United States Patent Application Publication US 2019/0348154 A1 - sequence listing, part 107

SEQ ID NO: 400899 - DNA, 966 bp, Salmonella enterica
atgagtaaacccattgtgatggaacgcggtgtaaaataccgcgatgccgataagatggctcttatcccggttaaaaatgtggtcacagagcgcgacgctctactacgtaaaccggaatggatgaaaataaaacttccggcggattctacccgtatccagggcatcaaagccgcaatgcgcaaaaatggcctgcattctgtctgcgaggaagcgtcttgcccaaacctggctgaatgtttcaaccacggtaccgctacgtttatgatccttggcgccatttgcactcgccgctgtccgttctgtgatgtcgcccatggccgccccgttgcgccggatgcggaagagccgcagaaactggcgcaaacgatcgccgacatggcgctacgctatgtggtcatcacctctgtcgaccgtgacgatctgcgtgacggcggcgcccagcattttgctgactgcatcaccgccatccgtgccaaaagcccggagataaaaatagagaccctggtgccagacttccgtggacgtatggatcgcgcgctggatatccttaacgcgacgccgccggatgtgtttaaccacaacctggaaaacgtgccgcgtatctaccgccaggttcgtccgggcgccgattacaactggtcgctgaaattactggaacgcttcaaagaagcgcacccggaaattccgacaaaatcgggtctgatggtgggcttaggcgaaaccaatgcggaaatcattgaggttatgcgcgatttacgccgtcacggcgttaccatgctgacgcttggtcagtatctacagccaagccgccatcacctgccggtacagcgttatgtcagcccggaagagtttgacgagatgaaagcggaagccctggcgatgggctttacccatgccgcctgtggcccctttgtacgttcttcgtaccatgctgatctccaggccaaaggcatggaagtgaaatga

SEQ ID NO: 400900 - DNA, 954 bp, Salmonella enterica
gtgagtgataataatcaggcagaaagacaaccggccgatcaacatctacaagacaaaccgcaaattttcagaacactgagaaatattgacctcaatctgttgacgattttcgaggccgtatatgtccataaagggatcgtcaatgcagcgaaaattcttaacctgacgccgtcagccatcagccagtccattcaaaaattacggactatatttcccgatccgctgtttattcgcaaaggccagggcgtaacgcccacgacgtatgctacgcatctgcacgaatacatcagccaggggctggaatctattcttggcgccctggatcttacgggcagctatgataagcaacgtaccattacaattggcacgacgccttcggtcggcgcgctagtgatgccgattatttaccaggccatcaggccgcgttatcctcagcttttgctgcgcaacattccggtagacgatgccgaaagccagcttagtcagtttcagaccgatctcattatcaatacccatagctataacaaccggagcatccagtatcacgtcctgtttagcgatacgcttgagattgtctgccgccagcatcacccgtgtctggcgaacgccattactgaagagagactgaacagcgcggatcacacctttctgatgctggagggacaacatctttccctgctgcgccagcgactgcaggagacatttcccgatcagcaaatcagttttagcagctacaatatttttaccattgcctcgctgatcgccagcagcgatctgctggggctgatgcccacccgcttctacgacttatttagccgctgctggccgcttgagcgccttccctacgcgccggtgaatagtgaacaggtcgagttctcgctgcattacaataaactgagtctgcgcgatccggtgctggagaacgtcattgatatcattcgtgaggcgttctga

SEQ ID NO: 400901 - DNA, 642 bp, Salmonella enterica
ttgtatcaggataaaatccttgtccgccagctcggccttcagccctatgaagctatctctcaggccatgcataactttaccgatatgcgcgatgaaaacagccatgatgaaatctggttggttgagcattacccggtgtttacccagggccaggccggtaaagcggaacatatattgatgcctggcgacattcccgttgtgcagagcgatcgtggaggacaggtgacctatcatggtccaggccaacaggtaatgtacgttttacttaacctgaaacgacgtaaactgggcgtgcgtgatttagtcaccctacttgaacagaccgtggtgaatacgctggctgaaattggtattgaggcgcatccgcgcgccgatgcgccgggcgtctacgtgggtgaaaagaaaatctgctcgctcggtttacgtatccgtcgcggctgctcattccacggtttagcgctaaacgttaacatggatctttctcctttcctacgcatcaacccgtgtggttatgccggcatggaaatggccaaaataacgcagtggaaggaagacgctaccacggataatattgcgccccgcttgctggcgaatattttagctctgctaaataatccaccgtatgaatatattgctgcttaa

SEQ ID NO: 400902 - DNA, 264 bp, Salmonella enterica; identical to SEQ ID NO: 369230

SEQ ID NO: 400903 - DNA, 1212 bp, Salmonella enterica
atgaagaccactttttccgctcgttttatgcagcgcatggcgctcaccacggcgctttgtgccacgtttatctcaaccgcacatgccgatgacctgaatatcaaaactatgatcccgggtgttccgcagatcgatgcggaatcctacatcctgatcgactacaactccggcaaagttctggcggaacaaaacgccgacgaacgtcgcgacccggctagtctgacgaagatgatgaccagttacgtcatcggacaggcaatgaaagcgggtaaatttaaagaaaccgacctggttaccgtcggtaatgacgcctgggccaccggcaatccggtatttaaaggctcttcgctgatgttcctcaaaccgggaatgcaggtaccggtctctcagttgatacgcggcatcaatctgcaatccggcaatgacgcctgtgtggcgatggctgatttcgccgccggtagccaggatgctttcgtcgggctgatgaacagctatgtgaacgcgttggggctgaaaaatacccacttccagaccgtacacggcctggacgccgacggacaatacagttcagctcgcgatatggcgctgattggccaggcgttaattcgagatgtgccgaacgaatatgccgtttataaagaaaaagagttcacctttaacggcattcgccagttaaaccgtaacggtctgctgtgggataacagcctgaatgtggacggcatcaaaaccggccataccagcaaagcgggctataatctggtcgcttccgcaaccgaaggtcagatgcgattgatttccgccgtgatgggcggacggacctataaaggccgtgaaacagaaagcaaaaaactgctgacgtggggcttccgtttctttgaaaccgttaatccgctgaaggctggtaaagagttcgcttctgaacccgcctggtttggtaataccgatcgcgcctcgctgggcgttgataaagacgtttacctgacgatccctcgcggccgcatgaaagatttgaaagcgagctatgtactgaataccgcagaactgcacgcgccgctgcagaaaaaccaggtggtcggcaccatcaacttccagctggacggtaaaaccatcgagcagcgtccgctggtcgtactgcaagagatcccggaagggaacttcttcggtaaaatcattgattacattaaattaatgttccatcactggtttggataa

SEQ ID NO: 400904 - DNA, 1134 bp, Salmonella enterica
atgcgtaagcagttgcctgtaatctgcgtcgcggcagggatagtactactcgcggcatgtactaatgacggcggtcagcagcaaaccaccgtcgcgccgcaacctgcggtatgtaatggtccgactgtggaaatcagcggagcggaaccgcgttatgaacctctgaatccgaccgcaaaccaggattatcagcgtgacggtaaaagttataaaatcgttcaggacccgtcccgctttagccaggctggcctggccgctatttatgatgcggaacccggcagtaatttaaccgcctccggggagatgttcgatccgatgcagcttaccgccgcccatccgacactgcctatccccagctatgcgcgaatcaccaacctggccaacggtcgcatgatcgtcgtgcgtattaacgatcgcggcccctatggcaccgatcgggtcatctccctgtcccgcgcagcggcggatcgtctgaatacctcgaataatactaaagtacggattgaccccattatcgtggcgccggatggttcgctctccggcccggggatggcctgtacgacggtggcgaaacagacctacgctctgcccccgcgccctgatttaagcggcggcatgggaagcgcctcttcagcgcctgcgcaaccgcaaggcgacgttcttccggtcagtaattccacgttgaaaagtgacgataccaccggtgcgccggtgagcagcagcggcttcctcggcgcgccgaccacgctggcgcctggcgtgctggagggtaatgaaccgacgccggcaccacagacagcgccggtttccgcgccggtgacggctccagcgactgcgacgccggtgagcgcgcctgccgccgcagccccggtatctgccccggtgagcgcgcctgccgccgcggcgagcggtcgtttcgtcgtccaggtcggcgccgtcagcgatcaaacgcgtgcgcagcagtaccaacagcgtttaagccagcagttcagcgtaccaggacgcgtaatacaaaacggcgcggtctggcgtattcaactggggccttttgccagtaaagccgaagccagcgcgttacagcaacgtttgcaaacagaagcacaattacagtcctttatcgccagcgcgcagtaa

SEQ ID NO: 400905 - DNA, 1113 bp, Salmonella enterica
atgacggataatccgaacaaaaaaaccttctgggataaaattcatatcgatcccacgatgctacttattctgctggcgttactggtttacagcgcattggtcatctggagcgccagcggccaggacatcggcatgatggagcgtaaaatcggtcagattgcgatggggctggtggtcatggtggtgatggcgcagatcccgccgcgcgtgtatgaaggctgggcgccctatctctatatcatttgtatcattctgctggtcgccgttgatgccttcggcgcaatatccaaaggcgcgcagcgctggctcgatctgggaatcgttcgctttcagccttcggaaatagccaaaatcgccgtgccgctgatggtcgcccgctttattaaccgtgacgtctgcccgccctcgctgaaaaataccgccatcgccctggtattaatctttatgcctaccctgctggtcgccgcccagccggacctggggacgtctattctggtcgccctttccggtctctttgtcctatttttgtctggcctgagctggcgcttaattggggtcgccattgtattgatcgctgcatttattcctattttgtggtttttcctgatgcacgattaccaacgccagcgcgtcatgatgctccttgatccggagaccgatccgctgggcgcgggctatcatattattcagtctaaaatcgccattggctcaggcggcctgcgcggtaaaggctggctccacggcacccagtcgcagctggagtttttacccgaacgccataccgactttattttcgcggtactggcggaagagctcggtctggtgggcatcctgattctgctcgcgctctatattttgctaataatgcgcggtctgtggattgccgccagagcgcaaactacatttggtcgcgtgatggctggcggattaatgttaatattattcgtttatgtcttcgtaaatattggtatggtgagcggtattctgcctgtggttggagtacctttacccttggtcagctacgggggctccgcactgattgtgctgatggccgggttcgggattgtgatgtcgatccacacccacagaaaaatgttgtcgaaaagcgtataa

SEQ ID NO: 400906 - DNA, 1902 bp, Salmonella enterica
atgaaacgacaaaattcttttcgtgactatacggctgagtccgcactgtttgtgcgtcgggcgctggtcgcctttttgggtattttgctgctgaccggcgtactgatcgccaatttgtataatctgcaaattctccgttttaccgattaccagacccgctcgaacgaaaaccgtatcaagctggtgccaattgcgccaagccgcgggataatctacgaccgtaacggcattccccttgcgctgaaccgcactatctatcagattgaaatgatgccggaaaaggtggataacgttcagcaaacgctggatgcgctacgcagtgtggtcgatttaaacgacgacgatatcgccgcctttaaaaaagagcgcgcccgatcccatcgctttacttctattccggtgaaaacaaacctgacggaagttcaggtcgcgcgctttgctgtcaaccagtaccgttttccgggcgtcgaagtcaaaggctataaacgccgctattatccatacggatcggcgctgacccacgttatcggctacgtatcgaaaatcaatgataaagacgtcgagcgtctcgacagagaaaacaaactggcgaactacgccgccacccatgacatcggcaagctgggcattgagcgctactatgaagatattctgcatgggcaaaccggttatgaagaggttgaagtcaacaaccgcggtcgcgttattcgccagctcaaagaggtgccgccgcaggccggacacgatatctacctgacgctggatctcaagctccagcagtatattgaaacgctgctggcaggcagtcgcgcggcggtgattgtcaccgatccgcgtaccggcggcgtgctatcgctggtctccatgccaagttacgaccctaaccttttcgtggacggcatctccagcaaagattactccgggctgcttaacgacccgaacacgccattagtgaaccgcgcgactcagggtgtctacccacccgcttctaccgttaagccttacgtcgccgtatcggcgttaagcgctggcgtcatcacccgtaacaccagtcttttcgaccctggctggtggcagttgccggggtctgagaaacgctaccgcgactggaaaaaatggggccacgggcatctgaatatcaccaaatcccttgaagagtcggcggataccttcttctatcaggtggcctatgacatggggatcgatcgcctgtcagaatggatgggtaagttcggctatggtcactataccggaattgatctcgcagaagagcgatctggtaatatgccgacccgcgagtggaaacagaaacgctttaaaaaaccgtggtatcagggcgatacgattccggtgggcatcggccagggctactggacggcaacgccgattcagatgagtaaggcgctgatgatccttattaacgacggtgtagttaaagtcccgcacctgttaatgagcaccgcggaaaacggtaaacaggtgccgtgggtacagccgcatgagccgccggtgggcgatattcactccggctactgggaaatagcgaaagatggcatgtatggcgtcgccaaccgccctaacggcacggcgcataaatattttgccagcgcgccctataaaatcgcggcgaaatcgggcaccgcgcaggtctttggcctgaaggccaacgaaacgtacaatgcgcataaaatcgccgagcgcctgcgcgaccataaattaatgaccgcctttgcgccgtataacaatccccaggtcgccgtcgcgatcatccttgaaaacggcggcgcaggcccggcagtaggcacgatcatgcgccaaatccttgatcacatcatgctgggcgacaacaacacccatttgcctgcggaaaacccggtggttgcagcggcggaggaccaataa

SEQ ID NO: 400907 - DNA, 468 bp, Salmonella enterica
gtgaagctgcaacttgtcgctgtcggcacgaagatgcccgactgggttcaaacgggatttacggaatatctgcgtcgttttccgaaagatatgccctttgagctgatcgaaatccctgcgggcaaacgcggcaagaacgcggatatcaaacgcattctcgacaaagagggcgagcagatgctggccgccgccggtaagaatcgcattgttaccctggatattccaggcaagccgtgggatacgccgcagttagccaatgagctggagcgctggaaacaggacgggcgcgacgtcagtttgctgattggcggcccggaaggattatctcccgcctgcaaagcggcagcagaacagagctggtcgctctcggcgttaacgctccctcacccgctggttcgggttctggtcgcggagagtttgtaccgggcgtggagcatcacaaccaaccacccttatcaccgtgagtga

SEQ ID NO: 400908 - DNA, 318 bp, Salmonella enterica
ttgcagggtaaagcactccaggattttgttatcgacaaaattgatgacctgaaaggtcaggacatcatcgccttagatgttcagggtaaatccagtatcaccgactgtatgattatttgtaccggcacctccagccgtcacgttatgtctattgccgaccacgtggtgcagtcgtcgcgcgcggccggtatgctgccgttgggcgtcgaaggcgagaatgcggctgactggattgtcgtcgatctgggcgatgtgattgtgcatgtcatgcaggaagaaagtcgccgcctgtatgaactggaaaaactctggagttaa

SEQ ID NO: 400909 - DNA, 609 bp, Salmonella enterica
atgcgattgtggctggtgcgtcatggcgaaaccgaggccaatgtcgccgggttatacagcggacatgctcccacgccgttaacggagaaagggattggccaggcgaaaacgctacatactttattgcgccacgcgccatttgacctggtgttatgcagcgagctggagcgcgcgcgccataccgcccgactcgtactggagggccgggatacgccgcaacacatcttacctgagcttaatgagatgtacttcggcgactgggaaatgcgccatcaccgcgacctcacccacgaagatgccgaaagctatgccgcctggtgtacggactggcagaatgcggttccgaccaatggcgagggttttcaggcttttacccggcgcgtagagtgctttatctcgcgactcgacgcgtttagcgattgccagaacctgctgatcgtcagccatcagggcgtactcagcctgttgattgcccgtctgctcgcaatgcccgccgcctcgctatggcatttccgggtagaacagggatgctggagcgcaatcgacatatgcgaagggttcgccaccctgaaagtattaaatagtcgtgccgtctggcagcctgagtga

SEQ ID NO: 400910 - DNA, 1095 bp, Salmonella enterica
atggcgttattcaacagcgcgcatggcggtaatattcgggaagccgcgacggtgttgggcatctcgcctgaccagttactggattttagcgcaaacattaatccgctgggtatgcctgtcagcgtgaaacgcgcgcttatcgacaatctggactgcattgagcgctacccggacgccgattattttcatttgcaccaggcgctggcgcgtcatcaccaggtgccggcatcgtggatactggcgggaaatggcgagacggagtcaatctttaccgtggcgagcggtcttaaaccgcgtcgtgcaatgattgtcacgccaggtttcgcggagtatggccgggcgctggcgcaaattggctgtgaaattcgtcgctggtctctacgcgaagcggatggctggcagcttaccgatgccattcttgaggcgttgacgcccgatctggactgcctgtttctgtgtacgcccaataatcctaccggtctgctgccggagcggcagttattacaggccattgccgatcgctgtaaatcgctgaacattaaccttatcctggatgaagcgtttatcgattttattccgcatgagacgggctttattcctgctcttaaagataatccgcatatctgggtgctgcgttcgctgaccaaattttatgccattcccggcctgcggttggaatatctcgtcaacagcaatgacgcggcggtggcgcggatgcgtcgccaacaaatgccgtggtcggttaacgcgctggcggcgctggccggtgaggtagcgttacaggatagcgcctggcaacaggcgacctggcattggttacgggaggagggcgcccggttttatcaggcgctttgtcagctccccctgctgacggtctatcccgggcgggcaaactatctgttgttacgctgtgagcgagaggatattgacctgcagcgacggttgctgacgcagcggattttaatccgtagctgcgctaactacccggggctggacagccgctattatcgtgtggcgatacgcagcgctgcgcaaaacgagcgtctgctgtcggcgctgcgcaatgtgctcaccggtataacccctgctgattga

SEQ ID NO: 400911 - DNA, 651 bp, Salmonella enterica
atgggtgatatgaaatcgttacaggctttattcggcggcacctttgatccggtgcattatggacatcttaaacctgttgaaacgctggcgaatctgatcggcttatcgcgggtgattattatgcctaacaatgtgccgccgcatcgcccccagccggaagcttccagcgcgcagcgtaaatatatgctggagctggctatcgccgataagccgctttttacgctggatgaacgcgagctacagcgaaacgcgccctcttacactgcgcaaacgctgaaagcatggcgcgaagaacagggtcccgaagcgccgctggcgtttattatcggccaggactcgctgctcaacttccccacctggcatgattacgacaccatccttgataacactcacctgatcgtttgtcgtcgtccgggctacccccttgaaatgacgcaggcgcaacaccagcagtggctggaacagcatctgacccatacgccagacgatctgcaccagttgccagccggtaaaatttacctggcggaaacgccctggcttaatatctccgcaaccctcatccgcgaacggctggaaaaaggcgagtcctgcgacgatctgttgccggaaaacgtgctgaactacatcaatcagcaggggttataccggtga

SEQ ID NO: 400912 - DNA, 1032 bp, Salmonella enterica
atgatcaggttgtatcctgaacaactccgcgcgcagctcaacgaagggctgcgtgcggcatatctgctattgggcaacgatccgctgctgctgcaggaaagtcaggacgctattcgtctggcggctgcgtcgcaaggcttcgaagagcaccacgcttttactctcgatcccagtaccgactggggatcgcttttctcactctgccaggcgatgagtctgttcgccagtcgtcaaacgctggtgctgcaactgccggaaaacgggcctaacgcggcaatgaatgagcaactcgccacgctgagcgagctgctgcatgacgacctgttattaatagtacgtggaaacaagctcaccaaagcgcaggaaaacgccgcctggtataccgcgctggcagaccgtagcgttcaggtcagttgtcagacgccggagcaggcgcagcttccccgctgggtggccaccagagcgaaagcacagaatttgcaactggatgacgccgcgaaccaactgctgtgctattgctatgagggcaatctgttggcgctggcgcaggcgctggaacgactgtcgctgctttggcctgacggtaagttaacgcttcctcgcgtggagcaggccgtcaatgacgccgcccactttacccctttccactgggtggatgcgttactgatggggaaaagcaaacgcgcgctgcatattctgcaacagctacgccttgaaggcagcgaaccggttattctgctgcggaccctccagcgagagctgctgctactggtaaatctcaaacgtcagtccgcgcatacgccgttacgcgcgctgtttgataaacaccgggtctggcaaaaccgtcgccccatgatcggcgacgcgttgcagcgtctccatcctgcgcagcttcgccaggccgtgcagttactgacgcgtacagaaattacgctcaaacaggattatggtcagtcggtatgggcagatcttgaagggctgtcgctcctgctctgccataaggcgctggcagacgtatttattgatgggtga

SEQ ID NO: 400913 - DNA, 591 bp, Salmonella enterica
gtgcgatatctggtaacactgttgttatctctggctgtgctggtcaccgccggatgcggctggcatctgcgtagcactacgcaggttccggcttcaatgaaaacgatgatcctcgattccggcgatccgaacggtccgctaagtcgtgcggtacgtaatcagttacggctgaataacgtaaacctgcttgataaagacacaacgcgcaaagacgttccgtctctgcggcttggaacggtgactatttcgcaggatacggcgtcagtgttccaggatggccagacggcggaatatcagatggtaatgaccgtcaatgcctcggtattgattccgggccatgacatctatcctatcagcacgaaagtgtaccgttcgttcttcgataacccgcagatggcgttggcgaaggataacgagcaggccatgatcgttcaggagatgtacgacaaagccgctgaacagctgattcgtaagctgaccagcgtccgcgcggcggatattcaggcgacgaaagaggaggctaccgccgacaatgagacggcggcgcccgcctctacgccagcacgcgtctccactacgctgagtaactaa

SEQ ID NO: 400914 - DNA, 2583 bp, Salmonella enterica
atgcaagagcaataccgcccggaagagatagaatccaaagtacagcttcactgggatgagaagcgcacatttgaagtgaccgaagacgagagcaaagagaagtattactgcctgtcgatgcttccctatccttctggccgactacacatgggccacgtacgtaactacaccatcggcgacgtggttgcccgctaccagcgtatgctgggcaaaaacgtgctgcagccaatcggctgggacgccttcggcctgccggcggaaggcgcggcggtgaagaacaacaccgcgccggcgccgtggacgtacgacaacatcgcgtacatgaaaaaccagctcaaaacgctgggttttggctatgactggagccgtgaaatcgcgacctgcaccccggaatactaccgttgggaacagaaattcttcaccgagctgtataaaaaaggcctggtgtacaagaagacttctgccgttaactggtgcccgaacgatcagaccgttcttgccaacgaacaggtgatcgacggctgctgctggcgctgcgacaccaaagttgagcgtaaagagatcccacagtggtttatcaaaatcaccgcttacgcagacgagctgttgcgcgatctggataagctggaccactggcctgataccgtaaaaacgatgcagcgcaactggattggccgctctgaaggcgtggaaatcaccttcgatgtgaagggttacgataacaccctgatcgtctataccacccgtccggatacctttatgggagccacttacctggcggtggccgccggtcatccgctggcgcaaaaagcggcggcgaataacgccgagctggcggcgttcgtcgacgaatgccgtaacaccaaagtggccgaagccgaaatggcgaccatggagaaaaaaggcgtcgacaccggctataaagcgattcatccgttaactggcgaagagatcccggtctgggcggcaaactttgtcctgatggagtacggcactggcgcggtgatggccgttccgggtcacgatcagcgcgactacgaatttgcctccaaatatggtttgaccatcaagccggtaattctggccgctgacggttccgagccggatctttccgaacaggcgctgaccgaaaaaggcgtgctgtttaactccggcgagttcgacggtctggcctttgaagcggcgtttaacgccattgccgataaactggcggaaaaaggcgtcggcgaacgtaaagtgaactatcgtctgcgtgactggggcgtttcccgtcagcgttactggggcgcgccgatcccgatgatcacccaggaagacggcaccgtgctgccgacgccggaagatcaactgccggttattttgccggaagacgtcgtcatggacggcatcaccagcccgatcaaggccgatcctgagtgggcgaaaaccaccgttaacggtatgccggcgctgcgtgaaaccgacaccttcgacacctttatggaatcgtcatggtactacgcgcgttacacctgcccgcagtatcaggaaggaatgctggattcgaaagcggcaaactactggctgccagtcgacatctacatcggcggtattgaacatgccatcatgcacctgctctacttccgcttcttccataagctgatgcgcgatgcgggcatggtcacctctgacgagccggctaaacagttgctgtgccagggcatggtactggcggatgcgttctattatgtcggcgagaacggcgagcgtaactgggtttcgccagttgacgctatcgtcgagcgcgatgaaaaaggccgcatcgtcaaagcaaaagacgcagcgggtcatgagctggtctacactggcatgagtaaaatgtccaagtcgaaaaataacggtatcgacccgcaggtaatggttgaacgttatggcgcggatacggtacgcctgtttatgatgttcgcttctccggcggatatgactctggaatggcaggagtccggcgtagaaggcgcaaaccgctttattaaacgcgtctggaagctggtttacgaacacaccgctaaaggtcctgtcgcggcgctgaacgtcgatgcgctgagcgaagatcaaaaagcgctgcgtcgcgatgtgcataaaaccattgccaaagtgaccgatgatatcggccgccgtcagacgttcaacaccgccattgcggcgatcatggagttgatgaacaaactggcgaaagccccgcaggaaggcgaacaagaccgcgcactgcttcaggaagcgctgcaggccgtcgtgcgtatgcttaacccgttcaccccgcacgtctgctttaccttgtggcaggaactgggcggcgaaggcgatatcgacaacgcgccgtggccggttgccgacgagcaggcaatggtggaaaacaccacgctggttgtcgtgcaggttaacggtaaagttcgcggtaagatcaccgttgcggtggatgccaccgaagaacaggtgcgtgaacgtgcaggccaggaacatctggtggcaaaatatcttgatggcgttaccgtgcgtaaagtgatttacgttccgggtaaactcctcaatctggttgttggctaa

SEQ ID NO: 400915 - DNA, 291 bp, Salmonella enterica
gtgaaaaaaaatgcagtggtgattcaccctcaggattgcgtcgcgacggctattacggcgctcaaggccggcgaaaccgccacaatgttcattggcgaacgcgagataagcgttgtgttacatcaggatgtgccatttggccacaaattcgccatctgcgatgtgccttttcatggcgaagtttataaatatggcgaatccattggccgcgccactcaggaaataaaaagtggcgactatgtgcacgtccacaatgtggaaagcgaacgcggacgtggtgactggaaataa

SEQ ID NO: 400916 - DNA, 1251 bp, Salmonella enterica
gtggcgactatgtgcacgtccacaatgtggaaagcgaacgcggacgtggtgactggaaataatataaaacaagggaaaatgattatgagcaatgagacttttttgggtttccgccgccctgacggccgttttggcatccgtaattatgtactgattttacctaccagcgtttgtgcgaataaagttgcccaggatattgcccggcaggtaaaaggcgcgacatgggtgaataacgattttggctgctgccaggtggcaggcgatgcgcgtctgacggaaaagacattgattaatgtggcgaataatcccaacgtcggcgctattgtggttgtgggcttaggctgtgaaggctcggagccgctgcgcatcgcagaagagattaccgcatttggcaaaccgacttcctgcattaccattcaggaagagggcggcacgcttaaatgtcaggccagggggatttcgctggcccgcgactatgcgcaacaactctccatgcaaaaaccgcagcaagcaccggttagcgagctgctgctggcgatggagtgcggcgggtcagatacgacatcggggctggcgtctaacccttcctgcggggtcgcctcggataagctgatacgctgcggcggaaactcaattctttctgaaacgacggaatttattggcgccgagcatgtgatggcgaaacgcgcggtgacgccggaggttggtcaacagctcattgatttagtggtcggctgcgaggcgcgagcaaaagcgctgggcgaggatattcgcgggggacagccgacgccgggcaatattaaaggcgggctgactaccattgaagaaaaatcgttaggctgtatgcataaagcaggtcatgcgccgctacagggcgtactggaatatgccgatagcccaacgcatcctggcctgtggattatggataccccggggcaggatattgaatctatttccggcatggtggcgggtggagcgcagatcgttatttttactaccggtcgcggaacgcctgccggtaacccaatagcgccggtaataaaaattacgggtaataaagcaacgtgggaaatgatgcaggacaatattgatattgatgtgtccgccattatgtctggcgaggcttctattacgcaaatgggcgaggaaatttatcaggaaattttacgcgtcgcgaatgggaaaacgactaaatcagaagatttaggtcataacgaattctctatttataagatcgcgccgacgttctga

SEQ ID NO: 400917 - DNA, 954 bp, Salmonella enterica
atgaaaattaaaaaaacactggaacgttttcctggtggtatgatggttgtaccgctgatcatcggcgcattgtttaaaacctttgcgccggaggcgctggaaataggcggttttgtcacctctatttcgcatggcgcaatggcgattttaggcatgtttttagtctgtatgggcgcggatatccagtttaaagccgcgccgaaagcgctgaaaaaaggcgctgctatcacctttgcgaaatttgccagcggcgtgattattggcattctggtcggaaaattttgcggcccggatgggttattaggtctgtcggctttagcgattatttcggcgatgaccaactcaaacagtgggttatatgccgcgttggtgggggagtacggcgatgaaaccgacggcggcgcgattgcggtaatatcgttgaacgatggtccctttttcaccatgctggcgttagggtcggcaggcatggtgtcgataccctttatgaatctggtggcggttattattcccattatcattggcatgattttgggtaatctggatgaggacatgcgcaagtttcttaaacagggcagcgtggtaacgattcctttttttgcctttgggttaggatacggtattgatttcgcacgacttatcacggcaggctcttcaggcattttactgggactcatgacggtggcgattggcggattttttaatattttcgccgatcgtctgacgggtggcagcggcgtggcaggcgcggcggtatccaccacctctggcaacgccgtcgcgacgccagcggcaatcgcgctgctcgatccgcattttaccgacctggcgtcgacggcggcggcgcaggtggcggcctcgacgattattaccgctctgtgcgcccccttcctgaccgtatggataaaaaaacgctacgatcgtaaactgaactcagccgccgcaggcggttag

SEQ ID NO: 400918 - DNA, 1929 bp, Salmonella enterica
atgaataagacgaaagatatagccgcatctcctctctgttttgtctctccttatccgcaactggcaaaggctgccgaggcgctggtcgcgcagttggattacgccgtcactattcatcaaacgacgcttaatcgtatcctggatgagctacctttattagagtcccgtgggcaccaggtactgattagtcgtggcggctgtgcggaaatattaaaaaagcacagtaaattaccggtagtcgaaattaaaatgtccggctacgacattcttgatgcgcttatcccttttaaaggacaaaaaggcactgtcggtattgtcggcttttccagtgtgatcaaaggatgcgcgcgcgtagcggaacagttaaatattaactataaaatttttaccttacagggaaatgataaagaaacgatttcttgcctgaagcggcaattagcgtccacgccattagattgcattgttggcgataccgtttgtcaggattatttttcaccgctgggctcgcaattccgtttacttgattccagcccagcctcaataaccgaagctctggaagaagccagctcattatatctggcttttcgcagccaattactcgagcgtcatcatctgcagctgattctcgatcagtttgataaagctgttatcacgcttgatgataccggcgcgttactgcattataataaatatgcgagccaactttttaaaattaacgcctccggtgaaatttatgacgcatctttcctgaaacaggtattgcaccaggagcggcatacattacgcgagggaaaaactgtcagcgcgaaagtcgtcgatacgccgcaaggcgcgatggtggttaatctgtatccggtatttgcggccagacagttaagccgggtagtgttgacgatgcaaaccgtctccagtttacagggggtggaacatcatgttcgccgccaggaactgtctcgccgtggcttgagcgcccgctatcatttcgacgatctgcttaccgaaaacccggaaatgctgcgtcgtctggcgatcattaaaaattatgccggtacggacgcgactatcttaattaatggcgaaagcgggacgggaaaagaggtgctggcgcaaagtattcataatgccagccaacgcgtcaacggcccgtttgtcgccattaactgcggcgcgatggcccctcagattctggagagcgaactctttggctatgtcgctggcgcatttaccggcgcgtcgccgaaaggcaaaataggcctgtttgaattagcgcaccacggtaccatttttctggatgagattagcgaactggataaaccgctacagacgcgcttattacgggtattgcaggagcggcagattatgcggctgggctcggaccagatgatacctgttgatattcgcgtgattgcggcgaccaatcagacgttaacgaagctcattgcggacgggacatttcgcgaagatctttactatcggcttaacgtattaaaagtgaccaccatcccgctacgcaaacgtccggaggatatcaaagccatcggcctgtcgctgcttactagtttcagccagcattataaacgcccggcactaacgttaaccccggcgctgtggcaagagcttcagcgcttcgcctggcccggaaacgtcaggcagttaagcaatattatcgaacggctggtgctctctattgatcactccccggcaacgctggatgagggtcgcctcttgctggacgatctggaagaggggagccgacgcgagccaactacctgccacgactgccagatgctggctggcgattataaaacgattcgcctgcgtattttgagaaaattattagaggcggaaagggataataaatcgttagtggcgaaacgattaaatgtcgatcgtacctcgctgacgcgctggatacgtgagtcggcctga

SEQ ID NO: 400919 - DNA, 474 bp, Salmonella enterica
atgaacaaggttgctcaatattaccgtgaactggtggcctcattaagcgagcgtttacgcaatggcgagcgcgacattgatgcgctggtggagcaggcgcgccagcgcgtgatgcaaacaggggagttaacgcgaaccgaggtggacgaactgacgcgcgctgtcagacgcgatctggaagagttcgccatgagctacgaagagagccaggaagatagcgtcttcttgcgggtgattaaagagagtctctggcaggaactggcggatattaccgacaaaacccagttggaatggcgtgaagtcttccaggatttgaatcaccacggcgtgtatcacagtggcgaagtggtggggttggggtatctggtgtgcgagaaatgccactatcatctggcggtttacacgccggatgtgctgccgctctgcccgaagtgtgggcacgatcagttccagcgcaggccgtttgagccgtaa

SEQ ID NO: 400920 - DNA, 552 bp, Salmonella enterica
atgttttggcgtaacaatagacctgaaatcagcctgctacagcacgatgtagcccatataacgttttcagtacgtaacggaaaagcattgcttcgtccctgcgttatccacgatcccgactctgacgccggtattcatacgctttcctggcatggctcgccgctgattcgtttttacactgaagcctggtgcccaacctgcgcagaatttgtttatgctggttttagcaatgatgatgaaggcgccacgcagtttttatcctcacttgccgagtggaatcagacaggagtcgggttgaacgaagcatttaccgccctgacgccgctgttttcactctttgccgatggttattaccggctggaagaacgcgaactttatcccacagatggcaatggacattttttctgggcggtgagtaacgaaaaacaaccgaatcccgcgaccacagggcagtggattgctgacgtggactatcactaccagtccggcgaaccctgttttttactgccaggccagcccccatcgcgatttaacccacaacgcgccgagtag

SEQ ID NO: 400921 - DNA, 936 bp, Salmonella enterica
atggcactgcccattattattgattgcgatccgggtcatgatgacgcgatcgccctcgttctcgccctcgcctcccctgaactggaagtgaaagcgatcacctcttccgccggcaaccagacgccggagaagaccctgcgcaacgtgctgcggatgctgacactgctcaaacgcccggatattccggtggcgggcggcgcggtgaaacctctcatgcgcgaactgattatcgccgataacgttcacggcgaaagcggcctcgacggcccggcgctgcccgaaccgtcattcgccccgcaaagcggcactgccgttgagctgatggcaaaaacactgcgtgagagctcacagccagtcaccatcgtctccactggcccacagaccaacgtggcgctgctgctgaatagccatccggaactgcacgcgaaaattgcgcgtattgtgatcatgggcggcgcaatgggattggggaactggacgcccgctgcggaatttaatatttacgtcgacccggaagcggcagaaattgtcttccagtcaggtattccggtggtgatggccgggctgaacgtcacccataaggcgcagattcacgccgccgatatcgaacgctttcgcgccattggcaacccgatttccaccatcgtcgccgaactgctggacttctttatggagtaccacaaagacgaaaaatggggatttgtcggcgcgccgctgcacgacccgtgcaccatcgcctggctgctgaaacccgagattttcaccaccgttgagcgttgggttggcgtggaaacccaggggaaatacacccaggggatgacggtggtggattattatttcctgacggggaataagccgaatgcgacggtgatggtcgatgtagaccgccagggatttgtcgatttgctggcggaacggctgcaatactacgcataa

SEQ ID NO: 400922 - DNA, 726 bp, Salmonella enterica
atgattaccctgaaaaatgtttcaaaatggtatggtcactttcaggtgctgaccgattgttcaacagaagtgaaaaaaggtgaggtggtggtagtctgcgggccatcgggttccggtaaatccacgctgattaagaccgtcaatggtctggagccggtgcaaaaaggcgaaattaccgttaacggcattattgtgaacgacaaaaaaaccgatctggcgaaactgcgttcccgcgtgggcatggtattccagcacttcgagctgtttccccacctgtcgatcatcgaaaacctgacgctggcgcaggtgaaagtgctgaaacgcgataaggccgccgcccgcgataaaggcctgaagctgctggagcgcgttggcctgtctgcgcatgccaacaagttcccggcgcagctttccggcggtcagcagcagcgcgtggcgatcgcccgcgcgctatgtatggaccccattgccatgttattcgatgaaccgacttccgcgctcgatccggaaatgatcaacgaggtactggacgtgatggtcgagctggcgaacgaagggatgaccatgatggtggtgacgcacgaaatgggctttgcccgtaaagtggctaaccgggtgatctttatggatgaaggtaaaatcgtcgaagattcgccaaaagaggagttcttcgctaaccccagttccgatcgcgcaaaagacttccttgcgaaaatcctgcactaa

SEQ ID NO: 400923 - DNA, 675 bp, Salmonella enterica
atgtacgaatttgactggagttcgattatcccctcactgccttacctgctggccgggttggtcatcacgctgaagatcaccgtcaccgccgttatcgtggggatagtctggggaaccattctggccgtcatgcgcctctcaagctttgcccctatcgcctggtttgctaaagcgtatgttaacgttttccgttccatcccgttggtgatggtcttgctgtggttctatctgattgtacccggctttctgcaaaacgtgctgggactatcgccgaaaaccgatatccgcctgatctccgcgatggtggcattctccatgtttgaagcggcctactattccgagattattcgcgccggtattcaaagtatttcccgcgggcagtccagcgccgcgctggcgctggggatgacccactggcagtcgatgaagctcattattctgccgcaggcgtttcgggcgatggtgccgctgttgcttacgcagggcatcgtgctatttcaggacacctctttagtttatgtactcagcctggcggacttcttccgcaccgcatcgactatcggcgagcgtgacggtactcaggtcgaaatgattctgttcgccggcgccgtttattttgttatcagcctgagcgcgtcgttgctggtcagctatttgaagaaaaggacagtttaa

SEQ ID NO: 400924 - DNA, 543 bp, Salmonella enterica
ttgtacgtagaactgttccgcaacgtgccgctgatcgtgcaattcttcacctggtacctggtggtgcctgaactgttgccggaagatcttggcatgtggtttaaggcggaactcgatcccaatattcagtttttcctctcctcaatgatctgtctgggactgtttaccgccgcccgcgtttgcgaacaggtgcgcgccgcgattcagtctctgcctcgcgggcagaagaacgcggcgctggcgatggggctaacgctgccgcaggcttatcgctatgtcctgctgccgaatgcctatcgcgttatcgtgccgccaatgacgtcagagatgatgaacctggtgaaaaactcggccattgcctcaaccatcggcctggtggatatggcggcgcaggcaggcaaactgttggattactcggcgcacgcctgggaatccttcaccgccattacgctggcctatgtgctgattaacgccgttatcatgctggtcatgagcctggttgaacgcaaagtccgcctgccgggcaacgtggggagcaaataa

SEQ ID NO: 400925 - DNA, 909 bp, Salmonella enterica
atgcaattacgtaagctaaccacagcaatgctggtcatgggactgtctgcgggccttgcgcacgcagaagatggcgcgcctgccgctggtagcaccctggacaagatcgctaaaaatggcgtgatcgtcgtcgggcatcgcgaatcttctgtgcccttttcttattacgacaaccagcagaaagtggtcggctattcccaggactactccaacgccattgtggaagcggtaaaaaagaaacttaacaagcccgatctgcaggtgaagctgatcccgatcacctcgcaaaaccgtattccgctgttgcaaaacggaaccttcgattttgaatgtggttcaacgactaacaaccttgagcgccagaaacaggccgccttctccgatacgattttcgtcgtcgggacgcgactgctgactaaaaaaggcggcgatattaaagatttcccggatctgaaaggcaaagcggtcgtcgtcacctccgggacgacctctgaaattctgctgcataagcttaacgaagagcaaaagatggggatgcgtattattagcgcgaaagaccacggtgactcgttccgcaccctggaaagcggtcgcgccgtcgcctttatgatggatgacgcgctgctggccggcgagcgcgccaaagccaagaaaccggataactgggagattgtcggcaaaccgcagtcccaggaagcctacggctgtatgctgcgtaaaaacgaccctgagtttaaaaagctgatggacgataccatcgctcaggcgcaaacctccggcgaagcggaaaagtggtttgataagtggtttaaaaatccgatcccaccgaaaaacctgaacatgaatttcgagttgtctgacgagatgaaagccctgttcaaagcaccgaatgataaagcgcttaactaa

SEQ ID NO: 400926 - DNA, 1590 bp, Salmonella enterica
atgactcgccccagccaaaactggacgaataacagcaatagtggactaaaaatggcatttgcctcgttaattgaacgccagcgtattcgcctgctgctggcgttattattcggcgcctgcggaacgctggctttctctccgtatgacgtctggcccgcagcgatagtgtcgcttatcgggctgcaggccttaacgtttaatcgccgcccgctccagtctgccgccatcggctattgctggggactcggacttttcggtagcgggattaactgggtttatgtcagtatcgcgcagtttggcggcatgccgggcccggttaacgtttttctggtggtgctgcttgcagcttatctctcgctgtataccggactgtttgccgggattttgtcgcgcctgtggccaaaaaccaactggctgcgcgtcgctatcgccgcgcctgcagtatggcaaatcaccgaatttttacgcggctgggtgctgaccggcttcccctggctgcaatttggctatagtcaggtcgacggcccgctaaaaggactggcgccggtaatgggcgtcgaagcgatcaacttcctgctgatgatggtcagtggcctgttagcgctggcactggcgacgcggaactggcgtccgctggctgtcgccgtgattctgtttgctttgccctttccgctacgttatatccagtggtttacgctggaaccggccaaagcgacccagctatcgctggtgcagggcgatattccgcagtcgctgaagtgggacgaaaaccagctactgaatacgctaaaaatttatctcaacgaaacccgcccagagttaggcaaatcacagattattatctggcctgagtcggcgattccggatctcgaaatcaatcagcagcccttccttcgttcgctggacgagatgttacgcgaaaaaaatagcacgctgatcaccggtattgtcgatgcgcgtctcaataaacagaatcgatacgacacctacaatacgattattacgttgggcaaggataatccatacagttatgactcgcccaatcgctacaataaaaatcaccttgtaccctttggcgagttcgttccgctggagtctatcctgcgtccgctggcgccgttcttcgatctgcccatgtcctcctttagccgcggcccttatatccagccgcagttacatgcgcacgactataagctgacggcggcaatctgttatgaaattattcttggcgaacaggtgcgggataacttccgcccggacaccgactatctgctgacgatttctaacgacgcctggtttggtaagtccattggcccgtggcaacatttccagatggcgcggatgcgttcgctggagctggcgcgtccgttgctgcgcagtactaacaacggtattacggcggtgattggcccgcagggcgaaattcaggcgatgatcccgcagttcacacgccaggtactgaccaccaatgtcacgccaaccacggggttaactccctatgctcgtaccggcaactggccgctatgggtactgaccgcgctgtttgcttttggcgcggtagtgatgagcctgcgacaacgacggaaataa

SEQ ID NO: 400927 - DNA, 879 bp, Salmonella enterica
atgagcgacgacaattcacacagtagtgacacagtaaacagtaaaaagggatttttttccctgctactcagccagcttttccacggtgaacctaaaaaccgtgatgagttgctggcgctgatccgtgattccgggcagaacgagcttatcgatgaagatacgcgcgatatgctcgaaggcgtaatggacatcgccgaccagcgcgttcgcgatattatgatcccgcgctcccagatgattaccctaaaacgcaaccagacgctggacgaatgtctcgatgttatcattgagtccgcccactcgcgttttccggtgatcagcgaagataaagatcacattgaagggattctgatggccaaagatttgctgccgtttatgcgcagcgatgccgaagccttcagcatggacaaagtgttacgcaccgcggttgtcgtaccggaaagcaaacgggttgaccgtatgctcaaggaattccgctcccagcgctaccatatggccatcgttatcgatgagtttggcggcgtttccggccttgtgactatcgaagacatcctcgaactgattgtcggtgaaattgaagatgagtatgacgaagaagacgatatcgacttccgtcagcttagccgccatacctggacgattcgcgcgctggcgtcgattgaagacttcaatgacgctttcggcacccacttcagcgatgaagaagtcgataccatcggcgggctggtgatgcaggcgttcggccatttaccggcccgcggcgaaaccattgacattgatggttaccagttcaaagtggcgatggccgatagtcgtcgtattattcaggtgcatgtcaggatcccggatgactcgccccagccaaaactggacgaataa

SEQ ID NO: 400928 - DNA, 474 bp, Salmonella enterica
atgagccaggtgatcctcgatttacagttggcctgtgaaaaccacgcgggcctgccggatgaagctcagtttcaacgctggctggacggcgttattccgcagtttcaggaagaggcggaagtcacaatccgtctggtggatgaggccgaaagccacgaccttaatttgacgtaccgcgggaaagataaacccactaatgttctctccttcccgtttgaagcgccccccggcattgaaatgccgctactgggcgatctgattatttgccgtcaggtcgtggagcaggaagcgcaggaacagagcaagccgctggaggcgcactgggcgcacatggtcgtgcacggtagcctgcatttgctgggttacgatcatatcgacgatgacgaagcggaagagatggagtctctcgaaacggagattatgcttgctatgggctatgaggatccgtacattgccgagaagattacagaatag

SEQ ID NO: 400929 - DNA, 1047 bp, Salmonella enterica
ttgaatatagacactcgcgaaattacccttgagcctgcagacaacgcccgtctgttgagcctttgcgggccgtttgatgacaatattaaacagctcgaacgtcgtctcggtattgaaatcaaccgccgtgacaatcactttaaactgaccggtcgtccgatttgcgtgaccgcggcgacagatattttgcgaagtctgtatgtcgataccgcaccgatgcgcggccagactcaggatatcgaaccggaacaaattcatctggcgatcaaagaagcgcgggtgctggaacagagcgcggaaagcgtgcctgactatggcaaagctattaatatcaaaaccaagcgcggcgtgattaaaccgcgtaccccgaaccaggcgcagtacatcgccaatattctcgatcatgatattacctttggcgtcggcccggcgggtaccggtaaaacgtatcttgcggtcgccgctgcggtagacgccctggagcgccaggagattcgccgtattctgctgacccgtccggcggtggaagcgggcgaaaaactcggctttttgccaggcgatttaagtcagaaggtggacccgtacctgcgtccgctgtatgacgcgctgttcgaaatgctcggctttgaaaaagtcgagaagctgattgagcgcaatgtgattgaagtcgcgccgctggcctatatgcgcggacgcacattaaacgacgcctttatcattctggatgaaagccagaacaccactatcgaacagatgaagatgttcctgacgcgtatcggctttaactcaaaagcggtgatcaccggcgacgtgacgcagattgacctgccacgcaacaccaaatccggcttgcgtcatgccattgaagtgctggcggaagtcgatgaaatcagctttaacttcttccacagcgaagacgtggtgcgccatccggtcgttgcccgcattgttaacgcctatgaagcctgggaagaggccgaacaaaaacgcaaagcggcgttggcggcagagcgtaagcgtgaagcccaggagcaggaacagaaatga

SEQ ID NO: 400930 - DNA, 1425 bp, Salmonella enterica
atgactaaaaaactccatattaaaacctggggctgtcagatgaacgagtacgattcatcgaagatggccgatctgctggacgccacccacggctatcaactgaccgacgtggcggaagaggcggatgtgctgctgttgaatacctgctcaatccgcgagaaggctcaggaaaaagtcttccatcaattaggtcgctggagactgttaaaagagaaaaatcccgatctgattatcggcgtcggcggctgcgtggcttcccaggaaggcgagcacattcgtcaacgcgcccattacgtcgacattatttttggtccgcaaacctcacaccgcctgccggagatgattaactccgtgcgtggcgaccgcagcccggtggtcgatatcagcttcccggaaatcgagaagttcgaccgtttgccggaaccgcgcgcagaaggcccgaccgctttcgtttctatcatggaaggctgcaataaatattgtacttactgcgtggtgccgtatacccgcggtgaagaagtcagccgtccctcagacgatatcctgttcgaaatcgcccagttagcggcgcagggcgtgcgtgaggtcaacctgttgggccagaacgttaacgcctggcgcggagaaaactacgacggcaccactggcacctttgccgatctgctgcgtctggttgccgccatcgacggcattgaccgtattcgctttaccaccagccatccgattgagttcaccgacgatattatcgaggtgtaccgcgatacgccggagctggtcagtttcctgcatctgccggtacagagcggttccgatcgcgtgttgaatctgatggggcgcacccacactgcgctggaatataaagcaatcatccgtaaactgcgcgcggcgcggccggacattcagataagctctgactttatcgtcggattccctggcgaaactaccgatgatttcgaaaaaaccatgaagcttatcgctgacgtcaactttgatatgagctacagctttatcttctctgcgcgtccgggaacgccggctgccgatatggttgatgacgtaccggaagaagagaaaaagcagcgtctgtatattctgcaagagcgtatcaatcagcaggcgatggcatggagccgccgtatgctcggcacgacacagcgcattctggtggaaggcacgtcacgtaaaaacattatggaactgtctggccgtaccgaaaacaatcgggtggtgaactttgaaggcacgccggagatgattggtaagtttgtcgatgtggaaattactgacgtctatccgaactccctgcgcggaaaagtggtgcgtaccgaagatgaaatggggctgcgcgtcgccgaaacgccggagtccgtcattgcccgtacccgtaaagaaaatgagctgggcgtaggattctaccagccttaa

SEQ ID NO: 400931 - DNA, 1176 bp, Salmonella enterica
atgacaaatcaaccaacggaaattgccattatcggcgggggaatggtcggcggcgcgctggcgctgggtctggcgcagcaagggtttacggtgatggtaatagaacatgccgcgcctgcgccgtttgcggctgacagccagcctgacgtgcggatttcggccattagcgcggcatccgtggcgctgctcaaggggctgggcgtgtgggaggcggtgcaggggatgcgtagccatccttatcggcgactggagacctgggagtgggaaaacgcccatgtggtgttcgacgccgctgaactcaagctgccgctgttaggctatatggtggagaacaacgtcctgcaacaggcgttatggcaggcgctggaagcgcaccccggcgtgacgctgcgcgttccggcttcactggcggcattgcaccgccgccacgatggttatgcgctggaactggccgacggcgaatgggtaacgccgaagttagtgattggcgccgacggtgcgaattcgcaggttcggcaaatggcgggaattggcattcatgcctggcaatatgcgcagtcgtgtatgcttatcaccgtcaagtgtgaaaatgcgccaggcgacagcacctggcagcagtttacgccaacggggccgcgcgcctttttgccgctgttcgacgattgggcgtcactggtgtggtatgacgctccggcacgtattcgccagttgcagggtttatcgatgacgcaattgcaggtggaaattaaccagcactttccggcgcgtctgggggcggtgatgcctgtcgcggcgggcgcgtttccgctaacccgtcgtcacgcgttgcagtatgcgcaacaggggctggcgctggtaggcgacgcggcgcataccattcatccgctggccgggcagggcgtcaacctggggtatcgggatgttgatgcgttgattgatgtgctggcgagtgcccgtagctatggcgagtcctgggccagccattcggtgttgaaacgctatcagacgcggcgcatggcagataattttatgatgcaaagtggaatggatctgttttatgccgggttcagcaatgaactgccgccgctgcgtattttacgcaatatggggctgatggcggcgcagcgcgcaggcgtgctaaaacgtcaggcgctgaaatatgcgttggggttgtag

SEQ ID NO: 400932 - DNA, 660 bp, Salmonella enterica
  misc_feature (233)..(242): n is a, c, g, or t
atgtctcaaggtgctctcgctaaagcgtcaggcgttgctcagccaacgatctggcgtttgacaagtggaaacgctcgtgggtcaacaaagattgttgaaatagcaaacgcgttaggtgttaattcggaatggttgtctaccgggattggtcctatgaaaaaagatggaactactccgataaacgcatctccatcttcgaacacatttaaaatcgatatcctagatcttgaagnnnnnnnnnnctgcgaatactcaaccgagcggagtatttccacgaattctcgattgataacgccaggacccgcgctaacttcaagatctaggatatcgattttaaatgtgttcgatggtagaaaggctgaaaatatccgcatcataaatgtgcgcggggatagcatgtcaggaactattgaaccaggagatttgttgtttgtagacgtaagcatcaaaaacttcgatggagatgggatatacgccttcctctatgacgatactgcacatgttaagcggctccagaagatgaaagataaactattggtcatatctgataataagagttattcagcttgggacccaattgaaagagatgaaatgaatagggtttttgtctttggaaaggtgattggaagcatgccgcagacatataggaagcacggttag

SEQ ID NO: 400933 - DNA, 501 bp, Salmonella enterica
  misc_feature (464)..(473): n is a, c, g, or t
gtgggctcgacaacctctcgcaactataatctgcaattccgcgactcggtcgttatttaccccgtatgggacggattcgatttaggtgctgacactgacatgaatccggagttggacaggcctggggactaccctataacccaatacccactgcatcagttacccctaaatcacctgattgataatcttctggttcgcggggcgttaggtgtaggttttggtatggatggtaagggcatgtatgtgtctaatattaccgtagaagattgcgctggctctggcgcgtacctactcacccatgaatcagtatttaccaatatagccataattgacaccaatactaaggatttccaggctaatcagatttatatatctggggcttgccgtgtgaacggtttacgtttaattgggatccgctcaaccgatgggcagggtctaaccatagacgcccctaactctaccgnnnnnnnnnnggactcaacttactgctatttcaggtaa

SEQ ID NO: 400934 - DNA, 456 bp, Salmonella enterica
atgactaaagcggcattcatgacaccaacattatccttgttcttaataagatttataaaccctccgtcagcaccttttacacactccgtgatctgcactactaaacgttgggtaaggggtttgttcatatttatactggacatgtacaaagcattattgaccgctttttccccatatttttccgttagtgcctggagaaatgtctgtaaaatcttttggttctgtactctgatattttccgtgtgtttttgcaccacttcagtgtttttaaataagggcatttttccaagccaggttaatacttttgacgaaaatttttcaggcgcaacatatgccttatcagtattttccttagcaatatatagccgggtatcactcgacacgccagattttgaaaatgaagacaatgttaaattattcaacttcctctcctcataccttagcatattcctgtag

SEQ ID NO: 400935 - DNA, 156 bp, Salmonella enterica; identical to SEQ ID NO: 376857

SEQ ID NO: 400936 - DNA, 1395 bp, Salmonella enterica
atggaatatatctcactgtgtaaaccggaacgccgcgtgacctgcgtcagccgtactggctggcatggtcaggtttacgtcctgcaggatgaggtcagcggtgaaggtgcagagggtgtcattctccagaccacttccgtgcaggggcgtgatttccgcgtgtcgggcacaacagaggaatggcgggagaacgtatcccgctactgtaccggcaactcccgcgtggcatttgctgtcagcctggcctttgctgcaccactgttacggctggttggtatggacggcggcggctaccacctcaaaggggaatcgacagacggtaagaccaccaccatgaaagcggcaacctccgtctgcggcgggcctgactactggcagacatggcgggccaccggcaacgcgctggagggatgcgccagccgccgcaacgatgccgccatgatgcttgatgagatccgggaagttgacggacgcgaggcaggcaatatcgcctacatgctggcaaacggtcagggcaagggccgtgccggtacggacggtgagctgcgtacccgtaagcagtggcgcctgttgttcttttcaactggcgagttgtctctgaccgaacatgcggcaaaggccggtgagcgtacttttgccgggatggaagtcaggatgatccagatccccagcgattccgggaaatttggcgtttttgaggagctgcacggcttcgacagcggcaaggctctggcagagcatcttgaatgggccacgtcctgctactacggttcgccgttccgggagtggctgaaagcactgaccgctgatcttaacggactaacggcacaggcaaaatcgctgatgaaggaatatgctgccgccctgactccgaaagatgcaggcaaccaggtgggccgggctgtgaatcgctttgcactggtggcgatggcgggtgaactggcaacccgtctgggtatcaccggctggcctgagggtgaagcactgcgggcaacccgcgtctgcctgaacgcatggctgaaagatcgcgggcacaccgccaatcaggaagatattgccgcactggagcaggttcgtagtttctttaccgcgaatcagtacagccgctttgcagactggtatgacgagcgcaaccgccccggcaatatggtgggctggcgcagggtggagaaaggcaataccgcgcagggcacggaagctgtcactacgttctatgtcatgccgtccggctggaaagaaatctgcaggggatttgacccgcgcaaggtggctcgtctgtgcgcagatcgtggatacctgctgccctccactgatggcaaactccagacaaccattcgcccgccagagatgaatccccgcaggctctatgtcttcaacagcgaggtgccgggttaa

SEQ ID NO: 400937 - DNA, 1080 bp, Salmonella enterica
atgaaaataacgtttgttggcgaagcggtatctggcttcggagggatggaaaccgttattagcaacgttatccatacgtttgaaaatagctctccgaaaatcaactgtgaaatgtttttcttttgtcgtaatgacaaaatggataaagcatggctaaaagagattaaatatgcgcaatcattctcaaatataaaattaagttttcttcgtcgatctaagcatgtttataattttagtcagtggctaaaagaaacgtcaccggatattgtgatatgtattgatgtcatctcatgtctttatgccaataaagcacgtaagaaaagtggtaaacagtttactattttctcgtggccgcatttttcgctcgaccataaaaaacatgcagaatgtataacgtacgcggattatcatctggccatcagtagtggtattaaagaacagatgatggcacgggggatctcagagcaagatattagcgtcgtttacaatcctgtctctattaaaacaatcattgtgccgccgcctgagcgcgataaacccgctgtatttctctatgtagggcgtcttaaatttgaagggcagaaaagagttaaagatttatttgatggcttagctcgtacgacaggggaatggcagctacatattattggtgatggctcagattttgaaaagtgccaggcctatagccgggagcttggtattgagcagcgtgtgatctggtatggttggcaaagcgcgccgtggcaagtcgtacagcaaaaaataaaaaatgttaccgcgttactacttacctctgcatttgagggatttcctatgactctgctggaagcaatgtcatatggaattccatgtattagttctgattgtatgtctggtccgcgcgatatgattaaacccggtttgaatggtgagctttacactccgggtgctatagatgattttgtaggacaccttaatcgagtcatttccggtgaagtaaaatatcagcatgatattattcccggcacgattgagcgattttacgatgtgctatattttaaaaattttaataatgcgatattctcgaaattacaaaagtga

SEQ ID NO: 400938 - DNA, 252 bp, Salmonella enterica
atgaccaatacaggcaccatctttacgatcccaaaactcaaccgcttggcctttgtctgttacttccagaacatcgacactactgaaaccattagcttgttgagaaacatcaagcagcccctgattagccagacctttcaatatttcatcactggcactgtatccggcagaacggtagccacggttaaccttaattggaaaacctttattgaatacaatatcgttgtcctgcagggagtagcacagctttga

SEQ ID NO: 400939 - DNA, 459 bp, Salmonella enterica
atgggggacgaaaagagcttagcgcacacccgatggaactgtaaatatcacatagttttcgcgcccaaataccgaagacaagcgttctatggagagaagcgtagggcagtaggcagcatattaagaaaattgtgtgaatggaaaaacgtacgaattctggaagcagaatgttgcgcagatcatattcacatgcttctggagatcccgccgaagatgagtgtgtcgagtttcatgggatatctgaagggtaaaagtagtctgatgctttacgagcagtttggggatctaaaattcaaatacaggaacagggagttctggtgcagagggtactatgtcgatacggtgggtaagaatacggcgaagatacaggactacataaagcaccagcttgaagaggataaaatgggtgagcaattatcgatcccgtatccgggcagcccgtttacgggccgtaagtaa

SEQ ID NO: 400940 - DNA, 129 bp, Salmonella enterica
atggaacattattaccattttctccaaaccaaattttattttctttacacaattctgcaaaacgtttttcagaaacctgccagcatctactggcgggaggagttacaatacgtcctgatggtgtggtaa

SEQ ID NO: 400941 - DNA, 276 bp, Salmonella enterica; identical to SEQ ID NO: 8395

SEQ ID NO: 400942 - DNA, 459 bp, Salmonella enterica; identical to SEQ ID NO: 392338

SEQ ID NO: 400943 - DNA, 861 bp, Salmonella enterica; identical to SEQ ID NO: 6162

SEQ ID NO: 400944 - DNA, 543 bp, Salmonella enterica; identical to SEQ ID NO: 84324

SEQ ID NO: 400945 - DNA, 228 bp, Salmonella enterica; identical to SEQ ID NO: 6111

SEQ ID NO: 400946 - DNA, 1137 bp, Salmonella enterica; identical to SEQ ID NO: 83602

SEQ ID NO: 400947 - DNA, 780 bp, Salmonella enterica; identical to SEQ ID NO: 15990

SEQ ID NO: 400948 - DNA, 276 bp, Salmonella enterica; identical to SEQ ID NO: 8395

SEQ ID NO: 400949 - DNA, 141 bp, Salmonella enterica
atggccatgcaatcgccgcccctactggatgcgaatccggtggcggatttagtgaggtgtagaacatcgcccattctgaccactcagcgtcggcggtatctcgatggctgcgaatatatgcaggtgcaggagcaccattaa

SEQ ID NO: 400950 - DNA, 165 bp, Salmonella enterica; identical to SEQ ID NO: 371553

SEQ ID NO: 400951 - DNA, 339 bp, Salmonella enterica
atggcgactgcgtgggtggatgtggctgataatgccgttaaaattggatttggctctgcgctaacaatattgggcggttatctgacgctcaaattattacagcggcacgagttaaggaaagaagcattaattcagcggcgtaaagattttgaagtgaaaactgagcgttacgtgaattttttatccaattcaagaatgatgttgcagaaatatatgctcagcgattttaagcctgatggggatgattacatggaacttacaagacggcatgaaacgttatcccttacatgcacgaatagtactgatgaatcccctaatgatttttatcaaaatcattaa

SEQ ID NO: 400952 - DNA, 282 bp, Salmonella enterica
atgagtcagcactggtttgaggtaaaaagcaatgaaggaattgttgaagttatgcttggctgggacactccgctccagtggtaccacatgtgcatagatttcagtattcattcatccgaagatcccctttacaccaatcttgcagaacctgatccttactcagtaactctcgaatacttacagtctgttttggaacgctttgaaatcacagacattgagatcaaactaggaacaactggactatacgaagagttattaaaagacaaacaattaaatcgatga

SEQ ID NO: 400953 - DNA, 675 bp, Salmonella enterica
atgatggataatatatcgaatctttttaaatggatatttagcttgaatcctgttgaagcggtggttaacgatcctactcagaagctattaaatagcatgcgggttacgtcaaaatgcaggtataacgcgtcgatacgattaaaaagacaaagtcaattatcttttttttcaacaacagtgctatctttggggctgattttaattcctttactccaaaatgccgatatacatttacacctcccattaaaagttttgaatatgcttcagatattccttgctgtttctgttctggtttactctgtgattataggaactgcacattatgaaattaggtcaaaacaacttaacgaatgtggtgataagatcaaagaccttataagaaaattaagattgggaaataacaaggaagaattatcaacatatatacaaatgtatgattctgtcagtactgaatcggaaaaccatgctagagttgattttttgcttgcttcgttagagatgaaaactgattataaatacaccggccttcttcgattttggctctatcttcgttctatttttctttacatattcccgtggttaatacctttgacactagtattgtcagaaataatatttatttgtgacatgcttggagtaacttatatatctactccgttccttacaggagagtga

SEQ ID NO: 400954 - DNA, 432 bp, Salmonella enterica
atggaactgcaagctgttacttctgttattacttctgttttaactgtcgttattgccttgtttgcattatttagctggcgcaagcaagagcaactaaaaactaaactggcttttaaaaacgcaattgctgattacgcaaatcagctaaaaaaaatagcatcacatcatcagcgttctactgttgagcaaaatacaaaattagaagaactattcaatgcctgtcattatgcgttgctcgtaactgaaggtttacttgatgataataaagaggttatggaagcttggggggttataaataaccaagttacacaatatatggtaagtggaggtgaaccggagagtattgagaaaatgaataacgcttgtgataaaattctcaaagaaaaatttgtatttaacaaatctatttttccctctgcaagtagtagataa

SEQ ID NO: 400955 - DNA, 471 bp, Salmonella enterica
  misc_feature (407)..(416): n is a, c, g, or t
atgacgattacggcctactccaaaacgttcaagcgtgaacttgatgccaggcagttgaaaaatctttttgatgaaaataatgccgattcagcgctgagtttccgggactttgtaaaagcagatattgaatgcccagcctgcaatgtttctggtggccattatgttgtagaagctaaatcgcagtcgaaaggcaatgttgtaaagcaggctcattttgcatttcgcgacagcctgggaaaagatactcatcttcctttctgtgatttttacactggttcagacaagctaaatgtcgttgctaacgacgggcgtgttgatttcatgcgttctggctctgaagccacgcaactgatcggcttaatggtctgtgccgggattgaagccaatatattctctcagcaacgacnnnnnnnnnntattctctcagcaagacattcggaacatgcgacagtggttcctagacttgcgtga

SEQ ID NO: 400956 - DNA, 591 bp, Salmonella enterica
atgattaatgtacgcaagcaaaacaagccctcttatgaatgtatgatgaacgcagaaacagcattggcgttgtgtaagcgagcatctgaaaatgaatttaaagaataccactgctcaacagggttggtatttttagctttcgctgtagaggctatgttcattttttatcggaggcaggttgatccaacttatgataagaagaaagacaaaacttgtcgtaaggattttcataaaaagactctaaagatgtgtggaattgatgacctgatggggcttaatgattaccaaatcatcaggaaatgcctgcgtttaagagatgagattgcccacggtgatttttttgaatcatcttttgattatgttccgaaggacttagatgctcatgataaacaaattattgatataacgtccaaatcttcaaaacaattccgagatgtaacattaaaaatacttgaagaaggaattaagtcagcgaagaatattgatgatttcatctgtgataatggttacaaagccgatgagaaaaccgaaagagagtatttacctaagctccaacctgcattcggtgttactggaatatctgtttggtga

SEQ ID NO: 400957 - DNA, 255 bp, Salmonella enterica
atgatttcaatgttcgttttggtcggttcattgtgccttaccagtcaggaaggccagaacgtatgtaggcccgaggcgctacttacctttaaaagtgccgaacagtgtatgtccggcatgaacaacgtggtcagcggtaagctcagtagaatagctccctcactgtcagccaaagagatcattgaaaaatatcatcttcgctgtactgaagcccccctggtgaccgagagagaattacagtacgaactgaagtaa

SEQ ID NO: 400958 - DNA, 330 bp, Salmonella enterica
atgataacgataataatcggtgtatcgagagttattgattataaaataggggaaatgtctgttgatattccaccatttcctgaatggaacagcggtcattatatagaaattccaggtgagggcattgtgttcacaggtgaaaagaatgatgacggtagccgttgttattctggtgtcatcgaatctcattacagcaccgatgactgggcatttatcctttctgaatacaaaaactggctgaaagataaggaaagaaagttttcttacctgtttgtcttacgcaatggtgaacttgttcaccatgaggtcaacaaatcagagcttctttga

SEQ ID NO: 400959 - DNA, 753 bp, Salmonella enterica
atgatgacaaaaaatgataaagaacgattcaataaaagaatcagtggtgaagttcagattagtgctgatattcgtgtcagtgatttaatgacagaaggtgcagcttacgtcactataacggaatcatccctgtatgagcgagtctgtcagtatgccttgcaacatggtgaagatttacaggggatgtttaaggatgaaaaatatgaatatatgtcctgttttgttcgtgatgtggctgcattcagaagtaattttgaaaacgaagagcttttaaaacctctgtttaaccatgataaaggtgatactgttgagtttgttatcagcgttcctgaaaaaagagtcgaggattacaaggatatagtcagaaaagagttcgtagatataattcagaagcatgtaataaccattaataataagatctggaagaaattcgtaaaacaagccatgacggggacaactttatatattggttttgatattaatacaggtgaaatggtggaccctgaagatgaacgtgacatcatattaaaatcatcacgtcaggagtttgtcagaacaacgactttcgattcatttcagccctatttctatgttgagcgtttatattctggtgcaaaagaaataggcaacatcaatggttttaatgtctggttcaatgagagagggttttatttttactggaatgaagaaacggaattcctgattgagagttggttgacgttccctgcatatccgtatggctggtttaaatga

SEQ ID NO: 400960 - DNA, 249 bp, Salmonella enterica; identical to SEQ ID NO: 41214

SEQ ID NO: 400961 - DNA, 327 bp, Salmonella enterica
atgaatatccatttattttcagaagtattgttctgcgtctgggttatagctttgattgtgattttatttatatttgttaaatattataggcgtgtccattacagactcaactcactgtctgaaacgataaagcgcacacagggcggtgttaataagcgaatatctgaaaacagagaactgcttgaacttataaagaatcaatatcctgaaattctggatgaatatccgtgggtaagtggttggcttgattcacaggaaaagtttttggtcgctcttgctgataagtcaggtatcgatatatacagcttaaaaattaaggagtcataa

SEQ ID NO: 400962 - DNA, 318 bp, Salmonella enterica
atgatatccattaagagctattttaactggaataagttatttgtgtttttagcagtggccttatactggttttggcgcattctctacagaagcacaaagctgatgccagtaatgctgttagtcgcactggtgatggcattttactttgtgcctgaacaacttcttactgatgttattaatacatgggaaagtgctactacagatgagaaaattacactggcaaggattttcttgaaatccgcatttctcttgtcatttgcatcctgttttctggatgaacttattacatatccacaaaaaggtgaacataagttatga

SEQ ID NO: 400963 - DNA, 258 bp, Salmonella enterica
atgaaaaaaaaagaaaagattgattttcttaatgcaataaaagcagggcactctggctttatagctggtaatcctgctcatgcattggatgataagactatgaacgccatcattcagaactacgtggcaacgatcgttcccggtaaaataggtaactgcaaagaaacttctttcacaaaatattgttccaggactataccagagcgtatttcagttgaaaaaattaacgaggttaaaatttatccagaattcttctga

SEQ ID NO: 400964 - DNA, 156 bp, Salmonella enterica
atgaagcaactgtgcttcgaactcttcacacccgatatgtttttcttcaacaaaccgtctttcggtgaagtcatcaatgtctgtttgcatgaagccagaagcctcacagccactttcaatctcaaattcatctgtcagaacgcgttcccggtttaa

SEQ ID NO: 400965 - DNA, 2286 bp, Salmonella enterica; identical to SEQ ID NO: 376964

SEQ ID NO: 400966 - DNA, 381 bp, Salmonella enterica
atggagaaagcgcagagcgaaggattgaaaggtaatgaccgcctgttcaatattgcactttttaccggcaaagatcccgccattggcgatgacatggattctcctcaggtaagagcattcttccgtcgtctgtccaaggagtgtcagtttgcgatcagtcctcatcgtttcagacacacgctggccacggagatgatgaaaatgccggaacagaatctgcatatggcgcaaagtgtgctgggtcattcaaacatgaaatccacgctggagtatgtggagaatgatattgcagtgatggggagggctctggaagcgcagtttatgcagattaaggcagcacatgcccgaagcatttacagtgggttgacaaagaatagataa

SEQ ID NO: 400967 - DNA, 369 bp, Salmonella enterica; identical to SEQ ID NO: 381619

SEQ ID NO: 400968 - DNA, 726 bp, Salmonella enterica
  misc_feature (20)..(29): n is a, c, g, or t
ttgatacactgtgttataannnnnnnnnngtgttataattttttctctaatctaactgaatatgatgataagagtttcaaaagttatgatcaactttcgcttgattttttcactttcttagagaatgaaggtgaccgagtattttattatgctcccggtagtcgctcaaaagtgagcgtaaaaaaatcatttaataaagtagcaaaattaacaaaagaatattgtgaagaagctttatctgctacaagtgaaaactcaagaaacttagcttggaaaaaagtttttggcaggccttttccaaattatacgacaaaagcactcagtaatgtcaatgtatctgaacagtttattgaagatcaatatgagatgaatttatatggtcatgtttcgatagaatgtgagattagaaagaataatttactggaagctcttctttcaaatcttcttggcgaagggcatgatattagcacgaatcgcaagttaagattctatgttgatgagataaataatatatctcacccatataagattaaatggaaaataaaaaatgtaggtgatgaagctgagcgccgaggaaatgttagaggtgaaattttagacgatgaaggcggttctgagcgtttcgagaccgcagatttctcaggacctcattttgttgaatgttatgttatttatggtaatcaagttgtagcaagagatagaatcgacgtacctatacataattag

SEQ ID NO: 400969 - DNA, 1077 bp, Salmonella enterica; identical to SEQ ID NO: 372427

SEQ ID NO: 400970 - DNA, 231 bp, Salmonella enterica
gtgctgattgatttgaaattggtactttatggagtgatggtggtgggggagagattactcagcgctgcgcgtttcgcccttcgggtcgttgcctgcggcaacgctttctcgctgcgctcgaatcgaaccttagtcgaagcttctcatccttcccgtacagagagatatgagacactatgcttaacggggataagatacgcgacggaagtgatggtggtgggggaaggatga

SEQ ID NO: 400971 - DNA, 180 bp, Salmonella enterica
atgtctaaaaaatatgaagcggtgatgctatttctgaaatgttttctgaggttttcttttaactcattgaaatacctgtggttggtggtaatgatgctactaagtttttattcattctgtaaattagcaattttcataccagtatgtgatagtaaagaggtgaataagaatgagcaataa

SEQ ID NO: 400972 - DNA, 552 bp, Salmonella enterica
atgtctcatgagaaaaagcggtatataaaatcatacaaacatacactggttgagtatagtgaatccaccgaagagttgagtaggcaagatataaaaaatagtgatgatgatatacaaaatcatagtaatggcctaaaaaaccggcaagcaaaatctattttgttagatttttcactaatctttattctagtcccttttattggattcttgctttatgtgattattaaatttatgaactcaacacagccgcgcatgatttctccaccggacaattatgttgatgtagggatctttttatttataggaactgttatatggttactttatataattagaggcaaatcatttaaaaatttaaatgatacaatattatttactggaacagctattggctgcgtattgttctttcacaaagatgctccagttctagatcataacaacgccacatggatttttggccaaatagttttagctggttgttctgttggcaaagctcttattgcatttacagagtttattagcgaacgagttgacgaaacaaaaaaccagtag

SEQ ID NO: 400973 - DNA, 342 bp, Salmonella enterica
atgcaaaccacaaacaaccgaacagatagcactcatgcagaacccgatggttccgttttgtcttatgagttcggactatctggattctcgattgatttgaaaaattgttctgtgcggctctttaataaggagctgaataacttttctgtctacaattattgcgacatcagagaagtcaactataccttgccaacaactgaatccgatgatgccgaaatatgtgttcttactgaagatatattaatcccctcatggaaattcaaaatcccatcaaacgctcaaacttatgatgtttgtgaacaatggattgatattttcaatactcatgttgttaattattaa

SEQ ID NO: 400974 - DNA, 576 bp, Salmonella enterica
atggccttaccgaaagaatgtagagttgaaagatctaagtatttagaagaacaatataagaagtatcaaataacagaacttgaaaacttaaccactgaagattttagagtgttggggatgtatatacagacatattgttttattgagttgaatatacagagaatatttcaaaaacttaaggaaaatggaattataaaaataaagaaaggcactaaaatcaatgttccttatataatggatatgttgaaaaagtcgattaatcaggtgatcacagagccatcagagatttctctttttattgagaatctaggagagatagagcttcgtagaagttatagaaatatttttgcgcattgggcggcgaagcgaatacctaaagaagacgctatggtttttattaccagtaatgcgcaggattataaaaaagtgattggtaaagaaatgaactcagattacattgcttatgctattttagacattgctgatattcgtggtttaatagttcatttgctcgaatatgataaatggctagctgaattcaccgggcatctctatagcaagtttcaggatgaataa

SEQ ID NO: 400975 - DNA, 735 bp, Salmonella enterica
atgagtaaaagtctatacccgaaaactttcttccactttaccaacgacattgaaaaattagaatcaataattacatgcaaattttttcgcccctcttatgcaagagaaacaatctatgggaaaaaccaacaaaagataagatactttggaatcccaatggtttctttctgtaatattagattatcccttttatcagagcatactcagaagtatggaagctatggcatcggattaacgtatgattggatcacccgaaacaatcttaaccccgtattttatgtaagtgaacactctaacgtcttccctcaattagatgagcaaattcgaaatattaaagatgattcagttattactaaggaaagttataattctttatccaatatattgagatatattaaaaatcatactggtccattgattcgagatgaacaacaggataataattattgttttgctgatgaaatggaatggagatatgtcccaaagagtagtacaaatataatccctattgtattacaaaaaaatattgatacaaagaagaaaaaagaaaaactcaatgacaagataaaacacatccatcttaaatttacaatagatgatataaaatacataatgttagaaaaggaaaaggatcttataccttttctagagaagttaagatcccaagggtgtgatgttaatgataaactaattagcaaagtattttatacatctcaaatcgaagatgatctataa

SEQ ID NO: 400976 - DNA, 1221 bp, Salmonella enterica
gtgggaaaagcactaaacaaactgagcgattcgacgttaaaaaaattggcggctgtccaggcagaaaaagagcgtttttactccgacgggggcgggctggagattaaacactcaaagggcggcaaattaacctggtatttccggtaccgaacgggaggccgtgaggttgccgcagagcggttaaagctgggggcttaccctgaattgtcgctgaaagccgcaagggaaaaacgcacactgtgccgggcatggctggctgagggtaaaaacccccgttatgagttgtgcgccacagtacaggaagcactaaaacccgttacggtgaaggaagcgattaactactggctggaggaatacgcgaaggataaccgcaaagattacataaagctggtgcagcgtatggataagcacatcatttgccatattggggcaattccccttgataagtgtgatacaaggcagtggatcgcatgttttgaccgcgtacgaaaaaaagcaccagtagcagcgggccatgtcatgcagacatgcaaacaggcgctaaagttttgccgcaggcggcgctacgcgtttagcaacgccctggacgatttgatcgttactgatgtgggtaagagagcagaaatccgcgagagagtgcacagcaacagcgaactaaaagaaattctacgcgctattgatggtgatgtgttcgctccctattacagtgcgttaatgcgcttgttaattgtgttcgggtgcagaacggcagagatcagactttcagagatcaaagaatgggatctgaaagaaatgttgtggacagtgccaaaagagcacagcaaaacgaaggtaacaatattccgacctattcctgatggtattttgccgttcattcagaagctggtggagcaaaacgcacacactgggttattactcggcgaactgaaaaaagataccacggtggcgcaatatggacgaaatgcgcataagcggcttaagcaggaacactggacgctgcatgatttccgacacacgtttacaactatgctgaatgatttaggtgtcgatccgcatatcgtggagcacatcacagcgcatcagatgccaggtcagcaaaaaacctataaccattcacgctatttgcaggcgaaacgggacgcactgaatctatgggttgagcgtcttgatatgattgcaggatataatgaaaatattgtgatattgagagggatacaatga

SEQ ID NO: 400977 - DNA, 855 bp, Salmonella enterica
atgacgaaaaaagtaaatagtaaaaaagatttaccaaagtcatttgatttaggcaaatatgattgcctagaaaacttgtcggataaagatctatttcgccaattatattggcgacaagatgatttaacgatgaaacattctgagatgcctgaatatggatttatgtttggtgctgaatacccgttgcataataattacggggatccatttggagagctgaaagaagacgattggttttgtgataaacaaaaagaatatgaccataaagtgcaaccgaagttaattgagctaagttatgatgatggaattaaacctgtaacaaggtttgatatatcaatgattaataaactgactgcggaaagaggatattggaaggataaaccaatcatcatagataatgagatggttggaagtttaatatcagaagataatgggatgttttgggctgtgatgcgtgaaccagtgaatctcctttctgatacattagataatatgcttgtttctgttgacttactacataacagagatgatgagttgattgaagcgtttacaaaactattaccaaaatggcgtagtgaactttcaattgttgagccagacaaaccaattgcaggaagttgggagagcatacgacgtaaaattattgattataagataatcccattaattgacttattatcttgggagttgtctacagatagaaaaatttcattaggggtgcttgccgtatctttgtatcctgatggtgaaaaggacacctttgctattgctcagactgtaaaacccttcttagaaaaaataatgcgcagcgattctttagaaaaaataagaaaaatgttatctaatgaaaattaa

SEQ ID NO: 400978 - DNA, 225 bp, Salmonella enterica; identical to SEQ ID NO: 263141

SEQ ID NO: 400979 - DNA, 204 bp, Salmonella enterica
atgagaaatcataccatacacccgcaagggcgggactcgtacaacctgaataaatacatctggcgttttatcgccctgagcaccgcacaaccgcgcgtgattcacatcgtggccaccagcgaacaggaagcacgccagcaatccccggctggctgcgtgatggtattcgccgcccgtattcgtcagggggggtgccatgcctga

SEQ ID NO: 400980 - DNA, 321 bp, Salmonella enterica
atgcctgatatgtcaaattaccagtacctgattaatccgcattttaactgtgagcatgatattgctaaaaaggtttattccgctgcggatggggctactgacaatatatcaatggctgttgcgtcaattggtagcctgatgtggcatgcgtcagaaaatgaggactatgacgaaaaggccatgcgcattgatatgggtaatattggtttgttactggcaatgcttggacattttgatatttcgttacggtgcaccattgaaaatgccacagatgcattaaatgctataaagaaagcgaatactgattcaaatcggggataa

SEQ ID NO: 400981 - DNA, 300 bp, Salmonella enterica
atgagaacatatttatctggcttgactgccagcggttatgcacaccccaaaattatccccggcgctatttatctggataagaacggtaacagagtaacggtaaaagagctgatgtttgaccgtgtgtattttattcgtgatggctattcatttcatagttcgctgaacgtggagatctttattagcagattcaggcgggaaatcccgctttccagaaaaaaccatgtgtcacgtgtgaatgtggataaaaaactacaggaactgaaaaacatgattgccgcgtggagagagcagaaatga

SEQ ID NO: 400982 - DNA, 1818 bp, Salmonella enterica
atgaaaaaagcgccaaatttaaaacaccagccgcgtgacaaaatgacggaagtcatcatttttgcgggtagtgatgcgtgggcacatgcgaagcagtggcaggaacaggacgggcgactggcaggcgataacgtgccacctgtctggcttggagagcaacaacttgccgaactggacaacctgcaaatcgtaccggacggacgctatcgcgtgcgtctctatcaggcggggttattgcgtccggtgcttgttaataccatcgggcagaaactggcagcggcaggtgtcagggatgctgattattatcctgaaggaatgcacagccagaaacgggagaactggcacgaatatctggaacgtgaacgggcagagctggcggaaaagaaaaaggtagttgaactgcctgtaaagaaaaaagagcgggtaaaagacgataacgcttcatcactggcgcttaaccagatgggagcaagtcaacgcggcgaagttctcctggcacattatggcggtgaactggcgattcatgctgactctgacactgttcaccattacaacggcgttgtatgggagccagtacaggataaagaattacagcgagctatggcacagattttcattgatgcggagatcagctattcgcagaacgccattaaatcggcggtcgataccatgaagttaagtttgcctgtaatggggaatacagcccgtaacctgattggattcagtaacggggtatttgataccagaacaggtaattttcgggagcataacaaaaacgactggttgttaattgccagtgaattacctttcagcccaccagcagagggggaaacgctggcaacacatgcgccgaatttctggaagtggttacgccgttcggtggctgagaatgaccgcaaggcggatcgcgtactggctgcattattcatggtgctggcgaaccggtacgactggcagttattcattgaggtaacaggtccagggggaagtggtaaaagcgtgatggcggagatttgcaccatgctggcgggtaaggccaacacagtatcggcaagcatgaaggcgctggaagatgcaagggaacgcgcgttagtggttggcttttcgctgattatcatgccggatatgacccgctacgctggtgatggggcagggattaaggctattacaggcggtgacaaggtggcaattgacccgaaacacaaagccccctactcaacgcgtattccggcagtagtgctggcggttaacaataacgccatgtcattcagtgaccgcagcggggggatctcacgtcgtcgggtgatattcaatttttcggaagttgtaccggagaacgaacgcgatccaatgctggcggaaaaaatagaaggtgagctggcggtagtgattcgccatctgcttacacggtttgctgaccaggacgaagccagacgcctgttatatgagcagcagaaatctgaagaagcactggcgataaagcgagagggggattcgctggtggacttctgcggctatctcatggcgtcggtaatgtgtgatggcctgttagtgggtaatgctgaaattgtgccattcagcccacgcaggtatctctatcatgcctatctggcttatatgagggcacatgggtttggtaaacctgtaacactgacgcgcttcggtaaagatatgccgggggcaatggcggaatatggcagggagtatatgaaacggaaaacgaagcacggtttgcgttcaaacgtgacactgacggaggaatcagaagattggatgccatcatgtgtatcggtcactaatggcgatagcaaaaattaa

SEQ ID NO: 400983 - DNA, 246 bp, Salmonella enterica
gtgacagcgaagcacacaaaaaaatcacaatcgcacgcccttgatttgacggaacactggttaagggtgtcgataaaaatcatcgaccgcaacgccggggaaggatacgcgaaagcacatcccgaactgataagcgcattcatgaccacggcggcggcaaattttgccacgctgatagagcgggagattgccgaagcggaacaggtgacaaccatcaacgttaacaccggagggatggaatcatga

SEQ ID NO: 400984 - DNA, 426 bp, Salmonella enterica
atgacagcacagatagccgcttacgggcggctgacaaatgacccgcagttaaagaccaccagcaagggtacacaaatggcgatggtaagtatggcggtccccctgccatgcagtcaggctgatgatggtgcggtgacgatgtggctttctgttctggcgtttggcagacaggccgatgcactggcaaaacaccacaaaggcgaactggtgagcgtggtgggtaacatgcaggtaagccagtggacaggccagaacggcgaaacgcggcaaggctggcaggttatcgcagacagcgtaatcagtgcgcgaacggtgcgaccgggcggcaaaaaaggccagcagagccaggcgactgacgcactgaacagggcaaaacagcagacgggtcagcacgatgatccgtacggggacaacataccgttttag

SEQ ID NO: 400985 - DNA, 249 bp, Salmonella enterica
atgccagtgacatttgaagaagtccagcaacataaaaagtttcatgattttgatgatctggaaaccatgacagcaaaaaaatatcgccgtctgctttcttccgatgcgttgtttgttgtggatcatcatgattttctgcgtagctcactgaccggggaaattttcgcaaccaaccgtgaacaggtggaagcgatgatcgaatatctgtggaaaataaggcgcagaatgcgcgatcccgtgaaacggtaa

SEQ ID NO: 400986 - DNA, 507 bp, Salmonella enterica
atgaatttaagcgcaatggtataccctgatactttcataattaatggcgaatcattcagaggtaaaagaaacgcaaaagaaaacaaggtattaattccatatacaaatgaaccggaagtaactattggtcaacacattatccagcgtgtcggtaaaaacgagataaatctaaaaattatagatatgaagttgcttcccaatggaaccctcagacagggaaccaatcatccaaatatgttgactctctatattgaaaatatcacgggaaatgaacatatgacgccaactaaaagtaatacatttaacattggttcaattagtggtgatcaagtgcagataggtgagtataaccatatgctggtaaacatcagcatcactgaactggttgaaaaagtcgctaaatcgggggatgtacaagccaaatcagtattaaagcagttactggaaaacagtaccgttgccagcattgttggggctggcgcaagtgccctaataggcttactgtaa

SEQ ID NO: 400987 - DNA, 1170 bp, Salmonella enterica
atgaagaaattaatcgaactccgccagcaaaaaaccgccctgaaaaaccagatgcgatctctgctggaaaaagccgacagtgaaaaccgtagcctgaacgatgacgagggcaaacagtttgatgaactgcgtgcaaaagccgactccctcgacacagaaatttcccgcctcgagtctgtggctgatgaagaacgcagcaagccaggaacgggcatccagaaattatcatctgatgaattgcgtaactacatcgtaaccggagatgtgcgatcactgtccactggcactgacagcggcagggatggcggatataccgtaattcctgagctcgatcgcgaagtcatgcgccagctacaggatgacagtgttatgcgcgtgatcgcgaccgtgaagaccgcaaaatcaaatgagtttcagaaactggtttccactggcggcgcaactgtaggacgaggcacagaaggcagcgcacgcagtgaaaccaacaccccgaaaattgaacgcgtaaccatcaagctgaatccgatctacgcctacccgaaaaccacgcaggaaatccttgatttttcagaggtggatattctgggctggttatcctccgaaattgccgacacgttcgccagcaccgaagaggatgattttgttaatggcgacggtaacggcaagccgaaaggcttcatggcttacacccgtgcggcgaccagtgacaaaacccgcgcttttggcaccattgaaaaaatggtagcggcaagtggaaccgccattacagcggacgaactgatcgacattctctacaagctgaaagcgaaataccgcaaaaatgccgtctgggtgatgaactcgggcacggcagggacactacagaagctgaaaaatgagaacggcgattatatctggcgcgacagccttaaagaaggtgcgccggatatgttgcttggtcgtcctgtttactgcctggagtccatgccggacatcggcgcaggaaaagcaccgctagcggtcggcgatttcagtcgtggttatttcatcgttgatcatgtaacagggattcgcacccgaccggacaacattactgaacccggattctacaaggtccacacggataaatatctgggcggtggtgtggtggattcaaacgccatcaaaattctggaaatgaaagctggctag

SEQ ID NO: 400988 - DNA, 561 bp, Salmonella enterica
atgaaaaacaccgattttgaaatccgcacatctgaactgaccgccagcaataaaaagctggtggggtatgccgttcgctggaacagcctttcagaaattatctgggacgaattccgcgaacagttcacgccgggggcttttgctgactatctggcggcgggtaatgatgtgcgctgcctgtatgagcatgactatacccaactgctggggcgcaccaaatccggcactctggtactgactgaggataacactgggttacgttttgagctgacaccgccggatacccagcttggaaaagatgtgcttacgctggtggagcgtggcgacattacaggaatgagctttggttttcgcgcattatgcgaggagtggagtattgcgcaaaaaccgtatctgcgtaccgtaaccgccgctgaactccgtgaaatcacaataacgtcgatgcctgcttatccagaatctggcgtggagattgcccgccgttcgttgtttgcacagcaccctgaattacgtccgacaggaaataatcgtcatcgttggtctgagctggcggggttgtga

SEQ ID NO: 400989 - DNA, 1215 bp, Salmonella enterica
atgtggtggccttttagtcgtaaaaaaagcgagcagcgtaacctgtccattgatgattttctggcgctgtccggcgtaccgaataccggatccggagaatatgtttctgccgggacggctgaatcattgcctgcagtgatgaacgcggtttctgtcatcgctgaggcggtggccacgatgccgtgttatctgtatctggtacgtaatgacaagggcagggaggcgcgggaatggctggacagtcacccggtagatattctgctgaatgagcagcctaattcgtgccagacaccttaccagtttaaacgcacaatgatgcgtcactgcctgctgaacggtaacgcctatgcggttattgagtgggggcgggacgggcagcccaaatcacttcatccttatgcaccgggttgtgttgtaccggaacgcacaggcgcacacaaataccgatataccatcaccgaaccctatacaggaactgtgcgcacgtatttacaggaagaagttctgcatctccgctatgcctcggatgatggctttctggggcgctcccccgtcacgatttgccgtgaggcacttgggcttggccttgctcaacagcgccacggagccagcattatgaaagatggcatgatggcggcagggattatcacgtcaggcgaatggctggacggcgtgaaaggtaaacaggcattagatgctctggaacgctacaagggggcgaaaaatgccggaaaaacgccaatccttgaagggggcatggattacaagcaactgggaatgagtaaccaggatgcggaatggctggcctcccgtcgcttctccattgaagacatcgcccgcatgttcaacgtatcgcctatttttctgcaggaatacagcaacagcacctacagcaatttcagcgaggcaagccgcgcgtttctgaccatgacaatgcgcccatggctggcgaacttcgaacagcaaatcaaggccgctttgctggtggcttctcccgtacctggtacccgttatctggttgagtttgattcagccgatttattacgcgccacacccaccgaacgttatgccacgtatgagaaagggattaagaacgggatcatgaatcctaacgaagcccgtgagcgtgagggtatgccgccgcgtgaaggtggtgatgagttcagccaggcatggaagcagactgtggaaattaaaggtgaaaaagatgagtga

SEQ ID NO: 400990 - DNA, 303 bp, Salmonella enterica; identical to SEQ ID NO: 27067

SEQ ID NO: 400991 - DNA, 441 bp, Salmonella enterica
atgccgtggcaaccattaaggcgatgcactgagccgggctgtaataagcgcgtgaagtccggcaagtgtgaagagcacaggcgggctgcatggcgtgcagaggatgccagacggggacaccgccgcgcacgtgggtattcccgacagtgggacaaataccgcgccctgtacctgagcaaaaacccgttatgcgtgcgttgtctggctaagggtatttatacaccagctcttgtggtggatcacatcattcccatcaatggcggcggtgatgttctcttctggcctgagtggaatcaccaggcattgtgccagacgtgccacaaccgtaagacgacacgggaagatccagccacgaaagcaaaccgtaaagcgggcatgtatcgcgagcaggaagaacgggcggcacaccgtaacgactggatgtatggcgatgatgactga

SEQ ID NO: 400992 - DNA, 498 bp, Salmonella enterica
atgttttcgcaatcgctggtgaggccgtcagagggggtgggggtggttttcaggacgaaaccgtccctgccggacaccgaccgccccctcaaatttttgtgcacggtaatttttttgaaaataattgggcgaaaaaagaacatggcaagaccaccaaaagcccccgcttacctggatgaaatcgcggtcaggcagtggaaggaaaaatcgcgccagctttccgggcgggaagaccttacccccgccgactggagcaatctggaactgtattgcgttaactactctatataccgcaaagccgtcgaagaccttgcgacgcgcgggttcagcattgttaacagtcagggcagcgagagcagaaaccccgcactgagcgcaaaggctgacgcagaaagaataatgatcaaaatggcttctttgctgggttttgacccggtaagccgtcgcagaaatccaccggaaacagaggaagaggacgaacttgaccgcctggcatga

SEQ ID NO: 400993 - DNA, 1662 bp, Salmonella enterica
ttgaccgcctggcatgagtacgcagaaggcgtaaaaaacggcaaaattacggcctgtaaacgactgaaacaggctgttaaacggtatttttctgaccttgaaaactccctttacacgttcgatccggaggtcgtggagcggtttattgccttttcccgggtgtgcccgcacgtaaaaggcgcaatgcgcggtagccccattgaacttgagccgtggcagcagttcgcctttgcctgcatcctgggatttaaggttaaggccaccggacggcgcaaatacaccagcgcattcattgaagtaccgcgaaaaaatgccaaatccacggtcgccgctatcctggctaactggtttctggttatggaaaacgggcagcaggatatttacaccgccgccgtgagtcgtgatcaggcgcggatcgtgtttgatgatgcgcgtcagatgtgccttttatcccgaccgttacgaaagcgggtaaatattcaggcgcacaaggtgatacacccgaaaaccaacagcctgttaaagccactggcagcaaaagcggcaaccattgaggggacaaacccgagtcttgccattgtggatgaatatcacctgcacccagacaacggggtttattccgcacttgaactggggatgggggcgcgtccggaggggctgttatttgccatcaccacatcggggagcaacgttgtttcagcctgtaaacaacactacgactattgctgccagatactggatggtgaagaggtgaacgaatccatgttcgtactgatttacgagctggatgatgaaagcgaggttgacgatccggcgatgtggataaaggcgaatcccaatatcgatgtttccgtcgatcgtgaaaaactggcctcaaccatccagaaagcgcggggtattccgtcgcagtgggtggaaatgctcaccaagcgattcaatatctggtgtcagggggctacgccgtggatgggtaacggtgcatgggcggagtgcgccggaacgttcgctgaggcggatttatacgggcaggagtgctatgcggggctggacttatcatcaaccagcgatatttccagcgtgtgctatgcctttccggtcggtaaaaagattatgctggtttcacgtcactatctaccggaatttcagctacagaaccctgccaataaaaaccgcgccatctatcgccagtgggcaaaggcgggctggatacgcacaacaccgggtgactgcattgattatgaccgtatccgtgatgacatcatggcggatgcagagaatttcaatatcaggctggtgggtttcgatacatggaacgccacgcacctgaggacgcagctacagggagcgggatttgaggtggagccgttcccgcaaacgtaccttcgttttagtccggcggcgaaatcgttcgaagtttttgttaaccggaaggtgattgttcatcgtggtgatccggtgctggcctggtcaatgagtaatgttgtgatgcagagtgacgcgaacgccaatatcaagccgaacaagaaaaaatcatccaataagatagacccgagcgttgcggcgttgatggcgtttggcacattccaggctgagcatgaggaatttgcatttgatatgagcgacagccagaaagagcgacttgcggcatttgatggggtatga

SEQ ID NO: 400994 - DNA, 291 bp, Salmonella enterica
atgacgagaatgactgaaactgatctactaaaaataattcgccgcattaccggaatcagtcagcagcctgacgaacaggctacacagccggacagcgtgatagccgaaaattacgcgcgtgtggtggctgaggtaatgcgccgtgacggtattgagcttaacggcgtggatatgcgcaacatacgaaccagagttcttgagttgctggcataccgtcgccgttctcaacaacggagggagagcgcgaaaaatacttaccagtggaggaagccggagcacttacggcggtaa

SEQ ID NO: 400995 - DNA, 267 bp, Salmonella enterica
atgattataaagaaaagaatgaaaagaccaatgacacaaaaagcaatggcagaaaagtttggtgtatctgtttctactgtgaaaaactatatatcccttcctcgtgaagactatttaaaagaagcagaagaaaaacgctgtcttgcatttaatttaagatcatccggtctaaagtggaaagaagtggctgaaaaaatgaatacaagcgaatatagtgcgattgcatattatcgtagatacttagcattactagaaaaacaaatatag

SEQ ID NO: 400996 - DNA, 846 bp, Salmonella enterica
atgtatttaaaacaagatatatataatgaagataagtttaaaagtcaaattcaaaaatacgtattaagcacagatgattttaatgatggtgtgtatcgaaaccctaaagaaaaggcattactaaagaaatatattggatttaataatcgctctttcgttaacggtcttgtattcgatgtagaccacgaatacggcgctattgcttgggatctagctgatttgccaaaacctaatataatcatacagaataccagaaatggccatgcacacttgttgtatgctttaaaaagcccagttcttaaaacagactcagcaagaataaaacctttaaaacttgcgtccgttgttcaatgtggttttacagaaagattagatgctgataaggcttatgctgatattttaataaaaaacccgttaaatgaagctgaatggcgtacaacgtgggctgagagtgaaacctatgatttaacttacttgtctgagtttgtgcctgatgttcttacgacgaaaaacattaaaagcagaagtgaaatatatggtttaggtcgcaacgttaatttatttgaagatctgagaataatagcttataaagaagttttgaaatataaagcaaataaaacatataatgacttttatcttgatatgttttcaaaagctacaatgctgaatgattacagtaatcataacaatccattgacatacagcgaaataaaacagatcaataacagtatttgtaaatggacgtggagaaattttacggctgaaagattttcttcaatccaatcagcaagagccaaaaaaacaagaaaagcaaaatcattaataaactttttggaggatttatga

SEQ ID NO: 400997 - DNA, 372 bp, Salmonella enterica
atgaatgatgatttaaattttataaataacatagatgggaaaattttatttgagcattatcaatatttaactaatgccatactgggtgatgatgacacaaaaaaagagtttgtgaaatatgaatattatgacttggattatttaaggtattatcttgaagcgagtatctattttttaggtgaggcaagagatgaagcaaatagagatgttgaaataaaagatttaaacgaagtagtggagataataaataaattatcaaatagggctaaggttgctttagctgaaaatattatattatggtttgaagatatttcattagtaggttcttataatacactatttagatttttagtcagggagaaaataatatga

SEQ ID NO: 400998 - DNA, 222 bp, Salmonella enterica
atgaagtttgaggtattagcaagatttttttattacatagaacaagataaagatataccttttagtgaaataaatagtgatgagcaaaggttgtgctattttgtagctcatagatatatacaagaaaataaagctgatgaccttctaaaatcgttgattgatgaaaatgatgaagactatataaaagctataagagattatatgtttacaggtggaaaataa

SEQ ID NO: 400999 - DNA, 261 bp, Salmonella enterica
atgaacaatattaaagtgataactcttttctatccacatgacaaaacaccattcatgatctgtattgtaagcaaagtagaagatacagaaatcggcttaaaattaactcttgaaaacggaaatagcatttgtgtcagtaattatagtcattatctgttatctaagtctgtaagtcgttgcgacaaagacaggttaaagaatatttatattcgcttggtttcagaactcacattgatgaatgaggaaacattgaaggcttaa

SEQ ID NO: 401000 - DNA, 444 bp, Salmonella enterica
atgcgtattcgtccttcatcccggttaatcattatctctcctgaaaatcaggtgctgctcttttttttcagccatgagaatgatgctttgaatggaaagtcatactgggctactccgggtggtgggctggagtccaatgaatcctttgaacaggctgcgctacgagaactacgcgaagaaacggggataatcaaaaatgacgtgggaccgcaagtagccaccagaagctttcctatgatgctaccgagtggggaaacggttcttgctgaagagcatttctttattgtcaacgttgaaaaaacggatactgacaaatcagggtggagtaacaatgaaaggaaagttattcgcgaccaatactggtggacgctggaagaacttcaactgaccaaggaaacgatttttccgcgagatttgattatcaaaatccttaccgatctgtaa

SEQ ID NO: 401001 - DNA, 588 bp, Salmonella enterica
atgagttatgactatgaaaaattagaaaacaaaaaagatgagataattagtattgttcatgaaatatttactgagaatgataaggcagctatttccctagtagattcattctgtagattaacgccgcctgaaaaagaaaaatttgtaatggaatatattacagtcaactcatcaggccgacgtggcggaaaatcaagaaaattgggtaattttgttcttaattggagaaaattattcaatgatcttcccgatttagtcttaacagcggcaggtgttgcagctgaaccaaaattagtattctttgcagcattaagtatttggaataagatttggtgtcattcttcaatagaacttacgccagaacatgctactgttttgtacgccttatggcaaggaagagatgagtataataaaataaagagagatgatgcgtttgcaaagagtggcatacaattcaatttttacggaatgcaagagttagtggatatttcattcgatgatatcattgatgatctaattaaaatgcgatgtatagaagttaatgataatataatatggcttcgcgagtgggtcagcggagtatattaa

SEQ ID NO: 401002 - DNA, 477 bp, Salmonella enterica
atggtattgccacctatcttaggcataaagcatttggtcgattggaaaaaagagtcgttcaatgattttgtttgtgaaatatcacatgatgaagaaaatgcaaagcttctattagattattcagaaaaagaattattgtatgcggttcactggatacaacttaagattaatagaataacgatgagggttagtagtttttttggtgaaaaaacagcagtattctcggttttgggtctttgctattcggcagtgcaggcattaattggttttgacaaattgagtaaaacatttattggagatctttctaatgcggattctactaatactgtcatcatgtttggactagcacttttgctaggtatatctctgggggcattaatgttgaaaaaagttgcaagccatcaattatacctgaaagaaattgttgagttgacaataagaataaagaaagatgtcgaagatgaaggtggtatatag

SEQ ID NO: 401003 - DNA, 447 bp, Salmonella enterica
atggctgaaaatttaaaggcaagagatggtaaccgcctgtataaggcgcaattgctttcctactattattcacgccgcgctgagtcggcgatcggcaaaggtgcgcgttttgttatctctaaggcgtattggtgcaaatctagtctggtaactgctaatggtgcaggaggctggaatatagctgacattccactcgattttaaattgagtgatgctcagcagtttgcagtgtccgatctgatattgtccagtgtggatgggattatcactatcaatgcagtcttccctcaagaaagaatgccggataacacgccttacgactttaacacgcttgtgcttgttgatgctgaggaacaggcttttggtgtgctttgcacccagcaagataccctctataaaggtaaacgttacagtattctcatgacaatcgagcaagttgagggttga

SEQ ID NO: 401004 - DNA, 846 bp, Salmonella enterica
atgaaagtaaactggctaaaagaaagactgactaaagcaaaacaggattctcaactctggagcgcctttataggcgctatggaggacgtctggaatgaaactgtagaacctgttttaactcgaattagcaacaggaaatcgttcttcactatggcgagtgaagatatggatacccggatcgcagaatatgggcgtttcttcgttatcaccgaaaatgataaggcacgccgaccaatgttattagcgcaacgtcttgatgaggtgcattttaagggcactgtgcgcccgattgaacaaactttctggcgtgagtttgggaccatccctgttacctgggaaccactatatgcccctgcggatatagaaaaacatccatatgggtcttattttgccactaaagctgagttccccactgcccaagctcaatttggcgaattttttcttacatctcgcggcctggttgtggtcaaccaaaacaagttgtatcaggtatacggtagtcttgataaagacggtgcggtaaaaaaactcctttctgactttgataccgttatagcacagttattgcctctgcatatcgttttcgatggcgtctctttccagttaagtgctgtattcccagaagtggcagaaatactaaattgcttgtctacggatgtttcggtaattgaaggtgtttatgttactgagagtatggctgatatgctatcccgtagtgatacctcctgccaggtagacaatatttctcttaacgccataccgaaccgaacggcagaaaagcaattacatcttgatgtaaccccactcgatgcgtggcctttggattaccaccttcaacctgtttaa

SEQ ID NO: 401005 - DNA, 1431 bp, Salmonella enterica
gtgagtattaccgaattactggataaatttaacgcgaagctcaatgaaaatacctggtgggcgcgttttgttaatagccagttcgcgcaaatgatggcggtgcttggcgctcagatcatatatacagcggaaacatatgccagtagggcattaaccgaaggctttatctccacggcgacaaggcgggcaagtattcttgcggcggcagaagatcgaggttatgtagggcgttttgtcagtgcatcctatggaacgattaccatcatcaacaaatccaatgcggatatcatccttcctgctggcgctgagttgctcgccagcgaccagacaccgcttgctctgaccaacagcatcgttatacccgctggtgggaaagtttctgctgttggggtcaaacagcatgaagccgtaagcgtgacatttgatattgagaaagaaacgctatttcttaccctgctgctttcgcgtgaattaacaaaagaggtatctagccttgcagtaacagtgatccgaaacggggaggcggataaatggatttataacccgttatttcggatgtctcgcgataccagtaagcactatgtgctggtgtataagcccactgagcaactcggcgttcgcttcggtgatggctctatgggaatgatgcctccagccggaagccaggtacgcattgatattatggcaagtcagggcgactacacccttgctgaaggccagaagctggaacctgctggcaatatcgcaaaatacgttgatgttctggatatcactaccgactctatcataactggtggtggcggcatggaaactaccgaagaaacacgcaatcgcgctcagtattatgtgccatatgatgagcaggttgtttggggtggggattatcgtcagtttatccagcaagtcgtaaacgggacatcgtggctgaacgtatggggtgaggcactccaggaaaaagtaactggttatgatgtccgtaatatcaataaaattttcttctgcggacataagcccggcgtaagccaggagtctctggcttctgagatactcaaggctcttaacgacgtacctaacgaactgaataaaaagtttgagtacgtttccactaatgagcaacctttcaccatcaattttactgggatcgtgcgtaaaagcgtgctggttgatgatgcgaaaaatgcgatcacatccgcacttgaagaaaactttgggcgcgactcatcatctttcagtcagttactacagagtgatgatgattcccagcaatgctacgcccaggtcaaagtcaaagatatatggcgtgtcattgagtctctggatatgttcctgtcctatgacgtaacgatgcaaaacttgaaagacgccgtttatttcaacgactttgtttaccttgatgtgaaatcctctacgtttagcatcacttatccgtaa

SEQ ID NO: 401006 - DNA, 375 bp, Salmonella enterica
atgttgtatgagatagattcctgccttcgaaccaatgaaagcggtgtcgttattgcagaaggtataacggcggcatggattgcccgccttgatgaatggctgcgcaccccggaaggcagtgtttatggcttgccttcatggggaaatcctatggctgagtttaagcacgaaccttttggcggtgataactcgcacattattgaagtggcaatagaaggccggattatgaccaaacttaggcaggatctgccgggactggatgtgcagggcatcaggtgttcagccatttcggaagaccaattgttaatcgttatatatgcgaaaggcagcagcctgaacgttgtaatgcagaaagcaaacggagagactttgtga

SEQ ID NO: 401007 - DNA, 3666 bp, Salmonella enterica
atggcgagcgctccacatgtccagggcgctggaagagaaatacaaagcacagaccgggaagaaacgctgatcaccggggtggtaagtgaggacattttgaaagagaacaaagaccgtattgcgataattgacgcgattcaaagcgccagttcggatgaattggaagcgctggcagaaataaaaaaagcgatcatgtcgaatatcgttgtttcaaataacgataatagccaccagggcaaagtgagtcgtcggctgtctcgtactcaaaacaacagacaatcaaaaacaggctctaatagtgctcgtgatcagcaaaacgtgtacgaggaacggctacctccaaagaaaaaacctttacgaatgacaacggcatcaagatctgctgttgtaacggattatccgcaacgtaaagaacgccgaaataataccgataaacgtacggcagcagttccacttatatcccaatcacctgcttcttcgccaaaaaaacttgcgcacaggcaagccggggctgttcagacagaaaatcctgaacaatctccttcaccacgtgaaaaatcagcatcaccaacgcttcgagacagtaacgggcgctttgtgtctcagcaaaagaacgaggacattgccaggaggaaagaacgccaacaggaacaagatgcagaggccaaactccaggccggatttttccgcaaattaggctcaataatgggtgccgatagcagtgggccatccagcgaggactcattgactgatgccgctggtgtaggcgctggtggtccattatggatggctgcaagaggagtgtttgacatctctaaagagatcaccgggaaagcagtatcactgaaagaatgggtaggtaagtttgaggatgatgacgcaaacaaccgcgtagcaacaaaaaaaacagcgatcacatacccggcccccggcgagcataaagcgtcagcaacagcatttagcggcgctgtagaagctaaatcaacacgggcagtggaagaacaaaccaagattcttgaagggaatgattcgaaaatcattgatggccttgaggacgtcactgacgagatcgtgaaactacgtaaatctgtctcgtccggtggtaatttccggcttagtgacctgtggcgaaatagatctgtacggcgtaacaaaatcaatattggcggagagtctcgcaccaggcgaaacaaaggccgaaaaaaaagcgctaaggcaggaaaactgctttctgccggagagaaagcggcggcaggaacggctactgttgctggtggtggtgctgcaatcaaggccgggaaagatgtcgcggtaaaaactggagaaaaagtcgcactgaatacagggaagaaagcggcggagaaaaaaatcggtgctgtagcacttaaagatacagccaaactcggaattaaatctgcggcctctatgggggcaagggcgatccccatcatcggctcgctggcaatggcgggatatgatgcggttgacggctataacgacacggaagcacaaaaggctgcatttggactcagcgatcagcaaaaggtctctacacagcagaaaagcgcatacgccgctgcgaatgtgctggatatgggaggaattgtttccggcgcaaccaatctgatagggcaggggatatcagcacttggattccaacgcgccggagagtcactaaagaacttcgaaacggctgatatagcacgcggtgttaatggcgcaatagatatcacaaaatcggcctttaacggagtgactggtgcagttaaagacgcgtttttgtctacagacgacagcaccaagcaggttaaaaaagcggttgaggacggcacaaggaaaactgttgatgcgattaattccttaaaacaacaattgcaaggcgggattaatggcgaagatggtgtgggggtatacggatacacatccccgtctgaatttaatgcgcctgccgtaaacaccattaccgatgatctgaatattggcgggagtaacgcccaaaaccgcaactaccggaaccataatcttgggaatctggtgtttgccaaccaggagggggctacgcttgaaaccccaaatgccaaaggcgaacaacgttttgcccggtttaataccccagaagaggggatcagggcgctggcaaaccaggtttcaagttactacaacggcacaagccgtgctgcggggtatcaaaagctccagacggtttccagtattatctccaaatgggcaccagccaacgagaataacaccaaccagtacattgataacgtcagcaaatatcttggcgtgtcaccaacggataaaattgatgtttctaatccggaagtaatgacacaccttgtgcgggctatagccacgaaagaaggcggtaacccggcggtcagagatgaatttatcaaaaccgcattaggcaccttcaatgcatcgaccgggcgctgggaaggccagttcaatgacgaaactctggcaaaactcaataaaatccagaaggaaaatggcggacagcttattgctcgtaattcacaatacagcgtcggcaataaggtcaaatatgccaacggcaatacgccagcagtgccagtaaataaagccattcctattaagtcagccgaaacgtttgaagttgctcagcacgcccaggccgcgaagaagatggcggaaaatactcctacagccagtgagcatcaaaaaactgatggtaattcagagagtatgttgcattccctgcttgaatccagccatgaagcaattgcagaagtggaagggatgtttggcggtgctggtagttttataggtgacaattttcaactcaccaaagaattcgcatctgctcaatcagccgggggaatcgaggcactggttgaaaaggctcgcagaatggatcaggcaatgactgccaaagtatcttccatcacgggtaaatcattcggttttcagccagcaaaacaagttgctgctatccagcaggcattgcaacaaaagcgcacaccaccagcggcggctagtgatgtgaatctacttgaaagcagcaaggacaacgcagtttataacaatggatatcgggtagtagaaggtgaggataaaggtttcctcggctcactactggattcctctgccactggattaactcgtattggcgctgccgttctgcctacggtgggggacagcctttcaaggctggtggggggactcgatggtgccggactggtaaatgatctcgtctatcaggccacaggccagaataccaacattgcccgcgcaataagccccctgacaaaagcaacggggaattggcttaatggcggcataaatcaggttgccaataccattaaaggtgtatccggtgatttgaataccctggcattcggctcagcctctgcgattcaggaaccttttcttgcaatgcctcctcagttgcctaccgtgactgaccttgcccgaagtggtgtccgccagactttaaatactgacactgtaaataacgatccggctatgttgaaggcgctggataacgtctattccatcctgaaagacattctgaatgtgaataaaaacaatgcaaaaggtgatccggataaggttgttaaaacggcacaaccgcaaccgcgacaacgggccagcacggttattaacgatccctcactggatgcattgcttgaggattaa

SEQ ID NO: 401008 - DNA, 822 bp, Salmonella enterica
ttgaacattccaaaattcccattgccttcccgtcctgagacagaaattcagttccacgcccctaccgtgaaggatgcgctgaaatattctgaactgaacccggcagaagatgaggcaactactacagagtaccttaactctatgcaggatggtgaaattaacgacagtgctaactggacagttcaggatcgcagaactgctctttggtggatatttgttaattcgcgccccgatgcagtaatgacctactcctacgagtgcagtcactgcggtaatacgcatcatgcagatattaacctgagcgacctggcccaaacagtagaaatactcactgtacctccttacgtgaaaaccaacgtaccagtaaagggagtaccaactgactggatacttaaaccattaaccgggaaaggcgcggaactccttgaacgaatgcgagcgtcacttcctgatatgaaaagtcccgaatacagtgctggcgtagcacggatgcgaattgctgaactcgctttatgcacggcactggatgacgatccggaagacttcactcaagcagctaaccgccgtttcgatatcattgaaagcatggcgcttgaaacggaattcactccgttggtggcccgtatccagctaatgcaaaaagaccttcgccacggcctgaaaatggcaatcgaacgtggcacaagccgcctcattttgccaccacaacgttgcaaaaacgctaaggagggtacagacgtgacaaccacgctgtacgttccctttctcaatcgagagtttatcccatcaattagatctgaatggatggctaaccattattaa

SEQ ID NO: 401009 - DNA, 756 bp, Salmonella enterica
atgaacagagcggaattaacagcaaaagccgtcagcctgattgagtcagcgacacctattagtcgtagtctggcacaagccaatgagatcacggaggctgcttatcacctgactcgcgaccaaaagcgactgttgtttattgtggtgggaagacttcgctatgcttctaaggatggcgttcttggttcaggtgcctgtgagttgacggtcaacgaatatgcagagatgtataatttgccctctgctgaagccagcaaggatattcgtaaggccatttcagggcttagcgagaagaaagttacgatatataaccctgatgaatcgaccgaatcagaagacagttatgagtcttatccctggatgattaaggatgcctattcaccacggcgcgggacttacattattcatcttaatccatatctcatgccgttttttactctgcttgataagagattcacaaggctgaattttaccgaagtatctcgccttacaaatccttattctatgcggctttatgagtccttatgccagtacaggaaggatgatggaagcggctttgccatacttggcgtcgaatggatgcgggagcgttatggcttaccaaaaagctatcagcgatatgccgaatttaagagaagttttttaacgaaggctgtagcagagattgaaaaaaatacaaaaatgaaaatagtcttctcagaggtgacggaaggcggcaaagttaccaggataaaatttacctatcagcagtcttaa

SEQ ID NO: 401010 - DNA, 708 bp, Salmonella enterica
gtgagtattttcagcagcgttggtagaacgttgaccaccgcactgtcatttaacacaaaatcattcaccagcaacctcattagcgacattctggataaagcaatatccggcggcggggtaagtgggaactacagcagcgatattgcctacgggaaaaatattgttgctgccgctatgcgtattcgttacgcccagggatggcagtggacggttgaagtggacggtctgaacggtttcgatatgttcgtgaaggatatcacctacagcagcggaaatatcgagacagaaaacaaggtgataggtagcgtagagttcagcaagccaacctacgtcaccgccggaccagtcacgatgaccgtaagggataccgaagacggcaagatcatgaactggttcaaagagcgtcgttcccgcgtgacaaacccggacggaacaataaaccttcctcctgaatatctaatgaagatccggctctaccgggtaactcaggatggcggtaaagaactggaagaggaaatgcgcgtattccccactcaacttggggaaatcacccgctcacgagaccaggtgtcagagttcttgtcatatccgatcactttccagaaatacacatccgcaggctcaggtgtttctgctttgaccaacggtgccgctggcatggctacaagtgcgttaaagggggctgtgagtggagtgatcaaattctga

SEQ ID NO: 401011 - DNA, 552 bp, Salmonella enterica
atgacaccaaccgaattattagaaagcgttaaaacgcgatttaacccactgcttgtgcgtgaagaagacacgctgaaagccttcctgattaaagcgctgaccacgtatcaggacagggccggggtagtgaagacactaaaactcgaaaaagctggtggcaccgcaatcccattgccggaagattatctatcccttgttcacgtcaccgacagcaatggccttttggtctattcggatgaactatccggctttattgaattagagctgacaggttcagaacgatggccttttcggatgctgtatctggttaatctccgcgacagaaaactggacgaatggcaagtgccgcctgcaatcattggaatgttggaagaatacctggaggcgcttatcaatgtcagaaatgtcgcccgccagcgtcgagcgtccatcgacgggaaatttgactactcagatctacctgatgaagccacgttatatgcccgcgttcaggagattgaagaaaaaatgtcatcaaaccgggcgattattccgggggctaccattttttaa

SEQ ID NO: 401012 - DNA, 492 bp, Salmonella enterica
atgtccggttttgcaaatacaaaagccgatatcgccttcctgaaatcccggtttaataaaaacctggcagcaggcgaaaaacttattggttcagaattctggatgactattaaaggttacgaaaacctgtctgtacttgttcgtaccactcagttaccggaaatgacacgcgaagacgtggaggattatgcccccggcggcatgaagttcaaccaacacgggccattgcgcaactctggtgagttccaggtcacctgctctgagacaatcgaaggggatgtactcgcagccgttaaacaaatggtttatggcaaagagtatcttgatatcaccttccaggcggcggctgaatccaacagcggcaaccacaaaggtctgattcgtacctactctcactgcaaagtgtattccgacgccgtggacttctcttccgaagacgtaacggcagtcgtgaaaccttccctgcgtattgtttacaactgggtagagtga

SEQ ID NO: 401013 - DNA, 597 bp, Salmonella enterica
ttgatttgcggtgcgattatgcctgacgggataagcccgttattgaaggtgtacatcaggaataattccaacacggatatggttgtcgggtatatcggtgaaggttcatcggtggagttgtcgtcaatctggcagtcaccattcgaaaaccagtctgttggtggcctgctcggtggcatcagttctgccgctggctctcttgctgacacactccagaccgcaactggcgtaacaacaaaaacgctttttaactccatgctggtatgggaagggcaggaaccccctgaatttaatctggttatcgacttcatggctacggtaaacgcacaacttgaagtgaatgctgcaatcaatgcattactgaaaatggagtcgccagaattaaacaacgtcgctccatttgggcgtcgtcctgagacggtcacgttgaatatcggcagaaacgtaatgttatccgatgttgttatcaaaaatgtgagctttcaactggatgcgcctcgcactccggaaggctatttcactcacaacaccgtaaccctgcaatgcagcggaaacacttcgattaaccgtagcaatatttcatctgtttttgtgtag

SEQ ID NO: 401014 - DNA, 708 bp, Salmonella enterica
atgaacaattttaccgttgcagatccgttcatgcgtgcgctttttgcatcccagcacgccgataatcaagatgccgcgatgcttgaaagcgcaaatagcaaaaaagaaaagaccacagataaagttgatgttgagaaagcaatgctggaagccgttgaatcccgcgccaaaggcgatatgcgaagcctggcagcttccatgctggctggctgggtagaagatggagatccagaagctgactccttcgatgcactggcaatttctatggctggtcttactgacattgacgaagacactgatttcactgacgagcaaatcgacgcgtacaacgaagcgctggctgcactggctgacgccgctgtcgcgctgggtgcggatcaggatgacgttactgagatgatcgatgacgatgacgacgccgctgcggaacgcgtattcgatgcgttatccgaaaatgactccgacatgatggaatccgcgattgcgatttacaccgtggctggtggcgatagtgcaatgctggaagatgtgcgtaagaaagtcgtccgtgacggcaaagttaccatcatccgcaagcgaccgcgcccacgccgcatgacttctctccagaagcaggctctgaaaaaagcccgtcgcaaagcgcatacatcagtggcaaatatcaatcgtcgcaagtctatgcgcattcgtaaaaaacgcggcctttaa

SEQ ID NO: 401015 - DNA, 1659 bp, Salmonella enterica
atgaataaaattagtttttcggtagggcaggccgcaggtgtcgccgttatggcggtcgatgctgacgctactctatccaataccagtggcggggcttcggtcttcgccgggcttgtcatctctcgacgaggtgcgccggggaaggtactgcaagtcaatgccaccacctaccagagtgtattaggtacaccaattcacccgcgtgtgggtgcagcatttgaatcataccgccacgtggagcgtgctgtgaacggcggcagcggctatgttgtgcgtgtttgtccaaaagacatgaaggtacctggcatttccgtttcggtagcggcaaaagcaaaggcaagcaaagcgacggccaaaaatctcgctgtcgaaccagaaacagtggaggttaacactggcgatactattagtgttcgtgttaatgaaaccgccacgactaaggccgttgctttcacaccgaaacaaacgccggaaattacagaagatgccgttgcaatcttctacattaaagatggtgacgcgtctcaaaaccgcacgctctctttaacatgtgacgaagacagcgaactgtatacgctgacactgaaagaaaagcaggcagacggctccgttgaaacgctggaaagtcatcaggtttcctttaagccggaaggcacaaacgatatgggccagccagcatggatccctacgttgctggaaagccagtctaaccgcctgggcgcagtgcttgcagataatgccgaaggcgttgcggcgaagatctcctttgaagatgttgcgttcgagggcggctccgatggcacactgaccagcattgaagccgaagactatctggaagccctgaaaattctggaagcctcggaggtcaattacaccgcactattgtctcttggctgctatgacccttctgtccttgccaaaatcaaaacgctggcagaagaagttcgcgtggacatgttctacgacctgagcggtaacaagacaccagaaaaggccatcgaagaggcaaaatcacatagctttggcggctctcatcagccaagtcgttactacttcccgtatgcctgccgcgataccttcactggtatgaatgttgtttacggcatcagttgtgacgcatttgtggcgaaagcgaaaggtgttgcactggtatcagatgttggtggctggcattacgccccggcaggtgtttcccgcgcaattattgatcgccagaacatttcccgcctggcaagcgttggtgtgattgaccgcgaagccttcgtgaaagctcgcattaacccggtaaccattgccgcagatggctctgtctatattgacgactctctgaccacgttcagcaaaaataattacctgcgtttccagcacgtatcgtccctgatgaacgctatcgcacgcaatttctacgaagttgctcaggcaattaagcatgaaccggatggcatcacgcaagccactctgatgaaagcgatgacagagctgcttgaccgattctatgccgctggtgcgctggtgaaaccgcgcgacgcttctcagggggaagccccatatgtcgtatcggtcactcagaaagatatcgacttgtggcaggttgactggtctgtctgtccgactggcacagcccgccgaattgtcggcaaaccgatcctgatgcgttga

SEQ ID NO: 401016 - DNA, 279 bp, Salmonella enterica
atggctgacattcaagtaaccattacgcccgcggacgcaacagataaatcttttaccgttgagtctaatcacccagagattgtgagcgtggaaggcactacatgcaccgccagaaaagcagggcaggccgtactgaccattaccacaaatgatggcagtaaaaccgcgcaatgcaccgtcactgttcgtgaggctacaaaaagggtgagcagtgtttccgtcgaacctaccacaaaagaagtgaatgtaggcgacaccttcactgtgggcgaagcctga

SEQ ID NO: 401017 - DNA, 1698 bp, Salmonella enterica
gtgaataaaaccattcagccagctcgtgatcgcgagcgcgatattatgaatcgggcggcaagcgtcatggctatgaccgtcgatccgaccactgatgctgcgggcaacatgattgctgataacgcagtaatgatggaaaacctggataaagctgtccagaaagtacctatgtttgaaggcgtacccccggaagctgcacgtcagattgctggtggatgggcgatgtctctgcatgagtacaagcgtcagaacggtcactacccggcaagtgatgtgctggcaaacgcacacagagcacttgagcgtttgatgactgaatgtgccagcaatacacacgaaggctctggcaaagcgatgtttgagtctgtcgcggaatctatgcgtacctctgacggtgtaatgaaggtcgcgcagtatgcagcattaatccttccggcttctttaggggcagccaccagcgatgcctgtacctttgttccttgcgaacgtgacgagtctcatatttacgaactgctcaacgttgcaggcactaaattcggctccttccagcagggcgacgaactggacatgcagtctgctggcgtttattcacagatgaaacgcctgtataccctgactgaaaaaggcgataacagcaaaacaaccttcacgttcgatatcaagaaatttgaaggccaggcctgcccgatccgccagggatataacaaacttttgattaaccgcaaaccgtccaaagtggacgatggcgacggcaacctgtatttcaacgaccgcgacaccaaaggcaatgctttttctgctacggcgaaagtgaaatacgacactggcgtaattgacatcacctttaccgacgcaccagcagaaggcaccgagattgccgttcaggttgaaattaacgttgagcgcaatcctggcctgatcccggtaattaaccaggcaatgcgcaaatataccgtacgcccgtcacagtacgtcattgcgtccgaacataccgtcatggcggcatcagatttaagccgcgagcacggcctggaactggcagcactgcaattctccgcaatgcgtaactggatttctcacgaaaccgacattatgcgtctgcgtaccctggtattccataccgtttacggacgtgaatttgatgttgctatgccagaagcacaaagctacgagtcctgggtaggtctgctacgccatgcagtaaacgcgctgtctcaggatatggcaaaccgtaccaaaactacgggtattcgcggtggcttcgcgggggctgatgcggctaacttcttgcgctctctgccgccgcaacacttccagatcgcaccgggctatgtccagtccccatacgtgcagtacatcggcacactgtttggctctatccgtatctacgaagtgccgcaacctgtctgcgaacagttcgggaagcagggctatgagttcggcctggatgacattttcttctacggtcgcggcgaaggcatcggcaaagctggcctgatcgcgggcgatgctgtcccggctattccgtatgttcatgaaacaaacccgtcactggttaaccgcaccactctctggggcacagccatcaacgaagttcatccacgcaacggtgaaaactacttcgctcgtctgcgcctgactcgttcgaaagaaggtgcgattgacatgctgaccgggcagatcaacgaaaaaaagtag

SEQ ID NO: 401018 - DNA, 393 bp, Salmonella enterica
atgagctacagtatatttgtttcttatccgaacggggcgaaaagccacaagctgagaacaacaaagcgccgtcttgtagagagccaactggagaacattctgagcgaaccggaaatactcagtctcgctgaccgggtggttattcagtttggtggtcatgacatcctcaatgttccagcctccacaccgccggaagttgttatcaaaactgttcgatggcctgccccaggatgcaggataaaagttgaaaacccgatggtcacatcgttgtacatgcctaaagccttccatgactggttagtcgcgcaaggtggcggcaaggccagtcggggattgcgtgtgctggtggaaaaggccgacataccagaattgaaaaacgcatggcggcagtga

SEQ ID NO: 401019 - DNA, 459 bp, Salmonella enterica
atgagtcacgcaaatccatcgaaaacgcagtatcgcttgatgctggctattgcgtcagcgataccgacaagcctgaatcctccggcaggatggcctgctgtagttgatgattgttttcagtattacggtgaggacattctgggtcagtcgaaggcgctcaagcagttatgcaaggcaggtattcttcactgcattggagatccggatgattttgtcgtcatgctggcagatcgtgactcttttttgttgtcctggaaagcaggcgcgcgcgaggcacgtttggggaatgggattggttacattgactatagtgattgcccgctggcattcgctggtggctatatgcactggcatgaaagaaataaaggccgtcagcgtccgtaccggttgagtgactttaacgtctgtcacggattcgaggaagctgacagccaagatatctggcttcaggagccgtga

SEQ ID NO: 401020 - DNA, 453 bp, Salmonella enterica
gtgaaaaaaatcatcttgattgtaataacgttcattgccgtatctgggttttaccgggcaacgtcggctgtcatcgatcacatcaggtacgtccgctcgcttgaagactcaaaatcacaactggaaagcgagaacaacacgctttctacagcattgcagttaagtgaagacgctcgatctgccatgcaggtcgaaaacgaaagaatcaaagaactggaaaaagactaccagcgcaaagccaccgaacttaataacagactgaccaaacagcgggaggaaagccagaatgaaatcactcgtcttgaagctgcgttacgccgtgctgggattagtgatgtgcgtttacctgatgatgttatccggatgcagcgggaacgtgcaaaagccatcaaccagcgtgccagtgaatattaccgtggaagccaccagcaaaccgcaggccattctgattga

SEQ ID NO: 401021 - DNA, 837 bp, Salmonella enterica
atgcttgattcaaaaggcgaagttaaagccttcaaaattctttcaggttcaggtactgccactccagagtccatcaccataagccgggcggcatccgcaaaagcctcgtcactcgcaagcgccatgaagggaatggttcatgacgataaaacctaccctgaatcagtgtcagcctggacaactaagttaattgttttttcagaacaactcgttgccgccagcaaagcctgtttatcacttgctgattctctttccccatacaccacgccatcagaactgttacagatgaagattggctgggaatgccacgcaaaaggtaatgaactggcacccacgccagcattcgctctcgtggaggggatgggtaatgtttccataccgcaatcattaacggacgcattggcggtgctgaaacttgacgatctgagcgccgctatgagcgccattaacgcaaaaatagaagccgccggaagtgcgggcagcgatgggaatcaggctggtggagggactgctccggctccagggactgctccggctccagtcattacccaggatgaaattgacgctctgagggaggcagtaacaacagcggaaacttcactctccgggattaatttagccagcgagaatgttgcatctcttgcaggtcggataagaacgtcaacagaacaggctgcaagggggcttgagaatgctgtcgccatcacgctaacaggctctctactgaatgacgcagtaatgagtccggcaatcagcctgatcatgccagaaggcgttattgaggcgctacagagtggctccaaaaaggaacaatataaacaccataacggcacctga

SEQ ID NO: 401022 - DNA, 285 bp, Salmonella enterica
atgagcgcaatagccaccagcgacacgctttgttctggtcacggtggattcccgccgagactggtagccgaaaccgttccctggttcaccgttaacggcaagcctgttgttgttgatggtgcagcctttcccagtcatacggacggcaacagcgcacatccgggatcggctgtatctacgcgggcatggttctcaataggaggaaagggggtggtctgtgtaggcgatccgctttcttgtggttctgttatcgccaacggcgaggatatttttcaggtcgcataa

SEQ ID NO: 401023 - DNA, 957 bp, Salmonella enterica
atgcgcatttttatcgacgatggttcaaccaatatcaaaatgatgtgggaacaagatggggaaactcgcacgcacatcagccctaacagctttaagcgcggatggtcagcaacatttggcgctggcaagccgtttaactatgtcattgacgacgaaaagtattcgtacgacctgatctcgccagatgttctgccgacaaataacgtggaatggcaatacagcccgcttaacgttcttgctgtgcatcatgctttgttgaccagtggtattgagccgcaagaagtagaaattgtggttacactgccactggcagagttttacgacgacgatgcgcaatacaatctcgctaatattgagcgcaaaaaagccagcctgatgcgccctgtcacgctgaataaaggcaatgtattcacaattaagaaagttacggtacgaccggagtctattccggcaggaattggcctgtgcgacaatctgaaccctgcccattctgttcttatcgtcgatttgggtggaactacccttgatgtttcaatggtcgccgggcaaatgacggcagtttcccgtgtttttggcgattcgaatcttggtgtatcactggtcaccagggaagtaaggcaagcacttgccagagccaataccgaaacgtcaaattacaatgtcgatcagcttattattaaccgccacgatgaagaatatctgaacgacaatatcaatgatccatccgctattggtgatgtgaaaaaggctattagtgcaagcattgaccgcctgcgtactcgcgttcttgatgtaattagcgactttaaagggtatacgcatgtcatggtgatcggcggtggcgcgccgctggtggctgatgcaattcgcgagcacgttaacattcgtgatgatcgtttctttgtggcagatgacccgcaacttgctcttgttcatggtctgaaggctatcggttaa

SEQ ID NO: 401024 - DNA, 339 bp, Salmonella enterica
atgtcccaggaacgtaagaaagtgatgatttatcttcgcccggaggcttatgccaatgaaaaagccgcgagtgaaaagataaaaaaacatagcgatatggcaagaactgcgcttttagctggccttgcgctgggagaagtcgatagtcggctgccgggattgctggcctctcttctgacaaaagagaataacccagagctgatccggaaaatgctggcctcgtttctggaagtgcctgctgcgacagaggagcgccctggtcctgtagcgccgggtaaagagcaggtcgttgtcgaaagtgcgtctgcgcggaacctggctaattctctacctgattga

SEQ ID NO: 401025 - DNA, 642 bp, Salmonella enterica
atgattatcctggtagcaagtcaaaagggaggctgtggcaagtcaaccaccagcgttaatatttgtgccgaactggcccgtaaaaacaaagatgtcgttttgattgatgctgataagcagggaacggcagcgagatgggcgtcagaccgtaattcgtccgaagtgacaccagtcattcactgcgtccagaagtttggaaatattcgagaaactctgctcgatcttaacaatcgatatgaatacgtggttgttgataccgcaggtcgtgatagtaaagagatgcgcacaggtataacggcggcggatattctattggtgccattcagaccgtctcagccagatttggacacgctggcacactttgttgaggtgtttgaagaggctttggatctgatgcctaatcccaatattaaggcgtgcgcagtcttaacgatggccccgtcaaatccggttgtgaatgaagcaaatgaggccaaagagtatctggctgaatatccgcaactgaaattgctgaaaaccattattcgtgatcgcaaggtttaccgcgactgcatggctgaagggaagggggttgttgagatggacaacggaaaagctaaaggtgaaatccagatgttggttaaggagctattaagtgattaa

SEQ ID NO: 401026 - DNA, 288 bp, Salmonella enterica
gtgattaagcctcgtaaatctgcgaaagccacagaagtaaaagatctcgatcttgaacgccgcattgaggcttttgccagtaaagctgatttggttccgggcgagcagccagaaaacaacaaagagcttgataaagacgcgccgcgcgactttaaatccatacgtgtgagctttaatgaatatgagtatggtgtgcttgatcagttgagcaaaaaacttaaccgtagcaaattgaatctgattcgacatgccatcctcatgcttgctgagtcagaggatgcaaaataa

SEQ ID NO: 401027 - DNA, 906 bp, Salmonella enterica
atgagtaattcgcaaacatgcatagccattaaccgaccagcggtgaaagcgacaataagttatatgcgggccatccgggcgcaggaagaatatgagcgcccgatttttaaatgggtaggcggtaaattctcagagttgcccatagtgcttgaacatcttccgcacggtaagcgcttaatagaaccatttgtgggtggaggatccgtgtttaccaatgcgggattccgtcacaacctgcttaatgacattaacagtgacctgattaatttctatcaaacgttgcagcgcgaggggcattcactgatcaccctggcatatcgctttttccagaactacaacaacgttgacgcttatcttgatgttcgtgaagcatttaacagggggaagtatgaccaactgcatcatgctgccgcctttttgtacctgaatcggcattgttttaacggccttacgcgatataacaaaaatggcgagttcaatgttgggtatggcaaatacaaatcgcactacttcccacatacggaaatggaggcgttcctggcgaatgacgtaatcaaaaacacttcgtttgtatcaggtgactttgcaggcgtcatcgagtcggctggtgaggacgatgttatattttgtgatccaccgtatgaacctctgccagatacagagggatttaccagttattcaggaaacagctttcgtttcgatgaacagaagcggctggtatcactgttggttgaggcccaccagcgcggagctaaggtggtaataacaaacagtggcgcgccaaaaattcgggaattgtacgaagaaaacggttttaagctgtaccccatgccagccagacggtccgtgtcatgcaaagcatccactcggatagtcgctaacgatatcattgcaacgctcaaatag

SEQ ID NO: 401028 - DNA, 681 bp, Salmonella enterica
gtgaagctgagcgttaataacaggccgctcatggtcagtctgtgcgattatacgggggcaatggttgccccctggctggactatggtgttgatgcggcaatcgtagatccacaacatccagttacacgtaatgagcgtcaagcgtccggtgcaatcctgactcgtattagtgcgattattgatagcgatgaagtatatgcattcgtgcgtaacaacttatcccgcattgtttttctggccggattcccaccgtgtacagaccttgctgtatccggcgctcgatggttttcgtcaaaagctaaaaaagatgcctcgttccagttcaaggcgatgcaagtcgtctggcaatgttacgacatggcaaaaatgatcggatgtcctttccttattgaaaacccagtaagccagatctcaaccttttggcgcaagcccgactattcattccatccatatcactacactgcctattgccgtgaagataattacaccaaaaaaacgtgcctatggaccgggcaaggttttgtcatgcctgaaccagcaacggatacatcgctgggtaaacctgataaccgaatccattccgcaccaccagggcctgatagagctaattttcgtagtgctactccgcgtggattcgcaaaggctgtttttgaagcgaataaaggggtgatctatgagtaa

SEQ ID NO: 401029 - DNA, 906 bp, Salmonella enterica
atgaagtcagtagcatttaaaaacatcttcatctaccgcctttcacgcgaaatcgaccttgattccagcactgttaaaaacgctctgagcaaattccagttctacccttgcggctctcaggacatggcaaaggctggatggactcacgtcctggcagaaaatttcactcacgagtaccggggctttcttctcctgcaacataaacgcgaagaaaagattctgcccgctccagttctgaaagaagaattgcagaagaaagtccaaaaactggaagaagagcaatctcgtaagttgaagaaaactgaaagagacagccttaaagatgaagttcttcattccttacttcctcgcgcattctcccgtaagtcattagctcgcatcttaatcgaccgagataaccacctggtcttcgtggaagctgccagcgcaaaaaaagcagaggatatgctggcgttactgcgcaaatcacttggcagcctgccagttatcccattcacaccgaaggatccgctggaaatcaccgtgacggaatggattaaacagggatttcctcaaggtttccgggctggagaccaggccacattaaaggcactgctcgaagatggcggcgcggtgctgtgtaaaaaacaggatcttcaatccgatgaagtgatggcacatattgaagctggtaaggtcgctacggcaatttcgctcaactggcaagatcgcgccttcttccgcctgggcgatgatatgagtattaaatcgctgaaattctgcgacgacctgtacgaccagaatgacgacatcgaccgggaagatgtcgcacaacgttttgacgctgatttcatcctctttacttctgaattatcagcaatgtttgcttcactggtggaggccgtaggcggtgaagctgagcgttaa

SEQ ID NO: 401030 - DNA, 627 bp, Salmonella enterica
gtgaagcgtagagcacaaattgtcggaacagaacacccggcggggcttatgcgtgctcaggtgcgtgttttaccagactggaatggtgtgccggatgaagacctgccctgggctgaataccagttacctatcggtaatgcttttgtacctacagtaaaaggtgatttggtttgggtggagttcccttatctcgacgtgaacgggcgaattgataccagacgaccaatgattgtaggggctgcacaggatgcgccaggcggtgttccaaatgtcgcaccggaggcgtcaggccagggcagtggatggacgccaccagccgtagatggtgctccttcccgtccaacactctcttccacgaaggattatgttattcaccgaaacaacgtgctcgaagtaaggacggcaggcggcggatacgaaattgcaaatacggctgccgggtcgcggatcggcatgaatgagtcaggacagatatacattattggccccgctgacgttgtgattaacgcgggcggcgatgtcaacgtgaagggcaacaatatcaatgtgaaggctgacggaaacatggagtttaccgctggtggcacgtttaaagcgaaggcatccaactttgagtttgtgaactga

SEQ ID NO: 401031 - DNA, 987 bp, Salmonella enterica
atgtcgcaagagttacaacaatacttcctccagtcagtcaccattaacgataacaaagtgccgcgagactggatttttaccgctgtatacgtggaaaaagccagccttaaagcgcctttgctaaagctggaaatccacgacatcactggaacgattattgatgactggaaagcaaaatacggcgcatcgctggtggctgaaatgggggatccgcaaggtaatgcaggcaccttcaagacgacatttttcgtcacgtctgcaatgctggctggagatgttgttaccgttattgcagtcagtgaagatgtgcgtcggtttaaaatcccctcccctcgcacaaatctgcataccaacaaaacgccagatgccatctttaaggtgtatgcgggcgatcagcagatcgcaggtagcgcgatgaaacgtgctgttacctatcaccttaatgcaggtgaaaagccatcgaaaatgtttgctgaaatggctcgtgataaaggtgctttatgctggacatgccgggggcaattcaacttctacaccctggcggatctcattaagcagcagccatccttcacatacgaaggtaataacccacaggctgaatatacgctgtcaaaaatgcggcttattcagcaagaccacgcagtcacggcaaccaatcaatacagattcgtcggctactccatgaccgacggctacattgagtgcggagacagttcgctccccgtccgctacatctctgattcagacatggagacgctgcgtaacatgcagctatcgctcgtaccaaaactggatattgaagtagctggtaatccggaaattaaaccggggatggtgatcgaaatactggtgtaccggtatgaccaggaaaatcgactcgatgaatccctgccgcgaaaaatgattgtgaagaacgtcgcccactttgaagaccgtgtggggtacacgacacgaataatattaggagtaccgaacagtgaagcgtag

SEQ ID NO: 401032 - DNA, 768 bp, Salmonella enterica
atgattgctaacaaaaccctcctggcgcgtatcggtgaatggcagaccacacgcacagggaaattccagaccactggcctggatagcgtggataacgcgtttgcttcgctcattagcaacattttttcagatatcttgctggtggaacctacgcgagaagaaaagcgttttgcatcattcctgaatcgcccaccagcagaacgtgtctatgtggcgcgtttcgataacgctattgagtttctgaaagccgtgcgccgcgcaaatgccggacaaggacggaaaccggaaaaccagaatatcaatcgcgatgcgttgcccttgatcaatatctcccggtctatggatatcagctatatcaatgatgaccagcagatagaccgcaaacaagtcgcctgctttcgcgaaccggataccggtatgcctttagccactctggaatatacccaggccattctgacgtatgacgtgacgttaatggcgaccgataaagcgaccatgagtctgatgtgtaattcgctgggtgcgcggcttcgcctgatgaccggaacacaatttgaggcgatcactaacctggtgcgtgtgcctgttccactgatttgctccattcaggatgctaaagaagttggatttacggatgtttcagcacccgtaggtgaagagaggatttatgctgttcaggctcctgtaagcgttattgccgatgtgatcaccgcatgggaactggacgcgaaacgcatcattactgaaacctcgttggcgatggggtga

SEQ ID NO: 401033 - DNA, 792 bp, Salmonella enterica
atgggccgttttgacgaatggtttgctgaggatgcaagccgggcaaataaggagtcagaccatgacagcacgcagagagaaacgccagcgtcggttgaagcggatggaggaagcgtaccggaacaaggcaatgccggatcggattcattcagcattctggaagagcaacccgccgccgaagctgatagccaggatgattttcctgatagcggcggtgaccttactccggatgctggcgaatcagatatagccatactcccatcttccctggctggcagagaaccgactccacagttaaaagctcgctataacgggcataaagcctttaacgaccagatccggtctgactggatgctgattattgaatccagtccagacgcgttccaggcgctcttataccgaccagatgttggcacatatggtgttgtaaacgacgaaacaggagaagagtcattcactgaactggataacaaccagcgcgaactgacttatcaggaaccggagatcgtttatgtgctggataacccggacggacgcgactctttccatgcggttgacgctgacggcgaacaggacggcctggctgatgatgtgcttattctgcggattgctgcaaataacgtgcctgtcggctcaattcttgaatggaatgaagagatggcaaatggtgttgctcgccgctggtggtatgtacaccgtattttcagttacggcacacagcatgtcggctcgctttactactgcataccagcaagaaactttgatacgactcagaacggagtgatcgaatga

SEQ ID NO: 401034 - DNA, 1206 bp, Salmonella enterica
atgcctgacttcctgaaaaatcaggacgggcgctatatcactcagggcttgtcctcaaaggatttcaaccgtctttttgacatcatacgcaaagaacaaaaccggaaacgccgacaggctcaccggacgctgacgcctggcagactgcgtaataaatccgccgaagacattctcaagctgggtaagaagaaaggcggcacattctttactcgcgatgacctgaaaggcttcgaaaaacagcgaacaaaagcgcgagaaaagtatgacagcaaggtagcaggcattacctacgctcaacttgtggcgtccagtcaggctatcgatattaagcgcgcaaataacgctgtagacgacggttctggcatcaaaagggctacgccagtatctcttcgccacaacgtgattaatatccgcgtagaagcatctgatatatccgtccaccagcatcatatcgtccgggtacgctttgaagaatgggatcagatggttgatgacatcgcagaagacgataaatccgctctgaaagtcactaaatcactgtgcgccgggcgggtgtctttcgattgtgactgtggacgccatcaatactggtatcgctacatcgctacggcgggtaattttgctctggccccaccaaaagaatacgcctaccccaaagtgcgtaacccgaagctgcaaggcgtagcttgtaaacacgtgatccactcaatgacacggttacagtctgccagttggcagatgaccatttcccgcgctttacaaaaagcagcgacacaagttgcctttggtgatgatcgccgaaaaacgacaaaacatttcacgaaagaagaagagaaagaatttaatcgtaaccgtagcagcaaaactaacgtcgaggcggctaaacgcgaatggacgctctatcagaaacgacaggcagcattaagcgctaagctggcgaaagatggaggcaagattgccaagctgcgcgaccaactgaccagggcaaggaagttatcagacgcccagaaaaaacgggcagcagcaaaagaggcagccttacagcgtgagaagcaaaagaataaagacttgaagcaacggcttgctgatcagttcgcactgaaaaagcaggcattcattgacgctcttatcatgacaggcacaccaccagcacaagcagaaaagatgtttgtggaatacgtgaagagcggtgttaaaagtgtataa

SEQ ID NO: 401035 - DNA, 330 bp, Salmonella enterica
atgggctacagcagactcgatgaccgctatgttgaagacgatgttcttcgcgccctgctccatcaggaaatgattaagcgggtatctgaatatcatgctgacaatttccagtacacgataaaaatcgacgaagtatatcgatcagaccttgctgcataccgggcgtatggaattgcagatatgagatgggtattccgcgtgctggtggggcatgaatcagagatggaagaaatgccagcaggcaccacactaacactccctgatctggcctgggtgcgcaataaaattcgtgattatgctggacctgctccggagatgactaatgcctga

SEQ ID NO: 401036 - DNA, 135 bp, Salmonella enterica
atggacgttattctcgaattgttaaagctgatcgatctgtgtatgaatgcctcattgaccacgcaattactggcgtcagtctttttgttactcttctacctggtattgcgggagttaacaaagctactaatgtga

SEQ ID NO: 401037 - DNA, 654 bp, Salmonella enterica
atggaacagattgcggtattcagccttaccaccagcaagccattgctgatgacagccatcctgaaagacggcgcactcgtcgttaatgacgtaaaaccacttcccgcctcagcaatggaacagcggaaaaaaatccctggggcaattgcaacgcttcgaaaaagcaaatttaaagtgctggtggatgaaataacccccgccgtatctgctggcaccggggcaagccaggtaacactgaaaacgcgtcattcagacggaagggccgcgattatcgtagggatggagcgttacagagagcttaaactgcaacgtctgttatcactaccagcgcaaaacaaagccgcattcgatatccctgactcaattgtagataccgaatacaactcgaacggtgaagaagtttaccgggtgaactggcaggacatcaggccggaacatattctgatgatcctgtgctgctacgcaaccgtatatcacaacgtctccagtgtggattacgtgcaacagatgacaggcattgtagagaaagagcacaaaggcgggataatcgctccgttcctgtcaattcttgggtacgaaaaagccacttctggcagcgttcaacccaaatcgctggctgggcgagaagttgatgaagataccgtgatactttga

SEQ ID NO: 401038 - DNA, 321 bp, Salmonella enterica
atggcagcattaagccaaaactggatgcaatttgaggtttaccgaagtcaaggcatggggcaactattgcagcctctctatatgctggcgctggtaccggaaggacagcagttccttatccgaaaaggaatgcttcggcaaagcgatgcggcgggatttaataagacaatagaacttgaacgctcaatgacgccaaaacaagcgcctaagcaacctacagccgattgcgttagccgtgagattcagaaggtattaagtgagcagccttacatggatcatggtgttgcagaaatggctgcaaaaatgaagtgctctaattaa

SEQ ID NO: 401039 - DNA, 429 bp, Salmonella enterica
atgttgcgcatgaaatcttcaacaaagatgtcaaccttgaataagttggctatggcggtattaatagtttcccctctggttgctaatgccggaaatttacaagtgaagtgcggtcagttcgatataaaaatctatccgaacgccatatttctgaatgggaataaggtagacaacgcgcaccgtgaaactgaatctgacgtaatgagctatgtattccaggaatatgcagagatgggcggaacctacacgctgtactcgttggatgttccttcacgcggtgaaatgacattatcccatcaatggcagaacgccgatggtgaagccctgcgtgaggtgaagacagaaaaatgtggcgctttccactcttttaaaggtaaagcaccaaatgttaaatcagtgcttgaaaaacagcgatcaggcgagttttaa

SEQ ID NO: 401040 - DNA, 168 bp, Salmonella enterica
atgactgttcgctatcttaactttcaaatccagaacgtgactggcggttgctatgactggtttgtcaccctggggaaagaagtaatctccggcaagctgggcgaagtgaaagctaaagcaatggcctacgcctgcaaacaagcacagaaaaaaaacagaaaagcataa

SEQ ID NO: 401041 - DNA, 186 bp, Salmonella enterica
atgaatatttacgctaattccaaatccgataaacgccttccgctatggatcatcggcggtcttcctcgcgattctaaagaaaacaaactcgtcaccttccgcattgaagctgaaacagaaaaagaagcgcgtcgcctggtagcgcctacacatgtctgctttttcgctggctgcattcgccactga

SEQ ID NO: 401042 - DNA, 606 bp, Salmonella enterica
atgaaagaaaaactgtctctgtgggaaaagcagcgccagaaagcgctacagaaattgtccgatcctgagtggagagaatcacaacgggaaaaacagcgtttgagagcacagcgtcagtatcagcgcacacgtgaaaaattggcttcacctgaatatcgtcaggaaaaaattgaagcagtcaggaaggcagaggaacgccgaaaagagaaagctatgagcaaggcttctgccggggaagtaaaaaaggtggcagtaaccaaacgtgcatcacgcggactaaaagggcgctcactgacagcggaagaacgcagaatacagggtgccattgccaccttaccgtgtattgcgtgccagttgcatgggaagcatagtccacacatctccctgcatcacatttttggcaggacagtcgcagatgcacataaatatgtcctccctttgtgcaaatggcatcaccaacatgcagcgccagcagaagtccggacacagtatccctggctggtacccgttcatgctgatggaaaggtaggcggtaagagtgattttatacggcacaatgccgaccaaatgacgctctataagatggcgcttgatttactaccttaa

SEQ ID NO: 401043 - DNA, 153 bp, Salmonella enterica
atgctgattgttttgagtgcgctacaccttccgcctctaactgacaccaccctgtttcatggtctgcttttgttagcgctggcactttttgaacttgggattgagctttttgctttgacgctgtttttcgtaacgatgctggagaaattctga

SEQ ID NO: 401044 - DNA, 294 bp, Salmonella enterica
atggcacgtgctttgaagttttatatcgctggccccatgactggctaccctgattacaaccgcgcagcgttcgatgctaaagccaaagagcttacggagcaggggtatatcgtaattaacccagccatgctgccgaatgggcttacccaggctgaatacatggatatttgcctggcgatggttcgttcagttgatgcggtgtatttacttaaaggctgggagggatccgcaggagcgcgggcagagtacgcgctggctgaaaaattaggcctgatgactgaggtggagatgtga

SEQ ID NO: 401045 - DNA, 672 bp, Salmonella enterica
gtgagcaaccgtttttacaactaccagcgaatcgacggcacagcatttagaaatgtatgggtagtaggcgatctgcatggctgccacacgctgttaatgaatgagctggaccgcgttggctttaacccggaatgtgatttgctcatctctgtaggtgatcttattgatcgtggtcctgagaacgttgagtgcctggagcttttacagatgccctggttcagggcagtaatgggaaaccatgaggatttaatgctcgaaggtatatcgccaacggggagtgtaacgaactggttgataaatggcggcggttggttctactcgctggatacggataaaaaagcacttgctatgtcgctggtggaacgtgtcagacagttaccgtacatcatagagttgaaaaccacgtcagaaactatcgtgatcgcccatgctgattatccggacggagaatatcaatttgggaagcaggtgccttttttcactgttatgtggggcagggaacgcatcagtgagtctatagacggcatcggtggagaaatagcaggtgctgacagattcatctttggtcactcacctgtaaacatgcctaaaaccttctggaatcagcactacatcgacactggtgcggtgtattgcggaaaactgacgctaatgcaggtccagggggcttaa

SEQ ID NO: 401046 - DNA, 954 bp, Salmonella enterica
gtggctgtctttccggtagacaagcccaccagtaactacattggcgcaggtcgccgtttcattatctccccacttccgcgtgaacaggctgaaaacacgccagatggcgtagtggatctgaactattcgctggttgccaaccagtctctgaaaccgttttttcaaagcgagcgcgtatttaacgcgttgggcggtgaagattcgcttgttcattgggtaagttccaatatccacgattgccaggcgcacgataagcgcgattgcagccaccagctaaccactcatttctataacggctctgccgttcgcctgtgctggaagcatgatgcggaatacatgatgaaggggtacagcaagctggacgaccagttatccctgaatcgtgccaactgggttatgaactgggctgcgagcgagttaaaactaccgccagaacgcgatctaagcatggttgaactcactttttgggccattcgccggaatctgaaagatgagctgccagatgaagccgggcgcattgcattttgtcagccaaaaactgaaatccctaccggtacgctgaaagaatcagatatcacctgggagcgcagtacgcgcgagctggtggacataaccgcagagcagatcgtcaacctgtctgtagatgaggattccggcctgctttatatgcgccgaccaaaagcggtcctcggtaaaagcccggcttatctccggtttgtggtttctcgtccgtgcatcggatgcggtggcaaagttaaccacccgttcatgtaccgcgcccgctcgttaaacgaacacgaccgctgggctgttcctctttgcgatgactgcgccagaagcgcagaaaacgatgtccgggcatgggaaaaagcacatggcatacgcctttatgtagccgctaaccaacttttcgatttcgccatcgaacgcggagttatcacgtttaatacctga

SEQ ID NO: 401047 - DNA, 195 bp, Salmonella enterica
atggagcttgatgctgctggtggattttatatccgccacgttacagctatgactaaagaaggattacacaacaaatcagatatcgcggcagagcttggctggcgcgatatgcgaattgcgggacttgaagctaagtgtgccgcattggcctcagaactcgacgccattgttaaacaaagtgaggctgtgaagtga

SEQ ID NO: 401048 - DNA, 276 bp, Salmonella enterica
gtgagcattgagccaacaattacggcaggaactgctttgcatacagggttggcacttatcggctgggtttacatcctttttaaatcaggccagttcgttaccaagacgctttttaagcagtgggataaaagccgcgagaaatcacgccgccagcaggcagtagaagaattttatgatgcgttttctctggaaagcatggagccaggtagcaccatccgcattgctacaaagggcgacctggtaatcatgatgtatcggaaagaggaagacaaatga

SEQ ID NO: 401049 - DNA, 621 bp, Salmonella enterica
gtgagtgaaactaactatcaggagttgcgtgaagcggcgcaacaggcttcgcaaggcgaatgggtcgcatacattttgccgggtgaaaacggtactacatatcctgtacatacgtctgagggtaggcattgtggattctttatggtctggcctggcaatgatggactgaggaatgctggcgccaatgcccgttatatcgctgctatcccaccaaaagttgcgttgtcactactggatgaaattaaacgtcaggaggactcaaatattgatgctatgtgccgtattgtagagcttgaaactaatatcgcggcgctggtggcagagaacgccggactgaaacacgcaatggccgtaactcttgagcatgtgtcggtaacggatgcagggcaggccggagttgctgcgatgattattaatgatgccctgcaccacagcgaaacgccagctaccgacgctttcctggcggaagtgcgggcgcagggggtggatatggctcgtaacgcgatgattgattttgttgatggtgaagttgggccaaacaagaacgttccggggctgattagaggcgcagagatatgcgtaagtattgctgaacagcttcgcaaaggaggcaaccagtga

SEQ ID NO: 401050 - DNA, 171 bp, Salmonella enterica
atggttggttctcttggttgtgtaatgtggcaagaggacgatagacctgaaatcccgtggaactcatggcctggttacattcttggtaagaagatacccaccagctatgaagtaaatgctatttcattcgaccaatataacggtgttgcaacggtgtattttctgtattaa

SEQ ID NO: 401051 - DNA, 159 bp, Salmonella enterica
atgaaaaataaaaagttttggtctacgtttttatttgtctgtgtttgtggcttttttgttgctttagctggtggcgtagaatggggaacggagaactgcggcgtaatggttggtgacaccttattactcgcgggcatgttagcttttattcgttcatga

SEQ ID NO: 401052 - DNA, 375 bp, Salmonella enterica
atgatgacattcaaacattttcttgaccgtccattatgggcggcagccgcaggctatgactttaattatatggattgcatgtcttatgccgcaaatgcatacgaccattcattcatcctgctgcttaactctttaaagatattaccggaaacagaagtaggcgagcttcatttgtggatatttggctttattgtctcactcgttggaattgttttttggccttttattttctggctggtggctgttgtagtgtggtttaagtgcaagacataccggaaaaagtatttcttaggtgatggaatgactgatattgccaaaatgaacattgaaaaatggactaaggaatgtgaaaagaaatggcgcaaaaagaaatga

SEQ ID NO: 401053 - DNA, 1095 bp, Salmonella enterica
atggcgactaagagcaatatttataaagatccgcgctggctgtcgctggtggagaaatataaagacaattgggttctggcagcaaaagaattgtttgatattgatttaagccaccagcaacaacaaattgttgaggctatacagcccaataatgcaaaagctactgtcaccactccgcatgggatcggacgaccgcaagtgcttgctgttattagtaccctttatacgattatgtatcctgattcccggacagtaattgtttatccaaaatcaaatgcttgcaaaaaaggaattgttgcatatgtgtggcaatgttgggaggcattactgaaaaaacaaccttttatcattgagtattttaaggtcggtgatagcggtctgatgttcaatgaattttggggaatgtgcttttgtaactaccgccttaactatgaagatagcattgcaggtcactacgccgaccatctgttattcattattgtggattccgcacatataagcgatcgggcatatagtattgtgtggacaagcatgactagtggtgattcacgcatattgctcacttcaattccgtcaccagaggaaataggatttttttatgattctcatcatgggcgtgctttagctgaagataatccgagtggtgtctataaagccattaagctgagtgctgaggattcaccatttattacccaagaatatcttgatcattttgccgaaaggtatggcgggcgaaatagtgatgactaccgtcgtatgattcttggtgagttccctggtattagggaggctgttcttgaatcagatatgccgaaaacaatgcgtttttcaatgcctgatggcagtgaatggacaatgccattacgagtgatagccaagcatcatgcacagcaccacgccaaaaaacatggcgttacaacattagagtggttgaaatcgcacaccattccactcttcactgcagatcacaatgctatcgttgagtgggcaaaaacaattccgtgggggaatgtcgctgaatacgcccacatgctaaaaccgccgaaagacaggcaagaaattagctggctgacagcagaaaaaatcattgagtga

SEQ ID NO: 401054 - DNA, 774 bp, Salmonella enterica
atgagcacggaaaacgcaaaacgcattttataccgcctgcgtaacggtctggttgttgaaatcgaaccagatatgtcactgccattagtcactattgaacgcactgttatggcctattttggctttgacgaagaacttctgttagaggaagggattgctatctggcgtcatggtgagacaggcaaacgtatgttcttcactgttcgtgataaagagtattcacaggacgaactgatcaaactggcgcagacatatcattgcccgccgattggcttgtttgataattattcatttgcgcagcggctgatcggtgagcttcaattagctgttactcctgtcatattccgtaatggctctcttttggggatatggcgtgtagagcgcatatcgaactacaagccgttcgaccgggccattaatggcattattactggcgtaaaccagcccgtttcatgcgaaaacgaaaatttattgcttgctgtatatgctactgcatgtcgtgttatcggtttggctaaacaggcatttattcatttcccaaatggtgcagaaggtagcgcagagattatcgcgtgtgatttcgaatttacctggatgctacgcgaatatctggaccaaacagtgttccgcgccgaagaactggatatgtatatcacgtcaacgattccagacgatgtgcgagctgaagcaatcgctacagccagggcgaaatgccgtgcggcgattgcagagcaggccaaagaagaagttaaggaagtggcagatggcgactaa

SEQ ID NO: 401055 - DNA, 495 bp, Salmonella enterica
atgattaacgtaaaagtgaagcgcctgcatcctggtgcaaaactgccgttctatgccaccgcaggatcggcagcaatggattttgaggctgttgaaataacaccatgcgtcgatagcaatggtgcaatttcctcaagctggtgggtgtataccggactggctatggagatcccgcccggctggtgtctgaaactctacccgcgatccggattgggctgcaaaaaacatactcgcctggctaactgcgtaggaattatcgactccgattatcgcggcgaaatcatggcaaaactgattactgatcccggcggtgaaggcgtttgtctcaagcctggaatggctgtcatgcaaggcatttttgagcgtgttgaacaagtctcactagtcgaggttgaggaactcaacgaaacggaacgtggtgctggtggctttggtagcacatcggaaggtcgctttgaaattaagcgttcacagcttcagtacgaaaagttataa

SEQ ID NO: 401056 - DNA, 492 bp, Salmonella enterica
atgaaacactattacccatctcttaactgttacccgtcttcctcccctgagctatccggtaagttgctggcgcttcttactgagtcgccggaagcatggctaaagcccgccgatctcaatctccagatacaggaatacggttatgagactacgcgcagggaactaaaacacctggtgtcgtttggttttcttcgcgcccataaggggaaaggctatcaactggctattacgccggaagaagcccggcaactgtttgcctatcgtgaaacacaaacccagtctcgtgtcgttgctgaaattatccgtaacggcagcatttacgcccgtaaattctggctgtccggtggcggcgatgcgtctcagttcctgcgtgccgttcgctctcttgaagagcaaggcattatcgaatccacaaacgtatccgtaccgactgccccgcatattaaacgtcgaatttacaccttcaccaaaagagcaaagaagcatgattaa

SEQ ID NO: 401057 - DNA, 255 bp, Salmonella enterica
gtggtgttcggaatcatgacagggcttgagaccgtacctgtacttaccctcgaaaagaaatggtcaaacctgggcgaagctgaaagctatgtccggcgagtaaccgtcattgctgctgaaaaactcctggcccactatcaggaaaactatcgcgccatgaccgagaagattgatctcgtattttcccgccctacaaccggattcattgctccggttgatgcccgctctcattatccagtaagggggcgcaaatga

SEQ ID NO: 401058 - DNA, 1038 bp, Salmonella enterica
atgaataaaagaacaatcgagaaagagtacaaacagttcctgtctgttgctgaacgttggaaggatctggtggtatcaaactcagtgttccatgacaccagttataacggagaggatttccgtcatgttgctttaacgcatgatccagacgtcttgaaagaagccgaaaaatgcctggttgcctggaaagcatttgtggacgtatgccgcaatgctggtgggaaaaaactgaatatcgttgagacagtgtatcttccgatcccattcatcatcgaggacacgaaccaaagtacgcatattgtcgtatctacagcttcgactaccagaacgtttacgcgcgagagtttgctgaaaaagtacgataaagtcattaagaaaagtaaaaaaagccctatcttttctcaggtcgtaggtgcccttgaagaagaaagacatttctttgcaatggagccggaaggcgaactctatcgcgcacgaaaagatggctataccgatgtggtgctgacctctgatctcacatctgacaacaccctgtctcgcttaagagtgggtgcgcacggggcgctggtgttctcacgcaataaagaattgaagatccctgtggttaataacgtagatgaacgccgtagtattaccgtttattccggtgtgaagcctatcccttgtggcccgctgggcgattttagtctgtatcgtgtgaacgacatcaccaggaatcagccaagctatgtggctaaggcctatattctgcgtagcattgagtccagaaacctgagttttaacaacaaaagccaggcgcttctgaactctacgccgcctgagatccgccaggtcattgaaagaaaggtgaacgcggcgagagaggcgcttatccgcctggaaaaaatggacatggagttgattgatgtcatgatggcatcaggcgatgacctgacaggtgtccggctgaccgatgcacgcaagaaatacggtaaagaaattgaggaacgatacggatacacgttcaatcaaacaatgtcagcaacaaaacttcgttaa

SEQ ID NO: 401059 - DNA, 1509 bp, Salmonella enterica
atggcgcgcagtcgtaagattaagtgcgtcaccagtgatccacgctggcgcgacatggttattaaatatcgctacaactttacccaggctgttgttgatattttcggcatgtttccatcccaccagcagcaggagatcatccagtctgtacagcaaaaggggagtaggaccaccgttacttctggtcacggtacggggaaatcatcgttaacggcaatgttgttgctgatttatctgattctcttcccggatgcccgtgtcatcatcgtcgcaaacaaaataggccaggtaaaaacaggcgtattcaaatacgttaagcaatattgggcgaacgcagtaaagcgtcatgggtggctacagacttactttgtcttatctgacaccatgttttatgagcgttcccgcaaagggatctgggaagttctctgcaaaggttatcgactcggtaacgaagaagcgctggcgggggagcacgcggcacatttgcttctaattctggatgaagcatcaggtatatctgataaagcgatcggggtaatgaccggggctttgacagaagaagataaccggatgcttatgctttcccagccaaccagaccaagtggttatttctacgactcgcaccattctcttgcaaagactccgggtaatccgaaagggatctggaccgcaattgttcttaactcagaagaatctccgtttgttacgccacaatttatcaggcagaaactcctggaatatggtgggcgcgattccattgagtacatggttaaggtgcttggtcagttccctagagagattaatggctatttgcttggtcgtgacgaatgcgatcgggctgcacggcgtaaggtattgctggagaaaaactggggatgggtagcaactgccgacgtgggtaatggacgagacaagtccgtacttaacatttgtaaggtgtccggtcccaaggataaacgacgcgttgttaactttaagttaatggaaatgccaggcactatggacccgttggcctttgctgactttatttataacgaatgtacgccggacaaatatccgaatattacaatcgcagttgacgcagatggttttggttctgatacctgtgcgcagttagtacgtcgtggtgctaatccggtaaggatcaggtggggtaagcccatgttttcgaacaaggacaaggagcggtttgttaatcagcgtgcctatgcaaatattatggctcgtgatgccataaagtcagggcgtatgcgcatagatagcgatccaaaaacggcagagcaagcgtcaaaaattccttttctaatgaatgaggaagggaaaatggcgatgatgcgtaaagagcacatgcgacaaaagctaaatatcaaatcgcctgaccgatgggatacttattgcttcaccatgctggtggactatgtgcctgcaaatgaggatgtaggggcggaaatggcgaccttccgcgatgatgttctggcagagatcgaaatgccggaactggatatttaa

SEQ ID NO: 401060 - DNA, 1365 bp, Salmonella enterica
atgacactggttaattgggaagagcatcgtgcccggtttctggcgttgaaagaggaaaaagggatcacggtaaaggaatactgtgaacaaaatggccttagtttcaacactgccagaaagcatctcaatatgaaaaaaaatgaggtgcaggccaaagttaaaccatcaaagaaccgcgccagaacacgccagcaaccccgtgctggtgggacaaaaaaacagcaacgagcgagcggaaaagaatcagaatttacaaaaactgacaataagacagcgacaagtcaattcagggagatgccacgcaagcgtaacgcggatcatgctgataagcccattgataacagtgagttagtggatttatcaaagggatcatttgccgataaaaaagcaaaaatgatcccagaaaaggataaaaaggcatcttcaagtcagagatcatcgcaaatgatccctggcgaatcagcacaatgtgccaccttgccgtcgaaaaatgtcgcccgtgaaatgatgcagaacggtgcggctgaacatctgcgtaaggccatcctgatggctcaggaacgcgccatagaataccagtcaattgtagacattgaggcggcacggctacgtaaagaaattgatattttaggcgatggcgagccggaagggatacacccggcccagcgtctctgcggcctcatgcaggatgccgcctattacatgaacgacttcatcagccgcctcgcagccatttatcaggcagagcaaaagctccagcaaggacaggaaaaactgattcagggtgcgcggcagcaggcatttaaagaggctgaggccagagaaaaactggacattgcacgcctacaggcagagcagcgtagcaaagagattgactatcgtcttggcgctgatgcacgcgccgccagggttatcgcaaccgctatacgtatgcgcgagcgcgaagaactggacgatataggtgttgcggaatacatcgagcggcaaggggtaagtgttcctgcaatcctggctgcgcgtgcggcgaaagccatcacgcttctggaaccgccaatttctgacagcaatgatgttgatgatgaacaactggacaaagaagcgcgggagttcgcctcactccaggctaaccatccgcagtggttggcagatcgccgtgccgatgtggcaacaatagttgaagacctggggtgtggtgattatgaccaaaatggtgagcgtaaggcaggtgaattcgagtccaacgatgatgaattggatatagacccctccgcaacggctgaaatttacggcgattacgacgcgtcagatacagagtatgacggcggatatgatgaaatcgccatagaatcgccagaggccgattaa

SEQ ID NO: 401061 - DNA, 393 bp, Salmonella enterica
atggataaaatcagcagtgccgaaatagcggatatcatgatcaggaaagactgttatcttacagtcactgagataaccaccctcgccaaagataaatatcctcatcttcacgtatcacgtgtcaatgttaacaatatcatccgtcactttgttcgttcgagcagggctatttgtgagcgcgatgaccgcgtatacccgcgcaaatactggcttcatggccttgacgggtatcagtttaaggtacgcggacgtacaccgcagtttgaccgcctgcttgtaaagaattccaaccgatttatctttggcaagaatcagacggaacgccgtgaactggtgaacatggctaaccgattgtggaatgaagccattaaacgccgtggtgttgctgtatga

SEQ ID NO: 401062 - DNA, 393 bp, Salmonella enterica
atgtacgaagagcagaagctaacagttgaacaagctaaggaaatggactggacgttgcttgactgcaaaatcacgtcatgtcatgcaggtgaaacaaaactcggttatgaaagtaccgtgcatgggtatgcaacccttgccgttcgtgacgtacgcattcgatttaactggaacgcaaagcaactaacgccgttcagagcacccacaggaccacttaatgttgatcaggactatctgaccgtaccacaagttgaaggctatttgctgtcggaaaacgatgggcgcaaggctgattatgaaagcgagttaaggctggcgcaggcggtagtcaacaaaaccaaagggaagtggtccgcaaaagtaagacatattgttcgtttaagcagatggtag

SEQ ID NO: 401063 - DNA, 576 bp, Salmonella enterica
atgactgttttggctaatgcatcgtatacagagcaggatcgcatcttgagtgagttcattggacgcaatgaacgctggtcatgcatgggtgacgcgttgtatcacgcactgtcaaacaaaggggtcaacatcgaaacggcgtcaaaaggcgattcccatgctgtgacagtaacagttcgtggatgcagccttaccgaagtccatcccgaaccttatgttgcgcttgccgaggccgctgtaaaactcctcaagtttcataaacaggctgtcgctggtggactttccattgccaaagcaaacattcctttttctgtcgcaatccactggttaatgaacggattagacgcacgccgaaaatcctggcctaaaggacagtacatatcactcgaacccggctgcattgaaagtaaggacaagatggttagctttcttccggaaggaatattcaacgtgcaaaagggcgtcaaagtctccattcttccacgtctggtaatgatggatggtgctttgcaagcacgttctgactggtttgccagcagcgtagacattatggcaactgactgggaggcattttga

SEQ ID NO: 401064 - DNA, 1212 bp, Salmonella enterica
atgagtcagcaagcagtaacctcctccaccgaagacatcatttctgcggatatcgatacactccgcagccagatacagttgttacaaaagcggactgccggagatgacctgtcaaaacgcctttttgaaagcactcttgccacagcagataaccttgtaaatgacatcaatcagctactggatgcgggtgcatcagactacaacgccctggttgatcagttcgaagaatttcagcgtgtcgttaacgccagcctgatcagtttttcccatgctaccgggatgagcgccacggcggagacgctgggtgaaatcattactgagtatgcagaacagcataaaagagagatcggtacacttgaagccagtctccagcaggccaacacgctacgcgcagcggcagagtcagatttacggcgctataagaaagacttcccgtccagcctggcaaaacgcctggatgacagcgagagagataaccgttcccttaaaagagaacgccgcgaacttaaagagcgtgtatccgaactgaacaaagtgagcattaaataccagggcgagaacgtaagcctgcgtaagaaacttgcttctgctcaggctatcatcgagaagttaaagagtgaatgttctcagcttgggtatgatctgaatcgcgcctgcggtatgccagaacgcccggaatctttcccgctcatgtacgatggcagggatgcggttgcttatattcacgaatacccacatggcctggttgcagaaaccggacagcggggagaatcattacttactgctaactatcacctgcaaattagaacaaaccgtttgctgacaatggatgtgatcccgtcagtttggggaacgccactttattaccgaatgcctgagtttgccaaagactggaacaacgacatcgacgaatgccttcacaataagattatggcgtaccttgaagaggattatcctcgcttgcatcgacgcattatggatgccaaagatgccccggttgacgagttaaaaatgcgtcctgagacgatggaaggcatcaaggacgccggatttgatactgttttcagtgtggcctgcatcccaagcaactttcatgacgagttgccattcatgcagggcgactgccgacaggaaatcattgattcctgtcgggtatgggcgaatgagtgggataaaaagaacgacggtgttgaagatttgtacgggagatga

SEQ ID NO: 401065 - DNA, 126 bp, Salmonella enterica
atgtgcatcggaattgaaaagcaagtgaatgggaacgtggattacacaaacctttttactggcgaaaaagtccatatcacgccggacagttctttagctgatgattgggagtgcgcgccttgctga

SEQ ID NO: 401066 - DNA, 225 bp, Salmonella enterica
atggtcgctgaggggcaaaagaaaggttatccagacctttcgattgatcttgcgcgtggcggttatcacggaatgcgcatcgagatgaagcaagggaataatcgtttaactcccgaacaaatcgtctggatgacacgcctcacagaagcaggttactactgctttgaggcgcgaagtgccgatgaagccatcaaagctatcacggaatatgttgatcttacttaa

SEQ ID NO: 401067 - DNA, 261 bp, Salmonella enterica
atgcgaaagaatcggcttttcacgattgatgatctaaaagattacgcattgtcaaagggatacgaacttgactttcatcgttataagcgtgtttttacactgataaagattgatagtcctaatgaatggagttggatttattatcctcatactgaggataaattggtcgaacgtgttgataatttaaactttgatgggtggaaagtagccattgataagacaattagcagtattaccgaacaggataagataaattattga

SEQ ID NO: 401068 - DNA, 435 bp, Salmonella enterica
atgacaacattgatcgacacagtaaaaccaacggaatcttaccttgaagaaattttgccacaggcacttgttggcaggggagaaggtgaatacctggatgcctatcttggcgtaatggtcgaaaggttgaaaaaagaaccgttattgtaccggctgtatggtccgtggtggcctgctatcaaaacgcaattgctggagcgcggaattactgactttggtcagattgtggatggcgatgtggcaactatctatagcatgagtcgcccggcattgactcttctcgcggcgcatttgtattcggcagaacgtctggaaaacgatgcggtttacaatcaggtccaccaacttgaagtcgcaagctatgctgatgatacagaaccgtatctgtacaccagttatgacgaatctatagaaaaatacagcattgcggggtga

SEQ ID NO: 401069 - DNA, 6843 bp, Salmonella enterica
ttggacaaattactcaattcaatcaatgcagccaccagcattggtggactgattgaccttatcagtcggttacataaaccacgtgcaatcgccgccttcggcgttaagaaggtagatggcgtcagcattcagaagactcgccgggcagctaataacgcggcagtcaatcttcttaacgctttgcctcccggtttcgatggctctcagttgacagacgaacagcgtcagatccttgcaggatacaccggggaaggtggtctgacggatggcgaaggaagtcagtacgagtattacacgccgcaatttatggcagaaggtatctgggatttattttcggattacggcattgatagcggtcatgttcttgaaccgtcagcgggtacgggaattttccaggagacgaagcggcagggaatgataatgacgagcgccgaattgtctccgatttctggtcgaattaaccagttattgcacccggaagatgatgtgaatatcggagcgtttgagtcgcttgcagccaaagacgcaatgtatgaccacgcggtgggtaatgtgccgttcggggaaggtcgttccggtgtggctggattagatcctgcctatgcgaacgaaaagaacgtaggtaactactttgtgcttcgtaccattgacaaggttaaacctggcggactgatcgtgctggtggtgcctaacggcatgaccgacggcactaaatacaagaaactgcgtgacaaggttagtcgtaaagcggaatttctgggcgcacatcgtatgccttccggtacgttcagcgaatccggtacagatacagttgtggacgtatgggtattgcgtaaacacccgcaagccttcctggagatgatccccgatacggatgatgcgacgctaaaatcggcaaatgtcctttgggatacctttctgaaaggcaagtggtttacaaccgaagggaagcgattcgtttacggcgacatggaacgcaccagcttccgcaacactctggtggtgaaaaaggacggtcgtgtatccaatgagtcgatgaaaaccgctctatcgcgccgctttgaaagccgcattaattgggatttgcttggcgtaactactcaggcatggcagggcgccaaagtaggagataagcgccttgtaggtggcatctggcatgagtttgatggcctgaaatgggttaaagatgcgacaaccaaatcctccgtacttgatgtaagccgatatggtgtttcgacattcggtgatctgcaaacaacgttccaatcaacaaacggcattctggctctgtcatgggggcagatatccgcgatcgcttccgactacccatcggttatcagtgatgaagtagcggcaatgattcgctttgctgggaaacaacgcgaaaaagaccgtgagcgcattatgcgcggtgcgctgatcgggcaacttatcaataaagcgctggataagcgtaaccttggtgaaaacgtcgatgatgaactggctgatgccgcacgtctgacggctgccgaagttgctaaatatggcccaccacacgccattaagctaaacgatattaccgaagcgggcgcgaagaactggctgacattcaccgggaacgtcaatcaggacggtgaagcatccgatctgctgtccggacggcttgatgttagcaaaggggctgctggtattgatttcactcgtccggaacaggttgtgacacaccttttcagcgatgttgcccttaatcctatcaatcttgatgacttccgcgaggcgtttaaaggcgaactgcccgaagacgacgatgaagcactggaatacctggcgaaattcgacgatatcgctattgatggatatggttgcctgctaccgatgggccgtgccactagtggtgatattaaatcaaaagtggcactgctggtgggctggcgagacgcgtccacaggagagcggaaggccaactttgagcgccagctttcaaaaatcgaagagaaacgcacgtttacaccgctgaacaaagtcacggtaaaccttaacgcacggtggttggatcgccgcctgataaaagagttcctggcagagcagggctatgacgagtttaagtatacagaacccgaccttaaggttgagaacggcattctggtatccccggacgattacgaaggtaaggacggggtatttactggctaccagctacgaaccgtaaacggcaaaaacgggaacgagttcaagaaagcgaataacaaagatggcttcctgaatcagcttgagaactacctgaacggtgttaaaccgcgcggacagaacgctaacgagtacctggacaaaatcgcccagcttgagacgagttttaacgactggttaagaactcacccgcaggcagatcagatcgcccgcgattataacgacgcctttaacggttatattccatttacccattcagacgcacccctggggcttgaaggcatcagcgggaaacgtataccgctttcttaccagaacgaagaagttcgtcgtctgtcggaagatgggcgcgggattatgggattcggaactggtttgggtaaaacgacgaccgcgctggcactggaagcctataactttgaaaccgggcgaaccaaacgtacctgtatcgttgttccaaaggccgtataccagaactggtatcacgaggcacagagcttctacagtgcagatgccttcgccaatatgatgtttatcggtctggacgaagtgcgcgatggtgacggaaatattcagactgccccagtgctcgaccaggacggcaccccgcgacttgataacgacggcaatccgatcacccgtaatgttgttaaagaatccgccagtgccgttatcgctcaacgcatgaacatgatcccatcgtcgaactggcgaacggtcatcatgacaaaagagcagttcgcatctatcccgttgcgcgatgaaaccatcggagaaaactcacagcaggctgtctttaatgccgccgaaatggggcgtcttgacctggcgtcaggcaagcaccgtgatgcgcagaagaagaacaagattaaggaccaggccgcgaataccggtacagcgaagaagcagaatatcccgtactttgaggatatgaacttcgatagcgtaattgccgacgaagggcataactaccgcaactcctttggtgccgggcgtgaagcggggcaactggcatatttacctaatccggcggtatccaaaatggcccgtgacatggctgtaaaagctgcgtacatgatgaaacgtcacaatgggcgcggcgtcgtaatgctgacagcaactccgctggttaatagccctattgacgccttcaacatgctctcaacggtgatccctcagcacgagtggatgcacatggggattattacccctgacgactttgtgcgagtgttcggtaaaacagccactgttcaggtccagaaaatttctggcgaagtggaagagaaacaggggctggtgggcttccagaaccttgatggtctgcgtggcattttccaccgctggacaacgcttaaaacggcttccgatgttggtgcaacggtaaaaatcccggatatcgtcgaaaacaccttgcagatcccaatgactccagagcagcaagcagcttatgaagagcttcgtaaacgcgcgcaggagttaagtcgtggtgatgacgtcactgtcgatgatgaaggcaatatcactcgcgggaaaccggatgatttcattttctctatcattcgcgacatggataaggtcgctatcgacccggatctttacgccagcgctatcacattccagttccctgtagagcttactgaacaggtgaagtctatagctaataacctaccaaaagtggctggtgggaaagcggcagacgatgcagaagaagcagaggaggatgcgaccggaggcctggtcagtacccgtaccagcaaggttgtagctacaacatttagtgagcatccaaatcacgtcgaattgcgtgccagcattgacctggaggctgaaatactcaaggcaattgctgatgcaggcatcgacatgaaacaggtgtcacacccgatcccgcctaagtatgccgcacttatcgagaaccttcgtgaagggcttaagaacggtaagcaaattatctttatcgacgagaaagcccagcaccagaaactacgtcgcatcattgccagtgcgttgcaaatgtcagagcaggagataggcattatcaatgctacgactgttagccaggctggtggtgttaagctgaaaaaggtcaaaaaaccgaccgaaccgacgccaaacaaagacggtgaatacaaagaaggcgcatgggaaacctactacagtaaactggcccaatatgaggattatctctctgctaaaaatgatgctggccttgaggggatggaaggtattgctgccgactataacgaagggcgcacgcggatcattatctgtaacaagaaagccgaagtaggtatcaacctgcatattggaacgaccgatattcaccacctgacactaccctggactcctgccagtatcgaccaacgaaatgggcgcggtgcgcgcgtaggttctccgcaagagaaggttaatgttcactattattgtggcaaaggcacattcgatgacttccgtctggatacgcttaaacgtaagaaagactggatcaagatggtgatgacctccgatatgtcagagatcgccaatggtgatgcggatgacgctgatgaacgcgccattatgctggcggcaaatccggaagaacgacgcgcaattatggctcgtcagtcgaaagaacgtgaggaacgcctgcgacttaaagcgcaacgcgaagccaataatgctctcgataactacctgaaagcggcgaatgctgccgggaaggatatcggcatgatggaggcagaactgaaaagcgcgatggagcaggcgcaacgataccagagtgatctggatggactgattaagaacggcaccaacaaaaacggacagaaatatacgctttcagcactaagcaaagctaaaaaaagagtgcgtgaattgcgatttgcaatcaccagggcgaaggacgcggatactgttatgaaacgctctcgtggtgatgtggagcgtgctattaagtctggtgtgctggatatcagtatcgatgttattcagaacccgcaggagtatatgcgcactggcaagaacatcctgttgcataaaggtagttactaccgtgcagtcattgatgctgaatacgagacaacggcgattgtacgcgtgacacaaattgagggcgaaaaagcgcaatacacctgccgcgtcgcctggctggatagagcaagtcgccactctcgttctcctggctcaaccatgacattaccgtttgactcagtggttgaagcggtaacatttgaagagggggtggctgaatcacgagaaatagcggcacgtggtgttcaaagccaccagctttcaacctctctttctcgcgatcaattctatgacgctattcgtagcggtgttatgcgggtaaccgggaaagatcgtggcggttggcaaggagcaccggatgtaaactattgggcttatcgtaacgccaatggtcagattcaaatggcctttacctatggcgggatgattggtcaaaaaattagcgcatctggaagtgacgagatagcacctgaacaatggatttatcctgatgtaaacgacgaagcattaaaacgcgaagtcgcgaaaatccagacaggtgataacccacttcgtatttcagaggcagaaggttttctccgtgcattgtttggcttcgattatgagcaaggtatggaggcatggggcgctcaggccactatggatgatgtggtcaaggcgttcgatggctggatggcagggcgcgatctctccgggcgttcacttgaaaaagtgactcaggaagatgtccgcagcttgttccgcaagccaaatggagaaggcctggaaacgtactggcgaggcgtgctttctttccgcgatttccaggggcgcatgaaagccttcaccaatggttcggagatttcgcagatgttcgaacaactgcgaacgtccaaaatcacaaccaaaattgagaaaacacgcatggcgctaaatgcatggcgtgatgcgctgtttgatcagtacaaaatgcaaagtgatgcagatggttgggcgtcacttgcctcgttggcagatcagtcagtttacagtgcgcaactaagcatttctaatgccgataatccgcttgaaacatctgcaacagtctggattaaagcgggggcgttaattcatgcatttgaggataaaagcattacccgtgatgatttcgcagatgcagatagcttgaatcgtcttgtcgggatggctatacgccatgctaacgccttaaaagcgggcgggtatgtggaagagttgcctgatgctctgaaatctgcaacgtgggatgactttgtgtcgcttaaaaatggtggcgctacggagtcagagattgctgaacgtcttgcggcggctaagactgaacgggaagaacaggctgatgtggctgagatcaaggctgacgaggtagcgaatgatgattacattatcgtggtaaacgataagcctattcgcgccaaagcacgtgtacgcggtcgctggtggagcgtaagtgaagacgctggtgctgtttatctcattgcagatatgcccggatcttcatctattcgcaacgcaaaagatgccatcaagaaaatcggtgggcgtttctggaacttcgaagttaacccggttgccgatgtggactttgaccgtccggcctggatggtatcgacgcgctattcaattgatgaagtgcgtaaaatcattgaagcggcggcttaa

SEQ ID NO: 401070 - DNA, 486 bp, Salmonella enterica
atggtgagtaccgatcctcgttggctgatggaagcccgtaaacatattggcctgacagaaatcaaaggggctaaacacaatcctgaaatcgtccagttctggcgagacatcaagcgcggcggcattaaagatgatgaaacgccgtggtgcgcggcctttgttggcgcaatgttagagcgtgttggtatccgttccagccgcttcgagtcagcaaaatcctacctgacatggggtgaggcgctcgatacgccagcgtatggatgtattgctgtatttactcgcgtgggcggcgggcatgtcggctttgtcgttggtcgccgggcgaatggtgatttgctcattcttgggggcaaccagggcgatgccgtgaatatccgcgctttcccaacatcgcgcgtttcaggttatcgctggcctactggagaaccacggaatactgccttacttcctactggtgaggccgccacatccaccagcgaagcgtga

SEQ ID NO: 401071 - DNA, 963 bp, Salmonella enterica
atggatattttaaattcagatgccatcactttcaacatttttgagcggaaaggcaacgctgagtaccataagcatatcaaaggccaccagctaagtttctttgcccggcacagtggattcctgtcgccaacacacggttcgatcattgccgaattttccaacctggcagggtcaactgacgaatacataatccgtcgctcttatgctgatatggctgccattctgggccgtagcgtctccaccgttcgccgtgcattttctgaggctgttaaatgtggaatgctcaccaagcaacatcagatcggcagtaacaatgctcaggtttgtaatgtctaccgcttcacccctgatttcctccagtttatttccatcgttttggagactggacgtaagcagggcgtcaaaattgttaatgccacgaaactggttaagcaactgatttcaaaggttcgttctttttttgaggccaatgcccccctgttcaaaatgaacaactccccccgtgttcatgatgaacaaccaatagaaaagaagaataaaaccgtaaccaaaaaaagagaaagatcatgccaggttcagccaaaggcttcccaggcggtgtccactcagttaaatccagactttctgagtgaagctcatgttgttagcgaagagcagataaacagccgcatagctgctgcaaaagcgcgatccgctaaacgccaggctgacgaccgccacgcgaaacgtctgtcactacatcgggctgctgaaaagttagctcataaaattgcctggattcgcgggacagggaatgcgggaaaggccaataagactgccaacgggctggatttttcaatggattattcagcatatcaggactgccagaccgttgacgaggcgttaaagctcatgaaacaacgaggcaccaaaactgagtttgatgatcgtgagtggcgtatccctgctggattccgaggatga

SEQ ID NO: 401072 - DNA, 996 bp, Salmonella enterica
atgcaatcactgaacaccgttacggatcgcttctctttggtcgagaaaattcgtaagcatacgccgcaaaacaaccgaaattacgttattcagtcggtgcgggagacattgaattctcctgagacgaaagagaggattgcgctcggtgaaatgtatggctattacggccacggtcgccgcgcaatgcattacgacaaaaccaaaagtcttaatttgccagaagtttcagtcgtcatggtggatggaaagcctgtagttcttgaaaacgtaccatctaacaggacgattgatatttcagttgatgacaatggtgttgttacgcatacacaggaaattctggataccgataccgggcgtatagtgcaggggatgattaattcaggtgctggtgggtggtcatgggcgacatctggaccggattcctcagtctccatggtgaagtcgtttcatggtttcgattatgtgacggtgcctaactatatcagccttgacaagaaaagcctgatgcttgagtcagcagaggagagagaggctgcgattcacgcggcgcttatcgctcagggctttacagataatgccgccaccgatcttgtacatcacttctcagcaatgaagagtcagcaagccatgctcgaatcagtacagcgtgaagccctggaatcagaattgatgctccttgaagtggaaaacatgcagcttcgcgacaagctacgcgctcagacagcaatgatggaaagccagggtgaagatgcgaagaaatgccgtcgtatcctgcgtgacgctatccaggaaatgcctgtattcatcagtgcagagcaacgccgtgcattatgtcggatgcagtcagaagatgacgcccgaattgtggcagcgatgcttgagtctctgggggtaaatgcaacgtatggcctgcctgttacgaaaggagagaagcagcaagcactatctcaaaacaacaagaatgtaagcccgttgatctttgtttcgcgacgttag

SEQ ID NO: 401073 - DNA, 1683 bp, Salmonella enterica
atggcaacgaaagataaaaacaaaggctttctgtcggcattgaagaaggccttcaacagtggcgatgtcacgcctgctgatccggtcgtttttacaagcgggcatagtgtcgttgcgcgttctggcctgtctgctttacgtccgggtatcctgggtggcaatagcgatggcatgacaagcgcggcagatacagtatcaatttcggcagaactgcccggcgaccgcctgcaaaagtacaacatcctggaaacgatggcgaaaagcccaaccatctccacagccttaaatattcacattgcgcacgctctggcaccgtcaaaaaaaacggggcttgcgtttatgcttgcgccaaaagacggggcagatactgaatccgtcaaaaggtgtgaagagttaacagccgatttaggggcaatgattaatgatggcctgccgtcatgggccatggttatggctatttttggtgtgtcgtatgttcgtccctatgccgagcaggggaaagggattacgggcatcgagtcgagttattacacattgcctcacttcatccaggagttctatcggggaagccagtttgttggctttgggggtgattacatcctggattctgaaagtatgcgccgggtgatcacagaaccgtggaacctggttgcgatgaaaaacccatactggacaccgcagcataaattaatgcccgtgacttatggggcgaagggatattccctgttgagcgatcagaaagacaaaccgctcactgaaacacagaactatggcacgtcttttctggaatacagttacgaaccattcctgaatctatgtgctgcccttgccgcgctgaaatctacgcgtaataacgctgcaaaaattgacaggcttatcgccctgacgaccaatacgctcgatcctgtcaatgccgcgaactatacgcgaggcgtcagtcaggcattaaagcgccacagtgacatgctggcgcagcgatcaataaatgccaacgccatcccgaccgtgcttaaccatctgatcccggtcatgggcgatgggaagaacggaatcactattgatacgcagtctatccccgcagatatcagtggcatcgaagacgttatgtttcaccttcgtcagctatccgccagcttaggtattgacgctacgatgctcggttgggccgatcaaatgagcggcgggcttggagaaggaggttggcaacagaccgctatccaggcggcgcttcgtgctaactggatacggcaggcggcacagagaaccatttaccgcctgtcggatattcatctcgcgtacaagtacggcaaggtatacaccgaaaccaatcgtccctatgccgtgcaattcaactcgatgaatacggctattcaggaagaggaaaacagagaactggatgcccgcgctaactttgtcgccgtcatctctcaaatcatggatcaaatccagaacaatccaaagctggcaggcagcgaagcctttatgcgttacctgtttaccgaacagttgcatatcgatagcgacacgctgaataccatgctcaaggagtttaaggaaaacgaatccgactcgaataatgagcatggaatgtatgagtccgcgccagcctcgtctggtgataacccggaaaactggacaccagaacagttgattaacttcgcaaaattcgtgatgagcaattaa

SEQ ID NO: 401074 - DNA, 1362 bp, Salmonella enterica
ttgaacaagtcagttacttccgcgctatccgaagcagcagacattaacagtgttattgcgctggtttcttcattagagaggcgagaaacacgccaggggcgcagtagttacgtagtcaccagtaaaggggcagaggtaaagacggcttttaaggtcgttgatgccagcagtctgatcatttcgaacaaccttgacggtacgattaatccggccttcccggaagaactccagccacgtgaccgtacacggctatccagcaaactccaggttaaccgtattgcctccaatttacgcccggcacaattaacggattccggcatgagcagccacggagcgccgatagttggtccggacaacgttgttgaatccggcaacggacggagcatgggtatctggcgtgcctatgagcaagggcaggcggatgaatatcgccagtacctgatcgatcatgcaaaagagtttggtctgaatcctgacgaaatttcgcaaatgtcgatgcccgtactggtgcgagaaagactcacagatgtagaccgcgcacaatttgcccgcgattcaaacatcagcgatctgcaagagatggctgcaagtgaaaaagcgtatgcggatgcgcaatttctcactgagagcgtcatggcgctatttaatccttcagatgatggaaatctactggcgcggtccaatgatgcgtttattcgtgcgtttttgcgcgaaataggtgatacggcgacggcaggtttgcttactgccgatgggcgtccaacgaaacaacttatcgaccgcatccagaatgcaatttttgccaaagcgtacaaggatgaaaggcttgttcggctggtggcggaagagccagatccggaaatgcgtaacatccttaccgcattaaatacggcagccagcgattttgcgcaaatgcagtcactttcaggcgatgttcaccatgacacggtaaccggactggtagacggcatagagcaattgaatggtctggataaacaggctattgccgcgctacaggaagcaattaaccttgttcgtgaagcaaaagataacggtcaggcagtagaagaggtgatcgcacagcgtggattgtttggagatagcactccggaagcggaagcgcttgcactgtttattgttgccaacaacagaagcgctaagcgtatgggggccgctttcaagaaactggcgcaaaaaattaacgatgagcttattcaccagcaacaagcgttaggcgatatgttcggcggcggagatgtcgatctgcgtagcattttgtctgccgtttccgatgagattgaaactgaatttggtgaagggaaaggattgagtctttcgatgttcgaaaatagtcataggtaa

SEQ ID NO: 401075 - DNA, 369 bp, Salmonella enterica
atggctatctctgttttagaacgcctgaaattaggtaaagagctatcagatctaatgcaggcgcagaaaaccgcgccagtattgcaacgcgtctcaattggtaagcagattgttgatgtgatgcttaaactggggcttggggctgcggcccaatcagtatcggatccgcaggcgcagccagatactgttgcaggtgacattcctaagatagtgacagacttccttggaggtgcattcacaaagtccacgcaaatggaatttattgatgcgctacgtgggatctcaaactatgtaggcgagttccttacgttggaacaggctaaagagcagaccataagctgggtgaaagccaacggttatgcaggctaa

SEQ ID NO: 401076 - DNA, 1944 bp, Salmonella enterica
atgattaaaaatcctattcgtataaatattcagtccacctttgctgacacgttgacggggtacgtcccaggaagatggagtcgtgaagagcttactgatgatgaccttctcctcgaagccgctacgcttgaagacatcgaactcgcctatatgggtaatgaaattctcgttgaaagcgatgaggcgatgtttgaatccatcacaacgacaaggatcaggcttgcgcagaccatgcgggcatttgtccgctcactaaaccgaggcctcaacggtacaaatatatctgccggtactgatgaagttggcgaagatgagaatgggcgaaacagcattggtggagcgataatcggtcgtgttcgtcgggtagcaaacattccggtattaacggcacttatcccgcttactgacggtcagaccaccagcattatcttccattcccccacggcagacggtgcaaagattaaaaacagcgatgaactggtggctttccagttcctgcttaataaacgcaatgtaactcatgtagttgcccccatcggcggacgagatgtttcattgagtcaggtatgccaggcgctatcgaacctgattgagcgcaatagtgaaaagttcaaaaaagctaaagcccgtcaggacaaaatgaaggcagatattgacggttatctaaatgaagccgacaaattggcagaagagcgttctgtattgattggccaggtagatacagcgcaacaaggtttagctgaaaagcgagaaagccttgtcgaactgcacaaaaaattagatgaccagaaaacacttaatgcacagttgcaggccaaacgtgatcaacttaaatcagcaaaagaaaaggtgaaaccggaacgagcgttcaacgaccagttgcgccgggtgaaaagcaatctttctaccgaaggtcgagcgacgcttgataatggagccgtggttatgtacgtcagcactggtgctgataattatgtcaccatagcagcaccagaaggcaactacagcattgaagcaagcgacgttaatggtcagagcatggctgatgccgcaacaaaactactgaaagcctatcgcgaacataaagctgaacaatacaaagtggatgtgttgccaggcaagccagagccatccgttcagccggaactacaaccagatccagaaccacaacctgggccgcaatcagtatcacagccagagactcaggatgtaggtaaatatcgctatgcactgcaatcccgtccggcggctgtaggtgcggtaccggaaggaaataaaggcgtacttgaccgtcctgaccaggcggatccgtattacgaatatgctcgtcacgggataattacttatgaccgaaaactgacagataaagaagtcagccagtatgaattacgctatctgcctgatgacgatgaactgaaggggatggcgaacgagctggttgcgtccagcatggtaaaacatattgatggctatgtagatctgtttggaagtgacctgaaaacattcaaggcgcaagttaaaattcttttccgcaaagcgttcccgaacgtggcatatccacttggtgatggggagaaccttttcattatggacgtgtataacgcccttcaaaatcattcaagcgaagtaaaaacagatcctgtagttgagccagaatcgcaacctgcacaagcaccagaacaggagccggagccagaagaagcgggtgaatcagcaagcgaagctgaccaggaagcagataaagcgcttgagtacctgaaatccgttccggagcagttcacatcccgcgatctgacggtcataagtgctgaacttgatcatgtgcaggaagctgcaaacgctcttatcagtgctggtcgatatgacgagaacgaagcaactgtaggtgcagccgttgactacctgatcaatattctggctgaaattcagcagggaggtgcttaa

SEQ ID NO: 401077 - DNA, 618 bp, Salmonella enterica
atgtcaaataaaagccagtatgtactgcttaattatgatgaactcaatgagaaaggtctttcgaagctggtaaaagagatttcgaagtccggttataaaatcgccaaagtggttcctgccgggaatggcaggaaaaaagacggcattatgacccgtactttctcactggttggcaacgatgagcagacaatggaaatccaggttaatgacactggtgatatttctggtatcaaacttaacgggaaaatagttccgttcaaaccagtcaaaaccctggctgcattaggccagtcaatcgctgggttattcaatcgtggcgcaacatcattccaaaaaacgttggcacgtaaactcgccagagccgcgaagaatattgatgacgacaacaaaaaacgtcagggtgtgaaatcgaatgcacagaaacttgcggaagcaaaacaggcgcgcgattcaatccaggaggatatagcgcaggcgaaagaaaaactgacgcaggtacagggcaactccgataaaaccacccaggagattggaaatgtcaaagctgctttggcacaagagcaagcccaaacacgctcgctgaaagaagagatagcacggctggaggatgaagcatga

SEQ ID NO: 401078 - DNA, 450 bp, Salmonella enterica
atggctaactttgagaattattttattttgatcatggcggcagccgcgctaatagaccgctttatatttcgtcgaaaaagcgtattcatcactgcgataggtaaagcggttgttaaagagtctgcgttggcatttcctgtctcgctaagcgtaaagcgaagctggattagtgatgctcagatcgaatactggctacaagatttgaaaaatccgtctgtggtgatttcaggtaaaacgcgaacaattgatacttcaaaacgtggcaaacgagaagagtatttgttgatagatactcgttaccttgagcctgcccggtgggatctcaaagtgaaacttacaaacgggaactgccgcctgaatccattctatcgaattttccctattaatgatgtcatcgtgcgccagttcaccattacgaataagggtaaaggaggctggaatgtcaaataa

SEQ ID NO: 401079 - DNA, 324 bp, Salmonella enterica
atgttcgctaattacgaaaacctgattctggctgtacttatgtccttgttaagcggaactggcgtattcctgcatgggatccgcgaacagcgtatatcagcgtcattactcaatcttgctactgaatgggttatagcgttgatcgccgggcttacaggattttacgttgccaaaagccaggggttagaggaaagcctgctttacatcgttgtgctggtatcaagcaacaacggcagggagataacaagtgcggttaaaacgaagctcatcagtgtcctgaatggggtgattgggggtggaaaaggtggagcaaataatggctaa

SEQ ID NO: 401080 - DNA, 588 bp, Salmonella enterica
atgaatcaaagaatcggctatgccagagtatcaactgatgaccagaacctgcatctccagcgggatgcgttggttgctgccggttgtgaaatcatttatgaggacaaagccagcggtaaaagtactgcccggccagaactagataactgtctaaaggctcttaggccaggtgatacgttagttgtttggaggctcgatagactcggtcgcagcctgggtgatttggttaaagtcgtgactaatttgattgatgaacggggagttggattcctgagcttacaagagcagattgaaaccaatagtgcttctggaaagttgatttttcatgtatttgcagctttagctgagtttgagcgtaatttaattagtgagcggactagagctggacttgatgctgctagggctcggggacgtaaaggtggcagaaagccgaagctcgcaccaaaggatattcgagagattaaggtattactaaaagatccaagcatacctgtttccgatgtggctaaacgatttggtgtatctagaacaacaatttataacagtgtcggggtcataaaacctgaccgtgagggggcaagtatatga

SEQ ID NO: 401081 - DNA, 1830 bp, Salmonella enterica
atgaacgctttccactttcaggatcttttaagtgagtcagcggagcctcttgttcgttatgaggcctgcaaaggtatggctcgtggttatgctaactctgtcatagatgaccagtatcgacttaaaatcgccaggtcttattgcgcagctttaataaaatcttattgggacgaaattaacgctaggcacaatagcaagcttaaaattttttcaatcccaactgattcagaattggccgaaattactctcgatgcagaggatgttgccaaaaacaccggtaaagtgatcgcacaattccctgatattgatgcgggctatcttatcggatcaatatacacagccatgttgcctactgcttatcgatctgatttaggagcttattacactccgccacctttggtatctaggcttcttgatttggctgaagaagcaggcgttgatttcagtaccgcgtcggtaattgatcctgcatgcggcggaggtgctttccttgcgccagtcgctatgcgaatgctccaacgttccaaacatgcttcaagtgaatggaagcttgcgcagataggcaagaggctcaaaggggttgagatagatccatttgctgcctggatgacgcatgtcttattagagtgtgtattaatagaacattgcattattgccagaaggcgtcttgcaaaaagcgttatcagtatttgtgatgctctaacgtaccagtcacctgtagattttgatctggtaataggcaatcctccatacggtaaagtttctcttgatacagaagttagagagaagtttagccgctcactgtttggtcatgccaatttatatggtcttttcaccgacctcgctttaagactcgccaagcctgaaggggtaatagcttacttaacacctacatcatttttgggggggcaatatttcaaggcattacgtgagctgttaattgatgaatctgcgccacgagcttttgattttatatcaaatagagagggtgtttttgacgatgttttacaagaaactcttcttgcaacattcaaaaagtcagcaagaaaaacaccggcaaaggtttcattgttagtacccgaggggcttaacgaagcaagagtagagcctattggaaaggtatcaattattaaaggcgatggtccgtggctaatccctagagtagctgaagacgctgcattgttaaatcgactcaagaagatgaagacccgtctccctgatctgggctacgttgtttcgactgggaaacttgtttggaatagacataaaagccagttacgtactgaaaaaacaaaaggggcactacctcttgtttgggctgaatcggtaacttcaaatggctttaaattctcttcggtgaagagaaaccatgtcccttatattcaaattgaaaaaaaccagcgacatcttgtaactactgattcatgtgttttggtacagcgaaccacatctaaagaacaaaatcgaagagttctcggtgctgtcataccacaagactttattgatcgatatggtggtgtcgttgtagaaaatcatttaaatatcgtttacgcagatacacttatacgggagttgagcgtagaaactattaacggattacttaattctcaggtctttgaccgtatataccgttgcataagcggtagtgtagctgtttctgcttatgagcttatggctgtgcctttaccgagcttggacgacatgaaaaagctggagaagatcattgcagcaggttctgatagactctccatcgagaagtgtatagcaggattgtatggagagagcaaacttgagctggccacatgtaccaagtctggaggtgattgctga

SEQ ID NO: 401082 - DNA, 1092 bp, Salmonella enterica
atggagagagcaaacttgagctggccacatgtaccaagtctggaggtgattgctgaacgcttacctctaatattccctgaagggacagaaaatcgtaattatgtcatccgagaaatggctgcaagaactctctatgttatgttctacgcaggagctgtcgagggtgctgatcgttggattaggccaagccaagtaaccgacatgtctgatgttcaggctgctctcttgacggacgaggagcgtcagtcttgggttaaacaggcgctatctagtaagaaagatagacctgttacgacctggtatgctccaaattcccgagaacctgtcagagatgaaactattcgatatgggtttatagcccttggtgccgttattgaacgcactggtttgcctgtgacaactcctcttcctaaatacgcaatgtcaaaagcatttgcagctctgttcaatgtagatttaattggggatgatttagaggctttaattcgtagctggcagaactctcaccttaatgctgccgctttaagtcgaattcgattacttggtgcgcatgccactgccgcagcatcagatcagataaccgcgacattacctaattctgggttagtaatgcttgagtctggtccgtcaggcgtaataggtaaggcggtgatcgaacaattcgctcggaagtttttaaagacgccagccgtattatggttgtctcagtcaggggaaaaggttggtattgatcttgcgagtaggttaaagctcaaaattgacccttcaaaaacgttacctgacgttattttagttgatcttgggaccaagactgacggtagtgacatgttatttgtttttattgaaattgttgcttcagatggtccaattaactctatgcgtaaacagaagctaactgaaatagctattgaagctggcttctctgcccagaatcttgcttttgtaactgcatttcaagatcgttcagccgctccattcaaaaaagcaatgtcagaactcgcgtggggaacttatgcgtggttttgttctgaaccagataatttaattgagctaagagatggcagttctataatcttgtcagagcttttatag

SEQ ID NO: 401083 - DNA, 645 bp, Salmonella enterica; identical to SEQ ID NO: 317054

SEQ ID NO: 401084 - DNA, 327 bp, Salmonella enterica
atgcaagagacagagttgcttaatagtgttttgaaagaactggctgagataaaaaacatgctcgctagctcgtcaggagcagacaaagttaatttggaaaaggtaatgctgaacattgatgactgtgctgagctgacagggttgtcaaaaggtcatttatacaagttaaccagtcaaaatgttattccgttttacaaaccaaatggttgtcggatttattttaagcgggaagaagtgatcgattggctacagtccaaccgggtcaagacaaacacagaaatttcaaaggaagtgagttcgagaataatcaggggccaaagaaattaa

SEQ ID NO: 401085 - DNA, 1158 bp, Salmonella enterica
atgaaagtatctatcgaaaagcgacagccagaccgcgaaggaaaacgctctttgcgcttggtatattactacggttccaacgttgaagacgggcaacgtaaactgaaacgttcacacgagccactagacatcttcatctatgacaaaccgcgctctccagcagagcgagagcacaataaagaagctttaaggatcgctgaagctgtgcgatctaagagacttcttgagagcgagacatcaaagcataagctggaggatcgaactaaactctctgccagtttcttcgattattacgattcagttaccgatagcaaagcttctggcagtaaatccaattattcaatttggatctcagccggacatcatctgagacgctaccatgggcgagcagaactcacattcgaagatattgatagagcctttcttgagggttttaaaacttatcttttgaaaagtgcaacgacgaaatctgatcaactgctgtcaagaaatacagtaagcagttacttcaataaaataagggcggccctgaatcaggcataccaagaggggattatcagagataaccctgttcggacggtgaaaagcgttaaaccagaaacaaaccaaagggtttatctgactctggaagagataaaagctatggcaaaagctgaatgtcgctatgacgtgcttaaacgagcctttctgtttagctgcacaacaggactgcgctggtctgacatacagaagctagtttggtcagaagtggaagaatttgagcaaggccattttcgaatcatttttaagcagaaaaaaatccagaatagaggaacggcacttcaatacctcgacttaccagattcagcggtaaggttgatgggagagcgcaaggataacgatgaacgcgtgtttaaagcattgcgatacagcagctataccaacgtagcgctacttcattgggcaatgcttgctggaataaccaagcatgtaactttccatgccggtcgccactcgtttgcagttaaccagcttgcgcggggcttagatatttattcattatcacgcttgctgggccacagtgaactgaaaacaactgagatttatgctgatatcttagatcaaagaagaagggacgcaatgcggagctttcctgatatttttgccgacagtctttaa

SEQ ID NO: 401086 - DNA, 1035 bp, Salmonella enterica; identical to SEQ ID NO: 292989

SEQ ID NO: 401087 - DNA, 489 bp, Salmonella enterica
atgagtcttttgaatgaagttcagaaattcattgaagcccatccggggtgtacttccggagacattgcggatgcttttgcaggttactcacggcagcgcgttctgcagtcagcaagcaagttacgtcagagtgggcgtgtggctcaccgttgtgaaggagatacacgcagacatttcccacgcctgactgagagagcgcaggagccggaaccacaaccagttcgtgaaaccaaacctgtgcgcaatttctatgtcggcactaacgatccccgggtgattttgtgcctgacccgccaggctgaagagctggagtccagggggttataccgtcgtgctgcaacggtgtggatggcggcattccgagaaagccactcccagccagaacgaaacaattttctggcgcgtcgtgagcagtgcttacggaaaagcagcaagcgagctgtatcgggtgatgagtggtatctgtcagggaattacgtgggggcttaa

SEQ ID NO: 401088 - DNA, 237 bp, Salmonella enterica
atgcttaatccgttgatcctcaatatttgccgtttgcttcagcgtaaaaaaacatcaattcctacagttgggcagtggtacaccacgcctgcagggcatgttctacgtgttagcctggttgaccgtgaatgtcagaaggtgatttgtgaaccgctgggccgtaattaccgcatcagtatgccgcttatagccttttgctccggaaaaaacatgaagcatctcggaggtgcagcatga

SEQ ID NO: 401089 - DNA, 837 bp, Salmonella enterica
atgaacagtttaacggcaaataaccgtttgtcgcaacagctggtggtcagcgtcgctgaacacctgttgttacggcatgaatgcagattaccaaatcacctggctgtaagtaaccacagagaactttacctgactgtggggggcgagttgtgcaggaacttaaccgctggtttcgtgacggaagagggctttatgtccatgttattcgttgggagccagaaacacagcgcgttatctatcttcgcaaagactacccgcatgagtgctttagtcctttgtggaaattcaggcgtgattttgttgagtgtgaaggaccaccagcacattgattctgccattccgggacgttacactgttcaggcaccttataaagcgggtgtcgggattggcgtcctggaattgcatacggcgacaattggcgcgttagcgtcttttttgttgctacaactcagctatacccaaattatggtgggctgggtgggggcaccgaaaggtgcgccggtttccgtatgcgccggttacgccaaccctgctcagttcaccaccagcgaaattggcgtttccggtggtggaagttatccattgcatacggaggctgccatcatggctactgtcccagccctctctcgtctgaatgatgaagacttacataaactcagttatgtaacaactgcactacgtgctctgcgcaaggtaactctttcggatccgcaggcgcatcaagttctggtagaaacccttcttaacttgcaggctgaacgtattcgtctggcggataaggctaattttcatattcaccgtctcctgaatatcagcggagggcatcgtcatgcttaa

SEQ ID NO: 401090 - DNA, 234 bp, Salmonella enterica
atggctaaattcaagtctcttattgttggcgccaagtttgaggttgcctctaggaaaaccacctgtaaacatgacaaaaagcatgtgattacaaaaggtgagttcaggctaagcgtaaagaattcgacgcaaggtgaatcttactattgcctctcctgtgccaaaacgatggttactgaaagccaggccaaactagaaggtctcaaaagcgagctcgattccctctcactttag

SEQ ID NO: 401091 - DNA, 1779 bp, Salmonella enterica
gtggcatttgaaaaaaaagacatcacagctaaacacaagttaagaagaccacagaccgaggcattcggtaagataagagaacactacgaaaaaaaagaattgaaagaagttgggctcatactgccggttggttgcgggaagtctggtcttatatcaataactccatatgcaacagaatctagccgtgttcttataattgcgcctggtaaaaaaataagagaccagttagctaaagacatgaagtttaatgagcctgataatttttacaacaagtgcgaattttttgatttggtagatgactatccagaagtttgcataattgaggcaggtggtaagactaatatacacgacattaggtcaagtgatattgtcgtttccaatatccaacaaatagctggagatgagaataaatggcttgagcagttggatgctgacttctttgatttgattattgttgatgaagcccaccacaacaaggcaagcacatgggttaaggttaaagaaaagttcccaaatgcgaaggtgataaactatagcgccactccaatgaggagtgatggccagttgatgagcggtgaaattatatatagtttccctgtggttgaagcaattagggaagggtatattaaaaggcttcacgccaagatgattagtccatcaaagttggtatatgttgatagtgatggtaatgaaataaccttaacaaaccctgaggatattaaaagattaggtgaggaagaagcatcatttaggcgcggcgttctcatgtctgatgaaacacttagtacattggtagatctttctattaaggaactaaatagacttcgagaagagtctggggaaaaaaggttaaaaatcattgcatctgcactgaattacggtcattgcattcagataaaagaagcatttctggctagaaacctacgagctgattatgttcactctaacgaagatggggctgttaatgatagggttttctctaaactagagaatcatgagctagacgttattgttcaatcgaaaatgcttggtgaagggtttgaccacaaatttttatctgtagctatggttggtagcgttttttctaatttgagcccatttgttcagtttgttggccgagtaatgcgagtagtaaaacaaaattcccccggcgatttagttaacagaggagttgttgttttccatgttggtgcaaacattgccaatcggtggagtgactttaggaatttcagtcaggccgatcaggacttcttcgctgacttgttaccagaagttgaagatgttgattttggctccgatggcacaagtgacagggatcctgatgagacagggggtagtaaccagcttatacctgtcgaggttactagcactgatggtgtaacggcttccgagttagatccaatcggagatttccaagagcttaaaaaagaactggcatctttaggtatgacaactaatgaggcgatagagattttgcgtaggtctaggttgagcaaacaagatcagagaagagctggaagacaggctattaacgatcttgttaatcatcatgcgggcttgctcattaatcaacttgggttcaaaccgaaaggccgaaatttcaacaagtctcaagataactactcatgggttgtaagagagttgcataatcgagttaacgaacatattgggtgtaacagcggtgatagagaaaatcttagtttagagcaggttgatgaagctaaatcagctgtgcctaaccttgcagaagacatccgacaggaatggtctaatggctaa

SEQ ID NO: 401092 - DNA, 924 bp, Salmonella enterica
ttgcataacgctgcactcgaactcttcaacgagcgcttaccgcacaagccgtacttttcggacgatctgcattttggtgtacggattgccggtaaggaacgcgccattctggcgaaatatatccagttcaatcagcctcatgccatgttctggctgggattcgacgttgatcgcgccggtgccgccatcgactggagcgaccgcaacgcgcccgcgcccacgctgaccattaccaaccccgacaacggacatgcgcacctgctgtatgcgctgaaaacctcgatacgcaccgcgccggacggaaaaatgaagcctctgcgctacgctgccgccgtggagaacgcgctacgcaaaaaattagaggctgacgcggggtattcaggtctaatctgcaaaaatccgaaccacggccactggaaaattgccgtgtggcagccggaactctacacgctggactggctggccgactttctcgacttaaacgcagcgaatgacaaagaaatcgtcgccgactacggcttaggccgtaactgcaccctgttcgacagaacccggaagtgggcatatcgcgccatccgtcagggctggcctgagtacgaccagtggctacaagcctgctatgaacgtgcctgcgtttataacctgcaatttgcagcgcctctggatgaaaatgaggttagtgcgatagctaaaagtattgcgaagtggactggtaaaaacttttcaaaagaaaccttttcttcttatgttaagaaaactcactcatcttccattcaatcattgagggggcgaattggaggaagtaagagtagaggcggaggaagatatatagatgatttcagtgaaagaactctggaaccatggttagacatggggatcagccgagctacctactacagaaggaagaaaaaaagtggcatttga

SEQ ID NO: 401093 - DNA, 1569 bp, Salmonella enterica
gtgatcgttaaaattcactcacgcggtgcaggttccggcagtggtcctgtggattacctgcttggaaaagaccgtcagcgcgaacaggccagcgtactgcgcggcaaccccgaacatgtgcgcgagctgatagacggctgcgactttgcccgcgcctatacctccggcgtgctgtcgtttcaggagccggacattgcagatgccgagaaatcacgcctgatggacgaatgggagcacacgctgctgcctggcctcgaccgtgaccagtacgcctgcctgtgggtggagcaccgcgacaagggacggcttgagctgaattttgttatcccgaacatcgaattacagagcggcaagcgcctgcaaccctactttgaccgcgccgaccgcccccgcgtcaacgcatggcagaccctgaccaacgaccggctggggctgcgcgacccgaacgacccgacttaccgccgcccgctgacgcaggccagcgatctgccccgcgacaaacagcaggcggcagagaaaatcaccgccggcctgatgaacctgatgcagcagggtgtgatccgcagccggcaggacgtagtgacgcagctggaaagctacggcctgaccgtggcgcgggaaacgaaaagcagcatcagcattgccgatccggacggcggccgaaatatccggctgaaaggaatgatttatgagcgagattttaaatttggcgaagggcttcgaggagaaatcgaagcagcaggcgcaggataccgagcagagcgtgaagcgcgagttcgtgaggctggagacgtctatcagcgcggaactgcaatcaagctcgcagagcatcagcaacgctatccgcgagcagaacggcaggctgacgggcatgctcaggaagtcagtctcaacagcgatggcgtggatattcttctgcttcgcactgctgatcggcatcatgggcgggataatctggtttcagggcacgatcatcacctcgcgcctgagcgagatggacagctacagccagcagctggcgaacctgaaagcgaaaagcggcgcgggcgtgacgatttacagcgacgacacgcgccggaacacctacctggtggtgctgccgaagcaggcgcacggcgtggaaacctacacgtcgacgaccgacaacaccgtggtgaaatacacagcgaaataacccctccagagcgccctgaaacgccacagcgcgtttttaacactgaggacgaccaaaaccatgaccgagatggaaaaacagcttctgagcgccttagagagcttacagacaagctacgagcaacagcagcaggcgtggcaggacagctacagcagtttgcagcacatgttcgaggctacctcacaggcgctcacgcacagcgaccgggtgtgtcagcacttgagcagtcaggtggacagcttgcgcgcgcaggtcgagagcttgagcaggaacgtcagccgcttgatgcgctgatcaggcagcacgaccgcgcctacgccgagaagctgcgtgagcagcagccagagccggagccgcagaaaaaaccgacccgctactatggcccctcgatgtga

SEQ ID NO: 401094 - DNA, 195 bp, Salmonella enterica; identical to SEQ ID NO: 263874

SEQ ID NO: 401095 - DNA, 336 bp, Salmonella enterica
atgcctcataacccaaatacctggccggactggctggagttgtttcagagctggtggcgtggagacacaccgctgggtgcagtgattatgtcgatcgttatggctggtttgcgcatcgcctattttggcggtggtggtggctggaagcgaaaaacgctcgagattttgctctgtggcgctctgacgctgacctttgcatccgctcttgaatatgtcggatggcctaaatcgctttctgttgccattggtggtggcgtggggctgatcggtgtcgatgctattcgtggggctgcaatgcgagtaatcggtaacaaatttggtagctcgaaggagtaa

SEQ ID NO: 401096 - DNA, 477 bp, Salmonella enterica
atgcaggcactaaattcccagcgtaaagctttcctggatatggtggcatggtcagaaggaacggataacgggcgacaaccgacacgtaaccacggttatgatgttattgttggtggcgaactgttcactgattactccgatcaccctcgcaaacttgtcacgctaaacccaaaactcaaatcaacagccgccggacgttaccagcttctttcccgttggtgggatgcctatcgtaagcagcttggcctgaaagacttctctccgaaaagccaggacgctgtggcattgcagcagattaaggagcgtggcgctttaccgatgattgatcgcggtgatatccgtcaggctatcgatcgttgcagcaatatctgggcgtcgttacctggtgcaggttatggtcagtatgaacataaaatcagtgatctgatttcccggtttaaagaggctggtggggtggtaaatgaagttgagctataa

SEQ ID NO: 401097 - DNA, 339 bp, Salmonella enterica
atgcaaaacagcagatcacactggagtcacagagaacccaggaagatatcaaagtggctgttgcggatgatgattgtgcttcacgtcctgtgcctgctgccgctgctgaccggttgcggaagtacgcgaacagtttacgtaccgattccggcggtaccgttgccagcaagcctgactactgaaactccccagccagtcattcccgagccgctgacctatggggccagtctggatctgaatgtgagcctgctttcggcgttgggacaatgcaatattgacaaagcggggattcgaagtatcgagatgcgccgtaacgctttgctggcagcaggcaaatag

SEQ ID NO: 401098 - DNA, 351 bp, Salmonella enterica
atgccccctcgaactccaaaagcctgccgcgttcgcggctgccgtaataccacgacagacccgtcaggctactgcgaaagccacaaaagcgaaggctggaagcaatacaagtcaggacaatcccgtcatcagcgcggttatggttctaagtgggatgttatccgtgtgcgtgtgctgcaacgtgacaaaggcctgtgtcagttatgtctgcgtgccggtgtggcgcgtgaagcgaaaaccgttgaccacatcatccctaaagcacatggcggcactgatgccgacagtaatctgcagagtctgtgctggccgtgtcataaggcgaagacggcccgtgaacggcttaagtga

SEQ ID NO: 401099 - DNA, 270 bp, Salmonella enterica
atgtccgatccgatgaaagaactggaagcggcgattgaatcgggacgttttcatcatgacggcaatcccatcatgacctggtgtatcggcaacgtggtcggcaaaaacatgccgggtaacgatgatgtggtgaaacccgtcaaagagcaggcggaaaacaaaatcgatggtgcagttgcgctgattatgacggttggcagagccatgctgtacgaaaaagaagacacgctgtctgatcacattgagtcctacgggatccgctcgctttaa

SEQ ID NO: 401100 - DNA, 198 bp, Salmonella enterica
ttgtttcctccggataaccggatccgcgatctggacaactataacaaggcgctgtttgacgccctgacccacgcgggtgtgtgggaagacgacagtcaggtgaaaagaatgctggtggagtggggaccggttatcccggaagggaaggtcgagatcactatcagtaagtacgagaaaacggcgggtgcagccgcctga

SEQ ID NO: 401101 - DNA, 423 bp, Salmonella enterica; identical to SEQ ID NO: 19122

SEQ ID NO: 401102 - DNA, 1872 bp, Salmonella enterica; identical to SEQ ID NO: 19123

SEQ ID NO: 401103 - DNA, 225 bp, Salmonella enterica; identical to SEQ ID NO: 377187

SEQ ID NO: 401104 - DNA, 294 bp, Salmonella enterica
atgggtattcgaaccctttgggcgaccaagggttcgtggagcagggggctagtgctgttcaatctcatccttatgagggcgaaccatagtgttggagcagacataccgtttgcacactatgggcataaggagcaaatcatgaagaatgataaattaaccaacgaacagcaggcgcagaacaagtcaaacctgaaaaagtgggctggttacgcttggaaattaatcaaatggggtattagactgtttgatttagttactcgagcactggactacttcgaagggggtgatgagtaa

SEQ ID NO: 401105 - DNA, 897 bp, Salmonella enterica
atggattcgccattttataaactcaaaagtaaaagaaaactggcgaatttgctttgtgttagtcttgatgatttatactctttgagaaaagatgaaggaaactattccgtttttgagcagctttctaaaaaagggaaagcacgaaaaatacaaaagcctttagaaaaactagaacttgtacatacacgaattgcaagtttgttatcgcggattgctttgccagaatatctgcactcagggaagaagaagtgctctaatgtgacgaatgctaaagctcatcttaataatgaaaagatgatgacaacagatattaaagctttttttccatcaactacaagagggatgatattttcttttttcttttcggtgatgaaaatgtcatctgatgttgctgatgttttgtcccacatatgtacttgtcatgaccgattgccaacaggtagtcgcatcagtatgccgttggcatattttgcaaattcaagaatgtttggtgaaatatatcaactttgccaaaagttacgagttaacatgactgtttatgttgatgatctcactttttcaggtagtaacgtaaatcgattgttctgcgctgtaattcgtaagatcgttaataagcatgggcatgttatacacccaacgaaaacaaaactatatgccagagataagcctaagttggtaactggagttattgtattaggcaatgcattaaaagttaggaatgagcagcattttttgatggctagggaaatagattattggaaaataattaaagacgccgaaaatgcgagagaaacaatcattgccaaaaagctctttggtcgtttgcattcaatgggagtgattgagcaacgttacaaatctaaggtgcttactttaaaggctaatactgcaaattaa

SEQ ID NO: 401106 - DNA, 360 bp, Salmonella enterica; identical to SEQ ID NO: 388124

SEQ ID NO: 401107 - DNA, 129 bp, Salmonella enterica; identical to SEQ ID NO: 388177

SEQ ID NO: 401108 - DNA, 432 bp, Salmonella enterica
atgcggagaatcacgcaggtagaccaaagtacaggggaggaattaggtggttttgtagcagtgattcgtcccaaacaaaagtcatcattccagaggcactttactatgaatcaagccgcgctaattaccattgccaatgagctaaaccatgaccagatgcgtgtactgatggccttgctcgcagagctggattacgagaactacatccaggtcgcgcagatagatattgcagaagcgctaactatgcaaaaaacaaatgtcagtcgtgcggtaaaaaacctgattgatttcgggatcatactggaaggaccgaagattgggcggagcaaaacgtaccgcctaaatccccagttcggctggaaaggtactgtcagcaaccacaaaaaagcactgaaaaacggcctcagcgttatacagggcggcagaacctga

SEQ ID NO: 401109 - DNA, 969 bp, Salmonella enterica
atggcgaactacgcgataatgcgctgcaaaaagctgacgggaatgggaagcgtggccagcgcgttgcagcactgctaccgagagcgtgagacgccgaacgctaacgctgaacggacaccagaaaactactgctctgtgtccaaatcaacggatcaggcaatggggcgtgtgcgggagctgctgccggaaaaacgccgtaaagatgcggtactggccgttgaatacgttatgacagcaagccctgagtggtggaaagaggccacaccacggcagcaggcggagtttttcgcccgctctgagcaatggctggagaagaaatacgggaaggatcgtgttgtggcggcggtggttcaccgggacgaggccaccccgcacctgtctgcgttcgtggtgccattgacgcaggatggacggctgtccgcgaaagagtttattggcgggcggtcaaagatgcgtgaagatcagagcacctacgctgaatcagtaaaaaaactgggtcttgagcgcggcatcgagggaagccgcgccacgcatcagacagttcagcactactacgaatcgataaaccgtggcacccgtagccaggtatcgatctcgccggaggcgctggagccgcgtgtattgcggaagggcattttcaccaaagacgtggaagatcaggcagccatagccaaacgtctaagccacgcagtgaacgatggctttgcaggaaccatcgctatggcctctcagagcgcccagaacgcaaaaagagcgcgtgagctacagaagactatggatgcgcagcagaaacgcctacagagcgtcacagagccttttaaggggctttccagagagcagatgaccgaaatcctgatgatggctcagcggtttaagcagcaaaaccaggagaaggagaaacagcagcgtgttgaacgtgagaaacagcgacagatgcgatcgcgtggcatgggcggtatggagcgttag

SEQ ID NO: 401110 - DNA, 621 bp, Salmonella enterica
  misc_feature (313)..(322): n is a, c, g, or t
atgacttttttttcacaaactaatggctttattgaaaatacggaaacagttttttccattattaatacaatcattactggtgttggggtaggagtggcttataaatggctaagtaggcgtaatcttgaacgagcacatgatgcagctaacgattttcttgacgagatgacagcaataccattgaaggcgctaactctagaaatagaagtggtcaagactgtagtcgctataggaagatcaattgaacgcgaaatcgatactgattacgccgaagaatgccttaatttgatgaataaagccaacacaataaagnnnnnnnnnncaataaagttaagtttctttaataaatatgaacgagttcataggagaaacgtaaaaataaaacctgaggtaaaatataaagagttagaagaacacttaatcaattatacttctttcttgtctaagatatttcaaactgctgctgatggattctgtcgcgctgagaacactaatgggttaaaatcagtttttaatgaattgaatgctcatcgtggaaatattaatataatgacaaaaaacctgagcattgcttgtggcaaaaatcaagaaattactttcaatgagtatttttcattttaa

SEQ ID NO: 401111 - DNA, 1557 bp, Salmonella enterica
atgatcagaggtattggcattcaaaatttcagaagttttgttgataggacttttatagatataaaaccaataacagttttcgttggcaaaaatagcagtgggaaaagttcattacttcgtacattcccattgcttcgtcaatcagtagaggaaaatactaccggacctattttatggtatgggcgatatgtcgattttggcgattttacggacgtgctttcccgaaacactgaaaataaagagatcacgtttagcttctccttgcaagtaccacctgagttaacgcaaagatacgcttactatcgatttagagatttagctgatcaaaatacggatattgatactgaattaacagtttactctaaagacaaaaaaacaaaaactaaagccataaatatttttattaataatgcaacagtaacgctctctattgacgatagtagtaatgtcaaactacaaatagaatctgaaggtaaaatattagagcgagatggtatcattgcaaaaaacctaggtcagttcataccaaacatccaattaaaaggaaaggaagaagtatccactacatccatccctttttatttacggcattctaggaatggcggggcattggaagtatcctttattgattcagcatctaaagatatcaaaaaatacttccatataagatctgatgtaaataaagtcacagaagcattcaaaaaaataggactagttcccaagaattatgtgagtcaattattagcttttttatttaaagaacaaagtacattcagaaaaaactttgatcaccacagcgacgagattatagatgagttatatccatttgtaattggttggaatattaatattcttattgatataataaatgctgctttgtctgattcatttagaaatgtaaaatacatagcaccactacgagctacttcagaacgattttatcgttttcaagatttacaagtgaacgagatcgaccatactggttcaaatttagcaatgctgttaaattcactaaaaccaactgagaagttaaaattcgaatcatggacaaaatctaactttgattttatcattaaggttgagcaaactggctctcatttcgcaattctgataaatacaggtggtaatagcgaaaattacaatataagtgacatgggatttggctattcacaagtattacctatagttacagctatttggctcgaaactgaacgcagaattgcatctcccaggagacctattacatttatcatcgaacaaccagaattacaccttcatccttcatatcagaataatctcgctaaaatattcgcaaaggttgtaacaacagcaaagtctaataatatagacttgaaaattatttttgaaacacatagccagacaatgatagaagctcttggcgaatgtattgaagacaatatgggactttcagaaaatgatgtctccatattaattttcgaaaaaaatgataaacaacaaacaatagttcagaaatcctattttaacgaagacggttttcttcaaagctggcctgtcggttttttttcaggtaggtaa

SEQ ID NO: 401112 - DNA, 1113 bp, Salmonella enterica
atgcttattaatatagagaatgcaaccgaagagaacgttttggatagcaaattcacaacagctattgagaacattttacgagcgtttgcagagaggaaacacttaataatcgcgcaaaaaaaattcttcaattgcataatggaagaaaaaggtggtatttatagtatgacctcaaaaaattttgcatctgaagcattggctggcctaatagaatatcacgcaattttgaatcaggtttcattctatatctcagttgattttaccattcatgatacatcatttagatggatcgatcttggcgaaaaatataaattcatatgtggcccattatattttaatgattcatcacaattgcagaaaacaaaaatagtttgtgaaaatccattagattctgatttttttaaaatcatagcggcattctatgctcgtaatgaacatctatcacgatgttcaattaattttaatgttcttaacggcggtggtggtagtaccaaggatgttttcgaacgtacaattcaaaatgacgaaatcgctttttgcattgtagataatgataaaaaacatccccaagcaccttacggaggaactagcagtcacttccttggggaaaaaataaaaagatcggggcttgtagagattttagatgtacatgaagtggaatcgctagtgccattagatactattgaagaggtattaaaaaatctaaatctaatgattaaaaagaaagacacactggattttttaaaaaaactctgctctatagatgaatcagcaaagttctattttgatcataaaaaagggtttaatataaaatctgcgttagaacttgataacactcatggggatttttggcgaccaatattaaaaaaactaaatcatgaatatgattgtgaatgtattgaatcgaaaaaatgtaaatgttgtaattcatgtttggcatatgaaggatttggagatggcttactcaataataccttagagtatattcaaacagggaatctacgacagtataatcccaatttatcttcccaactgcatgataaatggtatacattggggaaaaaattttttagttggagttgcggcccttataaaaaagctagggtaagttaa

SEQ ID NO: 401113 - DNA, 4041 bp, Salmonella enterica
atgaattcaactttctatcttgaacgtaatcttacgcatgatgaccggatctacactgagacagagttgctagcaacatcaaagtacattgttgtactagcagaaccaggtggcggtaaaacagaattgatgaagagccttgctctgaaattaaacacttctgtcataaatgccagcttttttgcccacgtgggagcagagaaagaaaatagtccactggtgattgatgccgttgatgaagtcgccaggatcgaccaatcaggtcttcataaacttcttgcgcgcgccaggacatcaaagccaactagtgtaatcatgtcgagccgatcgagcgaatgggggctggcctctaccggaaattttgaaagatttcttggtttttcccctatggttgtaaggctgagagaattcaatcaagatgaacagcgagccatctttaaataccatgcgccagaagaagatttttttgcatttcagaccgaagtgacacggtttagtttagaaatgctgttaccaaaccctcagtttctaaaaatgttcaccgatgcctatctagaaagtggcaggtgctttgctgacaaacgttcaatctttgctttagcggtagaacgactggctaaggaagtcaacccaaatttcccgaaggcatctatatcgctttcagtcacacagaagatttcattttctgctgaggtttatgccaaacttctgttgtcgggcgcagaaggagtcagcaccatcgacgcgactgcgaatcggatgtatcccacgctatcagcattatttagcggcaatactgcatgttacgacattttgtcaactcagcttttcaagcccggcgataaggaagaccagcactgctcggtccacaagatcgtcgctgaatactgcgccgcaggttatctcgttaaacgaatagccgaccctgcggatgttctcacattaacaaaatgcttacctgtgattgcaccgaacggtgcagtcagagatgaactgagaggtctgctcggatggatggcggcattaggaaacaagtcggtacaggaatccattattgagcttgacgcttatgcggtactggcgaatggtgatccatcgcagcttgaacgttcatcaaaacggttacttcttagtcgactcaaagaaattgaagctgcagatccctactttcgtcgaagcgatttttggcgccgatttagtgcggctggttttttcacgcaagacgttgttgaagaaataaaacctcttttaatgatgagcagcgaaggtcatttgcgtggtttaattttagaacttttggcagattctccagttaattttaagttggcacctgaattgagcctgctttatttaaattccaacgaatctgaaagtattcgaaaattagcaagcaagtgcttactcaatatcgataattacgagttcgcaggtgatttagctgttttgatttttgaagccagtaatatatcacttgatattgcagctaatatcatcgaagttatagggccagaaaatttcaatcacaaatatctttctggattcttacgagtctgtgcgaatctttatcccggtcacaaagaacaattagaaagagtagtcggtactcgttattttattaagagactcatttcctgtttttcattgcatactatcggacttcttctggatgaattaacccgtaatctttattgccattgtgggaaagaatcctacgaatgtgactgtcggaatggaataagcaagattgtcggctcaatggttgatcgctattttgaactcactcaaacacagcttgaccctgcgaagatctggcaatggataggtaatctcaattttcatcatcaatgtcaggctgatcaaagcaaatcggtacaggtacttcgagaaaatcacatgcttcgtcaagagattattgctcatgtattcgggccattaacggatcgtgaagaaatattcagcattaaagtagagaaattcgacgggcaactacactcacattcaggccttaatttatggagaaatgactataaatttatcctcaatctggcatttgcaatagataacgctgatctgtgggctagtttccttgttagtcatcaacgttaccgaaaaaaagaagaacagggtccagatgatttgagagcacaaatgcgtcggcatgccctttctaaacccgcgtttatgcgcgaatggagccgatttaataatgcgatgaaattatctgagcgaaagcaccagcacttgagattcagacatagccgaaagatgaaccgctatgatagaaggcaacgagagatccacgccaaaaatatagaattcgttaatgaaaacagagatattgtagaacgaggtcttcactggggttgtctggtgcgttttgcagaacttgtgctcatgcttccggaaagaattgaattagaatttggtgacgacaaactggttcggggggcattaagaaattgtctggattttattgcttcaaaggttcccactcttcccgagcttgcgactctgcaatgcgaatcaaaatacaggtattctgagacaattttgtatgccgcttgtctggagattctacgtgcagaaggaaatcttgaatccgttaatattgagttgcttacagcgttaagaaccaatattcacatgggatataactcagtttcgacagaagaacgtgatgctctacaggcggagattgatcgcatcatttttcctgatagtgaaagtgctgaaaaatatctccgacaatatgttgaaccgcagctatcccaaccatgtccccaccctgaaatctggatgttaagtggagaagaagtctttagtcattcacgcgctaaactttccattgaatggctttgtcgttttactaatttaccccttgactcagtagacaaactttttgaaattgctgcccaatatggtgaacgtgaaaatttaatagaaattattgaaaaattttgtgcaaatattatgtcagaatggcctaatcctacagataatgaaaatattgaacgcaaacgaatattctggctggtacgtgaattctacttcttggataatattacagatatttattgggcatggttaaggtctaataaagataatttattgcatttttataaatactctggacacatgagtcgaagtgagaaccatgcctggccagaacttacttctattaaagttgaagccattctagatgctttcattgagcaatggccacgagttgaactgccggatctctggggtagtaatagtcctaaagaagaaaaagcctatcgttttttaaatgagctgatttggtttattaactcagacattcctgacgaagcaataccagtgctaggtcgtcttcttaacaacccacgtttcgctagtttgcataaggaattacaaagcatatattccactcagatcagaaaaaaagcgctcagggattttgaaccaccgacaccggatgagatagttcaacgtctggattgtaattctgtcgtcactgttgaagacttgcgtcaattagtccttcaggagcttaatgatttccagaaagcgattgatggaggagagttcaattcggcagatcgcttctatgagaaaaatgaacgccttgatgaggtaaagtccactgaaatcattgctgaacgcctcaatttaagacttgaaccccaaggcatatctataactcctgaacatcagttgaaagatcaaaataggagtgatttcacggcgtctaaactgattggtggtaaaagaaggttgctggtaacggaagtcaaaggtcagtggcacagagagttatattctgctgcttcagcccagctctatgaccgctattctattcatccagatgccgaacaacagggtatatttcttgtgatatggttcggatcgaatgaaatcgttgctggtcgcaagaatcatggtattaaaacggctcaggagcttaaaactcatattgaaaccgttttaccgatcgatcttcgtggtctgattgatgttttcgtactaaatgtttccagagagagtcatagtaaatattaa

SEQ ID NO: 401114 - DNA, 1149 bp, Salmonella enterica
atgtttgaggcgatccagccattggatatatacaataagaacatcaacatactgattggctcaggcgcttcagcagacttgttcccgacgctgtccctagccatcaagaatgcagagggacggcgagaaacgatcgaaacgctcgccacacagtttgaaaactcgccagagaagcgaaccgcgttattcatgcactactacaacacatgtatttttccagtgcagacattcaatccaagtttcgttacaacgaataaaggaaaagaaaatctcaagaattatgagatttttttaacaacccttttggggttgttggatagaaggaaagacctcaaccgcaaaatcaatatttttaccacaaactatgatggatgcctgtcccatacagctgacagccttctcatgaagggatcacatgattttgtggtgaatgatggcacctccggatttcacacaaagcatcttcattccaaaaacttcagtacgtttcaatgtcaaactggagtatttgaacgaagcaactatggcatcccgcagctaaacattatccatcttcacggttcggtttactggtcaaaaagcggtgataagattgaagtcaattaccgcaatgattttagtaaccttttgacagaagagactctcggaaatttaaatggatattccgaatttcttggtgtcgatggcaacagaactgaaggcattccatccttggcattcagtcaagaccagatagatattttctggggggagtacaataagctacctattgtcaaccccactaagtggaagttttacgaaactgtcttcgaagaacactactaccagatgctcaggctattaagctatgagcttgaaaaaccaaattctatactcataacatttggcttttcgtttgctgatgaacacattctcagacttatccaacgctccctctccaacccacaacttcatacttttatttgttgttatagcaacaatagtgcaaatagcatgcgggaagaattcaaatcttggaaaaacgtccaagtaattggacccgctgaagatatgaatatggacttcaccaatttcaataaatatgttttctcactcacgccagacacttatgaacctccattaaaagctgaagaggaggatctgatatga

SEQ ID NO: 401115 - DNA, 1776 bp, Salmonella enterica
atgagtatcatcgtaggtgaggtcattgcagtgagtggagtgcgtatctcccttcgaatttttgaagactccaatcatgagactattttctacggaggagttaagtacagaggtatttcacttcgggagcacgtatctattcagcgaggctttatagatattgtctgtcttgttgaaggtgaatttttggatgagaaaaggctagagactgatgccgagaaggtccaatatgtacgaaacgtggatgttcgccccattggttatatagtagatgataagttttttgaaggtgtgaagtacatgccgatgatccgagacaaggcatctctactcagcgaacttatggtagggaaaatttatggggcggacggtaaaactggcttttctattggctctatgctcaaggagaatgtacccatcaacctcccatggatgcgattattcaacagccatttgggcatatttggtaacaccgggagtggtaaatctaatacgctagctaaactttatactacactttttaatgagcgactccaagcattacagcacaagagccagttcgttatcatagattttaatggtgaatacacggaagatcagctactaccagctaagaataagcaaatcacagtgctggactctaaaaaagcaaagcacaaattcaagattgaaggcgctcatttttgggatgtcgaaaccctaagcctcttgtttcaggcaactacgaacacacaacagccatttctgcgtcgcgttctatctggtaaggaaaaatttaaaactacgccactcaaaaggtatgtggaaaaggtttttgaaaaagtttttagtacaggtgaagcgaaatcagatgctttggatttgagccgtgaaattgcacgcatgattgactgcgaattgcttcaagatcatttaaaaggaattatttattacaataaagataagtattttaagcatgccagcggcacgtactataattcaaatggcaatggatttgacgcgaatatcaaacccattattgatgagagtgttaatttagatggaattgatcaattcgacgaactaatattgcggtgctacctccaactctgttcagatgttgtatttggctatgcccaatacgaacacattcaaccggtgctagctagggccaaatcatctatatcggctctgcgtaatgttcttgaaatcgttgatgtgccacaacctccgcatctcttacatgtcatctctttgaagaaatgcaagaatgagataaaaaagatcttgccactacttgtagccaaaaatttctatataaatcataaagatgcagagaatcttaaaagccctccaagccggactctgcaccttatcattgatgaggcacacaatattttgtcagagcagtccacccgtgagcatgaaatctggaaagactaccggcttgaactctttgaagaaataattaaggagggacgcaagtatggcgtatacctcacactatctagtcagcggcctgcagatatttcacctactattgtttcccagattcacaatttcttcatacaccgattggttaacgatcgcgaccttatgctattagacaatacaattagcacgttagattccagttctaaggctctcataccgactctagccaagggctgctgcgtagtcactggaaccgcttttgatcttccaatgatattgaaaattgacccgctgctaaaacagcatcgacccagcagcgacgatgtgaaccttgaagaactttgggcgctacctccagcttaa

SEQ ID NO: 401116 - DNA, 324 bp, Salmonella enterica
atggagctttcaaaagcagcagataccctgaaagagctgggtcaccctacgcgcctgagcgtgtacagagagctggttaaagccgggcatgaggggctaccggttggcgaactgcagaagcgcctcgacatccctgcctctacgctgagccatcatctttcctcgttgatatcagtttctctgatacgccaggaacgtcagggcagaacgctcttttgtcatgctcgatatgaaaaccttgaggccctgattgccttcctgacagaagaatgctgctcagggactaacaactgcctcaccatgccccagaagacggagaagtaa

SEQ ID NO: 401117 - DNA, 741 bp, Salmonella enterica
atgtcatcgatttctgggattgatattgttacaggattgctcatccctgtagttctgtatttgataaagaaagttattgactggacaggaaaaatcgttggtaacccacgacctaaacgaaaataccagtttgataaaattcctgcggataagaaagtagagattttttcaaaaattgatgcattaaaagaaaaaacaacaacgccgcatgttcttgttcagatgaaacttttatatgaacaactgggaatgtatttgcctgtgtggcattgtcaccagttggtttcctgtatggcggctgaaaatattagctcactggatgtacgtctgcgaggttttctgaaaaacactattatcggtcactatcctgagaaagggttcagcgttaacactaaagttgtccgcagattctacgtgatatctatcttgttcgggatatctgcagttgctatgtttatttatgcaggatgggataccgtctctactttctggaaaaacaaagagacagggttgtttatcttgtttttattgatttatgcatccgctattattactgttataggttatataatttcccagattgaagatatctacctgggatctaaatttgggcatttattcgagacttggctcaagaataatccaccgtgtagcgatgtgtctcctgatacttctgcaacaatgccagctgaggagcaagaaacatccgaaggcccccaagaagagtctctcgcgagttaa

SEQ ID NO: 401118 - DNA, 459 bp, Salmonella enterica
atgttacccgaagatatcgtacattcactttctcgctggctatccggtatgaatgatgtagagaaaatagccgcactcaatagcctgcaacgatttatacattatcatggaccgtttcgcgatgaacccatcggttgcgtacagtgggtaccgactgagtgtgtcacagcaaacgactataatccggaggccattagtctggtcgagcaaaaaatactggagttatcattggtacaggatggattcactcaacctgttgttgtcactgtaggacggactgaagatctccattatcacgtgatggatggctttcagcattactttatcagccagaaaccagtattacgtaaaagacttcgagggcatattccggtaactattatccgtccccggcaagatgctattttttcattgattgccgcagctactcgtgaacaagaggcgctcaaaacgaaatag

SEQ ID NO: 401119 - DNA, 861 bp, Salmonella enterica
atgactgaacctaaaatgacatttccagcaagcggaaacattatcctctacggtgactgctggcctgtggtcagtgccgtgcagagtctggtaacgtcgattctgcccaacagtcagtgcaaagtgattaccactctgccttcacttttaaaacaactcactcgggatccaagggcgttattgattttatgcctcagaccacgggagcatgttttccttttctacgcactcagacaggagttatttgaccatccggcactgataatcagcgacgagatcttcttcaatgacaaactcatgctcagggtgtggggggatctcccctgtatgatgcatgacgaattatccatgatggtcaccagtcagcaactctgtgaactgcttactgtccctcccgatcactgccctgaaaaaagccgtctggcagattttctgaaatctccgacgctcccggaaggattatcagaggtaccacagatatttcacctggaagaacctttgatggactatatgtcattgctgttataccgggagatgctcgacagaaagatcacaccattccggatgcgaatgcttcaggcaatctggtctggctatcagacccgcgaagagctaattgctgaattagatgccccaaaaagcaaaatatggaatgagaaacaccggcttctaatccagctggggatggatgcacgtttacgtaaccttttgtacggtacccggttttgcctttttctacagcgaaccgcatttatgtcaccagctgaaacggagcatctacgggctgaagccagggaacaactgacaaccggaaccgaaaattactgcacaaaaattatcacaaacgaagcaacctcatga

SEQ ID NO: 401120 - DNA, 477 bp, Salmonella enterica
atgagttcagagaaaatgtatccccccgaagacaacgcgtactatccggcacagggccacaatgatgcctgttttatcccggaaagcgtccgccagtaccatggcgaacccttgtatatcctggtggcatggtggtgcatgcagcaacggaactgggtgaaccgctgccagatttcggaagcattccgcattcctgtccagcgcgccagctacctgatggcttatgtgcgcaataaaacccgacgggtaatcgttgaaagtcgggaggtgttactggttaacaatgtgtaccgctatgaaatacaggtcacccgcgtaatgcctcctgagtctcgtaaaaaacgaagtccgggagaaaaaaaacacctgacccgcagccgtataggtaatgcagacacctcacaggccacgcttctctggaacaatctgagaaagggaaatccacaccccgtgaaggagggcatggataatgactga

SEQ ID NO: 401121 - DNA, 1029 bp, Salmonella enterica
atgctgaaaagagggttacaggcactcctttgtacattaaccatcctgacgagtatggcgtgttatgccatcccccccggatgctattctgccagtttgggtcaggacaccacgtttcatgtgaacaacattaccctccgttcaggcagtcacccgaatgtgggggatatcatctataccagtcccgcctataccatacagtaccagtgccaggccggtgactatagtgccacaacctaccgggccaatctggtaagcctgccagactttaacgtactcagagatcaactcaggaatgctggtctggcgctacggatgctggttaatgatggtatctggtactctggacagttaattaattacaccccgtttccatttggtgatgcaatccctgctggacagaattctcaggttcagtccgttcgtattcaacttcagattgaagtggtcagttcgcctcccaatgttgtcagcgtttccctgtcccctcacaccgcctttaaaatcataatgggtggcattccggatcagaattacgggttaaatatcaacacttcagggttccgtctgcagtcgattcccgactgctttggccgggtgagcatcagtcccacctgggtatctcttggtcatatctataccgactatccgtcatcacagcaccttccccgtcagataccaataaccataactgccgggcaaaacatagggtgtaccggccagttcagtgataattacgatattttactgagcacgacgttcagtgctcctggacagaccctgaccagtgccagccaggctgttgctctgactaatggtcagggggaacccaatggtctggcactttctctgaaagataatgccggaaacccgctcaccttcgatagtccgtcaacgtttggcaatctcacacaaagcgggggcgatatatcccggacatacacagcgaacctggatgcaatccccggtactgagctgaaaacaggttctttttcggccaatgtggtcgtgaacatcacttatcagtga

SEQ ID NO: 401122 - DNA, 726 bp, Salmonella enterica
gtgaaacagagcagtattaacggggccatcgttttcgccctggcggtagcgtggagccagtgtgctcagtcagccatcaaccctgaccgtacccgcgtcatcatgaacagcaatgagaaaacggtctcggtcaccctgacgaacgagaacaggacgatgccctttctggcccagtcatgggtggaggacgctcagggcaagaggagtaacatgctgatggtcctccctccgctgcaacgcattgacggcgggcagaaatcacaggtccgcattatgcaggtacagggcagcggtcttgaccacctgccgaaagaccgggaaaccctgttctggtttaacgtcagggaaattccccccaaaccggacacagagaatgtcctgcagctcgccctccagagcagactgaaactgttttatcgcccggtatctgttgccaaaagcagtaatgatatgtcggagaaaaaactggtggtggagcgtgagggggaacagctgtcgctgaagaatcccacgccttaccacatcaccattgcctggctgggaacagaccgccagcatcgtctggccggtttcagagagggcgtgatggttcctccgtttaccgacctgccggtaaacgccgtgctgccagccgcaacaacgaaattatgggtcggttatgtcgatgactacggcggtctgaagatgaatgcgtatacctgcgacagtaaattctgtgcgcggtga

SEQ ID NO: 401123 - DNA, 2610 bp, Salmonella enterica
gtggtcgcgcaaaccttcccggacggggagccggggaggttttgccttttaaaaagcctctctaaccctattatcccaaaacatgcagaacctggatgtatgaaactgacccggcttgccctgatgatacccctgacgttatccgcccgcgttgttcacgcaacggagtttaatgtcaacatgctgaacacagaggaccggcagcatgctgatctctctgctttcagcagggatggatatatcgcgccaggtaattatttactggacatctggctgaacagtcagtctgttcgtcagcaatatcccgtcagtgtggtcccggtaaataacaatgccggtgcggacaaaaacgatggttcagctatctgcgtgacatcctccctggttgaaatgctcggtctgaaagacgatatagttcgcaagcttaagcccgttccgggcgctgacaatggacactgtctggaactacgatcacaggacagtcaggtgcgttacagcgcgtcacagcagcgcctgacctttgtgatacctcaggcctggatgcaatatcaggacccgaactgggtgcccccctcccgctggagccagggggtcagtggcgcgttgctggactataacctgatggccagtcgctatatgccgcaacaggggaattcatccaccagttacagtctgtacggtaccggcggtctgaatctgggtgcctggcgcctgcgcactgattaccagtacaaccgctacgacagcggtaaaggattatcacagtccgacttttatctgccgcagacgtatctgtttcgtcccctgcccacattgcgatcaaaactgacactggggcagatctggctcagttccgccattttcgatgccttccggtttaccggtatcacgctggccagcgatgagcgaatgctgcctccctcactgcaggggtatgccccgcaggtcagcggtattgcaaacagtaatgccgatgtcactgtcagccagaacggtcgtatcctgtaccagacccgtgtgtcccccggcccgtttgtcctgccagacctgagccagaatatcagcggtaacctggacgtcaccctccgtgagagcgacgggaccacccgaacctggcaggtaaataccgccagcgttccgttcatggcccgacaggggcaggtgcgctacaaagttgcagcaggacgtccgctgtatggcgggtcacacagtaacaggatggtcagtcctgattttctgctgggtgaagccacctggggagccctgaataatacctcgctgtacggtgggataattgcctctaccggcgactatcagtcactcgcgtttggtgcagggcagaatatgggggctctgggggctgtctctgccgatatcacacggtccgatgcccacctgtcgcacggacaaaatcaatccggatacagctaccggattaactatgccaaaacgtttgataaaaccggcagcactctggcattcgtcggctaccgcttttcagaccgcaactacctctcgcttcctgagtacctgcaacgaagggccattgacgggggagacgtctggcacgaaaaacagagttataccctgacgtacaaccagtatttctcagggccggccatgagcgcagccctgtccgtcagccgccttgcctactggaatgcggattcaaacaataactacatgctcagcctgaacaaaacgctcagtatcggcgacattcggggaatttccgcctctctgtcactggcccgtaaccagtacgccgggggaggcacacagaatcagatttatgcctccgtgaccgttccatggggcgatggtcgccaggtcagctataacgcgcagcgggataaccggggaagcatgcagcaaaacatcagttacagcgattaccacaatcccgacaccacctggaatatcagtgccggagcccgacgggatgacagtacccgtaacaccagcaatttcagcggcagtatccagagccgtcagccctggggtcaggtcagtgccgacgccaccctgcaacccggacaataccgcagcctggggctgagctggtacggctctgccaccgccacggcgcacggagctgctttcagccagtccctctccggaaacgaaccccgcatgatggttgacactggcggggtggccggggtgccggtctccggagacagcggcgtgaccaaccgtttcggtattgccgtcgtcagcggcggcagcagttatcagcgtagtgatattgccgtggatgtcacccgcctgcccggagatgtggaggtcagtgactccgttatcagccaggtactgacggaaggggccattggttaccgccgaatcagtgccagccagggggctcaggttatggggagtctgagactgtctgacggaaaagcgcctccgttcggtgcacaggtggtgtctgagcaaagcggtcggacgctgggtatggtgggtgatgacgggctggcttacctcgcaggcatcagtgagggtgaccgtcaggcactggcagtcacctggaatggtcaggtgcagtgtcggctgacactgccggaaaaactgtcgctgaaccaggggccgcttctgctgccctgccggtaa

SEQ ID NO: 401124 - DNA, 582 bp, Salmonella enterica
atgttcagaaaaacctcactggccgtaataactgcagccaccatgctgtgcggcaccactgcttttgcagctccaccagcaaccgggcctttcgggaacggcaccattcacttttccggtaccattactaactccccctgcgctgttgctcccggggatgatgccattgaggtaccttttggtcaggtgtcttaccgtgaactggccactacgggtgcaacaacaacatcccagccagtagtcattcacctgaccggatgtgcctttgacccggacaccgcagccaccgacgcaaaccctgtaggcctgatgtccaaagccaacgtcactttcagtggcacagcaacctcagataagaaaggttacgtcagcacaggtagtgcctcacatgtagccgttcagttactcaaaaatgataacagcactgtcattgaggctaacagcataccgactacggccgacgctcaacaattgcaaaccggtaataacgaactgcgcttctttgcccgtctcctggctatggataccgtctctcctggctctgtagatgccactgtgaattacaccctgacatacctctga

SEQ ID NO: 401125 - DNA, 585 bp, Salmonella enterica
atgcgtaaagaaatatcaattacatcaccagataattatctggcgacaatacagtttcgactggatgaaattaccaatagtaatattgatcaggaagactcacatgaggaaacgttgcgttatcatactctgacctgggtaaacacagcctcttcaaatggaaaaaaaatagcattcatcgcaccagtttttctggtccggtgtctgagtcctgtaaccgggccagcatatggcctcccgccatcgtgcgaattaccggaaccattcacaactgacatcccatctctttgtcatattttactgaacgagcttcagcgactgggcatgatgaaaaggtatgaagagttaaaaaacacattagagttaataaaacagaactggctaaaagaaaagctggttttggctaactggtatctgttgatgtcagggggaaattattggatatacagtgaccagagcacatgcgatgataatgttctggattcagaaataacccgctgtcttcaggcacacggacatcttcattcagagatagatgcctgtgtctttttttcacactttgtgtgttggtcaacaactccataa

SEQ ID NO: 401126 - DNA, 534 bp, Salmonella enterica
atggagtatttaaacgatgagctgacagaaatgcagcaagtaaagcgggtggttcagcaggccatagaccagtacccacgtctggctgtatttcggttgacgctggactgcccaggccctgagacaatagggtgttttcaggataccgtctaccgacaagtaagtgaactggcagcgacccgacaattgagcggcaggccatcgccaccaacaattctcagatggattggaagcaaaacttctccccactcatatcagacactactgatgctcaaccaggacactttttacctttcccgacacgactcacttccggagaagtgtttccagacaatgaaaactctgctccgtcaggcatacaatacaacccgaataacgaatgaacagtatcagagtaatgaaacaaaaataaccgtcttcagagtggacagaacccaggcaagacactctgacgctgagcataaattattacaggaaaatgccctgtcgttccgaccagcagcgattacacagagccccagtatctttccctga

SEQ ID NO: 401127 - DNA, 189 bp, Salmonella enterica
gtgccacccggccactgtgaaggttggatacctgcccgtaacagcgatctggttccgagcggcatgcgcaatgtaccggagcatatgacctggattgagcagaaaaatacgcgcttactgtatggctgtaacggattagctaaccatcagttaaccgtgcgccgacgaagtatcgatttccgagtctga

SEQ ID NO: 401128 - DNA, 267 bp, Salmonella enterica
atgacaattaaaccttccctgtctgaagaccagttcgtcaatatggctttcattacccatctcaccggattaaccgataaatggttctacaagctcatcaaagacggtgagtttccggcacccatcaagtttggtcgtagttcccgctggcgacagagtgaagtcgaaacctggctacaggcccgcattgatgcatcccggggagagaattccgccatggcaatgacccacaaacttaccgtaactcccgtggaggcgttgtcatga

SEQ ID NO: 401129 - DNA, 582 bp, Salmonella enterica
atggactttccctggccctggaaccgcaaatacacgatgaactggttcctgctgtcgttactgaaccaccatcttgatcagctactggaacgttactcccgccttcagcccctcagactcgatgtgttctatcagaatgacacgtggcgttataaccatcacggatggtacgagacagaaagggaggtacgccagttaacagaacatctgatgtcagagagcaacatcgtgggtcacttctgggtgctggagtgtacttcccgacacaaatgccatgcccatatcgtgatgtatcttgatggtcaccataaccaggccacctttccggtagctgaacaggcggggactgcctggcagaagattacacagggagagggctaccacaatcgctgtgatcgtaagaaatgctacgaagccgatatcacccgccccgtcaattacgatgatgctgcagccatcgacaacctgcgctacatcatcagctatctcgccaaggagaaatcaaaacacgggcagacttactacggggccagcgaggtaccacccgccagtagactgggcagaccgcgagggcttcgatag

SEQ ID NO: 401130 - DNA, 615 bp, Salmonella enterica
atgaaagtgattcttgttcgacacgcagaaacagagtggaatgtgagaggcgttattcaggggcagagcgatagtacgttgacccaccggggggagcgccaaacatcagccttactggcagcatttgccgcaagtgattaccagattgaacgtgtttacgcttctccacttggtcgtacctggcaaatgggacagagcctgtctgagtgctttggttgctcattggtagctgaaaccgcccttaaagaacaggcatttggtcagtttgaaggcatgtcaacggcacagttcctgcaacaccatccgaacgatgcaaatgcgttattcaaacttgatgcagagtattgtccgccagagggagagtcattagcacaggcaactcaacgcgtaataagtttcttacataacctgcaaggcaccaaagaacatcagtgcgtatgtatcgtctcgcatgggcatgtcagtcagggagtgctggcaatacttaaagaagggactatcgataacttttcccgatatgctcaccccaatgcaagttactccgttttcgatttttttgatggaaaatgcattgcgctcagatggggaattgccacacacctacttgaacgatag

SEQ ID NO: 401131 - DNA, 1614 bp, Salmonella enterica
atgaacaggataaggtttgctctgttgatgtgttttatctttttcgccatcagttcaactttcgctgctgagccccgtcaggagccgacggagcaggaaaaagcgcgcacgctttatatcttccacactcccatagtcatgcttcaggccaagtttggtcagacaacgccggaagaacgagttttacgcatccacaatactctgcgtaaattcacccaggcggatgtccgtgagccaataaaaattctccccgtcacccgttataaccagcaagggaggctgtttttaatgaatggcaagccgctaatgttgctgacgcaggcagatctagatgagggtgatgacctgactctggatcaagccgcgcaacgcgtgctggcgcgaatggaggcgcaacgtaccgcccttcacgatcaatacgattccggctggcttgtactttccacattgaaaaccattgtggggttggcgggttatttactgcttatctgggtagcgtggcgctcatggcgtcgggttaagagatactttcgtcgtcggattgcagaaaatcgcggatggatacccaaaacctggcggcgttacgtgggggctgttgaagctcgtttatatgccttgctgatgactttcctgggaatcattggtttttatgtctggcttagctgggcgtttagtctttttccgtggacccgggtttgggcaacatcgctgggagactggtccctgcgtgtcgttcgtcagattttcttatccattgtctcatctttaccggggttgatgattgttgtgattattttcatcatcaccgcttttattctaaagttattgaaaatgacgctcaatcaggtcgaggtgggacgcttacagttccccagtctgcatcctgaaaccgtcggggcgaccagaaaactcctctcggtcgtggtgtggttatttgctctctcagcagcctatccgtttcttcctggcgcaaattcactggcctttaagggtataagtgtcttctttggtctcatgctgacgctggggtctgctggggtgatgaatcacgctatgagtggcctggtgctgatttactcacgcgccttgcgcaaaggagatgtcattcgtattgcggataacgaaggaaaggtgagtgaaattggcatgctcgccacaaaaattataactcgcgaaaactatgtagtgacagtacctaatgctgtcgtagtaagtggcaagataacgaacctcagtgcccaaaataacgacggcagtgtcaacttaaccgtaagcgtcaccatcgggtacgacaccccatggcggcaggttcatgccatgcttgaattggcagccaagcgaactgaattcgtggatcttacgaccgcaccgctggtgcgccagttggcgctgatggactggtatatagcctatgagcttcaggtcaggctgaaaaccgatgtgtcactggccatcgcgcgaaatgcactgttcagtaatatccaggatgttttcagcgaattcaatgtgcagatcatgtcgcccaactttgttatgcagcctgaaggaagcgtcgtggtcgcaaaagataactggtattccgcccccgctgttgcaccagtacgcgacaaataa

SEQ ID NO: 401132 - DNA, 1188 bp, Salmonella enterica
atgaaaaaatcgacgttattttctctggtggcgtttctttctccagcgacacaggccagcgcactctatttttacgaaattgggactgaagataccgcgcttgcaggtgctggccaagctgcgcgcgcgcaggacgcctctaccatagtgactaacccggcaggaatgacgcggctgcctgatcatatgtttacaggcggattacaggcaatggatggtgatatttcctatcgccttgatgatgatagtggaagtaaaaatcctggcgatatcatgcgtttttttccaaatgctagcgccttttatacacagaaactcaatgattcactgtatgccgggctggggttatatggcaattacgggctggggattgattttggtaactgggctggcgaccgtatcataaaaaagagcaccatggttgcaatgactttaagtccgtctttagcctataaattaagcgaacgagtatcagttggtggttcagtcaatgtcaattacggattcctttctctcacacgtaatgtcgacaatgaagatgaaaaacagaatgatcatgactgggcgctgagttaccgtctaggcttattgatggagctcaccgataaaactcgcgcgggaatcgcctggaccagcaaaacagactatgactttaatatagatgctaaagctcgcttcccaaacttacccaacgttgaatatgaaattcctgtttcagcgcaggtccgggcacctcagcagataatgttgagtctggtgcatgattttaataagacatggtcaattatgggtgaccttggctggcaggactggagtcagtttggcagtccgcaggtttctgtcgctggacaagatgccaatcggaaaaaccgtctcaaagattcctggcataccgcgctggggctacagtatcgcccaaccgaattgtggcgcattaatgcaggttttgcttttgacagcacagtctacaaaacgcagaacgacgtggccctttccttacctacaggtgatgaatggcgatttgcaacaggtgcgcagtatcaaattacaccacaaagtaatattggttttgcagtatcatacctaaatatgcagtcatcacgcgtgcagtccccagagcaattcaagggcagctataacaatccctatctatggttcgcgagcgtgaactatagctatttattttga

SEQ ID NO: 401133 - DNA, 876 bp, Salmonella enterica
atgcaaaagttggacggccttaaggcctttgagcaacccctggcttcactgccacatccgcttcgaaaacttatccttgcacgtcttcgcagtcttacgcagtacgagccggtgatcggcattatgggcaaaactggtgtcgggaagtcgtcactctgtaacgccctgtttcaaggggaggtaacacctgtcagtgatgtggaggcctgcacacgcgatgtgctgcgcttcaggctcagcagtggctctcacagcctgctactggtcgacttacccggagtgggtgaaagcgaggcacgtgacgaggagtacaccactttataccgccggatcttgcccgaactggatttggtattatgggtcatcaaggccgatgacagagcactttcagtggatgaacacttttatcgcaaggtgatgctggcgtatcagcagagggttctgttcgttgttaatcaggctgacaaggccgaaccctgccatcagtggaataccaccagcaatacaccatctcatagccaacagtcgacaattgaggccaagcggagcgctgtacagcagctcttcctgccgcaccatccagtctgtgctgtatcggcccgaacgggttgggggctggatgcgatggtagaggcgatgatgcttagtctgcctgatcgggccaccagcccattgacgacacaactgcatggaaggctctgcacaggttcactaaaaaaggaagcccgcgagcgatttagcaatgccgtagatgaaatgattggcactgtggaatcgtcatcttgtctgcctgcgcctgtaagggctgtgattcgaaccgtgcgggaagccgtggtgtccgttgcccgtgccgtctgggactggattttcttctga

SEQ ID NO: 401134 - DNA, 705 bp, Salmonella enterica
atgtcccagactgagcgtcgccatgagcggctggcggttcggctgtccctcattatcagccgccttgttgctggcgaaacactggatatgggccttcttgctgcagagtttggtgtatcgctccgtaccctccgccgggattttcgtgagcgactgatgtacctggacctggaatatcgcaatggcacctgtcgtctgctctcaggaagccatcaacgcgaactgactgtactgacttttgttcgtcagtcaggcgtggaggctttgtttcctgatatggataaccacatggccagctcacttctgagtggacctggtgagtctccgtgcctcatatgggcagagtcggagtcattgtcgccacccaggccaggcatatttacacgccttgtcagggccatatcagagcatcgccgtgtgacactgctggctgaaggttgtcgctgttcagggcttgcaccataccgcctcgtactctgtggcgggcactggtatctgactggagagcatcatcatcgcgtggcagtgtttccgctaaacgatatccatgcagttaccttgcacccggaactgttcgtgcctgaccttcagattcgcaatgttctcgccgaacctgagttcctcagagctcttccccattttcacgtttttcactcactgctcgccagaaccggcgactgtcttttacctcataaggaatcatga

SEQ ID NO: 401135 - DNA, 570 bp, Salmonella enterica
atgaaaaaattactggctacaacggcgctggccgtcagtctctgcgctggcactgtctttccggcgtctgctgaaactgtcgtgggtaccgtcaaattctggcagtacatgcaggcagatggctggaaatcggccgatggcatggataacgacacgctaaacaatacgctctatcaggccagtgtcattggcaattacccctggactaaacaatttctgctgcgtcagcggggaggtggagcttattttctcgccgataaaaaaacgcataccgtgcgcaagctgaatctgaaacctgccagcggttattactccgacctgacatcggtctatcagggcgaagaccaggggaaagggtgttatttcactatcatcgacacccagtatcaactggagctggctgacgaacctcacagcaaccaggtacttgctgcattcccggaaaactgtgtcaacaaacggcagcaggcggccctggcggcgaagcgttctgcctcagagcagaaactgcagcagtgggtagcccaacagagtctggctgagttgtgccgacgaactggcaactgctga

SEQ ID NO: 401136 - DNA, 453 bp, Salmonella enterica
atgaagaaattgtatccacctgtgcttgccgttctgacagttatcggtgcaatgagtgcctctggctgcgacagcaaggaagatgctggcgtgaaagcgatagccaggtttaaagacctgactccaccaccattcagcaaggttgtctcgcataaatctgatatcgcccaggagtgggtaaaaaaggatgccttcggtacaccgcaatatacggtgatgaaaacccgccagtcgccggaaggctgtgagtcaggcaattattactacattgcggatatgcagcagaaaacggtgcagcctctgattgctgccctgtgtcttgcggacaatatcaccctgagcttccggattgaaaccgacagctatacgggtgaaaaatcagtggtgtattcgcacgatggcaaggacatggggaaactctatctgccggagaatcaggagaaaaatccatga

SEQ ID NO: 401137 - DNA, 450 bp, Salmonella enterica
atgaagaagctgaaatgcgttctctcagtttgcgctctgagcctttgcctgctgtcaccggctcaggccgaagaacagcgttacatcagtatccgtaataccgacatggtctgggtgccgggcaatatctgcgtctggcagtttcgcctggacaacggcggaagtggtgaagggttcgggcctttgacactctccctgcgtctgaaagataaagggggatacacgctggcgatggggaatatggcggtggctgcatttggcgacagcgatgccactcgctctcaggaagcctcgctggagaacgaatgcgtggaaaacgtcaactcggtcgaaatcatgaaggcaacggaagagcgtaatggttaccagattgacctgccactgtccgttttcgacccgcagtattaccgaccgatacaagtcacggttgtcggtggtaatgcatcttag

SEQ ID NO: 401138 - DNA, 231 bp, Salmonella enterica
atgactgaattcactgaattgcctgatgggccgtttacacgccagcaggcagaggcagttgcgtctcaatattccaacgttgcgatagaggatgaccaggggtcgcatttccgtctggttatccgtcatgagcgttgcatggtctggcgggcctggaactttgagcaggatgccggttactggctgaaccggtatatcgctcgttatggcatccgcaaattccctgcataa

SEQ ID NO: 401139 - DNA, 444 bp, Salmonella enterica
atggatacacacaaccctgagttcgctgagcaggcggcaattactgcctcggtggtccctgacgagctacgcatcggcttctggccgcagcactttggctccatcccgcaatggataactcttgaacctcgcattttcgcctggatggatcgcttctgtgacgagtactgcggtggaatctggtccttttacacgctcagtaatggcggtgcgtttatggcccctgatgctgacggtgacgataaatggcatctgttcaatggcatgaacggcaatggtgcggaaataagcggagaggctgccggtattgcgctctgcctgatggcatatagccaccattcctgtcgcactgaatgcgatgccatgacggatcactattaccgcctgcgggattacgctctgcagcaccctgaatcccacgccatttttcgcattattgattaa

SEQ ID NO: 401140 - DNA, 483 bp, Salmonella enterica
atgatggaacagtcacttatcccacagactctggcacttccactgacagcaaaacttacggtaaaacgcgccttaaccctgcttgaccgacacctgcgcgaaacaggcgtggcattcacctccactcaggctgcccgtgactggctgaaactgaaaatggcggggctggagcgcgaagagtttatggtgctgtatctgaaccagcagaaccagttgattgcccatgaaaccctgtttgccggttccattagcagcaccgaggtacatccccgtgaggtggtcaaacgcgccctgtatttcaatgcagcagcagtgatactggcgcataaccacccctccggcgacaccacgcccagccaggcagataagaccatcacgcagcgtctggtgcaggcgcttcagctcgttgatatccgtatgcctgaccatttcatcgtcggtggtacgcagatattgtctttcgctgaacacggtctgctttga

SEQ ID NO: 401141 - DNA, 222 bp, Salmonella enterica
atgaaaattatcagtaaacgccgggcgatgacgatttaccgtcagcatccggccgcccgcatttttcgctactgcaccggtaggtaccagtggcacggtagtgtctgtcattacaccggtcaggtagttcctgacattcccggcgtgctggcggtatacgccgaacgccgccaggaccgcaacgggccttatgcctgcctgatgagtatcaccctgaactaa

SEQ ID NO: 401142 - DNA, 321 bp, Salmonella enterica
atgagcagtaatgtcacatggggactgcagcgggatatcacgccgcgcctgggagcccgtctggtacaggagggcaaccggctacactatctggctgaccgggcaagcatcactggtaaattaagtgacgccgaatgccggaggctggatgaaacattcccgcactttatcagtcagatggagtcgatgctgaccactggtgaaatgaatccccgccatgcccactgcgtcaccctgtaccacaatggttttacctgcgaagccgatacccttggcagttgcggctacgtatacatcgctgtttatcccagtcaacgctaa

SEQ ID NO: 401143 - DNA, 324 bp, Salmonella enterica
atgaaaactctacctgctacaatttcgcgtgcggcggaaccctgcctgtcgcccgtggctgtctggcaaactttactgacacgcctgctggaacagcactatggtctgacactgaacgatacgccgttcagtgatgaaaccgttataaaggaacatatcgatgccggtatcactctcgctaatgccattaactttctagtggaaaagtacgaactggttcgtatcgatcgcagagggtttagctggcaagaacaaacgtcatatctcacgattattgatatcatgagggcccgctgcgatctgggtttattaaatcgtaattag

SEQ ID NO: 401144 - DNA, 1377 bp, Salmonella enterica
atggatctcttccgaccaagaataactgatcattacggcatacataaatcacaagctgatttggattttgcaattcaattttttgatgaggacattccgctctacgttgatccttttttattgtggaagtcaccatccttgcaagatcaggcattgcatacagcgattactaactcattcaaccatttaaattatttaatgaaaaaaagacgtgaggaagaagctgctgatacgcttatcaatctttctgaatgttctgagattgggcttggtgtttccaaatctcgtagaggggtaaagatcgggttgaagcaggcgaatgaaatccttaggctttttaatgatgtgcctgaatatagccaattcggttttactcactttgaagtaattcaactctatgtttcaggtatatcaaaagaccgtgtcagtgatatcgcatgtaactatataaagtcttttttgattgattatacaattgagcaaagtgaaattaatggtattcctatggagggggttatactagatgcagtatataattatcaaaagcactcttttgattttaataagaaaatacgactccctgtaaacccgaagactaaagaaccactaattttcactcccaaacggtggctaaggtttaatccgtggatcaattttgaggattacttcgcatcgtattgcccaagagatgaaatattcaacccgaatgagcctgaagagagagttaaaatattaaatttcaacagggaaaattacggggttatagaggaatatgtaaaatataaaagcagaacctcacaggattgtcaaaatgatcctttgtttagccagatacctgttttatcagcaaaaagaaagttagctgagcttttgaagcttaaaacaggaaaggaagatggagcagatatgaggtatgaggatttatcagcggatttgttagctaccttattttatcctcatttagattttgcaaatactcaaagccgcacagaatcaggaaggcatattcgagatttgatattttacaataatagagatgtagactttttagatgaaatatttaacgaatatgacaaccgtcaattggtaattgaaatgaagaatgttaaagcaatcgatcgcgatcatataaaccagcttaacagatatctgcaacctaatattggtaggtttggtatatttctaactcgaaacccgttgccaaaagcaatgtataaaaatactatcgatctatggtcatctcaaagaaaatgcataatagcaataacagatgatgatttgaaactaatggttgatgtatatgaaagtaagcaaagagcgccagtagaagtactgaagaagaagtacatcgaattcagacgctcttgtccatcatga

SEQ ID NO: 401145 - DNA, 405 bp, Salmonella enterica
atgaataaatcgaacgtaaatatttttgagaagttatccggacaactgttgagtatatatgaggagatttcactactatcgaaaaaaaatcctaatgacgcagtaaataaattcaaactcaagtttgttaatgtacttttagtacaaagtaacgattatcttggcaatgaatataagccatttgaagactttattaactttgatgaagatgatattccacaaaacagtgatgttgtcttcatactttcccaatatttacaatgctttgagaagctgagagcagataatgtcgttagtagaaatggatactggtattggcgagttgtgggagatgctgctgataaagtcgatgaagatggtatggtattgattcgaaccgtaaagcccaaaaatctgaaaggataa

SEQ ID NO: 401146 - DNA, 342 bp, Salmonella enterica
atggaaaaattctatacatcgcaagataaagcaaaaacacatgatacaacaactccattattgaaggctatgtattttgagtttaaagaaatttcaaaaaaaaagcctgactcagctataagtaaaggcaaaataaaaatagttaatcgattgcttgaaaaagttaaaatagttttagaagatgaagagtctattatctttttagatcttttggatgaggatgatgttccacaagcaagtgatgttacattaatactttctcagtatgttgctgcaatggatgcattccgtgaaaagcattatggctgggacggctcaactcatgattggtttattgaataa

SEQ ID NO: 401147 - DNA, 144 bp, Salmonella enterica
atgatgcttgaaattaattctttgtatttcattgtattaatttggtatttgagtccggccttcgcaccaggagcatataaatggacctcaactgaggtcttttttatgcctgaaatccagaagttatctacctttctcggttga

SEQ ID NO: 401148 - DNA, 204 bp, Salmonella enterica
atgccgggtggcggctgcgccttacccggcctacacatcatctttatccataaactggcgcacaggcctggtaagcgctacgccatcaggcaaaagtgtgaacatctcatccggcctacgatcatctgtaggccgactgttcaccatacgcccttaaaacgtttcccaattatcgctgccgtcggccacagcggcctttggtga

SEQ ID NO: 401149 - DNA, 231 bp, Salmonella enterica; identical to SEQ ID NO: 38792

SEQ ID NO: 401150 - DNA, 504 bp, Salmonella enterica; identical to SEQ ID NO: 25818

SEQ ID NO: 401151 - DNA, 339 bp, Salmonella enterica
atggcgataaccgagcaggttctggccgcgcagcagcatctgcagcggggttttcggcatggcttttttgagctcgcgcaggcgaacccacgggtcttcgccgagaaaacgaatacaggcgtcaaaggtcgcgccgccccagcactccagcgacccgtagccgacatcgtcaagctgggcggcaatcggcagcatatcatcaagacgcaggcgggtggcgaacagggactggtgggcgtcgcgcaggacgacatcggtaatggcaatagtcatggatccctccggaaattaagcgttaaggcggtgatggtgaatggcggcggcaatcaccggctttaa

SEQ ID NO: 401152 - DNA, 1149 bp, Salmonella enterica
atgagatcattagagattttttcaggagccggcggtttggctaaaggtctagagttggcaggatttcagcatgtaggatttgttgagttaaacaagcatgcatgtgattctttgcgacttaattttgatgaggagaaggtatttcagggagatattaaaaattatgacctttcatctatagataaaatagatattgttgctggcgggcctccctgccaaccattttcattgggcggaaaacataaagctcatgatgactctagggatatgttcccatttgcaataaaagcaattgaagtattgcaaccaaaagcttttatttttgaaaatgttaaagggttgcttagaaaatcatttgcggattattttgaatacataattcttcgtttgacttatccttgtttatcgttaagtaatgtaggtgattggagaatacatctagatgcattaagaaaagctcgcaaggataaacactgtgggtgtacatatgatgtcagttttaaattgatcaatgcagctgattatggagttccacaaattagggaacgggtcataattgttggtgttcgaagtgatttgaataaaaaatggtcttttccaagcgtaacgcatactcaagaaaaattactgtgggaacagcatgttactggtgactattggcgaaagcataatattgatgcggttatagataaaggtatttctgagcgtttaatgaaacgttttggtattttccccccatcggggaaaagctgggttactgttagggacgcattaaagaatgttcctcaaccatatgagtcacatggtattggagatcatatctttaaagatggcgctcgagtttatcctggtcatactggaagttatatcgatttgccttcaaaaacacttaaggctggcgctcatggcgtacctggaggtgaaaatatgattaggtatgaggatgggactgttcgttattttacggtttatgaagggaagcttcttcagacttttcctcgagagtttctgattgcaggagcttggggggaggctatgaggcagattggtaatgcagttcctgtgttgctagctcagaagataggacagcaattgtataacttattgaatgaagaggttgagcctttattgtgctctaacttcaattaa

SEQ ID NO: 401153 - DNA, 645 bp, Salmonella enterica
atgcacaataagaaatttgatagatctgagcatgtttatagaaatgactctttcctagagttaataaaagatgccgttcgtttttttagtggtacgcctgttcattcattaccaccaccggaacggtttcaaggtgctggggtgtatgctctttactatacagggcattattcattatatgatgaatactctcgtataaataggttggcatataaccttcctatttatgttggcaaggctgttcctgctggttggcgtcagtctagaattagtgatcatgaaactagggctggttctgaactatctaatagaattagagaacatagccgaaatatagcaaaaacatcgaatctaaatttgtgtgatttttcatgtcgctttgttatatttgaggctacggggtctgatatgattagtacagttgaggccgctcttattaaaatttataagcctttgtggaatacagttgttgatggctttggaaatcatacccctggtgccgggcgatttgcgcaagctaaatctgattgggatgtaatacatcctggcagggagtgggctgagaaatgtacaggtgttcattctgagccatactttattgaggagagaattaaacagtatttttctaagagtaattttacataa

SEQ ID NO: 401154 - DNA, 267 bp, Salmonella enterica; identical to SEQ ID NO: 7253

SEQ ID NO: 401155 - DNA, 210 bp, Salmonella enterica
atgtcttttagcgaattttatcagcgttccattaacgaaccggaggcgttctgggccgagcaggcccgacgtatcgactggcgacagccgtttacgcagacgctggatcatagccgtccaccgtttgcccgctggttttgcggcggcaccactaatgtcataacgccgttgaccgctggctggataaacagccggaggcgctggcgctga

SEQ ID NO: 401156 - DNA, 456 bp, Salmonella enterica
atgccattggacagattaccgataacggcacgatggcatcagctaatactccaggatggtggcgggtggcggtgtcgaattctgatacggtcgctgattttccgacctatccggatggcagcaagctgtacagctacggatatatgtttgttgagaaaatcggggaagtctggtttcagcactattacgcgcatatgggcgcgaacgcaaagcgccaggactggggaacggtaccgaataccagccgccagtgggttattgactacaacaccgcaaataaaccttcagccggtgatgtgggtgcattgccgattaccggggggcggcttaacggcccgctgggtattggtactgacaatgcactgggtggtaattcgattgtattcggcgataacgataccgggtttaagtggcacagtgacggcgttttgggtatttatgccaataatgccctag

SEQ ID NO: 401157 - DNA, 579 bp, Salmonella enterica
gtgaacctacaaattgagttttctcagggcggatctgaggtactagatagagttatccaagcgtatggattcaacacaaaactagccctagctgaacatcttgatatagcaagcagcagtctggctaaccggtataagagggatttttttccagctgatatcgttgttagatgtatggctgaaacaggagctactctggaatggcttgcgactggacaaggtagaaagtttaacgatgacgaattagacatcatgaaactgccacgcaagaagattgtggacggaaaactctatgagtctggtttcctaatgctcgataaggttacttttttacctggcaaacctttaccgcagaatcctatctgtgtgattgataacacaatgcaatacattgttgatcaacactttactgaagtttatgacgatgtttggcttgtcgaagttgaaggtaaaaccagcgttagaacactgacacgcatccccgtgggaaaggttagagtaagcggtgttggaatggcatttgattgtgctattgatgatattgttgttattggtcgggttgttctaacaataagctga

SEQ ID NO: 401158 - DNA, 894 bp, Salmonella enterica
atgttaaagatattgtttttaaatttactaaaagcagtaatcgtatttttattaatgatatgcgcgattgggtttagcatagacgaaaacgtatcaagtaccgcacgttttattctggctccattattttcaatattactgcttttcttttttcataaatggctaattaagccattgctactcaaggcgaaatcaacaaaaaaaatacagaaatcgcgtagccataatgtaaattcttatgaaacttacgtagattcgctcacacgaaatcctatgcctactcccgcatctgttcctactgctgagaagaaaccatttcacaataggcctgttgttgtatggagcggaacgactaaaccagtttcatttcgcatactctctgagaaagagcgtagagagggtatttttacacaattagaaattcacaaggatggtgatttttatttttatctagtagaccaatccacaggtgagattactctggtaaaggaaagagaaatacaatctagaattaaaattaattcacagacttatgattttgtggaactgtgtagaaaggtgttgaaaattgatctctccgatttgtttgagcaagcaaaagaaatacgtaaagcagctaatgaaccatatgtaattgccaaattttcgccaataacaacatcattcacatatttatcatctaatggtaaagaaagaagaaccgtggatatagaccaagtattaaaaaatgataaaaatgactattatttatcaggattttgccatttaagaaaggaaagacgaacctttatttcaagcagatttcaaacaatgttagtaactgagggacataagaaatattactttcacgattggctgaaaaacgttataggtatcgattatgagtgttcgtaa

SEQ ID NO: 401159 - DNA, 1038 bp, Salmonella enterica
atgagtgttcgtaaacttccctctggagaatggatcgctgatttctataccgttgatagaaagaatggaaaagaaggcaaacgcgtccgcaaaaaattctctactaagggggaagcgctggcctttgaaaattatacacttcagaaaatagaggattcaccgtggctcggtgatggtaaagataaccgacgcctctctgaccttgtaaatttgtggtttgatagacatggcatcacattgaaggatggggaaaagcgaaaaagctctatgctctgggctgctgaatgtatgggatcaccactggctacagaattcagcgcccagctttttactgcataccgagcaaagcgccttgatggcaattttgccagaaccaagcgagtattgaaggtttcaccacgaaccatgaaccttgagcacgcttactttttggctgttttcaatgagttaaaaagacttggagaatggcaagcccctaatcctctcgaaaatgttcgtcagttcagaaccgacgaaagcgagatggcttttcttaccaccgaacaaattgagttgctgcttgaagagtgtcggcgcagttccgccagggatctggaaatggttgtaaaagtgtgtcttgcaaccggcgctcgatggagtgaagcagaaaaactaaaacgtagccagatagcggcagggaaaatcacatttactaaaacaaaggggaaacgtaaccgcactattcccttagaccctgaatttgcggcagaactcccaaaaaagaacggaaatctgttctcaccttgctattatgcttttcgttcagccctggaacgtgcgggaatagaactaccggctgggcagttaactcacgttttacgccacactttcgccagtcattttatgatgaacggcgggaacatccttgtattacagaaaatactgggtcataccgatatcaaaatgactatgcgctatgctcattttgcacctaaccaccttgaagaagcagcgaagctcaacccactaaagtgtctcaaaagtgtcgcacaaacttag

SEQ ID NO: 401160 - DNA, 201 bp, Salmonella enterica
atggataagcaactctggtttttttcgtggaatgcttatgacgcaaaaacgtgggaacatttacctgagtattcgtatggtgagacctatgtcagtgatgcttcagtttctgcgcaagagatttttgatggtctgatggaacaaaaatcaaagttgcgggataacctctggatacactgcatcgcgttcaacaagctctag

SEQ ID NO: 401161 - DNA, 1287 bp, Salmonella enterica
atgtcttcgatatattttgaaaagctggttaaattttacagagggttggggaagccttctgttattgactgctcattcgaatatagagggcaacttgctaaccagttcgatgtgtttaaggagttatgggataaatctgatcagagtatcgcagattttgacttgtcttttgattcctgttcctgtggtacattatacgaggacgctttccctgaaaatctaaccgcgagtactgatattactcttacagtatcgttacccgctggtgattttagatttatggagtcattagaagattttttactcatagataataatttaaatactggtgggcgagttgagaatgtttaccttgtaaaagaggatttcttatttggtgaggtaaactcaaaaaatgaacaagttctgaaggcgttacagctttcaaaattcattacagaactttatgatttagcgaattataacgatcgtgtagagcatagtggtctgctaaaacttgtattcattgatactagcaactcgaaaaaaacatcaccgattgttattgaacccagaataactattgaaagcatttcttttcctatggttgacttggcaatctttaaaagtataaaggaaaatggaacggataatgctcacattcaagaaaaacaagctatgtttagagtgtcaattattgaggtgcttaaagacatagatgagagtaaggataaatttaattttctgattgaacaatgggagttattgaaagaaacatattacgggaactttgaatgttatttaactaacttttcatttttgaaacagaaaaaagaagcagctgaaaattacatgactgtttcttcaaaaatttcaggtactctttcgtctatatctggtaagctatttgggcttccaatttcttttgctgtggctgtagccattttaaaaacaggtaaatttgaaagcatcttagccttgttaggtgttgcaataacatccctgttaattgcgcttactatttatgatcaaaaaaaagtacttaaatcgatcatgaattcaatagatgctttatttagtcatacaaaagcccagaggagtggggaactggcagagttaatttcaaagcataaagagaagctctattctcaagcaaggggtttagatgcagcaatggtgtttttgctgattatttctgctttgccatttatgatttctttaggtgtgtatatgtttaaattccatccttctgtgatttcgtattttaattgtttcatcgatgtatttatgactcaattatttaagtga

SEQ ID NO: 401162 - DNA, 1086 bp, Salmonella enterica
atggattttaagttacgtcactgcgttatccatgaactaatcaaagaaagcggcaagcagaaagttgaaaccactatcaaatcggtacttcctaatgacgacgaatatgtttgtcagttggtgcagtctttaaccgaattgataggtaaaaaagataatcaagcatcacgtgggaccttcaattaccaagatgtggccttcaaagttccccctgcatttaagacgtattatgatggggctgctacatcggaagattttcacaagttttccttggtctgcatgagtgaactgtctcgccaagccaaagatccatctcgagtggctgcttcaggtggggctatcgtattcgcccactatgttcgtggtgtgtctgattttcttctcattaccatggttaaacagaaggaagcactgcgtttagataaggacctaaagccagttggaactgttcagattgatttagccaaaattcaccaagctgctcgtgtgaactttcatcgattccatgaattcgaaactttacctaaagatgaaaaatcagcttacttagcatttgtaagccccaaggtgaatcaggatgcatctggatattttgttgccgcccttggatgctcagatagtgttccctcagcaagggctacagacgccgcccttaatggtgtaagaagttactttgatgcaaatgtagatatcaaagcgtacaaaaatgctgcttacgatgcagtgctttaccatctaaaagagaaaaagccgggggaaactgcttctctggcagaaattgagcatatcgtaaggcaggctgtaccagcagagaaacatattcatatcgataatttagtcgagtatcttaatggagaagaaataggtgttccattagagttcgctataaacagggctgtagtaaacaaaagaacaaaagttaggactagatccaatggatgggagttaagctttgaaaaacgattcttcggtgaacaggctggttctgtaattcagtatttgcgtaaagaaaagaaattaataatatcacagttggatgaaaatacaatccaaaaattagaagatgcacttaagaacgaagggtaa

SEQ ID NO: 401163 - DNA, 477 bp, Salmonella enterica
atgaaaaatcccgtcgtcatcctgatgccactcttaaagaaaaagggtttactcagctcagtaacgcgacagacagcgagtctgaaacgctcgcagcgacgccgaaagctgtcaagacagcgtatgaccttgctaatgcgaaatatacagctcaggacgccaccacaacgcgtaaaggcattgtgcaactcagcaatgccactgacagtgtgtctgagacgcttgccgcgacaccgaaagcggtcaaggtggcatacgaccttgctaacgcgaaatatacagctcaggacgccactacagcgcgtaaagggattatccagctcagcaatgccactgacagcacgtctgagacgctggccgcaacgccgaaagcggttaaagcggctatggataatgcgaacggacgactggagaaaaacagtaatggcggcgatattccggacaaaaaacaatttgcgagaactatcggcgcggtaa

SEQ ID NO: 401164 - DNA, 1197 bp, Salmonella enterica
atgtcagagcatttttttgagtatgatgagcaggctgaaaacgaagatgatgttgagttaatcgaaggcacggatttctccgctgctgtagttagtggtaccgactggacaacagaaactattattaaccaaattaataaaaacaatatacaacttaatcctgattttcagcggcgtgatgcctgggataaatcaaggaaaagcaattttattgagtcgttaatactaggtttgccaataccgcagttggttttggctgaaagaaaggagcaaagaggggcgtatatagtccttgatggcaagcaacggttgttaagtattcgtcaatttgcggctgagaaaggtgatgaaaactatgaatctttaaaattaagcgggctagagattagaacagaccttaaaggaaagaatctgcacgatcttaaagatgatgctagttattataatgatgtggcggcttttgagaatcaaccaataagaacggtggtaattaaaaattggccgagtgaagaattcctttatcatgtatttttacgtctaaatactggtagcgttcaactggcccctcaagagctacgacaagccctacaccctggtccttttgtttcttttgtcgatgcttccgcccctgataatgaggcaattaaaaatatattgaagttaaagaaacctgattttcggatgcgtgataatgagttgttattgagattctatgcccttaaaaactttcttactgactatgcaggggaccttaaaaaattcttagataatacatgtttggtttttaataaagactggggtcgtgttgagggtatggtgacagagcaatttaaccagcttaattttgctcacgccacaataatgaaaatttttgattctaacagttatagaaaatggtttgctggtgactatgaaagaaaattcaatagagcaatttttgatataatggtactctctttttcttatgcagaggttagggatgctactgtaggccgagaaactgaagttgaagagctttttcaaaagctttgtaaagaaaattatagttttctttcatcgattgaaacaacaactaaaagcctcaagtcaacatttaccagaatttcggtgtggtttaatgagcttaatgctttgctaaatactaagttaccaactcttaaatttgatgaggctgctaatagaataacagtggtatga

SEQ ID NO: 401165 - DNA, 654 bp, Salmonella enterica
atgattatggcacagtctgaacgttttattttattgcaggaaagactgggggagttaagacgacatctgcttcctgctgatttttctcccattggtgaatatgagcctgtgcagctagatatggcaaagggctaccgtctattgacccatgctgagtttgaatcttatctagaggatatttctaaagatacggttctatatgcgttgaatcaatggaaaaggaataaagttccctccatgacgattgtatcattccttgctgcgtatcatagttgttggtctgttggtgatgagcaaaacaatcaagaactaatagatttgtcacgaggaagaacaaatcctaaagactctctaaatgaaattatgacgattgctagtaagcagtttattagtaaaattagttcgaatcatgggattaaggcgaaaaactttaaattattaatattacccacaggggttgatatcgacgagcttgaacctcagatgttgccaaagttagatagttttggagctaagcggggtgaggttgctcatttatccgcaagggttaatcagcaaataaatcctaaagatgagttagacgatgttaactttatactggattgttttcgtgagttagataagaaattgtgtgcacttaaagaaacaatgtaa

SEQ ID NO: 401166 - DNA, 186 bp, Salmonella enterica
atggttggggaacatttcagacgaacgcagcaaaagtgggcttgcgtgcaatttattgccgaggtatctctgattgcaaactgcaaaccagcagacttaaagctcgcactcactctcattgctgacctggcaaacagcgaaaatgctagtaataaagacgaggatttattttatcgtgtagaataa

SEQ ID NO: 401167 - DNA, 846 bp, Salmonella enterica
atgtctaaaaatgatgttaatgcgcctgccgcattggaacgagtcctttctgcatacggctttaagcagcaaaaggaactagccgaaaggcttggtatacatgcaaacaacgtgagtagttggcttgcaagaaacgtaatcccaagcaacgttttcgttgagtgtgctcttgatacgggggctgacctgcgatggctaattaatggtgagcttgcaaatgcaagatttgaggtggtgaaagctaaactcaaaggaaagcaactctatgatgaaatcatggcaaatggagggagggcggttctgcgtcggattctcgatgcgtatggttttactctgcaaaaagagcttggcgatttattaggtatatcttcgggcactataagcacttgggttagacgcgattttttccccggtgacgtggttgtcacttgcgcccttgatactggcgtatcgttagaatggttatctaccggaaaaggccaaatgcgtaatagtaatgatggtgaaccggcaaatgctttaacgattagaaagtgccggctcgaggcgggcgaactcaaagatatcggacgctggactcctgatatatctatggctccgtcaaatactgatgatttagtgtttatcgatggtgtgagcacatcttggcttgttgatagttctaactcgaagataggaaatggtcgctggcttattggtattgatggcgcactcgatgtttttgacgtaatcaggttgccaggtggaaaggtcaggttatccaataagtctgctgagtttgaatgtaatctctcagatatcacaccatcaggtgcggttatttttactttggaaaagcatgtttaa

SEQ ID NO: 401168 - DNA, 339 bp, Salmonella enterica
atgaaaaagtttttatttttgatggtctgtatcggactttcttcctcagccttagccgctgagaagtttaaagagattgatagtaaatcttttggtgataaatggccgctgacctttgagcatgcaaaagtatcatgtgtaaatagtcactacgtttttgtttatgacactgatacggatgaacgctatcccctaagcggcatggctaagaacgccgtcaagtctggaaaaatggaagggcgagatttaaaagaagtgctaaaaaaagaccctagagatccattagaacgcgttgatattggtccggttttcagtgaagccatagcactatgtgaataa

SEQ ID NO: 401169 - DNA, 249 bp, Salmonella enterica
atgaccgctttatttgatttaactgggaaaacggcgctggtaacgggttctgcacgaggactgggctttgcctacgcagagggtcttgccgctgcgggtgcacgggttatcctgaatgatattcgcgccacgctgttggccgaatcagtggatacgctgaccagaaaaggctacgacgcgcatggcgtggcttttgacgtcaccgatgaactggcgattgaggcagcttttagcaaacttgatgcataa

SEQ ID NO: 401170 - DNA, 294 bp, Salmonella enterica
gtgaattttagttctgaactcctgagcctgtacggcaaaagtccgggcttcagtattgtgatcgaaggcaaggacgttacaaccgtgctggataaccgcctgatgggcgtcacgctcactgacaaccggggctttgaagcggaccagcttgatctggaactggacgacgcggacgggcagattgtcctgccgcgtcgcggtgcggtcattcagtttgcgctggggtgggaagggcagccgcttttccctaaagtctcgtttacagtggatgaaattgagcacagcggcacctga

SEQ ID NO: 401171 - DNA, 309 bp, Salmonella enterica
atgaaagcattgacgtatcacggtccacatcacgtaaaggttgaaaacgtacccgatcccggcattgagcagcctgacgatatcattttgcgtgttaccgccaccgcgatttgcggatctgatttgcatctctatcgcggcaagatcccacaggtaaaacatggcgatattttcggccatgagtttatgggcgaggtggtggaaaccggacatgatgtgaagaatattcgaaaaggggatcgggtcgttatcccgtttgtcattgcctgtggtgactgctttttctctacagcaatattcagcgtgtga

SEQ ID NO: 401172 - DNA, 651 bp, Salmonella enterica
gtggccgtattcgcctttcagaatgcccgccgtttctttggcaatggttttgtagcgctcgccggtcaggacattgagcaccgcctgggtgccgacaatctgcgaggtcggggtcaccagcgggataaagccgaggtcctcgcgcacgcgggggatttccgccagcacctggtcgagtttgtccgccgcattctgctgcttcagctggctttcgaggttggtgagcatcccgcccggtacctgcgccaccagaatacggctgtcgtagcctttcaactggccttcaaaggcgtggtactttttgcgcacctcgcggaaatacgcggcgatgttttccagcttcaggatatccagcccggtgtcatattttgtgccggcaagcgtggcgaccagcgcctcagtggccgggtggccgtaggtggcgctcatggaggaaatcgcggtgtcgacgccgtccacgcccgcctcgatggccttcagcagggccatctccgccatcccggtggtggcgtgacagtgcaggtgcaggcgcacgtcgtagcgttttttgatttcgctgaccagctcatacgccgccatcggtgtgagaatgccggacatatccttgatggcaatcgagtcgacgccggtttccagcagttgctccgttaa

SEQ ID NO: 401173 - DNA, 1371 bp, Salmonella enterica
atggcgattaattatatagaaatgcgtcttgaagattgcatggacgctattattgattacagaggtaaaaccccaaaaaaagttgataatggcattcctctaatcacagccaaaattatcaaaaatggtagaattcaagaagttagtgaatttattgctattgatgattatgacaattggatggttcgagggttacctttggaaggtgacgtcgtactaacaacagaggctccactaggcgaagttgcgcaattagatgcacgcaaggtggctttagctcaacgagttattactctgaggggtaaaaaaggaaccctggaaaatgattatcttttatatcttttacagtcttcttttgtccaaaaccagcttgatggaagagcctccggaagcactgttactgggatcaagcagtctgagcttagagaaataatattaagattgcctccaaccgctttacaaaaatcaatttcgcatcaattaaaatgccttgataaaaagattgatttgaataataaaatcaaccaaaccctggaacaaatatcccaaaccctgttcaaatcctggtttgtggatttcgacccggtgattgataacacgctggatgcgggaaacccaatcccggaagcactgcaatctcgcgccgaactgcgtcaaaaagtccgcaatagtgcagatttcaaaccacttccggcggatattcgtgcactgttcccggctgaatttgaagaaacagagttgggttgggtgcctaaaggttggatactggagtctgtagcaaaagccataaatataaatcctagtgtaaaattacctaaaaatacagtcgcaaagtatgttgatatgaaatccttacccacccaagggtattcaatctcagatgttattgaaaagccatatgctggtggcgccaagttccaaaaaaatgacacattattcgctagaattacgccttgtttagagaatggtaaaacgggattcgttgatttcttagatgaacaagaaaccgcgtttggttctaccgagtttattgtgatgcgaggcactacgaaagttcattattcgtatgtggcttgtttagcacgagaaaataatttcaggttacacgcaatacaaaacatggtcggctcatctggccgccaacgggtacagaatagctgctttgatagcttttatattgcggtaccgacaccttccgtaatgagtttatttgccgggaaggtcagtagttattttgataaaatgtattgctgtaatatggaaaacaaatctctaaccaacctccgagacaccctgctccccaaactcatctccggcgagctgtccctggaggatctgccagatttagttaaccaaaccgaagccgcataa

SEQ ID NO: 401174 - DNA, 693 bp, Salmonella enterica
atgttcttaacctttcctaatgtagcaataactccaggtaacaggatagacaaattatctgaaaatgatttaaatcttattcgtgacacagccatacagaatggcggaagaaaagtacaggtacaaatacgcgattcattatatgaagtaagtaatcgtcctgtagaaggtgattctaatatattcaaggttagagcataccgagacatatcccaggcgcgtgatattgcattaacaggaaacgctataaggttagcacgacaattaaatactgggctgaatgtgtcgcatggaaattttttaaatttgtcggccacatcatcttcaaataacagtcaggagttagcagcccacagttcaccaggagcacctgctatttttgatacatctaataaacaacaattagtggataagattgatttatgcagtttctcaccaaatgttgatgaactttcatgttcggaagaaaacttaacatgcccggtaatgttagttgttcctgaaaaaggcgtttttgtgaaaactagtccagagtcagacatatgccaattatttgatgaaatagcgcttatccaacttattattgacggtgccgtacatcctgttagtaggactccgttatcactaggcatgataataaataaaaatgaatgttattttgacactaccaaaggtaattttataatcccataa

SEQ ID NO: 401175 - DNA, 1509 bp, Salmonella enterica
gtgcaacgtaatttaccgcacataataagccaggccaccaatgccccgctgttacttgaacccgcctacgcgcgggttttcttttgcgcgctgggcagggagtcaggcgctggcagcctgcaaattccccagagccaggaaaaccttgatcaggcgggtatggagcttgttaccggaaattatatgtccggcgacaaaccacgggcgcggttttatcaggtggtgaatggtattgcagtgttacccgtgtcaggaacgcttgttcataaactcggcggtatgcggccattttccggcatgaccggctatgacggtattactgcccgcctgcagcaggcaatggacgacccggacgttaaagggattttactggatatcgacagtccgggcgggcaggccgcaggcgcgtttgactgcgcggacatgatttaccgtctgggacaacagaagccagtctgggcgctggcgaatgacctggcctgttcaggggcgatgctgctggcgtcagcatgttcccgccgcctggtgacacagactgccagaatcgggtctgttggcgtggtgatggcgcataccagttatgccgggcagcttgagcaggaaggtatcgatatcaccctgatttactcagggagtcacaaggtggatttaagcggaatccgcgaactgccggacagtgtaaggaaggattatcagcagaaaatggatgatgcgaggctgatgtttgcggagaaggtggcgcaatacacgggcttatccgttgaggcggtcatggcgaccgaggcggctacatacgatggtcaggcgggcattgatgtcgggctggctgatgaaatggtaaacgctgcagatgccgttacggtaatggcatcggcgctgaagaataactcaagaggaggcaatatgccggaattaacagcaaaagaagcggcagcgcaggaaaaccagcgcgtgatggggattataagctgcccggaggcaaaagggcgcgaacaactggcgcagatgctggccggacaaccggggatgagcgtggcacaggcgcaggccattctggcggcggccgcgccgcagcaggacgttatcagcgaggccgatcgcattatggcgcttgatgaggctgagggacgcgaggagctcgccgccacgctggccgccatgcctgagatgactgccggacaggcgaaaaccattcttgctgctgcgccgcgtgccggtgctgccgatatggcatcgctcagcgacagtattctggcactggatgaggcaaaagggcgtgaagaactggccggaaaactggcgctcatgccgggaatgaccactgagcaggcccgtgaactgctggctgccgctccggacaaatccggtaatgcggggctgagcatgaacaacgcatttgatgctttcatgcagtctcattccccgggccccatatccggcggcaaaggccacagtaatgataccgaaacgacgttgttgatgagtattcccggtacttcagccacctga

SEQ ID NO: 401176 - DNA, 507 bp, Salmonella enterica
atggccgttttgttgaataaaagcgatatggcctcctccatcggtatctcagtacaggcgtttagtgaatggggggttactcctgtagaacgccgggggagagaggttttttatgatgttaaagccgtactggagatagatcgcgagcgacagaagaaaaaacaagaatccccggatggtgaaaataatctggaggaaagattacttcaggccaggattgacctgacggaagaacaggccgttgcgcagcggctaaagaaccaggttactgaggggaagatggttgataccgggttctgtgttttttttctgagtcgactggcgatggatttatccagcacgcttgacgccatcccgctggcaatgcagcgcaagtttccggatatgccaccacaacagatcgcacacctgaaaacgctggtggcaaaaggcgctaaccagtgtgcaaaagcgggagataaattaccggagttgctggatgaatatatccgaacagaaaatgaataa

SEQ ID NO: 401177 - DNA, 2280 bp, Salmonella enterica
atgaggggtatcggagctgttatccattttcgcccatcgacagatagtagcataccgtcccctgacctcagcgggaggtggaacagtatcagagactggttctccctgcccgttcaggatgaggccgctcagtgctttcgtgttttttatcagccgaatgaagccgcgtctcctacggacaggttgaagaactttttaaaactgaaagccctggcgtctccgggacgccaggataatttcaccgcagagcgaatactcggtaccggtgaaaccatctgcatgattgcctccggtaaatacagcgacttcccccccgtcacacttcacatgagcgttcaggaatggcatatgacacaatctcaggaagagacggctgactgcacagtcacagtattgccgcttagtgcaggcaacccggcagcgaccacagcagaaaagagcgccggaaccagccgaaaaggaagccgtatcacaaatactcagattcaggcatggctggacctgtcgccggaggcgaaacaagatgccggcggctggaaaacatgggtgcaagcccagggaatatccatcgcaagtgccggaaactttctgacaaatacagggctgacctcccgcggagtggagcggctgcagccgctaggagagaagggttcctccattacaaatgcacagattcaggcatggcgggacctgtcgccggaggcgaaacaagatgccggcggctggaaaacatgggtacaagcgcagggaatatccatcgcaagtgccggaaactttctgacaaacaccgggctgacctcccgcggagtggagcggctgcagccgccaggagagaagggttcctccattacaaatgcacagattcaggcatggcgggacctgccacaggatgcaaaactcaaggccggcggctggatgaaatgggcgcaagcactggggataaacatcaaaagcgccggagcctttctgaccaacagcgcgctgacccccttaggtacagatcgcctgaaaccgccaggggaaagaggtacccctattacaaatgcacaaattcgaacatggcgggacctgccgcaggaggcgaaacacaaggccggcggctggatgaagtgggcgcaggcactggggatagacattggtagtgctagtgcctgtctgacaaatacagggctgacactccagggggaggtacgactacaacctcccggggagagaggctcccccatcacagaggcgcaacttctggcatggtttaacatgtcaccggaggaacgccacacatcaggtggatgggccgcatgggcgcaggctcaggggatatcctacagaagcgccagaaagtatctggcaccgatagacagcgagataccatccagtggcacatcgcgtccaccaccgtccgcaaccgtcacgagtgacagtccacaggcatcaacatccgtagccacaaccacaggcgatgagataaccgtcagcgtgagtacgcccccggagcgcagcggggaaaaacggtcgcctccctcgaccaaagaggatatcccagccccgccggcaaaacagatcaaggaagaggaagatgacgttacctggcggacacaccagataaataataacctgcccattctgcaggactggcgtgacccgacaatatcggttatggcccgggcggaaggcaggattgaaaccctgcatgtcacacggtggagacctctttttaacctgttatcccggcagacaaaagccaggattaatcaggagattcgctggtttttgcaaaatgaaggaaggcatgatgcgcggatgaatgaaatgatgtccgtcgctatcccccttgatgaccacgacggttacagggggcgtacagtctacgcacgaaccgatctggcggcgtttaccgtactgggcccctattccggtcgcctgctggacagtgaaacggtacggtgtgaatatgaaagagtgtatggcagggaagccagcaattattatttcaccacgcgaagccaggaacgcctggtgtccgcctggccggaaggaaatctcctcagcctgattaacagtccggtattttctcagcggacagcggagacagaagcaagacaaaacgtcagcgcggtgcgtgtagggaagaatattcactttttcctcaccacacgcgacgtccgcgccggggaagaactgtggtttgattacgggccggactatcagcattttgagccgggtgaagcgttacgctcagcgcaggttaaggaagagccactttctccgaaggaaggatag

SEQ ID NO: 401178 - DNA, 354 bp, Salmonella enterica
atggaaatcaaaacaattaacgtcagacttagcactattaataccacctaccccgctgtagctgaaatttatattaacgatgaactggtcagttatatctgtgaaaacagggaagataaccgtgatgaagaacctcagtcaattattcttcctgacggcaaacacttcggtgacttttgctgtgtggaacatgcagtaaaagcagtaacccgacaccactgcggagataacggactttatatgagtgctgatgctggtctgaaaacaggactgctggcagcgataattttagcactggccggacagaataacgctgaacaacagaactcgctgaaagagaaaatcctgcactga

SEQ ID NO: 401179 - DNA, 318 bp, Salmonella enterica
atggaagccatcttcattagcgggctgttcttctatgcaccaaaagacgccgccagcagtcttgatgagctgaaagcgagtctggctgaactggaagaagaacgcgctgaaaatccaaatgcggagtcgactggcaatgaaacagatgaagaacctaccatcgttgtagccgaaggtgcatttgattcgctcgctgctcacatggagtctgaaaaagcggagtggcaatccattaagaagttatgccagcaagaaggtgggctgcccatacgcattggcaacattaaaatgtctgagtctattcagattataccttag

SEQ ID NO: 401180 - DNA, 168 bp, Salmonella enterica
atgcacttccgagtcacaggcgaatggaatggagagcaattcaacagagttatcgaagctgagaacatcagcgactgctatgaccactggatgatatgggcgcagatagcacatgcagaagtaaccaatattcgaattgaagaactgaaagaacaccaagccgcctga

SEQ ID NO: 401181 - DNA, 543 bp, Salmonella enterica
atgaactacccaacagtcgttaacggcattgattttcgcgatctgatttttgtagcagacaacgatccggttaccgattcttttatggtggcaaaagcattcggcaaattatcgaaaaacgtagtccgcgacattgaaaggactattgatgcttgccctccagagtttgatacaaagctcaattttgagctttgctataaaaacaatgagttacagaatggcaagccgcagaagttttaccgactccgcaaggacggcttgatgcttcttgtcatgtcttataccaagaaagaagctatgcgaatcaaaatcgcatatatcaacgctttcaactggatgtacgccatgcttcaggttggtaatcgtcaatttgaagaagagcgaaatgccgtaatgctggagtacatgaaagagaaggatgtcgccagcatgtcaggtcgcctgctaaatcgctggggaaaaattaagaaaccacagctactggcgagaattgaacgccttgaacagcacgggcaaaccgtaatccccggactcaccaattaa

SEQ ID NO: 401182 - DNA, 234 bp, Salmonella enterica; identical to SEQ ID NO: 31730

SEQ ID NO: 401183 - DNA, 744 bp, Salmonella enterica
atggtcagacgttatctcccccttaacccgctgcgcgcctttgaggccgccgcccgtcatctcagttttacccgcgcggcgattgagctgaatgtcacccatgccgccgtcagccagcaggtcagggcgctggaagaacaactcggctgtgtgctgtttacccgcgtctcgcgcgggctggtgctgacccatgaaggtgagggattactgccggtgctcaatgaggcgtttgaccggattgcggatactctggagtgtttttctcacgggcagttccgtgagcgggtgaaagtcggtgcggtgggaacatttgccgcaggctggctgctgccgcgtctggccggattctatgacagccatccgcatattgatctgcatatctccacccataacaatcatgtggacccggcggcggaagggcatgattatacgatccgtttcggtaacggcgcgtggcatgagtcagatgcggaactgattttcagtgcaccacacgctccgctgtgctcaccggccattgcagaacagttacagcagccggatgatgttcaccgctttaccctgctgcgctcattccgccgggatgaatggagccgctggctggattgtgcgggcggcacaccgccttccccgtcacagccggtaatggtgttcgatacctcactggccatggccgaggcggcacaactgggggcactgttgcaaatagtcggtggtgataaacttatcatccccttttgctga

SEQ ID NO: 401184 - DNA, 657 bp, Salmonella enterica; identical to SEQ ID NO: 31789

SEQ ID NO: 401185 - DNA, 444 bp, Salmonella enterica
atggctgacgctaaattatccggaccagatgagaagttattttaccaaagccgtcgactatatcgaaagtgttgcaacatttattacatccaagtgagcatgatggtgaaaaaattcaaaaagttacttttagagttcattgtagcagttatgctttcgctttctataccgggtatggctatggcagcagatgctggagtccctggggctatgtgtcagtcagctggagtgtggcagggcttgattaagaatatctgttggagctgcatttttcccatgaggataatgggcataggggcagctccagaaggcgctgctccttcacgtccgggttgctactgcacagatcagaacggcgtaccggaaataggttggcaattgagcttctttcagccggtgaagattgtagaagttgtaaagagcccctggtgcagccaatcatga

SEQ ID NO: 401186 - DNA, 522 bp, Salmonella enterica; identical to SEQ ID NO: 105772

SEQ ID NO: 401187 - DNA, 552 bp, Salmonella enterica; identical to SEQ ID NO: 227820

SEQ ID NO: 401188 - DNA, 435 bp, Salmonella enterica
atgagtaaccgaattactcagatagacactgctacaggggaagaggtaggtagttttgtcgcagttatccgacccaaacagaagtcagcttttgagaggcatttcactatgaaccaagacgctttaaagatccttgctaagaccctcacaggggagcaattcaaagtcttgatgatgctgttagctgatctcgattatgaaaattacatccaaattgcccaagccgatattgccgacgctttaggtatgcagaaaaccaatgtaagccgttcggttaaggcgctaattgacctatccgtgattcttcaaggcccaaaagtagggcgcagttacagttaccgtctgaaccctcagtttggctggaaaggtactgtcagcaaccacaagaaagcactaaaaaacggcctcagcgttatacagggcggcagaacctaa

SEQ ID NO: 401189 - DNA, 192 bp, Salmonella enterica
atgacgaaacaacagaaaacagcgctgaacatggctaaattcatccagaatcagtctctgctcctgctggagaagcttaacgagcttgatctcgatgttgaggcggacctttgtgagaaactccacgatgatgcggagcatcttttccgtacactctcctcgagactgaatgcatcacaggatggtaactga

SEQ ID NO: 401190 - DNA, 402 bp, Salmonella enterica
atggccagagtatctattagtgaggctgccagactgacgggtaagagtagaacaacgctgcacaggttaattaaagcaggtgacttgtccacctgtagcggtgaacgtaatgcaaaaatggtagatacttcagagcttttgcgtgtcttcggtccctttgagcaacctaagggtgaacacctttctggacaggtctctgaacagcgtgatacagcctctgctgaccagaatgaacaggtgattcgtcatctgaaacaggagattgaacacctgaacaccttacttttgtccaaggagtcgcacattgacagcctgaaacaggccatgctccttcttgaaaatcaccaggcaaaattaactgaatccccggcgccatggtggaaattctggaagaaatcctga

SEQ ID NO: 401191 - DNA, 1623 bp, Salmonella enterica; identical to SEQ ID NO: 31773

SEQ ID NO: 401192 - DNA, 3327 bp, Salmonella enterica; identical to SEQ ID NO: 370762

SEQ ID NO: 401193 - DNA, 315 bp, Salmonella enterica; identical to SEQ ID NO: 370763

SEQ ID NO: 401194 - DNA, 1503 bp, Salmonella enterica; identical to SEQ ID NO: 370764

SEQ ID NO: 401195 - DNA, 978 bp, Salmonella enterica; identical to SEQ ID NO: 370765

SEQ ID NO: 401196 - DNA, 1791 bp, Salmonella enterica; identical to SEQ ID NO: 370766

SEQ ID NO: 401197 - DNA, 735 bp, Salmonella enterica; identical to SEQ ID NO: 370767

SEQ ID NO: 401198 - DNA, 396 bp, Salmonella enterica; identical to SEQ ID NO: 370768

SEQ ID NO: 401199 - DNA, 360 bp, Salmonella enterica; identical to SEQ ID NO: 370769

SEQ ID NO: 401200 - DNA, 534 bp, Salmonella enterica; identical to SEQ ID NO: 370770

SEQ ID NO: 401201 - DNA, 318 bp, Salmonella enterica; identical to SEQ ID NO: 370771

SEQ ID NO: 401202 - DNA, 588 bp, Salmonella enterica; identical to SEQ ID NO: 370772

SEQ ID NO: 401203 - DNA, 174 bp, Salmonella enterica; identical to SEQ ID NO: 370773

SEQ ID NO: 401204 - DNA, 567 bp, Salmonella enterica; identical to SEQ ID NO: 370774

SEQ ID NO: 401205 - DNA, 1029 bp, Salmonella enterica; identical to SEQ ID NO: 370775

SEQ ID NO: 401206 - DNA, 858 bp, Salmonella enterica; identical to SEQ ID NO: 370776

SEQ ID NO: 401207 - DNA, 354 bp, Salmonella enterica; identical to SEQ ID NO: 370777

SEQ ID NO: 401208 - DNA, 1647 bp, Salmonella enterica; identical to SEQ ID NO: 370778

SEQ ID NO: 401209 - DNA, 294 bp, Salmonella enterica; identical to SEQ ID NO: 370779

SEQ ID NO: 401210 - DNA, 1263 bp, Salmonella enterica; identical to SEQ ID NO: 370780

SEQ ID NO: 401211 - DNA, 477 bp, Salmonella enterica
ttgcgctggataccctttttagctgtctttctctatgtttacattgagatttctatctttatccaggtcgcccatgtgcttggcgtcctgatgacgttaatcctggtgatttttacgtctgttatcggtatgtcgctggtacgtaaccagggttttaaaaactttttgctgatgcaacaaaaaatggcggccggtgagagcccggcggcagaaatgattaagagtgtatcgctgatcatcgctggcttactgctcctgttgccgggatttttcaccgattttctcggccttctccttttgttaccgccagtgcaaaaacatttgacgctgaagttgctgccgcatttacgtttttcccggatgccgggcggcgggtttagcgcgggtactggcggtggcgaaacatttgacggcgagtatcagcgtaaagatgacgatcgcgatcgtattgaacataaagacgatcgtcgggattaa

SEQ ID NO: 401212 - DNA, 1437 bp, Salmonella enterica; identical to SEQ ID NO: 370782

SEQ ID NO: 401213 - DNA, 1302 bp, Salmonella enterica; identical to SEQ ID NO: 370783

SEQ ID NO: 401214 - DNA, 348 bp, Salmonella enterica; identical to SEQ ID NO: 370784

SEQ ID NO: 401215 - DNA, 1704 bp, Salmonella enterica; identical to SEQ ID NO: 370785

SEQ ID NO: 401216 - DNA, 576 bp, Salmonella enterica; identical to SEQ ID NO: 370786

SEQ ID NO: 401217 - DNA, 492 bp, Salmonella enterica; identical to SEQ ID NO: 370788

SEQ ID NO: 401218 - DNA, 294 bp, Salmonella enterica; identical to SEQ ID NO: 370789

SEQ ID NO: 401219 - DNA, 876 bp, Salmonella enterica; identical to SEQ ID NO: 370790

SEQ ID NO: 401220 - DNA, 273 bp, Salmonella enterica; identical to SEQ ID NO: 370791

SEQ ID NO: 401221 - DNA, 336 bp, Salmonella enterica; identical to SEQ ID NO: 370793

SEQ ID NO: 401222 - DNA, 861 bp, Salmonella enterica; identical to SEQ ID NO: 370794

SEQ ID NO: 401223 - DNA, 1401 bp, Salmonella enterica; identical to SEQ ID NO: 370795

SEQ ID NO: 401224 - DNA, 594 bp, Salmonella enterica; identical to SEQ ID NO: 370796

SEQ ID NO: 401225 - DNA, 774 bp, Salmonella enterica; identical to SEQ ID NO: 370797

SEQ ID NO: 401226 - DNA, 627 bp, Salmonella enterica; identical to SEQ ID NO: 370798

SEQ ID NO: 401227 - DNA, 2205 bp, Salmonella enterica; identical to SEQ ID NO: 370799

SEQ ID NO: 401228 - DNA, 1632 bp, Salmonella enterica; identical to SEQ ID NO: 370800

SEQ ID NO: 401229 - DNA, 720 bp, Salmonella enterica; identical to SEQ ID NO: 370801

SEQ ID NO: 401230 - DNA, 267 bp, Salmonella enterica; identical to SEQ ID NO: 370802

SEQ ID NO: 401231 - DNA, 1341 bp, Salmonella enterica; identical to SEQ ID NO: 370803

SEQ ID NO: 401232 - DNA, 1647 bp, Salmonella enterica; identical to SEQ ID NO: 370804

SEQ ID NO: 401233 - DNA, 1353 bp, Salmonella enterica; identical to SEQ ID NO: 370806

SEQ ID NO: 401234 - DNA, 933 bp, Salmonella enterica; identical to SEQ ID NO: 370807

SEQ ID NO: 401235 - DNA, 2271 bp, Salmonella enterica; identical to SEQ ID NO: 370808

SEQ ID NO: 401236 - DNA, 762 bp, Salmonella enterica; identical to SEQ ID NO: 370809

SEQ ID NO: 401237 - DNA, 1338 bp, Salmonella enterica; identical to SEQ ID NO: 370810

SEQ ID NO: 401238 - DNA, 1644 bp, Salmonella enterica; identical to SEQ ID NO: 370811

SEQ ID NO: 401239 - DNA, 669 bp, Salmonella enterica; identical to SEQ ID NO: 370812

SEQ ID NO: 401240 - DNA, 1080 bp, Salmonella enterica; identical to SEQ ID NO: 370813

SEQ ID NO: 401241 - DNA, 1503 bp, Salmonella enterica; identical to SEQ ID NO: 370814

SEQ ID NO: 401242 - DNA, 336 bp, Salmonella enterica; identical to SEQ ID NO: 370815

SEQ ID NO: 401243 - DNA, 444 bp, Salmonella enterica; identical to SEQ ID NO: 370816

SEQ ID NO: 401244 - DNA, 435 bp, Salmonella enterica; identical to SEQ ID NO: 370817

SEQ ID NO: 401245 - DNA, 909 bp, Salmonella enterica; identical to SEQ ID NO: 370818

SEQ ID NO: 401246 - DNA, 420 bp, Salmonella enterica; identical to SEQ ID NO: 370819

SEQ ID NO: 401247 - DNA, 1680 bp, Salmonella enterica; identical to SEQ ID NO: 370820

SEQ ID NO: 401248 - DNA, 690 bp, Salmonella enterica; identical to SEQ ID NO: 370821

SEQ ID NO: 401249 - DNA, 1311 bp, Salmonella enterica; identical to SEQ ID NO: 370822

SEQ ID NO: 401250 - DNA, 621 bp, Salmonella enterica; identical to SEQ ID NO: 370823

SEQ ID NO: 401251 - DNA, 510 bp, Salmonella enterica; identical to SEQ ID NO: 370824

SEQ ID NO: 401252 - DNA, 1737 bp, Salmonella enterica; identical to SEQ ID NO: 370825

SEQ ID NO: 401253 - DNA, 957 bp, Salmonella enterica; identical to SEQ ID NO: 370826

SEQ ID NO: 401254 - DNA, 672 bp, Salmonella enterica; identical to SEQ ID NO: 370827

SEQ ID NO: 401255 - DNA, 567 bp, Salmonella enterica; identical to SEQ ID NO: 370828

SEQ ID NO: 401256 - DNA, 1437 bp, Salmonella enterica; identical to SEQ ID NO: 370829

SEQ ID NO: 401257 - DNA, 1959 bp, Salmonella enterica; identical to SEQ ID NO: 370830

SEQ ID NO: 401258 - DNA, 315 bp, Salmonella enterica; identical to SEQ ID NO: 370831

SEQ ID NO: 401259 - DNA, 1650 bp, Salmonella enterica; identical to SEQ ID NO: 370832

SEQ ID NO: 401260 - DNA, 690 bp, Salmonella enterica; identical to SEQ ID NO: 370833

SEQ ID NO: 401261 - DNA, 411 bp, Salmonella enterica; identical to SEQ ID NO: 370834

SEQ ID NO: 401262 - DNA, 888 bp, Salmonella enterica; identical to SEQ ID NO: 370835

SEQ ID NO: 401263 - DNA, 1647 bp, Salmonella enterica; identical to SEQ ID NO: 370836

SEQ ID NO: 401264 - DNA, 1350 bp, Salmonella enterica; identical to SEQ ID NO: 370837

SEQ ID NO: 401265 - DNA, 669 bp, Salmonella enterica; identical to SEQ ID NO: 370838

SEQ ID NO: 401266 - DNA, 459 bp, Salmonella enterica; identical to SEQ ID NO: 370839

SEQ ID NO: 401267 - DNA, 279 bp, Salmonella enterica
atgaaaaattcagtttggtatttgatttgttttttttgcggtattctcgccgcatctatctataacataagcaaggaacctgaacgaataaatggtccagatttcacagcgttccagctacgtgatattttcaataagcaaaaggccgggtgctctttagccagtgtatcaggttcatcagtgaatggcggtgaatggaatctcgattacatttgccctaacgggaacattcaaagccctgtgtttactaacaccggggaagaaaaaaccgggcagtaa

SEQ ID NO: 401268 - DNA, 210 bp, Salmonella enterica
atgaaatcgagggaaaataaaaagaaatcgaggagaaataaaaagaaatcgggggaaattggtggggtgtcattttatccccccccgattaacattacagaccaaattttttgtatgggtgttatgtttgtttttctggtagttgttatggttgcttgtgtctattcagttcacagtaaacttggggtttttggggtttgtttgtcataa

SEQ ID NO: 401269 - DNA, 1674 bp, Salmonella enterica
atgcatgtgattaatcaattggcatgtaacagtaatacactttcattgcatgatatttttaaaatatgtcaaaacaccggggttcttcgacttgtaaaaacagaggaagacgaaaaatatattcgaattatcatttgtggtatttatcgcattcaaaaaaataaaaaaaatggcaaggtcagcatgtggggctacaagctgaaagataaagaatctggagtatggtgccgaagaaattcgcttccgagtaatgtgtatttattctggtcgaaaaaggcagcatttgatatggacgactggcttaggtgcgcgattaattatgtgatcaaatcattagttgaggctggtttttcaattgccgacaaactttatttataccgtataagagcacgtaacgggaagagcgcctttgtttccacgctaataccatccagtgtaattcaatacttgtattatggtgaactgtatcatcctctggggaaagtcgcattgtttaattacccctatagtgcgcagcatatcactaaacatgaattgcttgaagaaatagaaaagaaaatctatcaaagagcatataaggttattggggtagataatgaatttaatgcttcaaaagctctaagtaaaagcatatggatgattgttgataaatccattttcacaaaatatgcaagggcctcacattgctctataacttacaattctgttcgccaggcaatttttaaagactatctggacttttcaaaacgaattcatattactgagggggtggattttggcggtctgtggcctatggttggacgtctcagacgccagcataaaacaggacgatttattttatcaggaaagactaaagagttgtttgagaaacttaattttccctgcaacctcagttatggggatttcaggaagttacggcatacccgattgtctttggtctcagctttaaatgataatcgctatgagtccttcaggctaataaccagattgttacacaatccacttataaaacgttatccagtaaaagtggttttctggattatagagtatctggagtcgcgttatcgttatgacaaagaggatgacatttatcgtgtgtgttcaaaatggcttgaataccattgtgatttatttaaaaacattgggttccgtgaacaccactcagaaccctggataatgtctcgttgggaaacggaaaaaaattttctgtgccatgcaattgactggctattggatgaagaaccgttaattcacaaaaaccagcagtggccttctttctggagattatctgatgagtggacacagcgagtaaggcaaaacgctacggcagcaataaaagaatggaaaggaacgggtattgactggaaggccattgataagggtgttactgaactggtcacctttgaaggcctgtgtaatgaagggcgggagatggaacactgcgttgccagttatgctgactggtgtgcctccggtcagtatcttgctatttcagtatcaatggaaaatgaaagagcaacactcggcctctccagaactgagcataatattacatatcagtttgaccagatgagaggtattcataatcaggcagtttcaaggaatatgctgtacagaggtaaacacattttaaaaactattaataccattttgacaaaaacggattcagtttaa

SEQ ID NO: 401270 - DNA, 225 bp, Salmonella enterica
atgagtatcatccaaagaaaacatgaccggaaaaaagatggcacccggttttatcactctaaaaacggaaatatcctttgtcgtcttgatgcaacgctgaaccgatatgattgggagcagctacaggttttattcaattttatctatagccaggggaaagcagcgggaagtgaagaacgcgcagcagaaatacgtatggcgcttggatttgaggatacaaaataa

SEQ ID NO: 401271 - DNA, 216 bp, Salmonella enterica
atgaagaataaaccaacacctgaacaggtaaaagttgcaagaattgccgctggtctgactttgaaagaggctgcggatacttttggatatcaattaaattcctggcagatgaaagaaagtgctggtaaagcaagtcgatcattatcagttggagaatacgaattacttttacttctggcagacttacatcctgattataaaataataaaaaaataa

SEQ ID NO: 401272 - DNA, 150 bp, Salmonella enterica
atggaaggtcagttaattttttgttccgattcaatactacggtttcagtccgattacgatgaaaccgctgccgttccattgctatccatccagaacgtcatagccactttcaatctcaaattcatctgtcagaacgcgttcccggtttaa

SEQ ID NO: 401273 - DNA, 366 bp, Salmonella enterica
  misc_feature (6)..(15): n is a, c, g, or t
atgaannnnnnnnnncgctacgacaaatgcatccttgaattaatttccaatattattcacttaaataccacgactaaaaacccagcatttaaggaggaaaaagaagtacgattagtttatcaaactcttgatacaggaagatatgaatacccagaatcatcatcaattaaagatctgaaatatagaatatccaataatcaaattatatcatattacgaattaggtttcccaaaagatgccgtttcagaattgatattaggtccaaacaataaatttaaagaaagcgatattgttaactttttgcagtataatggttttgaacacagcataaaaatattgaaatcaaaggccagttatggagcttaa

SEQ ID NO: 401274 - DNA, 312 bp, Salmonella enterica
atgaaaaaagattcctggcatagaaaaacgattattgaagaatgtacaaagcgaggaattcatacacatatttttctatcatcaaacagggttcaaaccaacatagatctggttgctaaaaatgaaggaatttctttcattttggacgctgtcgatcttaaagccgaaaaagtaataaccaaggccatgactgagccgacttatgttacgattggtttggcctggaagaaagataaatatttatcatatgcaaccagagcgttaattaaatttattgaggattatattaaagaacattttacaattaaataa

SEQ ID NO: 401275 - DNA, 729 bp, Salmonella enterica
atgtataaagaagaaaataaaaatatagctcgtaaaagtgttttaaaagctgcgattgaggcgcttactttgtgtagaaaagactcgactttagctcctaaagactatattcgaaaagttaaagcgttttataggaaagacgagagtgatccacgtgcgtttattgttgatgagttatcggaggaaacaataattcggtgggaggaattctatgattcagtgattcaggataggactgcacgtagtattaaagtcgcatatttatctgggcctaaccctgaaaatgatttaactgaaatgactgatatggggcttttgccagaaaatatttgggcatttgaaagtgatgctaaaatatataatgaggctgtaatttcagcactttcttcaaaatttccgtttataaaattaattaaagctaatgttggggatttttttgaggtgtcaccgcagaaatttgatcttatatatcttgatttctgtgggccattgccgagtaagaaagctggtcagaaaacattaaaggcaataacatcaatattaaaatatcatgcgctttcacctcttggtgttatgataacaaatgtaagtctaccgtcaaaagaacaaaacgcgaatgaacataaaaatatcgtaaatttagttgcgagttatctctatccaaaatcaacactggagagtaataatcctgaatggaactgtactgatggtacatatctgcctcgatga

SEQ ID NO: 401276 - DNA, 339 bp, Salmonella enterica
atggaagccagcatcacggttagccatagcttccagtgccacccccgcgacgcgctccgggcgctctgcgcggcgctgctcacctcggcggctacctcccgcaactctttggccagctccacccatgccgcccctgtctggcgctgggctttcagccactccgccgcctgcgcctcgctggcctgctgggtctggctcatgacctgccgggcttcgtcggccagtgtcgccatgctctgggccagcggttcgatctgctccgctaactcgttgatgcctctggatttcttcactctgtcgattgcgttcatggtctattgcctcccggtattcctgtaa

SEQ ID NO: 401277 - DNA, 579 bp, Salmonella enterica
atgttcacagatcatctcgcgcgccatatgctgatggtcgccgtggtgatgttcttcgcctttagctgtctgtttacgctctccccgcagaacatggcggatgcgaaagcgcagaacattccggtactttcctacctggccaaccatttcgcctctttgtcggggacaaaatccacttttgcaacggtgctggagtatggcgcgtctatcatcgcgctggttgctattttcaaatctttcttcggccactacctggggacgctggaagggctgaacggcctggtgctgaaattcggttataaaggcgataaaaccaaagtctctatgggcaagcttaataccatcagcatgatcttcattatgggatctacctgggtcgtagcttacgcaaacccgaacattctggacctgattgaagcgatgggcgtgccgattatcgcctcactgttatgcctgctgccgatgtacgccattcgtaaagcgccgtcgctggcgaagtaccgtggtcgtctggataacgtgttcgtcaccctgattggtctgctgaccatcctgaatattgtctacaaattgttctaa

SEQ ID NO: 401278 - DNA, 525 bp, Salmonella enterica; identical to SEQ ID NO: 398929

SEQ ID NO: 401279 - DNA, 1467 bp, Salmonella enterica; identical to SEQ ID NO: 398930

SEQ ID NO: 401280 - DNA, 261 bp, Salmonella enterica; identical to SEQ ID NO: 398931

SEQ ID NO: 401281 - DNA, 594 bp, Salmonella enterica; identical to SEQ ID NO: 398932

SEQ ID NO: 401282 - DNA, 537 bp, Salmonella enterica; identical to SEQ ID NO: 398933

SEQ ID NO: 401283 - DNA, 426 bp, Salmonella enterica
atgaaactattcgacttatttaatataacacatcctgttttaactgttccaattacaattatcatggggttaatatttctcaccgttctttttaatgtgttcaaaaaccagttccttaccaaatacaaaagactcgatgagtctggattctggaaaaacatattccatttattgaaatggcttaaagggaagataaattatcttgttggggtttattttttcagtatgacattattgttttccatcatggtttttatattcagagatgaaacattcgggttagatttaacggcttatatcttatgcggttttatcagtattggtttaagcattctcttttacacatacagagatattaatttcgatttaaaaacctataagcaagtaagacaagagcaaaaagaaaagagaaggagaaagatatga

SEQ ID NO: 401284 - DNA, 711 bp, Salmonella enterica
ttgtggaacggggttaagatggcatatatccttgtctggaagccatttataatatggtgtggagcggttattggttggttaattcttgtcgtagaatctctttttgctggtcctttatggatggttgctcaccttgcccctgatcaggatggtgttgtgggtaaaatggggcagggatatatgttagttctttcattgttccttcgtcccgtcctaatggttataggattcgttgcggcattatcacttatgacaccatgtcttatgttcataaatgcttttatcgcatttaacggtaatgcaattggtgtaggtgcagcggctttaatcggtaagattgtaatgataagcatctaccttaaagtagttgaagaagtaatgaacaagttattcggattaatacactctataccagatagtatcttacaatggatcggtggtggtttatctcgctctatgggtgattatgcaaatggcattgaagcaggttctacccaaaacactgaaagatttggtcaaggtatgagccaggttaatcaggcagtaaccaatgcaggaactgataaaataaaaagagttggtgctgaaaggaaagaatcacttaaaggtaatatgactaatgccagtgcaggcgacgaaccgggaagtggtgcaggcaacaaaacaaaagcaagtgaatcaccaggcaacaagccaaaaacaaaaggttaa

SEQ ID NO: 401285 - DNA, 255 bp, Salmonella enterica
atggaaattttaagagaaaaaagaaaagcattttccactaacagatatatgttagtgattgaagattttaacggcggcttatctgattcagcatacagaataattgaaacaacaaaagatttcagaccagaagacagatttaattctacaaaaccaacctacacgactttaagccatattgatttttctgacaatgaagaagttaataataaaagtctcattacattaaaaaataaattctttgacctaatataa

SEQ ID NO: 401286 - DNA, 468 bp, Salmonella enterica
atgaaaaaaccaaatcaacaatactctaccttcacttcatatctttctaaaaccaataaaaatgtagatatgtataggctttacaacccttataatagtcacctttccatttacagctttgattacgataactatttttacaataaatacttcggaagacatgaaataacaaaacgaaacttcctaactttatttgctatcaatacctattatatcttctctcagccgttttttgataaaaaaatagatccgataacaagagtgataaaatgtttttattacaggcttaaatcaaatagattcaacattgataaattatcagttacttttagaggtggtaatgtgatatttagaacttataatggtaaaaaagaagaaatttcatggtttacactttccagaattgctaatgatattttggatattaatgactactcaatgagtaataataaattacttgcggcataa

SEQ ID NO: 401287 - DNA, 765 bp, Salmonella enterica
atgaataaagaaatagtaaatattttaaatgaagtagtagctaagtcaaaatttgcaaacacagaaaaacacttcttcaattgtgtatctcattcaatgattatgaatgcttttattcagtttgaagaaaggaagaaattctacctccaggacgactatgcttttaatcattttatgagcgaagaaacaataacaatgtttaatagctatgagtttaaaaagaataataaattcttcaaacaatttaaaagcgaaattgttaaatccgcaatgattttatctaactgtatagaaaatgagcctttaacagatatttttaaagaattgtttgaagtttactatgcacaaaacgatcagacaaaatttgcaaaatacattgacagtaaattaacaaaagacctgaaagttgaatatgttagctttaactatgataaaaatgatttttgtaatgtagaacccaccggtggcactggttttctcttatattccttgttaaataaaataagcagaaaagcagggctggaagaaattcaaaagctaaatatcacatacttagaaagcgatcctttttttgctcaaatatttattgcacaaacactaactaacatgttcaatcataatcttgactttaaagtattagatatctatatagcaagtaaagcacggtattacgactgtggaggatataaagaagcaggacatgtaatgatagtcaaccaaaatgagtttgtagcaaaacgagttttagaaatccaaaacaattaa

SEQ ID NO: 401288 - DNA, 465 bp, Salmonella enterica; identical to SEQ ID NO: 400671

SEQ ID NO: 401289 - DNA, 1059 bp, Salmonella enterica; identical to SEQ ID NO: 377160

SEQ ID NO: 401290 - DNA, 465 bp, Salmonella enterica; identical to SEQ ID NO: 377162

SEQ ID NO: 401291 - DNA, 177 bp, Salmonella enterica
atggtctggaattacatttcccaaatgatctgtctggttgcggtgaatcccccaggcaagcacactttgcagacctttattgactataatctgtggttttctaccgctattctgttcttttctgaatataaaatcggggtgagagatttctcttatgataatttccctggtttttga

SEQ ID NO: 401292 - DNA, 204 bp, Salmonella enterica
atgggccggaatacgtggctgttcgccggatcgttgcaggcagggcatcgagcggcagcggtgatgggcctgctggagacggcgcggctgaacggcgtggagccgtatggctggctgaaattggttctggagcggctaccttcattaccggaagagcggctgcacgagctgttacccttcgcgaaagatcctctgaataactga

SEQ ID NO: 401293 - DNA, 627 bp, Salmonella enterica
atgcgtcacgcggtgcagcagggcgtgactaaatataatcccgcttacgatctggatggtgtcgtaaccccaacggtgacccaacaccaccccgccctgcccctgaaacgcctgccggagctgctggagaagatgaatggctacaagggtcgagaactgacccggctggcgctggaattgaatctgcatgtctttttacgctccagcgagttacgcctcgcccgctgggatgagttcaacctgaaagcccgtatctggacggtgccagctaaacgggaagcggtgaagaacgtgcgcttttccgagcgtggcgcaaagatgaaggatgagcatctggtgccactatcagcgcaggcggtcaccctgctggagcagattaaggacatcaccggagagtcggtatttgtctttgcgggggcgcactcgatgaacaaaccgatgatcgaaaacaccatcaacaaggcgctgcgggtgattggctatgacaccaggaccgaagtctgtgggcatggcttccgcacgatggcctgtagcgccctgaacgagtccggactgtggtcaaaggacgccatcgagcgccagatgagccacaaggagcgcaacggcgtgcgggcggcgtgtacataa

SEQ ID NO: 401294 - DNA, 999 bp, Salmonella enterica; identical to SEQ ID NO: 380089

SEQ ID NO: 401295 - DNA, 531 bp, Salmonella enterica; identical to SEQ ID NO: 380861

SEQ ID NO: 401296 - DNA, 222 bp, Salmonella enterica
atgcagacggcgggaacaaagccagacgccgtgtttatcccaccgcagcagtttgatgcgggtgcgatttttattggtgaagagaaaggcagcgccgtcgtgccaggtcatgctgagagcgttctgcacatactgcgtgaggacatcagtaccgcagcgcatatcgacagggtggcggacgaggaagagccgctcaggcttcagcatgttttacgctcctga

SEQ ID NO: 401297 - DNA, 1149 bp, Salmonella enterica
atgcgaaagaataaaataacgctcagtcatatcgcttgctttgttgctttgcaatgttcattacctgtagcccttcctggttatgctcgggaatactttaaccccgctatgctcggtatcgacggaccaggtaaagatattaccgatctgtctgcctttgaggaaggcgtaggtcaaatgcctggcacttatcatgttgatgttgtcatcaacaatgcagcacagggaacttatgacatccccttctcaatgcaaaaaaacgcccaaggtcagcagagcttacagccctgcctgagcattgatatgctcaaaagcttcaggattcgcacagaactgtttccccagctcgttggcgacggacagtgcgccgtgctcaacgcgatccccatggctagcgccgaatttgatttcaaccatcaacggctgttgctgtccattccacaggcggcggtatccaccatggctcgaggccgggtcgcgccagatcgtctggatgaaggtatcaatgccctgttacttaactatacatttacgggtgggaacaccagcgcgcgccagtcaggcaacagcgattccgatagctattttctcaacttaaggccagggctaaacctgggaccatggcgtctacgcaactacagcacctggaaccagaacaaaaccggtgacacaaaagaggaaagctgggattccgtctatacctatgctcaacgcgatattatcgcgctaaaaagccaactgacgctgggcgatagcactgctccttcggatatgtttgacagcgtgccttttcgcggcgtgcagttagcatcagatgacgacatgctgccagaaagtttacgtggctatgctccgatcatccgtggcatcgcccgcactaatgctcaggtgagtgtgaagcaaaatggctatgttatttatcagacatacgtttcacccggcgctttcgagatcgcagatatgttccccactggcagtagcggcgatctggatgtaacgattaaggaaaccgacggcagcgagcagcaccaggttatccccttcgcctctctgccggttttacaacgggaaggccgtctgaaatacagcgtgacaagcggacaataccgcccctacgatggcgacattgataaagaatggttttcctag

SEQ ID NO: 401298 - DNA, 1203 bp, Salmonella enterica
atggaccgcgtccttcattttgtcctggcgcttgccgttgttgcggtactcgcactgctagttagcagcgaccgtaaaaaaattcgcattcgttacgtcattcaattactcatcatcgaagtattactggcctggttcttcctgaactctgatgttggccttggcttcgtaaaaggtttctccgagatgtttgaaaaactgctcggatttgccaacgaagggacaaacttcgtcttcggcagtatgaacgatcaaggtttggcgttcttcttcctgaaagtattgtgcccgatcgtctttatttccgcgctgatcggtattctccagcatatccgcgttctgccaatggtcatccgcgcgattggttttctgctgtccaaagtaaacggtatgggcaaactagagtcttttaacgccgtcagctcgctgatcctgggccagtccgagaactttatcgcttataaagatatcctcggcaaaatgtcccgtaaccgtatgtacaccatggcggcgacagcaatgtctaccgtttccatgtctatcgtaggcgcgtacatgacgatgctggagcctaagtatgtagtcgctgcgctggttctgaacatgttcagcacctttatcgttctttcgctgattaacccgtatcgcgtggacgccagcgaagaaaatattcagatgtctaacctgcatgaaggccaaagtttcttcgaaatgctgggcgagtacattctggcaggttttaaagtggcggttatcgtcgcggcgatgctgatcggcttcatcgctctgatcgcagcgctgaatgcgctgttcgcaacggttaccggttggttcggccacagcatctccttccagggcattctgggctacatcttctacccggtagcgtgggtaatgggcgtgccgtccagtgaagcgctgcaggtaggaagtatcatggcgaccaaactggtttccaacgaattcgtagcgatgatggacctgcagaaaatcgccgccaccctctctccacgcgctgtaggcattatctccgttttcctggtatccttcgcgaacttctcttccatcggtattatcgcaggcgcaattaaaggcctgaacgaggagcaaggcaacgtggtttcccgttttggtctgaaactggtttacggttctaccctggtgagcgtactgtccgcctctatcgcggcgctggtactgtaa

SEQ ID NO: 401299 - DNA, 351 bp, Salmonella enterica; identical to SEQ ID NO: 395583

SEQ ID NO: 401300 - DNA, 816 bp, Salmonella enterica
gtgtctgatattagtaatatagttatttttactccaacctacaaccgcgcccatactctaactcgttgctatgaaagtatagttaaccaaaattataaaaatctaacgtggatcgttattgatgatggttctactgataatactagagacttaattgacaattttatttgtcaagatcaaataaaaatagtgtaccactatcagaagaatgcaggaaaacagggggcatggaataaagctgtaagtttatcacaagagtatgatgccttcttgtgcttagattctgatgatatacttcttgaaaattgtatatcacatgtgtcttcatactttagtctccttaacgaaagtgacgttattggtctcagatgcttagcaattagacaatctacaaatagacccgatagtctttataatttgaaacgagttgaaaaaaaatcatggtacgatgaattatctagcagacagcttggagaaagagctgatatatttgatcctaaaaaattaattaattatttatatccagtagatgaaacgataaagtttgttccggaaatatggttttatgcagcaagtgctccgttatataaatatatatatatcccggtgccattaactaagttttatgataaacattgccatcttagattaagtaaggtaagtttttctcagcatatacatggacataagaaggctcgtgaaataatattacgtacagttcccttaaaagtactttataaaaaccctgttttttacttaaaaaatttaatacggtaccttcaatgtttatattatatttccataagaaataaataa

SEQ ID NO: 401301 - DNA, 1122 bp, Salmonella enterica
atgataataaataatatattgttaatggcattattagctatatgtactatagacctacctgctgttatagtagtttatggcttgcagttgtatattttgccatgtattgtactaatgtgcttaataagaggggggggatttccattaaaacttttttttgtaaccgcctctctatcattaataataattattattactgtaatccagaagacctatactccttaccctgatttactatggagctatactgctagattaatttattggattatggtttttacactgcttgttccatttatacagaaaacaccactgatagttttaataaaaataataagaagatggatattgatatattctacatttttatttatacagtttatagcattttatctatttcatattatagttgattactcattaattattggtggtcaggaatcaaggatactaaatgaagtaggcttaagagcctcaggcttgactgctgaaccctcaatttattcggggataatgatttcactattgatactattgtatctcatgactgggaaaaataatataataacatacatagggttaataagtatactatgtactttatctactttagggatttttttggttattgtttatttggcaataacaaatttatatcgagttaaaatttctaaaatagttttttttatatccctttcaattgcaattatttttgttttatgggattttattttaaaaaggatagaactttttctgcaggggggggatgttagtaataatataaaaattatggtcattgataacctgtttaataatgaatctttatttctgcttggatatgggctggttggctatagtgataaagctcccctatactatcaggccctttatgatctaacattatttgggaatttatgtgttatctttggtgttcctgttggtcttatattatctatgactatttttttacttgtatttaatatgagaatttgtctcgagaagaaaatactgataattctttcttttctaaaaatcactatcccaaactatatatttttttatttcttcttagttttgctatatgtcataactaataaaatatcggtaagattttcacaatag

SEQ ID NO: 401302 - DNA, 666 bp, Salmonella enterica
atgaaaatggcctcgctgcgtgccgtactgcaacaggccgggcgtaagcaggtggcggagcatgagcggttgactaataaatcgttgggactggctggcgcatcgcgcaacggtacacggcaggctattacgccggagcattatcgtcatgcgctggaaaccgcccgcgcgaaagatccgggactggcggcagcactggaactggcgcggctgatgggattacgttcgcaagaagcggtacaaagcgtgcagtcgctgagaacgtggaaacaggctgttgaacgtggcgcgacacgcctgacagtggttttcggcaccaaaggcggacggccccgcgaaacagtgatcctggatgctgacgcagtccgaagagcgctggagaatgcgctgactattgcagaaagctgtaacaacaggctgatcgacaagcccgatctgaaaagcgctatggattactggcataaccaggcggcacggattggcctcactggtgcgtattctccgcattcgctgcgttatgcgtgggcgcaggatgccatccatcactatctggcgcaggggttaagcaggaaagaggcgctggcaatggtggctatggatctggggcatagtgacgggcgtggacgatatgtggcgcaggtgtatgggcggcgggatgtggaatga

SEQ ID NO: 401303 - DNA, 228 bp, Salmonella enterica
atggacagcagctttaacacccagatagacgatttacgtcaagccggcgcgacggtgcggctcctgacagcggaagaggttgcgcaatggcaaatcaccacccgctaccaggccgcgcaagctaaatgggttaaagagcaggaagcgaaaggcgtcagggatgcgggaacggtgatgaaacaggttaccgccatcatggatgacgcaatgcggcggaaggcacgctaa

SEQ ID NO: 401304 - DNA, 312 bp, Salmonella enterica
atgcgtacgatcaattcaattctaatcgccttattcttttcgtccccagccttcgccgccgccctcaccgagcgcgaagagctaaccttgtcccttagccagcttagccaaatcgaagcctcgctccaccgcgcccagcagagtgccagaaccggcatcaacgagcgctactacttcgactacccgcgcatccacgacgatatcaccaccctgcgcagcgggattgaacattacctcacacccacccgcgcccagccgcgagatacagcgacgctggttgggcaataccgtgaagagagagccacgccatga

SEQ ID NO: 401305 - DNA, 1659 bp, Salmonella enterica
atggttaagtttaattacctttcatttcctgagcatgatttaaaggaaatattgacatcggcccaagacaacaaattagtgttttttataggctctggtttttctaaattcagtgagactgagtttataaaaattcctgactgggctgagttgatcgatgagttaaaagaagatttaaatcttccgtatgaaagcgactatttaaaaattgcacaactgtattttctcaaatatggtcagcactcatatgttcaaaaagtaaaatcctccattaaagacttagagccaagttcgtttcacaaaaatttgttcgatttaaatccccactatattattacgactaattgggataacttaattgagcaaactgctcaggatatgggacttgcctatgatgtgattagctctgacgtagatttggcacaaagccggttggacaaaaaaataataaaaatgcatggggatttcagacagcataattttgtgtttaaagaagatgattatttgcagtatagtcaaaacttccctttagtcgaaaattacataaaaggcattttttcaacgtgcacaatagtttttctgggctattcttatagtgattatgatttaaaacaaatagtgtcctggatttcaaatatatctaaagcaacaccaaaaaaatatttactccaaaaaacgtttgatgatgcacaggcttactatttaagaaatcatggtatatcgttgctcacaccaatgaattctaatgtagattatcgcgagctatatttaggtttttttaaggatcttaaaactataaaaaaccaagatgaatttataaaagaaatattgatttctgctgagatggaattgaagaagatagatgataatgtcaattttcctgaggtagagaaaaatagcaaaaaacgtcatgtatacgattttcttaatagtaggataaataaagctttagataataagtttagagttctgtcacagtataagatgttacttcctgagcaggtaagtaaaagattgacaaattgcactattgattatagctctgcccctgatattgcattgatatctcatggtaaataccttactacagattacgatgaatgcagtagaaaaattaataatatgttttttgataacgttctgagtgtgaacaataaatatacgaatgttttttcagtcttgttggaaaaggcatttatcacaaaggtcatttacgatacgccctcaaatagttattctctgaaaaaatcatcatatttatttgagggggctttatataagaagctcatgttcgagtatactgaagatagtgtagattttctttttataaataaagattacagtagggctttggagtgtcttaaatcagaagtaaagtacttcctcaaagagaagaactatatccgagcgactatttacatggcgggttttgatattatttatggcattgttcaacgctccataccaagcaaaggtgatgattctaaagaatcaccagtaaagataatagaaaatttttccccattcgattataagaataaagtgcttgatttccctagggaaatgcaaaaagatcttcgtgaacttatagacatccttgaattcaatgaaatatacaaagcctattataagtttcatagggaaacacaaaaaacttag

SEQ ID NO: 401306 - DNA, 1038 bp, Salmonella enterica
gtgagacagttttttgagtctaatatctttggaagtttagaacattatttaattgagggtaaattccatgtcaatattatggatttattcatattgattaaatattgtgaaatgaagaagattaaagagtttgcgagtagattgcttgaaattcaaaaaaataatcaagtggctcactttagtgctaaagaaattgtacgcataaaaaaatatttactactcgtattgaaaaacataataaacctattcaatatgcaaagtgaaagtttcttgcatatgacatcaattgatagatggcttaataacttgttaattttatttggttttgccaaatggaacgacaatgaaatgaaggagataattagcactataatttctttgttagaacatagaacaaaaaacatggttatttatgataatgcgcaatatcttctaactgtaaacgcgttgttgtatcaaaaatcacaccctgatatcttaaaacttttggatgttgttttggagaagatttccaataatcagttaaacggttttgatcaacaaattatgtatggagatactttaagaaatatttatacattatcagaaaattacaatcatatttacggaaatataaaattaataaactctgctttaatggtaataaaatctcgcagtgatgagtggaaaaaattcataacagataatttattgttagaccttaagcgaattggatctgaagaaattaaattagttattgatgattttatttcacaaaacattttggtattgccatgtagaacaccgaaagactatatggagcgtttgacattgttggccaatgggtaccctatgcctgaaggttttttagaagaattaacgtcatttgttgatgaaaatattcctaataatttgagtgaactggaattcatcaaggctagagtggaaactggattccctgaattactaaagttcttaataaaagagaagaactatactgagttgcaatctatttttgatgattttgaaattcgaacaaaaactgataaaaaaagataa

SEQ ID NO: 401307 - DNA, 684 bp, Salmonella enterica
atgcccgaacatgcgccaccaagaccagtgcgccgtcccggactgctcggctggattgcattacttcccggcgtgctggtcggcttttgcctcggcgcatggatgctggcaatagcgctggagtggctgggcgatgcttttttctggcggaacacctgcgccagccacagtgagcagatattgcaggcaacatggctgtggtggcggggttccgctggcgcacctacgtggttagtagaagatttggcgattgtcagcgatacgttgctgaaagggagcgcagcgctggttcattcgttcaacgggcaaaatgggttgttctggacggaaaccgtcacttcgatgatccgatgtgcgttactatctgcgggcaatgttaccctcacctttctgctgcggctggcgattctgttgcaggcgctgccactgtttgtgctgattatcatcatcgggctgattgatggactggtacgccgcgacttacgtagattcggcgcaggctatgagtccgggtttgtttatcatcacgccaggcgtatgatcagctccagccttgcggcaacggggctggtgtggctgacggtgccggtttttcttgaaccggagtatgtgttgataccagcggcagcagggattgggttggcagtatttttgacaatcagctcatttaagaaatacatataa

SEQ ID NO: 401308 - DNA, 609 bp, Salmonella enterica
atgcttaaacgtctggcttacctgattgctggcagcgctctcctgctgctggcggcggcgatgttctggtgcgtcaaccgcctgaacactctgacgctagcgcagcaacaaacacaacgccagataacgcaacggcgcgaccaaccgaagccagacaatgattaccgcgagctacaggttgccgtaaaaaacattaccgatcgcacggaagcgcttacccggcaacttaacgatgccacccgcgctcaggccgaacagcttcaacccattaacgaacagatcaaggtactggagagacaagtccagaccctgaacgccaattatcaacacctgcaacaacaaaccgccacgcgcagccgcgcaaaggcaaaacgtcccgtctcatctccgctttgggccgcaaaggcccctttttcccttatcagcagcgagtttcgcgccggacggcagttcgccgtcatcgcgccatccggctatcgctcgctctcgcagcttcagcttgttacccccggcgacagcgtgcagggctggcaactgctgcaactggacagcgaccgcgccatcttccgtaaaggcgggcagcggctgacgctgaacgccggaggataa

SEQ ID NO: 401309 - DNA, 216 bp, Salmonella enterica
atgacagtagaaagtgcacttgagatagtaaaaaaatattctatacagtcccttatcgttattgtcatatgcatacctattgcactctttttcatcaatgaatacaaatcgcttcaaacgttaaaagatgctcataataaagaggtcaatgccttttatgaaaaaacctcagcaaaggaaaatgaaataacacaaaaacaaggagaaaaattataa

SEQ ID NO: 401310 - DNA, 417 bp, Salmonella enterica
atgcgtcaggaccgggcgctgctgacggcgtgctgcactgacatgtctgtgggggcgttttctgcgcaggttcaggccttcaagacaataaatccggtgggttttcttgtggttaacaggccatccctcccggcgcaactgaatatgaatacgcgggcaaccgtagcgtatccgggtttccgctatttcccggatacgcagggttatcgcccgatcgtcacgccggctctgccagtggtaaacggttctgctctgcatcagcaacccgcatccccgccggacgctgatacggtaagcctcccgcaaaaatgtaaccgcctggcgcttctgagccggcctcagaacttttgcttcagtacctcctgcagcatctccttgtccagactcagctcagcgaccagcttcttcagccgctga

SEQ ID NO: 401311 - DNA, 456 bp, Salmonella enterica
gtgaatgagggaggtctgctgtacggtgatgaacccgccaccgttgttaatagccagtccgacgatgtactgcttcttgaatccgaagctatggaaaaaggtgacgcggaaggacccgaggcggcgcttgcctggctccagtcccgaccggggatggacacaccacgccatcgctggctgatacgcctgttgatggcccgggtggcagagcagtatggtcgaaacgatatggcgcttcacctgcttggcgaactgaccaccagtgcaccacagctgacgctggaagactgggaacccgcactgttgtttgaagtccaggctcgccgcctgaaactgctgcgcctgaaagccggtcgcagcgaatccgataaagcccgtctgatgcctgagatggatacgctactggcgggtctgatcgccatcgacccggcccgtgccatggtgctctgtggttaa

SEQ ID NO: 401312 - DNA, 417 bp, Salmonella enterica; identical to SEQ ID NO: 401310

SEQ ID NO: 401313 - DNA, 2502 bp, Salmonella enterica
atgattagccttatagagtatttatgtgaaagaatcaaaagtagctatgagtttaataattactataatggtttattagaacagttagctcattcatttttcgagaagaataagcatgattttgtttttacggcacagcacgagaggcttctacatttcagtcaatttttttctaattccagtaatgaacataatagagctatcgccttaaaagtaatttcaggcataaatgaattgttccctaataataactatacaaaggctataactaaatccattcttacaaactttggattattttcagcggtaacttcctttacagatccctctgtttctctctcaacttcatctgcactattaggtgatattcgtagggctattcaggctataccgaattcagaatattcatttactaatagacaatacgatatctataatgagatcctgattaataatttttttagtttttcagggccaacatcactgggtaaatcatttgttattaaaaattgtgccattgatttacttgataggtttaatgttattgtttttattctacctacaaaagctttacttgaggaatatttagttgattttcgtgctatgttaaataagcgaggaattgataatgttaatatcactaaatccgtatcaggtgtgaaaccaggtgaaaagaatttaatgatctttactcaagagagatataataattttctttacgaattggattatagcgatattaatgttgatgttcttttcatcgatgaagcacacaagttagctgataaaagtagtaagagatctatgactttatataaagtcatttctacctcgttagagaaatatccgagcttgaaactcattttttctagtcctgttatttctaatcctgatatattttttaaatattttaatgttaatggtagaagtttaagtatagcggaaagcccagttgctcaaagcttattctttgctaatatctatagtgaagaatataaatattttgatacagtgacaaaagctgttattgattttaatatatctggtgatttcgaatctgatttcgatttgatttttaaaattggttctcaacatgattcaaatcttgtctatgtttcaagtaaatcacagtgtgtaaataaggcgatagagttttccaattttctgatttcaaagggcacagcaatcgttaaagatgaagagctagttgccgaatcgaaattgatttctgagtttatccataaagatttttcgttacctcatctattaaaatatggtattgcatatcatcacggaaacttgccagcattcattcggaaaagaatagaatttctttatgcaaataaaaaaattaagtatatattttgtacttccactcttttggaaggtgtaaatcttccgactaagaatgtttttatttatccttttggtaaagcaaatagcaacaatggtttttctctggatttttggaaccttgctggaagagcaggtcgctataagaacgagttgacagggaatatcatttgtatagggaacgaagaaaactcttgggatgaatttgaaacttctgttgctaataaagatcaaatagaaattgataacgaaatttcaccacttctaaaagctcatcgaaaaatacttaattatcttaacgagagtgtaaagtctccagatccaaaagtggttgaaatttcaaccatgattttatctgaggttttaacatatataaatgaaggtaaagtcggtggattactgggggcattcgattcaaaaattagacaaaaaattatttcagcaggaagagctcatttagctaagaaaaatcttcttaacattgatgtttctactttttcagaaaatcatcgttttgactctgacattcaatcttcagcgtataaattagcctctaacagcaataacattttaacaacttttcagaaagaagatgtctttaaatatttacaaaaaataaatgatgtctataagatagtcaaaccagtagggattcttccttttagtatcatgacctattcttggttaagaggtgaacctattaatgtaattataagtaacggtattaggttcagcaaaaaagtctgtgaaccttcgccttatcgttgggttgattttgatagtagcaattcatatcatgtgaatttaaaaatattagagataattaattcaattgagaccgatataacttttaaattggaaagtgctttggctcattattatcagttatgtaaatctctacatggcgaggatgcatcaggtataaacttatctaaattcgttgactatggaacaattaatgctaaggaaatgtctttgcaagaatacggtttttcaagggctgccgcatctgagttattaaaaaaataccgagttttcgttgagtttgatagcaatgacgggttgaaaagaattaacgtcaaggggcttttgaattctgttggcagtggaggattacttaaaaaagaaattgaatggcttaatatttga

SEQ ID NO: 401314 - DNA, 1470 bp, Salmonella enterica
atgagtgtagctaattgcataaagatcaatgggttaggatctgaatcgactgggtatctttttaaggcaggttcctgcgatgcaagttttgtgatctcatcgaagcatggtctttgccatcagaagacaagttgtgagccattcaaagcaaagacagcaggatgttgtaggcaatgcccagtccaactcagcttagatactatttcattagaaaactctaaaatgagcctcaatgccataaagatctttagttttcctgatagagacttggctataactcttgtcgagggatattctagtcatcctttacgcatcggtagtgaagctaatattagttcaacacattattacctcaatgcttataaacaagatgatacggaaccagggcgtattatgctcaatttccctgataaatcaactgatgggcttatatattataatatagaatcgaactcaacacctgatttggtcgaaaagtctagagggtataaaggtgtttctggtgcattagtcttagaatatcctgcttcagatttcccaatagcacatgctgttgtaatagaaaatggtaaaaataatgatcttgttgctgaatctctaactgatattgaccatgagcagcttaataaatttttcgactgtatcgtttttcataaaccagcttggacaataaaattagataattcaataggtgattatgtccaagaaatttttaggaaaaaagttactgatgaatttgaagttgttacttacataccgtcacataaaggatttcctcactttaacttaaatccaattgcaaaatttttgcttattgaatttaatcatatgctaactacaaataaactttctctttctcaaggtatgtatagagccggtaatttattagctaatgaggaaaagcatgaaccagccaataagttgctaacaggaaggttggtagaaacatatcttaatgcacctcatctttactctactgggctgacggacaaatactatcatcacatgcattatatgattagtcccgatggcaattatgaattagcattttcaaattattgtggtcacaataatataattgaaggtttaaatgatgaaatagggaaagtaatttctaatttcaatttttatggttttaatcaggaattatttttagaacgttcatttttaaatcaaaaacttcctgcatcagaatgtgaaactctatttaaagttcttttttctgaagataaatgtatcagtacattttgtttagtttttactgtatccctggaggaatataataaaaatgaattcgcttcggtaaatgattatattatctcgctggttaaccaagcatgtgctggtattgatgaagaaatcctcaagagtctttcctttggcttaaaattaaatttattgatcatgccaagtaataaaattaatgaattatcgctggcaattgttaaggagttaattggtgatgattag

SEQ ID NO: 401315 - DNA, 987 bp, Salmonella enterica
gtgccaataattaatgtgttagatgctggtcatggcgattgtattctgttagatttcattcatacattgatacttattgattccgggcctaaaacatttttgataagaaggaatgttatagagaagcttaaagaattattgcatgatagagcaattgatattgcaattgttacccataatgacgatgaccatattggcggttataaatatgtaatatcttcagggattaaaattgaaaaattcatttttaatagtctcagtttttgtggcgaaatttttactgatcatgaacaacatatttcctataatcaagatgtcaatttagatacccttataaaggataagggggtttccttagagacattagtatttggtaatgaaccaatcattatcaatgatatcaagcttattcctttaacaccgacgattgatgcactccatcatatgcataatgattatatcagaaagaatcaaccacaaatatcatctgatgaaaaagtggagcctaccttattagagtgtattgaagaaattactaatggtaacgataaattcatacccgatagatcaattactaacagaaccagcttatctcttatcatcgagtataatagttttagaggattgtttttaggtgatgcatgggcatctgatatcattgaatgtttcagatcaaaccaaattgaaccaggtttttgtattacaaaattatcacatcatggaagtgaaaaaaacacaaatagcgaaataataaagataataggtaaaacagaatatatattttgtgctgataaaaccaagcataatcacccgaacaataaaactatcgctcggatattatcccagtttcaacaagcaacatttcattttagcagtgataatgacaaagtcagaagtattttcagtgagaacaatgtgttaggatgtcaagtgttatgcacttattcttctaatggagttaatgtacgatactatgagtgtagctaa

SEQ ID NO: 401316 - DNA, 531 bp, Salmonella enterica
atgattaataaggttttatttcaatcaatgttaatggttattttcactactttttcttgctcttcatcagcaagacttcaccattcagaaaaaatgaatgtttttaatgataaggctctagtggcagaagctaaatatagctttattgatgttcgtgataataatctatttgttgatggtaagtacaacaaatcttatgttgataaaatgtatgatacttactctattgtttatcaggaaaatagtattaactattacttaatgttaaaaagtggcgggttattgaaaaaacatatactcaaaacaaaagaatatttaaatggaaaggattgtgaaaaagctaagtatgttaaaaactgtattttcatggaaaaaagaattgacgagatgtataacctttcggtgatgattgataatggtatggatgcagattcaattagaaaaaatttatacaatgacgtatacaaagacagttacaaagttatgctaatgaataaatacattgaagctcataattctttacacgattga

SEQ ID NO: 401317 - DNA, 960 bp, Salmonella enterica
atgaagtttagatctatatccctcacaggtgattttaatatgtcaaaaagcaactacaagtttgaacgttggattcctcaatcacagtcatcttgggcatggcgagtatttaaaaagcataacaatgaattattgagaatgctaataacatttgataatagtcataaatttacctatagcaacctgaaagaaaaaggggcaaattttgaatctgaggttatcagttactttgattcatctctcaaattaaaagggcatatgaatgatactaaatttaaaaatatcaaagaatggagcaattctttcaatgaattacaaaactggatgaatctcaatgcacttcttgcaatgatgtcgaacttagaaacgtatatggcaacagtcattcctttagctatagaatctgacatcggtgttctgtacggtgtttcaaagagaatagatggtattgagctgcttaaacatggtaaacaaaaaaaccatggtataaaagaaatggttataggttgtactaaaggaacatggcaatcaagagtgaatacatatataaaaattttcgaccatgctccagataaacttatcaaaaacatatctgaactagataaaatgcaagatataagaaataaaattgctcatgcttttgggagagacattgaaagctccagagcaaatggtaaaatcactacattacccagtgaaaaaataaaaaatgataaattaattgaatttcaaacaaccgtatggcaaacagcaaaagttatagattttcacttgcaaaattctcatatcggtgaatacttaagagtccttttctatcataatatgcaaaaaaatttaaacacaacacttcataaaaatgaaaaggctgttattttaaaaaaaaggattggtaaatttggcgacgtttctgcaggtaaagaattttgccaaggtttagtagagtactatgataaactttaa

SEQ ID NO: 401318 - DNA, 1173 bp, Salmonella enterica
atgaaatatgggtacgtcacgagcaataaaaactatattttttattacgatgaaagtaataacataagaacttttactttgcgaggtaataaatataatgttgacaataaccctcaaagtacttactcacctatttttgttttagctgggattgttacaaaccaaactaaacacaatatttcagcacaagaggtaagaacattacttaatatccagagcaatgttaaagaaataaaactaaaacatgtcggaacaggtagtttccctgaattgatgaataataaaaagattcatgtgtttctaacatggttgcttgagagccctttctttattcattattacgcaacaaatacggtctactggtctttccttgatatcatagaagaccttgcacactatttattcgacaaaaaaaacagttctttattcaaaaaagcatttcataacaatatagatcatagatcacaactcgatttttacaaaaaagctctatatatacttataaaaaaagacaaaactggttttttaaaattgatgaatgattttaattatcctgaaataaataataatgatgctaataaattttacaaatccctgcacaaattttgtagaagtcacacaaatagttaccttagctacaagtataagaatccaaaccatattgagaaatcattgctggaactaacaaggctcctgtccatctgtaaagacattgataatgccgaattaacattcaatgataaagatcttcttatagattcattttctcatttctatctcaatcgattaaatggatttagaaactcccagcacttgcttgatgaagaagacttaatagaaccgcatctggtactttcaacaaaaaatgaatttattggtgatgaaaaaaatcaatactatgggctgaatttcaaattcataaaatcggaaagcaatattgaaattcaaatttctgacattattgctggtataattcgctctctatactcttttattgagcaggttgagttttccgaaattgatagctttattgaaaattccaccgaattgcaaaaggataatataaagatactaagcatgttaatttctaaatctgttaatgaatgtgaaggctttatttttagaacccaaccacaaatggatgaatcaaaaatgtataagctattatcataa

SEQ ID NO: 401319 - DNA, 384 bp, Salmonella enterica
atgagtaaaataataacattgtcgtatacaaataatttcaagccagtcagcgataataaatctcaatcattgcgaacacactgtgtcagtgtacgattaaataaagaagagttagagcttctcaatgcaagccgtggtgataaacgcaaaggtgaatggcttcgcatggcatcacttcaaaagcttcctcctaccattcctgcaatcaatttagaagtttggcaatcattgtctgatatatctcaaaagctaaatcgtctaataagtcaccttgatactaaaagcagtaatagtgaattgacgaaaacagaaatcttcgctgtcaagaaacagatcaaagagcttcgatcatgtcttacagtttctgatccgtctgtaaggtag

SEQ ID NO: 401320 - DNA, 207 bp, Salmonella enterica
atgatggacaattattttaaatctaacgataaccgagtatctgattctgagtaccagcgtttagtggctaccaaagctgctcttgaaattatcaaggccgccgtatctgcccctaccaatgcgaaaaacgtgtcttatgatttggaggaggcaataaaataccttccgcggttgactgatgctattcaggaaacgattggtaaataa

SEQ ID NO: 401321 - DNA, 417 bp, Salmonella enterica; identical to SEQ ID NO: 401310

SEQ ID NO: 401322 - DNA, 417 bp, Salmonella enterica; identical to SEQ ID NO: 401310

SEQ ID NO: 401323 - DNA, 417 bp, Salmonella enterica; identical to SEQ ID NO: 401310

SEQ ID NO: 401324 - DNA, 312 bp, Salmonella enterica; identical to SEQ ID NO: 396968

SEQ ID NO: 401325 - DNA, 408 bp, Salmonella enterica; identical to SEQ ID NO: 396967

SEQ ID NO: 401326 - DNA, 2907 bp, Salmonella enterica; identical to SEQ ID NO: 396966

SEQ ID NO: 401327 - DNA, 1059 bp, Salmonella enterica; identical to SEQ ID NO: 396965

SEQ ID NO: 401328 - DNA, 525 bp, Salmonella enterica
atgaagattattatttgtttagtttttgtttttctgtcatttaactcttacgcgggtcaatggaaggctaaatacttcagtgacggaatgagaggtacagtaataaaagatctggtgattgagtcaactaataatgtgtatttcgatgctccatatgatggtggctcaaaaatggagcttatactaaggtctaaatggacaaaactacaaaagggtcaggatattaacactcttaaaccagctgatgtcctgttaacaatcaaacccggtcagtttaactgtattctctatgaggaatgcagtatttctgtaaagtttgatgatggtaaaatattacgctatagagcaagaacatcatcagatggtagcagtgatgttatttttattagaaatggcgcgtcatttattaagaatgttggagcacataaaaaattaattattgagagtggattttatcagggtggaaacagacaattctattttgatatcgaagggtataaagaaaaactaaatcaaaatatgtaa

SEQ ID NO: 401329 - DNA, 3336 bp, Salmonella enterica
atgggtgacgttgcctctcttgccgtcgggctgcatctcaatgcagctaattttaaatcacagctgatgagcgcctacggtgatgccgacaaccagtcacgccgttttaaccgtaatgcccaggctgatgctaaaaaaacagaggatgcataccggcgtgtttctgagtccgtaaccgggcttgctggcaggctggcaggatttgccggagctggtttatcactcggtgcaatcatcaatacgactcgtcagtacgcacagtcattatctgatttgcaggctattactggcgccagtactgcgcagatgaagttatacgatcaggcggcacaggaaatgggccgcacgactgaatacagcgcatcgcaggcggctgaggctatcaaactgatggcctcggctaaaccagagcttctgagtacctctgaagggctttctgctgctaccaaaagcgccatgacgctggcgcaggcagcaggtacgacgctcccggatgcaaccagaacactggcactgtcattaaatcagtttggcgccggtgcggaacaggccgatcgctatattaacgtactggccgcaggggctaagtacggctcgtctgaaatagtggataccgccgctgccattaaaaatggtggcgtggcggcagcacaggcaggcgtagggttcgagcagcttaatgctgcaattcaggtacttgctgcgcgagaaattaaaggtggcgaagcagggacagctttacgtaacgttatcctcaaccttgaaaaaggggctgacaaaagcctgaaaccgtctgtcgttgggttaagccaggcgctggctaatcttgcaggaaaaaacctgtcgacagcccaggcggttaaactttttggtgtggaaaacatcactgcggcatcgatactggttgataaccggagcaaactggatgaacttaccactgcgctgacaggaacgcagacggcacatgagcaggctgccatcagggttaataacctgaacggtgatctcatggggctaacctccgcgtttgaaggattaattctgaaggttgggcagagcggagatggcccgctgcgaagtggtgttcagaccattacagaagcgctgaacgggctggcggataattttaatacggtcgccaacgtagcgctgtatacgttgattcctgttatagctacaaaattgacgagcggggtaagggagagcgttgttgcctggcgtgaaaatcagacggcagtgaaggccgccgcacaggcacaggcagatatagctcggaaaactctggagagcacatctgcaattctggcgcagaataatgctgaatttggccattatcgtgagatggaaaaaaaggccaaattatatggtttgaatgtcagttaccagagtgattttaaccgcctgatcaggcaggaaactgagcagacattactggccacgcaggcaaaatatcagctaaatatagccaataaacagttgtctatatcagcgcgcgctgcttcagttgctattgggttggccaaaggagcgctggcattggttggcggcccgtttggtgcagctatgttggctgggtcagcgttgttatattttcatcaacaggctaacgatgcacgccagtcggcaataaacctgaaagatgctgttgttgaaactaccgctgctttgatgcagctttcagataaacaactggcggttaaagaaattgattatcgcgacaaactggacagccagctggaagaacagcgcaaactgcaggatgtcctgaaatatatgaacaaacagatcgaccagtctaataaacagggctggattggtgatgtgtttggtaataaacgcgagatggacgacgcccgtaaacgagcagaggaaaatcttgaatcggttaataaagggattcagaaaacccgtgataatctggtcaatgtcggcaaggccaaatttttggttaaaaacggcatcgctgattatgctaatcagttggccagcgatatcaagacaataacagccagtacaaaatcagaaattggacaggatactccttccacgccctggaaaggtcaagatggtgacggcggtaaggggcaaaaggcaagggctaaccagtatgagcaactgcggcgtgaaatcgaggcggcgcacgcgaccagtcttggccgtatcaacctacaagagcaagaaagttctaggaagctggctgaagcggcgaaaaaaaatggcgtcagcgatgctgatctccagaaaaccctgttactgaatgcggaaaactaccagaaacagcgtctcgaactggcagaacagtatgcgccagccagagcgtcgctgaataaagagcgcgaagcaagtcaggagttaaaatcccttttagatgctcgctttcttacggaaaaagagtatcagacggcccgaattacgttggcacaaagtacggcccgtgaactgttacaggcccaggctgatgcggtatccgcaccgttgcttaatatagccgggacagtagacccattggcagatcttcgcaatcagctaacccagcgccaagcactactgcaggcatattatcagaacgatgcgatcaacaaagagcagtacgaactgctgaagcaaaaagccgctaaggattctgctgattcacaatatcagacggctgtagaactgtatcgttcgcaaggtgatctcaataatctgagtattggtctgtttgagactgcgcaggaacgaaccagtaatatgctaaccgggttactgatgaatacgcagtcgttccgggatggcatggttagtatgtttgcatcactggcgcagtcagttattaaaaacctgacagatatggccgcgcaggcactgctgactaatacaatcctgaaatccatcatgggaattggatcaagaatatcaggcggtttaggtgaaagtaccggcacggccataagtagttttgccagcagctttgaatttaacgccaatggtggtgtttacgattccccgtcgctgagttcgtttagtaacggtatttataatacccctacgttgtttgcctttgcgaaaggtgccggggtatttgcggaggctggcccggaggcaattatgccgttatccagaacggcggatggcgtacttggtgtcagagcgttgcgagatgctgatgccagcagtcgtgatggccgcgccagtcaaatggtgtattcccccgtttataatattgctatccagaatgatgggaaaaacggagaaatcggtccacaggctgccagaaaccttatccagatgatcgattcacgggtacagataacaatgcagtccatgcgtcgtgatggcggaatgctgagcgggtga

SEQ ID NO: 401330 - DNA, 402 bp, Salmonella enterica
atgatcaaaatggaagttacaggcctggatgatctggaacgccagttgatggccctcggagaaaaagtcggtacaaaagtccttagagatgctggtcgggaagcgctaaaagttgttgaagaggatatgaaacaacatgctggctacgacgaaacatctacagcacagcatatgcgtgattctatcaaaatacgcaactccaaccgaaagagccgtggtagcacagtagtaacactgcgggtcggtcccagcaaacaacattatatgaaggcattagcacaggagttcggaacggttaaacaggtggcagaaccgtttatcagaccagcgctggactataacgtccagaaagtgttgcgtgtgttagctgtggaaatcagaaacggcattcaaaacaggtag

SEQ ID NO: 401331 - DNA, 201 bp, Salmonella enterica
atgtcaatcggactttttatacaaggaccaatggaagagaaagaagctgaagaactggctgaacgatacaggaaagctggacgccgggttaatgtcacactttcgtttcagcctggtttaaagctggttcaggtttacttgcctgagtttaagcatagaccaaaggcatcgagaatctatcaacagaaaatatggagataa

SEQ ID NO: 401332 - DNA, 219 bp, Salmonella enterica
atgaccgagcatttgtttggcacaaataaaaattattttgattcaggtgacttttcacatcgttatttctatcaactacggggatgtgttcccccaccgttgaagagaaaagaagtcgaagtattaaaaccagtaaacaatacgcctcgccaaaagagtattcgggaattagcaatggataaggcaagagctaaggcaaatcgtcgctacagaggataa

SEQ ID NO: 401333 - DNA, 330 bp, Salmonella enterica
atgcctgacctgaagaatatgatggacgacgaactgaccagtttacaacgtgatatcaaggcagaactggccagacgttcggctgaaaaaatgattccggtgtttggtgtgcaaaccagcccacttaatcaatatgaattttctaatccagagcaggccatttcctgcgccgcagagctgttagagcaggtactcaatgatattcagagcgatattgccagaggtggattagacggatggaatggtaatttactacgtatctacgtacagcatgtgaacgagagcgattttgccatcctgcagccttatttgcaggataaaaaatcatga

SEQ ID NO: 401334 - DNA, 1857 bp, Salmonella enterica
atgactaagcttaaaggaagcgggataggtgaaataattagtaatcttgttacggaagtggacgagattgaaaggtccgatattcctcaaggggataaaacgagaaaatttaaatcactcgcatcaaaagtgaaaaattcactttacatggataagcgtaagtatcgcggaaacggattgaaaaaccgaataacagcaaacacttacaatgcttacatgacccgcattagaaaacaatttgatgataggcttcatcatagtttctcgcaaacagttagccgcctggctgagcgctaccctatttatgctgatgagttaaacagctggttagctgcgccagccgcagagattcgccaaaaattgggggcgctgcagaaccggttgagagaaataatgccgcttgctgaaactctatcatctattaaaccaggtccggtatcagtgaaaaaatatgcccgtttaacaaaaaaataccctgaatgggccatatatataggctctctggggacaaatgactggaaactggcacaggacgaaatttatcaggcgttccagcagggggagggtctgcttgatgatctgggtagcctgaaggtcaaccatgaaattttatatcacctgcagctgagttctgccgagcgcgcatcgatacagaaacgctgggatgaggtcttgggtgaaaaaaaacgatcgacagttctgattgactatccgtcatatatgcaacgtgttatcgatatcatcacgccagaattcatccctaccggaacgtcaagggctagcctcgcaccgatggcatttgcactagcggctgtatcaggccgcaggatgatcgagattatggttcagggcgagtttgaagctgtaggtcgttatcaggtcaaattttatggccaggcaaaaaaacgtactggcgaggatagcggtcgtaccatctataccctctgcgatgcagcattgttcgtagctcgtttagaacaactgcgtaacgcaccagctgcagcggattttgacgatatcatggggccaggagacgatagctaccgttctgctaacgccagaattaacactatcctggccgcgccatttaatgcatttgcgaaagactttttcggtgacgagcgcagggtatttaaagatacgcgcgccatctacgcccgtatcgcatatgaggcctggttccgatacgatgcccgctggcagaacgttgacgaggatgtttttttctctgaaattctggggcatgacgacgagaatacccaactacactataaacaattcaaactgcataacttttcacgtagttggcgcccaggcaaaggccaagaaaatggtcgcctagccgcactacagcaactggatggagaaatgccggggttcgcacgcggtgatgccggagttcgtctccataacgccgtgaaacagctggtggaggagacaccaaacgcggtgataaataccaacgtattgaggaaggctggttttaacccactgctagtaaaacgatatttagattttgcagctgacgcgctggggcaaacggtcggggaaaatgggtggtatgaaacaaccgaagatctgccgcctatcgtactgaataatgacgaccatccggaagattttgaaggggaagatactgataataccgaaatcaaaacagcatctgataaggagaacgatggcgatagtaacacaacggtgcatgaaaaccgcccgcggtttgctgcgcctgttcgcacccctgatggaggctggtcggtgcggttcgaatatcaaagtgttcagtacgcatggaacggccaggctaagaacatgcgggatgccatgttaaaagcatggcaagcttataatcagtaa

SEQ ID NO: 401335 - DNA, 330 bp, Salmonella enterica; identical to SEQ ID NO: 401333

SEQ ID NO: 401336 - DNA, 327 bp, Salmonella enterica
atgtcgacaaccaactatttagacagtctggactatgaccagttgaagttttgccgcgatgagtgtgaggcacgaatcagggccattcaggaagaagaaaaaaaggtggcctgggctgtgactgatggcgggatcaactttggctggtttcgaacagaggactacccgaaggcggttgaatgtcttgctacagcagctgctgaacgttgggcagatgccgataaagaaaacccgaaaacgcgttatgaactgaatatcgccattgagggaaaccgcctgccgttgtcggagtacaacgcgttattcgctgatggtcagtgggggtaa

SEQ ID NO: 401337 - DNA, 4044 bp, Salmonella enterica
atgaaattaacggatttttttcaacataagttcaattctgatccctttgccattctggattcgggtgccgatgagttatcagacctcgctaaagcagcaggtataaactggcacgaatgcgcgcatgaagttcagttaaccactacccgtggcccatcagctgaacgattttctaaatatgctggtcatgctcctgctgtcaccgaactgaagctaaaaggtaaagttgatatatattcccgcatggaagtcagtaaggacggcataagatacccgttcgtgaacttcgttcataaaggttccgatgcaggcgtatggagtggatatcagtacctgctttccgagttccgccgttatcaacagcaatacggtgggaccacggtcccactgtctcaccgagaaattgaacagcgtcaacgtgcagaagcacgtcgtaaagaacgcgaacgccaggctaaaatcgcgtctttgatggaatcacaacgacgtgatgcagacctgaatgagtacctccagtttagccaggcatttgctgaagcaccgctggaagacggttcctggccctatgcagtaaagaaaggtattagctcggttttttcatcatgtaacgttcggcgagtaacatattgggaccgtggtcacaacaataaagcgcataaaaaacaaagtgttatggctataccgctatctcatattgatagccgttatgacggtcgaattgttggctggcaacgtattactcaaaacaatgtgaaattacagacacgcgctgtcgacggcggtgagttctcaggatcgtgccatatcattggcagtttacgtggttcatcccgcgtttgtgttgttgaaggtttcgcaactggtgcatcggtttatataactgcaaagaaacgatttgatgcggtaatcgttgctgtatcagctaataacgtcctcaaggtcgtcgaacaaatttacaatctgtatccaggcatggaagtctggtgcgcactggataacgatcaaaagtcagccaaaaacgggaagggcaacaccgggttgaaagttggtattgaggtaatgaagaaatttcctcaaacacgttgtacctatccaatttttaacgatgatgaatcagaactcagcgacttcaacgatctgatgctggccagaggaataacggagacaaaccgacaactgttctcaaaacaaaaccgactggcgttacctgcaaatatttttgatgccgagatgctggcgttaactgttgcccctgttgctgatcgccgtgccttttcacgccagcttatccgctgtattgatgcggggatgacgcaatgcccatccaaattatcgccgcaagaacttatctcgctgataaaaataaagcttgaagaagtgggcgcagataaggcgttatttggcactgtttataatagagtaaagcgtgcatttaaacagaaatgcgacaaagcgcaggcgttccgctcgttcagcgaacgcgtcacaaacccagcaatacgtcctgaccatatcacgtataagcggttcgatacccctcatatgaccagggaagtgctggactatataaaatcactgaacggccctgtgatagtccgcgccggtatggggtccggaaaatctaaacatctgctccgcccaatgatgcatagtgcgcagcgcggcgtttctgtagcgcaccgagtttcattgattggtgggttatgggacatgatgacccgttctgatgatggacgccggatgcacgccgatattctccactatcaggaccctggctatcaggaactggcaccatatgccagtaagctgacaatttgcatcaatagcatcgtcaagggttgctggcagccgttgatgaaaagtcacgatttttttggactggatgaggcaacgcagggtctgcgggcaacgttgtctggtaaggcgatggcacaccctgttgatgtgtttaataaactaatcgatgccattgcatacagtgaagatcacgcgttactggttgatgccgacgccagcgacatcctggtcgacatttgcgaactggctatggccagacgcgaaacgtctggtttatcaacgtggacacagatccatgtcgtggagttgcctgttgacgtcaaatataaaaacgccacaggcgagcgtgtcgctcgccgggttctctataccgataccgaccgcatcatggttgaggtactgaaagccgttaacgccggagaaaaattcctgttagctacggactcgactaattttgccgagcagctgctactacaacttcgtgaccgctggccagaaaaaaaatggctgtatgtcagtcaggatacaaaaccagatcaggaagttgttgagtttaccgatgcaccaaaccaacgcgcaaaactttacgatggtttgatttatagccctgcgatcagttctggcgtgtcgattgaagagaagcatttcacccgccattttggctgtttctgcggccaggttgtaccgtcagacgctattcagatgctacgccgcgatcgcaccgctaccgaatttatggtcgggttaaacaaattaccaggcgttcgcgaagaaagcgcagaaaacattaaacgcggctttcttcaggctctactggaaacagccgaaattaacgacgaatttactgatgccgttctcgatggcgatcgattgtctctgggcctcgctgatactacctatatacgaatgaaatttaaggttgcggcaatggaagcgcaggcccgtaatgatttcgcaaacaacatgatctgcattttatacgcagatggctacaacgtaagccacctggcagaaaatgaagcggcaagtgcaaaaggaaaagagctacgcaaagaatcaaaagggcgcgtctgggatatgactgttctgcgccatcttgaagctgaaacacctgatgaaaacgagcataacgagttgctggcccggcgttctctttcggaagctgaacaggcgcagctggcccgctgggagattgaaaacgagctgatgctcgatgtggacgaagaatccctaaaattcctgcttgaagggggtaaaaagcggctgactctggccgagttgatgacaatggacgaattaactgctgcacgtatcgatcgtgagcagcaggcgttttcgttcacgtatcagttccgaaaagggcctcgtaatgaatacgtgacaatcacggcaattaatcgcgagacagcagatgctcaattcgacaggatgcagcctggaattacaggttataccgttcacagccgaccgattctggaagtcacccaacgaacgtatgcgtcactacaccgtaaggtggcccgcgaatatttctctacctgcggtattgatcctgatactggcgccggtgaggcaactcaggaagggatgaaagctgcgatggaaaaactgatggatgcaagcactgctgaccggtttaacaacgtcctacggtttggcggttacatcaatcccaaaggacgccctaaacgcccggaaacggtatttaaacagatttgtgagtcattcggttatgccacccaaaaacgccgcctgccacgttctcaggggcttggttacgtatggtcgatagttccggcatcctgggaatttatccacggcattctggcgcgtagagccgaggcatcactatcgtttgttcagatgaagctggatgtgactacggcggaaatagcggatctcgattgcagatcaactatagatattggatctcaatctggatcacctgatacagcatttacagacgcgatgttggctacgattgaagaggctattgccgctatgccggtgcctgttccggaggcctgggttcgcgagctgcttagctacgatgagttgtgccagctggcttcaatgccaatgaaaattatacaggccacaatttcaggcctatttatgacggactatgtttctgaacctatagccgtctccagcgccccatatcaaacaaacagcaatgcgaaagtagttccagtacctaaatggctaagtagacgtaacggcaaggacgaggcgttctatgggtag

SEQ ID NO: 401338 - DNA, 642 bp, Salmonella enterica
atgctttttatgaaaaaacgtggtgaatggcttaaagaacgccgcgaggaactgaaaagcctcgataaaagaaagtattccatgcgagccgtggccgaacgcgttggtatttccagcgcaggtatgtctcaccttgaaaacactgatgctatgccatcgctggatctggctatgaagttagcaaaagagctggatcggcctatagagtggatactgaacggcacagttacgtatggccagcgtggggttcctatcgttggaacgactctcacaggtcccaacagcgaatggcttgattcaatggggcgctccggtagctataacgagttcgtcgatatcaccgttccgaataagcgtctttatggactaaaagtatctggcgatcctggttgtggttataacgagggtgaagtcgtggttgttgaccctgacagcgagctaataaccggtgaagatgtcgttgttatgactcatgagaagtctggctcctgcgtcaaaattctggccagtatgcgttcagggcagtacttttttgactcaccaacggacagaaaccaaagattgataagcgatcttgacgacattatttcgatccactctgtgatttttgtggctaaatctcacacaataaaatcgaaataa

SEQ ID NO: 401339 - DNA, 636 bp, Salmonella enterica
gtggagataaataaacgtccagtcagggacaccatgtcatctgtagttatcaaagctactctgcagatgttggccgaaacaggctccagtgttgctgtatttgctacagaaaagctgattcctgcccttgagattcaggggttggttgatatgggttcagaaggtgtacgtgttgatgagtacatgcgctggcgtagccgttgtattaaacgagcacaacgagtcctggcaggagaaacacctatgcctgcggactggatcattacatggatgtctgttctcccggaactctataaaaataaatgttcacaaaagatagcagcaatgcagggactgcaatgggttcgcttgccgcgttataaccggatacgcatcgaatctgttgatgcggaaattgattcaatcacgatgaaatttggagaagttctggcctcatcatcgcctgctcatgatggggtttatgacaataatgatgataaagccgcgctgaagcagctgcagaatcgattgacagaaatggcggcctatataagacgagaaattatcaatattgagatggccaccggcatttctcctgattatgtggaaataggcgagaaaagcccattatcgggaggccgtcgtgttacagcttaa

SEQ ID NO: 401340 - DNA, 666 bp, Salmonella enterica
gtgttacagcttaactatgtacgggattctattactgcagcgcttctggcgtattcaaaatcacaacgaaaccagattgtggtaatgagtgaaatggctggggcttcaaggaaatatcttgagaagcctgttcgtgagattgaaataaacgggaaagtagtagttgttgatgcggaaccagtcagctatcacgaaggcaaaaaatttaaaacgagtacgctgcctgtttctccagatattttcagacaggctagctggcgacgggctatgtatcagttaccagaacaatatatcgcatggttaagttattgctatggtgatgtactgtcattcgaccatcagacaatattgagcgttcatatctggaatgcgttgcaagtttatcaaaaagaaaacggccttccgaaaatgaatagcactaccacaaagaaattaaagattctggcatggctggcaatacaggaaacaaaaaattttgttaatcgcggagagtataagtattcgcaggaagagttaagtggattttgtggtatcagttatgacggctggcgccagaatcataaagagcgctgggaggttttgttatcaagctgtattcagcttgatcgtgaggctttgattcatgtcgatcaattacggaaaaaagcaggttgccacaggtggtga

SEQ ID NO: 401341 - DNA, 306 bp, Salmonella enterica
atgtcgatcaattacggaaaaaagcaggttgccacaggtggtgatattccaccatgtttgtgtaagcagacaatgcacaggcaagcgactaagccaaagctagttcattcagataaacgaaatcaatacataatgttctgcccttcatgcggattcagaacacaccctgactggtgcaagaatgctgttatagctgaatggtgtggagctaataagggaggtgacatacatattcaggagctatggctaaaacggtataacgaacagcagaaagaaagtattgcaactaaaaaacatgtcttttga

SEQ ID NO: 401342 - DNA, 219 bp, Salmonella enterica; identical to SEQ ID NO: 401332

SEQ ID NO: 401343 - DNA, 939 bp, Salmonella enterica
atgaaaaattttcgtaccgcattcccttatgtcacggagatcactgtcccggatgatattaatgagctactggataaatatagttttgatggcctgtcagacagtgatcgccgtgggcatggatgggggctaattggcgatgacagaatgctaagtgtcgacggtaagtatctcttgcggtactgcgccagtcagcgtaaggctaacccacttgctgttcataaactggcaggagaacgccagcagaaagcaattgatgaaggtagggaaataaccccggcgcttatggaagagtttttatttcaggctgaaagtgaagtaattaaatatgcaccagtaactacagtttcagtatttcttcttatatggccatcaaagaggttgctgcttgcgtcaggtagcactgctgcaaaatgcgaagaagccttaagtatgttacgaaaaacacttggcagtttaagttcttatccgtggggattgtgttccaccctttctcaagttgttaccgatgtgatgaccacagataatagcctttataaattgccagataatttagtaatttctccatttggtaagaccatatttaccggagaagactcatcattaaaaattgttcttgatggcgtacagaatgatacagatgacgcaaaaagtatgctaaatggcatgatggcgcgttcggttgagatgtcattaatagatcgtcctgcgaatggacagattaaaaatatggcaaattttattcttcatatgcctccggctggtaatgctcatttaaaatgttttgattacgatgatgatgttgaacgtgatgatggagtctcttctcttatcgctgaaatgcatctggtttctgcctatgtagttactattttatcggcagtggaagattttaccggaatgaaatcaaccggagctaatgttattcaggaagaataa

SEQ ID NO: 401344 - DNA, 201 bp, Salmonella enterica; identical to SEQ ID NO: 401331

SEQ ID NO: 401345 - DNA, 1041 bp, Salmonella enterica
atgcaaaacattcagaaaagcattctgaatatggtaatgcaaaaatggctcaatagtgactatttgataatcgatacagagactaccggtcttgataacaatgctgaagttattgagattgcaattattaatatgcatggtgatgttcttttgaactcgctagttaaacctacctgctcaataccagcagcagttacaaagataaataatattactgatgagatggtagccgatgcgccgttatggcgtgacgtatttcctgtaatattgaatatcatagatggaaagaaatggttagcatggaactctaaatttgacgccagattaattattcagactggtattataactggttattttgaagatcttcctgccagtaaaatactggatatagccgcaaaaattaataattcgcagattgacgcaaaagcgatttatgaccagtggtacggtgagtttgacagtaagcggaataacttcaaacggcagagcctgaccaccgcagcagaacgtcacaatgtgtcagttgacggcgcgcacagggcgttggccgactgcaggatggttcttggcgttataaatgctgtatgccatagcgattatgcggttttcgaatctcgatatgctgagttggttgctgataacgataaagctatggaagcaatgaaacaggctaatgaagccgtaaaacttgcacacagtaaattttctaaactcgctgcggagaatgcgggactgaagggtggaattaagcaggctttcgaagatatggaagcacatcacgatgacgatggattatttagctatgacgctgatggcgaaccaatggacgcactgttacggctctgtgacgctcagggttcgatcacttctctgatgaattacgaaaccccagccaccgacgattttctggctgaagtacgtgcggagggcgtggagatgtcctccgaaaaattcggcggtggcactctaatttccgacatagttaaagagatagcaaaggatttcgccgcccaacttcgcaaaggcggtgcagcatga

SEQ ID NO: 401346 - DNA, 231 bp, Salmonella enterica
atgaaactgaagatgaatacgtctgatgactcggtgattgttgaaagcaatctggtaacacagttctatccagaccacgaaagcggcggcgagttaacaataatcgagactatttcagccactggagaaactttctctgtgaaggttaaacactcgtttcttcaggtaacaagtgcgctggctacagcctggagcatcgacgagaagaaagctgaaggagctgcatcatga

SEQ ID NO: 401347 - DNA, 189 bp, Salmonella enterica
atgagcaagaaagcaggatgggccaggccgattaacgccagtaaacatcatttcttcgcagaggatgaagtcaccagcatctgcggtcgctggatgtatttcggacacgaccgagaatcagacactttcgaaagccctgatgactgtgctgcgtgtcgacggaaactgaataaggagcagccggcatga

SEQ ID NO: 401348 - DNA, 714 bp, Salmonella enterica
atgacaatcgacaaacaggcgctgcgtgaagcggcggagaaggcagggaaagataagtggcaggctaagaaaataaatggcgacttctatgtcattcgcagcggtagttacataaagcaatgcggcatcacatcgtttcaacctatagcggagattgatcataagccagtcagggactttgttgccatggtcaacccggcaaccacgctggcactgctggatgagaatcttcagctccaacgggaaaaagacgcaatagaggccgtagcgctggcgctgcgtgatgatatgcgacaggcgcgggagcaactggaggccgcagagaagcgcataaatgactatcacacagtgcttaacaatcttgccgccgtcgcccgtcgctatctgccagattatgacgagcatcctgatattcaggccgctgacgacttgttagaaagcgccgctggcattggcgtgaagcagcaggaagatagcgtcgattctgatgtaggtagcaggaatcagcctggaatggttgttgcggttcatatcggcgccggtgactttgtgaaagtcaaaggacaggtgtttgaggtcgaggaaaccgactttgacgaccacgacgttacattatggtttgtgggtggcaacgcattgaaatgtgccgctggttgtccggttgaggtggtatctgcgccagttgccgctggcatcaaggttaagggggagtga

SEQ ID NO: 401349 - DNA, 474 bp, Salmonella enterica
atggcatcgcaaaccattttagatgtttgctgcggctctcgcatgttctggttcaacaaacaggattcccgcgccgtgttcgccgatatccgcgccgaagaacacacattgtgcgacggtcgccgtctggttatcagtcctgacctcattgctgattttcgcgcgctaccgtttgctgattcgtcgtttccggttgtggtgtttgatccgcctcatctggaacgtgtcggtcaaacggcctggatgggtaaaaaatacggtcgcctgaataaaaaaacatggcgcaccgacattcgcgccgggttcaaagaggcgttccgtgtattgcggccacacggtgtactcatttttaaatggaatgaaacgcagatcccggtgagccagattttggcgctgccggacgttaaaccggcaatcggccaacgaaccggcaagaacgacaaaacacactggattatttttgtgaaggactaa

SEQ ID NO: 401350 - DNA, 444 bp, Salmonella enterica
atgaccactattaccagagaacagttaatcgaaaaacttcagaacaggattgcggtaactgccaattatcccggcgtcgaagaagcgcaacttgatgcagctattttcaaaatcgcactggcatcgctggaagctgagccaataggtgcattccacatcgaagatcagcaggtaagtggaacaactgactacatcaaggatggggagtggcccatcgataatggtgttattgatgtctacgccgtcccgccagcgtcggtagtgccggaaggactggttaaagcggtgcgcttctatgaacaggttaagcgtgaaaatccgccagtcgaaaccggagcatggaaagatgccgttgactgggtacttaaagaggcttgcaaggctgtatcaatgttggaaagcagcagagaacacgaagttattagccagcaggagaaggcatga

SEQ ID NO: 401351 - DNA, 189 bp, Salmonella enterica
atgagacaactttacaccattgttatcgcaattgtttttggttttggtggcatttgtatcggtgagagtgctggctataaccgtggattaagtgaaggagttgatatcagggagggggataagtgggattgtgcttactcatacgtgaccggattccttatgtgtgatcgaaccccaaaatataagtag

SEQ ID NO: 401352 - DNA, 822 bp, Salmonella enterica
atgactactatcaccaataacaaactaacagacgaagaaatcaccgcgctggccttgaaattattcgatggttccagtttttattttcaaagtggccgacgccccggcgcaaaaactatggctgaattgctgaataaagcggccagcgctgtcgcagagctacaggaacgccgcaggactgataaccaagagccagcgccagaacgcgaacgtattcgccgtgagcacgccgaatggtctgatgccacgttcggcgatgttggcccaatcggcccgctgaaacatctctcgaaagaagcgcttgaggccgctgctgtaccagacgacctgagcgaatgggctgacatgcaattcttgctttgggatgcgcagcgccgtgcaggtatcagagacgagcagattaaccaggcgatgattgaaaagttggcgataaacaaggcgcgccagtggcctgaaccgaaagacggggagccacgacagcacatcaaagagctgccagcgccagtcaagcaaccatcaaacgctgaacaggtggcagacctgtacgcactatgctggaaaccgggagacgtagttacgtatacgccagatccagaaaaggcgaccatctggcttaataattactcaggcaccagtgtacaggaatacgtgaatctggagcgattgcaggaagatactaaacacggactgcttgaggttgctatcgccaggttcagtaagatgaacgagggattcccgatcaagcgatttaaagcagactgggttattagctggatgctggaaaatttcccgccagtagctcaaaagcagggagataactga

SEQ ID NO: 401353 - DNA, 624 bp, Salmonella enterica
atgattttggatcatcgcagcaatacagcaaaggagcatcgtgatagctggagaacggacccgcgcatgattgcgggtttgtttgaactactgcggccctgttatatagacgcctgcgccagcgatgaaaatcatctcttgccagaatactttactaaacaggaaaactgtctgcagctgaactggaaactggaagcccaaaagcgtggagtgccgccggctgtttatgttaatccgccattttctaaggaggatacaacggtagcgactccccacaatggtatggctaactttttcagaaaagccagagcagaagcggagcgtggtgtttactctcaatggctgtttcgtgctcgccccggtgaaggctggtttccgtggcttttggccagccgtatttggtttatcgttggtcgcgttggatttgtcagttctgaaacactgaggcttgatgatcaacagacagagaaccattgtgttgctgaatttatcccggatgagcttccatttatggctaccggactggcgctgaaccgggatgatatcatttctactggggagaaagttatcaataaatgcaaatatccaataattacagcacgatacgagcaattaatgagctaa

SEQ ID NO: 401354 - DNA, 237 bp, Salmonella enterica; identical to SEQ ID NO: 379428

SEQ ID NO: 401355 - DNA, 249 bp, Salmonella enterica
atgaacggaaatgagctttgtagttctgatttattagctgaaaaattgaaacacttgtcgtcaatgcttcagatagccaggcgaacgctggacagtaacgaaggatgcatttacctgaatgaggtcagcgatatgatgggagcggcaggcatcatgacgcaagaatgtgaggtattgcggcggcagatagacgccgagctgtaccagaaaaatagtaaatattttgacttcttcaaccagtcccaatag

SEQ ID NO: 401356 - DNA, 282 bp, Salmonella enterica
atgaaaggtgtatctctcgacgaattaagaaaaaaaatgctgaataccccggaagctgtccggggttatcaggacgcagatcgtgagcttgctcttatcgaaatgctctacgaaatgcgggaaaatgcaggactgacaaaaacagaagtcgcacaacgcctggatatccgcccatcggccatatccagacttgagcgaaacccgctaggggccagcataaaaacgctatcccgctatgctgatgcctgtggggcaaaaattgatataaaagcgctctactaa

SEQ ID NO: 401357 - DNA, 312 bp, Salmonella enterica
atgttcaacgtgataacccacgaagcagccgtttccgaactaactgacctaccggacgagttgcgaggtcgaatgtttcgactaatagaaagactgagtgaaactggccagctgaaaatgccacatagccgggtgataggaggagggatttttgaactgagggttggggataaaaatattgccagaacgctgtatgcttacgcagccgggcacaatatctacctcctgcactcgttcataaagaaaaccgaaaagaccccgtcagcagccatagaactggcgagaaagcggctaaaggagatgattaaatga

SEQ ID NO: 401358 - DNA, 222 bp, Salmonella enterica
atgaactacgcaggtagcgaggaagtcagaaaggacctggaaaaacttactgaagcgctgtacgaagtgtatcgccaggctgctgaatttgagagcaggtataaatggaataaagccaccctggtagagcgattaactggcgccgcagttggaattgcaaaagacgagctggctgatgtgtataaaaaaattgtagcaattgagcatcagttccaggactaa

SEQ ID NO: 401359 - DNA, 234 bp, Salmonella enterica
atgaaatttaaacaagtacgcgaagaaatgacagatgtagcagtaagcatggaatatgtaatgaggggatattattggttaagccttgacgacctggcggatgcctgttgccgtagcaaggttgagatcgaatttatactggaacagatgatctgtttcgggatggttcaccgtgataagtggggtcggtattcattaaccccggcttacaggaactatcaaaacgcggcgtaa

SEQ ID NO: 401360 - DNA, 1062 bp, Salmonella enterica
atgaaaaacactgtaaaaataaacagtgcagaacttatacatgcagattcactggaatttataaaaacacttcctgaaaacagcatcgatgccattatcacagacccaccatattaccgtgtaaaaaataacgcctgggacaatcagtggcctactgtggctgattatctggcgtggctggatgagtttttcgcggagttctggagagtgctaaggccagctggatctttgtatgttttttgcgggccaaagctgtcttcggacaccgagttattgttacgtgaccgcttcaacgtgctgaaccatatcatctgggctaaacccagcggaaagtggaaaagggcaaggaaagaagatttaagggcatattttccggctaccgaacatattctttttgccgaacattatggttctgaaggatttgcaaaaggccagtccggatatgcgacgaaatgccaggagtggaaagggaaagtttttcaaccattgatcgattatttccgtaatgcgcgccagcgcctgggaattaccgcagcagaaataaatgccgcaacaaatacgaagatgtgtagtcattggttcagcgcgagccagtggcagctgcctaatgagcggcagtatctggcgttgcaagcgttatttaacaagaaagcggaagaagcaggggtaaatggactgattgaaccgcataaggttttacaggaagaatacggggtgttatctgcgcactacagtgcgttagttatggaatacgatgaactgcgcaaacaatatgaaaatttacggcgcccattccgcgtgactaaggaagtcccgtatacgaatgtatggacctatcccccggttccttactatccgggcaaacacccttgtgaaaaaccgatagaaatgatgatagatatcatttctgccagcacacgtcccggcgatgtagttgctgactttttcatgggatctggctctacgataaaagcagcgctacaacttggccgtcaggctataggtgtggaactggaagaggaacgatttttacagacggtctctgagatcgaaagtttataa

SEQ ID NO: 401361 - DNA, 309 bp, Salmonella enterica
atgaacacagctatcgaatatggaaatcctgatctctggctggttttactcatgttggcagccggagcagtttccagcgccttgttatcaactaatccgctgaatattcgccgtctcataggcgacgttctgcgcggagtaattgttgcaatcactctttggacctacggggcgcttggccatgcctcaatccttcaggtgatagttcttgccggtttatccgcagtggcgtggccgcatacggttaacgaaattaccggctttgcaaaacgaataattagccggtttttcggcgggagaaataaatga

SEQ ID NO: 401362 - DNA, 492 bp, Salmonella enterica
atgaattatggacttgtgagtaagcgagatgctttgcggtatgccgaggctgtatgtgatgttatcggccacggaaaaaataacgcggcagttgcactttgcgttgaaaccgctgcagcagagacattgcttggcgattacaaagatccgacaccaacaggcgcaggtacggggctgacgcaggttgatctggggacatttgaatggcttcgtgataagtacaaaaacagccgttactccagtgcacttcttaaagaatttggtatcgatttgagcagaactgtttatcaggagttaagaacatccccattgctcgcaatgttgttttgccgtcttcgataccttgccgttcctgagtccatcccggcgacaagggtagagcgggccagctactggaagaagtattacaacacttccgcagggaaaggtacgccacaggattacatcaataaatgccagcgtgctggcgtcgatgcgctttttatttcatag

SEQ ID NO: 401363 - DNA, 465 bp, Salmonella enterica
atgaacagcttaaaacgaatggctaaggcctggttgctgatgaataccgtgtttgccgttcttatcatcgcgacgcagccagcgttggccagcgatgagtttagcgtggattcgattataaatgctcttcctgctggctgggccagcgtcgtaacaggggtattcattgtcctgtatgcagtcgcgcagctgcgtgccgtaatgcccccatcggtgacgaataaaattccgacggtaattatgaaagtcctcgactttgttgccgcaaattatgctcatgctcgtaatgcagatgcgattaataaagccgcccatgatgccgggaaggagaatggtctgtcagacgatgagtatcgggtaatggtggaaacagcgaaaaataaaggagagctgcgtggaagccggattgagagtgctggcgattatcctggagatgatcgtccaggcagtaaaagtacgcaatga

SEQ ID NO: 401364 - DNA, 195 bp, Salmonella enterica
gtgctggcgattatcctggagatgatcgtccaggcagtaaaagtacgcaatgaaaatgagcggcaggcgcggattgactatgcgcgtaataatccagctgattatctgcgtcgttttggccgggtgcgcgaggtcaataccagtggtgacaacactgagtccggaaccttgcgcagcggaaaaaccgacgattaa

SEQ ID NO: 401365 - DNA, 267 bp, Salmonella enterica
atggcgtttttaaaaagaatgtcgatagaaacaatccgtcagaaatttacgcactatgggttattctggggatgcgtacctgtttacgtaaatatgaggaatagtaattgtcctgatttggctacccgaaactggattcctgaatggatgctggacattgctgactggattagtgctgcgcctattttcttaataagactaattaatccatcgtatgagccaatgtttgcaattaaattaacaggcctgattgaggatatggaatga

SEQ ID NO: 401366 - DNA, 309 bp, Salmonella enterica
atgaaaatttatattgccgggccaatgacaggcagagagaaatttaatcgagatgctttcaataaagaagcagatcgtttaatgaaacatggccacacggttctgaatccagccagcctgcctgatggactggcacagcgtgaatatatggacatttgctttgctatgctccgttgcgcagatgctatcctgatgctacctggctggcagacatccagtggcgctacggctgagtatcactacgcgtacaaaatggagttgccagtttatacaacaatgcattatccgccagttgtacctgtccaatga

SEQ ID NO: 401367 - DNA, 705 bp, Salmonella enterica
atgacgaacggcacctgtggccagtatttttcaagctcgtcaacgagtgccgccctccagttatttttggtgagcaggtttcgagcaaggacggacttgagtggttcgccactgtacaagctgatttggaaaatgcgggatatgccgtcgcagcgtttgatacatgcgcagcgggcgtcggtgcgccgcatatcagacaacggcttttttggatggcctacgaccacagcaagcaacacaaagactgcgatcaaggacgtaaagaaaatcatggccagaaagtctgccgggcgccagtcgaatttgcaggacgtggccatcttggctggatggaatactccggcagccagcgacagcaaaggtggatacataggcggaagaataaggaatgggaagctgtcaacagatcgactggatgtcacatcacaactggcgggttggcctacaacgatgacaagcaacgatcgcacagcttcgttacaggtggccctggaaacttacagagcgaatggaacgaagatgcagaagcgtcttcaggatatagccgcgctttgtggtccatgccgtttgaccacttctggcgagatgctgactggctcttctgccaggatggaaagtggaggccagttgaacccgaatcattcccgttggctgatgggattgccaatagagtgggaaaactgcgcgcctacgggaacgcgatag

SEQ ID NO: 401368 - DNA, 249 bp, Salmonella enterica
atgctgggaatgccatcgggccaagacagccagagagagactgaactgatggcgtatatccactgcacatattgtggttcaaaactgcatacagtcgctaactgcccgaaaacgtggggtggttcctcccaccgcgctaacctacgctgtggctactgcgggcagtctggacataactctaatgcctgcccacacaatgcgagcagcggtcgtcggcgcagcctgaatgatgacttccatcttgattga

SEQ ID NO: 401369 - DNA, 435 bp, Salmonella enterica
atgggatcaggagtgagagcacctggtggcggtcgtaagtcgaataacacaggaacgcaggttagttctcttacaagagccgtttccccgccggatgagcttcttggtgaaatggctgttgatgcctggcgacgaacgtgcaaaatcctgatcaacaggggtacgttcgagatggaagattgttatttgctgatggaatactgcaatacagtgcagcttctgtacgacgcgaatcaggaaattaaaaacgatggtcttggcgacgatactgctgcaggaggacaaaaactgggtgcggcggttaaggccaggagcaaatatatcagcgaacttattcgtctcagtgttgtgttgaaactggaccccaacagccgcgtcaggaaaaagcagccaggagataacaccaactcagaaaacgaattcgacgaattttaa

SEQ ID NO: 401370 - DNA, 1710 bp, Salmonella enterica
atggcggcatacccgaacgtcaatctggcgaacgcttatgtacgcgatgtattaagcgggaaaatcgtggcatgtcggtttatcaagctggcgtgtcagcgccactttgatgacattaaaaaatcgcttgataaaaattatccctatcggttcgacagggatttggctgaacgggcctgcaggtttgttcagttgttgccccactccagcggggaattggccgggcagaagttaaaactggaaccgtggcagtcctttgctttctgctcaatatttggctgggtcacgaaaaaagataaaaaacgccgatttcgcgaagcctacattcgggtagccaggaagaatggtaaatcgttcttcgctgccggtattggcacctacatgttttgcgctgatggtgaaaacagcgcggaagtctattgtggtgctacaacaatggcacaggcgaaaaaggtattcaccccagccagacagatggcagaccggctgccttcgctgagggctaaatttgatatttcggtttgggtggatagcctgacccgtcctgatggttctgtatttgcaccgatagcagggaaacccggcgatggtgatagccctcattgttcaattatcgatgagtatcatgaacatgataccgatcatatgtacgaggcgatgacgctgggtatgggcgcgcgctcacagccactgacgctaattataacaacagcgggcgtttcgctggtatctccctgccatgacaaggataaagaggttaaggaagccctgagcggtatcattcagaacgaacgtctgttcgggctgatttatgagctggatgaaggtgatgactggactgaccccagaaatctgattaaagcaaacccaaatctggatgtttctgttaaatacagtgatctcgttgaacaactggaaattgcaaaacaggttccccgtaaggttaatgcctttaaaaccaagcgcctcaatatctgggtatccggtaaatctgcattttttaatatggagcactggaaagcggcagaagacaaagatctgcggcttgaagactttaacggcgacacctgtaatcttggcctggatctggcacaaaaacttgatatgaatgccgcagtgcgattatttacgcgagaaattgatgggaaacggcattattactgcataaaacccaaatttctggttcctgaagatactgtcaatagtaccgatcctaagctgcttaaaacggcagacagatatcgtaaatttgttgatatgggggagctggaggcgaccgatggcgctgaagcagattaccgggaaattctggccagcattatcgatatgcggagtgttacccgtattgatgaaatagatatcgacccggcaggcgcgacggcgctgcgtcacctgttagaggatgagggttttacctgcgtcgagataacccagaactacaccaacatgtcaccggcaatgaaagagctcgaggcggctctcgccggtggacgattccatcatgatggcaaccgtattctgacctggtgtatcagcaatgttatcgggaaatttatacccggtagcgatgatattgttcgcccgacaaagggagacaaacaaagcaaaatcgatggagccacggcgttatttaacgctatgagtcgtgcaatgctgaacgaaagcagcggtggaaaatcggtatacgatgaggaagacgtagcgtgttaa

SEQ ID NO: 401371 - DNA, 1260 bp, Salmonella enterica
atgttcattccccagatgttccggggtaaatcacgatcgggtggcggtttttgggaagcgatgctgggaggggtcagttcaagccagagtaaggcgggaataattataactcccgaaacagcgatagcattatcggctgtccgggcgtgtgttacgcttcttgctgaatcagtcgcacaactaccgtgtgaactgtatcggcggcgcgataacggaggccgggaacgggccactgaccatcctgtttatgatctgattcattcccagccaaataagaaagacacgtcttttgaatattttgagcaacagcaggggttgctggggctggagggaaattgctactcgatcatcgacagggacgggaaaggatatccacgcgaattgattcctgtgaatcccaaaaaggtcattgtcctgaaagggccagacgggatgccatattatgaactaccagaaattggcgaaacattgccaatgcgcatgatgcatcatgtgaaggtattctcgcttgatggttatatcggcagctcccccatccagacgaacgcggatgtgcttgggctaaaccttgccgtggaagaacatgcttctcaggtttttcgccgtggctgtacgatgagcggcgttattgagcgtccacaagaagctacgccgataaagagtcaggagaagattgaccagcttctggctaaatggactgatcgttattctggtatgcgtaatgctttttctgtggcattgctccaggaggggatgagctacaaacagttatctcaggataatgagaaagcgcagttattacagtcccggcagtggggcgttgaggaggtttgccggttatataaaattccgccacatatggtgcaaatgctggagaaggcgaccaataacaacattgagcatcagggcttacagtttgtcatgtacacgttgcttgcctggctgaaacgacatgaaggcgcgctgatgcgtgatctgctgctccccagcgaacgtggtgagctgtatatcgaatttaatgtatccggattgctgcgtggggatcagaaatcacgttatgaatcatatgcgcttgggcgccagtggggctggttatcagttaacgatattcgccgtatggaaaatctgcctccgattcagggaggtgataaatatctgacgccgctgaatatggtcgacagtacgagtattctgtcaggaaataagaagcccacagcgcagcaaatgacggaaattgaagccattctggcaagaacgtaa

SEQ ID NO: 401372 - DNA, 351 bp, Salmonella enterica
atgaaatatattttcgctttaggcgtggacatacttgttctcgtcagcattattatggggtttcacttcggtaatgagtctcttctgaatattcctcattttattgggtggtttgtcggaattgtcaatttattggctcatttgagtaagaaatcaaaagagggcatggcgaaaaaatatcagccacagcctcttttatttcgcatatatgacgtcctgactgacgttatttttgtgagtttctgtgcctatcaggggtggatgtttatggcagcagtatatgctacggctgcgtgcctgaaagctgagtttaagcattcaatggaaaagacttatgcaaaagttgattaa

SEQ ID NO: 401373 - DNA, 918 bp, Salmonella enterica
atgcaaaagttgattaacctgcctcatctggcagatcaggtatttggcgtgccgcattatgctacgcgccagacaatggactcggttaaagcggtgcttatcccccggatacagggtgctgttatcgatgcaggaattactatggcgctgacccctgataaccagccggagccagcaatggaacagccagcaggtggtgtcgctgtcatctccgttcatgggattctggttccgcgtcgtgggcagatcacggcgatgtgtacagaactgacgagctatgaacgaatccgcagccagctttatatggcgttgaatgacccttcagttagcgaaattgttctggatataaattcaggaggcggagctgctgcagggtgtaaagaactggctgattatatatttcagtcacgtgatataaaaccaattacagcgatcgtgaattacagcgcgtattcagctgcatattttattgcgtcagcctgcagcaaaattatcgttagtagtacaagcggagtgggttcaatcggcgttatttttgagcatatggaagcatcgaaatgggaagatagcgttgggctgaaattcaccactatttatcgtggtgataataaaaataatggtacgccacatgagccgctgagtgagcaggcacatttgatgctccagggaatgatcgatgatatgtacgagatatttacggcatctgtagctgaatatcgcggcatgaatcagcaggctgtaattgatacccaggcaggactttactttggtgccgatgctattactgccggtctggctgatgaggtgtcagatccgcagtctgctattaacgctattgcagataaatacaaaaaaccgcagcaggcaacgtcaattaagcttcaggccgcagtaatggaccagcaagcaaaaatgtaa

SEQ ID NO: 401374 - DNA, 1287 bp, Salmonella enterica
atggatcatattgaagaattacgtcgtgaacgcgcgggtattaatcagcaggttcaggtactggcagcagttgaagccggcggcggtacgctgacggcagagcaactgacggagttcgccagcctgcagcagcagtttggtgatatcagcgccaaaatcgaccgtctggaagcggctgaacgtgcggcagccgttgtggcaaaaccagttaaagcgacgcagcaggcacctgctgtcagcgttaaagcagagcctaagcaatacaccggcgccgggatgacccgcctggttatgtcgattgcggctgcacagggtaatgtgcaggacgctgcaaaatttgcggcagaagaactgaatgacccgtctgtatcgatggctattaatacggcggcgaattctggtggagttcttattccgcaaaacctccacagcgaggtgatcgaactactgcgtaatcgcaccatcgttcgtaagctgggtgcgcgctctattccgctgccgtacggcaatatggcgttgccgcgtctggcaggtggggcgacggcgagctataccggcgaaggtaaggatgccaaaacgtcagaagcacgcttcgacgatgtgaaacttaccgcgaaaaccatgattgcgatggtgcctatctctaaccagctgattggtcgcgccgggttcaacgtagagcaactggtattgcaggatattctgaccgctatttccgtccgagaagacaaggcatttatgcgtgatgatggcaccggcgataccccaatcgggatgaaggcccgcgctacagaatggaaccgtctgaaggaatgggattccactgctgacattaacctgaatacgattgatacgtatcttgacagcatcatcctgatggcaatggacggtaacagcaatatgattagctgtggctggggtatgtccaaccgtacctacatgaagctatttggcctgcgtgatggtaacggtaataaggtttacccggaaatggcccagggattgctgaaggggtatccaatccagcgaaccagcgcgattcctgcaaatctgggtactggtggtaaagagtcagaaatttatttcgccgactttaacgatgtcgttattggtgaagatggcaacatgaaagtggcgttctcgcaggaggcgtcctatcaggatgcagaaggaaatctggtctccgctttctcccgtaaccagtccctgatccgtgtcgtaacggagcacgatatcggcttccgtcatccggaaggtatggtacttggtactaaggttctgttctaa

SEQ ID NO: 401375 - DNA, 291 bp, Salmonella enterica
atggcaggtaagaaaccaaaaaccgcagttaaaaatgaaggtactgcggatactgaccaaaccagtatctatgaagatgggaccgcggtcccaacagaaggtaacgtggaacgtaaggctgtagtatttcttggaccgtatcatcgttattcacgcggtgatgtagcctgttttgatgttcagtatgcggaagcattggttgagcgacgaattgccgtctggccagaagatgcgaaaaaagtattaagtccccagtcgggagccagtgatcatgatactgacattggatga

SEQ ID NO: 401376 - DNA, 324 bp, Salmonella enterica
atgatactgacattggatgaagctaagacgcagctccgtctggagctggatttttccgctcacgatgagatgttgtcatcgctgattaatgccgcacaacgaagcatagaaagaacctattactgcaggctggttgagagtcaggaacagctcgatgcgctgggtgatggtgaaaatggctacgttattgatgacgatattaagctggcagcgaaaatgatggtctcgcagtggtatctcaatccaacaggaactggtgacgagtctcctgccgatctgggcgttgaatatctgctgtttccgctcatggagcataccgtatga

SEQ ID NO: 401377 - DNA, 345 bp, Salmonella enterica
atgagtgataaaccacttcgccccggtgagctgaactgccggataaaactgagccatattgaaaccgggcgtgggccgcttggtgaggagcttcctaccagagaggttctggatggtgaagcatgggccaaaaaggagctggtttcaggccgtaaggttcgaacgctggatcagcaacaggtggttgaaacctgtctttttacgttgtacccgcgtgcagttgatattgactggaaagtcgccacggcgaaccgaatttatacggtcaggaacgttgagcgactggcagatcgcatcgttataaccggggaggcagatacacgtcatgatcgagtcagcaattaa

SEQ ID NO: 401378 - DNA, 390 bp, Salmonella enterica
atgatcgagtcagcaattaagacggcgctggaacggattacagggatggcggcttggccacttttacttccggatactgtacaggaaggtgtgacgtttcaacgaatttccgatccgggaatctacgccggactattgcgaacaggtttgattgcaggccgctttcagatctcactttacctcctggattcctatacagacctgttgcgactggacaggaaaatctggtccgaatggaagcagatcgtacacggacagcttgacggttttccggttcagtatgttgatcgaggcgggattcgccaggataaaacaaccctgacaaacgggcgtaatcagtaccgactggttcgtgactttacctttgtttatccggaatcagcagaatga

SEQ ID NO: 401379 - DNA, 402 bp, Salmonella enterica; identical to SEQ ID NO: 401330

SEQ ID NO: 401380 - DNA, 474 bp, Salmonella enterica
atggctgatcaaaaaacatcgccagaatatgcgatgctgcctgccggaacgattgtcaagtacggcgaggttggtgacgctgaagcggcactgaaacctctggttaactgtaaagcgcttggagcgaccggtcagacagggggctttgtcgattgcaccacgcttcttgataaaagtaagcagtccatttccgatttgccggaagggccggaaaaatcgctgggatttattgacgatccgacgaacagtgattttgcagcgttcctgaatgcagcggagcagcgtaaaactgtccagttttatatcgaactgcctaatggccggacagcatcaatgatcctggcgttggctggctggcaggttaacgaaatcaccgctccggccagcgaggttattcagattaccgtccagggtaagcaaaataatattaagtggggaacaaaatccgcagccccatccgcaccagggagttaa

SEQ ID NO: 401381 - DNA, 363 bp, Salmonella enterica
atgtctgaatttaacctttcaaaactgaaaacagcgctgcttaaaaccaaacctgagccgattgaaacagaaatttttggcacaaaagtttatctacgccgacttactgcagctgaactgattgatcatgaggatgcgctgattgaggcccagacagaaggaaattcccgcaaggcgtccgagctgagtgtgcagattattgtcgatagcttggtaacaccagatggtatgccaattaaagacagcgataaacctacagtacaggaactgctggcagcacacgacaacgttgaacttctggacgctatcgataaggtaaaaaaacactccatcggtaagctggaaactgccgaaaaaaactga

SEQ ID NO: 401382 - DNA, 3336 bp, Salmonella enterica; identical to SEQ ID NO: 401329

SEQ ID NO: 401383 - DNA, 300 bp, Salmonella enterica
atgcaatcatcagttacgcccgcagtacagactgtcaaattcggggatggctatgaacaacgaaggcctgccggactcaatttcatattaaaaagttttaaacctgtgttcagagttacgtcggaggaagagcgtcaggcgctggaagattttctttttgatcacgctggcgttaaggcatttttatggcgcccaccaaaacataatcggacaatcaaaatcgtctgcagggaatggtctgttacggattatgcctgttatacagattttaattgtacgtttgagcaggttgttatttag

SEQ ID NO: 401384 - DNA, 696 bp, Salmonella enterica
atgcaggatattccgcagtcgacactgactgaaactacccggacagaacaatctgcaaaggtagttttatgggaaattgatctgacaggcattggtggcgatcgttattttttctgtaacgaggcgaatgaaaagggagaggcagttacctggcagggacggaagtatgacgcttatccaatagagggtagcggatttgaaatgaacggcaaaggcgcagctgcgcgcccgtcactgaaggtatccaatcgttacggtatggtgaccggaatggtggaggatttgcaaagtctggcaggggcgacggtaatacgccgtaaggtatacgccaggtttctcgattccgtgaatttccacagtggcaatcaggaggaagacccggaacaggaatctgtcagtcgctgggtgattgagcagtgtagtgaactaacatcggttagtgcgacatttgtcctggcaacgccgacggagactgatggcagcgtttttccggggcgtaccatgctggccaatacatgtacctggatttaccgttctgatgagtgcggttatgctggtccagcagtagctgacgagtttgaccagccgacagcagatcccgcaaaggatgcctgcagtcgctgtgaacgtggttgttcattgcggaataatacagaaaactttggaggtttcctgtctatcaaccgtctgagttaa

SEQ ID NO: 401385 - DNA, 525 bp, Salmonella enterica; identical to SEQ ID NO: 401328

SEQ ID NO: 401386 - DNA, 3405 bp, Salmonella enterica
atgggaaagggcggcggaaaagggcacacgccccgcgaggcaccggataaccttaaatccacgcagctgctgagcgtcatcgatgccatcagcgagggaccgatagaaggcccggtgaacggtctgcaaagtgttctggtaaaccagacgccggtggtggaccgcgacggtaacacgaatatccacggcgtgaaggtggtataccgcgtcggtgagcaggaacagaccccgctggagggatttgaatcttccggcgccgagacggtgctcggcgtgcaggttaaacacgataatccggtgaccaggagcatcacggctgcaaatattgatcgcctgcgttttacgttcggcgtgcagtcactggtggaggccaacagcaagggcgaccgcaatccgacatcggtcaggctgctgatacagatccagcgtgacggcgtctgggtcactgaaaaagatattacgattaacgggaaaaccaccacgcagtacctggcttccgtgatggtgaataacctccctccccgtccgttcggcatccggatgtcccgcgtgacggcggacagcaccagtgaccagcttcagaacaacacgatctggtcgtcgtataccgaaattattgatgtccgtcagcgctatcccaacactgccgtgactggcctgcaggtggagtctgagcagttcggcagccagcaggtgacgagaaattaccatctgcgcgggcggattattcaggtgccgtcgaattacgatccggtagcgcgaacctacagcggcatctgggacggcacgctcaagcctgcatacagcaataatccggcgtggtgtctctgggatatgctgacacatccccgttatggcatgggacagcgaatcggcgcggcggacgtggaccggtgggcgctgtatgccattggccggtactgcgaccagatggtccctgacggattcggcgggacagagccgcgtatgacctttaatgcgtatctggcgcagcagcgtaaggcgtgggatgtgctgaccgacttctgctccgccatgcgttgtatgccggtgtggaacggacagaggctgaccttcgtgcaggacaggccctcggatacagtctggacctatacccgcagcaatgtggtgatgccggctgagggtacaccgttccgttacagcttcagtgcgcggaaggaccgccataatgcggtagaggtgaactggactgaccctgataatggctggcagacgtccacggaactggtggaagacacggtcgccatcagtcactacggacgcaatctggtaaaaatggatgcgtttggctgtaccagtcgcgggcaggcgcaccgagccgggctgtggctgataaaaacggagctgctggaaacccagacggtcgattttagtgtgggggcggaggggctgcgccacgttcccggtgatgtgattgaggtttgcgacgaggattatgccggggtcagcctgggcgggcggattctgtccgttgaccgcgaccgtcgcattctgacccttgaccgggagattaccctgccgtcgtccggcaccacgctgataagcctggtggatggtgaaggcctgccggtcagcgtggacgtgcagtctgttaccgacggtgtgcaggttcaggtcagccggataccggacggtgtggcggaatacagcgtctgggggctgaaactgccgtcgctgcgccagcgtctcttccggtgcgtggctgtccgggaaaacgacgacggaacgtatgccatcaccgctgtacagcatgtgccggagaaagaatcgattgtggacaacggggcatcgttcgacccgcagcccggaacgattcacggcaccattcccccggcgatacagcatctgaccacggaaattctggcggaggagggacagtatcaggtactggcgcgctgggacacaccgcgagtcgttaagggtgtctctttttcgttgcgcctgaacgtggcggcggaagatggcagtgaccggctggtaagcagcgcaggaacgccggatacgcagtaccggttccgggggctgacgccggggcgctacaccctgacggtgcgggcggtgaacagccaggggcagcagggcgaaccggccagcacgcagttcagcatcgcggctccggcggcgccatcatttattgagctcacgcccggctatttccagattacagccacaccgcgccaggcggtatacgacccgacggtgcagtatgagttctggttttcagacgcgcaaattacggatatcaatcaggtggaaaacgccgcacgatatctgggaacggcgctgtactggatagcggccagcgtgaatatcaggcccggcagggattactatttttatatccgggcggtaaatcaggtcggtaaatccgcattcgtggaggcgaccgggcaggccagcaacgatgccgcaggctatctggattttttcaaagggcagataactgaaagtcacctgggtaaggagctgctggaaaaagtagatctgacggaggataacgccagcaaactgcagcagttttcgaaggagtggcaggacgctaacgataaatggaacgccatgtggggcgtcaaaatagagcagaccaaagacggcaaatattatgtggccggaattggactgagcatggaagacacgcctgacgggaagataagccagttcctggtggcggcggatcgcattgcttatattaacccggcaaacggaaacgagacgcccggattcgtcatgcagggcgaccagataatcatgaacgaggtgttcctgaaatacctgagtgcgccgaccattaccagtggcgggaatcctcctgcgttttccctgacgccggacggtcgtcttgccgcgaaaaatgcggatatcagtgggcatattaatgccacgtcgggggcgctgaataacgtcgttattgctgaagactgtacgattcatgggacgttgcgggccgagcggattctcggcgatatagtcaaagcggtgggtaaagagttcccgtatttcagggagccgtccaccggagcaaagcgttacgccagtggcacactgaccgttcagatagatgacgaccagtcatttgaccgccagattattatcccccccatcaattttcaggggagttattacggacgcaatgatacgaatgatacgtgggatgagtgtacgctggaagtgcgccgcaatggcgcgctgatttacagcggaacgagcagcagcattcctgagtcatacggtgccacgctggatatgcctgccggaggcggcatcgtcacactgacatttagtgtcagtaccagggggaacagcacaggatggccgaattccagaataagcgatctgattctgatggttgttaaaaaatccactgcagggattcgtatcagttaa

SEQ ID NO: 401387 - DNA, 153 bp, Salmonella enterica
atgttcggcaaggggctgcctgccatgctgaaagagtacgggctgagttatgaaaagcgccggaaaaatcagggcatacagaccaatctggcgctcagggaagaaagcaacgccgactggctgccgaaatgtgatgaccccataacgaaataa

SEQ ID NO: 401388 - DNA, 1746 bp, Salmonella enterica
atgttcataaaatctctccagatagccaataaagatggggttatacgcttaataaagtttcatgctggtttgaatttgatcgttgatgaaacgccagttgatgaggcatcaaccgagtcaaccaaaaccactggcaataatgttggtaaaacaacagtattaatgttagtcgatttttgtttaggcgcagatgctaaaggcatttatactgacccagaaactaaaaagggcgaatatacacttgttaaaaacttcttgattgaaacagaggttttaataaccctaacacttgttgaggatttagatgatccgctagctaagaccattgtcattgagcgaaattttctctctcgtaaaaaatgtatcagaagaattaatggactacaaaaaactatcgaagagtttgaagagacgttaacagacgtattagttcctggccattatggtaataagcctaccttttcccaaataatatctaataatataagatataaagaactcagtgttacccatacgctgagaacactaagctcatttactcgtgatgatgaatatgagacccttcatttatttcttcttggatgtgattttggaaaaggagctcttaaacaaaatttgttagctagcatccgaatggaaacaaccttcaagaataggttggagtctaaacaaactcgcactgcatatgagacatcactagcattattgatttcggaaattaatgatttagatctgaaaaagtctactttctatatcaaccctaactttgaaaatgatctcaatgctttggatgatattaagtatcaattgagcactataggttcaaaattaagtaagcttaaattacggaaagaactcatagttgaggcggtaaaagatattgaaagtggcaatatagaaattgacactaatcaattgaaagatttatatactgaagccagtaataatataaagaatattcaggtgaaatttgaatcattactttccttccacaaccaaatggttgaagaaaaagttaaattcatatcaaaagaattacctgtaataactagtgagattagtaaaactcaagaagatttaactacacttcttgtcaaagaaaaagaattagttgaaaatataaataaaagcggttcgtttgatgaacttgaaggtttagtcttagaattgaatgaaaaacaccgaagaaaaggtgagttcgaagccattattaaccaaattgagaaaactgaaaagaatatcgaagagttaaacgctcaagtagatgctattaacaataatttattttctgatgattttgaggtagaagttcaatctcaggtaaataagttcaataaatatttttcaactgtatctcaagagttatacggtgaacaatatgctttgaaatatgatattgttacagcatccaaaacaggaaaaaaaatatacaaattcagttcgtttaataccaattttagttcagggaaaaaacaaggagaaattgtttgttttgatattgcatatattttatttgcagatgaagaaaacattccttgtttccattttttgttaaatgacaaaaaagaacttatgcatggcaatcaactggtcagaatagctaatcttgttgaacgttacaaatctcaaattcagtatgttgaatctatattgaaggataaacttccaaaagaactgagcgatgagaaaaacttcattgtgaaattatctcaagagaataaattattccgcattgagaataattaa

SEQ ID NO: 401389 - DNA, 1170 bp, Salmonella enterica
atgaacctaaaagaacgactagacgagctgatcgcccgtggtcacacgatgacaaagatgatcgcacaggcgcagtttggcgatgacagtccggaagcgcgtaccatcactcgtcgctgggggattaccgaagctgcagaactcatcggcgtgacaccacagaccatccgcaacgcggaggagagcggaaaactgcctccggcagataccgtagttcgtggccgggttccgcagcgagctggctacactatcgggcaaattaacgatatgcgagaccatttcggtactcgcccgtcccgtcctgatggccagtctcctgccgtactggctatcgcagcacacaaaggcggcgcgtttaaaacatccacatcggtgcatatggcgcagtgggcagcattgcagggattgcgagttctgcttattgatgcgaccgacccccaggccacggccagcctgtatcacggatatgttcccgacctgcatatccatgctgaggatacattactgccgtattacctcggtgaacgtgataacgccgaatatgcaattaaaccaacctgctggccaaaccttgacattatcccgtcatgcctggccattcaccgtattgaatcagagatcgaagttctggaagccgctggcaaactacctgtgccatcacatctgctgctgcgcgctgctatcgaatcagtctgggacagctacgacctgatcgtgatcgacagcgctccgaacctcggcatcggtacaataaacgtggtctgcgccgctgatgttatcgtcgttccgacgccagcagaattgtatgactacgtgtcgtccctgcaatttttcaccatgttgcgcgacctgattgcaaacgtggatcttggtggtttcgaacctgacgtccgcgttctggtaacaaaatacagcagcgctgtgggcaatcagtctgcctggatggacgagcagatccgtaacgcctggggcggcatggtcttgaaagaagtcgttcgcctgactgatgaagtcgggaaggggcaggtgcgtatgagaactgtatttgagcaggccgctaaccagcgcagtaccccaacagcatggcgtaacgcggtagcaatctgggaacccgtatgccgggaaatttatgaacgactgattaaaactcgctgggagaacaataaatga

SEQ ID NO: 401390 - DNA, 1182 bp, Salmonella enterica
atgaaacgcgcgccggtgatgaaaaacgcccctaaaattaattttgattcagcgccaacggcaacgatcacagcatctgacaataaacctaccgccccggctgtcgccaatttgagcgaacgagtgcgaaatatggtcgggaaccatgtcaccctgccagtctgtggtcgtgacgtcacattcactctggaaaccgtagctgcggaaatggttgaacgggccactatggtctggtctggcaacgaacgtgaccaagcgctgctgacgcaggcggctcttgatgaccttattccttcatttctgacgtccggacaacaaaatccggcatttggccgcaaaatttccggcattatcgaggtagctgacggtagtcgccgccgccagactgcgatttatacgcacagcgaataccgcgttctggtcggggatctggacgacgagcagatggcctggttatccacgatcggcaacagctatcgacagaccagcgcctatgaacgcggaaaacgctatgcccgccgcctgaaaaatgagtttggtgacaacgtcagtaagctggccgaggcggaaaatatctcacggaaaatcatcatgcgctgcatcaaaacagccgaactgccgcgtgaaattatcgcattattcagcaatcctaatgaactgagtgctcgtgccggtgaatccctggcgaaggtgtacgcgggaaatgaggatgccgtactggcgtttgcccagcaccttgccaaacgtcagaaaggcggtgagtcattagaaactgatgagatcctgaaacagttacatgacgtagccgaaaaaccaacaaaaactgcaacgcgtgagcgcctgtttggtaagggaatcaaggcaaaatacaaaggggattcggtttcattccagctgaacaacgtttctccggtagtgatccagaaaattgaaacattgctgaaagagtaccaggaagagcagcaaaagctggtcagcgaagcggtcgacgacgcgttcgtcgaaattgatacagtgacaaattttatccgggctgcagctactggtattaattacgatattccagcaaacgagctgcagactatgattccatactcacgaactgtgctgaaggaacacacaaacgaggctgatcgaattaaacgaatcgctgatgaaataaccagacgttatattatataa

SEQ ID NO: 401391 - DNA, 309 bp, Salmonella enterica
atgggctttccgtctcctgcaagtgactacgtcgagccccgcctgactgtagatattttgtgtggtatcaacgctaatagtcggatagtcaatacatcagatggttatgccgtcgttgacgtttcactgattcagcggcagggagatacagtattgatacgttctgacggggcattacgttttgcaaaaataatggggcagtcgttgattgttgatgatggtgaagcgattgaaggtgaggcgctggatggtgtagttgttataggaaaagttacgtattttattaaccggataaatttttctgactga

SEQ ID NO: 401392 - DNA, 240 bp, Salmonella enterica; identical to SEQ ID NO: 399942

SEQ ID NO: 401393 - DNA, 162 bp, Salmonella enterica
atgattggtaacagtaatgaggccctatcgtttaaccgttacttaaataagaaagctatttgtcaggggaactatacttatagttgcactagatctcaaatcggttcggcgataaagtgggataatactttaatactaaaaattaattatcaattttcatga

SEQ ID NO: 401394 - DNA, 207 bp, Salmonella enterica
atggaacgcttcttcaggagtctgaagaacgaatggatgccggtggtgggttacgtaagcttcagcggggcagctcacgccataacggactatatcgttggatattacagcgcactaagaccgcacgaatataacggtgggttacccccaaacgaatcggaaaatcgatactggaaaaactctaacgcggtggccagttttagttga

SEQ ID NO: 401395 - DNA, 153 bp, Salmonella enterica
atgttcggtaaggggttgccagccatgctgaaagagtacgggctaagttatgagaagcgccgaaaaaatcagggcatacaaaccaatctggcgttaagagaggaaagcaacgccgactggctgccgaaatgtgatgaccctgtagcgaaataa

SEQ ID NO: 401396 - DNA, 873 bp, Salmonella enterica
gtgctccgcgccagcctgatttgcgatggacgttcgatacccttgctgaggtggatagttccttcggagaaacagcaaaatgcaaaggtacagcaggcctttcttaatactcttgccgaagcggtaaacccagaagcaagagtgatcatcgtcactgatgcagggttccagaatgcctggttccggcacatagaatcactcggatgggattttatcgggcgcataagaggaaatatccagatgcggcttgaggccaaaggcgaatactggttcagacgtcaggaattgcaggccagtagcaaaccggaatatctggggcctgggacgcttgcccgctcagaatatgcgcggtgcgatggtcatttttatttgcataaaaaagagccgaaaggccggaaaaataaacgctctcgttgcggtatagccagaccatcacagataaaagatgccagcccggcggcaaaagaaccgtggttaatattcagtagcactgatgactttaagccgcgagtgatcatgaagttatacagccgccgaatgcagattgagcagagcttcagggatgaaaaaagtgagcgctttgggttcggtctgcgggccagttacagccgttcggcaggaagagtgctggcgctgagcctgctgacaacgttgagcacaatagtcctgtggcttgtaggttatcacgctgaaaataaaggattacatttaaggtatcaggccaacagcgtcaggacacggcgggttatcacgtatctgacgttagcggagaatgtcttacgacagtccccgctaattttaaaacgaacggtgctgcgcaccgttctgaatcatctcgccagaacctaccagaatatggtgttggtttattag

SEQ ID NO: 401397 - DNA, 321 bp, Salmonella enterica
atgaaaaagccattaccacccgtattacgcgccgcgctgtatcgtcgcgccgtggcctgtgcctggctgaccctgtgcgaacgccagcaccgctacccgcacctcaccctcgacgcgctggaaagcgccattaccgccgagcttgagggattctacctgcgccagcacggcgaggaaaaaggccgtcagattgcctgtgcattactggaagatttaatggaggccggaccactcaaggccgcgccgtcgctgtcctttctcgggctcgcggtgatggatgaactttgcgcccgtcacatcacaccgcctgtactgcactga

SEQ ID NO: 401398 - DNA, 513 bp, Salmonella enterica
ttgtcgggcaaggctcgccagagaaaggaggttcacggaggacagcgccaccatgacggtttccccggtcaggtgatgcacggtgagtgccgtcgcataaccctccgctatccacagacgttttccggcatgtttctgcccctctatgatatggcatgtaccttttaccgctccgcctttcagggtgcgtttgagaccgtctgcattgataaactgaaggttaaccagtgcaccggtatcatcatgcagcgggacaaccacatcaccgacgcggaatgtcacgccgccggttttatgcatgacggtgagcgtcagacattccagagcggggaagccctttcgggtaaggtaggcgttgccggtggccggtcgggttttctccatgagcctgacggccagcgcggccgctgctttgcggtcagcctccgtttcggcttctgcgaccgcaatcacctctggggcaaccggcggcaggttgccggtgacagcattcaccttttgggcggcctctga

SEQ ID NO: 401399 - DNA, 321 bp, Salmonella enterica; identical to SEQ ID NO: 374927

SEQ ID NO: 401400 - DNA, 438 bp, Salmonella enterica
atgcacagtgagcgcggtcgcatagccctccgtaatccacaggcgttttccggtctgttttttcccttcgatggtgtgacatgcccctttaacttgaccggctttcagggtgcgtttgagaccgtcagcattgataagctgaagattaaccagcgcgccggtatcgtcatacagcgggacaaccacatcaccggcgcggaacgtcacgccgccggttttatgtatggctgtgagcatcagacattccagagccgggaagcccttgcgggtcagataggcgttgccgctggccgggcgggttttctccatgagcctgacggccagcgcggccgccgctttgcggtcggcctcggtttcggcctctgcggccgcaatcacctccggggcaaccggtggcagattgccggttacagcgttcacctttccggcagcctctga

SEQ ID NO: 401401 - DNA, 594 bp, Salmonella enterica
atgaaactatcaattatgcaattattgaattgctatttactagcaactagaaacgaaatagctattgatgaatctttatcgaaggggatttcaaaaaaaataccaccattgcccagaactagtaaatgggccggtgaaaaatggagttcattgagtttaacatttatttatatcatattaatgatccttttcatttttggtggctttgttatttatgtggtattttttttatcaaaattttatttatgcaaggtgaggtctttaacttctaaatctatcatttttagtaatgaaaataatagaatttattattttgcatttaccgagttaggaacaaaacaagtttgccatttttttaaagaaaagagtaattatgagttaccttataataaactaactatagtaaaattgccatggttaaattttgtgccaattaataacaattatgatgttattgatttatgtgggtttatctctttttttgatgtgataaaagcatttttgttatcgattgctagctttgtctctttttttaaaccctcctgcataaaatatctgttaatacagcccaacgatcatagtgctcactactag

SEQ ID NO: 401402 - DNA, 201 bp, Salmonella enterica
atggctacgaccctcaccccgtctcaccctgaatttgtctttgtgtttgcggccgttcgccgcactgagcgtaaaccgaacatctgcatgcttcgcactgttaccggtgacgagcgagccgcgcgtcgttcccttgtccgcgactatgtcctttcttttgccgcccgtctgccgcttgcggaggtgtcacatgcacactga

SEQ ID NO: 401403 - DNA, 639 bp, Salmonella enterica
gtggtgttgggtcaccgttggggttacgacaccatccagatcgtaagcgggattatatttaatcacgccctgctgcaccgcgtggcgcatgattttggccagatgctgtttcacccgcccggcaacgtcatgcacgcccttatcgtcaattgctttgaccagttgggccatatggcgggtttcaatcttcgcaatatccatcgcgccgatatcgggaaagacatagcgcttaaggcaggtgaggattttatcggcgtgaccttccgaccagagcttaaggcagctggtgtgccatgcggtggcgataaacttaaacgtacgggattcgtcaacggcgtctttatccgctttgcgaagctgagaggggcagataccggatgccagcagcttacgcgccgcatcgcgcttttcacgggcttccgccagcgtcaccagcgggtaagcgccaaaggcaagacggttttctttgccatcgaagcgatagcggaaataccacagctttgcgccgctggtggataccgccaggtacagaccttgcgagtcggtgagcttataagatttatcgaggggtttagcagcgcggattttactgtcattcagggccatgtgagggtctccatcattcatcgaactgaatga

SEQ ID NO: 401404 - DNA, 234 bp, Salmonella enterica
atgatccgcaatcgcttctttatgcgcctggcgaaaacgcaactggctaatcagaatgacaaaccacggcaccatccccggcagtacgctggcgctataaacgtaaacaaaaacgcgctgcggattggggatgatgtagttcaggcaggaacctaccagcaaaatcaaaatagagagcgccacgcccgcgaccgggacgccgtggcgggagacttttgcaactgccgccggtag

SEQ ID NO: 401405 - DNA, 378 bp, Salmonella enterica; identical to SEQ ID NO: 380215

SEQ ID NO: 401406 - DNA, 873 bp, Salmonella enterica
gtgctccgcgccagcctgatttgcgacggacgttcgatacccttgctgaggtggatagttccttcggagaaacagcaaaatgcaaaggtacagcaggcctttcttaatactcttgccgaagcggtaaacccagaagcaagagtgatcatcgtcactgatgcagggttccagaatgcctggttccggcacatagaatcactcggatgggattttatcgggcgcataagaggaaatatccagatgcggcttgaggccaaaggcgaatactggttcagacgtcaggaattgcaggccagtagcaaaccggaatatctggggcctgggatgcttgcccgctcagaatatgcgcggtgcgatggtcatttttatttgcataaaaaagagccgaaaggccggaaaaataaacgctcccgttgcggtatagccagaccatcacagctaaaagatgccagcccggcggcaaaagaaccgtggttaatattcagtagcactgatgactttaagccgcgagtgatcatgaagttatacagccgccgaatgcagattgagcagcacttcagggatgagaaaagtgagcgctttgggttcggtctgcgggccagttacagccgttcggcaggaagagtgctggcgctgagcctgctggcaacgctgagcacaatagtcctgtggcttgtaggttatcacgctaaaaataaaggattacatttaaggtatcaggccaacagcgtcaggatatggcgggttatcacgtatttgacgttagcggagaatgtcttacgacagtccccgctaattttaaaacgaacggtgctgcgcaccgttctgaatcacctcgccagaacctaccagaatatggtgttggtttattag

SEQ ID NO: 401407 - DNA, 387 bp, Salmonella enterica
gtggtgttgggtcaccgttggggttacgacaccatccagatcgtaagcgggattatatttagtcacgccctgctgcaccgcgtgacgcataattttggtcagatgctaacgctcccgcccggcaacgtcatgcacgcccttatcgtcaatagccttaacaagctgcgccagatggcgggtttcgatcttcgcaatgtccatcgcgccgatatcgggaaagacatagcgcttcaggcaggtgaggattttatcggcgtgaccttccgaccagagcttaaggcaactggtgtgccatgcggtggcgataaacttaaacgtgcgggatccatcaacgctggcgtcgttcgttttgcgaagctgagaggggcagataccggatgccagtag

SEQ ID NO: 401408 - DNA, 240 bp, Salmonella enterica; identical to SEQ ID NO: 377667

SEQ ID NO: 401409 - DNA, 246 bp, Salmonella enterica
atgaaagaatttaaattcatgactaaagacgaacttgaattaatgccagaaatagaaagagtggttagagagccggaatgcaaatggttaacggggacatctttacaagtaagagcgcgtatagaaaaggcgggagaattccctaaacggttacagcttggggggcgttctgtaggctggcgtctttctgaaattcaggcatggataaagggagaatggaaaccagaagacagccagcaagaataa

SEQ ID NO: 401410 - DNA, 165 bp, Salmonella enterica
atggccggaaaaagccgaaagaaacaggctaaaacagataacggtgaacctgatttcagttcagtcacgtttgcccttgatgaatacttaaaagcacgatgcaacaagcgcaaagtaaatcgcggctgtataggtagtgacaatcccaaaccaaaagaaccgtaa

SEQ ID NO: 401411 - DNA, 189 bp, Salmonella enterica
atggcaacgggttacattaataaaaagtcacaacaacttaatgcaagatttccacatgagattgtcgcagaaatggagagtaaccttgaatcaggagaaacaaaggcgcaattcatcattacggcagtgaaaggcgagatcaaacgccgccagcgccggaagcccaaagcagaagattcaagggagtaa

SEQ ID NO: 401412 - DNA, 294 bp, Salmonella enterica
atgtctgataagaaattagtaaaaaataatatcgacagatttattggtgacttatctggagccagcgctgctttacatttaatctggaaatatacaaatgaagataatgaaggtaaaaaagttcaagcaacccgttttttaattgatgaagtaaatgcgagggcggaagcgttggcaacttatgtttctgacgcggggaaattatccattgagctatgcaaccataaaagcgaaatagatattcatgggcttttggctagcgaacaacggaaaatgttttctaatacagactaa

SEQ ID NO: 401413 - DNA, 1359 bp, Salmonella enterica
atgagtgccgctaaaaaattacccgacgccgttttaatttgcctgtaccgctggatgcagcacaacggagcactcgacagcgtgacgcttgaagcggcagtaaaacagacacaggaaggaacgccggaggggggagtagtgcgcgagcttaaatcgatgtacgggaactataacagcatgtttgatgaaggttactttgatgcgcttcatcctgaacgggcgcaaaaacgccgttgtgagctggtggcggagtttatggggcatgatgccgttaaagacattctgacaagtgatcgaatagccctgctttttcccaataccccgccagaggtcagaaaaacaaagctacctatgagcattggttctaccgggtatgactgtcagacggattacaccatcaaatcacatctaccggctaacagcttgtgcagtatttacggcccatccggatcgtataaatcgtttcttgccgtgtcgtggtcatgtcatatcgcagcgggcaaggagtgggcgggaaagagagtaacaggaggttccgctatgtatgttgtcggtgaaggtggaattggcgtaaggcgacgcgtcaaggcctgggaatacctctataacgagggtgatcagcttaaaaacctgtatctggtcaatcggcctgtattccccgttcgtcccgaagaggtcagagaggtgatcatcgcagctaaacagattgaggcggaaacagggcaatcaataaagcttatcgtgatagatacccttgcccgttgttttggcggcaacgacgagaacgacgcgcgggatatgggggcatttattgagggatgcgacaccatcaagcgggagactggcgcaaccctgcttgtggttcaccattccggcaaggacgaggggaaaggggccaggggttccagtgcattcagggcagcgcttgacgccgagtttaacgtaagacgtgagggggaaggcggcgcaatcattctgacctgtacgaagatgaaagacgccgaggagccgcgacaatgcgcctacgaccttaaaaagattgccctgtttactgatgatgacggcgatgatgttcattcgctggtagtcctggacgttccccgcgaggttaaaggcggagatccagaactggagatcgtcaagaacctgacaggcaatcacgctgcgctatggcagtgtgtccgcagtcgtaaggccaggggagagccgtgcaaccgcgctgtagtacgcgacgacattatagcgatgtttggcgagagtgggcgtaagagcttcccccgatggcttgaaaagctggcacgcgatgaactgatagaggtatcagatgacggcgagatcacaatgacaggaaaggggtaa

SEQ ID NO: 401414 - DNA, 264 bp, Salmonella enterica
atgattaacaccacatccatcgagaaacacgcctgcaaggttgcgggtatatggatgaacaaggctgtaaaggaaattgaccggatacacggtgccgggtacgccaaagaacatccggcgctggtggctgcattcctggagacagcggcgcgtaatctggcaacactgaatcagcgggtaatagcagaaaccgaagaagtcacgcggatcactgtcagaagcgcagaggattgcgggggcgagcatgacaatacgcaagcttga

SEQ ID NO: 401415 - DNA, 990 bp, Salmonella enterica
atgacaatacgcaagcttgatgatggccgttggctggtggatgtgaggccagcaggcacggacggaaaacgcttccgtcgcaggtttgacaccagaggcgaggcagtggcatacgaacgtcacgttttaatgtattaccacgatagggcatgggtggataaacccccggacaggcgggcgctgacagaattatttgatttatggtggaaatatcacggaagccatcacccccacggagaacaggacagggtgcgcattgccgcagttctgcgtgatttaaaaacaataaacattacccgcgtggatcaactgacgggaaaaggaattgttaactacaggacaatgatgatgggtaaaggggttaaaaaatccaccatcaatcgttactgcatgatgatgagcggcttttttacccggttaattaccgcgcaggaatacagcggggataacccatttcatgaaatcaaacgacttaaaacagatcagccggaaatgtcctggctttcggttgaggaagtggcgcttttgctggatcacctttctggcgatgaccgtaaagcggcgatgttgtgtctggcgacgggcgggcgctggggtgaggttgttcagattaagggggagcacgtgatcggggggaaagtcgtgttcatgaaaacgaagaacggcagacgccggacagtgccggttgacggtaacatagaaaaaataattaaggttcgcgcgaccgggcgacttctgtttccggattacgcaacggtcagagcgacattaagaattattaaacccgatctccctgatggccaggcaacgcacatactacggcacacattcgccacgcatttcatgatgaacggcgggaacatcatcacgctgcagcgaatattgggacatgccaccatacagcagacgatgacctatgcgcattttgcgccggacttcttgcaggaggcggtgaactacaacccaatagcgggaatgaccctggaatag

SEQ ID NO: 401416 - DNA, 231 bp, Salmonella enterica
atgcaggagcaaaaaaggccgatactgagcatcaagcgtaagccgtctttgatgtaccagaagccaccacaaaagccagacagtgaacagaacgccgcgcagccggagcagcaggccgcgaccgtcaccacgacacaagcgaagcccaaatataaagggcttcccgaatggaaggacgtaagcgccaggtttggagcgtggtatctcaatttttttaaatcgacggggtaa

SEQ ID NO: 401417 - DNA, 225 bp, Salmonella enterica
atgaagatagaaaccgctgccggaatagaaaatgctggtggagtgtctgtatatatcagcaaggacattgtggaggcgctggaggcaaagcaaaaggacactatagaagcactggcaaaggccgggcttgatccgttgtgttatgactataaacctaccattggctggatggttcgctttcagttacgcaattctctcggcttacatatcgggggcgcagaataa

SEQ ID NO: 401418 - DNA, 1056 bp, Salmonella enterica
atggcagagcaaataacctcactcactacggctaatttactccaggttatcggacgtgaggacgtcaaagagtttaaatttagtccgctttttacaagtctgtttttccctgacgttgtcacgttctcaaccagagacatcgcactcgatacgctcgatattgaaaacgtggttatgagcgccttttgttcgccgatggttggtagtcgggtgcaacgtgataagggttacgacaccgcgacattcacgccgggctatatgaagccaaaaaacgaaattgacccgtcaaaaacaatcgtaagggttgcgggagaaaaccccgccgcgcttaacagtccgtcttatcgccgtatcaggctgattcacgatgcgctgagaaagcaggctaaatccatcaaggcccgcgttgaatggctggcggtgaatgccattacgacaggtaaaaacaccatcgagggcgaaggcatagagcgctatgaaattgactggaagttaccggacgccaacgtaatcatacaggccgcaggtaaaaaatggtcagagcaggaccgaaactctttcgatcctgtaccggatattgaactttatgcagaagtggcggaaggtcctgtaaatgtcattgttatgggtggcaaggcatggcgtttacttcggagttttaaggtattccgggaactgtttgataatcgcaggggatctaactcccgcgcggagctggctacaaaagacctcggtgaagtcgtcagctttaaaggctggctgggagatgtggccctcattgtgtataccgggaaatatgaagatgacgacggcgtgcagcattattatctcgatcaagattgcatggtgcttggcaatactgaaaatcaggggttagtagcctacggtgccattatggatcaggacgctgtacggtcgggacaggtaaacatgcagtattaccccaaaaactgggtacagcccggagatccagctattgagtatgtgcagacgcacagtgcgccgcagccggtccccgtaaacatcggcaaatttgtaaccgttcacgtcaactaa

SEQ ID NO: 401419 - DNA, 336 bp, Salmonella enterica
atgagtgtaccttatttgcaactggtggccggtacgcaggaagtaacctcaacgctggtatatctggctggcgctgagtctatcccggcctttacaccgctgatgatgaatgccgatggcgctatggttccgtgggatggcgcagagtcaggcaaggctatttatctgacgccgcacgccatagacccgacaaagcgaccgcgtgcgatggtgtacaaaaccgggatatttaatatcgagttgatccactggccggataccgtaatcacggaccagaagaaagtagccgcctttgctggttctggcgtttcggttcagccgctgggcaagagttaa

SEQ ID NO: 401420 - DNA, 429 bp, Salmonella enterica
atgagcgacgataacatcatgaatcaacagcaggtagcgcaggcatttcgcgtagaccggacaacggtaagagcctggacaaaacgcggtttaccattcattcagggagaccagggaaaggaaaatcagtattactccgggcttacaatgtggtgggtgctgggtgatgagtttgcccgcaatgacggactggaagaactcagcgcgatacaaaagataatttacgcccgatgcatggcgacagaaattcatcgcaaagacggcatatgtactgatgaagatatggccagcgaggaaatcatgatcggcatgttgtcggttatcggtgtggacccggttgatgtggttcgtgatgtcagttttgtaaaagggcttattagcggtcgcggccagggtaagcaacgaaagcgcaagaggaaaaaaatatga

SEQ ID NO: 401421 - DNA, 426 bp, Salmonella enterica
atgaagaatttttttgtaagtcagcaggaaatagccgagcactttaaagtaaacagaaccacgatccgcgcatggactaaatcggggttgccttatctggaagcagatcgcggaaagccggcaggctatcacattgggcacactctatggtggtttctcggaagggaacgctttaaggctatggagtattcaggcgctacagcactggaaacgatcatgcttgcgcggctggacttaaacgagaaaatggaggaagcggacatggagagtaaattcgataaggggcttgaggtatacggtttttcgccggaagaaatttccgcagcgcgtcacgctatggcggggtttcgccggggttgggataatgcgctatgcgttcgtagaaaaagcctgaaggaattcagggagcgctctacagaagattga

SEQ ID NO: 401422 - DNA, 300 bp, Salmonella enterica
atggcgacggttacattttatttaatgtattatccaaatcataaagatgtaagaggaacaaatcgttacttgaatgttaatggtcgttggtcatcttttccttctcgaggtgttcctttgttgtactgggatgatgaattgtcatgccgtgaagcttccgggatcttattaaaaagccgatatggtattgatggcgagttgtgtactttggtttcgacggggactttaaggcatcctgaacgcatggtgaaatacgataagaaattgcatgaagccgcattaaagagttatgtaaagtaa

SEQ ID NO: 401423 - DNA, 519 bp, Salmonella enterica
atggatgatgtagttcttattgaccgctatgataacgtgacaggaatcatggataaaatttcagcacataaaaaaggaatcttacaccgggcggtttcagtatatataattaatgataatggggaaatattgttacagcaaagagcagcaaataaataccactcaggaggcctctggagcaatgcctgctgtactcatcctctgcccggggaagaggtcatgtctgctgcaggacgccgtctgatggaagaaatgggaatggtatgtaacctgttgaaacttttcccgttatactacaacgttgatgtgggaaatggttttcgtgaacatgaaataacgcatgttttttatggtgtctgtaacgatattccggtacttaatcctgaagaggcagcatctttttattactcgtcacctgaaaacgttattcatgaaataaaaaaatatcctgaaaagtttacagaatggtttaaattctgcttcccggaaataatcaaccatgttgtctgtttaaaatga

SEQ ID NO: 401424 - DNA, 1038 bp, Salmonella enterica
atgcgggtcaacgggcagcattttaatgattccagaaaacgggactatctgagagacacgctggatattgttaatggtggacagaaggtcacagatttcagtgaccttcttttctatttcagaacactaaaaaaaacagaaagaagatatccatacccggagctgaaatccctctttaatccaatgaatatctatcctttttatttttttatgccttttttgtttgtgaacgatattcctgagcgaaatcagtataaaaagaaaatacggatggctggtattatctcaacactgattgcccgacggacaattttgacagacctttttgccgatgaacagtatgagcagctcatttcaagagatatggcggatctgaaaaaagaaaatcttggatattatattcaaattctggattttgaaattgataaaatcatatcagaagttttttcagatgatgttttttttcatgaaagttacagtctgcgattcagtgaatatatcagtacaatgcttacggaaagaaaattatcaccattaactggtatggatgattttcaattcaaaaagtatgccacggggaagtccgtgcttcatatacttgtcagtgatatggttctggctattataaaaaaacctgaacttcgtgagcaatttgataagatgttaagaagtttcatcatgtatctgaccgttcaggatgatgtactggatatagtggaggatataaaaaaacaacaaccctctcacttttatccgtggatttccggagggaaaataattgacaagccggatgataatacagaaaaagcggtcatcttaaagttttatctggggggaggggtggaacggtgtgaagcattttttaataaatatgtaaaagatataaaaacgcagtccatggacgccggtattcctcttgattcatggttgaaggttattgataaaatgtcagaaaaaacttctctcagaattgaaaaatttaaaacagcatctgaagaactaaagaacagtataggtaaaagggaatgtcatggatga

SEQ ID NO: 401425 - DNA, 159 bp, Salmonella enterica
gtgcaattacatgatgttgtgaattttataggtttggttgattttgagcatctgacacaggttgtatctggcgtggacctggatgtacttaagaacattgtccataatgcgcaggaaggtatgcaggttaacaatcctgcatggagttcctggtcataa

SEQ ID NO: 401426 - DNA, 921 bp, Salmonella enterica
atgaataatctgccgctgctgaatgatttacgcgtgtttatgctggtcgcccgtcgggccgggttcgccgctgccgccgaagaactgggcgtttcaccggcttttgtcagcaagcgtgtctcgctgctggagcagacgctccatgtggtgcttctgcgccgtaccacccggcgggttgttatcactgaagagggtgagcggatttacgaatgggcgcagcgtattttgcaggatataggacagatgatggatgagctttccgatgtccggcaggtgccacagggagcactgcgcattatcagcagcctgggttttggccggcgggtggtggcgccggcgttgtcggcactgtcgcgtgaatatccgcaactggagatacgctttgacgttgaagacaggctgatcgacctggtgaatgaaagcgtcgatttggatattcgggtcggcgatgatattgcccccgatcttatcgcccgcaggctggcgaccaaccggcgtgtcctctgtgcgtcgccggaatttttatcccgttatccgactcccggacagctcagtgacctcaccgccttaccgtgtctggttatcaaagaacgtgatcacccgttcggcgtctggcagttgcagaataaagagggagagcagaccgtcaaggtgaccggcccgctctcttccaaccatggagaaatcgttcatcagtggtgtctcgatggacaggggattgcactgcgttcatggtgggatgtcagtgaaaatatcgtcagcggacgtttgattcatgtgctgccggactattatcagtccgctaatgtctgggcggtgtatgtctcgcggctggcgacttcagccagaatccggaccacagtggagtttctgcggcactattttcagcagcactatccaaagcacagtgaagtgaaatag

SEQ ID NO: 401427 - DNA, 1086 bp, Salmonella enterica
atgaaaaaaacctgtcgtatcgccgccatcccgggtgacggtattggtaaagaggtactgcctgaaggtattcgcgtcctgcaggctgcagcggaacgctgggatctgtcgctcagttttgaacaaatcgaatgggcgagctgcgaatattatacccgccacgggaaaatgatgccggacgactggcatgaacagttgaaagagttcgatgccatctacttcggtgccgtcggctggccggatacggttccggaccacatatcactgtggggctcgctgctgaagttccgccgcgggttcgatcagtacgttaatctgcgccctgtacgtctgttcccgggggtcccctgtccgctggcaggcaaacaggccggcgatattgatttttacgtggtacgtgaaaataccgaaggtgaatattcctctctcggtggacgcttcaatgaaggtaccggacacgaagtggtgattcaggagtccgtcttcacccgccgtggcgttgaccgtatcctgcgctacgcctttgaactggcgcaaagtcgtccccgcaggacactcacctcggccaccaaatccaacggtctggccatcagcatgccctactgggacgagcgtgtggaggccatggcacagcaatatccggagatccgctgggataagcaacatatcgatattctttgcgcccgttttgtgctgcaaccggaacgcttcgacgtggtggtcggttcaaacctgttcggcgatattctctccgacctcggtccggcctgtaccggtaccatcggcatcgcgccgtcggcaaaccttaacccggaacgtacgtttccgtcactgtttgaaccggttcacggctcagcaccggatatctacggtaaaaatatcgccaatcccgtcgccaccatatgggctggcgcgatgatgctcgacttcctcggcaatggtgatgaacgttacaaagcggcgcataacggtattctggccgctattgagaaaaccattgccggcggcccgaaaactgccgacctgaaaggtaccgcctcaacgcaacaggctggcgaagccatttgccgggcgattctgcgttaa

SEQ ID NO: 401428 - DNA, 1608 bp, Salmonella enterica
atgttgagcaatgtaaagaaaaaagatgtatcgctgatagccatcagtctggtggccattcttcttatcgcaaccgtattaagcctctttccgcaacaatccgccctggtggctgacaccctttttaacagtattacccgcctgcttggctctgccgtccagctactggttctgctgatcctgggtctggtgatctggctggccaccggcaggtacggcaatatccgtctgggcgaaggtaaagccgaatacagtaccctctcgtggctgtttatgtttatctgcgccggactcggctcctccacgctgtactggggcgtggtggagtgggcttattactaccagacgccgggcctgaatattgcgccgctgacaccgaaagcgctggaatacagccttccctactctttttttcactggggggtcagcgcctgggccacctatactctggcctcgctgatcatggcctaccacttccacgtgcggaaaaacaacggtctcagcctctccggcattatctcggcaattaccggagtgaatccgcagggcttctggggccggctggttgacctgatgtttctgattgcgaccgtcggcgcgttaaccatttctctggtcgtcaccgccgccacctttacccggggtctgtcggcgctgaccggcctgccggataatttcacggtacaggcatttgttattctgctttccggtggcatcttctgcataagctcatggattggcatcaacaacggtatgaagcgcctgagtaacatggtgggctggggggcgttcctgctgccactgattgtgctgatcgctggacctactgagttcatcaccaacaacatcatcaatgcagctggcctgacggcgcagaacttcctgcagatgagcctgttcaccgacccgctgggcgatggcgcctttacccgcaactggaccgtgttttactggctgtggtggatttcctacacccccggcgtggcgatgttcgtcacccgcgtttctcgcgggcgaaaaataaaggaagtgatctgggcgctgctcctcggaagcaccattggttgctggtttttcttcggggtgatggaaagctatgccatgcaccagttcgttcacggcgtgattaacgttcctcaccttatgcagacctccgggggtgaaacggtcatttctcaggtactgatgtcgctgccggccggaaggctgttcctcgcggcctatctgcttgtgatgattattttccttgcctcacatatggatgcggtggcttacaccatggccgccaccagtacccggaacctgcgggaaggggaagagccggaacgcggtctgcgcctgttctggtgcgtggtcattacactcatcccgttatcgatcctgtttaccggtgcctcgctggaaaccatgaaaaccaccgtggtgctgaccgccctgccgttcctcgccattctgctggtgaaaaccgttggtttcctgcgctggttaaagcaggactacgcccacgtgccggttcatctgattgaaacgcatgtccccgaacctgtcgtcctgcccggacaactgccgcccggcgcggtactgaaaagcgacggtcagtcgctgtaa

SEQ ID NO: 401429 - DNA, 1125 bp, Salmonella enterica
atgagcaatctcagtcctgaacttaccctcccgaaaaacttttgcgaaaatccgcaggatgcctggaccattccggcccgtttctataccgacagccaggtcttcgcgtacgaaaaagagcgtatttttgccggcagctggatctgcgtggcccacagcagtgaagtggcgaagccaaatgactacattacccgggagattatcggcgaaagtattgctgtcatccgcggacgtgacaatattctgcgggccttctataacgtctgcccgcaccgtggccatcagctgctgagcggcgaaggcaaagccagaaatgtgattacctgcccgtatcacgcctgggctttcaggcttgacggcaaccttgcccatgcccgtaactgcgagaatgtggcgaatttcgacagtgagaaggcccggctgacgccggtacgtctcgaagagtacgccggattcgtgtttatcaatatgaacccggaggccgaaagcgtggaagcacaattgccgggcctgcaggacaaggtactggaagcctgcccggaggttcatgacctgaaactggcggcacgttttaccacgcgtacgccggcaaactggaagaacatcgtcgataattatatggaatgttaccactgcggtccggcacatcctggtttctccgattccgttcaggtcgatcgttactggcacaccatgcacggcaactggacgctgcagtatggtttcgccaggccatccgaacagtcgtttaagttcgaagaaggtaccgatgccacattccacggtttctggctgtggccatgcaccatgttcaacgtcccgccgatcaaaggcatgatgaccgtcatctatgagttcccggtggatgaagaaaccaccctgcagaactacgatatctacttcaccactgaagaactgaccagcgagcagaaatcactgattgagtggtaccgtgacgtcttccgcccggaagatttacggctggtagagagtgtacagaaggggctgaaatcccgcggctatcgcggtcagggacgcattatggccgacagcagcggcagcgggatctccgagcacggtattgcccatttccatcatcttgtggctcaggtgttccagccgtaa

SEQ ID NO: 401430 - DNA, 1449 bp, Salmonella enterica
atgtccgtattccacacagcccttttccgccagcaggcgctgattgccggcgtctggcgcgatgccgccgacggcaccacgcttgccgtcagcaatccgtcaaccggcatgacgacaggccatatccccaatatgggccgcacggaagcgcaacaggcggtggatgccgccactgcggcactcccggcgtggcgggccctcaccgctgcacaacgtgccgcgttgctgaaggcctggcaccgtttaatcctcgaaaataaaactgcgctggcgcagataatgaccgccgaacaggggaaaccactggcagaagccgaaggtgaaatcgcctatgccgcctcgtttatcgagtggtttgccgagcagggtaaacgcgccaacggcgagattatcccctcaccggatgccgacaggcgcctgatggtgatccgtcagggcgtcggcgtctgcgcggcaatcaccccgtggaacttcccggcggcgatgatcacccgtaaagccgggccagcgctcgccgccggctgtacgatggtcatcaaaccggcaaacgaaacgccgttcaccgcgctggcaatggcggagctggcaattcaggcaggactcccgccaggcgtcattaacatcgtcaccggccagtcgcgtgagataggtgcggtattcaccggcgatgaacgggtgcgtaaactctcctttaccgggtcaactgaggtgggtcgcgagctgatgcgccagtgcgccgggtcggttaaaaaaatctctctggagctcggcggtaacgcgccgtttatcgtcttcgacgacgccgatattgataaagccgttgagggcgcgctggtcgccaagttccgtaacgccggacagacctgcgtctgcgtcaaccgcttctatattcaccgcgccgtctacgaccagttctgcgataaattcgtcgcccgcgtcgccgccctgaaagtcggcgacggctgcggggcgggggtacagattggcccgctgattaacgccgctgccggacgcagggtgcaggccctgctcgacgatgccctgatccgcggcgccacgctgttaaccggtggtaaagcgcatgtgccgggcgggaatttcttcacgccaacggttattggtgacgtacagccgggctcgctgctgctgcaggaagaaattttcggcccggttgccgcgctggtgaagtttgaggatgaacagcaggtcatcagacaggccaatgacacccactacggcctcgccgcctatttctacagcaacgatgccgtccgcatctggcgcgtctccgagcaactggagtacggaatggtcggcatcaataccgggctgatttcaaacgaagtggcgccgtttggcggggtgaaacagtccggccttggccgcgagggctcagaacacggaatcgaggattacctggagatgaagtatctctgccagggggtgtaa

SEQ ID NO: 401431 - DNA, 966 bp, Salmonella enterica
atgtctgattatcaaatgtttgaagttatcgttcgcgatgttgaacaggtcaccgccctggtgaagcgttttaccctggtgtcgccagcgaatgaaccgctgccggcgttcagcgccggcagccatattattgtccggatgcaggatggcgggcagtgctacagtaacgcctattcgctgatgagctcgccgctggataccacaagctggcagattgccgtccgtctcgaatcgccgtcaaaaggcggctcgcgctttatgcatcagcaggtgcggcctggcgataccctgacggtttcgacacccaacaatctgttcgccatcgacccgcaggcgcgtaagcatctgctgattgccggcggcataggcattacaccgttcctctcctttattccacaactggaacagcgtcaggccgactggcagttgcactactgtttccacgatgccaacaataacgctttcgtcgacgagctcagcgcctccccgtggcgtgaacgggtcagtgttcacgtgtcagcgtctggcagccgacttgaccttatgcgcctgtttgccgatctcgcccccggcacccacgtttatacctgcggcccggcagcgctgaacgacgcagtgaaagtggcggcggcacaccatcaggtgcccgccagtcagctgcactttgagcagtttattgtcggagataaaggcggcaatgcctttactctggtactggcgcgttcaggacgcgagtttaccgtaccacaggacatgaccattttgcaggtgatagagaataacaaagccgcgaaggtcgaatgcctgtgccgtgaaggcgtatgcggtacctgcgaaaccatgattctggaaggagaagccgaccaccgcgaccagtattacagcgatgaagaaaaagccagccagaaaagcctgctgatttgttgttcgcgcgcaaagggcaaccgtctggttctggatctgtaa

SEQ ID NO: 401432 - DNA, 765 bp, Salmonella enterica
atggtacgcctgaaaaacaaagtggcttttattaccggagctgcaagtggaattggtaaagcgacttcagtgttatttgctaatgaaggagctaaactggtaatcagcgatataaatgaaaaactgcttaaccagacagcggacgagttaagagaaataactccggacatcctgccagtaaaactggatgtaagtaatgaatctgaatggcagtctgccattcgacaaacagaaaccaggtatggatgccttgatattctgtttaacaatgccggaatctatataattaaaccgttacttgatacttcgctggaacagtggaataccctgatgtccatcaatgtaactggcgtgtttttaggaatgaaacatgccattccactgatgagaaaaaaacgtaatggctccattataaatgcctcgtcagttgccggactgaacggtgccgccgggcatacgttgtatggagcaagtaaaggcgcagttcgaattatgacaaaagacgttgccatggaatttgcagatgacaatattcgtgtaaattccattcatccgggatatattaaaacagccatggcaaaatatgcctctgatataactcatgagtctgaacaggaactggggaataaatatcctctgggacgacttggagaaacaacagaagtggcaaaaacggtattatttttagcttcagatgattcatcatacataaccgggtgtgaatttgttatcgacggtggtatgacgagcggacataagcgttga

SEQ ID NO: 401433 - DNA, 360 bp, Salmonella enterica
atgaccgggttaaagattttcaggctggctccgttctgcctgttattgctggcggggagtgtatttgcagagcataatgatacatctgaagctgatgttattaattatgaaaaagttcttggcattaccataaaaaatacaggcggtcgtgtttttaacgcttataaaggtaaatcgtgtgttgtaaaaatgcatcttgcacgtgatgggtctttgcttggattcagcactgaaaatggtgcgcctgatttatgtaataaactttcagatgttatgcacagtattaaaaagcttccagcccccccttctgatgaaatttatgatatattcaaagatgctcgtttgccctttaaaccctga

SEQ ID NO: 401434 - DNA, 936 bp, Salmonella enterica
atgaaaatcacgaattatgacattaacgagcttcgtgccttttttgaagtggcccgttacagcagtttccagcgagcggcgtaccatctgtctctctccccttcagcacttagccggcggattatcagccttgaatccaggctggatgtaagcttgttctcccgtacaacccggtcggtttttctgaccaacgccggacgagctttatgtgaggaggctcagccattgttgctggcgcttgataactgtattcagcgggttgcaggtcatgccaaagggtatggaggacaggtagcaatatcctgtatcagtagtgctgcatttgcattatttccgcaggtattgcgcttatttcgtcaacactacccaaatatgcgtattgagttatcagacgacacaggcttgcgcgtacagcaacaggtactacagggaaatgtagcttttggattgacgacgctatgtgagaacactgctgattttttttcagtgcctttacttaccgatccttatgttgtgatggtaccacaggtacatccctggcgggacagaccgcaggtcacatggcatgagttatcgggtatttcagcactaggctggcccctggtaggattacggactgggagcgctaaccgtcggcagattgatgaggaacttcgttctgttaaaatcagcattccctggttcgatgaggtagagcacctgtcgtcagccatgggactgctacgtggcggaggaagcaccgttgtaatgcctaaacttgcaaccgaatcctgcggggaatggggcctgaagtgtttacctctggttgaaccgcgcattgcccgcaccatttctcttatacggcgtcatgaaaccaggctgtctgaatgtgagcaggtactctgggatctgtttcagcatcagctaaaagatttacagcatttctggctggaataa

SEQ ID NO: 401435 - DNA, 339 bp, Salmonella enterica
atgcccgttatcacgctatatataccaaaagaactctgcagtgagcagtattccgatgtcagtagtcagctccaggagaaatgtgcctctctgtgtattcagcgtcttggtgcatcgcctgaaaaagttcaaattcaaattctggttgcctgccttcctcctctgggaagaccagtttatgccgaagtgaaataccgtcagaatccgaaccgtgatgccgacctgatgacgctgtttatggaggaactggaaggcataatctccctgtactattccgttggaacaccgcgtatccgctgcttcccgcagtccggcgaatcactttatgccagaaactga

SEQ ID NO: 401436 - DNA, 942 bp, Salmonella enterica
atgaatttgaaagaaatccgcagttttttcgtcggcggtacaaacatcactttacaacaacaacctgtactcagacagcgactggcacagggaggggaagcgcgggatatcgatatgaatggcgatatcatgagcggtcaaatgtatgtccaggcatttatccagaataccccctgttcggaaattcctgttctgttatggcatggcggtggtatgaccggagttaactgggaaaccactccggatggccgccccgggtggttacagggattacttcaggaaggatggaatgtctatatctgtgatgctgttgaacgtgggcgtgcggggtggagtccttttcctgaagtatggacggatcctccgctgttccgtaccaagaatgaagcctggcaaatgtttcgtatcggccctgcagatggctatcatcacgacccagccttgcgtaccgtctttcgcgacagccgtttccctgtaacagcatttgactattttgcctgccagtgggttccgcgctggagtgggcacgaagcgataacttcagcggcctatgaagccctgcttgatctaaccgggccctgcattgtcatcgggcacagccaggggggagggttcgcacttcagatggcggcacagcgaccacaggatattctggctgttgtggctctggaaccatcaggagcccctgcatcctcccttcctgacggaagtcatccagcacaccttgtactttggggagatcacatcagtgaacatcctgtctggaagaaataccgcaatacggttaatggctatatcagacagttaagtagcgcgggagtgagggtggatgagattgatctacctgcgacaaatatctatggaaattcgcattttctcatgctggacgataatgccgatattttactggataagatcaccaaatggttacgaaacatctga

SEQ ID NO: 401437 - DNA, 1278 bp, Salmonella enterica
atgataagcatcatcgccgtatgtaccgtactactttgcgttattctgttgatgagcggacgagtgtccccggttgtaactctcgttctggttcctttgattgcagccctgcttgcaggtttcactactgaagagattcagagttttatcggcaaaggagttgtcactctggcacctgtcgtcgcattgtttatctgtgctattttatatttcagtattatgcatgagcaggggttattcaatccacttgtcgatagattattgaggctcgcaggaaatagtcccgcacgcattatgatatttaacgttctggtgacggctttggcccatctcgatggtgcaggggccacaacctatctgattaccattacagcgtttatgccggtatataagcgccttggtcttaatttacttcatttaacgttacttactggctgtacggcgggtatcatgaatatggtcccctggactgcaccagtgttacgtgcagcaagcgtggctggtatcgatcccgtagccctctggaaaccactgttacccatacagctgtttggtgttctctgttgcattggaatggcgtggttactgagcagacgatataaaaatacaggtgttatgatacatggtacaatggaaacccggcctgtgacgctcccccggtggcgttactggagtaatgttgtattaacctccgtgatgatccttcttctgctgatgagtgggttgtccagcctgctcatctttcttgtgtctctgtctctggccctggcgatcaattatccggatgctaaggcacagttgcactgcatacgacaaaatgccggagaagcgttgctactggcatcaatattatttagtgctgcagtgtttctcggcatactgactcacagtggaatgctggaacaggttacccgccaggctattgcgattttaccagaatcgtttgcacggtatctctacctgatcctgggaatattttctctgccgctcggtatgatgtttggtgcagatccgtggtatttcggcattatgcctgttgtgaagtctatagccggagtacatggtattgcacctgagtttgtcgcgcgggcaatgatgattggcgaaaatgtcggtttttcaataagccctatggttggaagtgcatggttaatggccagtctgagtggtgtcagccttggccaacatatccgtttctccatgctggctatctggggcattgctttgttaatgctgggaatggccatcctgagcggcgctgttgtattacctggctaa

SEQ ID NO: 401438 - DNA, 423 bp, Salmonella enterica
atgaatttttctgttgatccgggcattattaatatctacgaaacctggcacaggacagtaaaagaccgtgatctggcaggtactgtagcgttgtatacagaagatgctattctggaaacgccactggcgctggctgtttaccctacgcaaaaaaccggtatcgttgttggacgagcacaaattcttactttttttgaagacagtttgcgcaagtttccgggtgacctggcacagtggcaccgtacaggcacgcttttcgtaaatggacatcaactggtatgggaatatccccgcaatgcacctcagggtgaacagactgatctcattgagatgatggaaataaaaaatggactcattgcataccatcgcgtctattggggatggtatggtgtcaggttattagcacctgccttacagggctga

SEQ ID NO: 401439 - DNA, 396 bp, Salmonella enterica
atgacaaatcctgtacttagcatcattgactccagcaagtttcccgtggtgtacatctacggcgcggatctggtaccgggagacggagcaagaataacaggcgattttgagcaattaatccggtatgcgaagccatttgttctcgtcatcgagaatggcgctggttcttcccgccgtcagcaggaagagggtaagacgcgtatgttatggctgaaagagaacaagacccgcatggcggccgtatgtaaaggtatcgtgtttgtcacgccggacaggcagcgcctgcctttggtcgaaaagcaggcagcaggattgcagtctgtattagggatcacttttctggcacgaggaagtctcagtgaagctcatgctacaggcctgactatgctggaatga

SEQ ID NO: 401440 - DNA, 318 bp, Salmonella enterica
ttgacgacctggatactcacggcggaggctgaagcagatctacgcggcataattcgctacacgcgcaagcagtggggtacagtgcaggcacgccgctatattgccagactggaacatggtattgcctgccttgccaccgggcgaggtcctttcagggatatgagcgaactcttccctgagttacgaatgacgcattgtgaacatcactatgtcttctgtctgccacgtgggagtgctcccgccctggtggtggcgatttttcatgaacgcatggacctcatgacccgactggcaacgaggcttagcagagagagttaa

SEQ ID NO: 401441 - DNA, 252 bp, Salmonella enterica
atgagccgcctgacaattgacataacagaccagcagcaccagagcctgaaagctctggcagccctgcaaggtaagactatcaaacaatacgctctcgaacgtttgttccccggcgatacagatgctgaccaggcatggcaggaactgaaaacgctgctgggaaaccgcatcaataacgggattgcggggaaggtgtccgccaggagcatcggcgagattcttgatgaagaacttggtgaggatcgcacttga

SEQ ID NO: 401442 - DNA, 810 bp, Salmonella enterica
atgcgcggcactggtctggatacagctgatgaggctttgaaggcgcacataacgggtgtggtcagggagttagaaagcgagctgggaaacggcctctcagccgttattcttcatggttcgcttgcgatgggaacttttcacgctcccaagagtgatgtagacctgctggtactggtagacgatatttcagccgaccaggcgcgacggctttacggggtttttgagcgacatcattcgcacagaccctacgttggtggccttgaagtgaacgtcattcgtgttgccgatgcgagaactccgcaacaccccttgcccagtctggtgcgcttcagcgagactaccaggggatggaaccaatggcaggaaggcagacccccgactgacgaagatctaatcgcccatttgatggtggcgaagcatcggggtcgtagtctctgtggtcctgcgccggatgatgttatcggcgagctgtcatgggctgactatctggcatcggtgcgcagcgatatcaactggattctggaaggcgacaatattctggcatcaccttactacggagtcctgaatctcgcccggtgggccatgatgcaggcaacaccggaacgcatcgtacccggtaaagatgaggcaggtgtgtgggccatgacactcctgccgcaaaccctgcaggggattgtcgctcaggctctcgctgcttacaggaacacccattggccgggtacgatacgcgaacggcaattgtctggcggtccctggaatcatgcggcgctgattgaatttcgggactatatgaagtcagtctggatatag

SEQ ID NO: 401443 - DNA, 207 bp, Salmonella enterica
atgaagagtaaatatgactggttgttccagttaagaaaatgcagtaataaagagactctcgaaaaagtcgctgaatctaaccgttataaactgtcgaatgatgagctggaaagttttaactctgctgctgaccatcgcctggctgaactgacgatgaaccgtctgtatgataaagtcccggccagcgtatggcagtttgtccggtaa

SEQ ID NO: 401444 - DNA, 243 bp, Salmonella enterica
atgaaaactgaaacgcacactcacgatgtgacatccgctgacatcagactgcaccagaaacggggacacagggctctccggctggaaatggcgggggattatactgccgccgcactggcatggcagcataccgcaaataaagcaccgctcccacagtggagaatctttgccagggatcgaagccgttgttgtaagaaccggaatacaacccgttcccgccagggctgtccaccgggacggtga

SEQ ID NO: 401445 - DNA, 1134 bp, Salmonella enterica
atggcacaggccatgaaccacggtaacctgacgatgtcccggaccagcgatattccttatcatgcgctgaatgatgcttacgaacagtacctgcggctttcctcgctgaaggcggcctgcgacagcatcagcgacgggattaagatgcttcctgtttttccttattattcactggagctgggggaattatacgcggcggtggacgggcaaaaattcagtgtgaagcggcccatgataaaagcgcgggcttcaaaaaaatattttggtctgggcaagggggtggtggcctatactctgctgtgtaatcacattccgctgaacggttatctcattgatgcccacgagtatgaaggtcatcacgtttttgatatctggtaccggaataccagcgacattgtgcccacagtcattaccggcgatatgcacagtattaaccgggccaattttgccattcttcactggtttggcctgcgtttcgagccgcgctttagctcaccgggggacatgctgaaagcgctgtactgtgcggatgatccggggcgttataaaaattgtctgatccaaccggtgggacaaataaatcagcaggtcattctcgacgagaaaccgcatctggatcaaatcgttgccacactggggctgaaggaaattacccagggggcattgatccgtaaactgtgtacatacacgacagaaaatccgacacggaaggcattgttcgagtttgataagctgatccgcagtctttacatcctccggtatcttcgtgatccgcaggtggccagaaacagccatcggtcacaaaaccgcattgaatcatggcatcagcttcgctcgacgatcgcgcaggtggggggccaaaaggaactgactggtcagaacgatcttgagctggaaatcagcaatcagtgcgggcggttactcagtagtgtgatcatttattacaattccgccctgctgtcgcggttgcagcagaaatatgaagccgatggtaatacccgtggtctggagagcctcaggcggctctctcccgtggcgtggcaacatatttttctgaacggacattacactttcgtcagcgaaggaggagaactggatctggatgccatgattgaggggctgaccctaccataa

SEQ ID NO: 401446 - DNA, 879 bp, Salmonella enterica
atgtcacgtgaagttactgtttcagcatgtcagtacattgtcagcgaaattcagagttttgatgattttgtacttaaggttcgcagactccttgataaaggaaccggatctgacctgattgtttttccagagctcttcacaattgagttatttacattatcagaagactggcgtaacaagccagtatcagatcttattattattgataaattcacctcagattataaagagctttttgaacaggaagcgaagaagagaggactgtttattgcaggtggttctcatcttgaaaaaataaaagatggtctttatcaaaatgttgcgcatatatttggcccaagtggagaatattattctcacgcaaaaacacatatatttcctgcagaaggagagtggttcacgcaggaaggtaatgaaatgaaggtaattcaacttcctttttgtaatgtaggattcaacatttgttatgaaacagaaatacctgaatgtgcttcctcactcgctgagcagggggttgaattaatattgactccttcagctacatttacagagcagggattctggcgtgtcagacattgtggacagtcacggtgtattgaaaaccaggtttatcttgtccattgctgtcttggtggtaatccaggtaaacctttgcctgatggctgggcacaaagttctgttctgggaccatgtgatctcccatggagtaatccggcaggaattattgctgaggcaccagctaatgaggagttcgttattactggaaaacttaaccttgatttattgtatgaaaatcgtcaacacggagctgcaaccacattcaatgatcgtcgtcgtaaacagaaattatatagttcctggccatcacacgttaaataa

SEQ ID NO: 401447 - DNA, 924 bp, Salmonella enterica
atgggatatttaaacttacctgaaggtaaaaaaattgcagttaatctgggggttgattttgatgctcagtctctctggcttggtggtttcaaccgtccttcaccatcatttatgtcaagaggagaatttggtgcagaagttggtgttccccgtctccttaagttgttcagacaacatgatattaaaaccacgttttttacaccgggacatactgttgacacttttcctgaaatcagtaaaaagatttttgatgaggggcatgaaatagcccatcatggatattatcatgaaaatccgactcttattgacagggatacagaacgtcgtttgatggatctcgcgttcaactgttataaaaaacattttggtattcgcccctccggataccgttctccttactgggattacagtgaaaacacactggatctgcttgaagaatcaggatttatttacgacagcagtcttatggccagagaccttgaaccctatcgtcctcagcgctggcaggtaaactgggaaaaaggtaatgtcgcgggtcctgccagtaaagtgctcgaaattcctgtcagctggtatcttgatgattttcctgctctggcctatacaggtaatcaggaggggatgacggataccgacagtgttctgcgacgctggaaagatatctttacttatgcctggacccatcaggaaaatggtctttatgccatggcattacatcctcagattattggacattcacaccatatgatgatgctggagcgtctgattgagcatataaaagggcacgacggagtctggtttgcgacatgtgatgaaattgcccggacctgggttgatgatgaagatgattaccggaagatgcagttacctgatgtgagaggaacttcgccgatgccatctgactatggctggccagttaaataa

SEQ ID NO: 401448 - DNA, 1743 bp, Salmonella enterica
atgacagagaaaaattgtgaagatacaaaccggagacaatggtcctgtctgtattctgaacatggtaaaatggaagttcttacagacagggccggagtagtgtttatccgtggctttccgtatatcgtcgcctattcacgggggctcctgcattcttcactaaccagacttgtatttcatataccggggccatcgggaagatggtaccaggtaactttgttaaaggatgatgaaacatccgcagaacagtttgtgattattaaaatgaggcttataaagtccccctttaatcttacatttcgcgaactggatatacttacactcattgcagccggattttctaatgaggctattgcctcacatctgcatatcagttttcgtactgcggaaaaacacactgaacgattattgcaaaaaacgggtttcagaaacagatccggactggccggttatgccgttgacaggggatatcttcgtttacccaccccaggtggagtgaataacagtcagttatcaacaagtattatagaaaaaattacgctgaaactgtctgacaaaaaagaacaggttgtatctgtcagaaaaaaaaagaatccattaataataggtattcccgttattgaaagtggaagaggattttctgatacactggaactgattcagggaacggaactggccgttgcagaaattaacaaacagggtggaatacgtggacgaaaaataaaaattctgacagaagtatataatactgacagtgaaaaagaaaaaattgccgcttatagtagcatgataaataacgaggtagatgcaatcatttccggctatgcctgttattctccggttgcctgggatatggtgggagaatcaggtatcccctgtttacatgtggccacgctcaacagtgcagtggaacgtgtacgatctgtttataataatctgtttcaatcatgtgccacagacattcattattccataggtctgaaacgcttcatccgctcccttcctgagaaatttttatttatcacagccggtcaacgtctggcaataataaaacccttcggggctgaactcgatataggtatccattatatagagaagcatcttgaagctgaaggctggagcacctttattgtacctgtatactctgatacgttttcgggctggtatcaggctctggaggagctacatcatatacagccatcggttattgtgcttgcttcattttttgctgaggacgcgattgcttttcagaaattattcatgaaaaatccaataccctgtatcgtttactgtatttacagtccttcagtgcctttgtatcttcaggaactgggtaatcagtgtgaaggagtggtatgggcaacaacctgtgggatttcaggagatttctttggcagacgattcagacataattacctgaattattttaataaaactccagggaattctcaggccagcctggcttacgacagagtaaatatactggcagcatcgtggtccagatgtgtttatcccggtattctaagcaatgttgtatctgatttacgtcattcaattataagaggagtaaatggtgtatatttttttgggaaaagacaacaatgcctgacttgtccggataacacacaggacttatctatcagtcagatacatcttacatatcagattcagcataaccgtaatgtgattattgaacctgacttctgttctgaaagtcatttttctttaccttcctggttttga

SEQ ID NO: 401449 - DNA, 282 bp, Salmonella enterica
atgatatccggcctggggctggcgatggtggctcaactggtaccacaacgactgatggggttcatcatggggagctggttcctgactactgcaggagcggcaattatcggggggaagattgccggtctgatggcggtatcgaaaaacgagacagatccgcttgtgtctctggaaatttatagccgggtatttatgcagataggaatagcaacgttcataattgcgattgtagtgattctgattgcaccaaagctgaacagtatggttcaggaggatgtatga

SEQ ID NO: 401450 - DNA, 1170 bp, Salmonella enterica
atgaaaaaaattcttttcttatccatagggatgttcgctttaggtctggatgcctatgtcatcgccggtatactgccggcaatcggcctcacttatggcaccagtgaagctcagaatgcccagaccgtcacggcgtttacgctttgttatgctattgccgccccgctgttttctgcccttctggccggaaagtccgtgcgaaaaattcttagcgtcgcattagtgatttttgccgcggcgaatatcggcagcgcattaagtcccgacttgcatactttattattcttccgggcgattgccggaactggggcggggcttttctcaccggttgctgcagctgcagcagctgccctggttagtccggaacgtaagggccgcgcgctgagtatgattctgggtggtatgagtaccggaacggtaattggtgtacctttggggctactcctctcctcccactttggatggcaaagcacgttgtggctggtaaccattattggtgtcgttgggctgactggtgtggtggcgggctttcctgatatcaccgtttcaacaccgccttcattatcggctcgctttaagatgttaggcaatcgtcaggtagcagcaacagttggtgtcacctttctgacggcactggccagtcttggcctttatactttcattgcgcccgtacttaaggaggtatcggatgtgaatgctattacgccttacttatgggcgtggggtattggaggaatgatagcaagcttcagtgtgggtcatgtgattgactggtgtaaaaaacctgccattttgctggtctttattttgctgattatgaccctgtcgctgttgagcataccgattacttctcagtatgggccggaattcgcctttttttctttcatcctctggggagctacaggctggtcatcgcttgctcctcaacagcacagtttgctcagaatgcagcctgagcatggagccgctgtggtagcgctgaacagctccagcaattatttaggtggtgcggtagggactatctgcggtggattactgatttcttacggcattcacgccagcagcctgccttatttcgctggcgcagtggcagcactggccctggtgagtcatctggggattctggtatcacgacgaaccgggactcacaatacctctttcaataactaa

SEQ ID NO: 401451 - DNA, 1080 bp, Salmonella enterica
atgtttaatgttcttattattggtccgggttatgcagggaaaaggtatatcagtgcttttaagtccctggaaggtgaattcatgacaactgaatttaactatgcttatgtcgcactaagtaagaaagatctgccgtttacttattactccgatatagatgaagcgctgaagcagcaccacccggatgttattgttgtgaccgtctcagatggaaagcatgctgaagtcctgttccaactggagggctatagcggttttattctctgtgagaaacctctggtgaattctgcagacgatcttcatcgcatccagcaggcgctaggcagtacacatgggttctgtatggatatggttgaacggtattctgaagccactgattatttaaaaaattatattcgtgataacaacctcactctgctgcgggcaaacttcatttggggaaaagacaggatacatgaccacagacctacctgtggcgtacccagtgaaattattcactctcttgatctggtggaatgggtggcgggcagcaataagcatctggagcttgatgccgctattgggacagaatcaaacttttccatatcaggcgataacatccttgatagcgtgtcggttactgcccggcttggggaagcccttatcactggctatagcagttttaccaatatcattcgtcaacgtacgctcgattttatcttttcatcgccagaaaaagagctggtgtatgcccggctgacgtttgatacacctgaatgggataatgaccatctcaggctatggaagcacacaaagcagggtgacgaattgattcaggtatttagcacctctttcgatgagtctgaacaggcgttaaaaactattcagaagctcaggaagcaggtgcgggaggtcattcattatattctgaataacttgccacctgaacacgtttttgccgatcttgatacttcgttgagattacagagtctgcttaacacgattgagcataaagcacgccgacttggcccggcaaactatgttcttaaaaataaaagggaattgttcactgaagatggcagccctgagcaattaggctag

SEQ ID NO: 401452 - DNA, 513 bp, Salmonella enterica
atgaaagctttttcaactaaaggacccttcagcacaaaatgtgtgatagccggaactgcggatattgaagggttaattcgtcttcggaaactgctcctcagcgacggcgacgcccactattctgcgacttcacccgaagaagacttagcgtggcaactgcactaccaaaattggcttattcagaagcttaatgaacccacaggtaatgtaagggttgtggttgtgcatgacgaagcgggcaacatcattgcctgcgctacgggcattctggatgaacgtgcgcccatgcctggcattttgaacggcgtgcagggatgggttcagtctgtagtagtggcgccagaatggcgaggtaacggcctcgccagccttctccttactgctctatttttatggtttagctccagggaggcaggaaaggtagtgctgcaaacaacgccggcaggtgatgcgctgtacagaaaacttgggtttaaaaattcaggtgaagaccttcttatcaaaacactgtga

SEQ ID NO: 401453 - DNA, 1242 bp, Salmonella enterica
atgaaatataatacatttattgaagaaaagatttctactcttaaggatagcggacagtatcgcacctttcaaactatcaacagaattaatggttcgtatccggaagcctatactggcgatgataacaagaagaaagtggtagtctggtgcagtaatgactatttaaatatgtcgcaaaatccccaggttatagagtccatgcataaggcaattgaacagtatggcgcaggttcgggggggtccagaaacattggcggtacgcactcctattttgaaaaactggaaaacgctattgctgactggcatggtaaagaagcagctctggtatttcctactggctacagctcaaatgatgccaccattcagtgcttgctcaaactcttcgatgactgcatcgtcttttctgatgcttcgaatcatgcctcaataatcaatggtattcgcagcactgttattgagcgaaaagtattccgtcacaatgatgttaaagatctggaaaggctgctttcagagcagcctgttgaccgccctaaaatcgttattttcgaatccgtttactcaatggatggtgacatcgcgccagttaaagaaattgtcgcgcttgcaaaaaaatataacgcgctgacttatattgatgaagttcatgccataggcatgtatggtcccaatggggcgggtattgctgccggttttggtgtcgccgaccagatagatattatccagggaacaatggcaaaagctatcggcgttatcggtggctatattactgcaagcgcactaattatcgacgctatccgctcttttgcctccgggtttatatttacaacttcattgccgccggcaatcaccgccgcctgctatacgagcattctgcacctgaagatctcgaacgtagagcgagatgagctgcataagaaaacagcgctgctcagaaaactccttctggaaaaaaacatccctgtcatgccgatcagtaccactcacattctgcctgtactgataggaaatgcagataaatgtaaaaaatcggcgcgttaccttcttgagaagaaagacatttatcttcagcctataaacttccctagtgtacctattggcacagaaagatttcgggtaaacgtgacaccaggccattctgaagcacaaatctacgctttggcagatgctctggaagaggtgttccgcataatggacgtgccttttattcagaatacacctaagcagtcagagactatcgtatga

SEQ ID NO: 401454 - DNA, 1503 bp, Salmonella enterica
atggaaactcaggttgttgaaaacaaatcatcgcataccatgatcctgctctgcattctgattgccgtgttcgtggttccgacgtctatatccggaacggcgattgccctcccggctataagtgccgatctccactcacaaaccgcatcgcagcagtgggtggtcaatgcttttaacctgaccttcgccagctttaccctggcctggggaagtcttgcggacgtgtttggcagtaagcgctcgtttattgctggtgccgggctctatttccttgcctccgtgatttcgtggagcgccgggaatatctatgttctggacgcggcgcgtgcgctggcgggcatcggcggtgcagcgattttctcctgcggcagcgctatcctcattcagaccttcagcggcacccggcgcactcgtgcgtttgcgctgtttggcaccacagctgggctgggtataacctttggtcccaccatctccggatggctgctgaatgtggcaggatggcgctacatctttgtcgtccacgctattgcgctgttcgtagttctgagcctggccgtcaccattccggcggcggtgaagaagacagagaagccgtcgctcgatatcgccgggatcctgttctttatcgtctcattgtttctgctgatgactggcatcacccagggcgctgaacttggctggaacgataacatcaccctgagtctgctgggctccgggctgatactgttgctgtttttcgtggcgatagagaagcgttcgccgaatccgatggtcaattttgcgctgctcggtaaccactatttcctgtcaatgatccttatcccggtggtggcaagcttctgtttcgtgacgctgctgacctggttcccgacctggctgattgccatgaaaagtctctcgccgcttgaatccgggctggtgatgctggcgctgacctcgccggtgctgatactgccggttgtcgcaggcaggatggttacgcgcggtgtttccgccagtttgttgctggtgattagcctggtgctgtttgttggcggacttttgctgctgtggattttcaaccagggcagcatgtcgatgtggcaaattctgctgagcctgcttcttgtgggggcggggatggggctgtcggcgggtctggtcgatgggatagcgctgagtgtggtgtctcctcatgaggtgggacgtgcagcggggatactcaataccttccgtctggggagtgaggctatagcggttgccatttatggttcactgatgtcgaccggtatttttcacgcactggcctcaaagccggtaccggaggggagtacagctaatcagtatctggcggatgtcgtttcagggaatgcatttacctcagcaggcgcagagcagacggactggcttgaaagtgtttatacccaggcgttcagtaacactttgctggtgatgctgattatttcattagtgatatcgctctctgttgttctgatgattcgttgtaagaaggtgaatatataa

SEQ ID NO: 401455 - DNA, 1218 bp, Salmonella enterica
gtgaatcccactgctttttcgtggccgtcggtggccactattccccattatgactgcataccgggctatgaagttctggagccggcaggttaccatcgggccggcaaaatcaggctgctgagcggacatgaggcctggcatgtgatcaactatcacgatgtcaaaaaagtgctgaccagcaatacctgcctgcggggaccgtcgaacgagccggacgggcccagcgttttgccgacgctgacgccgaaagatttactgctgaacctggacttcccgcaccatgcccgcatgaagcgcttcgtggcgaaagattacagcgcgagcggcctggcgtggcttgcgcctcatatggtggacgtcattgaaacgctgatgcagggcgcgcgcactggcaatgagtttgatctgtatcaggatgtactcgacccgctggcggtgcagattaactgcctgctgctcggcattcctctgatggagaaagaatacttccgcgtactcagtgtgacggtgcaaaaagccagcccgcggcaggtggaagatctcatagagaagtttaccgcgctctatcagtacctgtctgagcacgtaaccggtgtacggcagcacgcggaagatggcctgattgcccgttttgttgcgatgcgtgaaaacgccacaccgccgcttaccgatgaagaaattaccgctattctgctcggctcgctgctgggcggtgaccagaataccctgacggtaatgaccaaaattttctacgcgctgctgtacactgaaacgttgtggcagcaggtcgtcgaatttccggaaaccacggaacaggtggcgaatgaactgattcgtctgactaacctgggtactgcctcggcgtttccacgtatctgcagcgaagcgattgagctttcctgtatcaccgtcccggccggggcaacgatttttccggacgtttatctcgctaatcgcgatccgtcagtatacgccgatcccttaacgattaatccattccgtaatggtccgcgtcatctgcagtttggctatggtatgcatcactgcatggggcaggaactggcaaaactggagatctgtacggcaataaaaacaatagccagactcgcccctgatttacggttatcagacaaaatatcaccggaaaactttatctggaatgaaggaattattctcaggagacctgcacggctcccggttttctctacccgtaaataa

SEQ ID NO: 401456 - DNA, 654 bp, Salmonella enterica
atgaaaataatatggtttgattttggaggcgtactttcgccatctgtacctgatctgttcacttcctattatctgaaaaccggtattcctcctgccgttttacaacgggcaatgaaagaagttgcggatgatatgaatatggacgtgctggctcccgttgagaaagcaattattaccgagcgggagtggggggcggggattcgcctgaagctcagccagtcagccccggaactggatctctcgcaggccaggcttgagcagtttggcgaacagtggttcgacggcattctgcccaaccagttaatgattgatctgttccgcaaagtcaaagccaccgggctgaaagtgggtattctcaccaacaacgtagtggagtgggagaatcactggaagcgggtggctgtcatcagcgaagaggctgacgtcatcgttgattcctgcaaagtggggtgccgtaaaccggagacggagatcttcgccatcgctgctgagcgggcgggggtgcgcccggaagaaaacctgttgattgatgatgttccggagaactgcatagcggccaggcagtgcggctgggagagcgtacacttcaaggacaacaccagcgcggtgacggaagtcatcgccgtactgcaacgacaggagattttcctgtga

SEQ ID NO: 401457 - DNA, 990 bp, Salmonella enterica
atgtcttttatcgaagatgatgaatcagaacttataaccggggctgattcatttaattatcagtgcaccatacctaaatcatatgttcaccgtgctgttatcggggaggtgtttttaacagatatcagaaaaattcatgataataaatacatcacggcaggttatttgcctaagtctcatatttattttaacgatctcccttacaaaaaaccggctgaccggagatatgacgccattttattgttagaaatgtgccgacagacgtcgatttatgtcacgcacaatttcttttccgttccatacagcgctaaatttgtttttgatgatgcagactttatattatttgaaagcgatataccctacaaacccggatgttccaacgctatagttgaagttaatattatcgaacgtaagttcagaaaatcggcgttaaccgggcttattttccgcatggatgtctacgttgacggcaggtactgtgcgcagaaaatcatgaatatttcatggatggatgaaagaaaatggcaccgccttcgccaccagaggtcagtggaatgtcacgacaccaccactattcaggcggcttcaacacatgaagtcggtcgtcagttaccgctgaatgtggttattggtagtgctggtataaatgagcgtgaggttatcacctccctgattgtcgatcaaaaccacccttcaatttttgatcatccgctggatcatgtccctggtatgctactgattgaagcctgccggcagactgcattactggtcatgcataaccatctggggaaacagagttttgatcttgttattaaccgttacagtattcagttcaggcaattttgtgaattctgtctgcctgtttattgtcatgttcgtctggaagatatttatcttcctgaaggaaataaaaatactgtcattccggtaaagatatctcaggacgagaaaatagtatcttctgctgaactcactattaatgttaagtaa

SEQ ID NO: 401458 - DNA, 333 bp, Salmonella enterica
atggaaaaaaatacgacagaagacttatatcattttgatattattaaggttttcaaagcactttccgatccagtcagactcactattgtgcgggcattgctggcagataaagagggagcagaacgacattgttcaacttttggactcacagtgacgcgtgcgacacgttcacatcacttcagggtattacgtgaagcaggtcttatccgggtagtggacaaaggtaatatggccgtcgccattttatgccgggaatcgattgaaaaggaactgcctggtctgacggaactcattaattatacagacacaaggggtgagcagggaagcaagtaa

SEQ ID NO: 401459 - DNA, 336 bp, Salmonella enterica
atggtctttccgggatgtcgctgtaccggtatctgccaccaggagggactgacaatgagcgaactgaccggccttcacctgcaaatcaatgaactcgatgaatacgaacagtatttactgagtgctcttctcaaaaaagctgccgctgacgccggcaaaaaacttaacatcagtgaacgccgggccgtcgcggcggagttttttgtttcccgtcaggatgaccgtaaaaacagggccagtaaccagcgtcgtgcgctcatgacccgcaaaatgcgcgagatccgcgcccaggaaaagagcgattttcactggaaacctgcgcggccacgacgctga

SEQ ID NO: 401460 - DNA, 471 bp, Salmonella enterica
gtgacagaacctccggcgcttaaaaaacagctcccgccttccggactgaacaagaaacagcgtaagtatctgcgccataaacagattcgccgcgatattctccgcaacagtcggcagaagcttccccttttttgccagatctttccgctcctgtggcctgaagaccacgttttccggctcatgaagattgggatttcccgcgacgctgaagtttttgttaacgctaatcctgactgcggtctttcccctcacgactgcagatgcgttttctcctgggttgccagcagacttccctgtctccgtctcttctcccccggcgccgttcgttacgacctcaacggactgcccgccggtactgtctctgacagggatgtgctcagcgccagactcaaaaatgaaaatattcttcgttttcaggcccgaaaaactgctgaagcgcagactgatgaaaagaatgaaaaaacgggctga

SEQ ID NO: 401461 - DNA, 906 bp, Salmonella enterica
atgcaactgagtgactatattgacagcgtgtacggtgcttcccggggaaaccgggcgcgtttcctcaaagacaatcccgacattctgccccaggagctcagtcgctggctgaaggccggactgaaaatcaggcctgaaaccggcgaaatatacaaacccgtctcccgccgggtccgcgttccggatgtggccgctgctgaagccggggtgttcctctctgacaatctgcgcgggcgcctcacaacgctggctgccgcgcagaacgtcacacctgacgccatgctcggtgccctggtggagcgtgaggagctgcgtcgccagttggctccggttccggccggtgaagatgccgttccggagcagctaattgccggggttgtcagccgccactttgcctccctgtcagaacgcagtgaaacggaagcgtggcatctggtactgagcgcgctggtcagcgagctggttgaggctgacctgctgtcctttcataccggcaacgtgaccgaaagccgccgcctgaacatcccccgcactgcgtattactggtacggcggctttgtcgcaaaacgcgtggccatgatgctcggctgctttgatgtatacctgtggaatgaaatgatacgcccggagagcgacgtcgtttttgtgggcgatgcgcgcaacgtcgtggcctgttacttcatctgccagcagatgtgtcgtctgctgaaagccgtgaggcttaactggcgtaagcagcagggcgcatgggggagccgggcggagctcgatgaagcggctcaccgctacacgcagcgcctggctgaggggattatggagaacggtatctttatcggcggcgatgaacagaacttttaccgcctccaccgttatgccgaaaaaaagtatgcatgggccatgcgctga

SEQ ID NO: 401462 - DNA, 915 bp, Salmonella enterica
atgggtattaaaacaggcggtaaactgactattaatacatttggtggtcttggagtgggtggtgagtttgataatgatgcttatcgccgggccagttcagctaagtggattccgtatgatgaatatattgctatcgaatgtattattgcgccggggtcgatgtatcagttgctgaccgatattggtcaggtttcaaatgtttatgcacaattccgttttgttaatccagcctatcttcagggagggctacgtgtggttcgagaagacggaagttgcattgattttcgtagtggtggtaaagctggagtggataatttactggccacatccaaagatatagtggatgctgattttattcatcagaatgaagattatagcgcgacgccttactatcctaaaggagctaatgaatcatcaggtgtaactattgcctggggggttgatttaggaggacgaacagtcgattctatgttaagagacggcgtaccaaaaaatattgtggataaattatcaccatatgtgggtccaagaggtgaaactgcaaaggatattctaaataaaaatgaggatcatcttcctgcactaactccggatgagggggcattaatttctgatatttatatgaaaaagacaattgatgaagtagccacagcgtataaccaggatagtaaaagtttaacttttagtcagataccatataacaccagaacggcaattatcgatttggcctataattatggaactaacctgcgtaaggtaacgcccgtattctggaatgatattgtttctcataactggcaaaaagcctatgatgagtttatggattttaaagataataacccagggcgtagaaaaaaagagggtgggttagtacacattgatattatcaataatctatatctgactattatctag

SEQ ID NO: 401463 - DNA, 471 bp, Salmonella enterica
atgtctgaaataaaagtgaaactgctcgctctctgtattctgtgcacgcctctggcctgctccgctcaggatttcagccccgaatttgtcaggcatgtctttttaaatctggatataacctcttttcccaattctatgggaccaaagcactttcccggtggtacaacaatgaaagaaacatttaaatattttggcaatccagacatgagcagtgataaaaaaacagtaaaaattttttttcctgataactcatatgaacctgactataaaaaatcaggatgggaatatactttaaaaatactttcttttgataaaaacaaaaaaataacagcatgctatacggatatctgtcatggtttgtgtacatatgcagtaactcaacctgtaacgatattagaaagaaatggggaatatattgtaactcatctatatgataaaaccattaaaggatgtgaatattacattcattga

SEQ ID NO: 401464 - DNA, 258 bp, Salmonella enterica
atgtcgcggacagaaaatgtagtaacttcctcaaccggtacaaaacgagcatacagaaaaggtaatcctctaagcgaagctgagcgtcagagatcggcttcagcgcgtaagagatctgtatataaggagataaaagttttcatcagacctgagctgaaaggttaccttaccagtatatgtgcggcagaaggggttacgcaggctgagctaatcgaaaggcttattgagaaagaagcctgtcacaggaatatccggtga

SEQ ID NO: 401465 - DNA, 285 bp, Salmonella enterica
atgagtgagagcgtcaggcaggctgagcacgctgaaatacttcacctgtcgcgtccgtttactcacggggtcgcggacatagcgtccttccagcctgcagagggtgccgtcagtccggcgcatgatggcgtggacgagcaaccgggtggtatggatatgcagattaaagtacccggcaatgtcgacggcggtcacgggcctttttttcctgtaaacccacagcgcaatctggtcttccagctgttttttttctttcggggtcagtggtccggtactgatggctga

SEQ ID NO: 401466 - DNA, 360 bp, Salmonella enterica
atgacagaccagaaacgaccggtgctgacgctgaaacgtaagactgagggcgaaacgtcggtccgcagcaggaaaaccattattaacgtcaccacgccgctggcgtggaaggtgaagaagcagaaactgtcggagaaagcagtccgggacgctgaactggcagccaggaaagcgcaggccggaaaggcgctggcggtttacctgaagcagacgtcgctgaatgacgccgtcagcaccctgaagccctggtggccggggctgtttgacggcgacacccccgtcttttcgcctgtggcgtgcgggaggcgctgtttgaggatgccgccaggcgcggtatcccgttgtcacataaaaagataa

SEQ ID NO: 401467 - DNA, 312 bp, Salmonella enterica
atgggaatatttgatcgaaaactggatatcagcattactgctcacaaccagattttcacttccattccaccgcaaatgaagattataaaaacttttggtctggtaaaagccaccacagcagaaatttctgctaaatatcataacgaagatgatgagctactttctgcgttattatctgaagccaccagaatgggagctaatgcaataataaattttcgatatacatcaggctcataccagagaaatggagcagcgtttgtaacaagttacctgatagctactggtgatgctgtactgttagagggcatataa

SEQ ID NO: 401468 - DNA, 504 bp, Salmonella enterica
atgattacacaacaaacagtaagacaggaattagaaaccttaaaaagatacatagactcaggtggtgtcagaattccatctttgtggagtagtatgaggatgggagtcagtatcgtagcttggatgatcttttgccctgtaatcatgtcattctttattacgcagaagacaagtgaaacactgatgtctgttctgtttggtggttggattggttttattattatgcttgttgtagcaaaaatgcgtatgttatatctatcactacctgaaaattttgtaaaagaatcattgcttgcaaagactttttcttcaaaagtaaaactatattatataacctatatgattcttatctttttgttttcaatagcaggcggtattgtttactgttttggtagtattttactgacagttattatgacttttttattttcattggatattggtagatataaggtggcaggggttgttgaaataattaatagttatattaagagcaggcagtag

SEQ ID NO: 401469 - DNA, 2853 bp, Salmonella enterica
gtgaacgaagtctatgtcattgccggcggagaatggctgcgtaataacctgaacgccattgcggccttcatgagtagccggacgtgggattcgatcgagaaaatcgccctgacactgtcggttctggtggtggcgattgtctgggttcagcgacataacgtgatggacctgctgggctgggtggcggtgttcgtccttatctctcttctggtcactgtccggacatcggtgcagatcattgataacagcgacctggtgaaggttcaccgggtggataatgtgccggtcgggctggccctccctctttcgctgacgacccggatcgggcatgcgatggtggccggctatgaaatgatttttgcccagcctgacagcgtcacctacagtaaaaccggcatgctgttcggggctaatctggtaacgaaaagtaccgattttctgtcccgcaatccggaaatcaccagcctgttccaggattacgttcagaactgcgtgatgggggacatttacctgaatcacaagtactcgctggaagaactgatgaattctgcagacccctatacgctgattttctcgaagccaagcccgttgcggcatgtaccaaacaacaattataattttctggataaaccgttgcagaaagaactgtttatcacctgtctgcaggcgtcaactgagctgaagcagcgtctggccgtggattcggctcaggggggaaaaacctggagctattatgtccggcagttatttggcggcaggcctgatcctaatctgctgttcagccagatgctcggggacagctacagctatttctacggctccagccagtcggccagccagattatccgccagaacgtgaccatcaatgccctcagagaaggcataaccagttacgcagcccggagcggcgatacggccagcctgatgaatctggccaccacatcctcaatggaaaaacagcgtctggcgcatgcgtcaatcgggcaggtggcattacgttccctgccgatgatgcagaccattctgacggggattgctatcgggattttcccgctgctggttctggccgcagtatttaataaactgacgctgtccgtactgaaaggatatgtgtttgccctgatgtggctgcagagctggccattgctgtatgccattctgaacagcgccatgacctgttatgccagacagaacggtgcgccggtggtgctgtcggaaatgtcacagatacagctgagatactccgatctggccacgactgccgggtatatctcgatgatgatcccgccgttgtcgtgggcgatggtgaaaggcctcggggcagggttttcaggcgtgtacagccattttgcctcatcggctatcagtccgacggccggtgcggctgccggtgtggtggacggcaattactcctacgggaatatgcagacggaaaacgttaacggcttcagctggagcaccaacagtaccacctcttttggtcagatgacctaccagacgggcagtggtgcgaccgccacgcagacccgggacggtaatatggtcatggatgccagcggtgcgcagtccagactgccggtgaatatcaacgcgacaaggcagatagcggcggcacagcaggaaatggcgcgggaagccagtacgaaggcagaaagcgccctgcatggcttcagcagcggtatcgccagcgcctggaatacgctcagtcagtttggctctaaccggggcagcagcgattccgtaaccggtggtgcggacagtaccatgagtgcgcaggactctatgatggccagccggatgcgcagtgcggtggaaagctatgcgaaagcgcataatatcagcaacgaacaggccacaagagaactggcgtcaagaagcacgaagacttctgctgggatctatggtgatgcacatgctggtgtggaggcaaaacctaaaattttggggtttggtgttgatgttggcgttaaaggtgggggacgggctagtgtggactggaacgatgatgatgctcatgaggccagtagtggttcacgggccagccaagatgcccgccatgatcttgatgcaaaagccacacaggacttcaaggaagccagtgactactttaccagccgtaaggtcagtgagtccgggagccatacggacaataatgccgactcccgggtggatcagttgtctgcctctctgaactccgcgaagcagagttatgaccagtacaccacgaatctctcccgcagtcatgaatatgctgagatggcgtcccggactgaaagtatgagtgggcagatgagtgaggatttatcacagcagtttgtgaattatgtgcaaaaacatgcgccgcaggatgcagaagccatactgacaaataccagttctccggaaattgcggaacgacgtcgcgctatggcctggtcatttgttcaggaacaggtccagccaggtgtggatagtgcctggggagaagcccgtggtgatattggtagaggtatggggacaatatctgctggaggtaaccagcagaatgtaatagctgatcaccaggcccatgagggacttattgaacaaagaactcaggacaataatatccgcaatgatgttaaacatcaagttgataatatggtcacagcataccgttcagatatcagcaatactcagactaaaatcaaaggtgaagaggatacagtaaatcaacagtattccagtttgaaaaataatcataaagaagaagaaattaatcaaaataataaatataataaagaaaaagcatcacaggagcagttacctggagcggatagtccagatgaacttttagaaaaagcaaaaaagtatcaaaatgaaggaaaatcttaa

SEQ ID NO: 401470 - DNA, 210 bp, Salmonella enterica
atgaagaatatgatggtttttctgctccggctgacggtgacggttatcgtggcatccccggtggtgtactggtcgtgggatgctgtaagggcaacaactgcggaagacagcctgctcgcggggcttatcatcgccgcgaatgtcgtgatgttaatgccgctgtactgtttcgtgctcatcctgacgaaacgccggcaatatgatgaataa

SEQ ID NO: 401471 - DNA, 633 bp, Salmonella enterica
atgaagcagaacatgaattttctggtcgcgctgattatgacactgagcgggagtgtatgggcatcagatgccgtgaatactgccgaaaaccgccagttcctgaagcagcaggaaacgctgagtcagcagttacgcgacagacccgacacacagcttaaaacatgggctgaacagcagattcagggtaatcccctgcaacagtcagaccgccactacctggatgacctggtccgtaaacaacagtctttacagacagaaaaacctgcgtcgggcgccgtgtattttgtctcgttttccattccggaagagggcctgaagcgcatgctgggtgaaacccgccgctacggtattccggccacgctgcggggcatgctgaataacgacctgaaagccacggcggatgccgtgctgtctctggtgaaagacggggcaacggacggggtgcagatagatccgacgctgttttcagaataccacgttcgcagtgtgccggccctggtggtcttctgcgatcggggttatgacattattcgtggaaacctgcgggtaaaacaggcgctggagaaagtggcgacagccggggactgcagacaggtagcgacaggattactggccagtaccggaaaacgatga

SEQ ID NO: 401472 - DNA, 222 bp, Salmonella enterica
atgagtgatgaagcggatgacgcatacacagtaacagaacaactgaccatgacgggaataaaccggatacggcagaaaataagctgtgcaggtgctccggtatatatctgcagatcctgtggaaattccattccggaagcccgccaaaaaatatttcccggcgtgacgttgtgcgtcggttgccagtcctttcaggaaaaacagggaaagcattatgcataa

SEQ ID NO: 401473 - DNA, 165 bp, Salmonella enterica
atgaacatgcgtaatgttatttcagtccctgacaaacctgtaccggaggaacgccgcaaatataatttttcagttgccggaattcccggcgcagggaaaacgttattcctgtctgaattaatcagcagtctgctgcgtgataataataaagaggtgaaatcatga

SEQ ID NO: 401474 - DNA, 375 bp, Salmonella enterica
atggatgctatgttaagtattcaggggattgctgtacctgctaaaaagacgtcttttctttctaagttcacccgccagaatctgttgatggctttactgaaggttgtgcggacggctattcctgcagtggtaatgatggtgttctttccacaactggctatggctgcaggcggttcacaggatctgatggcgagtggtaacggtacggttaaggcgaccttcggtaaggattccagtgccgtcaagtgggttatcctggcggaagtgctggttggtgccgtgatgtacatgatgaccaagaacgtcaaattcctggccggttttgccatcatctcggtctttattgccgttggtatggcggttgtcggcctctga

SEQ ID NO: 401475 - DNA, 570 bp, Salmonella enterica
atgtcattacgcggaattaacaaagtcattctgattggcaatttaggacaggaccctgaacttcgttacatgcccaacgggggcgcggtggctaatctgacactggctacctcagaaacatggcgtgacaaacagacaggggaaatgcgcgaaaacaccgagtggcaccgtgttgttgtgttcggaaaactcgccgaaatcgcgggtgagtacctgcgtaaaggctcgcaggtctatatcgagggacaactgcgcacccgtagctgggacgacaacaacggcgtcacccgctacgtcactgaaattgtggtcagcatgcagggcaccatgcagatgctgggaaaccgtcaggcgcagaattccggtgactggtcacagcagcagccgcagggaagtcagtcttccggcactcagccagcaccatcacaggcggcaaaacctgccgcagcgaaaaaagggcgcggaaaggctaaaggcaacactcagaacccgccaccgtcagcaccagtcacgccgacaccggacccgtctgaaccgccttatgatttcgacgatacgatccccttttaa

SEQ ID NO: 401476 - DNA, 231 bp, Salmonella enterica
atgtcagtaactattatttcaccttccgcagaggctgtaaagccccggcgtcatacgcgtatcaggcgcgccgatattcccgcaaaagccattgacccggcgttaaaagcattcggacggtatatcgcccgcagtgtccgtaaggggcgcggggtgcatatccccgcgatgacaaatgatgtattaggccaggtgctccgcactcttgagctgaaacgcgcatttaactga

SEQ ID NO: 401477 - DNA, 186 bp, Salmonella enterica
atgcagactcaggcgatgcggacgtatcagatcacctttatcggacgcgatgcaaacggtgttttaccgatgtttacccgcgtacaggccatgaccggaaaaggcgcgaagaggcgtttattgaacgctataaacccgtcagaggctggctttcaggcgaccccgaagacattaccgacaaagtga

SEQ ID NO: 401478 - DNA, 255 bp, Salmonella enterica
atgtccggatttaatctcgcggctacatcgaaagaagtacaggataaggtggcagtggatttgatggcatcaggtgtggcgtacaaagaacggctggctatgccggttgtcgctgaacttgtagccagagaacagcctgaacatttgagagcgtattttttggcgcggctggagcattatcggcagctcagtaagcaactgccggacaaaaatgtcccggaatacgccagaaatgaggatgacgttaaaaaataa

SEQ ID NO: 401479 - DNA, 408 bp, Salmonella enterica
atgtatgcacctcttaaagaaatcataaccagtctcctgaagtatgacatggcgtctgatgaggcgttgctggttctgtgtattactcgtgcggatatccggtttcataccactgactggaatttatcggaggaggagattacgtgcatcatgcagcgactggatgtgacgtatcagaacggggctgatgtgagcatgatccacctcatcacagaagagatgatgaacgagcgccgcgctatacgggatgtcagcgttccggtcagtgcgctgcaaaaaataatgttactggcagacattgaaatgcagcggctgtatgccgtggcacaggaggggggcggcgatgccgacgctctggctcaggaaatggacgccatgcgccagttacagaccgcgatcgacgcctga

SEQ ID NO: 401480 - DNA, 234 bp, Salmonella enterica
atgctcaacgatttctcaccaacagggatttcacagctgaatttgtttgatgaagtgcagccgcgtgtacagagcgagcagttgatgaaagtcctggatgggataaaccattcaggactcgggaaagtatggtttgcgggacgcggtatcactcctgagtggcaaatgaaacgagaaatgctttcaccagcctatacgactcgctggtctgaattgccaatagccaaactttga

SEQ ID NO: 401481 - DNA, 972 bp, Salmonella enterica
atgagacaggttatagcccgtggccgggttctgggaaatagtagttcagagttcgccaggatgcttgaaagcgacggagatgttaaaacgtttacccttaagtcaggctcgcaagccaagtttgtcaaaacagttgtgttaagcggagaagtcgaatcaaaaacgttcgttgatgcattggttaatggacgcgatcagactatgcttacgcgcgagtccgtcagtgatatttcccggacgataaagctgcagcagttctttccggctattggacgggaggttaatgggcgaattgagatattagatgggaccagacgtcgtgctgcctgtatctttaataatgttaaattcgaaatcttggtaacaaaagatgatatctcactcgccgatgcacggcagctagcgaaagatatccagactgccagagaacatagccttcgcgagctagggaaacgactcgaaatcacctatggaaccagcatgactaaagaagagattgcgttgaaagaaaatctctctccggcgaaagttacacgtgcgtttcaggccgcagctgtgcctgatgaaatggttgcagtattcccggtgataaatgatatttcgttgtcggattatcagtttttactgaaactagctgaggaagcaaacaagaagcaagcatcggtaacagaactgatggaaaaagttctgcatcaattgaagaccatgccagattatccggtaattgataaaagcaaaatactggcggttatcagggcggagagcaaatcgcttacagcccggtcaaccagtacgattcaaactgagaagcttagagaattttcagatcgcaatcagtttgccagaaagaaaactgattcaaagaagcgtcttgttgtttatgagttttcccgcatttcggctgaggcacaatcggagattgatgaggcaataaaacgtattcttgaaaaactgccagagtcaggtgagtaa

SEQ ID NO: 401482 - DNA, 1395 bp, Salmonella enterica
atgtctctaacaatgaacctcaatcagcagcagagaaaacgattacatcaggtcacactggtggctacccttggtggcttactctttggttatgatacgggagttataaatggggcgctttcttccctgaaggaacatatggcgttgacaccaacaaccgaaggtctggttatgggagtacttctggtcggtgctgcgcttggcagcatattgggtggtaaactggctgactactttggtcgaagaaagtatctgttatggctttcctttatttttttcattggagctgttctgtcagcggcctcaccgaatatcactttactcctgattgcaaggttccttcttggctacgcagtaggtggggcatcggtaacagcaccgacctttatttccgaagtcgcgcccatggaaatgcgcggcaggctcacaggactcaacgaagttgcaatcgtcatcggtcaactggccgcttttgcgattaatgcctttatcggttacttctggggacacctgcccgatgtctggcgttatatgctaatggtgcaggcctttcccgccataggcctgtttatcgggatgtggcgttcacctgaaagtccacgctggctgattagtaaaaacagactggaagaggcgctgaccattctgaagcaattacgaccggaggaaagagctaaaaaggaatttgacgacatcgtcacgctggttactgccgaagcagaaaataagactgcgcggggggaactggcaaccatatttcataccccctggatattaaagctactcgtcgttggtattgtatgggcagccattcaacagactaccggggtcaacgtcatcatgtattatggtacggaaatactcaaaacagctggtttctctgaaaagatgtcgttgatagcaaatattcttaatggtgttttttcagttggcggcatgctgttcggcgttctgttcctggttgaccgatttaaacgcaagactattattattagtggttttgcgcttatggcgacgttgcatctgttaattgccggagcagcctattatctgaccggagatatgaaagccgtggttgtctggctgctgggtgccatgttcgttggtacgatgcagggaacactgggatttattacctgggtggtgctggcagaacttttccctctgaaactacggggcttttcgataggggtttccgtattctttatgtggattatgaacgctatcgtaagctatctgttcccactgttgcaggcgtctctgggcctgggacctgtatttctgatactcgcggtaattaattatctggccatcatatttgttgtgacctgtctgcctgaaacatcgaataaatctctggagcaattagaagaagaactttcagccgcaggataa

SEQ ID NO: 401483 - DNA, 432 bp, Salmonella enterica
atgataggtaccattacaaccgataacctgcatctgggttgtcaggcaaggaataaagctgacgtgttaactatggtgggtaacacctttaaagataaaggatatgtcagccaggactgcattgtttttctcaatgagcgtgaaaaacaagtatccacatttctgggaaatggtattaccctgccgcacttgccaaaatctgcgacaaatattatcgttaaaactggtattgaaattttccagtttccggatggcgttatctgggatcgaagtaatgttatgtttattacaatcggcgtcatcgccagagaaaaagagcatattgatgtactcagggaaatagcattgatttttagcgatgaaatcattgccaatgcactctcactaatctccggcgaagaggatttccttcgtatacttaaccagaaataa

SEQ ID NO: 401484 - DNA, 1014 bp, Salmonella enterica
atgacacttaaactgggtgtaattggtaccggcgcaataggtaaagagcatattcgccgctgtactcaggtattgcagggagctactgtggtgtctgtatcggatatcaatatggataacgcgtctgcggcagtttccttgccgggggtaaacgcgaaggtgttctccagcggtcacgatgtgatcaatgacagtaatgttgacgcggtgctggtcacttcctgggatccgacccatgaagagttcacgcttgctgcagttgcagaaggtaagccggttttttgtgaaaaacccctcgcgatgacagccgggggctgccagcgtatcgttgatgcggaaataaaagcaggtcgtcgtctggtacaggttggttttatgcgaccatatgatgaaggctaccgggcactgaagaaagtaattaccgacggcgagataggcaggccgttaatgctgcactgtgcacaccgtaatccgcaggttgaacggaactatactacagaaatggctgttaccaatacccttattcatgaacttgatgtgttgcgatggttgcttaacgacgattatcgttcagtgcaggtacgtttcccgtgctcctcttctcgtgcgcacccggggttaagggatccgcaaatcgtgatgttcgaaacccgcaagggaacgatgatcgatgtggaaatttttgttaactgtcgctatggttatgatatccagtgtgaagtggtcggggaaaaggggattgccaggttgccggagccggcttcggtgcagatgcgtaaagagtccagactttcaacatttattctgaacgactggaaggaccgttttattcaggcttatgactctgaactccaggcttttattaatgatgtcactgatggtgagctgcgggggccatcggcctgggatggttttgccgcatcagtagctgcggacgcctgtctgaaagcgcagataaccagtgaggcagtgaatatttctctgccggaacagcctgctttatatcgctgttaa

SEQ ID NO: 401485 - DNA, 1182 bp, Salmonella enterica
atgattaacggtactcaggcgacaggccggtctttacgttggggtatggtgggtggtggtggtaccagccagataggatatatccaccgttgtgcggcgcagcgggatacaaactttacactgctggccggcgcgctggatattgaccccgaacgaggtaaacgattcggtcaggaactgggaattactccggatcgctgttacccggactaccagacactgttccgtgaagaagccagccgtgccgacggtattgaagctgtttctgtcgtcacgccgaacaatacccactttgaaatctgcaaagcggcgcttgaagcaggactccatgtggtatgtgaaaagccactctgttttacatcggaagaaggtacagtcctgcttaacctgagcaggcaaaagaaccgggtggttggcgtgacctatggttattctggacatcagatgattcagcaggcacgcaggatggtagctgacggccttctgggggagatacgcatcattaacatgcaattttcgcacggttttcattcggaagctgtggagctacagaaccccagtacccgctggcgggttgacccaaaattcgccggacctagctatgtgctgggtgacctggcaacgcatccactgtttattgctgaaactattgtgccggatcttaaaattaagcgtcttatgtgttcgcgtcaaagcttcgtcaaaacccgggcaccgctggaagataatgcttttgtgctgatggaatatgacactggtgctatgggaatgatgtggacatccgcagtcaacagtggctcgatgcatggacagaaggttcgcgtcattggttctaaagccagtattgaatggtgggatgaacatcccaaccagttgcgttatgaaatacagggtgagccggtgcaggtactggatcgcggcatgccgtatctgagcccggaggcgacggaggaggaccgaattggtggggggcacccggaagggttgttcgaagcctgggctaatctgtatcgacggttcgcaatagccatgaatgctgccgatcgtgacgataacgagcttctctccactttctggtatcccgatattcgcgccggggtgatgggcgtggactggattgagcactgtgttaaatctgccgatgcgggagcccggtgggtggaattctctgcccgtcagtaa

SEQ ID NO: 401486 - DNA, 924 bp, Salmonella enterica
atgaccctgcgcattgccaacgccccctgtagctggggggttgatgatcccaaaaatccctacctgccaccgtatgataaggtgctgaacgaagcaacgcaggcgggttacagaagtattgaactggggccgtggggttacctgcctacagacagcggcgcattgactgacgcactcagtcagtatggcctgtcactggtggcagggactcttttcgatgacctggtcagtgaagacaatttcggcaagatggtgaggctgacacacaacatctgtcataacctgtcactggctcccactgcggagaaaattcacggcaacaacgctccgcctccgtatctggtcgtgattgatttcggtaatccggagcgggcgaaattcgccggacatgccggaaaatctccccggctgtcgcccgatgactggcagcgtatgatgcgacacattcgtgaaatcagcactatcgccagacaggagtatggtgtacgtgcagtgatccatccgcatgccggcggttgtatcgagtttgctgacgaaattgaacaggttgttcgggatatcaatcatgatatcgcaggcctgtgtctggataccggacatctgtattactccggcatggatcctgtcacctggctggaccgttattttgaccgcgtggactatctgcatttcaaggacgttaattcgtctgtgcatcgggatgtcctttcccgtgggctggattttttttcggcctgtgcggaaggggttatgtgtccgctggggcgaggagccattaactatccggctgtacgcactttccttgctgaacgcgcttatcagggctggatcaccatcgaacaggaacgcgatccccggaacgttgcgaccagtctgcgggacgtcactgccagtttaaattacttacactcagttggattctga

SEQ ID NO: 401487 - DNA, 885 bp, Salmonella enterica
atgaaagtagcctttgacgttgatgtaattaaagaattaccgattacggacatggtacggcaggtgtctgaatggggatataagtacattgagcagtctccccatccccgtatcaatccgttctacaaacaccccagagcaagtcgggaaatcatgaccgagtataaacgagccctgcagacatacggtgtggaaatttcgtcttttattgtggtgtatcgctggtctggaccggacgaacaacggcgtcaggcagcggtgaaaaactggaaacgaatcattgagatagcagtggatatgggagtgcaggtaatcaataccgaactttcaggtacaccagatgaaccggaaatttgcgaagagatgtggtatcgctcaatggaagagctattgccggttattgagcgcgaaggcatccgggtggagatccagtctcacccgtgggatttctgcgagcttaatgatgaaactgtcgatatggtcaaatccctgcgcagcgataatgtgaagtacctttacagtgcgccacacactttcttttacgacaaaggcaaaggagatgtggctgagatgctcaggtacgcaggggatgacctttctcatgtgttgctggcagataccatgaaccataccctgaactgccgctatattgttaatccacctggtgtcaatgcaaccattcatcagcatctgggattgggtgagggggaagtggatttcgataatcttttccattccctgcgtgaactggattttgccaacagagaattcagagtcgggggggaccccatcatcactgcttcactgttcggttatccggaaaaaatgaacgtacaggccgtggaaacacgcgaacgaattgaaagggaattattcggtcgctga

SEQ ID NO: 401488 - DNA, 1941 bp, Salmonella enterica
atgaaaacgatcaggttaactgtggcacaggcgctggtacgctttctcgataatcagtatctggaggtggatgggactgagattaaatttgtgaaagggattctcgctattttcggtcacggtaacgtcctgggactgggtcaggcgctggaggaagatcgtggtcagttgagcgtgcatcaggggcgtaacgagcagggaatggcacacattgccataggctatgccaagcagaagttacgccagcaaatttttgcctgtacctcttccgtaggacccggagcggctaatatgatcaccgccgctgccactgcgacagccaaccgtatcccgttactgttgctccccggtgatgtttactctacccgccagccggatcctgtgcttcagcagatagagcaaagccacaatctcagtatcagcaccaacgatgcctttcgggctgtcagtaaatactgggatcgtgttgcccggcctgaacaactgatgagcgcctgtatcagtgctatgcgggtactcaccgatccggctgaaacaggcgcagtgacgttatgtctgccacaggacgtgcagggcgaagcctgggattatcctgactatttttttaccagacgggtttatcgcctcgaacgccagatccccactcccggtatgctggcggatgccgggaaattactgaccggcaagcgccgtcccctaatcatctgcggtggtggagtcaaatattcacaggctgaagaggctttgctgcgatttgctgaacgtttccacctgccggtggccgaaacacaggcaggcaaaggtgctctcgcatctgatcattaccttaatgttggtggtatcggtgaaaccggttgtctggccgctaatctcctggcgcgggagtctgatttgatcattggtgtcggtacccgttacaccgatttcaccacatcgtcgaaatggatttttcagaatcctgaggcatcgtttcttaatatcaacgttaatcgcttcgattccttcaaactggatggtgtatcaatgctggctgatgctcgtgaggggctggccgcgctggaggaagaactggctcaccatggttatcaggccgtctggggggaagacgtgactaaggcccgtgccagatatcattcggaagtgaaacgggtccataacgtggaatacagcggtgagaatttcgttccggagattgatgatcatctggacaggaagcgggtttatgcggaattccttgaactgaccggttcgttgttaacccagacaaaggttctgggtgtacttaatcagtgtctgccagcgaactccgtgattgttgctgcctccggtagcctgcccggagatttacaacgtatctggcagagtcgtggtaacaatgattatcacgtggaatatggttattcctgcatgggttatgaagttaatgctgcgctgggagtaaaaatggcacagccagaacgggaggtctacgcactggttggtgatggtgcattcatgatgctgcattctgaactggttacctcgttgcaggaaggcaggaaaatcaacgtgatactgttcgataacatgaccaatggttgtatcaataatttgcagatggaacacggtatggacagtttttttactgagttccgtttccatcaggaggaaagcgaaagaccggtcggagggctgattccgctggacttcgccagaatcgctgagggatatggttgcaggggatacagggtcaccacgactgaagagttgtatcaggcactggaggatgcgcgccgtcagaccgtatccactttgatcgatataaaagttctgcccaaaaccatggtacacaaatacctgagttggtggcgtgtggggggggcacaggtttcccgcaacgaacggatccgcacggtagcccgtacactggcagaaaatattaataaagcgcgtcagtactga

SEQ ID NO: 401489 - DNA, 1920 bp, Salmonella enterica
atggacagaagacaaaaaaagcttgatgtaatttgtatcggacgcattgctgttgacctgtacggccagcaaatcggtgcacgactggaagatatgaacacctttgccaaatacctggggggctcatccggaaacgtggcctatggtaccgccattcagggactgcgctccgccatgctggcaagggtgggcgacgaacacatggggcgttttctgcgtgaagaactcattcgcgtcggagtggatacccaatatctgattactgataaagaacgcctcaccgcactggttctgctggggatcaaggatcaggacaccttcccactgatcttttatcgtgataactgtgctgacatggctttaacaccggaggatatcagggaagagtacatcgcttcttcccgtgcactggcaattaccggcacccacctgtcccaccccaacacgcgcgctgcagtactgacagctctcgaatatgcccgcaaacatggtttgcgtcgagttctggacattgattaccggccagtactgtgggggctgacctcactcggtgacggcgaaacacgctatatcacctcagataaagtgaccagggaactgaaggacgttttgcaccattttgacctgatcgtcggtacagaagaagaattccatattgcaggaggcagtacagatacgctgacagcactgcgtacggtacgcacacttacccgtgccacactggtatgtaaacgtggtgcgctggggtgctctgtgtttgacagcgatattcccgacaactggagtaacgtccggctatacactggtgtacgggtcgaagtactgaatgtactcggtgccggcgatgcctttatgtcagggctgttacgcggttatctcaatgatgaaagctgggagcagacctgtcgctacgccaacgcctgtggtgccctggttgtatcacgccacggctgtgcgcctgcaatgcctacccgccaggaactggacgactatttgttgcacgaacagtcagtaccacgtcccgatcaggatgaacgtctcaatcacctgcaccgtgtaaccacccgaaaaaatcagtggccggaattgtgcatatttgctttcgaccatcgtaagcaactggtggatatggcaaaagaggccggcgcggacgaaagtcagctcccacgactgaaacgactgctgttgactgctgcctgccaggccattaacgaaaccggactgaaacaacaaagtggcattctggtcgacagcacctatggacagtccgttcttaataccattacaggacaggggatgtggatcggtcgtccggtcgaattgccaggttcacgtccactgcgtctggaacacggtaacatcggctcgcagctgatagactggccgctggaacatgtagtgaaatgtctggtgttctaccacccggacgatcctgcaggactacgggacgagcaggaagcactaataaccgagatataccatgcctgtaccaaatccggccacgagctgttgctggaactcatccagccctttgatgcaatagatcgggacgaacgtcactatgtcagaagtgtggaacgattctaccagctcggcatcagacctgactggtggaaactaccggctttaagtgccgcgggctggcagaaaatcggtaacctgatcgaccaatatgatccccagtgccgtggcatcctgatcctgggactggacgctccagaaaatgagctgaaagcaggttttgctgcagcagcagatattccccatgtgaagggtttcgctgtcggacgtactattttcggcgaaccatctctgcgctggctgagtcagcagtacagcgatgagcaactaatcaacgaagtcaaacggaagtatctgactctgattggtttctggcgcgagtaccgttccgtccggtaa

SEQ ID NO: 401490 - DNA, 150 bp, Salmonella enterica
atgtctgccgctgtggtcaatcagaacagtgagcaatcttcaggatatctgctgtgtatcagcatcgccatgtttctttcctgcgtgaccatcggcctgccactgacagtcactcccgagtcattcccctgtatatacatgagtaactga

SEQ ID NO: 401491 - DNA, 174 bp, Salmonella enterica
atggggggcagagtggcaacgctgtcattactactggagagcatcgaattgttgctattgtgggcaacaccggacaacagtctggcactggccactttcaccagttacccgacgatgttcctggtcgcagcaggttgtacccttgcgggtgcagtggctgatgcagcacaatga

SEQ ID NO: 401492 - DNA, 1506 bp, Salmonella enterica
atggaaacagtcggtaattttatcaatggtaatatcgttatcagttccagtcgcgaaactcagcctgttacggatcctgcaaccggagaggtgatcagacaggtaacacagagtactcaaagtgagatgctccaggcaatcgacagcgcacacagagcatacccggcctgggccgctaccacaccgttaaaaagggcaagaattcttttcaaattcaaagaactgctggaagagcaccgcgacaagatggctgcgctaatcgtcagcgaacatggtaaagtctattcagatgcgcagggcgagttaacgcgcggcctggaggttgtggaattcgcctgcggcattccgcacctgatcaaaggtgagtactcagccagtgtcggtacaggagtggacagttactcaatgatgcaaccgttgggcgtggtggcgggtattacgccattcaactttccggcgatggtgcctatgtggatgttccctctggctctggcctgtgggaacacttttgtactgaaaccaccggctccggttccttccacttcgctgatgctggcgaagttgctgaaagaagccggtttaccggacggggttttcaacgtggtacactgtggtaatgaagtcgccagcctgctgaccaccgatccacgcattcaggccgtgagcttcgtgggttcatccggcgtggcccagcatatctataaaaccgccagcgctcatggtaaacgcgtgcaggcatttggggcggccaagaatcatgccatcgtcatgcccgacgcagatctcgacaccacggtaaacgctatcatggggggcgcatttggttctgcaggagaacgttgtatggctctgcctgtcgtggtggccgtgggcgatggtaccgctgacaatcttatcaccaggctgaaaccattgatcgccgcactacgtataggccccggcaacatcagtggtgataaagaaaaccagatggggccggtcgtatccctggctcaccagaagaaaatagtgggttatatcgacaagggtgtggaagaaggtgccacactgatttctgatggccgtaactatcaggttgagggatatccgaatggtttttatgtcggtggtacattatttgataacgtcacgacagatatgactatctaccgggaggaaattttcggtcccgtactgggcattgtgcgcgttccggattatgagaccgcaatccgcatcgtcaatggtcatgaattcgggaacggcagtgccattttcacgactaacggtcactgtgcccgcgaattcgtgcaggcagtagaaactggtatggtcggtgtcaatattccggtgccggtaccaatggctttccactcattcggtggctggaaacgttctgtcttcggtgctctcaacgttcacgggccggatggcgtacgtttctacacccgtatgaaaacagtttccgcccgctggccggcgggtcagcataccgtggctgaattcagtatgccaactttaggttaa

SEQ ID NO: 401493 - DNA, 813 bp, Salmonella enterica
atgactcccctgctcagtaaacgtgctgcggaaaactacggtctgatccagtacgtcacaccggccaacacaggctggcaatatgtcggatttgaggttcacagactgaagccgggacaggaacttttgttacccgaagacgggctggaacgctgcctggttctggtgtcaggactggcgactgtagccaccacagcaggtacgttcagccggattggacagcgaatgtctccgttcgaacgcattcctccatggtcggtttatctgccacatcattccgcagccagggtaacggccgaaacagtactggaactggcagtgtgcagcgcccctggttccggcaagttaccgccacgtctgatttcgccggataagatcggagtggagcaacgcggcaaaggacgtaactgcaggctggtacataatattcttcctgatgatagcccggccgacagcctgttagtcgtagaggtgtacaccgatgaaggaaacaccagctcctatcccagccacaagcatgatacatatcttccaggagaggagaccctcctggaagagacatactatcatcgcttcgatccgccgcagggcttcgcactgcaacgggtgtacactgacgaccgtagtcttgacgagtgtatggcggtttacgatcaggatgtggtgaaggtaccacgtggctatcacccggtagccacaatcgcgggttacgacaactattacctgaatgtcatggcaggccctatacgtcagtggaaatttacctgggaaaaggatcacgcctggataaacagcaaggactatccccgttga

SEQ ID NO: 401494 - DNA, 897 bp, Salmonella enterica
atgaacaacgattacgtaaaactggctattgcgcccatcggctggaccaacgacgatatgccggatctcggcaaagaaaatacatttcagcagtgcgtcagcgaaatggcactggcaggttttgtcggctgcgaagtgggtagtaaatacccccgggatccagcgatactgaaacctgcgctggaactacgcggactgcaaatctgcaatatgtggttcagtacctttttcgccgacggtaataaggaacagactctgcgtgagttccgcattgcactggaatttctgaagaagatgggagctaaagtgatcggttgttcggaacagagcggcagtattcagggactcccgacacccatttatggtgagaaggtgatattcagcgacaggcaatggcagcaggtagcagagggctacaaccagatcggcgagctggcagctgaacagggtatatccgtctgtctgcatcaccacatgggaaccggtatccagacactggaagagatcgatcggtttatgacgtcggttaaccataacgtgtacctgcttttcgatacagggcacgtttacgcctcggaacgcagccagtgcagcgtgctcagcgttctggagaaatatctgccacgtatccggcatgtacatctgaaagactgccgggaaacagtgttacagcaggtcaaatgtgacaagctgtcgttcctggatggtgtgcgaaaagggatgttcaccgtaccaggggatggcgtaattgacttcgccccagtgttcgggctgctggaaaaaaataactatcgtggctggatagtggttgaagcagaacaggatccggcactggccaacccgttagaatatgccctgaaagcacgcagcttcatccgcaaactggcgaatatttaa

SEQ ID NO: 401495 - DNA, 822 bp, Salmonella enterica
atgacaatcaacagacaacgtttttgcatcaaccgcaaagttgccatcaatctggatattgaacagtttttcagactggttcaacataccggactgaataaagtggaaattcgcaacgatatgccggaaggcagggtgaccgatggtctgagcccggagaaagtacacaaactggcgaccgattacggactggaaattaccaccattaacgccgtttatccatttaaccaactgaatgcccggacactggctctcaccgaatcgcttttacaggacgcgcagggagtgggagctaaagcgctggttctgtgtccgcttaacaatggtacacccgtaccgcccgaacaaacgatgaatgctattgcgcgactaacccctttgtttaaaaaatatggaattcagggattgattgaaccgctcggcttccggcattcgtcgcttcgctctgccatacagacgcagacgctgattcgcgaagccggatcgccattcggtgtactcctggatagctttcaccactacctttatgaaaaggcagaacaggattttgccgacaacattgatatcagcggtattggactggttcacctttcaggcgtggaagactcgcgtcccagagaaacgcttactgatgaagaccgtgtaatgctgacagacaaggacgtaatggataatatcggccttgttcgtcgccttgaacaactgggttatcggggcatctattcatttgaaccattctcatcaacactgaccagatggggagaagatgaaattaaaaatcaaattaatcgcagtattgatctgataactgccgcaatataa

SEQ ID NO: 401496 - DNA, 837 bp, Salmonella enterica
atgcagaatcatccaacacaattatctttgttacaggacgacatccgaagccgttacgatacgctcagcaaacgtctcaaacaggtggctcgttatattctggataacagcaacaatgttgccttcgatacagtggcatctatcgcgcagcaggcggatgtacctccctccactctaatccgttttgccagtgcttttggttttagtggttttaatgagatgaagcaggtgtttcgccagcatctgatggaggaaaccgccagttatacagagagagctcgtttatttcggaaatccacggctgatgaagagggtgaacatcctgagcagccatatgaaatactcaacgtttttactatggttaatgcccaggcattacaacaacttccttcccagatccgcccggagcagttgcaaaaagcggttgagttactgggacttgcggataacatttatgttattggcctgcgtcgttcgtttagtgtggcctgctacctgacttacgcattacgccatctggaacgacatgctttccttattgacgggctgggaggtatgttctccgaacaactaagtatggtgagcgataaggatgtggtagtggcgattagttattccccttacgcgcgggaagtggtggagctggtagaactgggagccggacgcggcgtgcgacaaatcgtcattacggacagtcaggtcagcccgctggcggcgttcagtgaggtttgttttgtggtacgcgaagcgcaggtggatggtttccgttcgcaggtggcatctatgtgtctggcacagactctggctgtttcgctggcactgaataatgccagctaa

SEQ ID NO: 401497 - DNA, 231 bp, Salmonella enterica
atgagaaccgtatcgatatttaaaaatggcaacaaccgcgccatccgtctgccccgtgacatggattttgacggggttaatgagctggagattatccgggaaggggacacccttattctgcggccggcccggcccagctggagatccttaacacaacttgaaaaagcccgtccggattttctgacggaacgtgaagagattgtcgacgatgagggacgctttgaactatga

SEQ ID NO: 401498 - DNA, 417 bp, Salmonella enterica
atgaccagaacctacatgctggatacctgcatctgttcctttattatgcgcgagcagccggaggccgtactgaaacgtctggagcaggctgtgctgcggcgtcaccgcatcgtggtatcagccatcacttatgcggaaatgcgtttcggcagcaccggcaaaaaagcctccccgcaccatgcccggctggttgacgccttctgcagccgcctcgatgccgtcctgccctgggacagagccgctgtggatgccaccacggagatccgctctgcactgttcgccgccggcatgcccatcggccccaacgacacggcgattgcggggcacgctattgcttccggcgccgtgctggtgacgaataatacgagggagtttgagcgggtgccgggcctgacgctggaagactgggtgaaatag

SEQ ID NO: 401499 - DNA, 1275 bp, Salmonella enterica
atggaaaagttatcttacgcatctgaaaacagcacctctccgtgggtaacctatcttcatcagattgacagggtcgcgccttacctgggggaactggcctgctgggtggaaacactgcgtcatccgaaacgggtacttattgtcgatattccggtgcatatggatgacggcacagtccgtcattttgaaggttatcgtgttcagcacaatctgtcgcggggcccgggtaaaggaggtgtccgctatcatccggatgtggatcttaatgaagttatggctctttctgcctggatgaccataaagtgtgcggcagttaatataccgtacggtggagccaaaggtggtatacgtgttgatccgttttctctgtcagaaggcgaactggagcgtttgacccgtcgctataccagtgaaataggggttattattggtccacaacaggatattccggcaccggatgttggaaccaatggtagagtgatggcatggatgatggatacttattccatgaatcatggcaccaccatcactggcgttgtcacaggtaaacctgttcatctcggtggttcactgggacgagaaaaggctactggtcgtggtgtttttattaccggcagggaggttgcggaacgttttggcattgaaacagaaggagcaaaggtagctctgcaggggttcggtaatgtaggtggcgaagccgccagactttttgccgaagccggtgcacgcattgtggccgtacaggatcattccgccactctgattaatcatgatggtattgatatgaatgccctgactgcatggcagacggaaaataagcagatttcaggttttccaggcgcaagggaaacggacagagaggaattctggactacgcagatggatatccttattcctgctgcaatggaagggcagattacccgtgagcgggcggaaaaactcagctgcaaactggtactggaaggtgcaaatgggccaacttatccggaagctgacgatgtgctgatgaaccgaaatattgtggtagtaccggatgtggtctgcaatgccggtggcgtgacagtcagttactttgagtgggtgcaggatatggcgagttttttctggagtgaagaagagattaacgccagaatggatcgtattatgaccgacgcgattacccatgtttgtgacaaagcgaaagaaaaagggtgttccctgcgtactgctgcatatatcgttgcctgtgagcgtatcctgatggcgcgtaaggatcgtggcatttatccgggatga

SEQ ID NO: 401500 - DNA, 1254 bp, Salmonella enterica
atgttgaatatccatgatctgattgattctggtcgtctgtggggcagagttaaccgcctggctgagtttactcgtgacgatattccctggacccgaagggctttcactcctttgttctgtgaagcccgacaatggttgacgcaacaaatgcaggaagccggactaaaggtccatcttgatgctgcaggaaatcttgtagggcgtagggagggtaagcaacaaatatcgcctctggtaacaggttcccactgtgacaccgttgtgagtggtggccgtttcgacggcattatcggcgttctggccggtattgaaatagctcacaggttcagggagttgaatattgaattaagacacccgctggaagttattgactttctttcagaagaacccagtgattacggaatatcctgtgttggtagcagggcattttccggtgagctggacggtaacatgctgaaagcgaaaaaccagcaaggtgaaactctggctgacgctatgcgacgtattggtgctaatccggatttacttgagaggcctttacgccagtcaggcgaaactgccgcttttgttgagctacatatagaacagggaccagtactggaaagtgagaacattccagtaggaattgtcacacacatagtaggaattcgtcgggttctgattactgtcacaggtcaacctgatcacgcaggaactacgccgatgaatattcgtcgggatgcgttagtaggtgcatcatatattattgggcaggtaagggatatggctgaatccctgagcggtaatccttcatatgttgtcgccactattgggagattagccatgacgccgaatgtcccgaatgcagtacctggttgggttgaactgatgctggaggtacgcagtgacagccaacaggtactggatatattccctgaacaaatcatgaaattgtgccgggagccgctgcgtgcgcttcgcctggaagtaaaactggaacatgtcagtcgggcccggcctacagtgtgttcggaaaaagttatgcaggctattgccagtgctgctgaaggattgaatctggattaccgacaccttcccagtggtgccggacatgatacggtatatgtcgagcccacaggacctgtggggatgatatttattccatgcctgaatgggcgcagtcactgcccggaagagcttatcagtgaattacaactggcgcgtggggcaaccgttctggcgcaaagtctgattaatctggatgagtgcgtttaa

SEQ ID NO: 401501 - DNA, 1377 bp, Salmonella enterica
atgaatgactttgatttagtagtttgtggcaatctggtcgatgcagagcagattgtacaaaatggctggattgctgtacgagatggaaaaattgtcgctcgtggaatgggacccgcgccttcaacgaaagattttgttgatgcccgagggcactggattatttctggcgtagttgatggccaggtacattcaggtagtcaggcaaaacaagaaggtcttgggtgggcgtcacgtgctgcagctgctggcggagtgaccgtaatggttgatatgccctatgatgacccggaaccagttgcatcccgtgagcatctggatataaagattgcggaagttgaacgggattgccatgttgacgttgcgctgtttggcacactcaatcaacaatatggtctgaaggctgtagccgggcttattgacggaggggtatgtgctttcaagttttcgacatttgaagccactcccggaagatttccccgactggaggaagacgatctttatgaagccttcagactgatttcaccttctggcctggcgtgtagtgtgcataatcagatgcaggaactgacgcgaaagaatattgtccggatgacagaatccggtgatacaggatgggatgcttttttgcgtgctcatactccgctgatcgaaaatctggccacaacccttatctatgagattggtgcggaaacaggagcccgggcacacgctgtacatgtctctactgcgcgtggattcgaaatttgtaatatgtatcgtaaggcagggcaccagagtagtatcgaaacctgcattcaatacctcatgcttaaccatgaggagcataccaagcgatttggggcacgcactaaacactatccacctgttcgcccgaaggcggaaatggatgcactgtggcagtatattgctaacaatgattgtaccttcatttcctctgatcatgtaagctggggtctggaacgtaaagaaaaccccaacatattcaaaaacgcctctggtggtcctggtcttgaaacgttgttacctgctttctggacggggtgtgaaacccatggtatctccccaacgatggtggcacgccagttgagttttaacccggcacgtcacttcttgttgaatgatcgtaagggttctctcagtattggtgctgacgctgacatagttatcctcagacctgaacgctataagtacgatccatcggacagtttatctgctgtgcagtggagttctttcgagggcatggagttcacagtgcgggttgtctccacttattgtcgcggggtacttgtttatgatcacggtaatatcgtcaaccagcctggattcggtacttttctgcgtccgcacacctgtgttaacaaaggtggccaatgttga

SEQ ID NO: 401502 - DNA, 891 bp, Salmonella enterica
atgaaactcaatctgagacaaattgaagtttttcgggccataatgttgaccggatctattagtggggctgcgaaactgctgagtgtatcccagcctgctgtttcccgacttatttcttatacagagcaacgcactggactcaagttatttgaacgaattaaaggcagacttcatcctactccagaagcatcccgtctttttgtcgaagtcaacacactttatcaaagcatacaacgtgtaaatgaagttgccgacgatctgattgaacagcgcatgggacatctgcgcatagcgtgtagctctaatctgggtcactcattgttaccactggctatacaaaatttttccgcacaatatcctgatacacgtatcattttacatacagcacctccccacattgtcatgaaagagttgttaacccaactggtagaactgggcgtggcattcctgccagttactcacccaaatttgcaaatggaaatgttatacagtaatcggattgttgccgctttacctgtcacacatcatctggctaaacgtgactgcctgcaggtatccgatctggtagaagaaactttaattggctattgcaatgatattcctttcggtgaattagtacgtcagttattcgacagcatcaggttcaatccacgcccccggattgaagtacagcaggtgcatgtagcttgtgctttagttgaagccgggcagggtattgcattggttgacgaacaatcggtatcggcacacgcctggccaaatctgataaccagacccatagagcccgtgataaacgcccctgttaatgtcttttggcgatattacgatcccttatcgcgcactgctcagaattttgttgacattctaaagaaaatgagttcagcacgttaa

SEQ ID NO: 401503 - DNA, 1341 bp, Salmonella enterica
atgtcgttatcacactccaaaaagacagtgctcccccctgattttgactcaactgctatagtcgattttaaagggagccgaaaagcagtaacagcggccgtcatcgggaacgcactggaatggtacgatttttcaatttatgcttttttcgctatttactttgccagcagttttttcaatcaggcagaccaaagcacagaattaattcaggcatttcttgcttttggcttgggttacgtcattcgccccctgggcgcgttagtcattggttcgtacgctgaccgtacaggtcgtaaagcagcattgacattgactattaccataatggcttcaggtaccttaatcattgcgattgcaccaggctacaccatcattggtataatggcacctgttctgattgtctgtggcaggcttctgcagggtttttctgcgggtggggaaactggaggagctgcagcatttctggttgagtacgctcctgcaggtaaaaaaggtaaatatgcctcctggttacaggccagtatggggctcaccaacattcttgccgctctggtcgctacttgtatgacacttatatttacccatcaacaaatcagcgactgggcctggcgtatcccattcttgttggggttatgcatcctgcctgttggcttatggttacgttccacactggatgaaaccccactgttcaaactggaaatggagcgtcaggtacgtgaaaatgacgtacagaaacagcctttgttacaggttatgcgagactaccctaagcagttgctggctggtatcggtttgtcaacattatgggtagtgtcggtttatgtattgattattttttttccaacccatgctcaacgtgcgtggtcgtttacaggcagccaggtttttaccgcttcactcattggtaactgtttgctggtcgcggggtgtgtttttgcaggttctttatcagacaaatttggtcggttgctggtactgaagattgttactattttattaattgccctggtctaccccgctttcgtatggcttgatatatcacgtagctttgcagtacttatccttgtacaaagtttcctttgtttgctggttgcttttttttctggcgtggcaccttcagcattatcagagatttttcccacacgtgtacgcgctaccggaatgtcagtctcatataattgtgcatcagcagtatttggtggttttgcgccagctttcctgacctggctttataaccagaaaggaaatccttttggaccagcattatatgttattgctgcgggattattcactttattcgccttaatgttcatcgtcagaataccagaagcaaataattaa

SEQ ID NO: 401504 - DNA, 696 bp, Salmonella enterica
atggagtcattgcaacatatttatgttataaacccaaattcactacactccgtcaccagagagattgagcatgccctcagtccattacaatttcccggagggcctgttataaagtgtgtaacccttgcaaaaggacctgccggaatacaaacgcaacgggatgttgattcagtagcaattcctttgtgcgagcagattattcgctgtacggctcaaagtaatgcccagggggccatcgcgtcagcatttatcattgcctgtttcagtgatcccgggttgtattcagcccgggaatgtactgacaaacaagtgttcggtattgccgaaagcggcatattgacggcaatggctatgggacaaaagtttggagttatttcgattctacaaacatctattgcacgacatttccgctactttacagcgatgggagtcactggcagatttgcaggtgatatagctattggattaagtgttgatgggctatcagatcgggatgaaacgttcaaacgtctgaacgttgcaggagcagctctacgtgacaaacatagtgctgatgtgctggttcttggttgtgcgggtatggcgtcatacagaaaaatgcttgaagaaacgttagatattcctgtggtagaccctacccaggcagcagtcactatggctttgggtcagatagcgtgcagatccaacaatggatag

SEQ ID NO: 401505 - DNA, 276 bp, Salmonella enterica
atgcgcttcggcgccaccggcccgaaagcctcgccacgacacggcccactggtggaggcattctgtgcgcgccccgatgcgattctgccgtgggaccgggcggcggtggacgccaccacggacattaaggtgacgcagcacaaagccggcacaatcggaccgaacgacacggcgattgccgggcatgcagtgtcggtgggcgcgattctggtgaccaataatatgagagagtttgcgcggataccgggcctgacgctggaagactgggtgaaatag

SEQ ID NO: 401506 - DNA, 1341 bp, Salmonella enterica
atgaagaattttctctggagtataattattttaactatcaacataagtcagatacaactggcatctgccgatacctttgtctccggtcagtctgaatcaaaaggttttatcagtgacagtaaactggacgtattggtacgaagttattattttaacagtaataaaaaagacgggatcgttgataacagagactggtcaggcgcgattcaggggaactatagttccggctttacccggggctctgtaggttttggcttcgacgcttttggctattcaggatttaaactaaatggctcagataaatatgcaggttcaggtaatctgactaccaaaaccaacaataaaggaaaaattattggtaatcatgacagttatggtaaaagtggtgcggcactaaaagtccgcatgtctaagacggaactgaaaatgggtgatatgcagcctacgaccagtccggtcttctctgtaggagggacgcgtctgacgcctcaaaccgccagtggtattaacctcatgagtagtgaaatcaacggactggatattgaggcaggacatttttattcgagtaccagtcaggacagaactaatcgcgatggtgaactgtgggctgcatatgcaggagtcaacgccagaaatgttaactttttaggcggttcctatgcgtttaatgataaggttaaagcgtcactatatgcatccaggctggaagatatctggaaccagtattatgttgccgttaactatatttttccgttaaataaaaatcagtcattaaattttgatttcaattattatcggactaccgatgaagggaaagcgaaagcaggcgagataaataataatgcgtattcgttgtccgcaacctactcatttttatcggcacatagcttatctttattttttcagaaagttaatggcacgacaccattcgattatatcggtgtgggtgacaataatcgtggcagtaattccatgtttctcgccaacagcattcaatactccgattttaatggtcctggagagaaatcatggcaactgcgttatgacctggatatgacttcttatggtgttcctggtctcagttttatgacccgttatgccaggggattcgatatcgacggtagtcgaacgccggtaaacagcccttatgccggattttatggtcctgatgataaacaccgtgaatttgatctggaagttaaatacgttattcagtccggtccggccagaaacctgtccttccggttgcgtcaggcgtggcacagggcaagttctacccaaatcgatggcgatgcagatgaacttcgtttcatcattgattatccgttatccattttataa

SEQ ID NO: 401507 - DNA, 300 bp, Salmonella enterica
atgatgactgataacaaaaatgcattaatgcatgagtgttatcagtttgtcaccattgatgcagaaaaaggaaaatacggtacgcagggacgcttaccgatccgccgggctggctcactgccagtaaaggtgtctccccgcatcctgatactggctcagaacacgaatgacaataacggcctcctgtgtctgcagaaaataaatcacatgccgctcaaaagggagtgcatatatgtcctcacccagttccggactgtgggtcccgatatggttatcgcccaggagctgaaatatcgctga

SEQ ID NO: 401508 - DNA, 267 bp, Salmonella enterica
atggcacgaaccatgaccgtcgatctcggcgacgagctgcgggagtttatcgaatccctgattgcatcaggtgattaccgtacgcagagtgaagtgatccgtgaatcccttcgcctgctacgggagaagcaggcggagtcccgtctgcagacattacgcgatttgctggcggagggactgagcagcggcgagccccggacgtgggaaaaagatgctttcctgcagaaagtcaaagccggcatgaggaaatccggtgagagtcgttaa

SEQ ID NO: 401509 - DNA, 1449 bp, Salmonella enterica
atgtttgacattgtcattatcggacttggtgccactggtgtaagtttattgagtcatcttcaggaggaagtatatactttacaattaaaaagacctgaaatcgctgtttttaatccctctcacactttcgctaccgggaaagcttttggcgatgcagatcatatccacagagttaatacgccttccagcatgatgtctgtatcaaatacagaaccattcaggttcgaacactggttacagtccgtacctggctccggagaacgctggccaactcgtctacaattttcagattttatacaacagacatataaggacatctataaaaatggaatactaaacattaaggaattccactataatgttatatctgtcaataaagacaaaaaagatttcgttatcagagatgaaaatgggaataccgtaaacgcccgtaagattgtaatgtgtcttggtgcccagccttcagatatgttccctgaatttaacgatatcccgggtttcattaatcatttttcacaatatgatccgggctttaatgaaaaggtcatcattgcaggcagtagcctcacagctatagatgcattccgttatattcacagtaaaaatgatgtcaatgttcattgttattctcgtagcggatatgcacctacgtgcctgacagaaaaaaacacctacacacctgtttttttaaactggagaaacattcttacagaaagcgcttattccggagatattcttggagtatttacccgcctgttacggaaagaattttatctgctaagaaaaaatggtgaattcagacctgcaatgacacttttaaaaaaaggaaggcaggctgattattttagtttacttcagaaacgagcggaagcaggggatttaccctgtcaggacactcttgtttcaacacgtccctatatgcccaggatatggaatgccatgaataatcatcaaagaaatttatttttgtctcaatatggtgctctctggtcctcctggcgccaccctgtgccttatgaaatattttcagaattatcaaaggcatcaaccagcggaaaaataaaatttcataagatgaaaacatcgcctgtatatctgaaaaacaaattcactctgaatacacattcaggcactttgtcttcgggctgtttctgggatgctacagggggtagtcaaaatttaaatatgatgaaaagtccattattgaaaaatttaatgcatcaaaaccttattgaaaatcatccttgtggagggattaatattaatccattaacatttcagtgtaaagtaaaaaacaataatatacccggcctttataatattggaccacttaataaaggatgtttattttctacgaatgcgttctggtttaataatcaatgtactgaaatttgggctaagcagtgggctttcgaaagcactgaacgataccctgaggattttatatga

SEQ ID NO: 401510 - DNA, 873 bp, Salmonella enterica
atgattatattactcccctttttttatctttttattggattattactgggaaagacatcatgggatataagatcttctgcgtcttggttcttaacaaaaatcatcatccctgttgtaattacattcaacatatccactcaatttagcaatatgggaagtataatttttataacggcaatagttatgttatctatgttaatgttagggaaatatattattaatgatccggtcatgctcctttgctttacttaccttaatattgggtggttagggttaccagttgcaagttctctgtttggcaatgatgctgcacttatagttatcgccgcgtatgttggaagctccgttgtgggtaattcatttggggcaggtatattagccagtaataaaataaatctaatcaaattgttgcagactcctcctgttctggcattattcacaggcatttttcttatacctttcagacaacaagtcactcattggttttatgatgtttatgaagtagctaaatttctgatgagttttttgggcatgggcgttctggggctatggctgtcaaaaacaaattttaatttcagagaaattcgaccggaaatcattttctttataaaaagagctgtcgtgattttttttattattacactgttactatatatagcacggttatttaatcaaacactcataaccaataatccagaaactctgtatttgttctgtttcctccctcctgccgctaatatcatagtactggaaactcattatatgggcacaggacgttcagcacgaactatatcatgcgggacctgcataagtattattgcaattactatttatagcgtggttatttttggcttacggaatatttatctttag

SEQ ID NO: 401511 - DNA, 249 bp, Salmonella enterica
atggatcaggaaatgacgttttcgctcagctatgagcagatgacgcagatggcagaagaggaaataaagcaatgcgattttcgcagggatggaacccattatgtctgggaagtgaacaaggctcatgacatcctccgcttctggtatctcctggcgctgcgtggacacactggcctggccacaacacgggtcgaatcagactataaacggctaaaaacgctcatttctcagaggaatgagggacaatga

SEQ ID NO: 401512 - DNA, 594 bp, Salmonella enterica
atgatgcgggaaaaatcccgacgtccgtcgccgctgcaacggcgggtgctgattgttctggccgccctcgatgcgaaacgtccgggtccggtggccacgcgggatattgagcgggtgctggcgcagggtggggacgccccggtgtacggccccaacctgcgcgcttcctgccgccgaatggaaaccgcaggctggctgcgtaccctgcgggcacccaacctgcagctggccgttgagttaaccgacgatgggcgggttgtcgccgagccgcttctgatttcggaacaggcgcgggtacaggcagaacaacgcgccatgcaggtcgtggttctgccgatggtagggataataccgaacagtgatgctgacaaaaaggatcgcgccgtgcagttggatggcgaaggatacatcgcgtgtcggggagattacgttatacggctgaacggcagcacctgcctacaactgtggaccacatccggtcaggtgactcttctggaaggcgatccgctgcaggtggcacagtggctgtatgcctgccatgatgcgggcattggtatacgtgtacaaatcaacgagaatccccgaccggaataa

SEQ ID NO: 401513 - DNA, 405 bp, Salmonella enterica
atgagtgatgatgagctgaaagcccgtcgcgcagcggccctggcggaggacagatgtttcagccggggccggttgcgggatgaattccggatgaaaccgtctcccggcgctgagccggtccggatgtacaaaagcccttacggcggaaaatacggcggctggcggctggctgactgtgtcccgatgcgggcgaaacgtcctcagacagaaaaacagcgacaggccagcacacgtctgggcctgcaggccaggatgaagagtgagcgtggcaggttcgccaggctggcacatacctggttagcgctggaccccgtcttcctcgataccgaaacgaccggacttgatgccggcgcgcaggcgctggaaatcggtctggttaatgccgggggtgaaacaatattttaa

SEQ ID NO: 401514 - DNA, 1530 bp, Salmonella enterica
atgacagaaacgaactcagacataaacagctcaccgactcagttgcatctttttttcgctgcggcggacaggtttcccttacgcatcgctatcagcgatacaaatcaggatgtcagctacgccacactcagaggatggatatccggaattgtccgggccttacacagtgctggagtcagctcaggtgacagagtcgccgtcgcattgccccccggcgccggactcatcgcctcactgcttgcgattcaatatactggcgcggcatacattccccttgatcgtaacgccccccgggagagaaataatctgattctggatgatgcccgaccaaagctcgtcattaatgaaaacggtgaatccttatttacgaattgtccggtaatggacatcaaccagatgctggtcgctcccgccacagaatcggctaatgcagcgttgtcttcaggtgtggcttacataatttatacttccggaaccaccggacgcccgaaaggtgtccccgtgacacatgccagtctgcgagccctgttccaggctacagagtctttctttcgttttaacgaatacgatgcgaccctgttgtaccattcttacgcctttgatttctctgtctgggaaatctggtccgtactggcttacggtggcagactggtcattcccgatgatgaaacccgcctgacgcctgaaaaactggcacagctgatttataatcagaacattacccttcttaaccagacgcccggggctttttccgtcaacgccccctggctctgtcgctttcagaaagaagcactggcattgcgcttcattatttttggcggtgaacgacttaatttccgtacgctgacacactggcagcggcatttcggactgacctccccgatactggtcaatatgtacggaatcaccgaaactaccgtgcattccagctggcacattatcagtgaagacgatctgaacaaggatgaatcggttatcggtgagttattacccggatttcgttatcttattcgcccgtccgacaacaatactcaaccagacgaaggcggggaactgttactttccggtccacaggttacttccgggtatattaatcagaataacgaaactaacggaaagtttgttcacattgaaagtaaccgtgttttttaccggtattactgtaccggtgacattgtgaaacacaatgcagcgggcaaactggtctacctgggtcgttgcgatcaacaggtaaaaataaacggttaccgcattgaaaccggtgagatcgaatcactcctcgcccgacatgaagcaatcagagatatatctgttatcgcttcagattccacgacacagggtgcccatctcgtttgctgttttaccacatcccccgataatgaaaaaaatattatcccggaactcagggagttagcaaaacagtccttacccgtttatatgcgccctgttcattaccgctgtctcgatattatgccaaaaacaattaatggcaaagttgataaacaaaacataaggcttttactggagtga

SEQ ID NO: 401515 - DNA, 252 bp, Salmonella enterica
atgataatgacaaatagtgataatcacacaaaagaagagataaaagcaaacgcattaaaggaatatatatcctggatggaatttcttttagaaagaccagttacagaagaggataattttcttgatataggcgggcattcaatgatggctatttcactcaatgaacgtatccggaataagtttggactgacattgtcgatggaacgtctctataacacaacgctgacagaaacattccaggctgctcaatga

SEQ ID NO: 401516 - DNA, 978 bp, Salmonella enterica
atgagttaccttaaagaaaaggggttgattatgacaaaagaaattcacctgtctgaacaacagttagacagttttaataaaaacggatatatcggaccacttaccatctattctccggaagaaatggccgaaatatggaatacagttcgtcgacagttacccgatcgcactcatgcagcttacccttcagactcgtatggagcggcaaccaatatatcgaattacgatcgacatctggatattcagttgctcagccagcatataaccaatccactcatcgttgcgccggtttccgatatactcggaaatgacgttctgtgctggcgtacagagtttttccccaaataccccggagatgaaggtactgactggcaccaggccgatacattcgctaatgccagtggtaaaccacaaatactctggccaggtgaaacagaagagcaatttggtaagggaacattaaccgtctggactgcatttaccgatgccaccatcgaaaacggttgcctggaagttattcctggcactcatcacaggatgaattacgatgaagaaaaatcaatggaatatcagtgtgatattattaacaagcgggataaaaacggaaaaagtcgcggttttttcggctatgattaccgtgatcttcagattgatcctgactggaaacccgatgaaaatcagtcagtacctcttgagatgaaggcaggacagtgcgttattttttggtcaacactgatgcatgcttcttaccctaacatatcagataaacattaccgtatgggatttgccacccggtacgcaccaggttatgtcgatatttatcctgacacggatcacgtacacgaatacggcgggaacattccactggataagttcggctgtgtcatcgttgcaggacagaaccgtaatgccagtaaccggatcgcaacgcataacctgctaggtcatcctttcgcagtactgccatcccggtcataa

SEQ ID NO: 401517 - DNA, 684 bp, Salmonella enterica
atgagccaaatccagcattacctggaaaatacttactgtttcagggtatcaagcaatattatagccagtggctccgatgaatatggacagtggatagctctggggaaaaatatctttcatcctcagggtgggggacaacccgctgaccggggatgggtcaacgatattcctgtcactgtcagaaaacagatgtcaggtctggtgacactctatccggcatccccgtcttctctgtccggggaaacgaatgtcatccaggtcctgtcagtggatgatcgtattcgccatgctgcactgcatacagcggggcatctgctgaaccaggagatgtgtcgctatggatggctcgcggtaaaaggccatcactttccgggtgaatcacgcgttgagttctccgcttcggattcttctgccaggcctcccgatagtcttcgtccggaggaaatagaagaaagcattcatacgcaattacgcagtggcgcaccagtaatcacctggtatgacggagggacaagatggagtcagatcaacggaactgagccaataccctgtgcaggaacgcacaccgacgatatcagtaaaatcagtatgtttactgttaaagcaatccggtacaaaaaaggcatattgcgtatcagctatgatgcagaacatattgcactaagggatactcatgacaaatga

SEQ ID NO: 401518 - DNA, 918 bp, Salmonella enterica
atgacaaatgacaccctgccactgatgcgccgccggctactgatgctggatctgggtttactggtcgtggcgctctcctggggggccagttattccctgatgcagatgattattcatgccggcgtaaccgtaccattgtttttgatgctacggtttgctcttgccgttcctttcatattaataggtgctcgtgtacgtctgagtggtatcactcgtggggaaatcgttaacggccttatatttggtatattattgtatgcgatcctgacgtttgaaacactgggagtaaaatacacttctgctgccaatgccggtttccttatcgcattatccgtggttctggttcctttttttgaacgcattctgggtaagcgaaaacaaagtaaaattgtgtattttacctgttttctttccctggccggaggtggtttactgagtttttcagccagcggtaacactggatttaaccgcggtgatattcttatcctgctggccgctctgatccgtggtttccagatttttatgtttggaaaacaaacaaccggtaagccttattcattaataaacataaccctgattgaactagtcactgttgctgtcctggggctgctgtttgtcagtatcactgatccccacgcgctgaaatctattccttctgtttctcccgttgtctggggatatattatctttctcagtttactggcaacggcgttcgcatttctgatgcagttatacgccgccaggacaaccagcccgacccgggtcggtcttattctgtcactggaaccggcctttgcagccatttttgccgtagttattatgggagaaactctcggtgttctgcagggactcgggggaggaattatcgtctgtgcagcgctgacaggacgtatagctgaagggaagcgttatgaataa

SEQ ID NO: 401519 - DNA, 726 bp, Salmonella enterica
atgaataaccggccttatctggcgatgtttcatcatgccggtggtaacgctgctgcactgaaccatctggcgaaaatttttatgccctgtttcaacgtcattcagtttgagatgcctggtcgcggtagacgtcgcaaggagccactggccaatgatatttcactggttgtggacgattttgccaccaggttaccgtcctgtgagccgatattttttctcggtcacagcctgggggcttacatagcctatctgatggcagcatactgtcgctccagggagccatcacgacaaattgcgcttatagtgattgccaacgatcccattcactgccggcagaactttacttttgctgattcagtgcagccccccgacatgcaactcattcacttcgcttcccgtctgggtcaattacccgactggctgcgccaggagcccctgcttctggatcagtttttacgtgttcttgctgccgacctgcaggtggctgactccatcagtccgtcagatacggtaccgctggaagatattccacttctggcaatatattccagagaggacccattgttgcaggaacctccccggcgctggcaggaatgtacccgatattattttgaactggcggaaatatcaggcgggcactttatttccgaatgtcagggggaacagatacgaaaaataacactcaattttattcataaatacaacctgtgcaggaatgaattatga

SEQ ID NO: 401520 - DNA, 573 bp, Salmonella enterica
atgagcaatgagctgcagcatgaccgactaaaaaaaacctgtattaatattggtaataatgtaaaacaattacggatagcaagaaacctttcgctaaacgaactttcccggctgtccggggtttctaaagcggctctttccagacttgaaacaggcggctcgaatccccgggttgacacactggacgcaatcgccagtgcattacggctcccgctgggcgatctgcttggcagtaacgatgagcgttatccatgcctggagaaaaatgtaggttataccgggggttactcccaggttatgaagttccgtattggtcagggtaatgttacagaaatatggcatctccagatgcaacccggtatcacgattaccagtccggcgcatatatcgggcactcatgaacatattatgttacatcatgggacgttaatattgcgtatttctgataacgaaagtatctctttgcaacccggcgatttttacgctttttccggtgatgttaaacatgcttatatatgtaccgacagggccgtgagtgcgacagttattatgtcctatataacgtacggttaa

SEQ ID NO: 401521 - DNA, 594 bp, Salmonella enterica
atgatactgaatgaatgtataaagacagcgggaacgagcattttattgctcattatgcccgggccaacaaatactcttctgcttttttcaggatattcctgtggtgtcaggtgcagtataaaaatgattctggccgaatggagcggttatatgctggcaatcagtttatggggctttctgacaggatttctggtacgggaaggcaattttttcctcacaacaatcaaattactttcagcaacctatgtcgccttcctggcggtaaaggtatggcgtttttctctgaaggataagcctgaaaaaattgcggtgaaaacggtattcatcaccacgttacttaaccctaaatcctttgttcttgccatctatatccttcctcccggtacttttcagtctctgcagaattacgtgggcccgatgataagcgttctgatagctctcctgccggtctcttttatgtgggtcatatgcggttcaggtataagccagaaaggagttccatcattcagccctcattctgcaatattctgtcaggctgcctcactggtcatggctatttttgctgcttcgatgttttacaattcactgacttaa

SEQ ID NO: 401522 - DNA, 699 bp, Salmonella enterica
atgcaattcttctggcatgacataccgcaggtaacgaaagagcttcccccattccttcgtctggctgcgctgagttttaccgggatgaagaattcccgtgaagaatttctacatcataatatcccattcccgccgggactgatgcgggccagtgagcaacggcaggccgaatatctggctggtcgactgtgtgcccgaaggctgttacaggaattcgatatacggttgaatgccccactgatggacgaggatcgttctccgtactggccatctcattatcaggggtcaatttcacatgacagacaactggtgatatctgtcgtcaccagagcaatctatggtcgggtaggtgcagacatagaatcacttaccccgaaaattaatcccggaacaataaaaaatcggatctgcaatactgaagaaattaacaggactataagtaagggctgtatgacggaacatcaggctcttattttacttttttctgctaaagaaagtgcatataaagcattaccacgttcgttgcagcaacaggttgattttcacaacctggaacttaacataatcaatacaacttcgtatcgaatgactctgcggctgacaaactcatattccagtggaaatccaccagaattcattctgcatggctggtattactactttcaggacagaattttgactatagttcacatacgttag

SEQ ID NO: 401523 - DNA, 543 bp, Salmonella enterica
gtgcctgacgttgatggtactgctgctactgaccctcaccgtcagttcgtcgtagtcggcgctgcgacgcagcggcagtggtttcagatgggggcgctcttccttcaccagatcctgattgttacggttgtgccgcatgacctgctgggtgatgaagacctgatattcttcgatagtgctgaagtcgttactgccccgcagcatcagtgcctggcggatgcgtcttttcatatgcccgtgggcgctttcaaccgaaccattttcgtggccccgtccggtattattgtgcacgccctgcatgccgtagtgctgacagagggcagcatagcgctcagtcagctcgcggcgaccgtcttcaccctgttgtttccatgctgcccgcaggctgtcagtcttgtgctctgctggcactccgcccagttgcccgagggcttcctgcagaccttcagccagagcagagaagctttcaccacccagcacgacccgcatccagctccagtggctccactcaaggcggaagtggtacaacttatgcgtcaataa

SEQ ID NO: 401524 - DNA, 222 bp, Salmonella enterica
atggttgcacaggcgacgccacagctttcgccattcatcatccggcaggatgtcatttctcagtgtcgcatggcagaacgcaccgggctttttcgccaggctgtcgatcacatgccggaagtcgatgcgtctggcccgtgttttccctttttctggtctgacacgggcgcagctcatcacttcgctgctgcccacgtagcaactcaggcgttcatcccataa

SEQ ID NO: 401525 - DNA, 591 bp, Salmonella enterica
gtgaataagctctatatttttaactactctgatacagctggttcgcgtgaagatgtgaaaaaatggctcgaccaggaagaaaaggtcactacatggcgatatgatttgccacattgcttttatgtgatttcaaaagctagtgcgagtgagctaagcaaatcctttattcagtttaatggtaagaaaggacgtcatttattcgctgaaattactgacaatcgtcaaggtctgttgacaacgaaaagttggtccgtaatgagaatgaggagatataaaacagacgatttgactgttcatgacctcctttacaaagatgagtatgttaatactgcaactgacgtttctgacgacccaaaagttatcatgtcagatagtaaacgattgaatagaaatgaaaaatatgaggtccttcatttcttaaatgcactgacagggaaaaatgatgctaagttgaatcagagggtcaggaggatttgtgaatggatgattcatgagcacttaccttccgacatacaaagcaccaagaaaatacgcaactggattgctgataactacgtggaactttctaaatcataccctcatgatgattga

SEQ ID NO: 401526 - DNA, 405 bp, Salmonella enterica
atgtttgatcggttggctgcaaagtcacaaagttcggtcgaaaaagtaaccgttaaaaacgttatgaatccactattgtggatatgtggattggtatcaatcccttcattgggcgtgattttttggtccaaaggggctgaatcttgggtggtcgattttctagctatagttccacctaccgcaagtatcattttttacggctattttgctctaagaagccctgatagattgcagtctgaagggtatcaattaaagaaacaagttattgagttgatagaggaaaaggggtctattggacccatagacgcgcgtagtttagaggtgatatcaaatcctgatttgatcagacttgaatctcatccaaaacctgaagaagaaattgttatcaataaggagtcagagtga

SEQ ID NO: 401527 - DNA, 294 bp, Salmonella enterica
atgaaattgagcgaaaaattaagagcgctgagggaagctgaggagttaagtcaggcaaagttctgtgatatcacggggttatcgttgaatacattgaaaaaatatgagaggggaaattttgaaccaagcggcaatgcattactaaaaattaccacccacccacaatttcaaaaatacacgctatggctaatgaccgataagacagccccgcaagctggtcaaatcgcaccggccctcgcacacattgggccagatgtaacaaaatcagaccaatccgagaaacagactggttaa

SEQ ID NO: 401528 - DNA, 198 bp, Salmonella enterica
atgaaagcgcttataggtgtaatgccggaagagcagatcagaaagcgaatgcttgctattgcgaagggtgaacacgcccccacagccggagagcctaaaatctggtttacctcagtaaatgccgttgctcaggcactcagtagcgagaatatagtgttaccgtggcagaccgacgaacagcaggacagcaacccgtag

SEQ ID NO: 401529 - DNA, 204 bp, Salmonella enterica
atgtcagaaaaaatcagtgatcgcattgttcgcgaaaaagaatgtagggagctttccggcttgtgtcgcacagcaagatacgaaagggaaaaggccgggacatttcccgcgcgacgcaatatcggcgggcgttctattggctggatgttgtcagaaatcagggaatggcagaaaaccagacggaaacaaaagttgattaattaa

SEQ ID NO: 401530 - DNA, 1230 bp, Salmonella enterica
atgaacaacaaagcgacaaacaaactaagcgattcgacattaaaaaagatgctgggaaaaccagcgacaagcgacaggtttttatcagatggtgaagggctgcaagttaagcattctaaacaaggtattctaacctggtattttaaatacagaacgggcgggagggatgcgcaacaatatcgaataaaactagggaactacccggatctttcgctgaaagctgccagagaaaaacgctcacagtgtcgcgcatggttggctgaagggaagaatcccaaataccagttaaccgcgacagtgcaggaaacgctaaagccggtaacagtaaaagaggcgatcaattactggctaaaagagtacgtagcggataaacgcaaagatcacgacaaactagaaaagagttttaacaagcatatcattcgctatataggcgatgtgcccctttcgcaatgcgagatccgctactggctggagtgtttcgacagaacgaaacgaaaagccccggtagcagccggacatattttacaggccagtaaacaggcgcttaaattttgtcgcaggcgtcgctatgcaatcagtaacgttctcgatgacttaatagtttccgatgttggcaaaaaagcagaaagccgcgaaagggtacacacgccgcaggaaatgaaagacatattaagagcgcttgatagtggggtgtttcaggcttactacagtaacctcatgcgattgctgatagttttcggctgtagaacggctgaggtgagacgctcaaagatcggggagtgggatttaaaggaaaatatctggacagtaccgaaagagcacagcaaaacaaaagtgattatcttccggccaattcctgacgctatccggccattcattgaatcgcttatagagaagaacaaacacacaggactattgttgggtgaagagaaagcagacacaaccgtaagccagtacggatgccaggctcataaacggcttaaacatgcgcattggtcgtttcatgacttccggcacacgtttacaaccatgcttaacgatcttggcgtagagccgcacatagtggagcacatcaccgctcaccagatgccaggcatgcaagcaaggtataaccacgctcgttacctcacggaaaaactgaacgccctgaatctatggatgcaacggcttgacgttctggcgggtaagtctgaaaacgtcattgttatgagcaccgcaaagcaagcctaa

SEQ ID NO: 401531 - DNA, 1197 bp, Salmonella enterica
atgggcaagaaagaacaaggatatttatctctcccaagaggagtaactatcaggcagcataaaacaggctccacgattgttatcaccttcacttataaaggggtcctgtgcagggaacccctttccaggatggaggcaaacacgcgcggcattaagtatgccgagcgtctgttgggcgagatacagaaccagataacaggaggaaacttcgattactcaaaatatttccccaactctaagaagttggggctttttggggtggtgaagaagaccaaaaacattaaagcctacctcgatgaatacctgaaaatctgcgagaaccgcaatctgtcgccatccacgatcggcggttatgaaaaatgtctttctgccctgtcggcgctgcacacattgcacgttactgagttaacgccagcggtactgaaaaactggattgccagcaggaaaacgaagctcaaaacgataaggaataacctctcgtttctgcgtagcgccatcgatgaggccgtgaccgatggacttctgacaatcaaccctgtaacactggttagcgccagcagataccacgcgatcagcagcagcccaaacaccgacgattacgaagttgacccattcgcaccatctgaaacaagcgctatttatcagcactgtaaattccaggaatggaaaaacctgttccggttcgcattcaataccgggctgcgtagttctgaattatgcgcgttgcgctggatcgatatcgactttattgagaacacggctcacgtgcagacggccagtgtcgtgggagtgctgaaaggcaccaaaacaaaagccggcacccgtaaagtggaactgaatattgaagcactggcagcgctgcaggcgcaaaaacaatttacattcatgaaaagcgagttcatattcagcgatccaaaaacaggctccccctgggcgaacgccgacgctatccgcaaaaaagcatgggtaccaacacttaaaaaagccggagtgcgctaccggaacccgtaccagacccgacacacattcgccacacaacacatcagccagggcgttaaccttttctggcttgctgggcaaatgggacacaaaggaccggaaatgttattccgtcactacggatcatatctggctgagtatgacggtaaaaccgcgatttcagccactccacagcagggaaatattgcaaaatgttag

SEQ ID NO: 401532 - DNA, 213 bp, Salmonella enterica
atgttaaatcttgatgtagtgcctattacatcctactgcgaatcagtaggtgaaacactggatgccgttaacaaacggttacaacgtggggtatggaaagaaggtgtgcatgttttaaaagttgatggttccaaagagcgctggatcgacttagttgaggtttcaaaatgggcaagaaagaacaaggatatttatctctcccaagaggagtaa

SEQ ID NO: 401533 - DNA, 198 bp, Salmonella enterica
atgtggaaggaggtagaaatgatgagtaagccactaaaaagagccgtattcgtttttgtactcatctgcgtgatgggtacgttctgcgcgctggctggcggtgtgcaatggggtacacctgatgcgggcatggcggcactctttaccctttctcctgctgcgataatcgctggcgcggtctacgcaagcagtctgtga

SEQ ID NO: 401534 - DNA, 330 bp, Salmonella enterica
atgacagaactacgttatcccatggaaccagtgatgaacctgtctgattcggttcactaccgccactatcggatcaccgcccatgctatcgaccgttacattgagcgcattggcggtgacatcggggatctgatttctgacctggacagttgctgggtattcgatgtggatcggaaaggaatgaaccgtaaattgtgcgccgcagtcgttaaacgagagcgcaaaggtggatatgccctgtgtaacgacagggtgatgtttctgatacagccaggacggcattacgccgtcttgaccacgctggcaatgaatcaaggagtggaacgatga

SEQ ID NO: 401535 - DNA, 417 bp, Salmonella enterica
atgagtatgggctttctggaaaagaaatacggcgatgattacgagtccatgctgcgggattttataccttacctggaacaaaccgccgaggaagaatggtgtgttgacgttgtacgcactgaagatggtaaagccaattgccttttcgggcatttaagtaacttttgctgccattcaaaaaatgatgacgtcatgcctgattttgactggttcgaatcacgtatcagtacaacattcatggtctatgccgtcaacgatggtgagaaccacgactatcagcaaccaacccctaaacaacgcggtatcgcctatatgcgcgacctgctttcgggcagaaagttaacaactttacccttaatggataagtacctggaagaatacctggttcaactcgcagcggagaccagcaatgactga

SEQ ID NO: 401536 - DNA, 225 bp, Salmonella enterica
atgaaaatcgaatatcaggactacggatcggttgcaaacattgtgatcaccagcactatttttgaattccggaagcataaccgattggtcgataccaccctgtttctggttcccggagtggtcagcgaacggcgcggtagcttcttcatgaagacgaatatctcaggcaaaacccgcgatgcactgcgggcttataaaactattcagagggaggccgcccaatga

SEQ ID NO: 401537 - DNA, 567 bp, Salmonella enterica
atgatcatccagtcgaagctgatccgcgccgctctggtatgcgctgcaaagaacgatgctcgctattacctgtgcgggattcacattactccaaagcacatcgaggcaactaacgggcatgtagcgttacgaatggagcatggcatccgtacaaagaaaaacatcatcgtccagtttgaaggtaacgtgccggccaaagcggaaactactgagttgatcttcagtaaggagccgatcgccattcatcgcgaccagttccagcgccgcctttccattaccggcattaagctgctggatggtcgattccctgatttggatcgcgtcattcccaaaaagctggacctcagtgtaaaccctgtgattcaggcgggctacctgagctatccggaaaagatgttcggtcgcgagcgcccatttgttccggtacagttgcggccttccggtgaaggcggtgcagttcgtattcagttcgattctgccattaaagccacttacggcaatccggagtttgtcgtgatgccctgccgtgatgacgcattcaaagtggtagaggagcatctgggatga

SEQ ID NO: 401538 - DNA, 843 bp, Salmonella enterica
atgaataacaaaaccgatctgaaaatcatcaacggcgaaccaatgatgggtagccgtagcattgccgatatgactggtaaagaccacggcagcgttatcgttcgcgatatcaaaaatatgcttaagcaactcaatatctatcctgcaacaccgcaagataatgaaaataaatcattttttattaaaatgaaaacatacaatggtcgtgaggttattgaggaaatcttccttgatcagggcctctccacaactctcgtaacgggctatagcgttcaagaacgttataaggttatcaagcgctggggcgaccttgaatccggaaaggtgcaaccgcgcattgcctttcagcctgtccaaccggagatcggaattaacccggattttgcagctctgacccgcacggtcgcagaagccaccgcagcaggggtaatgaaaagcatcctggaaaccaccggtattcaggccgtcgtacatatcaacgcgactgtttctgccctgccagcagccctgcctgaagacccggcgctacatcatatcggccatgtaacccaggaagatgctgaagaacctgagtatgtaccggttcataaagtttcctgggctaccggattatctgatccaacctgccgccggctggtcactttctccaaccttccgaactgtcatatcgatggcgttcgcgggctttgtgtacatcgcgaatttttcatggctgcggtcgaggtcctgatcaaagagtccactccaccagccaaaggccgcaaacgctggcaacatcctgagttcggcggatttgaactgcgtaaggatccggaggaaatttttggggagaacaaagcatga

SEQ ID NO: 401539 - DNA, 279 bp, Salmonella enterica
atgaaaaacgaacttatcactgtgtggtactgcgtcacattcatggtgactgagaacgcccagcgtcgcgaatattcgatatttgttggcagtagcagcgagatgggtgcggtagtttctgccacttccgggctctgcaaatggcacgctgaattcagcgaaccagcattcaaatctatccgtatcgcgacctatggcgaggctgaatcgcttgatgcggaactcgatgccattgccgaacgggaagagaaagaactggaggaagaaggcaatgaataa

SEQ ID NO: 401540 - DNA, 600 bp, Salmonella enterica
atgcgaaaaaaacaagatgaattagctgatttaagagcgacagtcgttcctcgctcagaccagataaattacgaagacgttcaaagcgaaaacattaccgccgtaattaaatcggttcgggcaggtaattcagaacaacccgtacttattgacctggaaggcttcgacggtcggccctacaaaccatctaaatcaatgcgcagggtcttaattggcggctggggtgcaaacgggcattcatgggtaggcaggtcgttaacgttatatggagatccctccgttaaatttggcggtgttgctgttggtggaatcaaaatttcagctatgagtgatattgaagccgacatgggattaatgcttaccgtttcacgcggtaaacgagtggagcatcacgtaaaaaaactggaagttcaatcgcgggcaacacctgattcagtacttaactggttcgctgaaaacgcactgaatatggatttgcaaaaacttgaatccgcatataccagggcaaaagctgcaattggtgaccatacagaacttatttctaagctcgatgaagtttacacaattcgccgcaatgaaattactgactcagacaaataa

SEQ ID NO: 401541 - DNA, 822 bp, Salmonella enterica
atgaaaccaggtatttattacgatatgtctaacgaagattatcatgcagatgaggctattggctcaacgtccgttaaagcaatcagcgtgagtccagcaaacctgttcttcaacaagttcactggaagtaaatcagcacacattggaagtgcgattcatgcagcattacttgaacctgaattattcaaaaatgaatacctgctgatgccggatgttatatcgcgcagttcgaaggaatataagtcagcagcggaatgtacaaatccagaatacattttagttggcaatgaagtagaaactgttaacaggatgtttgagtcttcacggctgaatgaagatttcatggactacatgaataccaaaggtaaatctgaggtgtccatgtttgcagagtgtccagaaacaggactgatactcaaatgccgcttcgacaaactatcagacacgttagcctaccctctcgacgtaaaaagttgcagggacgcatcagtgcgtggattcagtaatgcgtttggacagtttaaatatcacattcaggccgctttttacctttacgttctcaggctggcaactggcatcgaatacaaccagttcgccttctttgccatagagaacacaccgccataccggaactgcatgtactacatcggggaagaatcactggaacttggataccgtgaaatgtgggcggcgctggaaaaaataaaagagtgtatggccgatgactccattaaatatgaaggaattgtcctgccatcaaacgaaattaacgtcccggcctggttgctggataacgaatacgacaatgaggtaattctctaa

SEQ ID NO: 401542 - DNA, 285 bp, Salmonella enterica
atgatgaacgcctggcatgaatatgaccgcatcgaatcgcaattacaggatgcttaccagtcctatatacagaaagagaaatggattgatgaccgcgcacgggaaatcattgagttagcgccatctgagccactttattttgtgtcgggttccgtaaacaaaataatcagactggcagttcagtctgaaaagtgccgggaagcctacaacgactttattaccaccattgcatataaccagtcagaaaaagagtgggaagacaattacggatgggctgcacaatga

SEQ ID NO: 401543 - DNA, 288 bp, Salmonella enterica
atggctaatcaggataacgccaatgtgttttcggctgcgtcatctcacaaggtgccaaacgcaaagcaccttcgtaaccagtcgaaaatttacagcccggaagaattcctcgcgctgccaatggttcaggagtttatcaaaaacaacccggaccagtatttcgtcaatggagaaactggcgatccaatggtatcgcgtgaactggctgaactttattgccaggtgaataacagaaaaaaactcaagaagacgctgcgtcgcgtatctggggtgtcgaagggaaaatga

SEQ ID NO: 401544 - DNA, 423 bp, Salmonella enterica
atgatcgacaaccgcaccgccagcgccattgacctggcattacagaaatatgacacgcctgtcggtctacttttcgcagccgttcgccacgggcgagtaaagcgctgttttagccgggacactgcgatccgttatctggcgttctttatgactagcgaagcttttgaacgctctggcttcaaacagcgctacccggatgtacagatagtacaccccataaccccccaacttaattgttgggagcgtggcgaggcaacgcgcgaatatcacctagcccaccagcgctgtattcgccggctgcgtcgcatcctcgcccacaaaagagaaatgcagaagtggtgcgacaagtgggatgccatgcacgaccgctacgtgaaagagcagaaagaacttcaggccagcaaaccggagggcattcgctga

SEQ ID NO: 401545 - DNA, 183 bp, Salmonella enterica
atgactaatcccccccttattacgcacgaaaaagtgcaaatcgttatgacgattgaaaacggccaggtgattgacacccgcaaggttcgcgataacgaactgattgccagcatggatacctttttctggatggcgaaaaaagccgggtatcaggtaatcgcccctaatacggagaagcagtga

SEQ ID NO: 401546 - DNA, 348 bp, Salmonella enterica
atgaaatcattaactgaaatccggcgtgatcgcgtgatttatgcaaagctcgactcactgatgcgtcatgtaggtaaacctgttcaactggctaatttatcagacggttcacgcgtacccgttgaattatcaccggagatactagagaaagcgctaataaagcttttcgagtccgatgttcataaaaagaaaagtcctgaatgtgctgaaaaaatcataactgaccattactcggaatgcatgagtaatgcatacagcaaactgactgcgcatggcatgacattcatgaatgcagtaatagatgaactggcagaacgggcttttggaaaacaggagggaattaactga

SEQ ID NO: 401547 - DNA, 333 bp, Salmonella enterica
atgaaagaatcagaatttaaagaaatcagcgtcagtgaagatgtaaaaaaagaacttcacgaaatggcaaaccggattcatgaaatatgtaaagaaaataacatcccttatatattttatttcattgacgaaaaaagggaggcaggcgacggagtaataaccaacaaattcaggggttgctatgcggactatgattccggcgcatgggattcatcacttacggcggcaaatttccttgcacaagccgactacgtgccggaagaaataattatctcgctagccatcatggctgagcaacagaacaacccggcagaaagcgaccctgttcattaa

SEQ ID NO: 401548 - DNA, 240 bp, Salmonella enterica
atgaacatgaccagcaacgagctgaatgagttcaggaatgctgcggataaggcatatcaggttgagattttgtgtgagcttattgaatcttacccattgaaactggaagcctcagatattaacactttatgcagattacttaaaaaacttggtggtgatttgtatgtttatatgggtgaggagatctataaacaagaacaattacaggaagccgataagaatcagacagaccgtacatag

SEQ ID NO: 401549 - DNA, 207 bp, Salmonella enterica
atgagcgatcaaatcaggcaacttgaaaatgcacagaaactaaatgcagtaattaacgcccttcgcttctcatgggcagaactgcacggtgaagatattgaagcgctgatgcatgtggcgactgaatacagtgaatcaataaaatcctggctgacaaataaagcagaaggtgaaaatcatgaacatgaccagcaacgagctgaatga

SEQ ID NO: 401550 - DNA, 216 bp, Salmonella enterica
atgaccgaagaggaaaaaatcaaaattgtttttcctatcgcggccaggttgacggctgagtattcacaatcccctgagtataaggagaagaagaaaacaaaatctgcccttgttattagtcctgaatcttattttaaaggtgagtattctctttatatgaaactactcaacgagaaactcaaaagtctggataagaatcaaaaggaccagtcataa

SEQ ID NO: 401551 - DNA, 201 bp, Salmonella enterica
atgaacgaatacgaaatggataaaagaagagtgaaaatgctccgggttatacctgttctggataagcgcatttccgaaaccctggaagagaacggcatccctggtatttattcattggatgccgtaaggttattacttgctatctacagaaaaacgaatagcgttatgactggtccttttgattcttatccagacttttga

SEQ ID NO: 401552 - DNA, 246 bp, Salmonella enterica
atggataagtttgaatgcaaaccaccagtagcgaaccgaaactttgaggccaaaacagaattcccggcattcaaaggtctctctcttgaacctgagatcgccttttatcagatcgcggcattaattgaagcaggattaattatttcggttatcgacgaagaagataaatcagaccttagtgactgcgtttttattctggctaagcgatacgctgaagcagcccacgctaacgagatggaaaagtag

SEQ ID NO: 401553 - DNA, 279 bp, Salmonella enterica
gtgaaaaagcataaaggcagcaaagagcaggagaggtactacgcccggaagaaccgggagttggatcgctttgaagcgcataacggttccatcgtgtacgcggagaaggctgttaatgaatctgcggcaaaggagggtatcaatatcgccgaagggctagacagcactactgatgctgctattggcgagctaaaggaaattattcagcgtgcctggctgaaaggcctggataaaggccgcgaacagggcggccttgaaccgttattcagcgatatctga

SEQ ID NO: 401554 - DNA, 273 bp, Salmonella enterica
atgtctttaactcaagctaagtgccccatctgcaaagaacctgcgacatatacatccaggaacaccgatgacgatcgcttttatcgctgccctaattgcggcgactacgacatccccggtgactgcgcccgactgatggaaaaagggatcatgcatcctgatttgcaccaaagaatgcgtaccagaacaaaggggcaagttccgcatttcaaaattaatgagtacggcgctattgtccttaattttctcccagcatctgatgccaaccattga

SEQ ID NO: 401555 - DNA, 210 bp, Salmonella enterica
atgaaagcttattttgatgatgctgggaacctggttattgagacagaaaaccatgcagagaaaactgcgctgatgatgtggcgcgagataaacgaatcagatgatcgatctgtttatgagcttttctgtgaagaaaagttttcgctgaaggtcatcgacggtaacgcaaactgtaacgctgtgagcgttacaaaaagcgaatcggagtaa

SEQ ID NO: 401556 - DNA, 1011 bp, Salmonella enterica
atggcttacgagtggatcaaaattgaagttattacgcctgataagccggaaatctatcagttggcggagattctggctatcgatccagacgcggttttaggaaagttagttcgtatttgggcctgggcagaccaacaaaccatcgacggtaacgcaaactgtaacgctgtgagcgttacaaaaagcgctatcgatcgcatcggatttatgccgggttttgcagatgcactgatccaggtcggatggttaaggctagaaggttcgattctgatattcccgaacttcgacaggcataacgggaaatcatctaaaaaacggacacttgcaaaccgccgtgttacacaacatcgtgagaagaacaataaatgtaacgctgcgagcgttacacctgcgtttcaaaaagcgttaccagaagaagaagtagaagaagaattaaaagatcaaaacactttgtccgatttcggatcgaatcggaccgatgaagacaatccggcttcgccagaaaaaccacctgcacccgaaaaccctgaaccggagcaaaccgcagatcggggtagcggaaattcacccgaacctgagccagaccaggaggctgaacgtacaggcgattctgacccaccgggcaaacacggtgaccgcgataaaccatgcgaacccgacccggttgacctggctttcggggatattttctggaaggccgggttgtgcaaggtcggcaaggtcaaggcgtgctcagcgttccggtcgaaataccgggcatggaaaaaatcaacccacggatcaccgcctgagttcgcttcgatgctggcgagtgatatccggcaacggctaagcgccggggtgtttggcatagataaattacatccggccacgtacctgaaccaggagcgctggaacgacgaaatgccagccacgccagattcgcttccatccggtctggtagatctgtcgcatttgtccgatgagcaacggcgggagctggcgatgtatgagcttctggaggggcgatga

SEQ ID NO: 401557 - DNA, 1887 bp, Salmonella enterica
atgacgattcaggaattatcgaatttactgtggcaacaggtcgaacgggttgttgcccatctgctgccaaacggtcgccgtgtcaacggtgaatgggttgtcggcgatctggatggtaacaaggggcagtcgctgaaaattaatcttattggcaagcgtgtctggtgtgaattcaatggcgggcagggtggcgatttgttgaatttgtgggtagcggtgagaaatatccagcttcaccaggcgatgcaggaagcgagagagtttcttggtgtgaaaactgagtccagtgattttctgccaaaacccgaaaaaatttataaaaaaccagagcgtaagggtgtcaaagcgacgagggagtgcttctcatacctggcatcaagagggatctcgcatgagacggcgaaaatattcaaagtcactgatgcggtgatatttgaccatgacagcaagactgaaatgccggcgatcgcgtttccgtatctgcgggatggcgaactgaaacaggtcaaacgcctgggtacggagcggcataacggaaaaaaaatcatcatggcggaggcagactgcgaaccgtgcctgtttggctggcaggcgatgagtcccactgagcgtaacctggtggttatttgcgaaggtgagattgacgccatgaccatccaccagtacggactccctgcgctttcagtcccgtttggcggcggtacaggagcaaaacagcagtggatcgacacggaatacgagaacctttcccggttccaggagatattcctgtgcatggacatggacgaagccggacagtctgccgcacgtgaaatcgcaacacgtcttggttcgcatcgatgcagctttgtaaaactgccgttcaaggatgctaacgagtgcctgttacagggcgtaacggtcgaacaatttcgccagtgtattattgaggcggaaacgcttgacccggcagaactgaaacgcgctggtgaatttcggcaggaagtacacgacgcttttttctcgcccgctccaggaatgtttaccagtccgtggacgacgctggagcataatttcagattcagggagtatgaaataacactggttaacggtgtcaacggacacggaaaatctcagtttgtgggacatatcgcgctgtcggcaacttaccagggcatttccgcatgtattgcctcaatggagttacgccccgccatactgctgaaacgcattgtccgccagggggtgtgtaaaaacgatgctgagccacaagacgtggatctgatgatggatattctcaacgagagattgtggctgtttaacgtgacaggaaaagcgaaaggagagcgcattcttgccgtattcaaatacgcgcataagcgttatggggtgaaattatttgtggtcgattcgctgatgatgtgcggactcaatgaggacgactacaacggacagaaagccttcatggaagcactgtgtgaattcagatcaacttacccggtacatgtgctgctggtgacgcatccaagaaaaactgaaaacgaggaaaagccggtaggcaagatggatgttaaagggacaggggctatcaccgatctgacagataacctgattaccatctggcgtaataaagcacgtgaagctgctgttaataaggcgataacacttggcaaagggttactttcggaaaaagaacaaaaattactggatgcacctggcaccctgttactgctggataagcaacgtaatggcgagggatggcaggggaaaatcccgctcgtatttaatccgttaagcaaccagtttctcactaacgacaaaagcgcaccgtttaactatgcgcgtggaaaatcgcagaccgctgttatttctgagatgcgtcgggcgtcgggagaagtggcacaatga

SEQ ID NO: 401558 - DNA, 189 bp, Salmonella enterica
atgaagagtccccgacattctgaatatcatgcgttaacgacccttgcggtaaaaatggagcgtgacagggagtttaaagaggctggaaggctatgggagcaagcacgctttttggcgagaaagtcagtcaatatggaatattgcagtaacagggctgaattttgtaagaaaagcaagtttacaagatga

SEQ ID NO: 401559 - DNA, 534 bp, Salmonella enterica
atgaataagattacagtggcggttctggcgtgtctggcagttggcagtattggtgtggcgaatgccagtgacctgcatcataccgtatcggttggttatgctcagacccatgcaaaatattatggtgcgtctgaagaaatgccgggttttaacattaagtatcattgggaagatattgataccaatataggtattattggatcgtttgcttatacaaggaaaagtgaaagcgacggagatactcatggtaaactaacttattcttcatatacagtaggtccatcatatcgatttaataattacctcagcggatatgcccttgttgggttggggtatggtaaggtcgaggctcatgacgaagattcgtcattcagtatgagtaaaacttcatttgcgtatggtgctggcttacaaatcaacccagtagaaaatgttgcgattgatgcatcgtatgtttatacccagttctctgacggatatggcagtaatattgacgccggaacctggatgctgggcgtaggttatcggttctga

SEQ ID NO: 401560 - DNA, 129 bp, Salmonella enterica
atgtcagaaaaaatcacaaaactggcactggctctcggtgtgatcgtcggcatctcattttccgcaatgctggttgctattttcattgctacagggtggagagtgctgagcctttccggattgatatga

SEQ ID NO: 401561 - DNA, 465 bp, Salmonella enterica
atgaaccgcataacgactggcgcaatagtttcgttgctgattgtcgccgcagcgctggcatggaccgctgaccactaccacggtaacgccgtgaagtacaaagaccagcgcgacaccgttactcataagctggcgctggcgaacgcgacaattaccgacatgcagacacgccagcgtgacgttgctgcccttgatgccagatatacaaaggaattagctgatgcacagaccaggaatactgatttgcagcgccgccttgctgctggtggccgggtgcgcgtcaaaggacgttgtacagtgccagccagcgccacacccgccagcaccggcagcgtgggcgatgctgccaccgtcgaactctctccagattctggacagaacgttctcagtatcagatccggaattatcagcgaccaggcaaaactgaggtatctacagcagtacgtcagggaacagtgccaataa

SEQ ID NO: 401562 - DNA, 1764 bp, Salmonella enterica
gtgagtattttagtttcaggtatcctcaaatcgcccactggtgcggtcattgccggggcggagatcacactgacagcactgaccacctcgcctgatttactggctggcgtcagcgcttcggcggtcaccagtgataccgggtattacggtctgaacatgttacccggtgcgtattcactgactgttgccgtcaacgggaaaagtcaggtctatggcagctttcgcctcgatggcaccgaaaccacggtgacgcttaatatggtactgcgccgtaacctggtcgaagtcagtattcctgatgcgcttctggtggatttccggcagatacagaataacgttgccgatgaccttgaagccatgcgtcagcttgagttcagtgtatcaggcagtgcggataatgcagccagagcagccgcagacgcaaaggtcagcgcggaagcggcggcgcgttctgaggctaatgcggcagacagtgagaagagcgcggaacagtttgcacagaatttacaggatgcagtcaaagcagcggaccagtcttcagcgtcggctgcgttaagtgccacagaagcaggaaaagaggccgcagcggcgaaaaactcagcgcttgaagcggcaaaccatgaaaaggcagctaaagaggctgcgatcaacgctgcaactgaggcagcaaaaaaggttgcccccgcagcggcggagcaggtaagggcgaaggtggcagggtatgcagacagtgccagtaactcggccctgaatgcatcagacgcaaaagatgcggcagagatagccgccagtaatgccaccctgtcagaaaaaagtgctgcgggctcagcgctggcggccagaacaagtgaagccaatgcttcagactcggcaaccaaagcagaggccagcgagaaagcctccgcgttgcacgagcagtctggcgcaacccacgaaacaaacgcggggcaaagcgcagcagatgctgcattaagcgcaacaaaggccgctgattctgcattaaacgccgggaaatctgcaacagaagctgccggttatgcaactgatgcgcaaacacaggccgggaatgcagctaccagtgctgaggctgcaaaatcatcggagtctttcattgctgataatgcttcaaaggtagccgctttagtcggacaaacacaactgagtgaaaaaaatgcacttgatgctgcaagccgggcagacacaaaagcggaccttgcggcttcctcagaaaaaaatgccgcagacagtgccgccgccgtgcttgccagccagaatgcggcaaaagcgtctgaagacgcagcaaaggcaagtcaggttgccagcgccaccagtgctgactcggcagcgaaagacgcacaacgggcggaaatcgcgcgaaccgccgcagaaaccgcagccgccagtgttgatgtccatgaggcaccgtctgacggtatctgctatgtcagacagaacggcgcatgggtacaccagggggcatttgatgttggtatcagtgcgtcaacaggcgaaatcaattcaacaacccaccaactttttaccctcgacggtacacaggataacactgtgacgttcacgaaccttccgtcagggcgggcctccgttctggcgctggtatttaagggggcgggaggtgaaatcacatggccggataatctcacctggtcacagaacgaaattccgaaactggctgccacgcgtaccgttatcagtattctgtgggacggagaaacgctgaccggcactacggcgctgacggtgtaa

SEQ ID NO: 401563 - DNA, 255 bp, Salmonella enterica
atgttcatgttattgctcagtggtaaacgatatgacccggacacgttcattaacgtgagacaggtgtatggtgccacgttggtaagttgcggacagtcagttccggtaaaaagcattttcggcaacgcagtcagtggcggcaatactctcagtgtgccggttaaggccgttaatgtagatatcgtcagtggcggcaatactctcagtgtgccggtgaaagttatttatggttatttattagtaacggaggtgtga

SEQ ID NO: 401564 - DNA, 1095 bp, Salmonella enterica
atggtaaatacaaatcccctggatgtactccatataaaagacctgatcgggtttaaacagattacgccggggtcactgggtagcatcccggtactggcactaaacgattgcggtattactgcaatcagtggtatttcaggcaatgatacagaattcagcattggctctatggatgtgctgggcaacaccttttacggcctggtgggaaaaacagcaaaaggcgggagggtcagttttgttaatattatgctccagcagagcgtaactcagttaaagaataaagccatgcaaatagggttgcgtcttactcagagcgcagttccggtgaatcaacgcggcattgatatgctgaatgtcgtaaataactcatctcagggccgataccccatagccggtacactgactgagagcagcagcgtctattatgaaattgttatagatacccatatcagcaattatttttcagttcaggcgtttgtgaataagcagaagatatggagtagtgacatctacatgcaagaccattatccgctacttctgcgtacagtaacaaacagtggttccatgatggcagccgaagaaggctttaccttcatgattggcgatatgtacattgctgaactggactacaacagcgacggcactgttacgccgcagttgctgggtaatctcaccctggagccgttcaccgttgccagttacacaggcgacaaacatgccaacacgaaaaatcaggatatcgtgacggcgctgaacaccctcgatccgaataacgatctgggtgtgctggcgattaaacccgtggagcaggccgcgagcgtgatgtttaacgcgcctgatattgccggtaaatccatctatggcgcttccctgaatattgtctacaaagactccatcgccccgaataaccgcctgagctatcagataacggaaggcagtcaaagcctgccgactgaggtgatacctgaacgccatgccgatattatcggttacaccacgtacaccagactactgaccacgccagcaaacggcggggactggaatgcggagaacctgaaatttaagctggatatggttaacaagggagcaggctaa

SEQ ID NO: 401565 - DNA, 198 bp, Salmonella enterica
atgttgaagaagattccgttttttaagaaatcaggttatcgggctgaaatcttgccgctcctgattttcgactggctgatggttatgatgcaggctatctgcatcattgtattactggtcggtacgtttgatgttgtgttcaataatgtaggagagccacgagaaggctctctaggcactctcattagaaacgaataa

SEQ ID NO: 401566 - DNA, 1491 bp, Salmonella enterica
atgagtaaaaaaccgtggcgtgcaggaaaggatttagccgccgttgtcgaaaatatggagattgggaccggccagcgcggtgacggaaaagatgcgtttgtcacgcagcgccagcttgcagaactgaaactggcgagaatgaacgccggcggaggtgggagagtcagccttacatccggtcttgggccggggattttccctgcgatgccacagccggagcggcccacaaagccggagggttttgaggtgacgggcggttttggctatgtgctgcttgagtgggtgatgccgaaatataacggtcactccctcgctgaggtctggcggggtacggaagacaacctttctgacgctgttctggtgggcactacgccggggcaggtttacagcgatccggttgatccgggctggaaggggttttactggatacgatttgttaactcagcaggcgtgtctggtccgtataactcacctgatggcactccggcagaaacgcagatggatgtgcaggccgtgattgaccagatacacgatgaagcggctaaatccccgattgttaaggaactcaggaaagagatcggcgattcagaaaaggccgtgaatgaacatatcgagaaaatcagtgaagatggcggcaaagcgtttcaggcgatgtggggacagaaagccagtgccgcaggaataacagcaggtattggtattgttgccgggaaagacgcggcaggtggcccggtaagccaggtggcaatagcttcatcgcagttttttgtttttgacccgaacaaccctggtaatacggcgtacccgtttgcagtgtctggcggtaaagtggtgatccagaaagcggttgtttatgacgcagtggttcagactcttgcagcccagcgaattgtggccgatgaagttaaggttggcgcaacgctgacggcaccctatataagaagtggcaccatcagtaacggtaattttacggttgattccaacggtaatatgaatgccgttaatgcgaacctgaataacgttacatcacgtggaggggctttttacgatctgtatgcagtcagggggacaatgaataatgttcacatcctggagaactgtcagattgatggtcgcctgagtgctgctcagattgacggggatattgcgaagacgtacgttctggcgggtaacagtgtgtacataccgcctcaggtggtggcgatgaatcttgttgttcaggctactgaagcacagtcgcgcggcaaacacggcaaaatacactggaataatgcggatttttatttcgatggaggatatcaggacccgaaaacatcgtccacaatgagcaactttatagaaggaaagtatgaagtcaggggcgggggaggctctacatcaacctataatctgaatggtcggttagtgattaaagtgtactccctgccagcaggcgtgcctaaaacaataagctgtagcaggtttgcgatcgtctggatgtcgaaggcttga

SEQ ID NO: 401567 - DNA, 600 bp, Salmonella enterica
atgacagtgattaccgatgcaaaaaatgcacgatacggagataacggtattatcacggcggatgtgcgttttgatgatttaaccgcgccggacggtacgccgctgtatctgccttacacttcaacggcgcaagactcggcggattttggcccacagctttattccgatttgaaagccggtaaatatggtcccgtcaccccatttaccgtcacgtctgaaatgattcaggtagcaaaagacgataagcactacgaaattaatgcctggcgcagtatgcaggaaagcacaaattatatatttcagtttaacgagcacaactgggactatggcagggcgactcaggagagattaagcctttccgtacagacggcaaaagccaacaggttgccaactgactttatctggactgacgctgataatatcgatgttccgatgacgccgggagaactattgaacctcagtgacgctattgaccaggtgatgtttaccaaaggtcttcaaatccacatgcgccagcgccagatgaaggaagaagtggatgcgctgactgattaccaggcaattaaggactatgtagtggactggcctgaggggagttaa

SEQ ID NO: 401568 - DNA, 309 bp, Salmonella enterica
atgagagagaagatgatggttatccctgatgaggtgacggacgtgataaatacagcgcaggataacttgcgtattctttatgacgggctgacgcgctacaaagatatttgtgaaaaaagcggtgacgtgggcgtgctgaatggctggacaagttcgcttcgtctgtccaggaagctctttaacctgcttgaaagaacaagatggctcattgatgagcacgatattgattgcgcgccaaaaggtgaagggaaattattgtcttcaccagaagaaataaaagaacgaatagctgcctggcgagacgaataa

SEQ ID NO: 401569 - DNA, 261 bp, Salmonella enterica
atggcatatggattacttgatgcggcaaaccagacgcgcaaagaagcgttgcagggcctgggagaagccgatcgccttaataacgagcgcgagatgatgaataagcagatgaaagagcaggccaaaatgcagcacaagcagaatattggtacaggcgtggcaacgggggcaatgattggttctgttatccccggtgtgggtactgcgataggtgcagttggtggtgccattgttggtggtctgtttggctcattattctga

SEQ ID NO: 401570 - DNA, 1371 bp, Salmonella enterica
atggacgggtttgcacagggcttactggcgggattcagtactgttgataatgcgatgcagaatcgtaaggcgctgagtctgcgtgaagcggcactggcacagcagcagaaaaattccgatcgtaattttcaactggcgcaggatgagtttgggtatcgtaaagagacaagcgatcgtgactacaagcatactcttgaccgggataaaattgatgacgatttcaagaacagggagcttggacttaagcaacgagaggcaaattcacgtattggaattgccagtcagcaactggcgatgcagaagaaggaattcgatttcaggatgaacaatgcgaagtatttacaggatatgcaacagtgggaacctcataaccgtgttttggaaagtctgatttcacaagggaaagttcaggaggcaagagagtatgcgaaggccaataatatgccacttacaattccggttgtgaaaatgttgaatgataccggatatacacagagtattttgagtggagggcaaaagcttcacagcatcatgtcagcgccggatgcacacaaagacccgatggcgacgctgaacgcgataaacgataacagggatgagatagcgccattgcttcagaccgaagccgatcgtgcgattggtcagattgacccgacaaccgggcaaaaaatagtcgctgcgaagtttaaccacatagcgccagtgccggataaaaacgaccctgaacatcattctcctgatgaagttgctgtttttatcaaagtgaagtatgccaatggaaaggaagccatcaaacccattacggaaaatcgaagtgctaatccgaaagatccggtactgcgtgccaatatttatgggctgcttgatagctcaagttcccgtgtagttggtgcgcataaaataatgaactcgtcgcagagtggtaattatgatgacgctattaccagtgcctatcagccgcagggtttatcgctcgctgagcaacaaaaaattgcgggtaatacggcatcgagcgcagcaagagcgggtaacgatccgggactggcatacaatagtgtgatgggtgatgcttttggtcataaggaaaaccagcaaaaagcccggcagactcaggctataaacaccgccaaaacgtgggccggtgatgatccggttaaacaaaggtttgccagcgttatgttacgtaacaatccggcggtatttattcccggaaatgaggatgacctcagaaaaagttatcagaattttatcgatagaaatacaaatactcagaaggaactaaaggataccagcgcatcaggtaccgcaaactatctgagacaacgaagagaacagcagcaacagagtgattttatgtacggttccgactaa

SEQ ID NO: 401571 - DNA, 399 bp, Salmonella enterica
atgaaaactggagcaaccggtaaaaaatcactggatgatatagtcttaccgggatctgttgattcaattcctgatacaggttcacaaacagatacgcaggctcctaatggtgttgaaaaacaccctgctttaatcatgcaggatgtcgaagatcgcaaagctgaccgggctctccgggaaaaatttggggacaaggcttacaaggtagcaaagaaaagcctgtacgggtggagttggcttttagctggttatgctgcaatcaagttttactttgacgtgaatatattttcagacagcgtattgattgcaataacatccgccgtaacattgaatgtttttgctgcatttctaggagttatcagaggcttattccctgctaataaaaaagacaaagattaa

SEQ ID NO: 401572 - DNA, 468 bp, Salmonella enterica
atggcatatcctactgtagctgttgctaatgccttcattgaaagggcattaagcggacaaataccagaactaactcctatgaagcttcaaaaactgatgttttacgctcagtcgtggcatctgaagttgtatgacgaggcactgatagatgatttttttgctaaatggcaatatggccctgtaatcccaggtctttatcatgagataaaaagatatggtggttcttccattactcggccaatcagttcgcttattgacagaggttcagaaataaaagttgttacacctacagtcccggtaagtgatgagcgaacaaacatgctcctagataagattgtgaatgtatacggcccattaagagggactcaattgtcttatctcactcatctccctggcacagcatggtctgcaacaaagcaagacaacgcagtaattgataataacctcctcaaggaatgcattgagtaa

SEQ ID NO: 401573 - DNA, 1197 bp, Salmonella enterica
atgagtaacaagacaatcacggcggtagtccgtcgcaacggcgggaagtcgtgggccagcaagtgcttgcggacggcacggatgttgatcatcgcctgcgcgacggtgatcgcgcttccgggagtggcgcaagcacagctttggaaatcaaacggatgtcgtggcatcagtggggcaaacatccagttgatccctgctgtgaatttcacgcttggcacgttgcctccagtaggtaccgaaatctatagaaccgtgacctatgtgatcaactatgaatgcacttactataacgagtacgataaaccctatcctcctggcgtaacaattccccaactccaggcgctcggcggcttcgagatcctgaacagcgcgctggataaggctggactggagctgcaaatcgtcgtcaacggcgacgagggccacccatggaggccgaacgtattggcgagctccggtaatgtctcggaatttcgtgctatcggccccgcctaccaggggacttcgggtccaagaaccctcaccctcgttgcgaaattattggtcaagaacgatcatccccctgcggcccgttatcctgtccctgcgcaaaccatattcagggtcatgcccacggttggggctggtgccgacgtggcgcaagtgagcatcaccaataccgccacgcgcatgcagttcgtccctcagtgtatcggcgcagtcagcgtggacaatgtggtgcaattcaacagcgtctatgcgacggctggtcacatgggtaccctgccgcaggaacgccccttcaacgttaccgctcggatcaacccctcgtgcagtacaggtagcctcctgacccccaacgccacggatccgaataacccgtggaagcaattcctgatggtgctttcggcgcagttcgtcctgcaaggacccgggcgaatcgacagcgatggcacgtccatcatcctgagcaatgaggatggcgtggagaatgggctgaaaatgcagatccttgacaatcagaggcgccccgtcaagatccttcctgccttcgctcctcccttacgtgaggatgttggaaatttcggccagttggcgggcaacaatcctgccgcgatgatccacacctatacggcatcgctggcgtcggacgcaggcaaggagttgaagctcggcaagtactcgacgcaggtgctggtcaaagtgagttattactag

SEQ ID NO: 401574 - DNA, 864 bp, Salmonella enterica
atggacgatctgacttatgggctacggcaactttgcaggcgtaacaaggacggtagtcacacaactcaggctgaccggctgcgcgggctgaccttgatcgctcagcaactgagtgaggcgggttttcggcggatggggactggttctatcaagggcaggcatgtggaggccctagtggagcgctggcagtccgaagggctgtccgcaggtacgctaaaaaaccgtctggcgcatctgcgctggtgggccgagaaagtgggtaaggctggtgtcatcccggctgacaatacgcgtctgggtatccctgagcggcagcacgtgaccaatgctgacaaatcaaagacgctgggcgatgcgctcgacggcgtgcgcgatgcacatgtgcggatgagcctgcaattgcaacaagctttcgggctgcgtcgggaagagtctatcaagttccagcccggttatgctgaccggggcgaccatatcacgctcaaaggcagttggaccaagggcgggcgggagcgcagcgtaccgattaccacagccgaacagcggcgggtactcgacctggcgcaccaactggcaggagtgggatcattgatccctgcacacaagagctttattcagcaacgtcacacttacgacgggcagtgcaaggctgcggggctgagtaatatgcatggtttgcggcatcgttacgcgcaagaccgctatgaagagctgacaggttggaaagcaccggctgctggcggaccgtctgcacggtcactgacggccgcacagcgtgccatcgatgcgaaagcacggcagaaaatcagccgcgaactggggcatgaacgggcgcagattacggcggtttatttgggacgataa

SEQ ID NO: 401575 - DNA, 378 bp, Salmonella enterica
atgaatacagctaaatttggtttttctcatcctgtcctttttctgtttgatatgaataataaggaagttgttgttccagaaattacagaaaattttcaagtggttagtaactcgacctgcatcgcagttcgagttatttctgattcggatgatgaagttgaggtatcgctggagtcaccactccccgagccgataaagaaagaaaatatacggatcttcataggcgagattagctctccaagtggggtgatttctatatcaagcgcagagttggaagaagttttaagttttaagattggggcaaccacctcaaaaatccaagtttatgttgatgaacttgcacatcctgcaaaaatatggattgaggtggactcctag

SEQ ID NO: 401576 - DNA, 4671 bp, Salmonella enterica
atggacaacacgagcccccaggaaacggatcacgactcccaggtagctgtggcaccgctgaacaccattgacccgagcgacatcagtgccggggccgaagagttcgaccgctggctgcgcaagatcagcgacggcatgatcaccctggaacggatccgcacggtcgcgggttcgctgccggttgtcggcaacatcatcgccctggttgacaccattggggacatcatcgcgctggctcaggccaaagagcgcaacatactcgactgggtcagccttggtatcaatatgattggcgtaatccctgttcctccggggatgagcgcagcacgcatgagcttgcgtccgaccttgttcctggttcgccaggaactgaaaataagcggcaagtcgctgcttggcgatgcgctgatcaacgttctgatcgctcaccttaacgccagcatcgtcggtgaaatcgacgccttcgcccagggcgcgcagcgccagatcaatgacatcctgaaccgtgcgggagagtggggcgaaaaggccatcgtggacatttccaccggtctggaagcaattgccacaggcaatcttgatgcgtccgtcgactctaaagccgcggcagatcaatggcgcgttgccggcgaccagttgctgcatgaccccaaagccagtatcagcaactttctcggtgccctctggaacagctataaggcagtcggcaaggcggcggccaacgccgctgccagggaactgctcaatgagagccagcgtgacctggttctggcccataccaaagcgttgaaagatttcgccccggaactcaggagcaaggttgccagcctggccgatgaaaatgtggccagcagtatcggctacctgctctccgccctggtcactgcgctcgcgcggtggcgcgcacgcggggcggcagctcacagcgccaacgtcaaacccaataccaccagtcatggaggacacacgggcagtgaccatatgctggagacgcagcacaagcaatctccgtccaggcgagacgccaatgcggcaaaaaacggtgcctgcactggtacctgcggcagcatcagcttcgccatgggttcggaaacgctcagtcatactgactttatgctgtccggccctttccccatcgactggacacgcacctatcgttccagccttggggcctatgatgacggcgaactcggcgcgcgctggatcacgccctacaccacacgcttcgatattgcaggagaaggcctgcgctatcacggcgcagatggccgcagtctggaatatccgctgcccaaagtgggcgaagcacatgatgaccgtatcgagaacctcacgcttctccgtgtcggtaatgaattgctgatgctttgccggggttttgagcagcgggaaacctatgtgcgctacggccatcagttcctgttgcaacaagtcgaactgcgtggcggggctggtctgcaactgcgctatgaccaccgtgttggcgaacggctggtgctctccgacctgttcacctaccaggatgatcccagccagcagcacctgcacctgggcactgacatcgatgcccacggacgtatcatcggcctgtggctgatgggggaggaggaaccgctgcgccgcctgagcctgtaccggtacgacgacgcaggtgacctcactctgacccaggacgagaacgcgcaggtctggacctatcagtaccagcgccacctgatcacccgctataccgaccgtactggccgcggtatgaacctgcaatggcagggagacgggccggatgcccgcgccgtacgcgaatgggccgacgatggcagcttcgatacccgtctgcaatgggatccgaacatccgtctgacctacgtcaccgacgcgcacggacaggaaacctggcactactacgatatcctcggctacacctaccgcatcattcatcctgataaacgttccgaatggttcttccgcgatgcggccaggaacattgtgcgtcacgtccataccgatggcagcgaagaccgctacgcccacgatgagatcggcaacctgctcgaacacatccgcgccgacggcagcaccgtccattacgcctgggacagcaaaaaccagcttatcaagatcagcgacgccgaaggcgggctctggctacgcgactacgacacccgtggccgtctgaccgaaacctctgacccgttgggcaacaaaacggagtacgcctacaacctgacggggcagcccatcgccatcaccgacgcctctggcaggcagaagcagctcgaatacaacgccagcggccagcttacccgttatgtggattgctcgggcaaagccagcgcgtgggcttacgatgcgcgcggccggctcatccagttcactgataccgcaggacagatcacctgctatcgtcatgagacaggtaatctgagcacggtcatctacccggacggcagcgaagagaagttcgaacgggacgccgaaagtcgtctgcttggtcatgtggatgcgctgggccgggttactacctggtattactcggccgcagggttgttaaccaggcgtatgaacgctgctggccagtcactgcaataccagtgggacaagctgggtcggctcaccgccctgcgtaacgaaaacggccgcgatgcggagttcgtctacgaccccgtgggacgactgctggccgagacgggttttgatggtgctaccatccgctatcagtacgaggaggagactggtcgactggcgcgggccatcgatggcccgcgtatcactgcctacaccttcgatccgatgggacggttgactgaacgccgtgccgccctgaaaaccggcgacaccccgccgggtgagcaggactggcaggtggaaaccttcgcctacgaccttaacggcaatcttgcactggcccacaacgccgacagttttctgcaatggttccgcgacccggccaataacctgatacgcgaacaccagcactacacccgcctgggcaagccgctggtcgcggtgtggcagcatgagtacgacgccctcaaccaacgcatcgccaccgtgcgcccggacggtcaccgggtcaactggctgacttacggcagcggccacctgctggcgctgcaactggacagccgtgaactggtcggctacgagcgcgacgacctgcaccgcgaagtgacacgtcaacagggcaaccgcctgctgcatacgcagaaatgggacgcaatgggccgtctgtccgagcaagtgctggcccacgaagccaaacagggcaaacaagtcccgtcaggacaaacagcaggcggcgaccggctgctggtgcgcagttaccgctacgacgccagcggccagctcaccgacatcaacgacacgcgctgcgggcaactggcctaccgctacgacccggtgggacgtctgctcgaagcgcaaagccgcctgggtctggagaccttcgccttcgacccggccagcaacctcatcgacccgcaagagcagcaggaagctgaccgccagcatatgccgcgcatcagggtgctggacaatctgctcagacaatatgccggcacccactaccagtacgatgcgcgcggcaacctgacccggcgctggcacaacggtcaggaaagccgcttcacctgggatttgtttgaccggctcacccgctacgaagacgagcggctggccgtcgattacacctatgatgccctgggacggcggctgtccaaacacagccaggcgcactaccaggaacgaagagaggcggggccgcactggaaccgcactgaacggacgaagctcaaccgcgagttgcagtgcagcttcaccctgtatggctgggacggcgatatcctggcctgggaaagcaggattgccgacgaggatggcctgggcgcgcgcaccacccactatgtctacgaaccgggcagcttcatccctgtggcacaggcgttgcgggaagaaaccatcgaactcctcgaccagccggtgtatggtgactactaccgtcaggacgaagacccgctgtggagtccgccaccgccagcaccgactattgacagcctggcctggtatcaaaacgaccacctgggtacgccgcaggaactgacggacgagcggggagagattgcctggagtgcacaataccgcgcctggggcatagcgcaggaagcaattcgcaaagcctcaggcaaggcacagattactaaccccattcgtttccaggggcagtatcatgaccatgagacgggtctgcattacaaccgctatcgctattacgatccggaggtgggaaggtttgtcagcaaggacccgattgggtttgtgggtggactcaatctattccagtatgttccgaatccaacgggatggattgacccattaggtcttgcaagcgatgacaccctcaagccagggccgtttgcggtcgagtctatccctgcacatcgcggccgacctactgcaaatgaacagcgtcaggtaaacgcattaatggagaagtacggatgccatacatgcggtactaaagatgtgggaacaaagagcgggaacgcgatcgtagatcatcaaccagcacaggcactaggtgagccagagattttcctcccgcactgcaacaaatgtaaagcacggcaaggcggtcaggttctccaagaaaaattgcgtagagcgaggaagatatga

SEQ ID NO: 401577 - DNA, 1200 bp, Salmonella enterica
atggcactcaccgacaccgccctgaaggctctcaagcccagggacaaaacctacaccgtcagcgatgatcgcggcctgtatctggagatatttccaaccggggggatggtctggcgttaccgctaccgtctgaacggtaagtacgaaaagctcacgctgggcaagtaccccgcactcactctcaagaacgccaggctcatgcgtgatggcgcttcgcagatggcggcaattggcgagtcgcccgcacagaagaaacagcgcgccaagatggcagggccggaggacacgactctcaggcaatttgcggagcgttttttcaaggagatccaggagcgcgaccgtaaggacaacaccatgccgcgccgctatctggataaggacattctcccgcacatcggcaataaacccgtatgtgaactcacgacagaagacgtccggtcagttatctggcgcaagaaggagcagggctttgacgctgccgcaggtcaggtacgcggcctgcttaaacgcatgctggattactccgtgacatgcggactacgctctgccaatccggtcctggccctgcccatgcgacacgtttacaaagccgtttcacgtgaacgcgctttgtccaccgaggaaatcaagcaattcctgcaagccacccatttgtccaacatccgtcgccagttcaagattagcttgcacctcattttgatcacactggttcgcaaatccgagctgctgctggcaaagcgcaaagacctgcatcttgatgaagcggaatggcacattcctgtggaaaactcgaagaccgggaagccgcacattgtctatctgtcaacgcaggcggtactgctctttagggagttactgatacttgcgggaaacagtgaatgggttctacccggtcgcggttccctgacccggccatttgcgcataacgcgattaataaggcgctcaaggtcgcattgcagggacaggatattccagccttcaccatccatgacttgcggcgtacagcatctaccctgttgcacgaaaagggctgggcatcggatgttgtagagaaggcgctcaaccataccatcggcggtgtacgcggtgtttacaaccgggctgaatactcagaacaacgtaaggctatgctgcaaacctgggcggatgttattgacacactctcacctgcgtcaagccttgttgtctcacgggtttga

SEQ ID NO: 401578 - DNA, 678 bp, Salmonella enterica
atgtcccccaccattaatttgaaccgcaaaagccttgcgctattgatcgccatattttgctcaggctccgcacagggtgaagagtattattttgatcctgcgctacttcagggggccacttacggacaaaatattgcccgttttaatgaacagcaaatgccttccggagactatcttgccgacgtttacgttaatggcacgctggtaacatcgagcattaatattcgatttaatgctgtaaaagagggtcaacagactgaaccctgcctgcccttatcggtgatgaaagcggcacagataaaatcactccccgcgactgacgctgcgacccagtgtcgcccgctcagtgagtgggtacctcatgccggctggcaatttgatagcgccacgcttcgcctgttgctgacgattccgatgaccaaacttacgcacaaaccgcgtggttatatctcaccttcagagtgggatagcggcgcgctggcgctgtttttacgccataacacaaactggactcacaccgaaaataccgatagccattatcgctaccaatacttatggagcggtctaaacatgggcgttaacctcggactttggcaggtccgtcatcaaagtaatctgcgctatgccgatagcagccagagcggaaacgcctggcgctataatagcgttcgaacctag

SEQ ID NO: 401579 - DNA, 354 bp, Salmonella enterica; identical to SEQ ID NO: 106256

SEQ ID NO: 401580 - DNA, 279 bp, Salmonella enterica
atgccaggcaacagcaacgaagataacaacacgacatactgtgaaatgaacgtcagcaccgatgcactcgaagatctccactgtctgcttgacacatactcagacaacctgcaggagaaacttctgctgctggccgtggtgacgcactccctgatgaccgcacaggacattgagcattttgaatcactgcttccctgcgggcacagaatacagtttattaataccgaagggcacgatttacccttcgctcccggatatccccctcagtttctgcactga

SEQ ID NO: 401581 - DNA, 264 bp, Salmonella enterica
atgaatcaccgtaacaaaaagaacaaacaaaaaagcggcaccgtcacgtctgacgccattacggctgtcatccgcgccctggagcaccataccgacgccccggatgacgccctgatggttctggccgccacggcgcacatgctcatggcatcgctggacattgactgtatcgagtcccggacaacagacggtcaaggaataatgcttacgcgcatcgatgacgaagaggatgaacaggaaacgggccgttcacatctgcactga

SEQ ID NO: 401582 - DNA, 423 bp, Salmonella enterica
gtgtcccgtaatctgattattcccccgttgttactgagcgtactgttgctgcccatgctgtcccgggcggagatggtagtgtacaccgaccatgcccacccgccatccggggtgaccggtgatacccgcgtggtctggctggatgcgccggaacaattacagcagtcgctgtttggcagtctgacatcagaccccggagaagcagagcgccgggcgcagacggtgatccactctgccggctggcagcagaaacagactgaactggctcaggcttaccgggggctgctgcaggcgtggtctctgggactgaaaaaatacccggccgtggtgtctgacgaccagtacgtggtttacggcactgccgatgtggtggtggccgaagggctgttccacagtcacagaggacgggaggggcaacgatga

SEQ ID NO: 401583 - DNA, 351 bp, Salmonella enterica
atgcggacccattgcgcgccactggatagagtaatcgattcagaatcgggggttatgatgaaaaaagtgatgttgcctgcggatgcagagcagtacacagggctggtgaaaaatgaagttgttctgctgcgtacaaaaatgggtggagcctgtattacgctgaactatcgtacggccaggattaatgcacacccggtactggtgattgattttttcagcgaccgggggcggttgtacactctgcgttatgatttgccggcgggaactccacagcagagttcacgtcgtgtgtcacaggtgctttttctgacccgaaaagcgctggaagaaaccggacaatatgcagcctga

SEQ ID NO: 401584 - DNA, 585 bp, Salmonella enterica
atgatcaccaaagcgattattctcgtttcagttgccgttctggcactcactggatgcacgcaccatcatggtcatgagaaaaaccggttccacgaacaacaccctctgaaaccggatctgcttccagtcattgcttccctgcacgaccagttacatctctggcgggggacaccttaccattatgggggaacaactcataaaggcgtcgactgctcaggatttgtatggcgcacactcagggataagttccatataccacttgacagactcaccaccgaacaactcatccacatgggggaaaaaatcagtccggaaagtctgcagcccggcgaccttgtctttttcaggattaataacgagctacatgtgggcttctacgacacggaacatcattttattcacgcttcagtcagcaaaggagtaacccgctcatccatggattctccctactggaaaaaatcttttattgtggcccgtcgtctgccacgtatcagcaaaactttcagcctggcaggtaacaatatttccacttcagcatatgctgcccgcaaaacaaataccccgtctcagttttccatccagtga

SEQ ID NO: 401585 - DNA, 873 bp, Salmonella enterica
atgattatattactcccctttttttatctttttattggattgctactgggaaaaacatcatgggatataagatcttctgcatcctggtttttaacaaaaattatcatccctgttgtaattacattcaacatatccactcaattcagcaatatgggaagtataatttttataacggcaatagttatgttatctatgttaatgttagggaaatatattattaatgatccggtcatgctcctttgctttacttaccttaatattgggtggttagggttaccagtcgcaagttctctgtttggtaatgatgctgcacttatagttatcgccgcgtatgttggaagttccgttgtaggtaattcatttggggcaggtatattagccagtaataaaataaatctaatcaaattgttgcagactcctcctgttctggcattattcacaggcattttccttatacctttcagacaacaagtcactcattggttttatgatgtttatgaagtggctaaatttctgatgagttttttgggtatgggcgttctgggactatggctatcaaaaacaaattttaatttcagagattttcggccggaaattattttctttataaaaagagccgttgtgattttttttattattacactgttactatatgtagcacggttatttagtcaaacactcataaccaataatccagaaactctgtatttgttctgtttcctccctcctgccgctaatatcatagtactggaaactcattatatgggcacaggacgttcagcacgaactatatcatgcgggacctgcataagtattattgcaattactatttatagcgtggttatttttggcttacagaatatttatctttag

SEQ ID NO: 401586 - DNA, 354 bp, Salmonella enterica
atgctgacactgaacaggcaaacctggagcgcaacgccgcgtgaggtccaggctgagcgtgaccgcctgttgctgcgggatgaggtggtatgccagcagacccggaacgagcacctgagtgcgcaactgcagaagagacgggatgaagtgaaaaccttgcggaacagtgaaaaggtgctacaaaggggttgtaggcgggaagccgccaaaattttgcggtctacttttttagacaatttcctgttcaaccttgaagcggctctgggatgcgtgcgcgcatcggtaccaatcacgatttccagggctgatttagtgctgaatatcggtaagaaggcgacttataagctaccctga

SEQ ID NO: 401587 - DNA, 633 bp, Salmonella enterica
gtgaaaaaatataactctttaagtagaactatagttacgaaaaaagaatttgattatttgattaaaataaaagatatatctttattgatgattaattcatacgctgaaattacagataagcttagtgattcaaattctctttgtctgtttggacgacacgtctggaaaatggaaactgttcttttttcttttatttcaagaaagagaataaatgaagatttaatttcttcattgtcaaggctaaaagagtatacaaaaataaaaaaagaaaaggaacagtcttttgtgtgggaacaaatccagtaccttcatgacagggatattggtgaatggcctgattcaatacctgaagaaccagagtgtagtgaatggaccttttttataaataaaatagaatcatttataaatgtcaattatccaggccataaagaaatcagaagcagaaatttaggtaataatattatttttgtaattaacccgagaaaatattttgatgttgtggataatataattattcctaaaggcgttaaaacaagagagaaaatatgctccagggtaagggtatataatgacgatgagtctcttttagaattgggattctatgaagatgataataacagggaatggagatag

SEQ ID NO: 401588 - DNA, 624 bp, Salmonella enterica
atgaacgtttcctttttttttatgtatatagtttcagttatgctattattgttaacaccagggcctgttattgctcttgtaacaggaactgctgccgtacatggaaaacgtaaggctttaaagacagcatttggaacaaatgctgcatcattagtattgatttttcttgcttctcttatggttacaggtcttgtttctattgaaaactcatatttgtacattttaggaatgttaggctctgtttatataggttatgcatcttcctctaatttaattcatgctaattttagtgcgagtgataatgtaagtgtagtaaataataagaatagtggctttttaaaaggattttttactgctatatcaaaccctaaagatattttattttttgcttctttctttcctcagtttatatatataacaaataatgttaaattaagtcttgctgttttgtctgttacatggatatttttagatctttctgttttgtttttttatatattggttgtgagtaaatttatttccagtaaatatagcaaattgctggatattgcgtcatctttctttcttctttttatcgccatattaggattcgcctataatataaaggaattagtcaaaatctaa

SEQ ID NO: 401589 - DNA, 714 bp, Salmonella enterica
atgaagaaaaacaaattctctttagttatactcggctgtgcttttctcatttcatgtgcaaacaacccacctccccccaaaacgactatcgtggacacaaggacagtcaggactgccagtggttcaggtattacaatactgactcagaatgcaataaatggagatgtgattaaggatactgacaacagtttaaatatcgtatctaaagccgataacgcaaaagtcatcggactgaaaaccttacagttcgcagccatgctacttggtggtggcagtggaagtgttgatggctacagtaaggaacagttaaaagggactcatatagacagtgtgaaaaataaaacgatggagtatctgaaccccgaacttgatgccatacttgaaaaacttccggcaactgacaagagtgtaaaaataacagttgaaccatataaattcaaacttatctacgacggacttgataacaataattatgaattcatatattcaacaacaataagcgcaggtaatttctatcagttatgctcaggcaattatttaacatcatccgagcgaatccagccgattgacgtgtgggaacgaaacaattatgagttaacacaaatcatggttaaaaagataataaaaaattgctttgaagatattaaccatgcagaaaatctggcgaaactggcaagtgccatatcaggagaggacaaccagagggagaaataa

SEQ ID NO: 401590 - DNA, 339 bp, Salmonella enterica
gtgcttaacgcggatggttccgtttcattccatgcctgtctggatgccggtaccccggaggctccgatgagtatcatggaagcctggctcatcaaccgtcagggtcagaaaatcgcgcactgggatactgcaatgttatctgccattccggtcgctgattttaaaaatgactatgcctacaataaatttaagcctgccctgtacggtatcgatggcgaagtgggggcgaaggcaaccattacgctccctgccattgtatcaccacagcaggatgagctgccggtgacgctcaggctggtcaactcgcgcggaaccgaattcactataacgctgaagtaa

SEQ ID NO: 401591 - DNA, 666 bp, Salmonella enterica
atggttctgtcgctgggtctgctttctgtgagggttatccaggggtttatctactggggcggcgggtcaaggcgctttatctacggcacgcaaaaaatcaatccgcactccgcccactggatggcaaacaagtttcagacagccatgccgggcgcactgctcggactggagcatgtgatttcattcatgcttcagcacttctggttactgtacgccggtatcattattttcagcgctgctgagctttttgttggcgcatttctgatgactggtcttttcacccggatatcagcttttatctcaatgatattctcggttttgctaatgctgatgtttggctggcagggcgcaacctgtattgatgaatggacaatggccgcctgcaatctggcaatgggtgccacaattttcctctgcggctctccgcattatgccgtcgataatatcattctgagaaagcacccttcgtgggaaaaaagctggctgttccgctggtgtggtggctccctccccgctccgctgggtgatggcggttataaaaaactggcattgtggacactgctctttgtggtcgtctttgatatcggtacctaccaccattaccgtggttcggttgtcacctggttccattcaggtcccgtcagcccgactaaacatcatatttaa

SEQ ID NO: 401592 - DNA, 321 bp, Salmonella enterica
gtgaaaaagatactgtttgctttaacgggactgctgttcgcagccggggcacatgcggattatctgcgtgaccttcagacgacgatgcagaaaacgaacacggggacggaggcgttaatgctctggaatgtgtacagaatgacggacagcgaaggtacccgtgtgacctgcggttttgtgaagggattcgacaacaccggccactttgtgccctttctgtataaaaacggggcgctgtatatgaatgatggtacccgccctgaacgggggcaggacgtttacctggcgtccccctgcagccggacctcatcgccggtgtga

SEQ ID NO: 401593 - DNA, 573 bp, Salmonella enterica
gtggcaatcacaaccgaacaaatcatgaaagcggccgacgaactcgaccgggagggacaaaaccccaccctcgcccgcgttcgcaaaaaactcggcggcggcagcttcaccaccatcagcgaagtcatgattgaatggcgggcgcagaaaaaccgttccgcgcccgctcacgaaccggctccgcaggctgtcaccgacagactggccgctttcggggatgatatctgggcgctggcgctggaaattgctgacgcccgcttcacaggagaacgggaagcgctggaaaaatcacggcaggaaacagaagatgcaaggcttgaggccactgagctggccgaccagctgaccgctgaactcgcacaggtgcgagcgcatatcgtttccctggaggaacaactggtcgcagccgggaaggaggtcacatctgttgccggggagcgggatgaggcccgacaggaagtggccggtctgagggagcaactggcgtccgttcgcggcgagttacaggctgtcaccctctgtaatcaggaaatcatcgccgccataaaacaaaacaccacaccggctccgtga

SEQ ID NO: 401594 - DNA, 282 bp, Salmonella enterica
atgatttacgacgaaaaagcagaaaaactggaacaggccggattataccgtcgcgcagccgcccgctggctcacagttctggaccagtgccgcgatgtgtcttcccgtgaatggattgcccggcggcgcctgtggtgtattgaacaggctgaaaccccgcgtcccttaacggacacctttggcgatgtccgccaggccgccacggaactacagaaaagcatgggactctggcagcctgacggggatgctttcaggaaaatcaaaaagcattcatcacgttaa

SEQ ID NO: 401595 - DNA, 258 bp, Salmonella enterica
atggaaaggaagaccgcccgctgggtatatgaacaggccagaggcgtgacggcaaaagaagtggcgaaacgcttcaggttgaatgaacataccgcccggctggttatccacgccataatgcgccggacagacggaatacgctgtgcactgacgggaacctatgagaagacggcgaaggggcgacgacccgtgaaatatttttcggtaactcgtcttcctgatgaatatcagccccggggaaagggaatggataaatga

SEQ ID NO: 401596 - DNA, 906 bp, Salmonella enterica
atgtccagaagcgaaaaactgtttaaacgggatatggtgaaccaggcaaaaaaggtgggcggcgccttcaagacggtttcgaacaggatgaaaattgcagaacgggttgccttacgtctggcaggtttgaatattcagatccgttctgccgctcagttaaaagtccgccatattgaacagtatattgaaagccgtaagaatgaaggtatttcgcgcagaacattacagaacgaaatgtccgccgtccgtcagatattaaatcaggccggaaggactaaaatggcagatccgaatcacgaacggctgagtaataaggcgctcggaattgacggggccagtcgtgcgggaacaaaaacggccattacggacgagcgctattatgaggcgctcgcccgaatcagaattaaagacgaaggtgttgcggcagtgatgcaactttcccgttatctgggattaagaaacgaagaagctgtccagtcagtcaaatcactgaaaacctggaaacaggcagtactgagtaataaagaatgtgtacgcgttatttttggtaccaaaggtggacgaacccgtgatacccgtatagtcgatcgtgaaaaagttctttcagcaataaataatgcactggtgcatgccgaaaagaataacggaaaactgattgaccgtccttccctgaaacaggcaatggatcgttatattaatgtcatgcgacgtgatggtggtctgaaatacgaaaactcaaatcacgcattacgttatgcctacgctcaggatgcggagaaatattatatttcgaaaggtttttcacctgaagaagcatgtgcactgacgtccgttgatttaggtcatggtgacggacgtggcgattatattaagcgtgtttacagtcagaaaggagaagaagaatga

SEQ ID NO: 401597 - DNA, 990 bp, Salmonella enterica
atgacagtacgttatgattttcagaactgctttccgcgggggcataaatctgcaagactggcccggcaactgaatgctgcattaaattcagtcgggggaaacgaaagaacgcttgattcccgccggaatactctgatttatttttgttgttacgtccgggacacagatacaggtctgaggaatttcagacttgtaacggaggatataattgaaggttatatctgttacaggaaaaataaaggcatgtgcaaacgtacccgttgtaatgagatgtctgttctgagatgtatgatggactattttgagttatatgagctgaagaattccccgcgcctgacgaatacggctctggggctgaccggagaaaaccgggaagttaaaaaaagaccgatgccggatattatttaccggataacagaagacaggttgatggaagcggaagaatattttgtggtggcgattatgaaattatgcaggggactgggactacgtacggacgaggccattctgggtatggcctcgctggcaacctggctgcgaagagtgaatacgggcaagccgacagttcatattgtttttggaaacaggggaaacaactaccggcaggtacatattataaaccgggcacgggtccgtgaagcgctgatatttgcgacagatgtatgggagaatgagacaggtggtaagagcggactaaagaaacggccgtttcagaaactgaaggattattatcagcgtcatttcactcataacgtggctgtgaaagggtattcatcgcacagtatgcgttatgcatgggctgttgaggcatttgattactggacggcatccggtttaagtcgtaaggaagccctttatattataaaacagaacctgggttacggggatggtggtggacgtaacctgaaagcgctggtatcagaacgtatcgatcaacagtcgatcgacgactgcttaatcagcggtctgatagctgaagaaacgatgtga

SEQ ID NO: 401598 - DNA, 450 bp, Salmonella enterica
atgtcaacacacagcactatatcggtattgtgccgtgacggcctggtccgtacggtgtactgccatcaggatggctacctgaaacataacggcagaatactggctgagtattacaacagtcgggacgccgctgaggcgctggtagccccgggaaatatatggtacctccggccacgttgcgacaggccggaaggacactgcgaggaaaccccggcagatggcgttacgctctactttggtgactgctggtcgccgccacacattgacgcctgggtttatcatgcagcccgggtttatccggacacagacactgcgctggcagaagaggattacgcggatatcgggtatcactatgtctgtgacggaaactgctggtttgtccggaaccttaccgttcgtggatggaaataccggcctttacgtgatgcgcttcgtggctgtaaacgataa

SEQ ID NO: 401599 - DNA, 966 bp, Salmonella enterica
atggcagacaaaaaaacgataacgtttgaaatgttaatcgaagattattgtggttcccgtcaactcagggaagcaacaatctggagttattataaagtcaccacaacatttctgaattttgtgggtggtaatgtcaacccggaagatatttcccgggctgatgttcacctctggcggaagaaagtcctgaatgaacagaaactttcaacgtggacctggaactgtaaggtcaggcatatgcgcgctttatttaatcacggaataacaagtggcttattaaacctgacagaaaatccgtttattaaagcggtggtcagacaggaggggaaaagcaagaaaattttgtcaccgaaacagatgacctctctgtatatcgttatggagcgtcatgaaattatggagagccatggtttatggagggggcgttgtgcgctgatgccggttcgtttctggctgacggtactggatacactgcgttatacaggtatgcgccagaaccagttactgaatctgcggatgggggatatcctgagggatgaggagatgattgtactggaagccagatcggcaaagaatcacaatgaaaaccgggttccggtgacacctgcacttcgtgagaggttgtatccgctgatggatgagctggaattacggggaatgaaaaaagaagaccagttgttcaatgtttcgtggttttttgtgggtaaggatgccgccacaacccgtatggggatttactcaatccgagccttcttccgtcgtctttcccgggaatgtgggtttgccgtcagtccgcaccgcttccggcacacgatagcgacggaactgatgaaacagccggaacgtaatctcaagatagtgaaggatctgctggggcattcaagcattcataccacgctggagtatgtggcgggagacattgaagggatacgacaggccctgaaaaaatacagcggtaaaaaataa

SEQ ID NO: 401600 - DNA, 1131 bp, Salmonella enterica
gtgatattttatgcggcactgtgccattcgctgccggtgtttggtcatcttgaaggggaactggctgatggctctctctggtatccggggctgacggtaccgtcacagccgtaccggctacgtttctgtccggaccgggaggaaaaagcgcaggcaatagccacgttgctgggtatgcggctgttgccggatgaggttgtggtctggctgggcaggacgcctgcggcgctggatacgctgctgaatcagattcagggtgataacagaccgggctgtgtggtgtcacaaatcatcagcgaagcggtcgggtatgcaggtggtgtgccccggacacagtctcttcagccggtaacacagacaccaccggcacctgccacgctggtagtgccggcggcagggggagcacgggtggctaacccggtgattgccgggactgcggataccgcagtaaccctggggtcggctctgagtgagcctcctgctgccgtggtcacggcgacacctccggtctcccctggcggaggagagccagatgatcagggagatccggcggtcagtgatgtgatggcgctgatgggattcagtacatctcaggaaccagaagcagcagccgtaaacatgatggaatcagatggagtgacaaaaatctgtagtgatcctcagactgaagatctggtcgttgcagaagaaccagtgctctctttaactgagcacgctgttcagtcagagggtactgcggacgatgagaattacggtaaacaatttctctcctggttgctggaacagatagatactggagcgttaaccataaacaatcgggattcttcgctacatgttgtaagtggtttactttttgttccgacgccgggaatttttaaggattttctgcgtgaaaataaaatgcagccaaggctcagaaagaagattcaggatgattttgaatcgcaggggatacatttcgctgttaaaggaaaaggggtttacagtttccagaagtatcctgaagaaggaagaaccggggaggcagaagacctgttcgggtatctgataaggctgagagaaatagtaccgtcatttcctgtcagggaggacagcagatatgtttttatttcaaatagattcaatatgtaa

SEQ ID NO: 401601 - DNA, 165 bp, Salmonella enterica
atggcgtcgttccggggagatacggaggtggaggatatcatccatctgacagcgaaggactatggggatgtcgtgggacaggcggttgagtgggtgcgggaacagtttgacgaacccgcagcagtcgaccggcccattgcgcaattaccgcgtctggctgcataa

SEQ ID NO: 401602 - DNA, 324 bp, Salmonella enterica
atgatgaaaaatctcacgttaattcatgcctgttcactgggccccggtctgcaggggctggcttctgtccgggggaacgactttgtcggactcccactgttgatatttacgttcgtgttcatcccgccagttttcattggtattcattatccaatccttgtattgatgaaagtggttttactgacggaacgttctgaccggtgtcgccaaacattgcggtcagaaaatgttctgtcagtattcgggatggtacgtattgcagtggcgggtccgacacctttttcgccattctttgctgttttttacacaacccggaatgcatga

SEQ ID NO: 401603 - DNA, 213 bp, Salmonella enterica
atgagcaggttaaccgatgaagaaatccttgaggtgttaaataagcatgggcgttgcatgacatgcgtagtgacttattggctacgtgataaacattatccgctccttacatcgtacgttctgcggcgactaaagaaacttgaagcaactggtgcagtgaaacgcgtcaaaagtagctatgcggtgcaaatctgccgggaggttgttcaatga

SEQ ID NO: 401604 - DNA, 780 bp, Salmonella enterica
atgacaatcgacaaacaggcgctgcgacagacagcagaaagcgttgtctgccgttcttaccggccagttgttaatgaaatatccggacaaaaaatcgcggcttttatcgccgcatttaccccaaatgtcgcgctggagttactggatgaactggaagcaactgcacattccgcagcggtagaccatgaagcggcctgttctttggttgaagaaaacgaagaactgaaacgccggattgcggaactggagattgaatcgtcagtaaacgacgccgtgattattgaactcaaacaacagtattcccggctgcagaaagcgcgttacgacacaaaagcagtcagagggggcattgcagatcgccggatgactgattacagactggaagacgcacgtattaaggcgctgactgacatgatcccccttaatgaaccgccatcggtgatagtcgacataaagtccgcgctggttgaattacaggagcgccgcagtgctgaccgtgagtacgttggtaccgttgtggatgtcgggaattcccgggttgttgagtgggaacgcagtgtaccggaaggggcaaaactgtttgttacaccacagccagtccccgtcgttccggaggatatcggcggaatcatccgacgttttcagcatcagtgcgaccatctcagtgacgggtgccacattgatgaacactcatgcagggtcgaccgtcgtgacctgatggcagtgactgaataccttaaaaacctgttgcggaacttttcccgggagaacgaacaatga

SEQ ID NO: 401605 - DNA, 816 bp, Salmonella enterica
atgacagtactgaataaaacacgaaccggcagactggaagacagcaaacttgctgaaatgacgacgcctgatgcggatttcttcgtttcagggtcagacattgtggcgatggcccgcgaaatccgggaataccgccagttgatagctgagccgctggggtacagcgcagagcaacgagaagcgctgatgagaatggctgagcatctcatgcagcacgggagcactgactgcgatggtcaggaggagcttctgcgggaaatcggggcggtggcgttacgaaccctcacgaaccgtcaggcagccccgtcagtaccgaaagaagccgctggcgtcattgcgcgttttcagtatgcatctgaccgccatcgggggtgtctgtgtgaggtctttgacctggatgtaattcggcgggatttgttcattgcctcgggctacatgacggactgctacaacgcttcgctgtcttttgggcatcgtcctccccgggggacgccggttatgcctgccgcctggtacgacatcatgagtgaacgcctgcgccagattcatgtggaaggccggactccggaacatgatgaccggtattgctgtggggaactgcccggggccgcggcctgctatgccaggcacgtcagtacccgggaatatcaggcggagcatcaggatgacggcgtaccgtgtgactggccatgggctgaagagtggtggaaaccgaccagtccctacagggacctggaaaaagcgggtgccctgattctggcggagatggagcgcatcaaccgcgctgctgacatcagcgagggggatatgtcatga

SEQ ID NO: 401606 - DNA, 192 bp, Salmonella enterica
atgaggcttaccgtaaaacaattaattcgcgagcttcgcgcaatgccgcaggacgcgctggttgtgtggaaggaccatgataatgacgtctgtgattttaatgactttgtccgttgtgttgaagacgcctctgatgaactggcagacaacgacagaactgataatcagcccgttgtgaccatgagaggctaa

SEQ ID NO: 401607 - DNA, 222 bp, Salmonella enterica
atggacatattaaccaaagcagcacttatcacgttgtccatcattcctggagcgatggcaggtgaaccccctcactgcgtatcgggtactgacgattacggcatcaccacaacgcagtgtgataacggaacggtgacaatcactaacggaaaaaaaggaacagcaactgtttgtattgctgatgccggcttcaccatcgcctgtaaggagattcagttatga

SEQ ID NO: 401608 - DNA, 921 bp, Salmonella enterica
atgacagtcacattaagcagagaacgccttgagtggctttctgaaatttctggtcgtgatgactttgaagatattgatggcgatgaaattcgtgaaatggcccgttccgtactggcatcactgaatgctgagccagtgtgccggactgacgaacaggagctccgtgacgcagaaaaggacggttccggctgtctgtttacggttaaccccgttacgccgcacgctgaccctcgccgtgtcattctcctgtacaccgtcccgccagcatcagaacgcgaccgggtacgccgcgagcacgccgggtggtctgatgccacgttcggcaatgtcggtccggtcggttcgctgaaacacctttcaaaagaagcgcttgaggccgctgctgaacctggtgacctgagcgagtgggctgacatgcaattcctgctgtgggatgcgcaacgtcgtgccggtatcactgatgagcagattacccgggcgatggctgaaaagctggaggtgaacaaaacacgccagtggcctgagccgaaagacggcgagccacggctgcatatcaaagagcagccagcgccggtcgtgccggaagaggttatgcccggtggtttggcctgctcaatcgcgctgcctgtgtttgaaggcaacgatagagacaagattattgggtatcgatgctttatcagtggtgacactcgaatcgtagagagtcaggaacaagcatatgccgacggcagggctgtggtcaacgcctgccgcgctgtcatgcttcaggggaaaaccagcgctgtggagccagaagagtttcttatctgcgacctgtgtggtcatgacgcctggcatcagggtgacagaacttacgaatgcacagagggacatgtgtttggggttcgtgcgccaaagagcggggaggtgtcctgtggctaa

SEQ ID NO: 401609 - DNA, 2469 bp, Salmonella enterica
atgaataaaataaccctgattgcatttgctgttggtatagtatgtagcaaagtttgggcggaagaggtgacgctagcgatggtgacgccttccagtactttaccatcaattacattagcaaatggaaaaagtctgacatcatcgcgttacgcaggacttattacaccagagtcagataacatcagggtggtgtttgatggtgttaccgaggaagctttattagcaaaaatctcactggatactgtccagtttgaaaatgatgagcattttattacttttttaagaaatgtcggaataaaagaaaactatattgaaaaaattcttaatcaaaataaaacgggaggttttgtacattcaaattcatgtgaaggctcaagaagtgaatgtgtggttgtaagtaaaagtatagattttgttattgattactataataaaattgtccgcctttttgtagcaccagaactgcttaagcagtcatcaggggaaaaatcttaccttgttcttaatggtggtccgggactggtaaataaaatctctggttactattataattcattcggacgttatgagccatcatattacttcagggagtcggggatggctggttttggaacgggttttattcggtataatttttatcaatcggattatacaaataatctggatgatttttaccttaaccgttctcttggcgagggaagtaaaatactcattgggaaggcacagaataacgctaattttaacccatcaagtactcagtccttgttatccgatattcctgtgacaggtataagaattggcacagcagatgaacaggttgaccatagttatggaaagcagcttttccgtttttatagtcctgtgaacggtactgttgaagtccgcaggcggggggaaattatttatgccacttctgtccgggctggctatgatgagataaatatgggtaatctcccatccgggcaatacaatgccattgtacaggtaaagtcgtcttctggcgatattatatcctcgcagaatttgttggttaataatactggttcattcagcaatgatttttcatggcacctctttgcaggtcaaaatgacacaatttatagtgatataactgcaacaaaagagattataattgatgcaggattacagtttccaatcaaggatttttctgctttatattttggtgggggagtgattgggaacaagaaagttgtaagtacaggaattaatttaaaaaatgagttggcctcaatatcagggaaaactggatggggggataataaattccgccaatatgaattaaacggctatctggagaatctttctgtttcttacaagaaagtatatgcagggaaaaattggggggggagacgtacaaataaaggcagtaccatattttctgccagttataacatcactttattatctcaattatctgcaagtatgggatatatgtattcatcagcacttatgtccaggtattcgtcagataccgactacaaccagatgaaatattcaagagaaaattatcctgaattgacttatgtaaatgtaaacagaagttttttttcaagtatctattataactttaataatggaaatgctttgtatttaaacggcagtaaagaagttggaacaaaaaactatagtgtatctttcggattaagtattccgtttggtggacatttccgtttcaataatatctctaattacagtaacggtaaagtattaacaaacaatagcaatattgattacaatgataaaatttctgaatcatggtcacagacagtatcagcaggaacctatctttctgaaacgagttataatacgttgacttataacctttctcatgatagcgacgttttccggggctctgcttacctttatggtactgataaggggcagaaacaggcaactatttctataaatagttctcaagcattaaatagtggtgggttatatttcattccttcatcatggcaggattcagctttcataatacgtgggaaagagtctgaatatgatattgctgtaagaaatatgactgataactcaacccgatatatggataaaactaataatatcattacagtcccagcctataacaaaatcatggtaaaaagtgatacggatagttctaactttgttttttcagatcgtcagtctaaacaaactgatataatttctatggtgccgggttcatcttatgtggtaaataaaaaaacgatcaaaactaactcagtcatcatgacattgagagatgtgaatggtgaattttcagtttctgcatcatgtcaaagtgatagctgtatttctgtttccagactaagtaatggagtatttaaagtgaaatatactggaaataacttcattatccgttcagggaatacggagtgccatactggaaatatacaggatgaaaagtttataagcgtgaattgcggtaggaaccataagggggggcaatga

SEQ ID NO: 401610 - DNA, 489 bp, Salmonella enterica
atgaaaaacgttaagattctggcagtggccgctgccctgagcgcagtgatgaccggttctgcttttgctgacgctcattatcagattggacaggtactgcctattgtcacgaccttcaacacagtggctgcaagctatgccgaagtagtgtctaagcacgtagacgttttgagtggtaatgtgtcctctgatactgttctggcacaggttactcacctgcctgcaaattcaataatttatgacagcgcatctaccgaggatggccaactgaagtttagcgatgcaaatggacacagttttcaggcaattgcctatgaaaacggggatagactccatgttgtctcagctggcaaaaccttacccgttgctcaaaacgcttatatgactcaaccaggtgatgtcatcgacatttctcctgtatccaatctcacttctgctattgcgggtgtttatacatcaaatccgacggtttacacctgggtgcaataa

SEQ ID NO: 401611 - DNA, 156 bp, Salmonella enterica
atgatgattttgatgttttatgaatccacattcttaaaaaaatatgcatctgcctggtttatgtccgaaaactggatttgtattcgccggacagcaggtatcgactggtcagagacgtggttccagctatcttttgctcacattggtgaaagttaa

SEQ ID NO: 401612 - DNA, 225 bp, Salmonella enterica
atgttgtggagcattagagatgggcctcggttgattgataaaaagatctttcggggcttttctctgtctgccgttcgcgaatgctcccggcaaacagccaaaagcccccgccgcaagtctaacagaatccaccagcttttaaactccaccagtaaccgtccctgtgattacatgctcgccctgtgcctgctggtggactttttccacgcaatagcccaactgtag

SEQ ID NO: 401613 - DNA, 339 bp, Salmonella enterica
atgacaagactaaacaaaataaacctcctgattatggatatacacaagaccagaccgggaagacgtaaagaagataaaataatgtcacttattaattacgtggaacaaataaacgagaatgtaagggatatgcgcgaaaatcttaaacatccttacctgaatgaaaataaagtcattcacgcattacttgaaattcagatacaggcaaggctaatgcaggttggggaggctaagagctttcaggagttagccgtgtatctttttaatattcgcgtgctggtggaaaacacgatggattacttaaaggcacacagaagcgtaatgcttgctcaggaataa

SEQ ID NO: 401614 - DNA, 525 bp, Salmonella enterica
atgagtaaggctgaacataaaaagcgaatcagaaagctgatgatccacgccatcaatgaggcggtaaatatcggcgttattcctttgatgttcagacgtagaaaaatgacagcagagggatacgcaagaatcaccgtatgcggcaagcctgcgaccattaactggacagataccggacacaatgaactaaggtttagcgtctggtgggactacaggccggatttgctaccagggaaaaacggaggtgaatcaatagacctttcgttattacttcccgatgtgaatcgggatcgctttcggttcatagttggcgcgtgtgcaagtttctattttgactatctgcataagggcatattgtcagacagagggaaagagttttttgcggtttatgttcgcgagtctacggccagttatatagacgaactggaagatgtgaagcctttcggttattcaatatcagaactatcccggccactacaaagaatgatttcatcaccagcaggcggtaagtacggaaaatattaa

SEQ ID NO: 401615 - DNA, 492 bp, Salmonella enterica
atgaaaaagatgaccatggctctcgctgccgccacattgtccctcgccgcagcaagcgcacacgccgacgccaccattagcggcaccggtacctacacgacccaagcagaaccaaatgcctcgttcgtcctcagcgcgtcgtacaccgcgcgcagcggcgccgctgccccgaacgcggtgttctcgcaaaaactggccatggacaacaatgctgctcgcccgatcggttacttcaccatcaccgggctcaccgaagggtacacctacgcgataggtgaggtccacgcctccggtgctgacgcaagtggggttgatgttgcctgcttcaagtcagaccagggcgacgcgactaccacttgtgggtctaacgctacatttctaaacggagctacgtccaccgggaccgcctatgttcagatcgaccataaagcgggcacggctgcccagggtgtgacatttgtaaacgtaccggtgacggcttactctgcctga

SEQ ID NO: 401616 - DNA, 198 bp, Salmonella enterica
atgactgatttttttacgcatatgtatggtctgttacttaaaggtgatggaacggtacttattattttatatttgggtattctttgtttctggtggtacctgattgtttctgttctggctttagccagatttttttcttttgttgttcgcttgtgcaggaaagctgtcattaaatacaaaaataccaggattaattaa

SEQ ID NO: 401617 - DNA, 492 bp, Salmonella enterica
atgataaaaggttatttttcagtactgataaacgccggagaatatggactgtgctgtctggcatgggggctgaagtgggtcgttatccggccgctggcgacgataatgataatgacgttgctgttgaactggctgagtggaagcacgcccgggcagatgctggcgatggatattgagaaggctaaggcaggcgcgggcacaggggagttcatggtacgggaatgcccgcctccggtgcttcccccgcccccggagcttccctccgtggaagacctccgggaggacatctgcccggtggtggtgacggatgcggccgggtatgccggcaggattgaccgtaccctgagtggaaccctgataacactctggctgctgctggcgctgttgtttactgtcgttgcggtgctttgtggtgatatgccctgccggaggccccgtcggatttacggtagtgtcggtggaaaccggggaggtattcattccgggtattaa

SEQ ID NO: 401618 - DNA, 186 bp, Salmonella enterica
atgaatattattgatacatggcttaaatcattttctgcactgtctcctccggaaaaagtgggatggttttttgtttgtattattatgatgcttacgatttctcctgagataaagtttgttttttttaaactgtcgaatgttattcgggctgttattcggtttgtcaggggcagagtgatgaaataa

SEQ ID NO: 401619 - DNA, 168 bp, Salmonella enterica
atgaggataaccgatttttttatcgactggtttttaatggtgtttacgttaccagtgcctgttttttttgttatttgttttattattgcgctctttattcctgaaatagcattcattgctgataagatctccaggttcctgaaaagagttacacggcgacaggactga

SEQ ID NO: 401620 - DNA, 162 bp, Salmonella enterica
atgaatgatgtgatgagtgattttcaggcgctgctcattcgcgattttctggaagagaatattgagcagtttgctgagttctgcaaccgtgacgggcgggacggagagaacattatggctgaaatcttcacggtgctgggaatactgggcggtgatgagtaa

SEQ ID NO: 401621 - DNA, 222 bp, Salmonella enterica
atggtaaaaacgcatacgggaacggttgaagtgacgacggcgctgggaaaggtacagaaaaaggtgaggttttaccggtcagagaaggcgtgggtggtcaccgccggggaaacgtacagtccggagaccgggaaacgtaacggcggtacagtgagggccagcgtattgttactggacacgatcagggcattgcccggaaagggaaaatccggacagggatga

SEQ ID NO: 401622 - DNA, 291 bp, Salmonella enterica
atgagaaaaccattcatcatattcagcgatataaaaccactggaaattatcagaaacatcatccgtgaaacattactcgccaacgccatgctggttttaattgcatccgaaattatttacatcaaccgcaaccgtaacgactggccatacattatatatattatagcagaaccaatattagcgaccatcggtctgacaacaatagtatggatcgcatccattacaaataaatactttcaggagctcacagggaataaagactcattatccttcataatatttttctcctga

SEQ ID NO: 401623 - DNA, 468 bp, Salmonella enterica
atgaaacataaaatgacttttgcctctctggttctggcgtgcctgcttcagtctgcctgtagcagtgaccatactgaaaccccgtcgtcatacacgtacatctcactgggtgagttcccggccgaccgtgatgtcgcagagaatatccctgtggcaaaatatgatgaaatattcatgacgagaaaattgactacggcagacgggcaggctgtcagtgaggaaccacggcgggtggggcttcaggcagtggcgacgcctgtttttaatgcggacggtacttcaaaaatggtgctgaaaggaacattcagttgtattccggagccgtccccgtcgtcatcagaccctggccggacccgcagttatggcttcgcgctggagaaggatgcacatcccggtgacaggctggctgttcgcgtggaaggctgcacaaaagcgttaccggtgatgctggtcaaagagggccgctga

SEQ ID NO: 401624 - DNA, 1140 bp, Salmonella enterica
atgccgtcatccgttcgcgttaaaaagctttcactgttccgtgcgctggaccgttatctggacacggtttcggttcacaagcggggatatcagcaggaattctggcgcgtcagcgtgattaagcgtcatccggtcgcacagaagatgatggatgaagtgacgacggtggacatcgcatcctaccgggatgagcgtctgtcactggtgaacccccgcacgggaaagctgatatccggtaacacggtacgtctggagctcgccctgctgtcggcgctctataatctggcgaaggtggaatggggcacctgccggacaaaccccgtggaaatggtgcgcaagccaaagccgtcctccggacgtgaccgtcggctcacctcatcagaagagcgccggctgtcgcgttatttcctggcgcgtaacgcagagctttacaccatattccatctggctctggaaacaggcatgcggcagggggaaatattatccctgcaatgggagcatattgacctgcagcacggcgttgcacatttgccgctgaccaaaaatggcagcgccagagacatcccgctttcacgccgggcccggaatctgctgcacgaactgccggtgcagctctccggcgcggtgtttcactacaaatccaccgggttcaaatccgcctggcgggtggcgctgcagagcctgaagattgaggacctgcattttcacgacctgcgtcatgaagccatcagtcgcctgtttgaactgggtacgctgaatgtgatggaagttgccgcaatctccggtcataagtccctgaacatgctgaagcgctacacgcatctgcgggcgtaccagctggtcagcaaactcgatacccgccgccggcagtcgcagaagattgcgacgtattttgtgccgtatccggcagtgctggaagaggctgacgatggtttccgggtacatctgcacgattttgaagggatgagtgtcagcggtgatacgcgtgagtcagcaatggatacggcctcggtcgtgctgctgcggactctggcaatggcggcacagcgcggggagcgggttccccgtccgggagacctgccgttacatgccggggtgatgattaacccgctggcggggtctgcgccggtatttgtttaa

SEQ ID NO: 401625 - DNA, 171 bp, Salmonella enterica
atgaataatgatatgtcagtaatcgtatgtatgttatgtaagaaaacacctaaagtgatgagtcttatccaagagatcttggatatatttatcgcattaagaggtagcgctgtcgaagaaatcatgaatgataagaccttgttagatgatttaaatcgttatgtaaattag

SEQ ID NO: 401626 - DNA, 234 bp, Salmonella enterica
gtgcagtgcacgcttgatatccacggtgtgacagtctgccctggcgactgggtgtttggcgacgacaatggtgtgctggtgatacccggcgaacacctggaagaggtgatcctgcgtgcggaaaatgtcgaaaataccgagaggcagatcctcagtaccattgatgccggcacaccgctggacgttgcccgtcagcaactgggctatgatgttccctgggaaaataacgtatga

SEQ ID NO: 401627 - DNA, 165 bp, Salmonella enterica
atggcgtcgttccggggagacacggaggtggaggatattaaccacctgacggcgaaagactatggtgatgtggtggggcaggctgttgagtgggttcgtgagcagtttggcgagcccgccgcagtcgaccggcccgtcgcacagttaccacgtctggccgcataa

SEQ ID NO: 401628 - DNA, 324 bp, Salmonella enterica
atgaaaaagttaacagtttcgctgtgttgttctcccctgcttttattttcatgccttacctgtgccatggtgtcgcataatacagctgacatcatacgacaaaatacacagaacaccgctcctcacccgtccatatccgttgctgaaagtacgccgtaccttatgacactggatgataacgaccggggtgtcattcctgccgggaaaacactgataatgccggaaaataatgccagaaacattatcactcacatagtgaattacagcagtattaccgaggcccggaagataaaaacagcaggcgatacatttattcttgaataa

SEQ ID NO: 401629 - DNA, 276 bp, Salmonella enterica; identical to SEQ ID NO: 397159

SEQ ID NO: 401630 - DNA, 231 bp, Salmonella enterica
atgtcgatgtataagagtggtttcccgaatggtcgccctgcaggtaatatggcttcttcaaaacctaaaattgaggtgcaaggaaaagaagtaaatggagaaatattatattatttctattatgcaggaactaataatctttacgaaggtgatcctaaagcaccatataaagataagaccatagctaacatgaaatgccataacttaaacattcagctaagaaaagaatag

SEQ ID NO: 401631 - DNA, 882 bp, Salmonella enterica
atggagcttttgttcgtcaaatctgagtccacgttttcttacttcgaagccacatgccattatattgataagcatggcaagccgctggcgctgtacagtgataaagccggtgtttttcgcgtgaacaataagcacgccaccggtggcgaaggacatacccagtttgggcgggccatgcacgagctgaacatccagactatctgcgcggaaaccagtgaagctaaaggccgtgttgagcgggcgcatctgactttgcaggatcgcctggtcaaagagctgcggttacagagtatcaactcaatggaggctgcaaatgcctttgctgaagcctatatagctgactataaccgtcgttttggtaaagcgccccgatatgactttgacgtgcatcgtgcggttgaacatgacgaagatctggatcttattttcacggtacgggaacatcgcaaagtctcaaaatcgctgacgatacagtatgataaaatgctgtacctgattgaagacagcgagctgagccgtcgtgctattggtaaatacatcgacgtgtatcactaccctgatggtcgtaaagagctacgcctgaatggtgcagcacttccctactctacctatgaccggctgtcagaagtcgatcagggcgagattgtggataataaacgacttggtcgtactctggagtttatcaatctggtgcagagtaaacgggataacactcgctctaagtccgttccttctggtgatggcccttcccggcgacggcccagagaggaagggaaaaaatctcagcgttcattgaataacgacgacatgcccgaagcgcttaaacagctccagtcgcagtcagaggagatttttggcaaaagagccagaaccggacgataa

SEQ ID NO: 401632 - DNA, 1140 bp, Salmonella enterica
atgccgccatccgttcgtgtcaaaaaaatttcactgttccgggctctggaccgttatctggacacggtttcggttcacaaacgggggtatcagcaggaattctggcgcgtcagcgtaattaagcgtcatccggtcgcgcagaagatgatggatgaagtgacgacggtggacatcgcatcctaccgggatgagcgtctgtctcaggtgaatactcgaacgggaaagccgatatcgggtaatactgtgcgtctggaactggctttgctgtcggcgctctataatctggctaaggtggaatggggcacctgccggacaaaccccgtggaaatagtgcgcaagccaaaaccgtcccctggacgtgatcgacgactcacctcatccgaagagcgacgattgtcgaagtattttcaggtgcgtaacactgagctttacaccatattccatctggctctggaaacaggaatgcgacagggggagatattatctctgcaatgggagcacatagatctgcaacacggtgtagctcatttacctgtgacgaaaaatggcagtgtccgggatgttccgctctcccgtcgggccaggaatctgcttcacgaattgccggtgcagctctcggggactgtttttcactataaatccaccgggttcaaatcagcgtggcgagtcgcgctgcagaagcttaagattgaaaacctgcattttcacgacctgcgtcatgaagccatcagtcgcctgtttgaactgggtacgctgaatgtgatggaagttgccgcaatctccggtcataagtcccttaacatgcttaagcgctacacacatctgcgggcgtatcaactggtcagtaaactggatacccgccgccggcagtcgcagaagattgcgacgtattttgtgccgtatccggcgatactggaagaggctggcgatgttttccgggtgcatctgcacgattttgacgggataagtgtcagcggtgatacgcgtgagtcggcgatggatacggcttcggtggtgctattgcgaactcttgcaacggcagcacagcggggtgagcgggttccccgcccgggagacctgcccttaaatgccggggtgatgattaacccgctggcggggtctgtgctggtatgcgtttaa

SEQ ID NO: 401633 - DNA, 468 bp, Salmonella enterica
gtgatttttgtgctttttttgttactggcgttgttgttgtactgtccttgtttcacgttactgtccagtttcgggcgtgtgagcggattttcggtgttcacgctgcgacaccacgggcaatgttggcgggtgattcacctgtctgtgcgtgagcgggtgggcagaatgaatcgccgtcgcgtaaggttttatcaccaggcgtttgtacgggcgttgaatgaggcactacagacgggggagccagtagttttccgttcacacctgatgcgtccagcgcagatcagactggcctgtcagatactggtgccaacacgcagacgtcaccacattgtgacggtagccattccctcttatgagcgccggctgatgatgttgctgatacttcttcaggagtggcggcttatccaggtaccctcgcagggcgtgatggtggtggtcagttcagaaagaggaagggatattttgtga

SEQ ID NO: 401634 - DNA, 192 bp, Salmonella enterica
atggcagttgctgaagatctgatgacagaagcggcattggtcgatttttatccgagtatggtggagttcgggttaacggtaaaacaaagccgtcagccagaaattgatgacctgcatgctgataactggctggacaatttgctcgtcagtatgaatcttattcgttatgaactctataacgggatgcagtga

SEQ ID NO: 401635 - DNA, 249 bp, Salmonella enterica
atgtttagtcttattcagcgggggcaactgtacgcagatgataacggttggccggttactatttacgactgcaatgtctcccgggtggtgtgcagacgggaggatggcagattgcattcagtttccatccgtgagttcagccatcggtttgagcgtctggaacacaaggaataccggcaaataaaagccgaaatagagcaggaaaggcaccttaaaacattacgtgaactgcgtgtgaaatgtacatga

SEQ ID NO: 401636 - DNA, 897 bp, Salmonella enterica
atgaataatttgttaatggaaaatgttcccgcgcggcgacgtatgccatccctgccgtttctgaaatgggcggggggcaaacgtcgcagtcttgccacgctgctgcagcgactgccttccccggatgaggtggaatgtctggttgagccgtttgtgggtggcgccagtgtatttctggggacggattaccgccagtatctgctggcggatatcaatgctgacctgattgacgtgtatctgcacgtcagggatgaccctgcggggatggttaagcgcctggaaaagctgtttcttcatggtaacaatgaaactgcctaccaggaaaaccgtgacgaattcaatcgtattcagtcaagccctgagaaatcagcgttgtttatctatctgaaccagcactgtttcaatggtatctgcagatataacaaaaagggcatattcaatgtgccgtttggacggcgtaaatcggcctatataccggaaacggagatcattgcgtttgccaggaagacagagcggtgccatgtctcttttttccatgcaggatttgaagacactctgcagatgacgactgcgggtatgtttgagggaatgtcgtgcgcggtgtactgcgatccgccttatctgccggttagtcagacatcggggttcacggcgtacagcggggaagtgtttaccgtggcagatcatgagaggcttgcgatgcaactggcagaacttcatgcccggaagaagatgccgatggtgatatcggcgagtgacacgccattcagccacaggatttacgggcaggcggggtttcggttgtacgggcataaagtgtcaagaatggtatcggcgagcgccgcgtcgcggaaatctgcaggtgagctgacgggggtactgaaacgcggtcagtga

SEQ ID NO: 401637 - DNA, 162 bp, Salmonella enterica
atgaatgatgtgatgagtgattttcaggcactgctcattcgcgattttctggaggagaatctggagcagtttatggagtactgtaaccgggacgggcgcgacggagagggtattatggatgaaatccttctggttctgggagttctgggcggggatgagtaa

SEQ ID NO: 401638 - DNA, 600 bp, Salmonella enterica
atgaaacatttccccctgctgcctctgatgttcctgtttaccctgatctcaggctgtacacctgctgtcctgattacctccgcatccattgcgacccagactgcaacagacccacgttccaccgggagacaaattgatgacggcacgctgacactgcgcgtcagtcacgccatcagcagcgccgggttaccaccgcaggcccgtgtgacatccacagtataccagggtgatgtccttctcaccggagaagcccctgatgatgccacacggcaggctgcttcagagactgtcaactccgtaagtggtgtcaggcatatctggaacgaaattcgtaccggatctcccgtcagcaccggacaaaaagtgaacgacacctggctggcatcggatattcgtgcacggctactcctcaaccgggataccagactggctgatatcaaagtcgtcacagaaaacaacgaagtcttcctgatgggactggtcacgccggaggaaggacagcacgtgactgagctggtaagccgtataagctgcgtcactcacgtcaccacagcctgggtctttaaacgcataccagcacagaccccgccagcgggttaa

SEQ ID NO: 401639 - DNA, 1224 bp, Salmonella enterica
ttggatagcttcctcgatgaatcagaatgtgagccattaaagagacatagggatgtcattaaaaatatctatatacgctcagatgatacaaatctcagaaaaattaagcaaagtattttagattttggatacattgcaaattatatcgatgaagaacaacttaaaaatgacgagtattcatcgcttttaatacgcgttttctttgccttatcgttagaaattaaaagtggtgagttaagcgagaatgaattaagaaaaaatgaaccattcaaaaatgaaaaaaccaatagcgatggttctaataatgtattttataaatatgacattagctacagaaatttgtatgtaggtgatctatgggctgatattttgttcaagggtgatgcaagtaatttaaagtcagcaactgatgagcttgtatattttaaacaacaaaaaaacaatgaacatcccctctggttcaaattatggaattttagcacactgaatgaagaacagtttatttctcttaccaatcagctacttttggagttcgactctcttcaggaggaagagcatcaggtttacttacataaattagccttaatcatttacttctcaaaaaatgctctaattagtaaggaaatcgatgaaataaacaatacagtttatgaatacattaaaacctataaagacggttgggctattttggacaatcgctctattgaagatatagtatttggaaacaatactggctatagctactacaatgattcagatgaagactttagaaaactatttaatttactcaggtctgaacgcaaatctatctctgacaaattaaagcaccaagcagaaatcatcagagcaaatgaaatatttacatatctttcgcaagggaacaaggatgagctgatcaatattttatatactgaaaatcagtttaaaccatttttcaataaattaaatgctgcagacttagtgaagaccttattgcaatcaagtaattacataacgtcttactttaatcaccttataaaggaacgttatacttcgagagatactctcgatggtctgagagcatataaatatctaaaaattgaagaggggttttggattgatttacaaaataaaatctcgaaagaaacacctcgaatgccacccctaaaaaaacatttcatggaacagcttgatacaaccattaaggagataataacaatcctatcttcagtgccaaatatttaa

SEQ ID NO: 401640 - DNA, 450 bp, Salmonella enterica
atggaaaacaacaacgagcgaagctctatggaaatcttcgaaaaagatcaaaaaatcgcttttgttgattcgttcagcaatgctgctttgtcttacgaatacgaacaggcgggcttcaccatcaacttagtgaatcgcacggttcttctctttaaccataatataaagataaacgtaactgccaagcagttgcgtaaaaataatataaagaaaaacgtaatgtcttcgacattgcgtaaaaatatgaacagcacatttatatatccatatagcaacatcagggaaatcaactactcgctgcctgattctagatccgatgatgccgagatctgtattatgactgatgatgtattaaatccagtctggacgttcagggttccatctcacgcacattatatttgcgagcaatgggtggaagtatttaataaccatattttctttggcccataa

SEQ ID NO: 401641 - DNA, 579 bp, Salmonella enterica
atgccccatgagaaaaagcagtataaaaaatcatacaagcatacacttgttgagtatagtgaatccaccgaagagttaagcgagcaagatatagaaaatagtgatagtgccatacaaaatcatagtaatgctctcaaaaatcggcaagcaaaagctattttgttggatttttcacttgtctttattttagtgccttttattggtttcgcgctttatataattattaaatttatgaactcaacacagccacgcatgatttcgccaccggacaactatgttgacgtagggatctttttatttatgggaactgccatctggttactttataaaattagaggtaaatcatttaaaaatttgaatgatacaatcttatttactggaacagctattggctttgtattattttttcacaaagatgttccaattatagatcataacaatgccacatggatttttggtcaaatagttttagcgggttgttctgttggcaaagctcttattgcatttacagaatttattgtagaacgagttgatgaaacaaaaaaatcagtagaaaagaaaacttatcctcatccctaa

SEQ ID NO: 401642 - DNA, 342 bp, Salmonella enterica
atgtctgatgctttaaaggttatcaacaatattcgtactctccgtgctcaggctcgtgaactgacactcgatactctggaagagatgttcgaaaaactcactaagctggaagcattccgtcagaagttgctggaagatggcatagacccggcagagttgctttcaactgttagcccatcttcttccaagactggagcgaaacgcaccccacgtccagctaagtataaatacatcgataccgatggttctgaaaagacatggacaggtcagggccgaactcctcgtgttatcgcttctgcactcgaaagcggtaagacgctggaagatttcgagatcaaataa

SEQ ID NO: 401643 - DNA, 480 bp, Salmonella enterica
atgaacaagagcataagcggactcgcgatgatcctgataacctccggaactgcacacgcagccgcggtacccactgcagaccacgatacagcttacagcaaacccggagctgtgctcgaaataagcggcaatgtgatcactacggtgcaagaaccgcccgtcgccatcgtctttacaccgcacacactgctaagcaaatcaacaaaacaaatcgccgctcacgctgtaatctcggggacccatagggactccgagtatgtcctagggacactgaccgccaccggggacgatgctgcagggtacaaaacggacaccacgagttcgtggatcacaacctcacttagtcaggcaacgaccggcagctaccgagcaatacaatcggacgggagcgcattctacgtgactatagtgcacgaagcggctgtaccaaatcccgggcgcacactccttaacctgcctttaacagagtacacgaaataa

SEQ ID NO: 401644 - DNA, 849 bp, Salmonella enterica
gtgaatgctctctgcgccggcgcggatagtctgcaccatttcactcagggaatcacgcatcgaggaaagaccggccgtcaggtcatccagctcattaccctttataagcggaatgtccacggacaaatccccgccggcaatggtctgctggtatcccgccagcctgcggatactgccggtgatgtactgccggcaccacagcgccgaagccactgtcagcagaacaaagacaacagcaaacactgccgccagaataatcccctgacgaacaagggttgtggacatggccagggaaggctcaatgacggttcggttgatggcatcttcagtactgttcactgcatccagaaaatcagccgtcgggtttccctgacgggcgatttcgtcaagtccatcaaaatcaccggcaatcaacaaacggatattgtttatctgggaatcacgggcagatgtatagaacgctttcatctgttcagcatggcggatatcatcctggctgccactacgcgagagggtatagtatttgtccatatcacggtcagcaccttcataccgtttaagcatactatccagttcttccctgtaatggttgccctgtttcccctgcgccgtcagaacagccatcttccagacgtccccccgggtatcagaaataataacgtaagcttcatccagcaggccaatccgggaccgctcaaaagcgatttgttgcaggtttttatcatagtccagatacgacacaacactccacgaaccggagataatctgaataatcgtcagcagcgccaagacaacgacaagaccgtaagagattttaattcgtcggaacataatggcagttctccctga

SEQ ID NO: 401645 - DNA, 171 bp, Salmonella enterica
atgttacgggccagtgaagggcaggcccgcctgacgcccggagggcgtgtgaaagaacgaattctggtctggatactgatgctggcctgcttctgtggcgggctggcgattcattatatggtgtatctggacgtccgccgggagttcctccttttttacagcgatgattaa

SEQ ID NO: 401646 - DNA, 339 bp, Salmonella enterica
atgaaactgatttcccgtctgcgtggcgcggccacgttctgcaccggccttttctggtccctggccgtccgggcggaattgcccaaaatcaccggaggcgcaaactccgccgacgtgatggaggatgtcaagaaaatgagccacaacggagtgtcctacgcggcgctggttatctgcgccctcgttttcatcgtggtggttatctcctgtgtcggtacctatcacaagattggggacggcaaggccagctggtttgactttggcgtccgggtggtagtgggcgccattatgattgtgctggtcatctaccttctcaacaaggccgtgacggttatctga

SEQ ID NO: 401647 - DNA, 504 bp, Salmonella enterica
atgacgaacctcagccgccactaccgcaaatccacgcccctgttcgcctgccctggccgcctcaacggcagcattcagtgccagaatattcgtctggaaagcaataccatcaatcaggccgatgatgtcgttgattttttgcgagctttcactgatctgtaccattgtctccaccattctttgcgttatggccgcactgttctgcgcgatggtgacattcccggccgcaatttccgcaacctgacggatgttatcagtattattctgcaccgtggtcgtcagttgctccatactggccgccgtctcctccagagcagcggcctgctgactggtccgggaagacagatcagtattgccgtcggcaatatcctgaatgccaacgtgaatactctctgcaccttcccggatggtgatcaccatttcactcagggaatcacgcatcgaggaaaggccagctgtcaggtcatccagctcattacccttcacaaacggaatgttcactga

SEQ ID NO: 401648 - DNA, 288 bp, Salmonella enterica; identical to SEQ ID NO: 391847

SEQ ID NO: 401649 - DNA, 384 bp, Salmonella enterica
atgacggataatgaatggatccgcagcctgaataacaagagtatttacacaggtggacagttaaaaggtggttcactccggtctgacagtgacctctctgcggggggagtgttaaagctcgatcagacgagttatgcaggcacctggtgtccgcaaaacggggcgataagccacgacagctccggggggatactttcgtgtcagtccggtaggtggcaaaaagaccccgcggttttagagcagcaggaatgtttcgagaccggaaatcacaacggacgcgacttccaggagcatcgttgtcccacggggtggtatacagctggtcttcgcttctcgggccatagacgtggggaatcaacatatatgattacatgctgtcattag

SEQ ID NO: 401650 - DNA, 906 bp, Salmonella enterica
atgaatatttacaagcttgatgtcacagaaaggaactggtggtctcttgacaaagatgattatgaacaacgtactgccagacgtcctccatggtacaaagtcagtgacgagggaaaacctctttactttgctgtctgccctgcatgcaacaaccccatacagataataggcctttataaactgccatccaacatcacagccccttatgcaaaacattatagtaagccagtacccagagtgggtatctacgaccgggatgcctacaattggtgtccttattctgaacattcaaaaaaaaatagtggtacaaaaaataaaagatcagaaggtctgttgagtcgtcagattctggagttactgatacttcactttgataaaatcatctggatgctaagtaatgtgaccgggatatcaattaatgaaaaacttgcagttgaaatgttacatcaatatcgtaaagaagaaggatggttgtattcacacgctacactaatgaatgtcccatggatatttgcttacatgactgatcatcaggacattttatttaaaaagataaaagaccctgtattacatcagagtataaccagtaaatctgatggtaaaattcataccaaagaaaatggagtgataattaaaaacccgtcatgtgtaaattatcttgatattggcatatattacacaaaccacagtatttctttatcaggtcatgaattgacggaaaaaatggacatggtgattaacattaaagactcagtatcccccccaggagagatattcagaaagaccatcactttcgactttgaatactttaataaaatcataaactttcctgactggaaaagatcaccctggcatgaaacactgctgaatcatgccagagaaatactggggaaatacatctgttag

SEQ ID NO: 401651 - DNA, 237 bp, Salmonella enterica
atggcacaacaaaaaaaacagacagaacataacattgcaactccagaaggggtggtaaaaccctgtccggagttgcaacaaatgcattttgttctgcaggataactatcatgtctttctgctttcccttgaggatatattactttgtctgagggaagcagaaaaacatggagaagttccccatataaatgacgtgtggtgggggacgctccagagcgcattcccccgccttcgctaa

SEQ ID NO: 401652 - DNA, 1017 bp, Salmonella enterica
atgaatgataatgaggatacgggaaaaaacacctcccccgaaacagggagtgagggacgcggcaatgacaatacccggcttcgcagtggcgcattacgatcatcgctgacaatagaacttcatacccgctatgccatccagttatggcaggggcgtgaagggcacgaaaagcaacgaggggaaaagaaaaacaggaaacgaaatcataagtggcgcattatcgggatgccgttttttctgcatcttgttaccgttattaatgaggcgtcccgcagggacgatccttttgcggacgaaagaatgctggttctggaaaatcttttcgccagaggggatgcgctggtgaagtccatggttgaagagcttgatggtatactgcacaaccttccgcgacaaatatcattatcttcagtatgttctgtgtctcccgtgaatatcggtgttttcagcagtacgccagtgggttatcgctgtgtatggctgttggttggttttgatcaactggccatgcaggcaagtcaggcatggcattacgggttaatctctcatacgcagcgggaaaaatatctgaatgcagcaggtgcagcggtcaggcgggtattcggggtggcgcttggcttccggaaaacgggggttacccgtctggatatcgtgaataacacgccactggctcaggaggccggcaggctgatggggaaggtcagtgaggatgttctgtgggggcgtaagcgttcctcctggtctccgccggtcagcagacgcagtattgatgcgctgaacagggggtattttgcagatgaggatccgccagagagccatattgtttttgaggaaccgccggaaggacgtattaccgcaacaggagcggaagatactgaatacggggatgtaccggcacagtcgcagacgcagacagaagaagccaccgcgccggaggcgaacgaactgacggatgacatcgatactgatatggatgatttatccacgttgttgcccctgcctccggagccggagtaa

SEQ ID NO: 401653 - DNA, 690 bp, Salmonella enterica
atgaaccaaccacaggactttacagctcttcttaacagcttaactcctcaagagcagcaaatgcttttcacgcaacttcgcggaagaattcccatccatcctcttgaacagcaatggaatattacagcagaattcattttagaagccattgcgcgaagccaagatatcacgaaacgaggcgtaagaggaatcattgcagagctatgtttcgatacatatatcataggtgcaatgaaacataagggctggatacagcatcaactttttggagatttaccctatgatgcactgatttctcatcctcatgtcggggaaataaaaatacaaactaaaaaccaacgacttgaacgtggagtcccaaaatacgcaaatggaccaatgataaaattcaatccatatgtcgaaggttggtatgtttgcgaaacacagaaaacgaggacaggaaaaaatgcggaagggttagatacgaggccatatagatttggtgagtttgatatactatcagtttgcctccatccgtcatcgggtgattggacacgattcatgttttgccctgcatatacactaatgccaagagcgacaaatcctgaactaattgctgttttacaaccagtaccacctacacgacaaggaaattggactgataatcttgaggaagcgattgaatggcatttgaaccgtaatcgttaa

SEQ ID NO: 401654 - DNA, 633 bp, Salmonella enterica
atgccggtaagaagtaaggcagccatggctgcagccagcgccaccgcggtactggtattgctggttccgctgctgacgggcggcatacgggcgcaggcggcagaaaacgttccgtcgtccgcgccggcggagaccgccgccccggtcacagaagagacggtgcagccggaaggcttcgtgccgcaggtacaggccccggtgacagactctgtcccgccggtcgcaccgccgggcagtatcacgctggggatgctggagcatattcagcagaagaatctgctgctggcggcacaggtgcagactgcgcaactgaagcgccagctggaagaagcgggcagtgatgcgcccgccgtatccagcccggtatcaccgggcgagccctcttccccggtaatggtacaaccgggcagcgtttccccgtcacgggggcaggggacgggcgcggtccgcccgcaggtgctggaaatcagcggaaagggcagcgcgctgtatgccgtactgcagatgccggacggctcccggccggaggtgaccgccggcagcagggtgaccatcgggaaggccacgctgacggttagccgggtctcactgagcggcgtcacgttcagcgacggctctgcgctgccgttctga

SEQ ID NO: 401655 - DNA, 330 bp, Salmonella enterica
atgcaggccgtccgccgtcggcgtgtggctgtagcgggcgccagacagcccgaccgggtccttcagggccatccccggctcgtccggtgtggtctgccggtcctgtgtctgccggcagttctgcagcaccgggcgggacacaaaccgcgtggacgcccgggcattttcgttcagcggccgcatcatcgccgtctgaacggcactctggccacggcggcgctcatcaatcaggatctccgtttcgcgggtctccgggttgtggtacagcagaaccccgctgtcctcatcctgaaactgatttcccctgttcataatgtgtttactccctga

SEQ ID NO: 401656 - DNA, 699 bp, Salmonella enterica
atggcaaatcgcggcattctgacggtatcagccctgttgctgaccggaatggaggtattctccgggtcagctgtcgcagctaccgtcgccgggccggtacaacggttacccgcttacagcccagtgcctgaaggctatcgccgggtggcggaagaatacggcgtaccggctgaagcgctgtattcggtatcactcgctgagtcctcccggcggctgccccagggggagcgcccgtggccctggacgctgaacgtggcggggaagggctaccgctacgccacgcgggaggaggcatatcaggcgctgctgggttttatgcgccaccacccgctgcggcgcattgatgtgggaatagcccaggtgaatctggggtggaacggggcatttttccacagctaccgtgaagcgctggagccgtacaccaacctgcgggctgccgcgcaaatactgcgtcactgctatgagatgaaccccggcagctggctgcaggcggcggggtgttatcaccatcctgccggcggaaaacctgcccgtacctaccgggctattgtgcagcggaaactggcaacgctggacgcggccgcttctgatccacttacgtcatctcatttttcttatccggtcccgaccgtagcattgtcggcaaccaaagaaacggcgctgctgtgggctgagccacagataccgggaggacagtaa

SEQ ID NO: 401657 - DNA, 291 bp, Salmonella enterica
gtgctgcaggtggaagacagtttttctgcacaggctgcgggtacagcagccatttccggcagtgccgtcctcagcgaagagctgaaatcgctggtcagcctggcggtctcatccgggattgatgaggggctggcgcgggggctgcaggaagccctgaaggtggcgttgaccgccctgcgccagaacgcggcgacacggacaaaccagagtgggagtcaggtaaatcataacgccggtcattctgacaacagcaacagcaacagcaacagcggaggtgggcatggccggtga

SEQ ID NO: 401658 - DNA, 555 bp, Salmonella enterica
ttgcacattcaacgtatccagacccagagtctgagagttgatctgcttcagatcgatatcgatggtttcaccgtcattggcaccaacctggatggtcagggtgttatcctgcgccagaactttcacgccgttgaactgagtctgaccggatacacggtcgatttcgttcaaacgctgggtgatttcagcctggatagagtcgaggtcagactgggagttggtgctgttagcagactgaaccgccagttcacgcacacgctgcaggttgttgttgatttcgttcagcgcgccttcagtggtctgcgcaatagaaataccgtcgttagcgttacgggaagcctgagtcaggcctttgatgttcgcagtgaaacggttagcaatcgcctgacctgccgcatcgtctttcgcgctgttgatacgcagaccagaagacagacgctcgatagcggtgcccagtgcggactgggatttgttcaggttattctgggtcagcagcgacagactgttagtgttgattacttgtgccataaaattttccttttggaaggtttttga

SEQ ID NO: 401659 - DNA, 669 bp, Salmonella enterica
gtgtttaacaggacagccccgtatgaaaaccgctggcaggtgttcagtgattttgcgcatatggcggcggccgcgttgtataacgttttccaccatgacccgacggttgaggcggattatctgcgcagggtcaaacgttattcgaaagaggatgcaatccggatgtcccggctgctggctgtggtcacggacgggctggaattcagtccgacggatttcctgggccagttgatgatgacgctggagctgggaaaccagtatctgggacagtacttcacgccctggagcgtgagctgcatgatggccagaatcaacatggcggacagactgccggaactggaggatggcagcagggagtatattacagtctgcgacccggcctgcggcgcgggaggcatgattgtggcgacagcggaagccatgctggaagcgggttataacccccagaagcagatgcttgctttctgcacggatattgatccgctggcggcgatgctgtgctacatccagctgacgctgatgcatattcctgcggtggtttcaatcggtaacagtctgacgatggaaattacgcgggagatggcgacgccagcataccggctgggtctctgggatctgaagctgcaccgccagcagtctgaacatgaacgcaggcaacaggcggcgtga

SEQ ID NO: 401660 - DNA, 762 bp, Salmonella enterica
atgcgcttcctgctcgatgaggtgacggagcagaacccgcaacagcgggagaaatgccgccatgccgagcagatcctgacactgtggatccgcggcctggatgcgctggcgcagacaatgaacgagatggcgcttctgccccggacggtgtcagagttcagcgggcgggtggatcggttattacccggtgaaccacaggcgctgctgtccctgccggatgaggcatttttgcgcctgactgcacaggggcatctgatgtccggtgagcagatgagccggcagaatctggaggcaaccctgccgtactgggaccgtttcgtgaccctgatatcagcccgtcttgccgcagcgtgtgactactgcctgctgcaactgagcagactgtaccggaatctgaacacggaaccccggcaattaaggtgctttacgctgccttttggccggctggagctgcatatgcagccgcgggatatgagcggttgtgaacacattctggagtatgacgatgcttcgatcgcggattacctggaggaagtgatggccggcagactgacgccagttcgcatggaggccagagtgatttaccgcaatgacgctgaagtgtgtgttttccggagaaatgcagacgttatcgatgtaagccatccgcacgtcagtgactggcgggagccggtcacggaagcgctcgactggatacgacgtgaacgtacatcgctggttcagacggtaacgcgcaggccggtactgaaactggcggcctga

SEQ ID NO: 401661 - DNA, 639 bp, Salmonella enterica
atgaatttgctccccgctctgtcggcggcacaccaccccggcctggctcagcgccgccgacagccggtcacaggtctggcgaagctggaccaccggcgggtacgtttcccgctgccgcgggttcacgtagcggtataccaccatccgtatctgtcgtatctggccgcgccagctgaccccggtcactacttcatcctgaaacaaccctgccggacggctgatgacctgcaggtggcgttctgtctccgcaagccatgcttccgtaaacgcgctgccctgtgcggccgggctgacatagcccctgatgtggtccatctccgccgtcaggtcggtctcatcctggcagaagaactgcaccacccactggtgactgctgcgctcttccgggccgttctgcagcgccacttccgcgatgtcgcggatttcttccagacgttctgcagaacggccgtccgtctgcgccgggctcaggctgaacaccgcgccgaccgacaccccgtcatcaagcagcaggcactcatcctccggcagatattccacccacggcagaaaatcaataaacgacggaccgtgtgcataaatttttgcctcgtcgcgacgggtcagttttccctcacgcttcagcggctcacgccctga

SEQ ID NO: 401662 - DNA, 615 bp, Salmonella enterica
atggccccgatatcctgtggcatgacgcccactttgataaccccgtattctcccctgtactcccggagtacacgcggttcgaagttacagttttccacaaatcggctcagttgccggaagcagcgttccgttgtctcccgcaactggcgtcccagccaggcctcaaaccgctgccagtatttctccgtggcattaaaggtcttctgcggtattcgctggttttccggcaaatctgtctgcccggtcaggcgaagatactcctcctcgctgcactgctgcagcggccggatatcagcgctcagcaactggtcggtctgtccgctgctgtgggggtgtaccctcggcagcagctcactgctgttacgttcacgggccagtgtatccagcccagttatccagagcgtcagtacctgccggcagcgggtaaccgtcgcctcatcactttccagtgaacccagcatggtttccatcaccgccagcattttttcacgtttaaacagcataaaggtgttaacgtggtcagatgcaacgccccggaactgccagctgaaatcctcatcgtccagcgccagaccgtatgccgcttctgcctgctgctgtatataccagtcataa

SEQ ID NO: 401663 - DNA, 447 bp, Salmonella enterica
gtggcggggaagggttaccgctacgccacgcgggaggaggcatatcaggcgctgctgggttttatgcgccaccacccgctgcggcgcattgatgtgggaatagcccaggtgaatctggggtggaacggggcatttttccacagctaccgtgaagcgctggagccgtacaccaacctgcgggctgccgcgcaaatactgcgtcactgctatgagatgaatcctggcagctggctgcaggcggcggggtgttatcaccatcctgccggcggaaaacctgcacgtacctaccgggctattgtgcagcggaaactggcaacgctggacgcggccgcttctgatccacttacgtcatctcatttttcttatccggtcccgaccgtagcattgtcggcaaccaaagaaacggcgctgctgtgggctgagccacagataccgggaggacagtaa

SEQ ID NO: 401664 - DNA, 615 bp, Salmonella enterica
atgtcccaccgtcgccaccgtgcggccattcagtaccaccgccttccggcagtactcacagccttccggatggcggaagtacaaatcctccggacagcacagcccgggctcgctgcagtatttctccagatatatgcgctgatcttcgctcagttccgctttcttctgcgcccacggtaccttacagtgcgggcacagcgtctttaccagccgctggctgataagccccaccatcagctgcgcatccagaatcagcgcagcttcaacgcccatggttatcatgcgttccgggatcgacagcgcactgttggtgtgcagcgtgctcatcaccaggtgacccgtctgggcggcgaagatacctgccagtatcgatatcaggtcccgaagctcacccggcatgatcgcatccgggtcaaggcgcagtgcgctggaaatggcgcgctcccaggcccgtctgacctccgcctcatccgccttgtcgcagataatcggcgtctgaatggcaccggcaatacgcccttccggcggatcttccaccgtcagcagacgtttaaggaacccggtccgctccagccagatacggctgaagctcctcagcgtggtggattttcctga

SEQ ID NO: 401665 - DNA, 372 bp, Salmonella enterica
atgagtccttacctgacaccgggttgccaggattttctgaataaggatgtgaagctgcgccgcacgcatgatgagctgaaagacagggttcgcatggtgtatgaaattccgatgcagggctataacagcaacagcgtgagggaaaacagccgggacagctgggtggtgaacctggacctggtggcggatgaatactatcacgcagtgctggtcaaacgcgccctgacccgttatccgctgcgggtggtgaaatgggagggcgacccggaaagaaacccgttcgggctggcgctggactgttatgccggtactccgcagcgcctgcaggtctccgggctcagtgagctggacaatacggggaggaatgaatga

SEQ ID NO: 401666 - DNA, 345 bp, Salmonella enterica
atgaccgtgctgcggccacgaacggtgtatgccgggcgctggctactggcagatgacccgcagttctgcgggcgcgccattgtggtgaaacagggggagaaccttcgccccggtgtcgagctgctgtatttcggtgaggaaagcgccgacccgtatttcggggagcgttactttatggaccacggcgaggccacccggtcggcggagcagatgctgctgcgttttctgggagggcgttaccgtcgtcgtcacccgcggacatcatccccggcagtgacgctgccggccgtggtgaacggggtgaatgacggtcatgcgtccggtcccgggagggaggcggcgtga

SEQ ID NO: 401667 - DNA, 522 bp, Salmonella enterica
atgacgcgagataatccacccacctgtactgcgaatatcgcctcctgccgtcaccgggccattactcaccacgctgacgtcaaagttaccgtatctcccgttcaccacacctgtactgttaaggttgttacctcccatatctatcgaggtgtgcattttattcagttccggacgaccattaacctgaaagcggtacagcctgtcgctatcttcacgtgctcccgtcattgtttccgggttcagcagaacagcgatatgaccgttaccgccgctggttccaaaacccgccagtggcactgcccagctgttcatggcgcctgtcgccgtccggccgtcacggatataccccccgagtcccgaactgatatccagagatatctggcgcagcgccttataaggcagtggctgcccgcccatggtgataaccagcccctgcagtacctccgcatgctgagcattccgtatcagcagcgctttaagctgctgcccgttgctgttggtctcccggaatcccgccggtaa

SEQ ID NO: 401668 - DNA, 399 bp, Salmonella enterica
gtggtgccggcagccgccttccattccggaccggacggctgcgccttcaccggggtgccgatcagtttcggggccggagtggataacgcaggtccgggggatggtgctgtcggggcgaccggggatgctgacgccgttgatacggccggtgtggtggcggtggttttgccggtcaggttcttcccgctgaaggggttacgcccggttgcagccactacaggcgtgcctgccgcgggtactttcgcggaggtattcaccgtggatgaggcagtgtttttcactgtcgcagaggacgccggaagcggggacgagactggaggggttttcactgtgccattgctccctgaaccggaagccgtgagtaccggcaccgccggaagaggatgtgtctcactctga

SEQ ID NO: 401669 - DNA, 180 bp, Salmonella enterica
atgacccgcacgccgcagcggcgggtgataagcccgctgatttcaggcaacgtcaggccgtcacgactgccgatggtgatattgcaggcgggcagccccgccttctgcggggacggtgtggcctgcacgatgggcttcaggttcacccacggtttgtccgtccagaccagcgggtcctga

SEQ ID NO: 401670 - DNA, 978 bp, Salmonella enterica
atgaattcaacatctgcaattgactcagcactggaagcattttctgtaagtaactcggtaaatgggaataagggacctattgcagctctgttggttattaaccgacatgcacttgagaagcaaaaggccggaaccctagaatggcctttaaatagtgatgactggaagactggcaaacaaggccaggtaaaagggttagggggtccggcaacgcaaaaagtgttggctgatcatgggattgaaagaatattagccagcgaaggtggtcgtactagtcgtggtagtatgcaactcatgctgggatacattgagttgttaaataattatcaccaaatcaacggttctatagatctatttcggtgtgaatgcttctggattaataaggccaaagagtattttgaaagacgcccatttgttttaagcatcgatccccaatggggagttcgtcgagctattcgccatttgctgactcaagcgcaaaatagacaaaatgaaggtgctggcaccagatttgtaggtacactgatgcagcatatggttggagccaaattggatgtactccttggagaagggaaagttacccatcatcattcgaatcagaatgattcaggctccagtcgcagtggtgattttgactatgaagacatggtgttacatgttaccaacctaccaacagaagcattgttgagcaagtgtatcgcaaatctggaagggggttataagccactcgtaattacgtcgtctaagggcgcatttgtattagaaacattactcgagaatttttgtaatggcgtatacgatggtcgtgtagatatcctggagtttgaacagtttatagcatcaaacgtcattgaactcggaaggtttaatgccgctggtcgtaaagcctcactcagtaaaattattgaggcttacaaccgtatcattgaaacagtggaatatgatctcagcatgaagatcgagttaggggaaaagtag

SEQ ID NO: 401671 - DNA, 1389 bp, Salmonella enterica
ttggcgccaaatttaggatactttatgaacacctcaacaaactatcgtaccagtctccgtcttacaaacgagcaatacaatgaaatatctcgtttatgccaacttgatggcggaaagatcaagatgagtgcatggattactgaggccattaacgaaaagattcaacgtgatatggaaaacgcgaaagctattccagaccagatgaatcaatccggtccctctttttacgagttttttgccgggggtggcatggctcgggctggtttgggtgaacattggaattgcctctttgctaatgattttagcccaatgaaaggacatgcttacaggaacaactggcatggtgggttagatttattagttgaagatataaataagattaccagcaaacaacttcctgaccaggctgaccttgtatgggcctctttcccttgccaggacctctctctcgcaggcggatataaaggtattggtggcgaagatgacgtgactcaaacccgttcaggaacattctggcctttctggcgactcatgcgaagtctaatgacagaaaatcgagcacctcgaataattgtgcttgaaaatgtctatggtgttttgacgtcaaataagggaaaggatttcgcctcaataggtactgttttatctgatgctggttatcgctttggggcgatgatgattgatgctgtccatttcgtcccccagtcacgccctcgagttttcattgtggccgttcatccgacagtagaattatcacaacaactcgtatctcaaacgccagtaactccatggcatccagaacggatggttacggctttcaacggactatcagcgaaagctcaggaattatggttatggtggaatttacccctaccagataagcggttaatcacatttactgacataatcgatgaagagcctgtaggggtaaaatgggattctcctgagaaaaccaagcttttactgtcaatgatgactgaagcaaatctcagtaaagttaaagctgctatgaagtcaggacagcgcatagttggcggtctttataagcgcacccgcaaagatgataacggtgtaaaagcgcaacgagcagaagtccgattcgatggtattgccggatgtttacgtacacctgcgggcggttctagccgccagagcatcttggtcgtagagggggatcaggttcgctcacgcctcctctccccgagagaggcggctcgcttgatggggttgcctgatacctacaagctcccggataactataacgatgcttatcatattgctggagatggcgttgttgtgcctgttgttagccatctttctagattcatctttgaacctatcctttcagagtcgtacaatgctgtattgactcagaaaaaggttgcgtaa

SEQ ID NO: 401672 - DNA, 309 bp, Salmonella enterica
gtgtccccgtgttttggcgtacggctggttcaggagggcaaccgcctgcattacctggctgaccgcgccggcattaccggacaattcagcgacgcggatttacgccacctggaccaggccttcccggtactgctgaaacagctggaactgatgctgctttccggtgagcttaatccccgccatcagcactgcgtcaccctgtatgcaaagggactggtatgcgaggccgactccctgggctctcacggctacatttatgtggcgatttaccccggagaaccgcctgaaaccggaggtatggcacgatga

SEQ ID NO: 401673 - DNA, 303 bp, Salmonella enterica
atgaccacagtaattaaccctgaatttatccctgtgcctgatgaacccctcatcaccgctacgcccgtaccggatgaggaccgccctgatttctggccccgtcatttcaggggcgttccgcagtggatactactggagccccgcatcttcgcatggacggaccgcctgtgtgcggactacagcggcggtatctggcagttttacacgctgagcaacggtggcgcgtttatggcgccggaggtgaatgacggggatgacgtctggtcactgtacaacggcatgaaggcaacagcgcggacatga

SEQ ID NO: 401674 - DNA, 819 bp, Salmonella enterica
atgaaattagccagccgctttggtcgcgttaacctgatccgtcgcgaccgccccttaacccatgacgaactgatgcagcatacccccagcgtgttcggtgaagagaagcatgcctcccgcagtgaacgatatacctgtatccccaccatcaccctgctggagagcctccagcgtgaaggttttcagccgttctttgcctgccagacccgcgtccgagaccagagccgccgggagcatacgaaacatatgctgcgcctgcgacgtgccgggcaaatcaccggtcagcaggtcccggagattattctcctcaactctcatgacggctccagcagctaccagatgctgccggggctgttccgcagcgtctgctgtaacggccttgtctgcgggacgttattgggtgaagtgcgggtgccccataaaggcaacgtggtggaaaaggtcattgaaggcgcgtacgaggtgctgggaatatttgaccgggtggaagaaaaacgtgatgccatgcagtcgctgttactccccccaccagctcagcaagcgtttgccagggccgcgctaacgtatcgctttggtgaagagcatcagccggtgacggaatcgcaaattctgtctgcacgccgctggcaggatgaaagcggtgacctctggaccacctaccagcgcatccaggaaaacctgattaaaggcggtctgccgggacgtacagcaaagggcaaacgcagccacacccgcgccgttaacggcatcgacggcgacgtcaggctcaaccgcgcattatgggtgatggcggaacaactgcaacaggcgctgagctga

SEQ ID NO: 401675 - DNA, 552 bp, Salmonella enterica
atgtctgccattaccgacctcagcacacgtctcaacacgaaaacgctgaattttgtcttactgtctttcatcactttcggtatttatccactgatgtggctctaccgtaaacaaggcatcattatcgacaccacaaaggtctcgttttcctccgacctttacgtgctgtggatagccatctgctacggtatttcacgccagttgagcgtaatggggaccaccgacccggagctctatggctatgacccgactatggacgccattgccatgctcggcggcgtattgtccattgccagcggtgtgatgtacgtcatctgggcctttaaagcacgagcggctctgcagagctatgtgctgaacacctttaagtttgagctgaagatgaatatcttctacctcatcatcttcaacgtgttttatatcacctggtgcatcaacgcgatgccggaggcctttgctaaacacaaaattatccagggtggcttaaccactgcgcctgctgaagccactttaccggcggacaatagccaggccagcacggaaccgaagtaa

SEQ ID NO: 401676 - DNA, 435 bp, Salmonella enterica
atgaaattttcagcaaaggcctttttctccgctacggtatttatccttgccataccgacatcggccatcgcgaccaccatcaccacgcaaacgcgtattcctgacagtccctatatcctcgccagtaccggggccggggatggcctgtggtgcaacggctgcggtgggaaaaagggctgggtacatatcgacaatgacgaaatgatgactctcgacatggggacatcagtcgttgcttccggcggtaaatttgccattttgcgcaccgatatgggcatgtcctgcccggctggcaatatcagcgtactgaacctggaaaccgggaaatacgttggccccgaaattgatgaatgtaatgatgaaaaaatcgattacaaaatcagcaacggcaaatggtgggtgaaagttcgcaaccacatgtactccggaaaataa

SEQ ID NO: 401677 - DNA, 438 bp, Salmonella enterica
atgaagaaactgaccctgccagcactggcacttctggctctctcatccgcaccggttatggccgacggagactgggggtatgccagtggggagtattactacacgattaaccgaaacagcacgttctccatggatgacacgcccggatatgaatatatccaggtacagaccaatgagagaaacaagaagacctgccagacgccagagggggaccgtgtagccctgacccttaataaacaaccgatacagggcgaacgtcatatctggcagaaaaaaggtgaatgccagatatctctgattatccggggtaaagccactcagcagtggctggtgaattacctgagtgaatacggccatgtcatcacgctgtctgatattaccggcgattttaaaatcagcggacgtggctttaaagatttctgggatgcaaaccagtga

SEQ ID NO: 401678 - DNA, 153 bp, Salmonella enterica
atgccactggttttattatggatttttctggccgtcgtgctgggttttctggctaagggggccggaaggtcgttccggggatggtttattctggcgatgattatcgacccgattctcgccgggctgctcttctttctcatcgtcagagactga

SEQ ID NO: 401679 - DNA, 888 bp, Salmonella enterica
atgaagcagccatccggatatcagattatccgccgccatttacgccgctatccccgtacattacggcacacactgattaaggaactcagccagcttattacttacgagccagtcattggcattatagggaaaaccggagcaggtaaatcatctctttgtaatgccctgttccgcagtgaagtttgcgcggtcaatgccgtcgaagcctgtacccgtgagccacaacgtatccgtctgcgattcgggcagcactatctgacgctggtcgatttgccgggcgtgggagaaagcctgaaccgggacgatgaatatcgtacgctctatcaggaacaactcccgaagctggatatggtgctgtgggtattgaaagccgatgaccgggccttctcggtggaggagcagttttatcaggcaatcctggcacagtgcgacagcaccatgccgccggtactctggatactcaaccaggtggataaagtagagccctccgaacggtggaactggcactcagccacaccatctggtgcccagcttgagaatatcaaacgaaagcagcaggccgttgccagtcagctgggtatacaggatgacgttattattcctgtatccgttaaaggacgctatcacctggcccgtatcgtggagcagatgataaaccgcctcccaaagcaggtacgcagcccgctgctgccccatctgcatcagtcataccattccgcccccgtacaggaaaacgcctgcagcggcttttccgatgccgtcgtcgatatgcttgaccgggtcatcgacaactcaccgttacccaacattgcccggaaggctctgcaggccgtcacgcataccgtcgcccacgtggcccacagcgtctggtccttctttttcgattag

SEQ ID NO: 401680 - DNA, 1434 bp, Salmonella enterica
atgatccgttttccacttagagcttttcctgagagcattcgtcaaacaattcttgatattcatgaacgcacacaggcaccgatagaattgatttcctcatcagttattggtgctatgtcgttagcctgtcagaacaccatcaacgtaaaattaaatgagtccgtgactgctccggtatccttatttttattcgttatagctaactctggcgagagaaaaacgaccgtagatcgcatggtgcttagcccattctatcggcatgatgcttgtttgctacgacaggcagaggagcagaggaagattttcgagattgagacaaaaatatggaacgtaaaggaaaaggcaattattaatcttattaagaaaaaaacgactaagggtgaatgtactcatgaggaattacaaaacctgaaggcgttacagtttgaaaagccagtacagcctaaaattggccaacatatttataataatgtaactccagaggcattgcagctggcgatgtacagccattctccgcatatcggattgattgctgatgaaggagcaaatattcttgagcgacaggtgatgaacgatctaagttttattaacacaatgtgggatggcgtttcctttcgcgttgaacgaaaaacgacgcaaagttttaccattgaaaatggtcgtgtcacactgtcactcatggttcaaaaaaagacatttgatttataccttaagcggcagggatcaaaagctaggggcagtggtttttttgcacgctgtttaccggtatatattgatgaaaatcttacgacgcagggtgaacgctatattcagcagaatataggggatttgagacatcttgaagctttccatcagcgtctggagactctaatcactgagggaggggcatctgccagttctggggagcaaaaaatcatttcattcgatctttccgcacaggatgcatgggaagagatttataatgtcattgaaagccgaatcaaaacaggtgagtgctattcaaatatgagtgactttgcttcaaagttggctaataacatagcacggttatcagccctgttctcttactttacagaaggcgagtgtttaataaaaaaagagcatgtcgagggggcatggttactgtgtgaatggtatatggagcaggcgattaatctgtttgggcaagatgatggctattatgaggcactgctgatttcatggctacgacgtgatttttctcgttcttgtgttaactctgtgagatataacgatatacggcgatttggtcctaatgcattacgtaagggagcgttgctagatcgagtgatacataatctggcagatgcacgcgtgattgagattggggtttttaaaggcaggagagtagtgtatagagatgaaaattttgataacaatatttttacaaaaaatccagcttacagtcactactga

SEQ ID NO: 401681 - DNA, 633 bp, Salmonella enterica
atgttcccattagaatatctcgatatacgtcaggaaccttttaatcaacactatctacaacggttgggggatgtactgcagtccgcacaggatgaatacccgagaacgttagcagtacgaattgacctacgcttatcaccagaatggattacagaggattcagtatgctgtaatcctaatatgtcacgtgatctgctaagtcgctttataagctctctcagagcgaaaatagcgcattatcgacacagacttaagcggtcaggtaaacgagcacatccttgtcgtttacgttacttctgggtaagagaaatagatacagctgtttatcctcactaccatgttgttttatttctgaataaagatctctttcgtgggttagggcgtgcagagaatcctcaaagcctctggaggatgatacagggcgcatggatgagtgcattagatttacatgagtatgatgaataccgaaaattgacccattttcccaataatccagtttatgtgttggacacaaatacctgtgattactcggatcattataagcgcttagtatttaggttaagctatctcgctaaagaacgtacgaaagcgtacagctcacgagaacggtcaatgggatgcagccagcgttaa

SEQ ID NO: 401682 - DNA, 222 bp, Salmonella enterica
atgggtaagaatcaacatgtagtaccgcacaacggggaatgggctgtgcgtggcgaaggaaacgaacgcgtgacttctacacatcgtacgcagcaggaagccattgacgctggtcgtgcgattgcccgtaaccaggagagcgaactggttattcaccgacctaatggtcagatccgggataaggattcccacgggaaggatgacttcccaccgaaaggttaa

SEQ ID NO: 401683 - DNA, 240 bp, Salmonella enterica
atgcgtggatttgaaaaggacgggcgagagttgaatgtgcgtgttgatggtcaactggttttcattacgggaagcatgatactgaaaacggcacctgaaggtcgagttcagccctatctaccaggagtgttagaaattctgtgtcattccagtaatatacaatcaaaaaggaatgacacatgtcccagcccttcgatttcgacaaagcacttaaagccctccagtcaagtcaggcattaa

SEQ ID NO: 401684 - DNA, 207 bp, Salmonella enterica
atgccatcatttaatatgaaaattctgcgagtacgtgacgtttgtaaaaaattaggtatcggtcgttcaaccatctacgattggatcaatactaaatccccccgctacgatgacactttccccaagccattacagcttggaaaaaaatcggttggatggctcgaatccgatttagaacagtgggttatcaatcgctgcaaaatgtag

SEQ ID NO: 401685 - DNA, 762 bp, Salmonella enterica
atgagtaataatggaaatattttttttctggacgagttgagagtgtgtttagatctaacaaaggggcagcttgctttagctttgaggctgtcggaaatggacgatgatttatcttttttgagcgacgacgatcctgttattgccggatacctagacaacgtgactaaacgtttacctagttatgagaaaaagttagagggatgccagcaagtcttaattaatcgagaatttcttgcttcatataaattggcaagtgaatttgaagatgaaattgacagatatctgattgatgctgctttaaactggcaattgggattacgtttttgtaatgcagggaagaatagtgaaggaattaaattacttttaaaatctatagctaggttgaatttttgttgtggcctgatatcaggaaaaaatcgacaagaaagtgaggttgaggatgcaaaacagaaggccaagggggggaaagcaaaagcggctcgttttggaaaaatgaaagaggaagtgattagattactacaaaaaaataaagtagacggaggatggcgtaagaaaacaatcgcattcaaatttattgaagatgatttgcttttatttgttgagaaaaatggatggccttctgctgaggataaagatgagttaaataaatcatctgtagataaatatgctaatatgcagcggttagtgatggattggtctagaaatgatcaaggcgtgaagagtgcttttgattcggtaatacaaaggaagccaaaaaaataa

SEQ ID NO: 401686 - DNA, 804 bp, Salmonella enterica
atgaaaccagatttgtttaccgcagtaatgaaaaccatcggcagcacgcaggatgagaacatccgcacggccattgacagtgcactggacagccttaacgagaaagcaaaccagaacgcagaggccacgataaaaaacgcgcttgaggcgttcagcaaggccaaatccgcgcacacggaaaatatgctgaaactgaatgatattgatgccgccattaaccgcagcgaaaaagagcgtcagaacgccctgaatgaaagtgccgaagccgaacagaactggcgtacccgttttcgcgaactgcgcggcatgatgaccccggaactgaaagccgaacacagtcagcgagtggccggtcgggagctggcggaggaattcaccgccctgattgatgaactcaacgatgataaggccagtaccatgctgtccgcctgtacatcaggagataagtacgtcggcacgcattttatggtgttctctgcctactcccggaatgagtgggcgactgtgatgaaagacatccctccctcactggtgcgcgcatttgcgttacgtctgcgtgaactcgaaatgaagggggaagaacaccctcacaacgttctcattcaggagctgggggagaatgtactggcgcaaagcaggtattacacattcaacatggcgcaggagccggtaatttcaaaaattgggcttcaccgtccggcactcaccggcgtggatatgaagctctttaaaagccctgttctcagaatggcgcgggctaaagagctggcacagaagaaaaaaacgcagggggctaagccatga

SEQ ID NO: 401687 - DNA, 1500 bp, Salmonella enterica
atggaagagtctactaattataaactaattatctggggattatccgttattcagcctgcaacgcctaatgaggttttgaattatcttacaaccactttaaatgataatggcttattgcctgaagttgaaaaaatggttcattactttgcattgcttgatcaacatgggtatatacatcaagtatcaaagcgcaacaatctttattcgttgacgcctcgaggaaatgaacgactaactccagcactgaaaaaacttcgcgataaaattagactatttatgcttgacaactgtcactctactagtaaattaggagtgctggcctcaactgatacagagaatatgggcggtgattcgccgtctttactgttaaggcacaattcaaaagaggttccgcacccaagcctgtcttgggctgcagggaccctgcccagcagcccaagacaggcttgggtgcggatctacgagcaattaaatattggttcgatgtccagtaatgaggccagccccccacccacaacgaaaggctcaccacaccattctattggccgattaggtttttctttaaattattattcatttaataaaattgatgagagtttttttaataatgatggcgtgactgctattgcctcatgtattggcatatctccagggttgataactgcaatgataaaatcacctaaaagatactatcgcacatttaatttacaaaaaaaatccggcggttttagaccaatccttgcgcctcgtaaattcattaaaaccatacagtattggttaaaggatcatcttttaaaccgtttaaaaatacattcatcctgttattcatatagaagtggtgtaagtataaaagataacgcaattaatcatgtaaggaaaaaattcgtcgcaaatattgatatttcagattactttggttcaatcaataaaaaaatgatcaaggattgtttttataaaaacaacataccagaacatgttattaatactatctctggcatagtgacatataatgacgtgctgccacaaggtgcgcctaccagccctataatatcgaatgcagtacttttcgaatttgacgaagaaatgagttttcaagccttaactcttgacagcatatatactcgttactctgacgatatatccatcagcagtgataagaaagaaaacttagagatacttataagtattgctgaagaaaaattactatcgattgggtttacattaaacaaagagaaaaaacgaatttcttcatataatagccgtcaaattgtcactggtattctcgttaatgaatcgataagaccaaccagaacttacagaaagaaaattcgctctgcatttgatcacgctcttaaagaacaggataacagccaattaacgattaacaaattaagaggatatttaaattatctaaaatcttttgagccctatggtttcaattttaatgaaaaaaaatacaaagatattctcaattttttgcaagcatttaagcaagggtag

SEQ ID NO: 401688 - DNA, 678 bp, Salmonella enterica
atgatggaaaagaataattctcaaaatgttgaccagaaaataaaatctactgtcgtggggacgggcaatacgacaattatcgcacaagtcattgttaatactaatagtcctgacattgatacaaatgcaatacaaaacacactgattaatgagataagaagctctctaaaagaagagtttgtatccacggaatataacatattactttgttaccctaacaaattaattcgtgatgaaccaactctaaagatcataaaagaaatcaaacaaaaattagataagatgggtgcaaaagtttatgaaggcgggggaaaaacggccctacctaaaacccaaataacatatccacaccttgcggaattggaatttataaaaactgtcaaatgtgatacggtgataatttttgcattggatgaagtcacactatcacaactaacattaataagttactttaaagtttctaaaaaaattgacagtacagatatgataataatatctagcgacacattaaaaaatagcgatatatttttatccaatggcacattccaatactgtgatgataataattgcaaattatattctttgaattcactagatgatgctggattaaaatctgtaatcgctagaatagaaaataaaaaaataattcaacgaaaaggcggcttgttaggagattaa

SEQ ID NO: 401689 - DNA, 195 bp, Salmonella enterica
atgacatggctacatagtaatgctgaatgggtattctctggtattggcgtttatgtcatatcacttatagtattagccattacagcattaatatttagaaaaaaaataaaagctagcactcaaaagatcgctaaagtttttactttcggatggggtaacacaactaatatcaaacaaaatgatggaaaagaataa

SEQ ID NO: 401690 - DNA, 303 bp, Salmonella enterica
atgagcaagcgagaaccacagattaacttacgactaccccaagagttaaaagataaggtacatgaaattgcagccgaaaatcatcgctcggtaaattcagaacttgtgcgcatgattgagtcatgtgtagatgaatattatttttttaaagagtctgaagggcgagggcattatagctttgagttggagaatgaaagtccagaggagcatatctcggaagaagaatattcacgcaggttggctaaagctttggggcttcttgaagagggcatgaaagccttaaaggagaagtcgcagcaataa

SEQ ID NO: 401691 - DNA, 564 bp, Salmonella enterica
atgactaatttagcacaatgcaccatcagcgttccatttcatggaacagaactttacgttgttaaccataatggggaagcgttcactccaatgaagcccattgttgaaggaatgggaatggactgggcttctcaatttattaagttaaaacaacgctttgctaaaggtattgtggaaatcgcaataccctcagttggcggaactcagaagatgatttgccttgcattgcgtaaacttgctgcctggcttaacaccattagtcccaacaaagtccgtccagaaatccgcgctcgggttatccaataccaggaagaatgcgatgacgttctctatgaatactggatgagggggcaagcaacaaacccgcgtcacgctgaacctgcaatcgacatgatgaatatcgatcttcacattcgcattcgcgatgggcaggtgtcgaaaattgaacatattgggcctgatatgtttgttggaaaaataacagacatattaagcaatctgcgccaaagaggatgggtcgtcattaatcgcgatttgttggttgaaaagctatcaacatggtga

SEQ ID NO: 401692 - DNA, 207 bp, Salmonella enterica
atggcgatgaaatattcgtacttccaccacactgactgcaccaccgagcaggcagagcgcctgattgccgattatcagtctcgcggtgtcagagccaaaaagagcctcaatcctgatttcctgacatggaccgtcagcgcgaaattacaagagtgcgaacatccggcgcggacgccgagaaccttccgacaaaaaggctgggggtga

SEQ ID NO: 401693 - DNA, 822 bp, Salmonella enterica
atgaaatccggcatttattacgggatgcctaacgaggattaccatgctgacgaggcgataggttcaacgtcagttaagtcgattagcgttagcccggcaaacctattcttcaacaaatttaccggaagtaaatcagcacatattggaagtgctattcatgcagcattactggaacctaacttattcagaaatgattacttgctgatgccagaagtaacgtctcgtagttcgaaggaatacaaggaagcagcagaatgcacaaaaccagaatatattttagttggaagtgaagtagaaactgttaacaggatgtttgaatcttcacggctgaatgaagatttcatggattacatgaacaccaaaggtaactctgaggtgtcaatgtttgcagagtgccctgaaactggcttgatgctcaaatgtcgtttcgacaggctatcagacactctcgcctatcctctcgacgttaagagctgtagagacgcttctgagcgtggatttagcaatgctttcggtcagtacaaataccacattcaggcagccttttatctctacgttctcaaactggcaaccggcattgagtacaaccagttcgcatttttcgctatcgaaaactctccaccccatcggaactgcatgtattacatcggtgatgaatcactggagcttggctatcgcgaaatgttcgcagcattagacaagctcgttgcatgcaaagaaaacgacgaactgaagtacgaaggaattgtacttccatccaatgaaattaacgttccggcatatttgctggatgatgaatatgatgatgaggtaattatctaa

SEQ ID NO: 401694 - DNA, 570 bp, Salmonella enterica
atggacctttcacgcacaatcattccaaagtcagaccaaattaacttcgaggatgttcagacgcagagcatcacagcggttattaaagcagttcgcgcaggtaactcagagcaaccggtattcatcgaccttgaaggttttgagggacgaccttacaagccgtctaaatcaatgcggagagtgttaattgggggttggggtgctgatggtcattcatgggttggtcgctatctgacgctaattggagatccgtcagtaaagttcggtggcatagctgttggtggtatcaaaatttacgccatgagcgatgttgagtccgacttctcaatgatgctttcagtatcacgcggcaagcgacaggagcacagagttagaaagctggaagttaagcaacaggcaacacctgaatccgcgttggcatggttttcggcgaatgcactaaatatggattccgcaaagcttgaaaattcctataaccgtgccaaaggcgttatcggtaatgattcaacgctaattcaaaaactcgacgaaatttaccgcctacgcaaacaggatttagagagcgtctga

SEQ ID NO: 401695 - DNA, 177 bp, Salmonella enterica
atgctaaataaatactaccgtttcgctgtcgaaaaagacgacccctccgaagcgccagaatcgggcgataagcctgatagccaaccgcaaaaaaatcgtaatttatctggatattccccggcgtttttacgtttggggaaaataaccgtttcgtttcaacctggttgcgaacagtga

SEQ ID NO: 401696 - DNA, 1728 bp, Salmonella enterica
atggctggccgacctatcaacctttttatgtggtcatatcaagtaagttatagagcgcaggtccaatatttaactcgcagagtccttgaagaactaggggcaactgttgaagtagaagtgttactcgttggagcacgaagcccaaatagtgacaactataattctatatgtatagaaccagaagatggcaaatggagagtttccatttttaatgggctgcttgacaccatagaatcgacctatcgtaatcatgacttacagaatatgtgttttactgatacagcgagtatgcgtgacaaaccagaatggattcgccgtagttctgtgagaaagtgtatatctaatgctataaaatcatttgataccactgaaaatgtaacatctttctgcggtaatgtcagacgtgttggtgattattatgtaagtcctataatacagatacctaattcaattttcttacagtttccacctttaccattagtatccgaagcaaaaggatacagaagcctaatccatgcagcaatagatgcagtccttgatgaggcgactcaagaactagaagcaccggagccaggacgctatgattcgatgagaagtgaagaggaaattgttcaaattgcagcaaaaaaatttatgcatactccaggggcctcaataatagcagaacaatattataggacagatctttttaatgatattaatttgatatcctctcttatgtatgaaggaactaaaggtgttggcaatttaattcttgtttctcctaaaaacgaagcaatagagttcatggtaaagtttattaagccagttagtttcaaagagcctaggtgggtaagaaaaatattacaaatggcctccacaggaattggaataattgctgatagcagatatatctatggattaggaaagttagataacactcataaccctgacaatcaagatgtttttattgtgacttttgttgatcactatcactgggagctacactgtggaaacaaagctcttatacgcagccattattcaaaaccaagactccctcaggaaccgtttaataaatctgcatttcttgcaaattatcagcgaatgtttccatcatcaacatatcagaatggactacatctttggcagttgatgttaactcaaattcgccaaaatcatggtagtatgatcgtcgtcgcagaggatgctgataaagaggcatcacgtctaagtatgcaaggaacctgtattaatccaattctactttcagaatctttacttgaaagtgttagtggaattgatggaacaatattactcgacacctcaggttattgccacgcaatagggcttattcttgatggtgaggcaacagcccaatgtacgccatccaggggctcacgttataattctggtgttcgttatgttcaagcagggaaaaacaatagattggccattgtcgtatcagatgatcacactgtcgatatcattccagaaattaggccactagttagccgttcccgtattgagtatcatatttccaacttagaaatagccacactcgataactatcacaactcacgaaactggctggacgaacaccgattttatatcaacgagaaacaatgttgtcgactaaataccgctatagacagattagatgccttgcctcgtgaagttgggcttatttatattggcacgcagaaattcgaagttcatcctgagatgaatgaaagttatctaattgattaa

SEQ ID NO: 401697 - DNA, 801 bp, Salmonella enterica
atgaacgaatttaaggttgctcaagctgctgcctctaaggatcttgcgctttatcgcgaattaaaacctagtaatagctatattgatacatcaacaaagaaaactatactaacaccagaaagctatacaccattggttagcttcaatgttcatacggctttaaatttgattcaattcggcttctcccgttctgaactaatgagaaaaagtcctatgcttcctgttgaagaagtagatccactctaccaaccggaacgcctaaaagaagaacaggtatcaacggtaacgagagccataaaaaataaatgtgcagttttgtgtacatatggttctaagagcggtgaccatagatttagaaccctgttcccgcatgctctatttatggatcggaaaaactggtactttagagcatatgacagaaatactgaggagcccgaacgtagtgcatttaaaaattttaagttatctcgtatctttaatatttctcaagatctcaacgttctaccaagcctaattgaacaaacagatagagaatgggatgaaaaaatcacatttattataactttcaaaaaacatataacccctgatgttattgatgaaatttccagagagttttcaataaatgggcacgttcattctataacatgcagggcagcattagcctgttttgttaaaacaaattggaagattgatctcttgaatgatgataacaatcattggctttactttgacgtgcttaatggggacacgttgcaggaaataaaatgccttgcccccctattcaatcaaaaactaaaataa

SEQ ID NO: 401698 - DNA, 597 bp, Salmonella enterica
atgcacgattacgctgtatttggtcataaccgcactacgattgggcgatggctgggtgttgcttcgatcattttagcaggagcagtttctagttttcttgcatggtttcatcaattgactggtttacatgctttaactggcggagcagtaacaactggtacaatatattttatattgcactgggtctttaataaatttgcatggaaactacctttctttaaaatccctgatcttaatggtatttggaaagtaagcggcactacacttgatgaaaatagtaatgcaaaatatgaatggaatgcagagatagacattgatcaaaactgggagaaaatggttatttgtcttaagacaaagcaaagttcaagtgatagttataccgctacattatccaaatgtaacggttctcggggcgggtggctattaagttacagttatagtaataacccaaacgtagatcaatatcatgcactcaactctcataaaggttattgtgagattttaataaacaaagaattgactaatggtgtcgccgcctatttcaatagcaatggtagacgaacttttggcaagatggaattgaagaggggtttatga

SEQ ID NO: 401699 - DNA, 1113 bp, Salmonella enterica
atgattagttttgaaaataggttgaaaagcttaaaagatcgcaggcaaggaacaaaagaaagggtattgtttgaaaataacatgtctatccatgctgctatcgatcttcgagggcaggaaagttatgagctattagctgaaaatgcagcaattaaatatactattggtgcaatggcagaagttgatcctgtgtccacaagagtttcaattgatgaaggtgagcgagttgctaatactctcattggacttttaaatacagtaggtattttagccacaaaagaaattcaaggttcagttgcattaaatatacatatcgaagggcattcagatgttgatatgcttatcctaaaagatgatatcgttttagtgcaaatgcctagggttagtggtgttagtagtaccccagatgatcgacgtccaatggttgatattattagagagctaagattgcaatcagaagcgaaactaacttcaagatatcatcaagcaactgtagattgtaatggtaataagtcaattgcactgagcggcggtagtttaaagcgtaaggttgatatagtacctgcttgttggtatcacactcatgcttaccaacaaagcaggcagaaacatgatcaggaagttaaaatttatcacaaagctgaacatgttttatatgggaatcatccatttctccatataaagaaagttaatgataaagactctatgtatacagggaatttaaaacgcgttgtcaggctgatgaagaatgtagttgcagatatgcctgactataaaaaacgagtggttaagaagctctcaagttatgatttaacagcgatcggttatgagatgaatgaacagcttcgatgcccaacttatatgtctctggctttggttgaaagacttcgtgcgcacttggcattacttgtatcatcaaaggtcttaagagatagattaatcgttcctgatggtagcaggaacgttttcgactctgaagaaaaagttgatgctttaaatatattgtataatgaaatatcggaccttgcagtttcaatttacagaagtttacagccattttcttatttaccatatgattcttctacattaactcaaaagcatgtttttttgtga

SEQ ID NO: 401700 - DNA, 243 bp, Salmonella enterica
atggtaaccagggaaagcatgaaacaatggatcattgagtgccttcaagacaggaatggtagcgcctggcctcgcgaagtctcaaaatatgtttgggataactatgagttagaactaaaaaattcaggtgatatgttatatacttggcaatatgacattcgatgggccgctcaacagttgaggcatgacaatattcttaaaccagtaaataagcgcagagatttgccatgggaattagcgtaa

SEQ ID NO: 401701 - DNA, 903 bp, Salmonella enterica
atgattgaaacatggaaggatctagagagctatacgcagtatgtatactcaactttgcttaatccacaagataatggcataaaagtcagccgtgacgttcccctaaaaggattaaaaggggaatatcgaattgatgtattttatcaatttgaaaatgcaggttttacacatcgtgtagcgatagagtgcaagtatcatcagcgccctcttgaccgagataccattatgccattttgcaataaaattaccgatattggaaatattattggagttatcgttagcaaatcaggttatcaaagtggagctagagagtacgctgaaaaacatggtattaccttactaacgaccgaggatttacccaagtttaatgtattggttgctgattacttgatagcttcggcattacctacaaaagattggataggggaacctttttggattctgatggaaagagaagagcataatgtttcaggttcatactataaactttcacagaagcataatggaagaaatataataccattattcttttcaaagcgtgaagccattgactttttaaataaatctcaggcagcgagtgtttttgcagttcgaggtattccacagcattatttgaaacgtttaatcggatttggcgagcaatttaactttcttttttttctgatgctcccagctatgacagaagagcaagccacaggcttatgtgttgatgcaactgagctgaaaaaaagatatctattatcagaaatatcacctgatgaatacaaggaattttatgtcaaaagaaaaccaatatataacaatgaactaactctttttaaaattttaaaggcaatgaaaggtaatataggtgcagaattagcagaaaaaatactaaataaaaaacgagtaaaacctaaataa

SEQ ID NO: 401702 - DNA, 3204 bp, Salmonella enterica
atgaagcaatctgcttacgattcaatacaagaaaagcgtcttcagccctggaagggcgaagaagaagtcagatttgcctggaacaaagcgttagaagacgccacagggttacatcttttcgccgagcgcgatcgaaatgacgccagttacaaccacgtcatcattgaatacaaggcaccagggtatttcaatggtagcaaagatagtgccgcgttcaagaatgctaccatagagcggctgttaccctatattctaaaaaaatccgctcaaacaaaaatacctgaatccgattttattggcatcgctattgatggcgagcatatttgttttgctcaggtcattgatggtgatatcacaacccaacacttgatgccattttctccggcatccgtagaaatggttgtcgatgcgctccgttcggatacccgtaaggggcttactacagagaatttactcgctgattttggtcatggttctgcaaacgctcgtgcgtttatgcaacaactctctgatggattggcacagcaactcgccctcgatgggaataacaaactaaaaatgctgtttgctgaatggcgtacgttatatggccaggtcgccgacttgtccatattgcaggccgaagctattgcaaaagagctgaagtttggttggtccggatctccagttgactctatttcggcaaggctgtttattctccatacctataattcaatgctcataaagctgttggcggcagaaatcgtatcagcgcacggactgacttcaacagcacagcccgcacagagtatggctgcactgaaaaatgatgctcagatgctggggtttcttcgctcatcaatcgaacgctccgccatttttaaggaggcagggatcaacggctttgttgaggaagccattttcagttggtatcttgacgtcgcggagctgggtactgcccctaaactgctcccaacattgaggcgattgctgtcagtcctttctctgtatcgccttgatcaactgtcgcaaacacgtgatgtgctgcgtgatctctatcagggcttggtgccaagtaaattgcgccaaagtttaggagagttctatacccctgattggttggttgactttactctcaataaagttagtactccagctcttctgtatcagagagttcttgatcctacttgcggatctggtgcgtttctgctggctgtaattcgacagaaacgccagcttgcaaagtcaatggatttgagtgcgaaggatacgctggatctcctgtgtgacagcgtatggggctttgatctcaatccactggcagtgcagaccgcaagggttaatttccttatcgaaatcgctgatttactggctcaatgcccgggacacgaatttgaagtgcccgtgttgatggctgatgctatctattctccctcagcttcacccgatacatctaaatctgtagttcagtaccgtatcggcagccagtatgcaaaactggatatacatttacccgcagctcttgcgcttgaccgagctagactcgatgtcatgtttaaccggatgagcaaagatgttgaagtggggctcgattttgatgagtccatggataaagctcgaaaggctaattatttttctgagcaactacttaaagaatgggatgcacctctgcgctatacgtataaccagatcctcaatttgcatcaccagaactggaatgggatctggtttaggattgtcaggaatttcttctggtccgcgacagcagggaaatttgatgttgttatcggaaatccgccatgggtcagatggtcgaagcttccagatctgtatcgtgaacgagttaagcccacctgtgagcattacgggattttttccaaaacgcggaggcatggtggtaatgaactcgacatctcagcaatgatcacatacaccgttgctgataagtggcttaaaacggacggttgtctggcatttgtcattactggaacattgttcaaaaatccatcatcagcaggtttcagaacatttaaactggaaccttctcgtgaggactcactctatctgcaacctgtatcggtagatgatatgaaaggcctcaaaccttttgaggatgccagtaatcatacgacgattgctatttttagaaaatcagcaagagaggcagtgtatccggtcccgtatcaggtatggatgcctaagaagggtgaaaagagagctatcaaatcgtctctaacgttggaaaatgtaaaaaaaacactccgatgtgaagttaaagaagcctttccggttaacgaagaggggtctccttgggccatactcgaaccaggcagatttgaaaccattaatttcttatctcgccagtgcttgtggaccaaaggacgaaagggaattactacggacctcaatggtgtttacttcgtgcccattttgaagacgaacgaacagtatgttcagattcggagtcggcctgaagctggcaaaaaagatattggtccagtaaaacaagcatgggtagaaccagcggatttgtatcccttaatcaagggggctggtgattttgaagagtgttaccttaacgttgatgctccagatatcagcgatgaggaacgcctttatacttttgttcccaactcaggtatttcgaatgcagattatgctgatgcagaagaacgtcttgaaaagtatgaactgagaaaaaccgctgcctggttcgaatcgtttgaacctgtactccaagctcgctcgacttatcgccgacaaatgaaaggtgctccttttcatgctgtttataacgtaggtgactatacgttcaaaccatggaaggtgatctggcctgaaatgtcttcttcgttttatgcggctgtggcgggaagtgcaaatgttccactgatcggtgtgcgcccttatgttcccgatcataaagtctatttttcagcctttgatgataaggaaaccgcctattatttatgcgggctccttaactcaaaaactgttcaagagtggattgacgcacacaatgtctcgattcaagttgcagatgttttcaaacatttagatctgcctgagttcaataaaaaagacatccatcatattcagctcgcccaaaaggtaatcgcggcacatgaagagcacgatcgtgatgcgcgcagggtgatagttgacgaaataaaaatactggccgagaagattctcaccgaatggagtgtaaggattgctaactaa

SEQ ID NO: 401703 - DNA, 321 bp, Salmonella enterica
atgaaacctcgttatccattttcaatgcttgccatagcactatgccctatgacaagtgttttcgcagcccccctcaccgagcgcgaagagctaaccctgtccctcagccagcttacccaaatcgaagcctcgctccaccgcgcccaacaaagcgccagaaccggtatcaacgagcgctactacttcgactatccacgcatccacagcgatatcaccaccctgcgtagcgggattgaacattacctcacccccacccgcgcccagccgcgagatacggcgacattggttgggcagtaccgtgaggagaaaacctcgccatga

SEQ ID NO: 401704 - DNA, 426 bp, Salmonella enterica
atggaatggggttctgtaagtgattggttcagcactgcggcaaatattgcaatggctgcatgtgcaatttatgcagccattaatgcaaaagaatggattactcaaaggcattttgatgaaactcgtgagttcataaaaataatgacacgaattgatgataaattatgtaaatacatcatctcatctgaaggaggagatttagaatacgctctctccctaccatatttttacccagcagatgaacaaataaaaataattggtctccttttatctcctcataaaaaaatagaactagacgaggagtacaaaaaatttagagaaaacaggataaacagttggattgaagcccgaaatcattcaaatgatcctgatcatgtttacaaaacttatccaggtttttatctatatttgaaaaatctaaaatag

SEQ ID NO: 401705 - DNA, 1398 bp, Salmonella enterica
atgagcgacgaaaaaacaatctgtcatcagtgcattggtgagaaatatgtcaaagccactataaagagtacaggctcaacaatagcaacttgcagcttttgtgaaaaaaggcgaaaaaaccttcctttacatgatatcgtaggaatgatgcatcacgtatttgaaaattattatcaatctcaagaagataatggatactcctggatggatggcggcgactctgcgcaaatagtcattggaaatgaattaatcgttgatgaagatattgccaatgacatctatgatggactctgtgatcgttataatcgctatgatgattgcgatccggcaatctacaacgatgactatatttatagccgtcgaggtttttcttctaggaagttaaatcaagcttggcacaaaatgaaacaatcactgaacgaagaagctcgttttttcaatcgctcagtaaaattatttttagatgatttattttcagacctggacgactttaaaatcgggaatgagcaatcgcccatcaaaataattgaccagaatatccagctttatagagcaagagtatttgaaaacaataatgaaatcgcagaagcactgacacatccagaacgaaacttcggaccaccacctcctgagttagcccgctcaggtcgtatgaatgcacatggaatatccgttttctatggcgcaactacgccagacatcgcaatttctgaggttcgaccaccagtcggaagtcgggtggtcgtagccccgtttgtatctcataacccattgcgtatactagatatctctgccctagattccttaatcttcagccgtgaaagtatatttaatcctgcaacaataaaaagtctggagaaaaccgcatttctgaaaactttctcccgaaaaatgacactacctgtattcgggaaacgacaggatagagaatatttgatcacacaggcgattgcagaatatctcagcatctctacgaaatatcgattagatggaataagtttccgttcaacacaggtcagaaaaaaaagtaaaggtcgccaacataccagtgaagtcgggtataatgttgtactgttcagcaagtcatccggagtcatgtactctgaagaaaatgagcgactctataaagttaatctgatgagcaatttagagcatgattctgaatatttcaatccctcaattcaccttattgaagatgagcgcgatgataaaaacacatggatatcccccccttttaaaaacaaagaaaaaacactagaactgataacctcaggcctcacttactacaaaatagagggtgtttcttatcaaaagataaaaacagagattgaacaaggaccaccggtaaaaaatacgtcatcaacacacagtcacaatatagattttgacatcttttaa

SEQ ID NO: 401706 - DNA, 681 bp, Salmonella enterica
atgcccgaacatgcgccacaccccgtgggccgtcccggactgctcagctggctcgcattacttcccggcgtgctggttggcttttgcctcggcgcatggatgctggcaatagcgctggagtggctgggcgatgcgtttttctggcggaacgcctgcgccagccatagcgaacaggtattgcaggcaacatggcagtggtggcagggttccgctggcgcaccggtgtggttagtaaaagatctggcgcttgtcagtgatacgttgcagcaagggattgcggcgctggttcattcgctcaatgggcagagcggcttgttctggacggaaaccgtcactacggtaatccactgcgcgatactgtctgcgggtaatgttaccctcacctttctgcttcggctggcgattttattgcaggcgctgccgctgtttgtgctgattatcgtcgtcgggctgattgacggtctggtaagacgtgacttacggcgatttggcgcaggccatgagtccgggtttgtttatcaccacgccaagcgaatgatttcatccagcctgatagcgacgggaccggtgtggctggcagtaccggtttttctcgaaccagcgtatttgttggtagcaggagcaatactaatcggcctaacaatatctgtggctgttggggctttcaaaaaatttatgtga

SEQ ID NO: 401707 - DNA, 609 bp, Salmonella enterica
atgcttaaacgtctggcctacctgactaccggcgcggctctcctgctgctggcggcggcggtgttctggtgtttcaaccgcctgaacaccctgacgctgacgcagcaacagacacaacgccaaataacacagtggcgcgaccagccgcagccggacagtgattatcacgagctgaaggttgccgtaaaaaacatcaccgatcgcatggaagcccttgccagacagcttaacgatgccgccagcgtgcaggccgaacgacttaaccccatcaccgaacagctcaaagaactgaagggacaaatccagcccctgagcgccagttatcaacacctgcaacaacaaaccgccacgcgcagccgcgcaaaggcaaaacgccccatcccatctccgctttgggccgcaaaggcccctttttctcttattggcagcgagtttcgcgccgggcggcagttcgccgtcatcgctccatccggttatcgctcgctctcacagcttcagcttgtagcccccggcgacagcgtgcagggctggcaactgctgcaactggacggcagtcacgcgactttccataaaggcgagcagcggctgacgctgaacgccggaggataa

SEQ ID NO: 401708 - DNA, 138 bp, Salmonella enterica
atgctgatcacccacattgcaataataaaatctactattcccattactctgactttaggaaaaaatgtgttgttaattttgtcggcaatcatgccagtaatgacctgggcaataatgaagctatgcctggcgcgctaa

SEQ ID NO: 401709 - DNA, 417 bp, Salmonella enterica
atgaaaaaactaacctttgaaattcgatctccagcacatcagcaaaatgccattcacgcagtacagcaaatccttccagagccaaccaaaccaatcgtagtaaccattcaggaacgcaaccgcagccttcagcaaaacgcacgtttgcacgcgatgctttctgaaatcagcaaaaagacaacctatcacgggaaagtaaggggaattgacttctggaaaggactatttgtctccggatggcagatagcaacaaatcagcaccctgagattgttcccgggttggaaggggaatttataaatatccgggagagcacagcaaagctatcggtaaagaaattaaccgaagtcatggattacatagaagcatattgcgccatgaactcaatacatcttagtgaatggaggaattatgagtga

SEQ ID NO: 401710 - DNA, 582 bp, Salmonella enterica
atgagtgaggtgtgggtagatattgatggcattccattctatcaggtaagcaatgatgggaaattcagatccgtttcgcatgaggtgattgtcagctcatctagacaaaaaccgtataaaaaattaataaggggaaaaagcgtaattccattcaagtgcaattcgactggctatgtgcagattaaggttgctgggaagaaatacagcgctcaccgtcttgttgcaaaagcattctgcccaggatttaaagaaggtcttgtcgttaaccataagaacggcatccgagatgacaatagagctttgaatctggaatggacaacgtacgcagagaattcaaagcatggatatcaacataacggaagaatccctacaacactaggtaagtttggtggggaaagccctgccagcaaggccgtcatatccaccgatatgaaaactggagaagagagggtttacgaggctgcaatggatgcagtcagggaaggttttgacagttcatcaattagccgatgctgccacggagaaagcgcatatcacaagggtaggttctggaggtttgctgatgagaggatggccgcatga

SEQ ID NO: 401711 - DNA, 204 bp, Salmonella enterica
atgaaacactgctaccgctgcggagaaagcaaagacgattatcgattccggctaaatcaaccttattggcaccaatggtgtatcagatgtgagcggtcgccagtaggtaatttcccgctgccagagacgaaggaggacgtatggcacgacagcgacgaagtatcaaaactgcaaatacctaccaacgaaacgctccagaaataa

SEQ ID NO: 401712 - DNA, 501 bp, Salmonella enterica
atgaaaaagctatccattgatgagattcgaagcctgttttcatataacccggataccggaatcctcacggcaataaacagaactcgcaggacagatctgaatggcaagccagttggatgccctcacgggaacggatacctcgatgtgagggttgggaataagctctattatgttcaccgcctgtgctgggctcactattacggagaattcacagatctaattgaccatatcaatggaaacaaatcggataaccggatagccaaccttcgcgcagccaataagaaaatgaatggcctgaatcgcggaatagataaagacaactcatctggattcaagggtgtgacattcagggttgataccaaaaactacatgtggcaattcgtcattgacgggaagagatacacaaaaagcggcttccctacagccgaagaggcatacaaccataaacttaagttcatcgacgcattgcagcactcagcgtcagattttcttaagccatag

SEQ ID NO: 401713 - DNA, 639 bp, Salmonella enterica
atgaaaaaaatagatatatatagcgatacatcagcctatgtcataggatcattaggttttttaattttttttgtttggcagtaccagtcactatctccagggtggcgatttttggggatgtctttgatatcacttgctgcaggaatagcaacgcaggtgttgatgtatctctttaatggatggctctcaaaaagagttgagaaaaaaagagctgcttcaatatgtagaagcctagccattccagaagactctacagatcaggatgatattgcaaaatgttggcggtatatgattgcaagatactcaaatgagttactggcaaacagactgtccgacttaatcgggatcgtagttacctctgttggaacaatcatcagtatagggatatcaatttggtatgtcgggatgattgtctattttgtttggaatagagacttcaatgaacctttccttctttttatacctttatttttcaggatattagaattcatatgtgagttattgctctcttttttctgcaatgttttgttcaacagataccctggtgaagcaagaaagtttaataaaaactatgatgagttaaggagaacagatccttttctatcaagtaaagagttccgcgattccattcgcaattaa

SEQ ID NO: 401714 - DNA, 222 bp, Salmonella enterica
atgaggtttattgaggttgatgagattggctatgagaatgcacttggtagaggtaaatctttagttaacattgatggcattgaatcggtaaggagtggcgaatataccgagatcagaatgatgtcaggtggaattattccttgccgcgattctgtagagtcaatcaaagcaagaatgagtggtcagtggctttatagctacggtgatttgaaaaaacagtga

SEQ ID NO: 401715 - DNA, 1905 bp, Salmonella enterica
atgactaacatcacgccaaatattgttgtatcacaaccaagccagttatttactttagcgcgttcttttaaagcaaatgctaatggcaaaatctatattggtaagattgacactgacccggtaaaccaagaaaaccagatccctgtatatctggaacgagaagatggtactcatgttcaggtggcacagccaattgttatcaattctgcaggctatccggtatacaacggacagattgcaaagttcgtgactgtgcagggacacagcatggctgtgtatgataggtgtggggtgcaacagttctatttcccgaatgtactgaagtatgatccagaccaatttgagaagagactgagcgggaatgatggatttaaattcattggtcgagttcctgatattgatactctgcgtactattcatggtaaagatggtgatgctgttattctggaagcgtaccgggtgggtgatggtcttggcgagagcgtcgtttattgggatgctacatcaactaaaaatgacaatggcggaacagtatttgcggtatctggtgttgcaactggaagatggattcgtaagtataaaactctagaagcaaaaatgtttggtcttccaaaagaaggggactgttacgacgagatggcggctatcgaggccattatgtttgaggaaggcgtggattgtattttctatgacggaatctatgcgattactggatccagaaatatgccgtggcgcggtagcgacctgaataatttcaaatcgtacaagggggccagcattcgctgcattggtaatgtagttttttcaacaaaatctcctgatggtgctgatatattccagatgaactgtgtttccgatttaaatattatcggattcccagttcttaagggtacgctcactagaggtgattcctccggaacaaatggcgtatcaataaccaacggagggaaaaatatattcattgaggttgaggctgattcattacctttcaccgtgacaagttcaggactagatggtggaaaagctgtaactatacagaacgggccttcagcggtactcccttatcaaaatataaaaattaattgtcggagagcgcacaactgcccatatggctttgagatgtcgatagtaggagattcactgataaataatccaaattctggcatagaggtagatatttatgctgagaactgttacagaggcgttgcaatcggctctagcgagaacaccaaagagataccgacaaatggattaaaccatggtgtaaaagttagagctattcttaaagattgtcagcaggatatcgttgttataagggattggggtttagacattgaggcgacggtaatccagactaaagacccttttatgtacaatccacatgactcaaaaagggaagttttggagtctgctggctctaagtactcacgcataaaaatatccggaataaaattggctgtcgattcactgtatacaataggggggattcattatagcccatccgtcagtgggagaaccggtcaagccgagtggtgcgtatatgaccttaatgttacgacgcaagtcgctacaacaacacttactgtcatggattcaggtggtgttaccgcaaaaaataacacgctcaggtcatctacactatcagcagtagatgtgattgcattcatatccaatggtaataccgtaactataggcgcttccgtgatggcggaagatttatcttcatataactcattttcagtttttgataactcaaacaccaaaaagttcggagttaataaattaggggaattaaccatagtaagaacatcatcatcagctccaagtagtaatttgtctggttttatccaattcacagatccaaataatggccagatgttccaaattcatacttacattccttaa

SEQ ID NO: 401716 - DNA, 234 bp, Salmonella enterica
gtgtatttatttgggatgttttcgtatgttataatagtgctgagttacgttatgtttcctgcgattaaaaacatgctgactcaggccgtacttttggcaccacaaattacgtacgcttgcggtgttctgttcttatttccattaataatttttttccccttaatcctcgaggatttaatcgcctctctgattttatataaatcattattagacagtgacactcctcctacatag

SEQ ID NO: 401717 - DNA, 189 bp, Salmonella enterica; identical to SEQ ID NO: 393645

SEQ ID NO: 401718 - DNA, 1632 bp, Salmonella enterica; identical to SEQ ID NO: 398468

SEQ ID NO: 401719 - DNA, 354 bp, Salmonella enterica
atgcctgcgttacggagagcacggaaaacggtcctggagcgtaacacagcggtatgggtatggcagcaggaaagaccggtgagtatcgctgaaattgccgggcagttttttattcctctttatgtggcaaggaaggtggtacataacctgatgcggagtgcagatggtctgcgctgcaggctggaaacagtccggggaattaacagtgccgggcaccggggactggtaaaatatttttcggtgcagcacgttccggaagagtacctgccgggtggaaggatgaaaacggcagaaaggggattacagaatgatgcaggattttttcctccggaacagcagatgccggaggagtga

SEQ ID NO: 401720 - DNA, 261 bp, Salmonella enterica
atgagtgacattctcagcgcctttgagccggcatcgttgtttatcctgaaagtggatattgaaggcggagagaaagatttattttcgggagatgtgtgctggtttgatgatttttatctgtgcattattgagttacatgactggctgtatccgggagaaggaacatcaggaccgtttctgaggttgtgcgggcagagagaccgggatttcatttaccggggcgagaacattttttcggtaagtaaccgtcgggaatggtga

SEQ ID NO: 401721 - DNA, 462 bp, Salmonella enterica
atgacagagttgatgaagggtgatattaccgtgcagggcagacagcgggtattttactggcgggatatccggtcagaccgtgctgttatccggcagaactttattgaccgggagtatgcgacaggaatgtttatacgggatgcggatatcacggcacggtaccgttcgattctggaggccggactgacgccggtgatagtggactgcggggcgaatatcggaacgtcagtgctgcattttctggaggcatatccccgggcgcatgtggtggcgattgagccggcaccggataactttgccctgctgtcccgcaatacagaaggtctgaatgtaaccctgataaataagggggtctcctcctgcgcaggagaaatgacactggttgatacgggagagccttttgcataccgtctgacagacagacagacagacagacagacaggataccggttattgcaatga

SEQ ID NO: 401722 - DNA, 819 bp, Salmonella enterica
atgagccgggagacagtgccgtcggtggtgattctgggggaggactggacgctgacggcggcggtccggggactgatatcagagcggtggcccggggtggtcacggcggaggccggttcgccggccgggctgtcagcctggctggagcggtatccggcggcgggggtgctgttgtgcctgcgtccgcatgagagcctgccgtggctggacagcctgagcccgctgctgtgggaccgggctgtcagggttgtctcgccgacggtctggtacagcgacaggatggtactgggctatctgggataccgtcgcgcggtgagtacggatacgctgaccgggtggctgccgggaaggcagggcgccgggaggtgcaaaggggggcatccgctgtcgggttttatggatgaggtggtgcgtggcgcggagaagcgccgggggggacaggaactgccggtgccagggcggatgagccggacacggacggcgtgtctggtcagggaggtacagaaggagtcgctgaggatgctgccggcgcaggtgacggcacggcagtggtttattttatgccgtctgacagacgggatgaagggggggcaggtggcggcgttgacggggctgcaggaaaagacggtaagcctgtacaggcggcatgtgctgtgtgcgctgggtatggaggaggtgaaaagcgggatgccgctctaccgtggcgtgatggtacgggagtctctgcagcgttatccgtcaggagccggattaacggaaaacagatacggtcagccggggagagaagagcgaatggcagataaagagggagaggtatga

SEQ ID NO: 401723 - DNA, 471 bp, Salmonella enterica
atgacgggcagggagaacagaagggggcggagccggcgccgcgaaccgcagcagagcaatcacgacgtgtgcgtggtgccggaggaagtgtcggcgcatgaggggaagccgctgtatgttctggtggcgctgtggtgcctgaagcgggggggatgggtgaaccgggggcagatagcagatgccttcggtatcagtgagcggagcgcgacgttccagctgacctacctgtcgagaaaaaaagagcagatatgctgcgagctgagaaaagtgaagcgcgcgggggtaccggtggagagttatgaggtcagggtgacggaggtgagtccggaagcgggcgtacggaaagtgtcggagaagcagcgggaggcggtgaaaaccattcagcgcggtcgggtggggaatgctgacggggacgtcagggagctgacgaggaatatctggaacagtctgcaacgggggagaaaggcatga

SEQ ID NO: 401724 - DNA, 423 bp, Salmonella enterica
atggagaagtcggtgttttaccgggaagtggcgcaccgtacagagtgtctgcagatgagtgtgtcccggatggccgtggcgcggtggtgtgacagcccggagcaccgggaggcgctgtggcagatatgccgtgacacggcggcgtttatggtaccgccggcagaagacggggaaccggcctggagaaaggcgctttgggcgcggttgcaggagacgtctccggatgcactccgtcagttgctggcgctttcaggtggggcggtgctgcgtaaccagctggcccggggagaggtgtatgccggcgccgtgctgcacagcctgctgaaatcgtggctgtcgcagtacggccggggaaaggagaggatgcgccaggcagctcagggcgtgacgtcagtacggggatacgggggagggacgggatga

SEQ ID NO: 401725 - DNA, 489 bp, Salmonella enterica
atgaaggagcagaatgtgatggcggggacacgttcaccggggcggcgttaccgggcggaggactatgacgacgaggggaacctgaaggcctcattatggatgtggcccggggtggcatggctgctgctgccgtggtggctgacggcggccggggtgatgtcaggcagcacgccgctgatggcggaggtgctgtacccgacgacggcggatgcggtgttaagcctggtcacggcgctgccggtggtggcgctgtgtgcggtgtacccgcttcgggggaggataccccgggcgtcgctgctgacatacggggcggtgtttacggggcaggtgattgagctgttgcggaccgggagcgtcctgctgcgtgagacgggatgggggcatgacgggactgacctgctgctgagctgtctgtgcgtggattttgcggtcctgctgggcatgttgctgtcgccgcggttatggacagtgtttggctggcggcggtga

SEQ ID NO: 401726 - DNA, 1980 bp, Salmonella enterica
atgaatatggataccgaactgtctgccaccccggccccgtccggagaggcggctccgctgccggcggtaaccctgtttaaccttgagcattttgagtggcgggtccacacggcgcagacggagctggcctgtcgtgaactgatgtttctgctggaagagctggaccgacactatggccagtggggagagcggttcacggcttttgcgcccggccagacggcgtacgggctgaaccgtcatctgtgcacccggcttgcaggggcgataacgaccctgttttcccgtccggggttcagcatcagcgacacgggctatgtgcggctgatgaacctgcaccgctggctggcgctgatttttgcggtgagcagctaccgccatgccgaccacatcatccgtaacctgaatgcagccggcggcggagtggttgacccgctgacgctgaacgccgggaacctgcggctgttctgcctgtgttatttcccggactcggaaatcgccctgcagccggacgtgctgtggcagtacgaccgtgagacggtggtccggctgttctgtgcgctgattagcgggcgcgccctgccgacgccggcggcccacggaaagcgcgagcagttactggcctggctgccggacaggctgacggagctggattcgctgtcctttctgccggtggctgtgctccatgatatgtacatgcactgctcgtatgcggatttaccggaaaagcacgccatcaaacgcagcatcaatgcgctggtcaggcggacgctggagcaggaagggctgacggaccggagcgcggagacggcggaggaaaacgggaagccggtgatgatggtggtgctggagcatttcacacgccagcacagcgtgtaccggacgcattctgtggcgttcagggcgctgcggtcccggtttacggtacatggcgtggcactggagggctcagtggatgaggagacggcacaggtgtttgatgtgtgccaccgcgtcccggccggtgatgcggtcccggcaacccgcagactggcagaaacactgaagccggcggtggttttttatgccggggtggggatgttcccgtacaccatcttcctgagcaatttgaggctggcgccgcttcagctggtcggcctggggcacggagcctcaacgttctgcccggccctggacggttttgtggtggaggaggattttgttggcgcggaggcgtgcttcagcgaacgggtgtatgcggtaccggcggacagcatgccgtttgttccgccgtcacagacgcagcgggtgttgccggtgcgccggtcgtttgaagaaagacgcctgctggcagagccgtttgcgctgccggttcgtatagcggtctgcgcgtccatcatgaaaatcaacccgggttttctgcagacgctggcggagatacagcgccgcagccgggtcccggtacagttctgcttttacatggggtttgcacaggggctgacgctggactacctgcgtgaggtcattctgtccgtgttgcctgatgcggaagtgaatgcccatatggccgttcaggattaccagcaggcactgaacagctgtgagctgtttgcgaatccgttcccgtacggaaacatgaacggggtggtggatgtggtacggcaggggctgccgggtgtttgtctgtcaggcccggaggtgcacacgcatattgatgaagggctgttccgccgcctggggctgccggatgaactgattgctgacgaccgggaggcgtatatccgggcggtgttgaagctggcggaaaataccggctggcgggagtcactgcaggtacaactgcgggacaacgacccggagcaggtgctgttccgcgggcatcctgaaaagtttgctgaggtggtgtggcaggcgtggatggcgcggcaggtgccgccggaaaaaccggcaggccggggtaaagccggtaagggggggacccgtaaggaaaaggaggcaccatga

SEQ ID NO: 401727 - DNA, 6582 bp, Salmonella enterica
atgaacaagatatacaaactgaaatatgaccgccgccgccagcagcttgtggcggtaagcgagctgaccacgggggccggtaaggaagccacgggtcaggtgtgtggtctgtcagacatcagcagcttccgtaaactgctgggaaccctgacgccgctggcgttcctgacggggctgatagtgagcctgctgccggggatggcgctggcgaacccgtcactgccgaccggcggacagatagtggcgggccaggggagtatcagcaccagtggcaaccagatgaccgtgaaccagaacacgcaggggatggtgaccaactggaacagctttgatatcgggaagaaccacacggtacagttcgtgcagccgggcagcagcgcggtggccctgaaccgtgtgacgggcggccatgagtcgcagatcctggggacgctgaaggcgaacggccaggtgatgctgattaacccggccggggtgatgttcggtaagggcgcgaaggtgaacacggcgggcatggtggcctcgacgaagaacatcagtaacgaagactttatggcgggccgctacacgttcagcggagggagtcagccgggcgcggaaatcgtgaaccaggggagtctgaccacgacgaaaggggggtatatcgttctggcggcggaccgggtgagaaaccagggggagatacgcacgccgggtggccgggtggtgctggcggcggcggaccgggtgacgctgcagctggacaacacggggctgactgctgtgtcggtgaacgggagcgtggtgaacgcccttgcggagaaccgggggttaatctcggcgacgaacggtcaggtgtacctgacggcgcgcgggaaggacatgctgctgaacacggtggtgaataacagcgggacggtggaagcgaaggggctgagcgagcgcgggggagaaatcgtactggacggcggtgacagcggtgtggtgagccagtcggggatgctgctggcagacagcgacagcggccgcgggggtaaaatcacgctggagggacagaatatccacctggcgggcgggagcctgatatcggcgacgggtgagaccggcggcggtgaagtgtatgtgggtggcggctggcagggtaaggacagcagcatccggcatgcgtcgaaggtggtgatggacaaaactgcggtgattgacgtgtcggcgaaggcgcggggccagggcggcacggcggtactgtggtcggatgattacacgaacttccgcggcaccattctggcgcggggcggtctgcaggggggagacggtggccgggtggagacgtcgtcgcaccataacctgcaggcgttcggggatgtggatgcatcggcggtgaaggggaatgccggtgaatggctgctggacccgtttgatatcacggttgtatccggctccactgatactgatgtgaatgaaggcagcggtaatgacggtatcttcacgccggacaccggcacctcgcaggtgagtaacggcaccattaataatcgccttaacagtggcacaaacgtgaccattaaaacggccaaagagaacagtggctcaaatcagtggggcaatatcaccgttaatgcggatatcagtcatacagccactaataacgtcagcctgacgctggaagcggacggtaacatcaatatcacgaaccacagcatcacgtcgacgacaggtaagctggatgtgaacctgctgggcgcggggagccatgacggcaccatcacgctgaacaatgcgacggtgagcagcaacggcgggaacatcacgctggggcagctgaatgccgggagtgatggcaccacttcaggtctggcggtcagcatcacaaacagcaccctgaatgcgacgtcggccgggaatatcagtatcactgcgaacaatggcacgacgctgggtaatggcaccctgagcgggaatgaggtcagcgttagcgccagcagtggtaccggcgatgcgctggtaattaacctcagcagtaacctgactgcggccggtaacctgacggtgagcggagacacttcggcaacgggcaataaatacggtattcacaccagtgatagtcagttcacggccggtgacacgctgaatatgacggcagaggctgccggcggtacggacggagcctttaaggcatcggatatcaatgtcagtgcacagaatgccgtgatgaaggggacctcgggcggagccggtggtacgggtgtctggctgaccggcaatgtcaccaacacccgggacggcggtaacctgaccatcaccgggacgacgaccggttcaggaaacagtatcggagtgaatgtgctggcgaacctgacggcaaacggcacgggtaatctgaacatcacagggaaaggcgcgcagggtgtcggggttaaggtggacgggaaaaccctgaccgggggtaatgtgacggtgaccggtacgtccggcaatagtaacggtaaaggtctggaggtgaaaggtggcaccctcaatgccacaggcgggaatatcgcactgaccgggtgtatgaccggtcgcaatggcgggtttggggcgcatatctatagcggcagcagctttacggccagggataatatcacgataaccgggtatgccatggatggaacgaatggtggcctgaacctgaacggggggacatttaacgcgaccagtacggtgctgaacgggacctcacagaataataacctcggtgccaaagtgggcggggtgattacggtcagccagggtaacctgagcctcagcggtacggcgaaccgcgtaaactcagcccctaacgtgaccggcgtggtgtcagacggcacgctgagtatcacagtcagcagtggcaccctgaacgttaccggtaaggtgaatgacacggctaataatccgactagtgccagcaccaccaggggcctgagtctggttaacaccaccctgaatgcgacggaggtcagcctgtcaggggaagtggcgggggggcgtgatggcaccggtgcatccctgacgaacacgacgataaacgccaccacaggcaatgccaccctgaatgcgactgtggcgaacggtaatgcgctggttgtgtcgggcggcaatattaccgccgggaaggacatcagcctgaccggtacggcgaaggccggctcggggtatggcgtctccctgaccaacggaaacatgactgcctcgtcgggcaatatcagcgtgaacggcacaggttatgactcaggcagtggagccctgaacgtgaacggcggcaacttctccgcactgaatacggtgctggaaggtaccgcaggccgtaataataaaggcacggtgctgaatggtaacatcaacgtcacacagggtaacctggtggtgacggggacggtcactcagactgccaacagcgctgataataatcagtttactggtttgcttgcgtcagggaatatcacagtcagccaggggagcctgaatcttacgggacatattaccgggaaaagtggcttgaatgccaaggcagttaacctgacgaacctcaatatcagcgccagtaatgccagcattacgggggttaaccaacgcaacggaacaggttttattctgagcaatgtaaatctgaccggggacattgaaaagggtgcgaacaccaccttcagctctgcgggaagcgactcgtcagtgaccaacgtgattggcagcggggtactgaacgcgaccactacagatgtactgatgcgggctggtattgagaacgacacgcagattagcgcgtcgggtatggcactgggaggaagcggtgataactggaatcagaactataccagcagcaagggagggggctggatattcgatggtgccacagtcagcaaggcggggaatatcagtctgcagggggtgggttttgtcaacagcagcgtcacggcgggtaaggacctgaccattaacaacggcgatgactcgctgacagtacagaacacgaccctgaatgcgacgaccatcagtctgtctgggggaagtatcagcctgacaggcaacagcagtgtgaacgctgtaaatgatatcacgctgaacgccccaaaagggggagtaaatataaacgggcagagtaatgtcaacacggtgaatatcagttcagagagtggcaatatcagtattgaggggaacggggcaggatttaaccgtgatggcgttttaatcagcaacgctttattaaatgccagtcaggggggaattactgtcacaggtgtggctgatggtgctgattatagattaagagggggagtgaagtttactgatagtgtaaatctgacctcacaatcaaacacgattaatggcacgcatcggaaaggcaacgcaggtagagtgaattttgcaggtgtggtaataaaccccggagattatcactttaagggtaatacgactattaatgcagagtctgacgattatgcagggctggcctttagttcatctgttcccagaactaacataacgttctctgatggtaactttgttattgatgctaaaaataacagtactgcgttcaatagtataggagggatttctattgataactgggaggggacccaggcaaaaattatcataacaacgctgaacgggacgctgaatatttccggacaagcccgaaacagagaggggattaccagtgtttcctcgagtttttctatcaaccccaatgatggtagcggataccacggatatgtatttaagggcgatggtgatgtcaatgtaaaaggggtatcagattcgtcaaacggtgtggatatgcgtttttttgataataccggtgtaaccggtaacttcaccattaccggggaaagtaatacgggtaacggggtggctgttcctaagtttggtgagatcagtcttgtaaataccacaattaccggcagcagtaagagtggagccgggatactgatgaatgccagtgacaaacagattaagaaaattgacctcaacggcaatacgctgaccgggacatctgtgagcggtgctggtattaaaattaacggtaataatgtttccatcgccaacggttccctgaacggaacctcccagggtaacggggccggcgttgaactgaccgggggaaataactacaccgtcagtcatgtcaccgtcaccggtcagtctgccggcggaaatgctgtcggggttaacggtaacctgacgctgaatgacagcactctgagcggtaataccgcgaatggcagtggtgtcagcgtttccggcaacgtgaactccaccaacaccaccatcagcggaggggcaaccggcagtggtaatggtgtgtcgctgggcggtaatgccagcatcactgacgggacggtgaccgggaatgctgtggacggtaacggtgtcagcgtttccggcaacgtgaacaccaccaacaccaccatcagcggaggggcatccggcagtggcaatggtgtgtcgctggacggtaatgccagcatcactgacgggacggtgaccgggaatgctgtggacggtaacggtgtcagcgtttccggcaacgtgaataccaccaacaccacagtgacaggtaatgccacaggaacgggttccggggttgacctggcgggcaacgtgaccgggggcaccgtgaacggtaatgcgacagacggcaccggggtgaacgtgagcggggacagcacgctgacggacgtcacggtgaacggtaacaccaccagtggtaccggcgtggatgttaacgcgaacctcactaaccagggcagcaccaccgtgaacggtaatgccacaggaacgggttccggggttgacctggcgggcaacgtgaccgggggcaccgtgaacggtaatgcgacagacggcaccggggtgaacgtgagcggggacagcacgctgacggacgtcacggtgaacggtaacaccaccagtggcaccggcgtggatgttaacgcgaatctcactaaccagggcagcaccaccgtgaacggtaacgccacaggaacgggttccggggttgacctggcgggcaacgtaaccgggggcaccgtgaacggtaatgcgacagacggcaccggggtgaacgtgagcggggacagcacgctgacggacgtcacggtgaatggcaacaccaccagtggcaccggcgtggatatcagtggcaacctcactaatcagggcagcaccaccatcaccggtaactccggcagcggagccggcgtgggtctgaacggtaccgtgacgggcggcagtctggccggcaactcggtcagcggtccgggacttcacgtcacgggtaacagcaccctgaacggcgtggacgtcacagcctcttcgcagagcggcccgggcacgcagatggacggcatgctgtcggtgtcgggtggtacgacactgaacggcgaggagcagaaggactcggcagagttacgccgtcaggtgtatgagcgtcagcaacagctgtcacggtctgataccgtccgggatgcctatcgcacctccggttaccgcgtggaggaaaaaccggtaagtgtggaaatctgcacggacggtgaatgccgtgcgctggaaacgggatacgcggacgcgccgaaagcgcggtag

SEQ ID NO: 401728 - DNA, 1833 bp, Salmonella enterica
atggtgttctccattacccacaggagagggatctgctcgtcccgcattcctgcccgctgtcgtctgtccccgctggccgtcatggtcctgctcggggctggcatgtgcagctccggtgccaaggcagccttcctcactccgcccaccggtgccggtcagctcggtaaccagctgcgtcagcaggcagagtccgctccggccgcgcccgtcgcgccgtcactctccctgccgtccggtgaccgcgggcaggcccgcgctccggccgggaacgcccgtgtgacggtgaagcaggtcagctttaccggggaggtgaccgtcccgggcgcccgcagcgtcacggaacccgccctgcagaaagtggtttccccctggctgaaccggccgctctcctttgccgacctgcagaccatgacggaggctgtgacgcagtactaccgtgaccgcggtgtcctgctggcccgcgcggttctgcctccccagaccattaaggacggcctgctgaccgtcagggtcattccgggtaagtacgaccgtggcgtcctgcacaacagcagccggctgcgcgacagccaggctgagcgcatggtgaacgccacggccccggcagggaaggtggtgaaaaaagccggtctggagcgtctggcgctgctgatgagtgaagtgccgggcgtggaggcgcaggtgtccctgcagtccggcagcgtgccggggacctcggcgccggacatcaccctgaaacccggaaaacggttcggggggtacgtgggcctggacaaccagggggacccgaccaccggtcgcagccgcgtgatggccggggtgtatgcgaacggactgctgggctacggcgaccagctgcgggtggatctgctggacgcgtatgagaagagcgatctgttcaacggcagcctggactacagcctgctggccggcgggtacggtacccgggtcggggtgaactacagccatctgaactaccactacaccttcctgggagaaggctataacggctactcggacaactggggactgtatgtgacgcatccgtggatacggacggcgcgcgcgcgggtggacgtccgtgcggacttcggccagcagttcctgacggacaaatacccggcctcggtctttatgggcgtgggtgaagaggggcgcaagcgggcgacgctgggctcgctgacgctgtcagggagcgtggctggcgtgccgggcggcataaccgggttccgcgtacagggaacggcaggcagcctggactaccgtaacgagctgtcacgcctgattaacttcagtgacgagctggggtcagccgggcagttcgcgcggctgaactggggactgagccacgaccagcaggtgtgggggccgttctcggtgtacgcgggggtgaacggccagctggcaaaccataacctggactcctcgcagaagttcctgctgggcgggccgggggcggtgcgggcgtacgacatcgggacagggtcagtggacaacggcacggtggcgacgggtgaggtgcgctggcagcacgccattccgcagacacgctggacggcctgggcgggcacggccccgtcggtgacggtggcggcgttttatgaccagggatggggagagcagtatgcggagaaccgtaaccagaacggtggcgggaagataacaccggataatcatgtgaacctggccggggcggggctgtacacgacagtggcggacgccgggaattacgccctgactctgacatgggcgcaccgtacgggggatgcagacccggtctcggggctggcagaccgtgaccgcttctgggtatcggcggtgaaatcattctga

SEQ ID NO: 401729 - DNA, 663 bp, Salmonella enterica
atggaatcaattattaatcataaacttactgatgatgacaggcagttgctggcgtcctgtattccatttattgactgccttggtcagtttctgggtgagtactgcgaaattgtcctgcacagctttgaggatttgcatcattccgtcatccatatagtgaatggccatgtgacaggccgggaaaagggcgctcctgttacgaatatcgccctggagaaacttgcagaattcagttcaacaaatgatatgtgggacgtctatttcagccataaaggggtacggccttttaaatcatcatcaacactcattgtgaataaggacaaagagcctgtaggcatgatatgtatgaattttgctctcgatatgcccctgaacgcctttattgaaaactttacaaaatccagtaactgtaagaatgagaatttcacacaggatattaataacctcgttctcagtcatcttgagcctgtaaaaaacatggtttatgctaataaaaatatctccagcaagaacagaaatttcgaaattatcaaagagctgaactcaattggcttgtttaaatttccggttacaacaaaaattgtgtcatcgggtctcgggatcagttctaatactatttataaacaccttcgaacgttgaatggcaagatgactgaaaaatga

SEQ ID NO: 401730 - DNA, 954 bp, Salmonella enterica
atgaaacttggtcttgaaactgagtcatatcatcttttctttcagcagggtgtgatggatattttcagcttcatttcaaaaacaagtgaactggggctggatggtgtcgaaataaatattattccggatgttgggttgcaccctgtgtttggggtactgagcagtgattcacctgaatatctggcaaaagtccggaaaactatcgaggcatacggactttactgtgagatagacacccgttttacttctcacgaatctgttaccaaagcagtggaaattgcatctgctctgggagctgatgttatcagaacctatatgttccgaaggggagaatataatccacagagataccctgaaatcattgcacagcttaaagcgcaggttccgttgctcagtaaaaagcgaatcaggctggcaatagaaaatcatgaagacgaaactgccgatgagattattaacatagtcaaatcggtggattcagagtgggttggcgcacactgtgatattggtaatggcatgatggcatgggaagaacccgtggatacagtacgtaagctggccccttatgcttacagtacacatttcaaagatcatattgtcacccgcaacggagaggaactggttgtctgtggcgttcctgtcggggaaggcagtattgatattgatacctgtttcaaaacgctggttgatgaatcctctttaacccgtatcaacattgaaacatgttttccatatgcttcccgtttttcccgcccgaaaggcacgacgaatacactgaaaggaacgtttaccgtaaaacctgcaccatttgatgagttaaaaataaaacctctggagtattactatcccgcaaaaatatctgaagcagtattgcaggagttaatggaggctcaggaacgctgtgttcaggtttccgttcaggctcttaaaaatttacgaaaaaaatattgttaa

SEQ ID NO: 401731 - DNA, 378 bp, Salmonella enterica
gtgatcattaaaactaaaaatgcaccggaagccattggcccatactcccaggctgtttcaactggtaatttattgtttatatcaggatgctgccctttcagcccggaagatggttcagttaatgggggtgacatcgaagctcagacgaaacaggccatgaataatttaaggtctgttgttgaagctgccggtctggaaatggatgacatcgtcaaaacaacttgcttcatcagcgatatgaataacttctcattgtttaaccaggtatacagtgggtatttcgcttccggaacttatcctgcccgttcctgtgttgaagtcgcccgattaccgaaggatgtactgatagaagttgaagctgttgctgttgtcaaataa

SEQ ID NO: 401732 - DNA, 201 bp, Salmonella enterica
atgactattgctgaacgtcttgagcagaaaggtcgcgaggaaggacgcaaggaaggtctccaggaagggcgtcaggagggcgctgctgaaaaagcacagactattgcacgacagctccggaatatgggaatgacaccagagcagattgaacaggcaacagggctttccggtgctgaactgaaaaaattatttgctgactga

SEQ ID NO: 401733 - DNA, 657 bp, Salmonella enterica
atgaatcatgtcgccgggccgaccggttattccccggaggggcgaaagccccttctgccgtccacttcttcggggtttcaccccgcagtggacctttccgatggggcgcccgtcaccacgtcacggggcggctgtccgggggcggacgcaaaagtttttgacgcccgcggcaaaaagttttgtggccggtacacctccccctggacggctgaaacgggatgtggttacttcagcccccggaaagtccgcagcgggaaacaggccgcagaggtggcggcaggagggaaaaagccttacgccccgcaaggggtgcggggagcgccgtcaccggcgcgacaatggcggcgcgaccgctccggtcgctgcaagccggggtttcagacatcagaccgtagcgaagcccgaaaccgcgccagcgggttcggcggagcctggcaggtgcgccagcagctgcccggcggagtcgggcttgacgaccggatgccgtcaggcagccgggagccgaaggtgtccatgcgctcctggccgacagaacaacagacaccacacagcaaaaacagttctcataccatgaatggcaggaagggctgcgccgcaggcgcggcctgcctgcatttcaggcaggcgtcagcctgccaggggttttctgctgcctga

SEQ ID NO: 401734 - DNA, 318 bp, Salmonella enterica
atgaagtggcgttattcgcttcgctggaaactgccctctccttgtcccggcgaacaggaacttgtgtctgaagtggtggaagcagggcaacaggctcccgaatccgttatgtcacgctgggtggcgggggccgggtatgccgtgtgtgtcgattttctgggggagaggcaggttcgtcgctggagtaatgagcgtaaagccgccacccgtcgccggaatctcgaacggcgtattaaccggattgctccactgtttgcggatgaactgatcacaagggagcttgaggcacggcctgaatatttccgtggaaaatcatag

SEQ ID NO: 401735 - DNA, 741 bp, Salmonella enterica
atgatcccccgttcgcacgccctggtaccacaactgccggaacaggaagctgctgctaaggcgattatttatgtcgaggagaaaagggcgaaagatccgacatggaaatgttattccagtccttatgcgcaggcgtttctccggtttttgtgcgggaaaggaaaaatttccggcaaatcacttaaccagataagaggcattatctgggataaggaggataaaataccgctgtcgtcttatgagcgggcgcttgatgatttcatatcaagccggggacggtattgtccgaccccgctgccgtcagatcttgcccggtatgtgttccctgaaaacttgttccgacgaagtgaccgtcaggaaaaacgccgtacaagagagttccatcagtattcccgccgtgaacagcgcaaaagacaggagagggagaacaaatatgcctgtctggtcgggcaggctgaaattgacctcgcttttcagacaccggagtcgttgcgggcctggtatttaagatggtcgcagtctgacattaagcaatatgatctggagcggatgctctggatatggctggagcgatgcccctcgttgtctcatctggaacgatggcagtattcagattgtcctgtctgggttctggaagctgacatccgcgatgcagccgcatcactgacgacggagcagaaagcccttgaacgctggcttgtgcctgacaaactgacagtgtcagtaaggagccagatatga

SEQ ID NO: 401736 - DNA, 549 bp, Salmonella enterica
atgtcagcacgtggtgttaacaaggtcattctggtcgggaatctggggcaggccccggaagttcgttacatgcctaacggtggcgcagtggcaaatctgcaactcgcaacgtcagataactggcgtgataaacagacgggcgagatgaaagagcagacggaatggcatcgggtggtgctgtacggaaaactcgcggaagtggctggcgagtacctgcgcaaggggtctcaggtgtatatcgagggacaactgcgaacccgtagctgggacgataacaacggcgtcacccgctatatcacagaagttattgttaacaccacgggcaccatgcagatgctgggtgcccgccgtgaaagttatcctcagcagggcagtcagcagttcagcggtcagccgcaacctcagaccccacctccggcggcaaagggagagggcaaagcggcaaaaggggcagggaaagcagccaaaggaaaaaacgccgcagcaccgcagcagccgccagcgcagcccgaaccggcgtatgacttcgacgatgacattcccttttga

SEQ ID NO: 401737 - DNA, 192 bp, Salmonella enterica
gtgaacattaaaccagaaacccgtgaaattcttcgccagtacaaagagctgattaatgcccgccgccgtgatgccgaccagagtgaactgacgatcgcgcaggtcatggatgaaatctgcgagtacatggcctgtcagtgtgccgtttacatcggcggtcacttcatcttacagggaggaaaaagcaggtaa

SEQ ID NO: 401738 - DNA, 411 bp, Salmonella enterica
atgtacgcacccattaaagaaatcatgaccgatctcctgaaatatgacatggcgcctgaagaggctttgctggttctgtgtattacgcgtgaggatatccgtatgctgaccactgaatggaatatgtccgatgaggatattacatgtgtcatgcagcgactgaatgcaatgtatgagcagggggctgatgtgagcatgatccgctgtatcgctgaagaactgatggatgagcgccgcgcaataggtgatgtcagcgttccggccagtgcgctgcaaaaaataatgttactggcaggttctgaaatgcagcgactgtatgccgtggcagaggaagggggcggggatgcagacgccttcctggcggaagaaatagacgccatgcgccagttacagactgcgatcgacggataa

SEQ ID NO: 401739 - DNA, 426 bp, Salmonella enterica
atgcaatacgcagcaactgcccccctgaacgttgaagaatctgatcgtctgtcatttctgccgtatctgttcggcgatgatttcatgattgcagaaatgcaggtgtacgcgctggccagaaaaatgattaccggatacgaaggcggcttctggcacttcatccgtctgccggacggtggcggctatatgatgccggactgtgggccagtgcatctgactaacagtgaaaactggtttgactctactgtcagcgcggatgcagcagggattatcctcacatccctcgctattaaccgccgtttatgggcgcatcacgcgtgtggtcatgctgcgctgacgcaccttttccggacaagggatgcgcagttatggagccatattgagttccatcctgaatgtaacgccatttacgccgcacttgactga

SEQ ID NO: 401740 - DNA, 186 bp, Salmonella enterica
atgggaagcagaaaaaccaatgtgatgatcgtggggaaaaccggtagcggtaagacagccatcagcgttgatgtgatgcggacctttttatcagaacgacagctccgtgactggcgcgatttacgcaaagacattcagaaatacggcaaaaatgcaggagacgaagatcatgacaaccaacagtaa

SEQ ID NO: 401741 - DNA, 291 bp, Salmonella enterica
atgacaaccaacagtaacggtggtccgggtaagacccgccaccttaatgatattgctgcctgctgcgagaacatgaggatgcgtgtcatatgtgttggtgccacagagagcgacttctggctttcagcgcctctgccgtgcactaccgcccttgactggaaagcccggattgctcagggcgtactgcagcgggaacgagggcactgcctgttcccgggaaaaccgggctcaggtatgagcgtaacaaaacaacagatgtcccgggttgtcctggcgaagtgtgagaaatga

SEQ ID NO: 401742 - DNA, 444 bp, Salmonella enterica
atgatggatatttcttcattacttttgcgtgatttcagcgatctaacccgaccggagttgattgcgaggctcagagatgtggatattttgcgggctaaagttgtgcatacccacgaaagcctttctccccggaaaattcagtctttcgctattgcaattgtggtgttgattgcggggtatgccttaactgattacctgcttcttgccagtgtggcggcgcttggtgcccagattatcgtattgcgctattccactcagccgcttaactggagcatgcaattgaaaatcgaaataacaaaactggagccgttactgcattcaccccttcgtcagtggggtatcagttctgatacctcatgggaattcgcgctctttagtctggaaaaagaaatcgatcttattcattcctcgctttcgcaacccgtcagccctttcagggcataa

SEQ ID NO: 401743 - DNA, 246 bp, Salmonella enterica
atggctatttttatggaagttcgttgtgcaggtcgcggtgatgttgatggttgccattctgaccagaacgccgaaccaatgacgacagcacatgaaagcgttaaagatgtttctacggcgctgaaatttcttaaagacgattcactaaataacggctgggtgttgcataaaggtgagctttattgcccggtatgcgccaacgcaaaagcatgggacgccgctggcattggcgtgaagggggagtga

SEQ ID NO: 401744 - DNA, 423 bp, Salmonella enterica
atggcactgacgaaaaaacagcgtgcagaactgcgcatgaagtttggcggtcgctgtgcttattgtggctgcgaactaccagagaaaggctggcatgctgaccatgttgaggctgtccatcgcaaactggtaattgatgaagaagccaggctgaaagggaaatggaagctaaaacagacaggggaagtttatcgccctcaatatgacaattacggcaatttgttcccggcatgtgctccatgcaacttgtttaaatctgttttcgatattgaggaatttcgcaaccagatagcgatgcaggctggtcgtgcattaaaaacctctgtgaatttccgcaccgctgaacgctttggcctggttgaagtaatcgaaaagccggttgtgttctggtttgaaaaatatcaagaaggagcgtcagcatga

SEQ ID NO: 401745 - DNA, 183 bp, Salmonella enterica
atgacaactaaccacccggcgcacggtcctgatcgcctgcgccaaataagtaccctgctgccgtccctgactcgccggatgcccggcagggagcggctgatgtgggaggacatgctgaaaattcgctcagcggatcacgcttatggaatggtgcgcggcaagtcacagggagaaaaacgatga

SEQ ID NO: 401746 - DNA, 231 bp, Salmonella enterica
atgaaaattgagaaatttttctacgcaggaaaatttacgattggtttcgggatatcaagcgagctctggcatatcgaaagaaagaatggcggcaaagctatcagcttttttcacttaggctatacgcctgaccttaacccgcaacaaaagtttaaagcgtcattaattatgcttaccgtcttgtggttcacaattcggttaggtgtcatcgactgggaaaggatgacgtaa

SEQ ID NO: 401747 - DNA, 387 bp, Salmonella enterica; identical to SEQ ID NO: 393901

SEQ ID NO: 401748 - DNA, 510 bp, Salmonella enterica; identical to SEQ ID NO: 393927

SEQ ID NO: 401749 - DNA, 2043 bp, Salmonella enterica
atgtttaatatccgcaatacacaaccttctataagtatgcaggctattgctggtgcagcggcaccagaggcatctccggaagaaattgtatgggaaaaaattcagttttttttcccgcaggaaaattacgaagaagcgcaacagtgtctcgctgaactttgccatccggcccggggaatgttgcctgatcatatcagcagccagtttgagcgtttaaaagcgcttaccttccccgcgtgggaggagaatattcagtgtaacagggatggtataaatcagttttgtattctggatgcagacagcaaggagatattgtcaatctctcttgatgatgctgggaactataccgtgaattgtcaggggtacagtgaagcacatgacttcatcatggacacagaacagggagaggaatgcacagaattcgcggagggggcatccgggacatccctccgccctgccacaacggcttcacagacggcagcagagtatgatgctgtctggtcaaaatgggaaagggatgcaccagcaggagagtcacccggccgcgcagcagtggtacaggaaatgcgtgattgcctgaataacggcaatccagtgcttaacgtgggagcgtcaggtcttaccaccttaccagaccgtttaccaccgcatattacaacactggttattcctgataataatctgaccagcctgccggagttgccggaaggactacgggagctggaggtatctggtaacctacaactgaccagcctgccatcgctgccgcagggactacagaagctgtggacctataataattggctggccagcctgccgacgttgccgccagcactacgggagctgagggtctctggtaacaacctgaccagcctgccggcgctgccgtcaggactacagacgctgtgggcctataataatcggctgaccagcctgccggagatgtcgccaggactacaggagctggatgtctctcataaccagctgacccgcctgccgcaaagcctcacgggtctgtcttcagcggcacgcgtatatctggacgggaatccactgtctgtacgcactctgcaggctctgcgggacatcattggccattcaggcatcaggatacacttcgatatggcgggtccttccgtcccccgggaagcccgggcactgcacctagcggtcgctgactggctgacgtctgcacgggagggggaagcggcccaggcagacagatggcaggcgttcggactggaagataacgccgccgccttcagcctcgtcctggacagactgcgtgagacggaaaacttcaaaaaagacgcgggctttaaggcacagatatcatcctggctgacacaactggctgaagatgctgcgctgagagcaaaaacctttgccatggcaacagaggcaacatcaacctgcgaggaccgggtcacacatgccctgcaccagatgaataacgtacaactggtacataatgcagaaaaaggggaatacgacaacaatctccaggggctggtttccacggggcgtgagatgttccgcctggcaacactggaacagattgcccgggaaaaagccggaacactggctttagtcgatgacgttgaggtctatctggcgttccagaataagctgaaggaatcacttgagctgaccagcgtgacgtcagaaatgcgtttctttgacgtatccggcgtgacggtttcagaccttcaggctgcggagcttcaggtgaaaaccgctgaaaacagcgggttcagtaaatggatactgcagtgggggccgttacacagcgtgctggaacgcaaagtgccggaacgctttaacgcgcttcgtgaaaagcaaatatcggattatgaagacacgtaccggaagctgtatgacgaagtgctgaaatcgtccgggctggtcgacgataccgatgcagaacgtactatcggagtaagtgcgatggatagtgcgaaaaaagaatttctggatggcctgcgcgctcttgtggatgaggtgctgggtagctatctgacagcccggtggcgtcttaactga

SEQ ID NO: 401750 - DNA, 654 bp, Salmonella enterica
atgtcacaattatcagtaattggcggtcaaccaatattactcattgttattttttttctgctctcggtattacctatatttgttgttattggaacatctttccttaagattgtcattgttctcggcatattgaaaaatgccttaggcattcaacaggtcccccctaacatggcgatcacttctgttgcgttagtattaacaatgtttattatgtctccagtgatattaaaaattaatgataatattgaaaaaaacccaatcaactattctgatagagacttttatcaaaaagttgaacaaggaatattatcgccgtatagagtttttttgaaaaaaaatactttagagaaagatatttctttttttgaatctgctgcaaaaaagaaacttggtaacgatacggtgttaaaagaagattcaatattcatattgttaccggccttcactttaggtcagcttgaagctgccttcaaagtaggttttttactctatctcccttttatagcaattgacttaattatatcaaatattttgttggcattagggatgatgatggtctcacctgttactatatcgattccattcaaaatattgttatttattctcgtcggtggatggcaaaaaatattcgaatatctattggtggtaaactga

SEQ ID NO: 401751 - DNA, 1401 bp, Salmonella enterica; identical to SEQ ID NO: 376817

SEQ ID NO: 401752 - DNA, 1308 bp, Salmonella enterica; identical to SEQ ID NO: 376738

SEQ ID NO: 401753 - DNA, 570 bp, Salmonella enterica
atgaaaaatctacccagcgactattttcttgatgcggatgatgacattctggattttcttgaaaaacagggagaagagtgcattcgggaaatccattgctcaaacagcatcaacaaggaaaatggctataaattattaagcattctgatagttggcatcggttcatcatttttactattaacgcaaaaaactcatctggattttttgggcgctggactggctgtttttgtcttttactggtccatttgtgctgtgtaccttgttgttaatgtgctgaaagttcataaacgtgccattattcatgcgtcgccagatattctgtacactccggcgattaagggcattactgcgatggattacgccaggcttaaagagcgaggtttttcggggaaagacagccgtttgtccgtattgagaaggtacagattgatggctttgtgcagaactgcaaacgaattattgcaggaaaataaaagactgagagaaggactcgagaaggcaaggatatcagctatccttgcccctgtttattcattaatggtttctgttgttatttactttttcttctga

SEQ ID NO: 401754 - DNA, 153 bp, Salmonella enterica
gtgaaaagtgcgcgctttgtgctggctgccatcctgctgtttctggtagtggcggtggatttcaccggacggctgatgtcggtgctggcagatggtgtgctggtggcgatggcgctggccgtactctggcctttactgcgcaaatctgaataa

SEQ ID NO: 401755 - DNA, 393 bp, Salmonella enterica
atgtctgaacccttatccggttccggcacggctgcggcgctcggcggggcgacggtattcgggctgtttaccggaacggatttcgggattgtgtttggtgcgttcgccggggcgttgtttgtggcaacgatgccgcagaagatttcagcctggcgtgtggcggcacattttctggtgttgttcattgttggtgtactgggggcgcgtgtactgtcagcctggattgcatcaaaaacaggttatgacggtacatctgcggatgcactgtgtgcggtgctggtggcggtggtgtcggtgaagattctgtcgttcatccaccagcaggatattgcatcactggtgtccggtgtgttctcccgcctgcggggtggaggaggcggcaatgttaagtaa

SEQ ID NO: 401756 - DNA, 276 bp, Salmonella enterica
atgttaagtaaccttcccggattgctgaatgtggcgttatgcacggttatcgtgctgacgctctttttttatcgtcgtcgtgattccagacataaaccgttgatgtcatggctggcctggctgctgatgctgctttatgcctttgcgcccctcagctatctgtgtggtcgcccgttagcggcgaactggctggcggtggggcttaatttgctgttctgcgtgctggtaatacgcgcacgcgggaacgtttcaaaaatcctttcattccggaggtga

SEQ ID NO: 401757 - DNA, 288 bp, Salmonella enterica
atggggcggggactggaaaacgctgaaggacgggccgcacttccaattgaaacgctgatagccgggcgagttatgagtcgaaaacactggacacacagaatgccgcgaacggcagcgaaatgggcactggtagcgatactggtgccttttttattggtgggatgcgtcagcctggataaggcgcgccagctttttgatacagtttctcaggtctgtcagttgattgatggcttcagcaagtatgaatcaaacaggatgtgccaactactggatattaaaagattttag

SEQ ID NO: 401758 - DNA, 768 bp, Salmonella enterica
atggaagaacacggcaactatcttatcaagccaattcaagttattggttgtggtgcttttggtagagtagaacaaattgagttatacaacacgaacgggcacaagtgcgggatatatgcaagaaaggtgttatctgttcgcaaagagcttgttggtccaatttttgattatgatgattggcggcgcagatttgagcgggaagtgaaatatcaggcagcgtgcagtcattttaatgttgtaccgatttacattcaccatttgaattctggtgttccttggtttgtaatggatctggctattactgatttgaaaaaggaaatacgtagtggtgtattaagtaatgtagagaaaatcaaaattgtagaaatgattctttctggcgttgaatttattcaccaaaaaggatttttccacagagatctgaaaccggaaaatattttgcggttcgcggatggtatgtataaggtttctgattttggcttggttaaaaataaaagtaaggaagcggagtccgaagttttaacaaaaattgctgttaaaatgggtactgatggttaccgtgctcctgaagcatcagatggcatctataacgaaaaaacagatatatatgctttaggtgcgataatcaatgagattaaattggataatcttcctggcttgagtgatttaattaacaaaagtacatcgtacgtcccggcaggtcgttacaattcagtctctgagatgcgggctaactttaatcatataattaaaggcgctggactatga

SEQ ID NO: 401759 - DNA, 744 bp, Salmonella enterica
atgattactctcttaaactgcgggttattttctgttgcgaaagaaatcgccggagaaaatgaagatacaatattagcaccattgttgactcgggctggttatgttatggctgtggctgatggtgtggggtcttatgctggggctaaagtattatcttcaacagttattaacgctcttaaggaattaaccgaaaatggagagttcgttgacgttgaagctacatttattgggataaaaagtaaaatcaacgaactcgttgaacatgatccattactttataaagctgcaaccacattgacttatgcaattttgaacgaaaagggactgtatattggtcatgtgggcgattcacgcttgtatttaaagaaagcacgcaaattgattcagttaacaaaagaccatacgcagtatcaaagcctaatggatcggaaactatacactaagaaagagttggatagcatgggagtgtcccatacacttacgttagcattgtccaactctattgatttgggctacgaacatattttttatccgataaacgattgccttgatgatgatggttttattaacttgtatttaatgaccgatggggcttatcatttttggaacaaaagacctcgtttttcctatgatactttgaaaaaaccaactcgatttgcatcgagtttgctaaatcgaatagaacttaatggcgctattgatgattattcattggttgctgctaggttttccatttcaaaatag

SEQ ID NO: 401760 - DNA, 1140 bp, Salmonella enterica
atggccaggacgaactggggtgaggaattatcccggtttgcaaacgaatggcgacagacgggaataaagcctaaagagtggagtgacagagaaggtcattcatggggaactgcgaaaaaccatatcacgataaaggctgctaaagctctcctttcaggaagtggaggaaaaatcgcgaattcgggaaaaaaatcgcgaaaaaaagacccccaaaaaatcgcgaatttgcagtcaggaaaagagcaaaaaagttcgggatgtaacgatgccaggacatccaaaaacggttctaaaaataccagcttcagcttgttgcttggtgatgctgatatccctttcatccctgatgaattcggcatttctgaccagcaggcgaaattcgcaatgctggttgcccaagggaaaaaactcgttgaggcatatcgcctggcaggatacgagtcagaggggaatgcggcctacgtaaccgccagccagctcctaagaaatcctaaggtttatcgtgccatcagctacttccgcaatcagtaccagaaacgctataccgcagacctggatttactggtgagtcagttgatggccattgtccaggccgaccccaatcagttggcacaatttcgccgtgttaactgccgttattgctggggcgagaatcacctctaccagtggcgtgatattgcagaattcgataaggcagcggcacaggcctccagagatggcaaacccgagccggaatatggaggcctcggctttgttgataacgccatacccaatccggactgcccgaagtgctgcggtgagggaacgggacagctttatatggctgataccactctgcttgatggggatgcgcgacaattatatgcaggggcaaagctcgggaaatttggtgttgagatcctgctggaggataaggctgccgcccggcgcgaacttatcaagctgataatggcgacgaaaggaagttctgctggtggtgcaactgacagtcgcaatgatctggagcttgaaggactgaggcttcgcaacgaaaagctgcgcactgagattgaaaacctcaaaaaaggcgtgggtggtgagaataacgaaataattatccacaactctctgccgatgccgggagtggataatgtcgattga

SEQ ID NO: 401761 - DNA, 294 bp, Salmonella enterica
ttgcttcgtccctgcattatccacgatcccgactctgacgccggtattcatatgctctcctggcatggctcgccgctgattcgtttttacactgaagcctggtgcccaacctgcgcagaatttgtttatgccggttttagcaatgatgatgaaggcgccgcgcagtttttatcctcacttgccgagtggaatcagccaggagtcgggttgaacgaagcatttaccgccctgacgccgctgttttcactctttgccgatggctattaccggctggaagcccaactacactcttaa

SEQ ID NO: 401762 - DNA, 2286 bp, Salmonella enterica; identical to SEQ ID NO: 376964

SEQ ID NO: 401763 - DNA, 369 bp, Salmonella enterica; identical to SEQ ID NO: 377198

SEQ ID NO: 401764 - DNA, 1362 bp, Salmonella enterica; identical to SEQ ID NO: 376671

SEQ ID NO: 401765 - DNA, 591 bp, Salmonella enterica
atgaaaaaacgtgtatttgtgattgctgccatcgtgagcggcgccctggcagtatctggctgcacaacaaacccttacaccggcgaacgcgaagcaggtaaatccggcattggcgcgggtattggatcgctggtcggcgcaggcatcggcgcgctctcctcctccaaaaaagatcgcggtaaaggcgaactgcgtgacaaaatgcggggcacaggcgttagcgtgacgcgaagcggcgataatatcattctgaatatgccgaataatgtcaccttcgacagcagcagcgcgacgctgaaaccggcaggcgctaacacgctgaccggcgtggcgatggtgctgaaagagtatcccaagaccgccgtcaatgtggtgggctacaccgacagtaccggtagccacgatctgaatatgcgtctgtcgcagcagcgtgctgactccgtcgccagttcgctgatcacccagggcgtcgacgccagccgtatccgtaccagcggaatgggtccggcgaacccgatcgccagcaacagtacggcagaaggtaaggcgcaaaaccgccgcgtcgaaattaccttgagtccattgcagtaa

SEQ ID NO: 401766 - DNA, 543 bp, Salmonella enterica
atgaccatttgcccgaccggggcgattgtcgaaccgtatacggtggacgcgcggcgctgtatttcttatctcaccattgagctggaaggcgctattccggaagcatttcgcccactgataggtaaccgtatttacggctgcgatgactgccagcttatctgtccgtggaatcgttactctcagttgaccgacgaagcagattttagcccacgcaaggcgctgcataacccagatttgcttgagttgtttagctggagcgaagcgcagtttctgaaagtcactgaaggttctgcgattcggcgcattggccatttacgctggctgcgcaatgttgccgttgcgctggggaatgcgccgtggagtaatgccgtcattacggcgttggaaagccgcaagggtgagcatccacttcttgatgagaatatcgaatgggcgattgcgcaacaaattgaaaagcggaacgcctgcatcattgaagtgcagctaccgaaaaaacagcgtctggtcagggtgattgaaaaagggctggtgcgcgatgcctga

SEQ ID NO: 401767 - DNA, 414 bp, Salmonella enterica; identical to SEQ ID NO: 376887

SEQ ID NO: 401768 - DNA, 1032 bp, Salmonella enterica
  misc_feature (1017)..(1026): n is a, c, g, or t
atgacaccgcatgtgatgaaacgagatggctgtaaagtgccattcaaatcagagcgcattaaggaagccattctacgtgcagctaaagcagcgggagtcgatgacgcagattactgtgccaccgtcgcagaagtcgttagcagccaaatgaacgcacgcagtcaggtggatattaacgagatccaaactgcggttgaaaaccaactgatgtccggcccgtacaaacagcttgcccgcgcctacatcgaataccgtcacgatcgtgacattcagcgtgaaaagcgtggtcgtctgaaccaggaaattcgcggcctggtagagcaaactaactccgcgttgctcaatgaaaacgccaacaaagacagtaaagtcattcccacccagcgcgatttgctggccgggattgtcgccaaacactatgcccgccagcacctgttgccgcgtgacgtagtacaagcgcatgagcgcggcgatatccactatcacgatctcgactattcgccgttcttcccgatgttcaactgtatgttgatcgacctgaaaggcatgttgacccagggctttaagatgggtaacgccgagatcgaaccgccaaaatctatctctaccgccactgccgttaccgcgcagattatcgcgcaggtcgccagccatatttatggcggcaccaccattaaccgtatcgacgaagtgctggcgccgtttgtcaccgaaagctataacaagcaccgcaaaaccgccgatgagtggcagatcccggatgccgaagggtatgcgcgttctcgcaccgaaaaagagtgctacgacgccttccagtcgctggaatacgaagttaacacgctgcacaccgctaacggccagacgcctttcgtgacctttggttttggcctcggcaccagttgggagtcgcgtctgatccaggcgtctattttgcgtaaccgtatcgccggtctgggtaaaaatcgcaaaaccgccgtgttcccaaaactggtcttcgctatccgcgatggtttgaannnnnnnnnngtttga

SEQ ID NO: 401769 - DNA, 534 bp, Salmonella enterica; identical to SEQ ID NO: 400171

SEQ ID NO: 401770 - DNA, 552 bp, Salmonella enterica
atgacggcgcaggtattggcgacagaacgcacgcaaccgcagttgattgtgttgcatttaatgggatcgcatccccaggcctgcgaccgtactcatggaaaatacgcgacgtttgtccagtcgaaagagacgtcttgttatttatacaccatgacgcaaaccgacgatttgctccgtcagctctatactcagcttcgtcatagcggcgacagtttttcgctcgtctatttctccgatcacaggctggcgtttaaagagcgcggcaaagcggtacagtacctggcgcatgacgacaaattccagcaaaacttccaggtgccgtttatggtgctatccagcgacagtaaagcgcatcggatcattaaagctcgccgttccgcgaacgatttcctgagttttttctcgcaatggacaggaattagcgctaaagagatcaaaaatcgctatcgatttatttcggaacagaaagccgggcccgtttatatcaccaatttcaaattacagaaagtggactataaccatctgggcagcgatattttttcactaaaataa

SEQ ID NO: 401771 - DNA, 429 bp, Salmonella enterica
atggcgcgtcttaaaattgctcagccaaactcctcactgcgtaaaatcgcagttgtagtagccacagcggttagcggcatgtctgtctatgcacaggcggcggttcaaccgaaagaagaaaccattaccgtaaccgcagcgcctgcgccgcaggaaagtgcctggggaccggctccgaccatcgccgcgaagcgttccgccactaccaccaaaactgatacatctatcgaaaaaacgccacagtcggtttcggtggtcactaacgaagagatgcagatgcatcaattccagtcagtaaaagaagcgttgggttacacgccgggcgtaactgtaagcagtcgcggcgcttccaatacctatgacttcgtgattatccgtggcttctcttccgtcggcctgagccagaataactatctctggatggcctga

SEQ ID NO: 401772 - DNA, 276 bp, Salmonella enterica; identical to SEQ ID NO: 376783

SEQ ID NO: 401773 - DNA, 465 bp, Salmonella enterica; identical to SEQ ID NO: 376905

SEQ ID NO: 401774 - DNA, 567 bp, Salmonella enterica
atgaaagcgttaacggccaggcaacaagaggtgtttgatctcatccgggatcacatcagccagacaggtatgccaccgacgcgtgcggaaatcgcgcagcgtttggggttccgttccccaaacgctgcggaagaacaccttaaggcgctggcgcgcaaaggggtgcttgaaatcgtttccggcgcatcgcgaggtatccgtctgttacaggaagaagaggacggattaccgcttgtcgggcgtgtcgcggcgggtgaaccgcttctggcgcagcagcatattgaaggccattaccaggtcgatccttcactgttcaaacccagcgccgatttcctgctgcgcgtgagcggtatgtcgatgaaagacatcggtattatggatggggatttgctggcggtacataaaacgcaggacgtccgtaatggccaggtggttgtcgctcgcattgatgatgaagtgacagtaaaacggctgaaaaagcagggcaataaagtggaactgctgccggaaaacagcgagtttacaccgatagtggtggatgtcattcgcaacggggaatggttgtaa

SEQ ID NO: 401775 - DNA, 405 bp, Salmonella enterica
  misc_feature (330)..(339): n is a, c, g, or t
atgaaagcatttgatttgcaacgaatggcgctggataacgtgtcggtagcgtttttgggggaagtggcgctacgtagcttttacacctttgttctggtgtttcttttcttaaaggtgacaggacgacgcggcgtacggcaaatgtcgctttttgaagtgctgatcattttgacattgggatcggcggcaggcgacgtcgcgttttatgatgacgttccgatgctccctgttctggtggtattcatcaccctggcgctgctctatcgcctagtcatgtggctgatggcgcatagtgaaaagttggaagatctgctggaagacaagtcggtnnnnnnnnnngcaagtcggtggtcattgttgaagacggcgaactggcgtgggaaaaactgcagcgctcgaacatga

SEQ ID NO: 401776 - DNA, 147 bp, Salmonella enterica
atgattgacgccagttataaatacattaatgcaggcaaagtgagcatttcaaaaaatcactatgctggtgatgaacataccgcttatgatgcagacacaaaggctgcctccaatgacttcatgctcggcattacttacgccttttaa

SEQ ID NO: 401777 - DNA, 279 bp, Salmonella enterica; identical to SEQ ID NO: 376844

SEQ ID NO: 401778 - DNA, 333 bp, Salmonella enterica
atggtcgcccctgttgacggtaccatcggcaaaatctttgaaaccaaccatgcgttctctatcgaatccgatagcggcattgagctgttcgttcacttcggtatcgacaccgttgagctgaaaggcgaaggcttcaagcgtattgctgaagaaggtcagcgcgtgaaagttggcgatccggtcatcgagttcgatctgccgttgctggaagaaaaagccaagtctaccctgactccggttgttatctccaacatggatgaaatcaaagaactgatcaaactgtccggtagcgtgaccgtgggtgaaactccggttatccgcattaagaagtaa

SEQ ID NO: 401779 - DNA, 387 bp, Salmonella enterica
atgaaaaaactgtccggaggtattcgtaccgcgctggcgcagtatcgtgaactggcggcgttctctcagtttgcatccgaccttgacgatgccacccgtaaacagcttgaccacggtcagaaagtgaccgaactgctgaaacagaaacagtatgcgccgatgtccgtcgcgcagcagtctctggttctgttcgcagcagaacgtggttatctggcggatgtcgaactggcgaaaatcggtagcttcgaagccgcactgctggcttacgtcgaccgtgatcacgctccgctgatgcaagagatcaaccagtccggtggctataacgacgaaatcgaaggcaagctgaaaggcatcctcgattccttcaaagcaacccagtcctggtaa

SEQ ID NO: 401780 - DNA, 375 bp, Salmonella enterica
atgggatttgcgcttgaggccaggattaagcaggccactcagcgtcagcaacgcgtaagtcaacgcctgagccagcaaaatccgcagccgcgcattcaccgcgtgcagtcgcgcatccaacagctggaatatcgtctgacggagaatatccgctcacggttaagcgaacagcgcgagcgttttggcaacgcggtcacgcatctggaagcggtcagcccgttagccacgctggcgcgcggctatacggtttcgacgacaacggacggcaaggtgttgaaaaagatcaaacaggtcaaagcaggcgatatcatgaccacgcggctggaggacggctggcttgaaagtgaagtcaaatccgtcacgccgggaacgtaa

SEQ ID NO: 401781 - DNA, 348 bp, Salmonella enterica
  misc_feature (235)..(244): n is a, c, g, or t
atgcgaattaaacctgacgataactggcgctggtattatgatgaagagcacgatcgtatgatgctcgatctcgccaatggtatgctttttcgctcgcgcttctctcgtaaaatgcttacgccggacgcgttttgcccgaccggtttttgtgtggatgatgccgcgctctatttttcctttgaagaaaaatgccgggatttcgaattaaccaaagagcaacgcgcggagctggtannnnnnnnnnctggtattgaatgcgctggtggcgattcgctatctcaaaccgcagatgccgaaaagctggcattttgtggcgcatggcgaaatgtggaccccgggcacgggtga

SEQ ID NO: 401782 - DNA, 330 bp, Salmonella enterica
atgaatgacgaccttgaacggcgggtcagttgcctggaaagtgatgtgactgaaatcaaaaacaacctgattactctcaccacaagaagcgaatcctttgctaccaaatctgatgtactggagattcgcgaagggttgaggcttgagatggcagaatctcgccaatccctgaagtctgagatggctgatttacgccagtctctgaaagttgagatggctgagcatcgtactgaacttcagaaatcatttgcaaatcagacttggttactcacaggtattgtcctgtctgcgatggccgtgcttgtggctgtggttactgttattaagtaa

SEQ ID NO: 401783 - DNA, 363 bp, Salmonella enterica
gtgaagtttcatttagatgaacttaaaagaatggcaacgctcgataattttgcgcgttttctcaatgagtcgtctacgaatgaaaaatgtttgtcgtgtggcgatacggatatgtacatgtatttgacgaatattgttgaggtggggcctgagccgaaaactgctgaggagtgtgatttaggcactcttgttatgcttgattatatcggtccatttactgggtatccgggatatgagggacatgatcgggaaaatatccataactatgaattccgacttacctgtaacagatgtgggtttgttcatcgttactcggcccgggcctttatgaactgggtaggcaagcagggtgatgagaagtga

SEQ ID NO: 401784 - DNA, 1128 bp, Salmonella enterica
atgaggctgctgggcagatcagtccctctctctcccctgatgggccagaaaacacatcgtcttctcaaaagccccgcaagactggtacacagcccggctaatcatggaacgctgggggcatggtggtcttgtaacgctggggtttcacgaatgagcataaaatcaattccgggagggtatcttcttgacatgcgcccggaggggcgtaaaggcaaacgcattcgtaaaaaatttaaaacgaaatcagatgcagttttatatgagcggtgggtgctggcgcaacagcataacaatgagtggaaaggaaactctattgatcgccgtcctctgtcagtgcttattgacttgtggtggaaataccacggccagctaatgaagtcagggcataacacgcgccttaaattgctgcgcttgagtgaggcaatggatgacccgtgcgtgcataaacttaatacaacgatgctcaccgagctacgtgtgtccaggatagagcaggggatacagcccagcaccataaatcgagagattggggcgttaagcgcgatgtttaccgcactcatctcatccggccattttcttaatgataaccccgttcaaggccttaaaggaatgaaggttaacgagcgtgaaatgggatatctgagtaagtctgaatgtgttcagttgctggatgcactggctgaaaatcccgatgaacggctggctgtcgaaatccttctgtcgaccggggcgcgatggggcgaggtagcggcactggagcagcgccgtgttcttcattgtcgaatcactttttcaaaaacgaagaacagcaaaaaccgtaccgttcctatttctgaaagcctgtttgaaaagatcaaaaaacggggcgggaaactggtgtttccgacgctggattattcattggttcgcgatgtcatcaaaacggtcgcacctgatgttcctgacggccaggctgttcatgcgctgcgccacaccttcgccagtcatttcatgatgaacggcggcaatattctgacgctccagaaaattctggggcacgcaaagattcagacaacgatgatttatgcccatcttgcgccggattacctgcaggatgcggtgaggtttaatccactaggaggtgcttaa

SEQ ID NO: 401785 - DNA, 279 bp, Salmonella enterica; identical to SEQ ID NO: 12284

SEQ ID NO: 401786 - DNA, 339 bp, Salmonella enterica
atgctgaagcaacgccgtaattttcgcaccgaaacggaacgccaagctaaccgtttcgctaccagcgcatcacgcagcaacatccgctacagcctgagcgagacgcacgcaacgccagatggccatacagtaaaacaaattggcgaacacacctggctgattgaaaaagctggaatcgtggttcagagatgccaacgcaacccatttaccggaaaccgcatttttgctctgagcaacggcgacaatcagtttggacaggatttcacattgtacgaagcacttcgcacggttgatcgtctgcttcgcgggcaaagttttattaaacagactgatttataa

SEQ ID NO: 401787 - DNA, 219 bp, Salmonella enterica
atgagcaggagaagaatcactcgcagacatcaccgcacacacctgaattcctcagcaacgctaaaggcacttattcaaagcgagatcggtgatttcttcgcgggagttggctcaccaagtgaaccagaaacaccagaagcgatgcagcgtgagctcatgatacgcatagataacacttttgatttcttctacagcatgcacggaattaaacagaaatga

SEQ ID NO: 401788 - DNA, 315 bp, Salmonella enterica
atgacgacaccaaccagacggataagtttctatctgaagcccgccgccgtcaagagtgaacaggaggcgtgcaattacctcgatagcctgccagcctccgaacgcagccgcgcgcaacgcgcggcctttctggctgggctagcgctcataaagcgcaacccagcatttacctactggatggccgaatggccagaggacaacctccccttcaataccgttagcatcaaggaaacataccaggataatcagcctagcggagttgaatgcaatttttataaaataaaaaagaatattcagaccttattcccagaataa

SEQ ID NO: 401789 - DNA, 540 bp, Salmonella enterica
gtggctcggccagaaacgtaccatcgtgccggttttatcggtatcgccagtgacggccaggggtgcctgcggcacgccgtgctcgtagatctgacggtgaattttgccatctcgctggataaccagctccagtttttgcgacagagcgttgactaccgagacgcccaccccgtgcagaccaccggagactttataggagttatcgtcaaatttaccgcccgcgtgcagaacggtcatgatcacttccgccgccgagacgccttcttccggatgaatcccggtcggaatgccacggccatcatccgttacggacacggagttatcggcgtgaatagtcacgacgatatctttacagtgacccgcgagcgcttcgtcgatagcgttatctaccacctcgaataccatgtggtgcagaccggtgccgtcatccgtgtcgccgatatacatacccgggcgcttacgcaccgcatccagccctttcaggactttgatactggaggagtcataagaattcgacatcaacgtttctcgctcatttaa

SEQ ID NO: 401790 - DNA, 192 bp, Salmonella enterica
atgttaacaaaagatttgtctgttaccttttgcggcgttaagtttcccaatccgttttgcctttcttcttctccggtaggcaattgttatgagatgtgcgccaaagcctatgataccggctggggcgggatcgtttttaaaaccattggttttttattgccaacgaagtctctccacgttttgaccacctga

SEQ ID NO: 401791 - DNA, 588 bp, Salmonella enterica
atgtcctgtggctctgatttaccgttatttgagcaagccagtcacgtagagattgccgttgattttttacagcgcgcccgtcaggccgacggcgatattagcgttccgcgtagcgcattaattattggcggcggcgacgtagcgatggatgtcgccagtacgttaaaaattctcggctgtccttccgtcacctgcgtggcgcgggaagaattagccgaattccccgccagcgaaaaagaatttaccagcacgcaggcattaggcgtatcgattattgatggttttacgcctgtcgccgtcagcggaaataaagtgaccttccaccatgtacgccactcaggagaactgacgctggaagcggaaaatattattttggccgtggggcagcacgcgcgactggataactttgcggagataaaagcgcagcataatattatcgacacgcacaattatcaaaccgacgacccggcgatctttgccgctggcgatattgttaaaggtgataagaccgtcgtttatgcggtaaaaaccggaaaagaagccgctcaggctattcatcattatttagaggaggcctgctcatgttaa

SEQ ID NO: 401792 - DNA, 273 bp, Salmonella enterica
gtggacacggtcataggctttacggggttcttcacagaacacggtaatgtcgaacaggctagcgtcggatttatcaaggagatcctcaataaagcggtggccgaccataccattaccgataatagcgagtctgactttgctcatttttgcctcgatttcttttctattaccgcctaccttaacgattcagcaaccccgcttattgatgtaaatcaaattcacctttatatacctcttaatgggtatatggctgatttgtctgggtttttataa

SEQ ID NO: 401793 - DNA, 756 bp, Salmonella enterica
atggcagcctttattgatagcagcgatcagatcgcctttagtcacatcgaagcaggagcagatctgcgcgctgtccggcagtttatccacgccgatagcgggtttaccactgctcgcgtgcgacggcaggatcagcgaatccgggttttccggcagttcgatggcgttcagtaccagttgcagcaaattgccgtaatcgctggtgtcgccgaccagtactgcgccgagcagcgttttgttatcttcgctgacaataagacgtttgtagacttctttgctttcatcgaggtaaacgtagctacgcgcgcccggcgtgcggccatgcgcatcgccaatcccgccgacgtccacgcccagcagcttcagtttggcgctgagatccgcgccttcaaaggcgttttcactgccgaggatatggtcaacggcgacctgggccattttatagcccggtgcgaccagaccgtaaacgcggttgttccaactggcgcactcgccgatagcgtagatatccgggtcggacgtctggcaggtgtcgttaatcacgatcccgccgcgctgcgcgacggccagaccgcactgggtagccagcttgtcgcgggggcgaataccggtagagaagacgataaaatcgacttccaactcgctgccatcggcaaaacgcatagtcttacgcgcttcgttaccctgctgaacaatctcttgcgtgtttttactggtgtgtacacgcacgcccatgctttcgatcttgcgacgtag

SEQ ID NO: 401794 - DNA, 2103 bp, Salmonella enterica
atgagtaccacaacacgaaaatttaaaaccgttatcaccgatacgggtgcaaaaaaattagctcaggcagccgcgccagatggtaagcctgtccgcctgactcatatggccgtgggcgacggtggcggcacgttgcccacaccagacagtaagcagacccgtctggtgcatgaggtgtggcgacacactgttaatcgcgtcatcctggacgcaacacatcagaaccgcattattgcggagctggttattcctccagaaacgggcggattctggatccgggaaattggtgtgtttgatgagcacggcgatttaatcgcagtaggcaatactgccgaaagttacaagccaaccgttgccgaagggtcaggacgtgcacaaacatttcgcaccattctgaccgtatccagcactgccaccgtggcgcttaccgtggataacaccatggtaatggccacagtggattacgtggatgacaaactgaaagagcatgaacactcacgacgtcacccggacgcctcgctgaccgcaaaaggctttgttcaacttagcagcgccactaacagcacgtctgaaacgcttgcggcaacgccaaaggctgttaaggcggcatatgacctggctaatggcaaatacaccgcacaggacgctaccactgcgcgaaaagggatagttcagctcagtagcgccaccaacagcacatctgaaacgctggctgcgacgccaaaagctgttaaggcggtaatggatgaaacgaacaagaaagcgcccttaaatagtcctgcactgaccggaacgccaacaacgccaactgcgccaaaagggactaataatactcagatcgcaagcacggcttatgtgatggccgcgattgccgcacttgtagactcgtcgcctgacgcactgaatacgttgaacgagttagcggcggcgctgggaaacgacccgaattttgcgaccaccatgactaaagcgcttgcgggtaagcaaccgaaagatgccaccctgacggcgctggccgggcttgctactgcggcagacaggtttccgtattttacggggaatgatgtcgccagcctggcaaccctgacaaaagtcgggcgggatattcttgcgaaatcgaccgttgctgccgttatcgaatacctcggtttacaggaaacggtaaatcaggcttctggcgcattacagaaaaaccagaacggcgcagatattccaggaaaagataccttcaccaaaaatattggtgcctgccgcgcatatagcgcatggctgaatattggtggcgatagtcaggtctggacaaccgcgcaatttatttcgtggctggagagtcagggagcatttaaccatccttactggatgtgcaaaggctcatgggcttatgcaaataataaggtcattacagatacaggttgcggaaatatttgtcttgcaggtgctgtggtggaagttattggcactcgcggcgcaatgaccatacgcgttaccacgccgagcacgtccagcggtggcggaattactaacgctcaattcacttatatcaatcatggtgatgcttacgctcctggctggcgacgagactacaacacgaaaaatcaacaacctgcatttgctttagggcaaacaggaagcactgtcggaaatgataaagctgttggctggaactggaatagcggggtctataacgcaaacattggtggcgcatcgacattaatcctccacttcaatatgaatacggggagctgccctgctgtacagttccgcgtgaattacaggaacggcggtattttttatcgttcagcgcgtgatggttatggatttgaggctgactggtcagagttttacaccacgacccgcaaaccctctgcgggagatgttggtgcatacacgcaggcagaatgtaactcaaggtttattacaggtattcgccttggcggtctgtcatctgttcagacatggaatggtcccggctggtctgacaggtcaggttatgtcgttacggggtcagttaacggaaaccgtgatgaattaattgatacaactcaggcaaggccaattcagtattgcattaatgggacgtggtataacgcggggagtatttaa

SEQ ID NO: 401795 - DNA, 963 bp, Salmonella enterica
ttgtccggtgggcttacttttgaaaacgactcaatccttgcctggattcggaatactgactgggcaaagattggttttaaaaatgatgccgacagcgatactgattcatacatgtggtttgaaacaggcgacaacggcaatgaatatttcaaatggagaagcaaacaaatcaccacaacaaaagacctgatgaatcttaaatgggatgctttgtctgttcttgttaaagcccttttcagcagtgaagtaaaaatatcgacagtcaatgcactgaggatatttaattcatcttttggtgctatttttcgccgttctgaagaatgtcttcatatcatccctacccgagaaaatgagggggaaaatggcgatatagggccactacgcccctttacgcttaatctcagaactggtcgcataactatggggcatggtctggatgttacaggagatatatttgcaaaccgttttttaattaacagcagtacaggcatgtggattcatatgcgtgaccagaacgttattatgggacgtaatgcggtatccactgatggtgctcaggctttgctccgtcaggaccatgacgaccgcaaatttatgattggcggtctgggaaataagcaatttggcatctacatgattaataattcaaggacagccaatggcaccgatggtcaggcgtacatggataataacggaaactggctttgcggtgcgcaagttattcccggcaactatggcaattttgattccagatatgtgaaagatgttcgacttggttcacagcaatattatggagtgaacaactggcaaacatggaatttccagtgcccgtcaggtcatgtattgtctggtattaatgttcaggatacagggtccaactctgccgataatatagcgggcgtttattacagacccgttcaaaagtatataaatggcacctggtataatgtagcgagcgtttaa

SEQ ID NO: 401796 - DNA, 636 bp, Salmonella enterica
atgaaaaagtttaattttgctgctctacttccgggatttttggctctcaacaattctgtatgggcaagcgattcatctacaggagcgagtgatttacctggtatgactcttaatgagcatgatttagtgatagctccacttaacacggaagtcccattttatatcgcagggcatcgaagccatagctctcataggagccatagctctcatagatcctcatcaggtggtggatactatggtggaagtaccccctattatccaaaaacatacagctcaccaagttcatctggttcttcaagttcaggtgcaagttcctcatcgtcctcttcctcggtgcgtgcacttcgttctaacgataataatagaaccactaacacgagttctgttggaacttcagaggttaaccgtacgagtaatgggcttgcttctgatgcagagaaacgtaagcgattgattatgcgagttcagttcgcattgctggacaggggattttataacggaaatattgacggcataatggggccatccacaaggctgtctgtgaaaaattaccgcattgcgaatggattaccgattcctgcaactgaaacactcgacactcaattgttaaattctttgaatatattagctcgctaa

SEQ ID NO: 401797 - DNA, 873 bp, Salmonella enterica
atgatacgcgttattctgtcacgcaaagccaatcataatactgtcttagttacggaacgctgcaataacttgtgtctgttttgttcgcagccaccaaagaaaataaatgatgactggctacttacccaatcagctcttgctatagcttcatttggcttgaacggagttgttggggtcagcggtggtgaacctttgctatatggggatgacttccttcacttcattgattttatcatcgagaattcaccagatactgctttacatgttttaacaaacggacgcaaatttgctgatatcaactttacacaggaaatggcaaagcgaagcaaaaagatcaaaatcacctttggtatcccgctctactcatcaagaccacttgtgcatgatcatctggtagggagtgatggcgcatttaatgaaacggttaaagggttaatcaatgcaggaaacttggggattaatatcgaacttagagttattcctacactggctaactataccgaattggatgatattgtagaattcgctggccgtgtgttctccaacatcaatcagatttcccttatggggttggagcctatcggttgggcacgaaaaaactggtccaccatcttcattgatcacagtagttatagtgagaaaataatctctgccatagacgctgcatacaggtcaggcatacctctgacaatttttaattatcctttgtgttatcttcctgaaagggctagggagcttgctgttcagtcgatctctgattggaaaaattactatccaaaagaatgtgatgaatgtactcagaagccttcctgtgctggctatttcagttcctcaaaaggccgttttcatcaatcaccgagaccaattttatga

SEQ ID NO: 401798 - DNA, 210 bp, Salmonella enterica
atggctcaccaaatcaatattactaccgcaacgtccggcaatcggttttaccgcatagccggtctgcaccagctcatcgttaacggtaaaatccgtgtcgagcaaatagcgatgatgtgggaagagcgaccacaggatgggcaggatcgctttgttacccgggatcaccgtccacagcggttcaaacaccaacacttccgggcgcagtaa

SEQ ID NO: 401799 - DNA, 372 bp, Salmonella enterica
gtggataacgttttgctcagcaatgcgaattttgttatccaggagttgggtgataatcgcgacgtgcccggtttcgttaaactcgccgcccttttgccagatgagcaacgccccggcctccggcgcgcgcggcgaaccgttcgggaaggcctgcaaaggcaaaatattgtcattcacgacctcgcgcagaaaacgcagcgagaaaatttcccaggccatgccgacgtcagtaaaaacaacgccataattcagaaagagaaaacggcgggcaaattccacgcactgccatttatgccccatgtattcatcgtcgatgtagctacgaaaagctgcgtcgtcgtcgtcccacggatcgagggaattgtaatctga

SEQ ID NO: 401800 - DNA, 228 bp, Salmonella enterica; identical to SEQ ID NO: 376700

SEQ ID NO: 401801 - DNA, 264 bp, Salmonella enterica; identical to SEQ ID NO: 377036

SEQ ID NO: 401802 - DNA, 690 bp, Salmonella enterica
gtgctcgacgttacgaatggcaaagaagttcagcgacgtcggcatctggctgtacagtacgaagaagataatcgcctgcagcatcaaaataaaggcgacgatcattttacggcgagccgcgccgtgcatggaaaacgcttctttaccgaaaataatgacgatgccaagagcgattacgcccagcaccatacgcgcgatatcctggttgtgcagcagccaggtggcgaccgcaatcagaacgacaatacccacgattgtcagcagcagattacggaagttgatcggttcaaagtcgggtttggaaccgtagcttttcacccagcgctggcagaaagcaaagttaacgacggttatcagcataccgacgacgctaagcgcaaacgcggtgctccagccataacgcgccgccagccacggcgtcgccagcatagagaagaaggagccgatgttgacggacatataatacatcgtaaatgcgccgtcgagacgcggatcgtccttcgcgtaacaggtagacagcagggaagacgggttagctttaaacagaccattacccacagcgatagccgccatgcccatatagacgatgccagcgtcatgaccagaccatgcgaccagcgcataaccgatagccagcaccacggcacccagcataataacgcgtttggtgcccagaattttatcacctaa

SEQ ID NO: 401803 - DNA, 237 bp, Salmonella enterica; identical to SEQ ID NO: 376875

SEQ ID NO: 401804 - DNA, 246 bp, Salmonella enterica; identical to SEQ ID NO: 376876

SEQ ID NO: 401805 - DNA, 768 bp, Salmonella enterica
atgacgacatcatccgcacgctatccacagcgtgttcgtaatgaactgcgttttcgcgagctgaccgttctgcgggtagaacgtattagcgcaggatttcagcggatcgtacttggcggcgaggcgctggacggtttcacctccctgggctttgacgatcacacgaaagtttttttccctgagccaggctgtcgctttacgcccccgacagtcactgaggaaggcattatctggggggagggcgttcgtccggtctccagggattacacgccgctgtatgacgaggcgcatcgcgagctggcgctggatttctttatccacgatggcggcgtagccagccgttgggcaatggaagcccgtgaaggcgatacactgacgattggcgggccgcgcggttcgctggtggtgccggaagattatgcttgtcaggtttatgtctgcgatgagtccggtatgcctgcgctacgtcgtcgtctggaatcgcttagccgtctgcctgcgcgccctgcggtaaccgcgctggtgagcattcaggatgccgcatatcgcgattatctcgcccatttgacggatattactgtggaatatgttgttggcggcgatgaacaggcaatgcaaacgcgcctgtcgcagctggcaataccagaatcagactatttcatctggattactggcgaaggcaaaacggtaaaacgtttaagtcagtgctttgaaaaggggtttgatccacacctggtacgtgcggcagcctattggcatcgtaaatag

SEQ ID NO: 401806 - DNA, 495 bp, Salmonella enterica
atgccggacgcgtggggaatcgatcagctctttccggtgctgccgctggaagggttagatcaggtaccggaacgtcgtgccgtgctgctggatattacctgtgattccgatggcgctatcgaccactatatcgatggcgacggtatcgccacgacgatgccgatgccggaatacgatccagagaatccgccgatgctcggcttctttatggtcggcgcctatcaggagatcctcggtaacatgcacaacctgtttggcgatactgaagcggttgacgtgtttgtcttcccggatggtagtgtcgaggttgagttgtcggacgaaggcgataccgttgcggatatgctgcaatatgtgcaactggatccgaaaacgctattaacgcatttccgcgaccaggtaaaacagacggatctggacgatgcgttgcagcagcagttccttgaggaatttgaagcgggactgtacggttatacttatcttgaagatgagtag

SEQ ID NO: 401807 - DNA, 225 bp, Salmonella enterica; identical to SEQ ID NO: 376789

SEQ ID NO: 401808 - DNA, 558 bp, Salmonella enterica
  misc_feature (483)..(492): n is a, c, g, or t
atgatgaatattttgctggaagaacttccccatcaggaacaggcgttagcggcgattctggcgagtttcaccggtatcgatcacgcgcaggccgatcataatcactatgctaatccgctgattaagggacgttacgacgataaggccaatattgacgttaaaatggagaccgggacgggcaaaacctatgtctatactcggttgatgtatgaactgcatcagaagtatggcctcttcaaatttgtgctggtggtgccgacgccagccattaaagaaggcgcgcggaactttatcaccagcgattacgccagacagcatttttcacagttctacgaaaatacgcggatggaattttgcaccatcaacgccggtgattttaaagtaaagtcggggcgtaaaaattttccggcccagttattaagttttactgatgccagccgtcgtgatagccatacgattcaggttttgctgatcaatgcgcannnnnnnnnngcgcaaatgctaaattccgccagtatgacgcgagacgattacgatcaacgctactgggcgggctga

SEQ ID NO: 401809 - DNA, 531 bp, Salmonella enterica; identical to SEQ ID NO: 399232

SEQ ID NO: 401810 - DNA, 246 bp, Salmonella enterica
atggcgctgcgtttcctgtctctattaaccgggattcagggaacgttgcgccatgctcattttgataaatcagcacacgccaaaatcgcccttttcgcaatagggggtgacatctgccgctttgaggatcaatttttcgcccggctcattaccgacctgtaccgcgacaatatgatcctcgttgacttcaatcactttcagtttcggccccccccattcggggctgtacgatatcgcctggtgtga

SEQ ID NO: 401811 - DNA, 3123 bp, Salmonella enterica
atgcaggtattacctccgggcagcacgggcggcccttcgcgtctgtttattctgcgccccgtggccaccactctgctgatggcggcgattttactcgccgggattatcggctatcgcttcctgcccgtcgccgctttgccggaggtcgactaccccactattcaggtggttacgctctaccctggcgccagcccggatgtcatgacctcctccgtcaccgcgccgcttgagcgccagttcggccagatgtcaggacttaagcagatgtcgtcgcaaagctccggcggcgcatcggtggtgacgctacagtttcagttgacgctgccgctggacgttgccgagcaggaagtacaggcggcgattaacgcagccaccaatttattgccttccgacctgccgaatccgccgatttatagcaaagtcaatccggcggacccgccgattatgacgcttgccgtcacctcaaacgcgatgccgatgacccaggtagaggacatggtagaaacccgcgtggcgcagaagatctcacaggtctccggcgtcgggctggtgacgcttgccggcgggcagcgccctgcggtacgcgtaaaactgaatgctcaggctatcgccgcgctcggtctgaccagcgaaacagtccgtaccgcaattaccggcgccaacgtcaactcggcgaaaggcagtctggatggccccgaacgggcggtgacgctttctgctaacgatcagatgcagtctgccgacgaataccgcaagcttatcatcgcgtatcaaaacggcgcgccggtacggctgggcgatgtcgccaccgtcgaacagggggcggaaaatagctggctcggcgcatgggcgaatcaagctccggctatcgtgatgaacgttcaacgccagcccggcgccaatatcattgcgacagcggacagcattcgccagatgctgccccagcttaccgaaagcctgccgaaatcggtgaaggtcacggtcctgtccgatcgcaccaccaatattcgcgcttccgtgcgcgatacccagtttgaactgatgctggcgatcgcgctggtcgtcatgattatctatctgtttttacgtaatattcccgccacaattattcccggcgtcgccgtaccgctgtcgcttatcggcacctttgcagtgatggtgtttttggatttttccattaataacctgacgctgatggcgctcactatcgccacgggtttcgtggtggacgatgcgattgtggtgatcgagaacatctcgcgctacatcgaaaaaggagaaaaaccgctggcggcggcgctcaaaggcgcgggcgaaatcggctttaccattatttccctcaccttttccctgattgcggtactgatcccgttgctctttatgggcgatattgttggtcgactgttccgcgaatttgcggtgacgttggcggtagcgattttaatctccgccgtcgtctctttgacgcttacgcccatgatgtgcgcgcgtatgctcagccggcagtctctgcgtaaacaaaaccgcttttcccgcgcctgcgagcggatgtttgaccgcgtgatcgccagctacggacgcggattagcgaaagtgctcaaccatccatggcttacattgagcgtggcattcgccacgctcctgctcagcgttatgctgtggataaccatcccgaaagggttctttccggtacaggataacggcattatccaggggacgctgcaggcgccacaatcatcatcgtatgccagtatggcgcaacgtcagcgccaggtggcggagcggatattacaggacccggcggtgcaaagcctgacgacttttgttggcgtagacggcgctaatcccacgctgaatagcgcgcgcctgcaaattaacctcaagccgctggatgcgcgtgatgaccgcgtgcagcaggtgatctcccggctgcaaaccgccgtggcgacgattcccggcgtggcgctgtatctccagccgacgcaggatttaaccatcgacacgcaggtcagccgcacgcagtatcagtttaccctgcaggccacgacgctcgatgcgctcagccactgggtgccaaaactgcagaacgcgctacagtcgttaccacagctctctgaggtaagcagcgactggcaagatcggggattagcggcctgggtgaatgtcgaccgcgacagcgccagccgtctgggtatcagcatggcggatgtggataacgcgctctacaacgcgttcggacaacgcctgatttcaacgatttatacccaggcgaaccagtaccgcgtcgtgctggaacataataccgccagcacgccgggtctggcggcgctggagacgattcgcctgacgagccgcgacggcggcaccgtaccgctcagcgcgattgcccgcattgagcagcgcttcgccccgctctccatcaatcatttagatcagttcccggttacgacattttcgtttaacgtgccggagggctattcgctcggcgatgcggtgcaggcgattctcgatacggaaaaaacgctcgccctgccagcggatattacaacgcagtttcagggcagtacgctcgccttccaggcggcgctgggcagcaccgtctggcttattgtcgccgccgtggtggcgatgtatatcgtgcttggcgtgctgtatgagagttttatccatccgattacgattctctcaacgctgcctacggcgggcgtcggcgcgctgctggcgctgatcatcgctggtagcgagctcgatattatcgccattatcggcattattttactgatcggtatcgtgaagaaaaacgccatcatgatgattgacttcgccctcgccgccgaacgcgaacaggggatgagtccgcgcgacgctatcttccaggcctgtctgctgcgttttcgaccgattctgatgaccacgctggcggcgttgctcggggcattgccattaatgttgagtaccggcgttggcgcggaattacgtcgcccgttggggatcgcgatggtgggcggcttactggtcagccaggtattaactctgtttaccactccggtgatttatctcctgtttgaccgcctgtcgctgtacgtgaaaagtcgctttccgcgccataaagaggaggcgtag

SEQ ID NO: 401812 - DNA, 1092 bp, Salmonella enterica
atgaccatttccatccatgccagcgcatttgacgtcaacagctggtatcaaaaaatcaccttaaccttcatcaatgagagcggtaatccggtcgatatgaaccatgccgcaatatcattcacggcttccgggcacatcgatccatggggaaatagcggcggtacgctcaaagggaacccgccgcttacgctgaatgatagttcgtatggcacgctggaaactaacaacatcatcattaataacagcgatgcattacttcttcagccgggcgaacgcggaacgctctctttcagcctcgcggcgacgcaggtgccggtaaaaatgtccgccgtcaccttgacgctggcgtcatcgtcatccgaagacgcagagtctgcaaccccatccgatcaggagacgccagcgatacccgccgcagacgaacaacccgccgaatccgatgtgccggaaaaggacaatgaccttcaggaacgcggccttacgcttaacgttagcgagttgaatgccgcaagttggtatcaacacgtcacctttacgctgaccaacctctacgcccaggcggtagatctcaatcagcttcaactgaattttacggccagcgcgcaccccgatccctacagtccgtttcagggaacaatgctggggaatcaggccgtgacgctggccagcgatgggggatggcccatcgagaagaataccatcaccattaatcatgacggcgcgctgatgctggcggcaggggatatcgccgaattacagtgctatctggccgccacgcagacgccagttgccatcagcgatttgaacgcgacgttggcccatgaccctgcccaccagggaaaaatttgcgttcactttcctgccatgacgcagaccgtggcgctcaaaccggtgattgagctactgtttcctgccggcgaaacccggcgctttgtcggtgagtggggagaggttctgacaataagcgatcttagcgcaggaacgtatcggcttatcgtaccggtactggcgaatgatgagatgcaaatcgcgccagtcgagtcctcttttaccgttacgctgcaatccggagatgccgccgcgcaggtctag

SEQ ID NO: 401813 - DNA, 921 bp, Salmonella enterica; identical to SEQ ID NO: 376904

SEQ ID NO: 401814 - DNA, 156 bp, Salmonella enterica; identical to SEQ ID NO: 381860

SEQ ID NO: 401815 - DNA, 252 bp, Salmonella enterica
atggagacgctcaaagaggtcattactcatcatccacaaaaagaaaaactggctgagattgcattgcagtttgccagagaggcggggttgaccaggcaaaaaggggaaactgactatgtgttaagtaatgtgctggacggccttatcggagacggtagctggcgagctggcccggcttacgagtcatacctgaataaacctggtgtggatcgggttattactaccgttgatggcttgcacatgcagcgttaa

SEQ ID NO: 401816 - DNA, 831 bp, Salmonella enterica; identical to SEQ ID NO: 376666

SEQ ID NO: 401817 - DNA, 1656 bp, Salmonella enterica
atgaacctctggcaacaaaactatgacccggcgggtaatatctggctttccagcctgatcgcatcgctcccaatcctgttcttctttttcgccctgattaaactcaagctgaaaggctatgttgccgcttcgtggacggtggttatcgcgctcgccgtcgcgctgctgttctataaaatgccggtcgatcacgcgctggcatcggtcgtgtatggcttcttctacgggctatggccgatagcctggataatcatcgccgcggtctttgtctataaaatttcggtcaagaccgggcagtttgacattattcgctcgtcaattctgtcgattacccccgaccagcgtctgcaaatgctgattgtcggcttctgcttcggcgcgttccttgaaggcgcggcgggtttcggcgcgccggtggcgataaccgctgcgctgctggtgggcctgggctttaaccctctgtatgcggcagggctgtgcctgattgtaaacaccgcgccggtcgcctttggcgcgatgggtattccgattctggttgccggacaggtcacggacctggacagctttgaaatcggtcagatggtaggccgccagttgccgttcctgaccattatcgtgctgttctggattatggcgattatggacggctggcgcggcgtgaaagaaacctggcctgcggtgatggtcgctggcggctcgtttgctatcgcccagtatctcagctccaactttatcgggccggaactgccggacatcatctcttcactggtgtctctggtgtgtctgacgctgttcctcaaacgctggcagccggtacgcatcttccgcttcggcgatatgggcgcgtcgcaggtcgatcagacgctggcccgcacccgttatacgacaggacaaattgttcgcgcctggtcgccgttcctgttcctgaccgccacggtcacgctctggagcataccgccgttcaaagcgctgtttgcccccggcggcgcgctgtatgactgggtaattaacgttccggtaccgtatctcgataaactggtcgcccgtatgccgccggtcgtacacgaagcgaccgcttacgcggcggtgtataaatttgactggttctccgccaccggcactgcgatcctgtttgccgcgctgttgtctattgtctggctgaaaatgaaaccctcagccgcaatccagacctttggcagcacgctgaaagagctggcgttgccgatttactccatcggcatggtgctggcgttcgcgtttatctcgaactattccgggctttcctccacgctggcgttagcgctggcgcacaccggcagcgccttcacgttcttctcgccgttcctcggctggctgggcgtcttcctgaccggctcggatacctcatctaacgcgctgtttgcctctctacaggctaccgcggcgcagcaaatcggcgtctctgatgtactgatggtggcggcgaacaccactggaggcgtaaccgggaagatgatctcgccgcagtctatcgccatcgcctgcgcggcggtgggactggtagggaaagagtccgatctgttccgttttaccgtcaaacacagcctgatcttcacctgtatggtgggcgtgatcactacgcttcaggcctatgttttaacctggatgattccgtga

SEQ ID NO: 401818 - DNA, 405 bp, Salmonella enterica
atgcgcgctgtgtggattaaccgcctgcaacggcacttccgccagcgattcctgcgccagagccaatgcctgccagttacgctcaaccagatcctgacctttgctgctatagcttttggcaatcgcgccctgcagctcaaccagagcgctatcgcccggaagaatatgcgtcaggtggaagaacgccatttgcatgacggtattgatgcgggcgcccagtccacattcgcgggcgattttcgccgcgttgaccacgtaaaaacgcgcctttttctgattcaataccgcctgaacttcttgcggcagacgcgaccagacctcgtcggcgctgtacggcgtattaagcagaaagataccgcctggcttcagacgctccgccatctgatatttatcgataaactgtaa

SEQ ID NO: 401819 - DNA, 912 bp, Salmonella enterica
atgaccggaatatttgcagaacaaactgtagaggtagttaaaagcgcgatcgaaaccgcagatggggcattagatctttataacaaatacctcgaccaggtcatcccctggaagacctttgatgaaaccataaaagagttaagccgttttaaacaggagtactcgcaggaagcttctgttttagttggtgatattaaagttttgcttatggacagccaggacaagtattttgaagcgacacaaactgtttatgaatggtgtggtgtcgtgacgcaattactctcagcgtatattttactatttgatgaatataatgagaaaaaagcatcagcccagaaagacattctcattaggatattagatgatggtgtcaagaaactgaatgaagcgcaaaaatctctcctgacaagttcacaaagtttcaacaacgcttccggaaaactgctggcattagatagccagttaactaatgatttttcggaaaaaagtagttatttccagtcacaggtggatagaattcgtaaggaagcttatgccggtgctgcagccggcatagtcgccggtccgtttggattaattatttcctattctattgctgcgggcgtgattgaagggaaattgattccagaattgaataacaggctaaaaacagtgcaaaatttctttactagcttatcagctacagtgaaacaagcgaataaagatatcgatgcggcaaaattgaaattagccactgaaatagcagcaattggggagataaaaacggaaaccgaaacaaccagattctacgttgattatgatgatttaatgctttctttattaaaaggagctgcaaagaaaatgattaacacctgtaatgaataccaacaaagacacggtaagaagacgcttttcgaggttcctgacgtctga

SEQ ID NO: 401820 - DNA, 408 bp, Salmonella enterica
  misc_feature (374)..(383): n is a, c, g, or t
atgctgtttggatttttccgtaacctgtttcgcgtgctttatcgtgtgcgcgtcactggcgatgtccgggcgctacaggggaaccgggtcttaattgcccccaatcacgtttcatttatcgatggtatgctactggcgctgtttttgccggtacggcctgtctttgcggtatatacctccatcagccagcaatggtatatgcgctggttaacgccgctgatcgattttgtaccgctcgatcccactaaacccatgtccattaaacacctggtgcgtctggtggagcaggggcgtccagtggtgattttcccggaagggcggatttccgtgaccggctcgctgatgaaaatttatgacggcgcaggctttgtggnnnnnnnnnncaaccgtcattccgctccgcattga

SEQ ID NO: 401821 - DNA, 303 bp, Salmonella enterica
atgacagaaacgtcatctcaccgctataaaccacgcaatataataaatgcgccaaatgtaaaatcatctattttttcccggagccaacaacgcggcgatagcgaaaatatccagcgctggttaagcaatcatttttatcgttggatcattggtgactttcctcacgtttaccctgtgcgctccgtcgctgattatgccgtttattttagccctgatgcagaaatccccgcctgggtggcgatgagcgcttttactaccttaacgttcagcacccgcaacttgtggcaatggaaagagatttag

SEQ ID NO: 401822 - DNA, 501 bp, Salmonella enterica; identical to SEQ ID NO: 376787

SEQ ID NO: 401823 - DNA, 489 bp, Salmonella enterica
  misc_feature (6)..(15): n is a, c, g, or t
atgccnnnnnnnnnnctggatgcctgtgctgattcgcagagtcccagtttgctgatgattgcaaaaatatgcctggcaactggcgcccgatggagtgaagccgaaaacctgcagggccatcagctatcaaaataccgcatcacttataccaagaccaaaggcaagaaaaaccgaaccgtgccaatatctcaggaactgtatgatgaactccctaaaaacagggggaagttattcacgccatgcagaaaatcctttgagcgtgcagtaaagcgagctggtatcgaactgccagaaggccagtgcactcacgtactgcgccatacattcgccagccattttatgatgaacggcggaaacatactggtactgcgcgatattctgggccatgccgatataaaaatgacgatggtttacgctcactttgcccctgaccacctcgaagatgccgtgacaaaaaacccgcttcacaacctcaattggaagcgctaa

SEQ ID NO: 401824 - DNA, 279 bp, Salmonella enterica
  misc_feature (264)..(273): n is a, c, g, or t
gtgtacgttattttgatttgtcggctggtgcttggcattaccgaaggcatttattggccgcagcagtcccgcttcgccagcgactggttttcagacaaagaacggacgcaggcgaacagcattatccagtattatggacagttcctggcattaggcctgggatttatgattttgtccccgctggatgctgccttcggttggcgaaatgtttttattatcactggtatgatcggcattgttgttgtggttccactttatataacnnnnnnnnnnatataa

SEQ ID NO: 401825 - DNA, 171 bp, Salmonella enterica
atgacgccgccagaaatcggcgcaggcctgataacgcaacaaagattcgtcttcaataagctgttgctcaaacaacataccggattcgaaagcgttcaggctgagcatacgctggcaaaaaccgtggatggtaaaaaccgcggcctcgtccatttgtcgttctgccagtaa

SEQ ID NO: 401826 - DNA, 264 bp, Salmonella enterica; identical to SEQ ID NO: 377210

SEQ ID NO: 401827 - DNA, 1119 bp, Salmonella enterica; identical to SEQ ID NO: 376832

SEQ ID NO: 401828 - DNA, 426 bp, Salmonella enterica
ttgccggaattttgtccagcgaaagagtcgcaccttaacaaagcattgacggcgaagtatccgttgcagttaagcggtttccataccaaagggcatacccactcgacctacagcaatgtgctgatgctgcatgaggcggtgccggatgaagtctggattaacccgattgacgccagcgcccgccaactgaagtccggcgatcgggtgcatgtattcaatgaccgcggcgtggtggagcttccctgtaaagttacccagcgcattttacccggcgtggcggcgatgccgcagggcgcgtggacgcggcttgacggcaacggtgttgatgtcggcggctgtatcaatacgctgaccagccatcacccttcgccgctggcgaaaggcaatccgcagcataccaatctggttgaaattaaacgcgcttaa

SEQ ID NO: 401829 - DNA, 456 bp, Salmonella enterica
atggcggcatcggcagcttgcgctgtgagcatcacatcccgcacgctattttcattgcgcagcgtgcaggcaatttcctgcgatgatgcgcgcagcggcgcgggcataatacttacgctacaagcggcatcaagctggcctattccggtcatatacggccccacgccgccggataacgtgaccagtcggatttgttgcgccgagataaatccgctgaggcgttttaatgtggtcatcgtggcttcgccaaagccgacggccagcagttgctgtggccgcagtgactccatcaacatatgggcggcgccgattcctaagcgcagaccaatatcggcatcgggtaatgccggcagcacgcggatattctgcaatgcgaagtggttacgcaaggcattttcatactcaagacacccttcgaaacgggagttgatttgtacgcgaataataccggactga

SEQ ID NO: 401830 - DNA, 798 bp, Salmonella enterica
atggttgatgcctgcaaagaagctggtgttacctttatggcgggtcacgttatgaacttttttcacggggttcgccacgctaaagcgctcatcaaagccggtgaaatcggtgaagttacacaagttcacactaaacgtaatggttttgaagacgtgcaggatgagatctcatggaagaagattcgcgcaaagtcaggtgggcatctgtaccatcacattcacgagctagattgtacactgttcatcatggatgaaaccccatccctggtttcaatggcggcggggaatgttgcgcacaaaggtgaaaaatttggtgatgaagatgatgttgtcctaatcacccttgagtttgaaagcggtcgtttcgcgacacttcagtggggatcatcgttccactaccctgagcactatgtattaattgagggcacgacaggtgcaattctcattgatatgcaaaacacggctggttatctaataaaagcgggcaaaaaaacacactttcttgtgcatgaaagccaggcggaggatgatgatcgtcgcaacggtaacatatccagcgagatggatggcgcaatcgcttatggtaaacccggtaaacgtacgccgatgtggctctcatcaattatgaaactggagatgcagtacttgcatgatgtgataaacggtctggagccaggcgaggagtttgctaaattgctaacgggagaagcggcgacaaatgccattgctaccgctgatgctgcgacgctttcttcaaacgaggggcgcaaagttaaactcactgaaattcttggctaa

SEQ ID NO: 401831 - DNA, 255 bp, Salmonella enterica
atgagtagtccacaagaaaatttatacgatgcaattcgtattgtaaaaaggaaaatcattcctttggcctttattctttacttttttaactatatggatcgtgtcaatattgggtttgctgcattacgcatgaatgaatctctcggtattacgcctgaggatttcgctaatatttcttctatattcttcatatcatatttaatctttcaaattccgagtagcattggcttgcaaaagcttggcgcaagaaaatga

SEQ ID NO: 401832 - DNA, 684 bp, Salmonella enterica
atgccaactccccaaaattactcattcatcgccatagcggtatcagcagcattagcctctatggtatttccctcccaggcggcctgggttgacgttgatagtctgccatccagtgggctggtcagccagctgccgccggaattacaggctattattcccgctcaggccagtaccggtttcaccaaagtcggtaccatgcccaactacgtttatcagtggaacaccggcaccatcccggtttatggcaatggcctcacgcttaatgggccgggtgcggaggcgtttgaacacactgtcacggttattcagaacagcgggacgggaagtccgggcgtgatttttggcaacgacctgaccattcggacgcagtcggcgaatgccgcgaataatggtagagacgtcgatggcatccgtactcacggcgcaaatactccggataacccggtatttattattaccggtgaccgtaccaacatctacgtggatggtcaggatggtgacggtattaacgccggatataactcactgggccagggttggaccggatcggccaatatttacgtcggcgacgatctgtatatcaaaacgaccggtagccagggacgtggaattacagctaacgccatgcgggatgcgtcacgtgccaaaaatacgattgtcgtcggcaatcgtgtgcacatatag

SEQ ID NO: 401833 - DNA, 336 bp, Salmonella enterica; identical to SEQ ID NO: 376660

SEQ ID NO: 401834 - DNA, 450 bp, Salmonella enterica
atggctttcaatttcgacaatcttgcccagtttcccgctctcaatcgcttttttagcagtgagaaaacaggaatcaaaacgccgattctgatatggcgtgacggtcagtcctttgcttcgcgccagttcgaacaacacttttgcctccgccagcgtcggcgtgaaaggtttctcaaccagcacatttttacccgcttccagcgcgcgtttggcgtattcgaaatggctgtcagcatgcgtacagacgatcaccagttttacctgcggatcgcccaacacctcatccagatcgctggtgaagtgaatatgcgaatactgcggcgcctgctcttccggtttagcgtgacgacggaaaatatgcgcgacatgccaggtatctttacgattcagaacgtaggggagatggtaacgggtggtacttttgccgaatccaataaatgcgcagtgtaa

SEQ ID NO: 401835 - DNA, 633 bp, Salmonella enterica
atgaatcagtccagtctgaagaaaaaatttattatctacagcccacagctgttgatcacccaatatgcgatgaaattagttaaatatatccgcaaagatccacaggttgaaattgaacatcacgacattttgaccactgacgaactgcctgaagatctgcttgcctaccgcaaagcagatgttgtggtttcaatggccccacttaataatcgttctattgtttgtactcactttaataggctagaatgtatcctggtttgcagtgaaaatcatccccgactaggcgacaccgccactatcgatgaaattctacaagagtcatttacgcaactcgtctcccgggcaaccggtatgaaagagtatcattcacttatagatgatgtgctgggggagagaataattggtttaagaagcaaatcggtgatgactatcgccaactccatcagctccacggagcttattggttttttaccacaaacatttgttgactattactcttcctctatcaaacttaaaaaagtcgccacaccttttaccattgctcctatacaattctatcttatgtacaatagagcttcgctgaataatagcggatttgctgagctcattgagtacatcacaaaaaagcgttaa

SEQ ID NO: 401836 - DNA, 237 bp, Salmonella enterica; identical to SEQ ID NO: 376854

SEQ ID NO: 401837 - DNA, 432 bp, Salmonella enterica
  misc_feature (16)..(25): n is a, c, g, or t
atgcgaaaagtttgtnnnnnnnnnnacttcagccgggtggtgcagtttaaaataaacctaaacacgatgaccgtaacgcgtccgtatgaatatggtaaaacggaagtcgggaaccggggctatagcagttttgtgagcgctaagcatttattgactaatggtcacctggttattcacttcggcgcgacgacggttgatgagtttgaacataccattaccgcgcaaccaggctccagcgatcttgtcgatccggatgaagggcaacaggcgttaggtcgactggtattacaagaaatcaataaagagacgaaagaggtcttattcgaagcgatggtgacgtcgggctatttcaagaacgaagagacgaatggcacgaattatcgttatgatatttctgcatttcgggtatacaaaatgccgctgtttgcataa

SEQ ID NO: 401838 - DNA, 204 bp, Salmonella enterica
atgatatctgcggcgaagcggataccgctcagaataaccaccagcattcccagcataatgacgatttttagaccattgagcgtgatgatcggttttgccatatcagtccctgttttctatgccgacacgaataataatgtgatgtcggtcgacctgttctggttaaaatcaaacacttcaggtaaagaagtgaaaatattttga

SEQ ID NO: 401839 - DNA, 2937 bp, Salmonella enterica
ttgttgcttacgaccgtgacaatcgattctcaaattgctgtctttgatattgatgaagattcattaccggccctctctaataaccgggcgttgtcagtctcaggcgtcggggaggctggttctcaggtcagcatctttgtcgatggtaaattagtcaacgttgttatggttgaggctgatggctcatggcgcgcgccgatactgctgcaagatgatggtacgtttaatattcatttcagcattactgacgttgctggcaacactcaagtaagcaagaattacagtgtggatgtcgattcatcaaccgacttcccaacgctcaaccttgaagatgcgagcaactctggttcacttgacgatctgattactaatcacaacaagcctgtgttagttggcaccgcagaagcgggagccacaatccatatttatgtggatgaaaagatcgtggcaaatgtgcttgtgcttgaagatggaacctggtcctatcagtttgataatgcgttaaaagatggtgaatattctatccgtgtggttgccgaagacccggcaggtaatacggcagaatcgcctcgcttactcgtcacgatagataccagtacgtttatcgataatcctgctatggtggcaggttctgataacggtattttcagtaatgatagtataacgagtcagacccggcctacgtttagtatttttggagaaatgaaccagagtgttcagattttcattgatggggtgttagtcgatacgatcacggtgacggacagaaatcaagtttatcgacctgagtcaccgttgggcgatggttcccatagcatttattatgttatcaccgataaagcaggcaacacggctacctcgaaaacgctaaactttactatcgatacctttaatacgacgcctgtcgccattgattctatcggtggacaaacgttagcagagatgaccggtagtgatggcaaaatatatataacggacacgacgcgtaacttattgtttagtggcagtgccgagcccaatagcaaaatagaaatcattattaatggcttaaatgtgggggaagtttgggttaatgaaaaaggccactggcagatgccggtgaacccgctttatttcacagaaggccaactggatatcactgttaaatctacggaccgtgctggtaacgtaaatcaggaaaagtattccatttgggtcgatacgcatatccaggtatttaccagcgagcttgatgacaataaatcatcatcgaaaacggactggtggagtaatagctccactattaccatgagaggtatgggggaaattggcgctacggtatcattaatcgtggcaggggtcacgctggcaaccgctgtcgttgcggctaatgggcagtgggaattatcgaccgatcagcttccggaagggaaatacgatatcactttgagtattgaggataacgcaggcaaccgtaaggaagaggtacatgaaatatttattgatcgaacgccgccaaacgctccggtcgtaacttattcagacattgtcaacgatctaattattatgcagggaacggcggaagccaaatctcagctaataataaccgatagtaatgggaatacttatacgttaaccgttcctgataatggtaaatggagtatggcgatcccgtatccatcggaagggaagtttaccattacgagtgtggatgcgattggtaaccggagtgatgatgtccctctcgatatcatgaaagaggttcccgttatttcattatctccagactcagacagtggtacggtgggcgataatattacgcgcgataagcaacctacctttattatcgggaatctggaaagcgatgttgtggtcgttcaggtcgatatcaatgggacagtatataatgctgaaaaaaatgccgatggcgtttggttctttacgccaggtacaccgttagctgatggttcctatacgatatcggtaatcgcaagcgatgccgcgggtaatcagaaaaactcgttacccattaccgttacgatcgacagtacgctgacggtgccggagattgcgttggcagcaggtgaagacaatggcgtttcagacagcgataacgtgacgaatcacacccagcctaagttcacgctgcagcatattgatgctgatgtgaccggggtgaccgtaaacgtgacgcataacggcgtgacagacacctatcaggcgacgcaaggcgcggatggctggaccttcacgccgccagccgcctggaatgatggtacctacacgctgagcgtgacggtggtggatcgcgcggggaactcacagcaatctgcttcgctagcggtgacggttgactcaacggtgacggtaacagcggatagccagcatgacgatgcgagcgatgacgccacgccaacagcggttactccaccggagtctgaaacagtgaatgccgaaagcgatacgcatcttcgtacagtgccgtctgcggcggaagaaagcgtggtgaaggagacggcctatagtattacattgttaaacgctaactctggggatgaaatagatcgttcaattagtcagacaccttcttttgaaatatcagtacctgagaatattgttaatgtcagtgttatgtttgaaggagaagagtttactctgccgataactaaccagaaagcaatattcgaagttccgctatctttggaagatggtgaatatactatggacgtgaaattcattgataaggacgatgatttcctgattaaggaaaaaacattctcagtcgatcactcctcggcggatattgtgaacgcaatgaatgcaagaggaaagaccgaggatgatattaatgattccccttccacgagttctgtagggcacaacaataacggcgctattgatgttttcgccgttaatgaagttacgctacctgtagataatcaagaagaacacgcataa

SEQ ID NO: 401840 - DNA, 471 bp, Salmonella enterica
atgacgagcgttggtcagacgagtaccaacggtgtcttgttccaggttccagatattggtgttcgcagaaggaatgctcagcgccatgttagcgtagtcggtcagttccatctgttccagcacgacagtgttgccttcctgcttagcctgataggtgtaagcacccaggtcagctttgtttgctgcagagaaggtagcgtcggtgtttatgtcattgacataaatcagctcgttacctttgtaatccgcaacagaaccggcaccagtagcgttgtcgatgcgcactttataattaccagtggccgctacaacgttgtcagtggtgctacttgcatcagcctcgtcaccattgttgatatcgccgttaccgttgatagtcagatgaccatcagagttcatcgcgacaacgccgtaaccgtagttagcctgagtggtatcccaggtacggtcgttcaccaaatcggcatttag

SEQ ID NO: 401841 - DNA, 552 bp, Salmonella enterica
  misc_feature (402)..(411): n is a, c, g, or t
atgaaactgggatttattggcctgggaattatgggctcgccaatggctatcaatttggcacgcgccggtcatcaattacacgttacgactattggtccagtcgcggacgaactgctctcgctgggggcggtaaatgttgagactgcacgtcaggtgactgaattcgcagacatcatcttcataatggtgccggatacgccgcaggttgaagaggtgttatttggcgaacacggttgcgccaaaacatcgcttcagggaaaaaccatcgtcgatatgagttctatttctcctatcggaaccaaacgttttgcccagcgcgttaatgaaatggacgctgattacctggatgccccggtttccgggggagaaatcggggcgcgtgaaggcactctgtcgattatnnnnnnnnnncgattatggtcggcggcgagcagaaagtctttgaccgcgttaaaccgctctttgacatcctgggaaaaaatatcaccctggtgggcggcaatggggatgggcaaacctgtaaggtggctaaccaaattattgttgcgctga

SEQ ID NO: 401842 - DNA, 729 bp, Salmonella enterica
gtgccagtaagaagcatccacgttccactcttcaaacgcggtggtaacgggcagcacgatatcagcgtgttgcaccgtttcgttgaagaactgatcggcgcagaccaccatttccagtttttcaaacgcttttttcatcttgctgcgatcgaaatcctgggcaaacgggtttttacaggcgacccacagcatacgaaccggcggatcgttggcctccagaatcccctgcgccgtctggttaatattcagagagcgatcggagtactgcacggcgtcgctgccagcggcagccccgaattcactggtggtgcccgccgctcccggtatgccaatagcgcccaccggcggcttctgcagcatggcgttatagttaaagccccaggtatgcagatggccataacgcgcgccgccgccttcgacaccgatgttgccggacatagcgacaaaggcatcgatagcgcgaacgttggcgccgccgttgacatgacgctgcatcccgtaaccaatccaggccgtggccgggttaaccgccgtaaactcttccgccagttgacgaatcacctgtgccgacaacccgcagatttctgccgcccactccacggttacatggttacgcagataggcttcaaattccggatagccatgagcgtcgttgttgacaaaatcctgatccaccaggcccttatccaccagatggcgcgccatccccagcgccagcgcgccgtctga

SEQ ID NO: 401843 - DNA, 483 bp, Salmonella enterica
atggattcaatctatgaatcactgacggaattagaaaaaacagggcttacattgcgtgatttttttaattctcatgatagtcattcactgaaatctgcctacgtgagattaaatccatctgctgcggtaaaccttaccgaccgggcgtggctggaagcggagtatgactttaatgcgctattcgtcggccctggcaagctgctggctgcgcctttcgcttcagtgtatctggaagaggatgcgctggtgatgggaaaggcgacgctggagatacgggattttatggcagcgttgggattatcggttaatcaggaaagcaatattcctgacgatcatatttcctgcgtgctggaattgaccacactattactggctaatacccggcaaacgtcacaatactgctctaccctcactcaatatatcaataactatttaacaaagtgggtgccattatatatcgaaaaaataaaaactcatgcataa

SEQ ID NO: 401844 - DNA, 159 bp, Salmonella enterica
atgaagttcatcaacagaattttcctgatcgtcgccagaggggcgggcaaggcaataatccagtaccgcacctatcgccgtcaggctaacggaggtaattacactccccatgtccaaagaggccgctatattttcagccgcgggcagtggaaactgtag

SEQ ID NO: 401845 - DNA, 1797 bp, Salmonella enterica
atgtttgaccaataccggaaaacaatacttgccggcgccgtcgcactgacatgcggactcaccgcagccagtacgtttgccgcaggttttcaaccggcgcagcccgcagggaaattaggcgcagtcgttgtcgatccttacggtaatgcccctctcaccgcactggtggaattagatagccatattatttcagacgttaaagttactgtacatggcaaaggggaaaaaggcgttcccgttacttataccgttgggaaagagtctttagaaacctatgacggtattcctatttttggcctttatcagaaatttgccaacaacgtcacggtagaatataaagaaaacggcaaagccatgaaggatgactatgtggtgcagacgtccgccatcgtcaaccattatatggataaccgttctatttcagatctccagcaaacgaaagttattaaagttgcgccaggatttgaagatcgcctttatctggtaaatacccatacctttacgccgcagggcgctgaatttcactggcacggcgaaaaagataaaaatgcgggcattcttgatgccggcccggcgggcggggctttgcctttcgatatcgccccttatacgtttgtggtcgacacccagggtgaataccgctggtggctggatcaagataccttctacaacggccacgatatgaatatcaacaaacgtggctacctgatggggattcgtgaaacgcctcgcggcacctttaccgcggtgcagggccaacactggtacgagtttgacatgatggggcaaattcttgccgatcataaactgccgcgcgggttcctggacgcatctcatgaatccatcgaaaccgtgaacggtaccgtactgctgcgcgtcggcaaacgcgattaccgcaaagaagacggcatacatgttcatactattcgtgaccaaatcattgaggttgataagtctggccgcgtagtagacgtttgggatttaaccaaaatcctcgaccctatgcgtgatgcgctgctcggcgcgctggatgcgggcgcagtatgcgtgaacgtcgatctggcccatgccggacagcaggcgaaactcgaaccggatacgccgtatggcgatgcgcttggcgttggtgccggtcgtaactgggcgcacgtcaactctatcgcttatgacgcgaaagacgactccatcatcctttcttcccgccatcagggtattgtaaaaattggtcgcgataagcaggtgaaatggatactggcaccgtctaaaggctggaataagcagctagccagtaaattgctgaaaccggtagacgatcatggtaagccgttgacctgtgacgaaaacggcaagtgtaaggacaccgatttcgatttcacctatacccaacatacggcatggctttccagcaaaggtacgttaacggtctttgataacggtgatggtcgcggcctggagcaaccggctctaccgaccatgaaatattcccgttttgtcgaatataagatcgatgagaagaaaggcaccgtacaacaagtttgggaatacggtaaagaacgtggatatgatttctatagtcctattacctcggttgttgaatatcaaaaagaccgcgacaccatgttcggctttggcggttctattaacctgttcgacgttggtaaaccaacagtcggcaaactgaatgagattgactataaaacgaaagaagtgaaagttgaaattgatgtgctgtcggataaacccaaccagactcactatcgtgcgttactggtacatccaacacaaatgtttaaataa

SEQ ID NO: 401846 - DNA, 1023 bp, Salmonella enterica
atgttactactacagatgttttatgatggaatgttagtgaccgagacggagtgctctgagcgttgcgtcgattttttaaaagaaacgatgtttaattataattccggggaaattacgcttgccgctttagataatgatcacctgacgccgagcgaagcaggtagtaatgggatctatgaggcttttgagcatcgtttgatagacttcctgaccacgcccgccacgcccgccacggcgtctggtgatgagagcggcgctattgatcagacagatacatcacaaccagcggcaatagaggcgtttattaactcgccggagtttcagaaaaatattcgcatgcgtgatattgaaaaaaataaaataggtagcggaagttatgggacagtctatcggttacatgatgactttgttgttaagattccaattaatgagcggggaataaaagtggatgttaactctccggagcatcgtaattgtcatcctgatcgtgtcagtaagtatttgaatatggccaatgacgacaagaatttttctcgttcggcctccatgaatattaatggtaaagacgttacagttttagtttcaaaatatattcaaggtcaggagttcgatattgaagatgaagataactatcgaatggcggaggcgcttcttgaatcccggggggtttatatgcatgatatagataacgtaggtaatattctgattaaagagggggtacttttctttgtcgatggcgatcaaatcgtgctgtcacaagaatcccggcaacagcgaagcgtttctcttgcaacaaggcaactggaagagcaaattaaggcccgttacctggtaaaattaaagcagtccgagaccgaaggaaatactgaagatattgaatattataagtcacttattacagaacttgatgagttaatcggagaggaagaacaggcacctgcgccaggaagacgttttaaactagccgcgccggaggaagggactcttgtggctaaggtattaaaggatgaattaaaaaaatag

SEQ ID NO: 401847 - DNA, 1203 bp, Salmonella enterica; identical to SEQ ID NO: 377153

SEQ ID NO: 401848 - DNA, 1386 bp, Salmonella enterica
atggagaacgcgccagccagtctgcattcgctggacgtgaagtcccgcgatatgcgcggccagaaatatgtgctgcaggtcgcgccggaagactgtactggctgtaatttatgcgtagaggtctgcccggctaaagatcggcaaaatccacagatcaaggcgattaacatgatgtcgcgccttgagcatgtggaagaagagaaagtgaattatgacttcttcctcgacttgccggaaatcgatcgcagcaaactggaacggattgatatccgcacatcgcagctcattacgccgctgtttgaatattccggcgcctgttccggctgcggtgaaacgccgtatattaaactgctgactcagttatatggcgacagaatgttaatcgctaacgccacggggtgttcctctatttacggcggtaacttaccctctacgccttataccaccgatgccaacggacgcggcccggcgtggacgaattcgctatttgaagataacgcggaatttggcctcggtttccgtctgagtgtggatcagcaccgggcgcgcgtcatgcgtttactggcgcaattcgccgatcgcattccggcggaattaaacgatgcgctgcatgccgaagcaacgcctgacgttcggcgtgaacaggtcgccgcattacgccaacatctgaaatcggttgcgggcgcagaggaactgttaaaagatgctgatgcgctggtagaaaaatcaatctggctgattggcggcgatggttgggcatacgacatcggctttggcggtttagaccatgtgttaagcctgacggagaatgtcaatattctggttctggatacgcagtgttattccaatactggcggccaggcgtcgaaggcgacgccgcttggcgccgtcactaagtttggcgaacatggcaagcgtaaagcccgtaaagatcttggcgtcagcatgatgatgtatggtcatgtttatgtcgcgcaaatttcgctgggcgcgcagttaaaccagacggtgaaagccatccaggaggccgaagcctggccaggaccgtcgctgatcattgcctatagtccctgtgaggaacatggctacgatctggcgctaagccatgaccagatgcgccagttaacggcgaccggtttctggccgttataccgctttgatccccgccgtgcggatgaaggcaagccgccgctggcgctggactctcggccaccgtctgatgccctagcggaaacgttgcttaatgaacagcgtttccgtcgcctgaatgcgcaacagcctgaagtagctgaacaattatggcgagatgccgcattggatttgcaaaaacgctatgactttcttgccttgctggcaggaaaagcggaaaaacccagcgcagattaa

SEQ ID NO: 401849 - DNA, 510 bp, Salmonella enterica
atgcttttacgtttgttagcttgctcagcgcgtttttttgcttcatttagcgcctgggtgcgctctgcgactttgttttccagattgtcgtattggacttgtagggtatcaagtagttggttaaaagcaccggcaatactatctaattcatccagtcgttgtgctggtaaacgtgtgctcagcggtgcagttgcggttttattaatgatatcgacaaaacgccataacggtttggccagtgagcgatgtagtaaccagcaaaaagccgacgtcatcaacaccaatgctgttaatgtaaaggggatttgttggaggatagtttttaagatgcgattatgtagattaccgtatgggtacagcgtaaccagactccatccggggccatgcaaagttgtgcgtaatatcagaaatccgggaatttgttgccatccatcatgcagcgttacattttctaactgtgtacgtattttttgcgggatgtatgaaaacggcaataagtggttgttttga

SEQ ID NO: 401850 - DNA, 243 bp, Salmonella enterica
  misc_feature (194)..(203): n is a, c, g, or t
atggaattgatgccatttaattttgacagattgcctaatggacaggtgtttataagcaaccttgcaggttttcatcatttcattggtgagcaagaccttattgatctttctgatgagcgaattagttcggagcaatcaaacgtgctagaaagtaagcttttcataaccagtgaaagctcatctgctataactcnnnnnnnnnnatgctttaagttctgcttttgcaaaacgattgatgaatga

SEQ ID NO: 401851 - DNA, 273 bp, Salmonella enterica; identical to SEQ ID NO: 15606

SEQ ID NO: 401852 - DNA, 540 bp, Salmonella enterica; identical to SEQ ID NO: 376972

SEQ ID NO: 401853 - DNA, 348 bp, Salmonella enterica
atgttagcccatgaaattgacgcggtgcccgcctggaattgtaaaagcggcaaagatcgtacagggatgatggattcagaaatcaagcgagagctcatttctttccatcagacccatatgttaagtgcgcctggtagtcttccggatagcggtggacagaaaattttccaaaaagtattactgaatagcggtaacctggagattcagaaacaaaatacgggcggggcgggaaacaaagtaatgaaaaatttatcgccagaggtgctcaatctttcctatcaaaaacgagttggggatgaaaatatttggcagtcagtaaaaggtatttcttcattaatcacatcttga

SEQ ID NO: 401854 - DNA, 552 bp, Salmonella enterica
atgcagatcgcgggcttaactatcgcaatcactgcattgacggggatacttcttgaagaaacgaatacaagtacagagagtcactggcagggtatcactgcgcttatttctgctgtgttaatccatgccataatatatacacaatgtaagaaaagaagttgtactgtctctgttatcacatttaatgcgctcccgtgccttttagctgggttgatactttctgcgacaggatggttttttgaaagaccacaagtatcaaccttctcagtacactcaatattagctaccctgtatctcggggcttttgccggagtttttggtatcctgtgctactttgcgcttcagcaaaaggctaacgccttccaggcttcgcttgtatttcttatctttccgctgattgcggtaagtctggaagactatatttatggatatgctatttcaacacactcaatgctgcttattataccattagctatcgggatatttcttactcttgtcgccagaaatatccctgtaaccagcagatgtcgggataattcatcacagaaataa

SEQ ID NO: 401855 - DNA, 156 bp, Salmonella enterica
atgcaaggcgatgtattggttaagttggaaaaatatactcccgtgatcgttatcgataaaagtgacaggaaatggttatatgtacaactgtcattcggagaacaaaagatctatggttgggtcaatcgttcctatacaaaagcaataaatcattaa

SEQ ID NO: 401856 - DNA, 324 bp, Salmonella enterica
atgaatcgaattcacagtaatagcgatagcgccgcaggagtaaccgccttaacacatcatcacttaagcaatgtcagttgcgtttcctcgggttcgctgggaaagcgccagcatcgtgtgaattctacttttggcgatggcaacgccgcgtgtctgctatccgggaaaattagtcttcaggaggcaagcaatgcgttgaagcaactgcttgatgccgtacccggaaatcataagcgtccatcattgataaaaccgcgggattggtctgcaaaaagtcagggcgggcaactgaggtgcaaaatgcattacgtaataagcaggtaa

SEQ ID NO: 401857 - DNA, 156 bp, Salmonella enterica; identical to SEQ ID NO: 376857

SEQ ID NO: 401858 - DNA, 1068 bp, Salmonella enterica
atgagtaaccgttatgtcatggaggcgttattgaggccagcagtagaactctattcagctgcggctggcggggctgccacttttgttctggttgtcgcaccatggtcgatggcgttagcaccacaggtcagttatgtgactgcagccggttttgccattttcacaacaatcagaactcgtcagggtttgcgcatcttgcgctatcgacgcaatatccgtcggttaccccggtatcagatgtccagtgaatccataccggtaagccgacattttttgtttctggggaaaggctttatgtgggagcaaaagcatacccaacgtttgcttgagacgaaacggccggaagttgctccctttctgaaaccgtcagttttttactccctggctcgtcagtttgaacgacggtatgagtatacattccctgggttatgtagcctgacaagacgagattcattttttaatccggtacgcccattaccccctgttggtggtaattcggcgatacatggtgtcgagatggaggaagataatgttttgatgagtcttaccgagcgcgttggacatcttcttgtattaggaacgacacgagttggtaagacccgtctggcagaactgttaattacgcaggatattcgcagaggaaatgtcactatcgtttttgaccccaaaggtgatgctgatctgttgaaacgaatgtgggctgagacgaggcgagctgggcgtagcgacgagttttatatctttcatcttggctggccagatatcagtgcccgttataatgcagtcggccgttttggacgcgtatctgaagtggcctcacgtgttgccgggcagcttgggggagaaggaaataacgctgcgtttaaagagtttgcatggcgctttgtcaatatcatcgctcgtgctcttgtcgttcttggtttgcgacctgattattcgcttatcctccggtacgtaacaaatattgcagagctttatgagacctatgccgagaagttactgactcaacaggcaacaggctccggagttgtggctgatggttcaaaaccagatggggatcctgactga

SEQ ID NO: 401859 - DNA, 1527 bp, Salmonella enterica
gtgttagccgcagaagcgatgggcgagctggtgcaggcgctgggcgagctggatgcactgatgcgagagctgggcgcgggcgatgaggcggatgcgcagcgccagttgctggaagaagcgtttggggggggagaaggaatgagtggggggaaattgccggaggggtgggtgacaacccatctttcagaaatatgcagtaagcctcaatatggctacacaactaagtcaagctctatgggggatgtaaaatttttaagaacaaccgatattacaaaaggagcggttgactggtccagtgtaccttattgcatggatgccccggaagatgtttcaaaataccaattacaggacagagatattgtgatatctcgagccggttcggttgggtttagttttttggtacaaaaccctccaagccaagttgtttttgcttcataccttattcgatttaaaccagttaattatttttcagaatattacttaaaacgttttttagagtcgagtgactattggaatcagctgtctttaatgtcagcagggaatgctgtacaaaatgttaatgctcaaaagttatcaacacttacagtaccaataccacctatagccgaacaaaaaatcatcgccgaaaaactcgatacgctgctggcacaggtagacagcaccaaagcacgtcttgagcaaatcccacaaatcctgaaacgttttcgtcaggcggtgctagctgctgcggtaagcgggttgttaattggttcaaataaaagaaaccaccatccattatgtagtgaatggcaatggccagacctaccatcaacttggagtgttcataaatactctgaacttgttgatagcagactaggtaaaatgcttgataaagctaaaaattttggctctgcaacaaaatatcttggaaatataaatgttcgctggtttagttttgatttagaaaaccttcaagatatactaatttcagatatagagcgcagagaattatcactcaagcttggcgatgttttaatatgtgaaggtggtgaacctggtcgatgtgctatatggagtgaacctcaggacatacctgttattttccaaaaagcattacatcgagcacgggtaaaagacaaaatcatccccgaatggttagtttataatttgaaaaatgattcaaataacattagcttatctcagctctttacaggaactacaattaaacaccttacaggaaaagcactagcaaattatcccatcagagttcctccattagaagaacaacacgaaatcgtccgccgcgtcgaacaactcttcgcctgggccgacaccattgaaaagcaggttaacaacgccctgaaccgcgtcaacagcctcacccagtcaatcctggcaaaggccttccgcggcgagcttaccgcccagtggcgtgcggaaaacccaagtcttatcagcggtgaaaacagcgccgccgccctgctggaaaaaatcaaggccgaacgcgccgccagcggtggtaaaaaaacctcgcgtaaaaaagcctga

SEQ ID NO: 401860 - DNA, 333 bp, Salmonella enterica
  misc_feature (312)..(321): n is a, c, g, or t
atgaaatcgtcagggatgtttacgcttacagccattggcagttgccgtattgtgagtccggtaaaacgagctcagccttattttaattttcaggcaaactttaagagaatatatggttttacgcatacgagcagcgaggcattacagcagattcggtttattttgggcttgatagacattcctgaaaaggtccgaccatttatttttagacctaatgtaaactattcaaacaccgacgtacatagtcgttctgatttctatatcattgagatttcaagtcagaagaagattatggcctatgggttctgcttnnnnnnnnnngcttacaaataa

SEQ ID NO: 401861 - DNA, 369 bp, Salmonella enterica
atggctaaactgaacaagaaacaactttctttactcaaggaaatgcctgcagaacaactcatgcaaataatttgtgatattgcagaggataatggtcaggcaaaatcctttcttattaatgaatatctgttaactccagaagaatcactgaaaaaggctgaggctgaatacaaaagggtaattaaaacaaaacgcttttatgattattatgaagcagcgattttttttgaggggctatacaggaatgtcatatttccacttgaaaagacggtatcaacgctgcctgaaaaaaccgaggcgttttgccatgatttactgctctcatttgataaagtcagcgaaattgctgatacatcagatggatcatga

SEQ ID NO: 401862 - DNA, 390 bp, Salmonella enterica
atgggggctctgctgtgcgctggggtcagaaccctgactgcgctgcaggttatccaccgctttgcttctccctggctcgttgtacgtctgaacgcagtgatggaggaagtggaggagggggcctcttttggtatggcgctgcgtgaatgtggttatgccttcccctcaaaagaagccgtgaactatctctctatggtcagtggggacggggccgctcagatgattgcgcgctttgggcaggaatggctcgaggaaactgtgaagcgagttaaccgacggggaatagccgtgatgctgttctcaatggtgatgttatttgcgcttattggcgttgtggtcgtggcggtgattgaggcgacttcgatgaccgagagtatggggcagtactga

SEQ ID NO: 401863 - DNA, 360 bp, Salmonella enterica; identical to SEQ ID NO: 376730

SEQ ID NO: 401864 - DNA, 141 bp, Salmonella enterica
atggtttatatcaactggctgaccgacaccgcagcggagctgccgttcggcggcgttaagcgttcgggcttcggacgcgagctatcggatctggggattaaggagtttgtgaaccagaagctggtagtggtacgccgctaa

SEQ ID NO: 401865 - DNA, 243 bp, Salmonella enterica
atggctttaccacgcaagttaaaacacctgaacctgttcaacgacgggaacaactggcaggggatcgttgagtccctgaccctgccgaaattcacccgcaagtttgagaagtatcgcggcggcggtatgccgggcgcggtggacgtagacatggggctggatgacggcgcactggacacggaattttcaatcggcggcaccgaactgctgttattcaagcagatgggccaaggcaaccgttga

SEQ ID NO: 401866 - DNA, 330 bp, Salmonella enterica
atgaacgggatcacaaatcgacttttctcatactgtggttgtttcgccagagtgggcgcttttacgctatggctggcggcgatgttcggttcttgccaggcgtacagccgcgagctggtgatggcaacgaccttttcacccagcgcgaccgcctggattatccagcgctggcagacggagccgggttccgtcatgattcgtacgctcaaccgtaccagcggttctttagagcaattacttgatacggcgaatgcggaaaatgtcgatctgatcctgacgtcatcccccatgctgttttcaggagcaccaaaagctggcgctattggatag

SEQ ID NO: 401867 - DNA, 270 bp, Salmonella enterica
gtggccgagggggatactgtaaaaaaaggagaactccttgcaaaggtcgttaactttgatctgcaaaaagaatatcaaaggtatagaactcaaaaagggtatctggataaagatgttaacgaaatatctttcattcttgataaagaaaatgagagtggattgattaccctggatggcacccgttctttaagcaacaaagaggtaaaagcgaatattgaattagtgcatagtcagataagagctaaagagttaaaaaaaaacctctcttga

SEQ ID NO: 401868 - DNA, 186 bp, Salmonella enterica
atgatcagggtaagccatttcattctggatattatagctttggtgtgggctatgactctccttctgttggtgctacggatatctggggattattttccgtcagtccgaaaacaggtgatatctgggaagaatattcatgtgagagaatatcatttccggcgctacaaaaaatacaacaagaaataa

SEQ ID NO: 401869 - DNA, 459 bp, Salmonella enterica
atgggggacgaaaagagcttagcgcacacccgatggaactgtaaatatcacatagttttcgcgcccaaataccgaagacaagcgttctatggagagaagcgtagggcagtaggcagcatattaagaaaattgtgtgaatggaaaaacgtacgaattctggaagcggaatgttgcgcagatcatattcacatgcttctggagatcccgccgaagatgagtgtgtcgagtttcatgggatatctgaagggtaaaagtagtctgatgctttacgagcagtttggggatctaaaattcaaatacaggaacagggagttctggtgcagagggtactatgtcgatacggtgggtaagaatacggcgaagatacaggactacataaagcaccagcttgaagaggataaaatgggtgagcaattatcgatcccgtatccgggcagcccgtttacgggccgtaagtaa

SEQ ID NO: 401870 - DNA, 207 bp, Salmonella enterica
atgaaaatggaaccattaaacgagaacgagctggaatggctggatgatgtgctgacgaaatacaataccgatcaggtcattttggatgtcgcggagctggacggtctgattactgcggtactaagttctccgcgtcccatcgagccggaacagtggctggtcgcgatatggggggggacccgcgtacgtaccgcgctggacatctga

SEQ ID NO: 401871 - DNA, 1053 bp, Salmonella enterica
atgacaacgttgtccaaaaacgtgatgcaacacaggaaggtattgaaagaaactggtttggcgtttgccaaatctataccgcttgttggacctcatattgaggcagcggaaaaaatgttcacgttgttctcagagataaatgcgacgacttgtcgtgatcgattcaaccgttacattatgggcattggtgaaatttgcgacgatgaggtcgatatctcaagagaacacttttcggcgttagtcaaaaagctcgtgcttgatgatgaagacaagaaaacagaatactacattcgcttgacggtaagcctagcccgcagcagccttaacgacgatgaaaaactattttttatccacatactgagtgggttaacctgctttgatattgaatatgcgcgcaaactttacatcacaacaagctcgccaataaaaggctataaatcaactgtattagcccaagttagtctcacatcacaaaaaagtggaatggctctgagatcgctaaataagctcataacctcgggtctcgtctacgaagacagggctggcgagatccaagcgaaccccatgttcaaattaacagatgaacttgagcgtcttttaggatttatttttcacaaggatgatttggagcctgaagctttatctattgagccaaaggaagaatacgacgtcattatcattgaaagcagcgaaatctatagtggggcatatccaaacagcatttatcgtagtttgaaagccgccggcattaaggtttgcatagaaaaaaatgaagactgcattacaaccaagctggcaaagtacttcatctcagtcaagacagggagcggactcaatggtgaaggtgagtggattgaatttgggcaaatttacgtcctcaaacgcctagattcaagcagtaaacgtttctatgaaaatgagcacagtgagacagtcagtatcagcaattttaaacctaaggataacgaccaaacatacgatgcaagtttgctaaatatagcactaaataatatcgctgcgtttgtcctgaaccgtctgtctcccacaacttaa

SEQ ID NO: 401872 - DNA, 1056 bp, Salmonella enterica
atgcgcttgaataaacttcccggatatggtcttcctgagctggctttctggccgcaacccaaatacgaaagaaatgagtggtcgatttattgcctgaagcttcgcactgacggaactccggcctggtacagacatttcgtcgatagaggtacagaataccgcgcatatggtgacgactatgaggattaccaaactgcgaaagaaagagcattggagttgaacaagagcgtagatttcaatattgatgaacttcctctctccccagcagaaaaagagtcattacgcttaaaagtggaaaaggccctcaccgcgaaaatgcgactgatggatgaggaacatatgatgttcaatgaagccgtcaagagacacgccaaatctccccgagtttcaatagaagagttaattctaaaacctgataacgagaacctacgtccacttctttttgaagcactaaaacagatgccatatctgcattttgttcttcttcctaccttccgcgtatatcttcaactcacagggcctaatacttgggaatggtcgtatgccggagcaagagaagcaaaaatcggttacaaggagcgtattgccagaggttttggtttatcaggagcggcccattggggtaaaaccaaggcaactattcgctcaatgctgctgccgcaagccaataagctgctacagcatgccagcgtaaaaagaatgctggatgaagctcttcgtaacggccaaagagttctcgtctctggaaactttgttttctggttcgaagataagaatcaaattgggtggagtgttaaagcagtgaacgaaagcgaaaacacctcaaacggtaatacgctctggaaagaaggaacaatcatctccaaaaatcacggccgtattgtcgttctaccttatacgaaggaaaacggcgagcacgttagagggtacaccaagaacgcaccgaatgacggcaatgcgcttccgaggcataagaatgaatacgttgagcttccctttgaagttttggaaggagacctgatgatcggattgctcggtgagcttaattacgaataa

SEQ ID NO: 401873 - DNA, 756 bp, Salmonella enterica
atgctgtacaaatatgtaggtaacgctgatgacgacaaagtcatcgagtatttggacgcctttgttgagaacggcaccatatatgccagtaggcctttagacttcaatgatccagccgaacttaaggtgattttagattttgaggccgactttgatgtaattaaaaataaattctacgcagataacccagaaaaaactgaagaagagtttctggcttggtattcatcattcgatgaacgagcaaagtcatggattgcctacaaaactagagaagaaatacttacaacacatggaattgtttgcctcacacgcgatcatgataatttcttgatgtggtcgcattacgccaactcacataccggattctgtatcggttttgatgatgagttttctaaaagtattgagggacgcagtgtcttgggaaacgtggtgtatgtagacttttaccctcgttataattactacactgacgatcctgtaaactatttaagtgctacttaccttcataaaggactaccgtggtcttacgaaaaagaatacagagtaatcactgatggttatggtgttaagcggttcgataaatcgttaattaaagaggttactttaggctgtagagcatcttttgagctacaggaccatgcttgtaaattaatagaaaaaggtattagcgtctttaaaatggcacttggtaaagactcgtacaaattagaacgagttcctgtaaagaaaaatcactattttcagggggacgcgtag

SEQ ID NO: 401874 - DNA, 666 bp, Salmonella enterica
atgaccaagatcattgtggttggcggcacgaaaggcggcccaggcaaatctactgttgcccagcaaattgcggtatgcctcaaagttaaaaagaaaaagaagattcaagttaccgatattgatattcagcgcaccacaacgagttggtgcgaagaccgtcgccagaacgaagatcttgagttgattccattcgcttacgttcaggacgacatcgtcaaacacatcaaatctctgaagggacgcttcgattacgtcgtcattgatgcggggggctttgactccgaaattcagcgacaagcgatgctgctggcagacttcataattatcccgctgcgccctaaacgtcgtgatttgaaatccctgcgcgatatcgacccgattatcgacaacgttcgcaacgtgaacgagactgtgaagatccgcgcggtagtgaaccagtgtccgtcactgccttcccaggcatcacgtattctggcggcgaaagaaattgtcgagacattcggcatcgaagctgcaccggttaacttgtacaaccgtaacgtttatgacgacgcggaagaggcaggccgttctatctttgaaatgactggtgccgaacgcgataagaaggcagaagccgagttcgaagaatttgtagattacatcatgagtttggaggaagaataa

SEQ ID NO: 401875 - DNA, 552 bp, Salmonella enterica
atgtctgactactcttgcctgagcattctcaagaccaaagctaaaaagctggttcgaattcaaaaaattaagcaatccgaggcgctagagatcgttgctaaagaagcgcaattttctagctatcacgagcttaaagaggtcgcaaagcgagacccttttgagcctcgactggttctggcagcaatgggtgaatcttctctggaagatgctctttatactgaagaagtcttctccgctatcgagacggaggttatggagctgttatctggtgaaacagccgatacgaatgcctatgatttcaacgtagaagaccttgaagcaacgaaggtcaagtacgacgagaagcgaggcattttgactgtgctggcgtcctttacgtatcagggagagcaagacccagaccgtgcctactcaggaacctcatttgaggttgttgctgaaatgcaactaattctccgtgaaaatgcctggagtctcgttgaagatagtctggaattggcctcggttgtatcggataccgatcgtgactggtatgacgatgtagatggttaa

SEQ ID NO: 401876 - DNA, 2553 bp, Salmonella enterica
atgtggtacagggaaggtactatctcattcactcaggggagtaacatagtaacaggcgcaggtacagcctggaatgtgacggccaatggtgtattgccaggcatgatcgtaattgggcctgacaataagctacacgagattaagcgcgtcgatagtgacaccagcatggttctggtggaaccatatgctggtgagacgcaggcagatgtaccttgcgtaatcattacaacatatgagggcgatctgacacagttcagtgctcgcttcactgcgcttatgactcgcatgtctgctgactcaaaagcgatgcgcagctggttgacggcgctcgatgaagtcaccttggaagctgctgatggcactgagataaaggtaaagtcgctcttacagattgttaatgagcacaacgaaaaccaacagtggtatcgagatcacgtcgataccattgagtcggagtcctcaaaggctctggctgcagccgccagatcggaagcagcggctgcagaggcgttaaactctaaacaagcagctgcgggcagcgaagctaatgctaaggcaagtgaaaacgctgcagctgcctctcagcaggcagcggctaccagtgaaagtaacgcccgggcaagcaaagaggctgccgcagcatcacaaacagctgcattacaaagtgagcaggctgcagccgcccatgcagactccgcgaagagtgaagcagaaaaggcgaagaaatttgccgatctgttagatgtaaacaacgtgctgcataaagatcagaaccttgctgacctgccagataagagtgcggcaagaaagacgttgcaagttcaggcggttattagtcgcgatccggaaattaacggcactcagggtgattacaactcatttacgaaccctcaatccacttatgagttgaggattgcaaacaatggcgaatggcgtgttgcacgtaatgacaataacagtacatcggctctatccattggtgcgggcggtactggggcaacagacgtatcacgcgccaaaaaaaactttgaacttgaaaggttcgtacaaacatcaaattcaacagtaatgaggttcaggacattcggtcttaacctgacaagcgacggcacatggggagttacacaatcaggcgttagcgggtggattccgcttggcatggcgcaaggtggcacaggggctacaactcttggctcagcaagaataaacctaaacgttgacaggctaaaacagcaggataacggtacgtttttgcaatcaaagaacggcttttattccttgtttatctacgatagcggtgattggggttttattgagagcgccagtgcacaagtacacccattgaaagttaattttggaggtactggggcgacaacagttgacggggcaaggcataatttaggactggcaacaaatcactcccctgtttttgctggtattgatttgcaaggtcttaacggcacaacgtcagggatcatggttttaagaaatagagatgctggaggcgctcaagtttcatactcaagaatttaccatgaaattcaggctggagttgccaaaacaacaatccaaacaacaagagaaggcggcggaacaaactattttcagattgatgaatatggaaatattggaaacataaatgccgcagtaataacaagctatgcttgtgttggtgttgctggaagcgctcttggtgataaatctcttgtgcttggtgattctgacacaggttttagatggggtggcgacggcgttttgcaagtaatgtgcaatggtagaaatattgcaacatgccaaactaatgattttaacatgtacgggttattgagtatatggcctattagtgacaatgcaaacggcattagggttgctggcattaggtctggtggggcaaatgccatgattggcggtcaaattcagggaggcacttttactgcttggcgtgatcgtggtgctggaatgctttgcgagattacagcaaaagacgcagccgttaacgtatttaaggttgttcattggggtgatgattggattactggaatggataccgttaactggttgagtggcggtgctgaaacacatctttatgttaagggagcgcaatttatatttgatcacgccggaaatgcaagttgtaaccaatggatcagcacttcggacattcggctgaaagcacatcttaatgatatcgaaaatgcaaaagacaaagtaaggacgctaagaggtataacctattacaaacgcaataatatcgttgaggataagtattcctactatgaaattgaagctggtttagttgcccaagaggtacaggaagtattgccggaagcggtaagaaaaattggtgatactgagtttttaggggtcaactatggaggcgttgttgcgcttctggttaacgcaatcaatgaaatgattgatgatgaagacgttcagagtaagcgtattgaggcgcttgaggacgaggtgacagctctcaaatcagaactaacggatctcaaggttctggtagcgtctttagtgaagtctcctgccattttggaaggtgaatag

SEQ ID NO: 401877 - DNA, 4383 bp, Salmonella enterica
atggaacagttcaagaagaagagactgcctctcctgattgcaggtgctggcggtaagaaaagcagtggctccagccgcacgccgattgaagctgacgataccgtaaactcgcgtgctatggcgtcaatcctcgacctgctcggggaaggtgtcattggcgggctggtggatggcgcaaaatcgatcttcattgatgatctgccaatcctcaacgaagacgggtcaccaaactttagtggtatcacctgggatttccgtgatggttcacaagaccagacgccgatggccgggttcgatttcgttgaaacgccgaagtcggtcaacatccagttgaaaagaactcacgacgtcacgattgccattgataacgatgaggcagaccgtgtccgcgtcattctgaagttcccgtcactgcgtagcgtcgacaaaaagaccggtgataccaacggtacgaccgtgaagtacaaattccagattgccaatggcgacaatgccttcaaggacgccatcgcagaaggggagagcacttccgaagttacgctgacggcaaaaaagacaggcgtctactaccgcagctatgaactgaaactgcccaagccaggtcgtgcctacaaaattcgcgtgattcgtattaccgaagacagcaacactcagtacatttttaacgatacgtgggtggactctatcggtgagatcgtcgatacaccgatgaactacccgaactcagcgttggttggcctgaaggttaactcagagcagttcggcagctcaatgccgtctcgttcgtatctggttcgtggcctgaagatccgcgtcccgtccaactacaatgagaatacaaatacctatatcggcgtatgggatggcacctttaagctgctttcgtcttcaaacccagcctggattcttttcgacgtgcttaccaacgctcgttatggccttgggcagttcgtttctgagtccatgattgacctcgggcagatctaccagattgggcgctactgcgacgaagaagttgacaatggattcgggggcaaagagaagcgctttgctatcaacacccagatcaccagccgtcaggacgcgtaccgactgattcaggatatcgctggcgccttccgcggtatggtcttctgggctggcggcatggttaacgtcatgcaggatagcccgtcagatccggtcatgatgttcaccaacgcgaacgtcaaagacggcatgttcagctataagggatctgcgcgcaaagaccgtccgtcagtggctcttgtgacctacaacaacaaggaagacggctacaaacaaaacatcgagtacgtagaagaccaggaggcgatgcgtcgttatggcgagcgcaaaaccgaagtggttgcgttcggctgcactagccgcggccaggcgcatcgtgtcggtctgtggttgctgtataccgcacgcatggaatcggacgttatcagctttacggcagggctggatgcttccttcctgatgccgggcgaaacggtgctgattcagaacaaataccgcgcaggtaagcgcaactctggccgcattgtggcgttcacaaagaacagtatcactctcgacgcaccggttacgctgaataaggccggtagctacatccggatcttgaatcaggaaggtgaaatcgttgagcgcgatattcttgagaccggggaagacattaccaaagtgaccttctccaaagcgctcaattccggcgatatgccggtaatgaatggcgtctggacgattacagagccagatctggagccaatgcgtgtgcgcgttatcaacgttgctcagggggatgcccaggggacatttgacgttacggttgtccagaataacgcatcgaagtacgaagccatcgacaacggcgcgacgctgatccccgagaacaacaccgttctcgatccgacttattcgaagccgactaacctgcaggtgacggaagggacgtatatctccagtccgggcaacctctcaatcaaactcgttgccacctgggagggtaagtctgcggaatattggatcagttggcgccgttccgatgagaacaacgtctctaactggcagtccgcacgcgttaccgaagagcagttcgagatcctcaatattgccgagaatggtcaatacgacattcagctctatgcggtttcgttcagcggcaagaagacggacatcatcagcaccgtttatcaagtaaaaggtacgatgacgccgccaggctctcctacctctctgacggctgtgggcgactaccgcaacgtgattctgaattgggtcaacccggactcaatcgacctcgatcacatcaacgtgtacgcctcccagaccaacgatctggaaacagcaaagttgattgcagaggccgccagcacaacgttcacccatgccggtttgggagatagtgagacctggtactattgggttcgtgcggcgaacaagcgtggcatgttaagcccgccgaactcaaatctgggtacggaagcgacgacaagagacgttctttcattcctgacaggtaaaattacttcgtccgagttgggtcaggagctgcttgaggaaatcgatacgaaggcgtctcaggatgcagtcgacaatcttcataagcagatggaagagagccttaaggaactggccgcagccgatgaaactctccagcagtctcaaaccgatctcaagaatgaggtttcaggcacgctggacaaggtcaacgacgcgctgcaacaggttgaggactctaatgcggctctggttgagttgcaggagaccgtttctgagcagggtaaagccgtcgctggcgctgttgaagcggcacacgctgcgctagacaatgcctccgcgctgattgctgaagagcgtgaagcccgtgtcgaaggcgataaggctaatgccaagcaaattgaggcaatgaagtcatccgttgatgatagcgctgcgacaattgaagaaatgaagaagactgttgccgaaattgatcgcgcaagctccgaggtcacaacaaatatcgacgctattgccaagacaaatatcgatcttgctctccgtcaggatgaagaccagcacaagcagatgatcaacaacgcgaagattgccactactcagaaggctttcgctgatgatatgtcgacaatggccactaaggtcgaagagattcgtgctgaaattggtgatgaaattaaagcgtcaattaccgaggaaacgacggctcgtgtggaagcggataaggctatctcgaagcgaatcactgcgcttcagtctcagcttgatgacgatattaaggctgcgattgcgacggaacaggagacaagagctaccgccgatgagtccctggctcgccagataaccacactaaaggcgcaaacgggggaggacattaaggcagcgattggcgctgagagcagtgccaggacggatgcagatagtgccctgtcttctcaaattaactctctggcagctcaaacatcggaagacattaaagcagctattacatccgaggctactgctagggcagatgcagatggcgcacttggtaagagagtagatacgattaaggctgaggttgatggcaactctgcgatcattcaggagcaggcaaaagcgattgcggatacgaacgagaaggtgtctaccgcatggactctgaagatggaaacctcaacctctggtggccagaagtatgttgccggtattgcacttggtatcgatagcacagggctttcgcaatttcttgttcaggcggatcgctttggattagttaactctgttaatgggcatattacaacaccatttgtaattgagaatggcgttgcctatatgaatggggcatggattaaaaacgggactattgataacgcaaagattgggcaagtaattcagtctgataattatgctggttcgtcagcaggatggtcgatcaataaaaacggtaacgctgagttcaaccaagtgacagtaaggggtactgtctatgcaaatcagggggtgtttagaggcagaattgaagcacaagaaggctacttcaacggaactgtttatgctgaaaagattgagggcgatgttgccaaagcggtcgtgttaggtttcaactcatctatcggcatacctgcggcgagctatgacagacatttggtaatcccttatatcggtgtgcatgggtggacatattccggagggtatggacaaggtggtggtactgtgtgggttgattcgtcttacggtggtcgaatcgcgtccgtctcttcgacggcaatgcatggcggcggtagcgcctatctatttctgcctcgaaatgtctcgaccacactgtcttatggtggacaattagatcatgcaaatgccgttggcacattaacagttttattatttaaagcctaa

SEQ ID NO: 401878 - DNA, 228 bp, Salmonella enterica
atggttatttttatcgctggcgttaacatccataatcatactcttgtttatgatatcgctggtttagctggttacgctctcagctctgaagtagtcgacgaaaccacgtttaaaatagatctgaatagcgcggatcataggaagcgcgcaggaatcaaagaatccgatgttcttttaatgattcaagagtttttaaacgctggctttaaaattcacttagaaaaataa

SEQ ID NO: 401879 - DNA, 177 bp, Salmonella enterica
atgctggtggccttaaatgaccatcctgtttcccgcaggctaaaaacacccacctcttaccgccaggctaccgaacaaccctccgactccctgccggccaccagcagccggaacagaacgcttggacgccttatgcgcgtagcgataattaaaccaacaagaaaacaagttgtttaa

SEQ ID NO: 401880 - DNA, 393 bp, Salmonella enterica
atgacagtttcacgtgagagtcttgtgatggatttgcattatgcttccgagaaagcctccggcgagaaagtcgcgaaattaaccgtcgttctgcgcgagactatcggaggtgatgtacacaccagcaccttaattcgcaccggcgaaggggacacagcagtttactcggtaggctaccagagcgtcagtaatgcgtcagatccagtcttgctaaaactggctgcctatttccgcgaagggaataaagaaatgtttgaaaaaatgatggtacaggccgaggaggtgttcgattcaggtctcaacatgaattctacctggcttgggcaatacggtctgcgtatcgcatctaacattcccctggaaaaccacatcccggaaagcgtattcgcttaa

SEQ ID NO: 401881 - DNA, 315 bp, Salmonella enterica
atgcactactacaccaccagcaaccctgacaccggggactgtttcttaatctgtttcgtcattcgcgatatggaagaccgccagccagcgccggaggttgaggaagatatcgttgcgcttgttcagttgaagggagacgaaattgtctggcacaagaaagggactgacggagacaactatcactttaatgaatacctgatgaagcaagatctccttatgtacaaaaagttggatgaagaaggctgggtttttgaagtgccatttccatgtatcgccaatgatagtgaagtcacctattcatggagtacaccctga

SEQ ID NO: 401882 - DNA, 243 bp, Salmonella enterica
atgagcactaaagactacacagacgggtacttcagcatcgacgccgagagaggcgagttgctacatggcggcattactgtcggacgcgtcattttggttaacggtcagatttacacagagctggacgataccagttcaagcgcacctgtcgtctccggccccttcgggacaagagaagaggcgctcaatgatttgtgggacaacagggacgatgcgaatcagggcagtgagattttcgaataa

SEQ ID NO: 401883 - DNA, 1191 bp, Salmonella enterica
atgacagatacagctttttcgaaatcgctacgaaaggaagtcgaccctgagcaatacttggtacttaaaaatttagatgacagctcagttcatgctgtcgctcgtgaagatatcatttgtccaatttgcaaagttggaggtggctcgttcgttagagcctctaggaatgatggttatcacaagaaggcgcatttcagatttgccggtgaagctggccaaggccaccatccatcatgtgacttctacggagataggttaacgtctgaggtagggaagcaccttgtcactttcacgaaagatcgaacaaagtattcgcaggtaatacgaaagctggtatgcgcaggcatacaggaagggttttttactcaagataaaatgtggcagatgagggaatggttcttcaataagcgtaaggactccacatttgaaatatggctggaaaagggtcatttgggctggcttgactatattagcgggttacgtgagtcatatctggcatggacaaacccggatattatgcctttctcacctattcaggctactgtgcctggtttttcatggcctcgtgcaatcgacaaagaggtgctaagacttcacatcaagactctacagcaattgcgtgaaatttcagtatcccatagtgacatttcggcaatcttagaacatataaataataatcgtggacgtacaattctcgacccatcgcttttggaagatgagataaataagacgtacaaacttactggttttgtgatgagcaattacattgagtttaagacaaaaacggttcgcgatagagcatatggcgaggctaagtttctggcatttgccgcactgctgttatttgtgtctgattgggacctcaacatcgcaattggtaagttttccaagattgccagagtgaaggaggttgatgacatgctagctggtaatttcattggtcttaacccttacttccggtacgacgtggctaaagcagtgaagaaattgcaggataactggccgattgaataccaagagttggaacattgggatgtagaaaaatctatgcgtgagtcatatgaaaagtggcgttcgacagagccagaattcgccccacctcttttaccagacctgtatgtaacccaacacgagaaagaagtcgcacgagacgaggaaatcaggcggtggattaagaacggagatgtttga

SEQ ID NO: 401884 - DNA, 318 bp, Salmonella enterica
atgttgaagctcacggaagtctacaaaacggcagtgatcagcaccgcccacgtaacgccagcggattcagaacggctacccattgcctgcttcgacccacttactgatcgcgggttgaattgggtacacggtacgcagtacggctggattgtccgcgcaggtatgcgtggcagtgactggaaagaagagctaagtgaatacggcatttcgaaagagacgatctcaaacatacagaccatactagatgccggttatgattcggtgcaattcgattgcgacgcagagctggtggatgggataccggcatgggattggtag

SEQ ID NO: 401885 - DNA, 267 bp, Salmonella enterica
atgggcagcaagaattccaaatatgagatcgtctatagaggcgaagcactcaaacacctgataccaggacagttcgttttcttccaacgtaaaaaagaatacggcggtggattctggcttggtaaaacgcatgaggacgggttcgagtttgtgctggaacaacccacttcacttagttacgggcttgcgtatctgatcagtctgtctagtgttgaagccagacatatggagtttgtggacgacatagatgattttaaattgacctaa

SEQ ID NO: 401886 - DNA, 690 bp, Salmonella enterica
atgagcgaaaaatcgagaattacattcgccagcgttgatcaggcgaagctgccatttaatttagtgctacaggggaacgcaggaacgcctgccggaaccatcaaaatcgacaaggagcttgtgacgttcgaaggtaactttgatgaatcggcgcaggtttttatcgaacatctggcacgccgttggagccagcagtggagagaccttgagaaacgcgctaatgagtttgatcggttcatgggcgcaatggacacagcaaaagaggctctggctgccggcactccgttagatctggagtcgcttttcaaaggagagatggcctctgcgatgttcgccaccatgttcgcaggtgagttcgtccgcagcggcgccagaaattacctggagctgggatacaacgttcctgaaatgggcgagtttaccgtcaccatccagcgcaaagaaggcaagacgccaggcgaacgtatcgctgaacttgaggccgttgttgatcagcgtaacggcgagtgtgttcgtttgatcaacgaacgtgatgcgctgcgcgaagagcagctaaacaaaggctcgaacacacgcgcggccgcagacatctacttccagttagttgaggaatgccagatcccaccaggcggctctttggtcgagtatgtccgcgaattgcaggataaagcagagaggtgcgcggcatga

SEQ ID NO: 401887 - DNA, 591 bp, Salmonella enterica; identical to SEQ ID NO: 199555

SEQ ID NO: 401888 - DNA, 213 bp, Salmonella enterica
atgaaaaatataacttctaaattgaccgcccttgaggttggacatgcgtatgcgcttggactagatggtgttgcaacaattctcacagagctgcacgccgaagaactgcccatagacctgattgacaccaccgtgttcaagtttgaactaagtaataagcatttcactctcatcaatactggatgcggctcgctcgccgtcagaacttattaa

SEQ ID NO: 401889 - DNA, 492 bp, Salmonella enterica
atgccgggtcattcacatgacatcttgcatgatgagctgcaaggttttgatgtatttaggtatacggacattagctttgttttttctggtgacgcaactcgtcagattacatttaggcttgttttttgcaaagatggtgagcaaggtcaccagcttcacgagctatatggtgaagagcttgcaacactcacagtaagtgttgtcagtttttacaatgttgaagcagagaataacgaagaatgtgatactatgtttgacaagccacctggtgccccagatctaacggcagcagaagcgctctatctttacagaacacttgttgacatcattctcagaatagctgaaactgaaaacatacaaattttaacctttcaagcatacagtgaagaactacgccgtgtgtacgaccgtttggttcgaaagtatgcaactatcaagaaccttgaaacacatatagagggggcttgttatgttatacgaacggaaaactaa

SEQ ID NO: 401890 - DNA, 144 bp, Salmonella enterica
atgttatacgaacggaaaactaagatgaatatgaatatcaactacgacgcaatcaaagcccaaaagaacgaaatgatccagcggtttctgcaggctaaaaagcaggcagagcaaagcggtaaagtcgtagctaaacctctttaa

SEQ ID NO: 401891 - DNA, 381 bp, Salmonella enterica
atgaccgatatggatatcgaaaaagagattatggccaaaggcaaaacggcaccgcgtattactccccagcacattgagggcattattcaaagcgagcattattttagcgcgtatgatggagctaaatcgggcggtgaagaagttgagcaaatctggcacaacaaagacgatctgggaaaagaatatgaggtgctatctcttctaactttctgcgttctggtgctgcgcaacggctttgtcgtcaccggcgagtctgcgtgcgcaagcccggagaactttgatccggagatcgggcgtaaaattgcacgccagaacgcgattgccaaaatctggccactggaaggctatcttctcaagcagcagctgcacgaggtgaaatga

SEQ ID NO: 401892 - DNA, 792 bp, Salmonella enterica
gtgagtaacagagatgattttccccaatcggtgaagcgaacactggccgaacgcgtaggctggaaatgctcttttcttggctgcaaccagacaacagtaggcccggatagcggtgatacaaacggcaggattaataatggcattgcggcccatattacagcagcagcgccaggtgggccgagatatgatcctagcttgaccccagaacagcgaagctcgattgataacggtatatggatgtgtcgttcacatggcgcactcattgactctgaccacactatctattccgttgagcaattgaaaaactggaagcaactggccgaaactcagcaatctttactgcttcaaatgacgcaccaggtgagacagaacaattactcagaaagagacgtcggtgttctaaaagctattactgatatttttaattacaactacctccaaatactgaagagcgaacagtttcgagcaaaagttagtaccaacattaccgaccctctctacgcttttgatagcattgcaaacaatcctttttacagcttcaatgatgttgttttagaaggacttcgtatagcgttgatcggcaaagttaacaacttttgtgcgctgttcagacagcgttgcgctggagggtttggcgggtattatgactatatagacatacccaaaatcagacagttcagccctgatgaggttgaacgccattacgatataattaacgaaacccaagatctggcgtatgacatcagtgtcgcggcccataaattactcgaaattagagcaaaactgccgtga

SEQ ID NO: 401893 - DNA, 729 bp, Salmonella enterica
atggcaaagatatttttcagcttacaactttggggagcaaagacatcaattgcggtcatgaatatgcttgccgaacaggctgaggcaaacattgttcgcgctctcagtgatgccgatcttccgggagcagtctcggagggcgagtatgacgattatcacgaggacgatgagggtaatatttatcggtacacggttccgtactttacctgcggttcatgttctggactcgatgctgatgaagtcaaaactgaatacaagcacttgatttcacaacttactcgtcgttcggcatttctgacgatgttcgggttatttgaacaccgcatggttgaatgccttgatgtcatggatagattgtcgggcgaggtgacagacaaaaggttcaaaactgtcgaagattgccataagcgacttacaggaaccataggaggcaaaggcatcagggacattgatcatctagctgccatcagaaatatcatggctcacaacgatggcgttgccgaaaactatcataaccttttaaaatcaaacgcaaagaagtcagaaacacagaagcgagatatccgcgcaatcaatcgtgcaaagaatgaaaacgccggtataacagtaaatttcttcaacggcgttctcatggacgatcagtttttggagtatgttgtgagtgagtttaatcgatatgttagtgagttggatgcggcagttcgccagtatcaaagcagcatcggttaa

SEQ ID NO: 401894 - DNA, 417 bp, Salmonella enterica; identical to SEQ ID NO: 376758

SEQ ID NO: 401895 - DNA, 528 bp, Salmonella enterica
atggcatatctcatggttaatccaaagagttcctggaaaatacgttttttaggtcacgttttacaaggccgggaagtatggctgaatgaaggtaacctgtcactgggggagaagggatgcgatatttgtattccgctggctataaatgaaaaaattattctgagagaacaggcagatagtttatttgttgatgccgggaaagccagagttagagttaatggccgcagatttaatccaaataagccgctaccatccagtggggttttgcaggttgcgggagtggctatcgcgtttggtaaacaggattgtgaacttgctgattatcaaatacccgtttccagatcagggtactggtggttggctggcgtattcttgattttcatcggtggaatgggtgtcctgttaagtattagtggtcagcccttaattgtaaaattatgcctttggcctcttcacgcgaatgaagcagcaaatcttctaaccgggtcagagttgtcattttccactcacttaaaatctaatggatag

SEQ ID NO: 401896 - DNA, 549 bp, Salmonella enterica
atgagaggtttgatagaggcagggaaaatcaacgatgtcaaacatgtcatatttatggatgacgacggctcatgtgaaattgaatcgatttgtcgaactcatgcttttttactgatggctaaagacaaaaatacagttgttactggctgtatgctttttgaagataacccggcaatcatacatgaatctggtgccatatggcatagagattttttacattacccggataaacattatctggatgctcgggaaatagattctttagatacttttgataatgaaagaaaaataggctacggtggatggtggttttttgcctttaatattaacgctattgaatattactcatttcctttctttgttcgtggtgatgacctgctatttggatatatgcataaaaaacataatattgtcacacttaatggtgtggcttcgtggcaaatggattttgaaagaaaaatatcggttctaaatagctatttgaacttcaggactgttgctgtacctgcattaattagtaaaagaaagctggaattaagtgtccattaa

SEQ ID NO: 401897 - DNA, 336 bp, Salmonella enterica
atgaccggcgtgatgcttggcgcggcaaggtgtggcttacccgtattgctggatggctttctttcctactcggcagcgctggcggcctgtcagattgcgcctgcggtgagaccttatctgatcccgtcgcacttttcggcggaaaagggcgcccgcatcgcgctcgcgcatttgtctatggaaccctatttgcatatggcgatgcggttaggtgaaggaagcggcgcggcgctggcgatgccgatcgtggaagccgcgtgcgccatgttccacaatatgggggaattggcggccagtaatattgtcctgccggaggggaacgcaaacgcaacataa

SEQ ID NO: 401898 - DNA, 909 bp, Salmonella enterica
atggtggaaactctgcttgaagtgcgcaacctgagtaaaacctttcgctaccgaacaggatggtttcgccgccagaccgtcgacgccgtgaaaccattaagctttacgcttcgtgagcgtcagaccctggccattatcggcgaaaacggttccggcaaatccacgttggcaaagatgctggccggcatgattgaacccaccagcggcgagcttcttattgacgatcatcccctgcattacggcgactattcgtttcgaagccaacgtattcgaatgatttttcaggacccttcaacgtcactgaatccacgtcaacgtatttcacagattcttgacttccccctgcgccttaataccgttctggagccggaacagcggcgcaaacagattgtcgagacgatgcgtatggtggggctattgcccgatcacgtgagctactacccgcatatgctggcgccgggacagaaacaacgtctgggtctggcccgcgcgctgattttacgcccaaaagtcattatcgcggacgaagcgctggcttcgcttgatatgtccatgcgctcgcagctcatcaatctgatgcttgaattgcaggaaaaacaaggcatctcctatatctacgtcacgcagcatatcggcatgatgaaacatattagcgatcaggtattagtgatgcatcagggggtagtggttgaacgcggcagcaccgccgatgtgctcgcctctccgctacatgagcttacccgccgtttaatcgcaggccattttggcgaggcgctgaccgctgacgcatggcgaaaggatcggtgccctgggttgcccaaatgcctgccgtttttaacgccggcaaatagcgtgtgttttcctggccacccaccacgatcttgtcacaataacgccggatatgtttga

SEQ ID NO: 401899 - DNA, 1023 bp, Salmonella enterica
atgtcattcagatatataggttcaaaagcaagactagtagatcaactaggtaaattctttggaaaaccatgctccaaagatgcatattttattgatgctttttgtggtactggttctgtcgctgaggctgcagctgaattagggtggaatattagaattaatgacattctatattctgccgtaataacttcagaagcgcgactaatgagttcgcatcaagttccttttaaaaatttaggcggatatgaaaaaacgattgaaaaactaaatgctgttgctttagaaccaggatttatatggagagcatatagccctgcctcattagaattttatggcattgaacgaaaatatttctcggaaaataacgccataaagattgatagtatacggagacaaattaaagaatggaaaaattccgcaatgatcagtaatactgaagaacgatttcttattgcagatctcctaaaagcagcaaataaaatagctaatatagctggtactttcggctgttttctctcaaaatggacaccacaatcacaaggtactttgaaattagagcgccgagaattgaaagattataatataaatatagatatatctattggagatgctttttccgttaaaaacagaatttatgatttggtatatttagacccaccttacactaaaaggcaatatgcaagctattatcatattttagagacaatttcttttggtgatgaacctaaagtagaaggggttgcagggttaagaccatggaaagataaggcatctgcattttgttataagcgtaaagcattgataactctaactaacttagtatcggttattcaagcgaagaaaatacttgtttcctatagcaatgatggccacataaaaatagatgagatgacagaagcttttaataaattaggtatggttaaagttatttccctaggcaaaatcaatagatatgaaccaaacaaaaaacgattaaaaccaataagtaatgtgaatgaatttttagttgaaataaaaaaataa

SEQ ID NO: 401900 - DNA, 651 bp, Salmonella enterica
atgagcctgagtcccgcacggcagcaccgcctgcgcattcaggctgaacaggccgcccgtgagggcggcagtgttcgccatgcgtcgggctatgacctgatgctgctgcagctggcagaagaccgccgccgcctcaagggcgttcagtccacggtgaaaaaggcggaaatcaaggtggaactgctgccgaaatattccgcctgggcggagggcgtgctggctgccggaggtgcgcagcaggatgacgtgctgatgtacgtgatgctgtggcgtatcgacgccggtgattatgccggtgcgctcgaaatcgggcgccatgcgctgcgccatggctgggtgatgcctctgggcaaccgtaacgtgcagaccgtgctggcagaagaaatggcagacgcggcgcaaagcgctctgcttgccgctgccggttttgatgccgatccgcttctgcagacgctggacctgaccaccgatctggatatgccggaccagtcgcgggcgcgcctgcataaagccatcggtgctgtactgagcgaaagcaacccggcgtctgccctgaatcaccttaaccatgcgctgcagcttgatccccgctgcggtgtgaaaaaagaaaagcagcagctggagcgcagactgcgcaatgacagccgctaa

SEQ ID NO: 401901 - DNA, 864 bp, Salmonella enterica
gtgactacccaggaagatagcgtcattgttattcataatagtatgaaactgtatcggcagatcagagagcgcaatccgaatgcaaaactggttatgcacatgcataacgcatttgaaccagaacttcctgatacggatgcaaaaattatcgtgcccagtcagtttcttaaagcgttttatgaagaaagattgcccgccgctgctgttagtattgtgcctaatggtttttgtgctgagacttataaaagaaacccacaagataatcttcgtcagcaattaaatattgcggaagatgccaccgttctcttatatgccgggagaatttcgcctgataaaggcatcctgttgcttttgcaggcgttcaaacaattacgtaccttaagaagtaatattaaacttgtcgttgttggcgacccttatgcaagccgcaagggtgaaaaagcagagtatcaaaagaaagtactggacgccgcaaaagagattggaactgattgcattatggctggagggcaatcacctgaccagatgcataacttctatcatatagccgatctggttatcgtgccatctcaggttgaagaagcattttgcatggtggctgtagaagcgatggcagcaggaaaagcggttcttgccagcaaaaaaggggggattagcgaatttgtgttagatggcataacgggctatcacctcgcagaacctatgtcgagcgacagtataattaatgatattaaccgtgcgcttgctgataaggaacgccaccagattgccgaaaaagcaaaatccctggtgttttcaaaatacagttgggaaaatgtagcgcagcgtttcgaggaacaaatgaaaagctggtttgataagtga

SEQ ID NO: 401902 - DNA, 240 bp, Salmonella enterica
gtggtaactctgggccgtgcgggcattggtgccgaggaagtaaagcgtggccccgttgggaagcaccatcggatcgcctttcagctccacctccacttctttggcgaagtcgatgatgtactgtttaaagacgtgggcctgtgccttactggcggaaaggaaaatctggttacgtccggtaagcagggcgtcaatcagggcttcacgggcaaagtaaaaggtcgcgccgatctggcgtga

SEQ ID NO: 401903 - DNA, 774 bp, Salmonella enterica
atgaaagcggtcatcctggctggtggacttggtaccagattaagtgaagaaacaattgtaaaaccaaaaccgatggtagaaattggtggcaagcctattctttggcacattatgaaaatgtattctgtgcatggtatcaaggattttattatctgctgtggttataaaggatatgtgattaaagaatattttgcgaactacttccttcacatgtcagatgtaacattccatatggctgaaaaccgtatggaagttcaccataaacgtgttgaaccatggaatgtcacattggttgatacgggtgattcttcaatgactggtggtcgtctgaaacgtgttgctgaatacgtaaaagatgacgaggctttcctgtttacttatggtgatggcgttgccgaccttgatatcaaagcgactatcgatttccataaggctcacggtaagaaagcgaccttaacagctacttttccaccaggacgctttggcgcattagatatccaagctggtcaggtccggtcattccaggaaaagccgaaaggcgatggggcaatgatcaatggtggtttctttgtgttgaatccatcggttatcgatctcatcgataacgatgcaacaacctgggaacaagagccattaatgacattggcacaacagggggagttaatggcttttgaacacccaggtttctggcagccgatggataccctacgtgataaagtttacctcgaagggctgtgggaaaaaggtaaagctccgtggaaaacctgggagtaa

SEQ ID NO: 401904 - DNA, 141 bp, Salmonella enterica; identical to SEQ ID NO: 401864

SEQ ID NO: 401905 - DNA, 651 bp, Salmonella enterica; identical to SEQ ID NO: 377161

SEQ ID NO: 401906 - DNA, 456 bp, Salmonella enterica
atgactcagcttattcaccagttcgttaaaggctgtctgctgtgcctgcagggcagtctccagctcagacagacgttcttcctgctcagacagggatttttcggtgcgtgcgctcaggttttgctgctcagtggcgaccaactccacggccttatgcacatcagagaaccgggcatcgtcggactgctcttttttggtgaacagtgccgtgacgcgggcaaacagggacagcttgtcctcctggatttcttccagttcgatcaccgtttcctctgcggcggtaaagagattggcgggattctgcttgcggtttgccagcgggttatgggctgcactggcgctgaatgtcagcatttcagtgcccagactggcagggtcatcagtggcagccaggccgaccaggtaggctttgcccgtatcagcgaacttcgggctgacttccatagaggtgaataa

SEQ ID NO: 401907 - DNA, 186 bp, Salmonella enterica
atgaccatgaccatgaccatgaccatgaccatgaccatgaccatgaccatgaccatgaccatgaccatgaccatgaccatcatggtcacatacatccggaaggcgcaacgtcaaaagcgtatcaggatgcccatgaacgcgcccatgctgccgatattcaacgccgttttgatggtcaaacagtga

SEQ ID NO: 401908 - DNA, 246 bp, Salmonella enterica
atgagcctgctgtcaccctttgacgtggtgatatggatgacggatgactggccgctttatgaatcacgcctgaagggaaagctgcacgttatcagcaagcgttacactcagcgcattgagcggcataacctgaatctgagacagcatctggcaaggctgggcaggaagtcactgtcgttctcaaaatcggtggagctgcatgacaaagtcatcgggcattatctgaacataaaacactatcaataa

SEQ ID NO: 401909 - DNA, 246 bp, Salmonella enterica
atgagcctgctgtcaccctttgacgtggtgatatggatgacggatggctggccgctgtatgaatcccgcctgaagggaaagctgcacgtaatcagcaagcgatatacgcagcgaattgagcggcataacctgaatctgaggcagcacctggcacggcagggacggaagtcgctgtcgttctcaaaatcggtggagctgcatgacaaagtcatcgggcattatctgaccataaaacactatcagtaa

SEQ ID NO: 401910 - DNA, 627 bp, Salmonella enterica
atgcaaatgctttctggccaaacgcactttcccagctccgattcacccaactaccttttgcccaaaagctccttttatgggtccattcatgcaaatgcttttcaaacaaagacacctatcagggactcattcatgcaaatgctttccaaccaaaggcaacttacacttccccattcattcaaatgctttccgaccaaaggcaacttgcattctcctattcgtgcaaatgcttttcgaacaaaggcaccttacactgtcccttgcgagccctgcttcccgaccaaaagcaactttcaccgcagcattcatacaaatgcttttttcaaaaggcacttttctgccgccattgaagcaaatgcttttatacaaaaggcacttttttgctctccattgaaacaaatgcttttcatctccttgatatccaatttgagtaattttcatttattatcagaatgttatgttatttctctaggtccttcattggcctgcatattcataaaatgccgtcgaccaggctcatatcccagtcgtttgcaggcgttaaggaactgtaaatacgccgagtggcacaaggagtatagggatttgcgtttaaagcccaatacaacacgatggagggtagtgtag

SEQ ID NO: 401911 - DNA, 246 bp, Salmonella enterica
atgagcctgctgtcaccctttgacgtggtgatatggatgacggatggctggccgctgtatgaatcccgcctgaagggaaagctgcacgtaatcagcaagcgatatacgcagcgaattgagcggcataacctgaatctgaggcagcacctggcacggctgggacggaagtcgctgtcgttctcaaaatcggtggagctgcatgacaaagtcatcgggcattatctgaacataaaacactatcaataa

SEQ ID NO: 401912 - DNA, 246 bp, Salmonella enterica; identical to SEQ ID NO: 401911

SEQ ID NO: 401913 - DNA, 468 bp, Salmonella enterica
atgagtgttgagggtaaagttctcattgcccgttttgcacttaagcaatttttccattctgattttggtgatttcatcttagagttcgagaaaagtatctccaagtgtttgaatacttctctccagataattaaatctgtaaagaactcatttaaccgtttaggtcaatatcaatatcagcgtcgtgtaaaagatgacctgactttttacatcggtttcaaggagtctgaagggacgacgggagtgtatcgcgatgatgaaaaaatcattcgtctttatactggcgttagttccggaaaggatgttcctgtaatgatgaccgttcgattcactggctgtgacgggagtgttttgtctgaatcatcgcacggtactttctgttccgtgggacctaccggccgagtgcaggtttgtgacagagttgcgttggtccaagaagcggtcgaagagttacgggatgttgtttaa

SEQ ID NO: 401914 - DNA, 447 bp, Salmonella enterica
  misc_feature (329)..(338): n is a, c, g, or t
atgactttcaatacttctaaacttaataaagtttctgcaaaggaaatcagtgaaaactttataaaagcatatcctgacttgcaggaaggtgctgttataacaaaaattgaaattagtgggtgtcagggctctcggcgaactgataaaatcgaactgtcctatggcggtgatgatataacagaccagaagagcgtgtctaaaagcgaagttcgctggatagacataaaggcactgagtttcaaaagcactatcactagtcgaatttcaaccctttgttcacggttgtgcatccgctatagcaatatgtggatactgccagttgaaaggannnnnnnnnntttctcgaagaggcacaagaaatcgaacgtgaatttcaagccggtatccagaacgtggttgataactatgacactcatattcaggctgagaaagatcgcagtccgttga

SEQ ID NO: 401915 - DNA, 516 bp, Salmonella enterica
atgaaggtgctttttaaaggcaatatttctataggtatttgcccatccgattacacagacatacggcagggcttcaacaatacatataacgccctcctcgcttttaatcaggcaaatgtgaatatttttcagagtcagtttctatacggcatggatcacgcagtcaggccagtgaatgtcagcgatgtaaacctcgtagtattgggtcggaatccagttaacagcatcagaaaggcccatgggctaccgctgactaacttaccggtactcataggaaactgcctccacatcaatacaggttctctgtacatgtcagaaatcagtagcccagcactactggcaccaggtattccgcctactacagttccggcaataacactggtcgagttgatcctggcatctacaccgaccctgatttgccaccaaatgatcctgaataaaaacggtatttacacacaaaacactgcaccacttaacctggattcaaatgataataatatagaggccacattataa

SEQ ID NO: 401916 - DNA, 336 bp, Salmonella enterica
  misc_feature (306)..(315): n is a, c, g, or t
atggcatccgagcacgtccagacaattgatctgactaatttttcaggaagggttttctttctggcagaccctcatggtcattattcgacgctatgtaaccttatccattcgatatcagaacctgatgaggagttgatcgttttctccacaggaaatctcttcgattatggacctgagcctatggagttaatgacagcgatcaacacagggatttttgacggccgttctgttcgtgtgttctcagctgccggggccggagaagagatgctgaaaaagctcttacccataaataaagaccgcagaacnnnnnnnnnnttatccaagcacatttcttaa

SEQ ID NO: 401917 - DNA, 1059 bp, Salmonella enterica
atgaaatcactgatactgtcaggtgtgtttcttttctttgctgtctgtgattctgcgagggcaaactatgactggtcaaaatgtgatgccaatggaaatgtaaatattcagaatatcagtctgaagggaggacaatatttacaagggcaggaactacagagggttaccgttccgatcagttatacctgctatacaaaatggagcagttttggttcacttagttactccgcagctatgtatctttccggtatggggcaggtagtaaatgcgctaaaaagtaccggtttgggaatggatatcattgctcaggaagggagtctggcgccagtcacatttacatggaaggagatacaggcagggttttctgggtggggcaagtcaaaaacattcgggcaatggatggcgcctgagaaaacatataatctgagcggaacccttacgttacgtatatttgtcgaatcctcttttaaaaatacttttgtgaacataaacattccggcaactgtgattcatattttaccctataacccaacacaacctgggatttctgttgggccaccaactgttccttacacatctttaaccgtttctgcctttaatatcaggtttattccagacaattctggcagggttattatttctccctctgttgtcaatcttggacatttttatacggaatataaggaaaccatggtgcccagggaagtacctttcaccgttacagcacaacagaatgtcggaacgcagatcccgttcgtcgccccactggctatagagttcaggaccaacggtctggcactggcagatgctgacagcaccgtgattcttaagaataataaacaagaaaacaatggtttcagactgtcggtaatggatgtggataataacacaccagttaaatttaatgtgaaaacagatatgggatctatccatcttgataacggtgccggtggcagaattataaaacagtataaagcaaaggtcgaagctatacccggtgcggtaattaaaacaggtgctttttcagccgcaatgacagtgattgttacttacaattag

SEQ ID NO: 401918 - DNA, 585 bp, Salmonella enterica
atgcgtaataaaataatacttgccatggcggctgccggtatgatgtatggcgcttctgtatttgccgccggtacaacgcccacagcaggcccgttcggctcaggtaaaattaccttcaccggcactatcaccaactcaccctgtgatgtcgcaccgggtgacgatgcgattactgttccgtttggacagatttcttaccgtaaactgaataccgctgacgcaactacggactcaaaaccgttcaccattcacctgcagaactgtgctttcgatgcgggtagctccgatgtacctggctccgcagggctaatgtctaaagtgactgtttctttttctggcacgggagacagcactcatcacgcatacatcagtaccggcagcgctgagcatgttggtgtccagctattaaaaagtgacaactccacaattatcgagcccaacaccccgatgccggatggcgaagctcagcaactgcaaaatggtaataacgaactcaacttctttgcccgcctgattgccctgagcactggcgtcacccccggtgatgtcaacgcctccgtcacctacaagctgaaatacctgtga

SEQ ID NO: 401919 - DNA, 945 bp, Salmonella enterica
atggatgctttacagactgcgttagagaagttgttgagggatgatggcgatacgatttatagctactttcatgaaattaaatcagattatttgattgagggaacttctgcatcctgccactttcattgtatcaatttagatggaaatggacgccccaaaatcaatgcacttattcaatttctagttgggaaagtgatcgactactcaattcctcgtaaaaagataaatgaggcgatgcaatatcagcgtgatacaggatcaacccttaaaattactaaattatttatgcaggctatgggattgtttaccagcctttcaaatagtggtgagggtggggagttaatactgttcttatttgcggagaaattcctaaaactcccacaaataatttgcaaaatgaaccttaaaactaatccagaaatgcattaccacggtgcagacggcgtacatataggcgttgacaatcagagccagaaattgtgtttgtattggggggagtcaaagttatattctgatttaactcaggcgatttataaatgcatgaagagcatatctcctttgattactagttcatttggtagtggtagtgcggaggaaagagatattcaactactcagcgactttatgaatgttgatgatcctaaactagaaattgccttaaaaaaattcttggatcctgatgagcctgaatttaataaattagaatatcgagggatttgtttggtaggttttgatattgatgattatccatctgaacccaataagttgaatattaatggattggctgattcgtttagcagcaagattgatacttggagagatagcataaaaaaaagaatagttgaggaaaatattcatgggatatcattacatgtgtttttaattccgtttccatcagtagatagttttagaaaggcattggttgcctctctggtaggagagtga

SEQ ID NO: 401920 - DNA, 2580 bp, Salmonella enterica
atgagtatgaaagatctacctaattggttagttcgtaataaaggttttatcaagaaattagagaaactaactatcgcatcagtagttggacaattcccttctgttagggcatctcatgaaaatgatatttctgatttggatatcagctatctattgacctgcggaagtattttatcacaatcaaatgatgaactctgccaagattcggccttgaggatttctcaatattgtttaattaactctgttaatgtgcagagaaaagatagtgccgcattgattttagatactttggcaaataatgctacagtagagctagcagtagaaaaaggatttctgagcgaggggtttgagaaaaggctacctatagctggtcagcttgaagccatgaagcgaaaaattgaacatacaatagagattggaaatgataagtttatttatgcaaacaaatttcaatctgaattttgggatagtgctcaacaaaacgaatggataagtgtctctgctccaacatcagttggtaaatccttcattttagaatcatgggtggaggactatattttcaaaagagataaaagtttaattgtttatctggtacctacgagagcattaattagtgaggtgtttgagtctatcgtaacacgacttgacccatatagaaccggagtgattaatatacaaaccttgcctcttagaactgcttatgacaactctaagacaaatgtttttatattcactcaagaaaggcttaatatattttataactctctgaatgaaaagccgatagtagatcttttaataatagatgaagctcataaaattggtgattctctccgaggtatattcttgcagtatgtattggaaatgacatgtgcaaggaatagacatattaaagttattttcgctagcccttttacttccaaccctgaactattgttatcagatgcaccatataaaggaaaaacaagcgttataaaaagtagctatgttactgttaaccaaaatttaatttgggtggaacaacgccaaaatacgcctaaaaaatggcggatgtacttttttttcagaggcgaacggcaatttataggggattttgatttagaaaatacgccgtcttcggacagtaaaagattgtcctttgtcgcacttacgctgggaagacatgcttcaggtaatgtagtttatgtaaacggcgctgctgatgctgaaaaaacggctaaacaaattgcagatggtttgaattatgatactgaggatgaagatgttttaaacttgattgagttaagcgagaaagttattcatgaacgatttgcgcttaatgttactttgaggaaaggggttgcatttcattatgggaatatgccattaataataaagactgaggtcgagaggttatttagtaaagggaaaataaaatatttaatttgtacttccactctagtagaaggtgtaaatttggcctgtaaaaatatttttattcgcgggcctaaaaaaggtagtggaaaacctatgcaagaggatgacttttggaatttggccggtagggctggacgatgggggaaagaatttcaaggaaatgtgatttgtgttgacactaataatgaaagaatatggaatggtactcctccaattagtaagaaaaatattaaaataattcgtgcgacagactcactgcatgacgaggttaattctatttacgaatacattgactcacctcatcattatggaatgacacgagcaaacccaaaattgcaggggttacttagttatttatgtatttcacattatcttcatgatgggctggtttttaatccttacattgaaaagtataatttagaaaacttagacgaattggatgctaaaattactgaagtattggatttattgagtttccctcttgaggtggtaactcgtaatccaggcattagcccaatattaatgcaaagtttgtggaataggttttgtgactgtgataaagataatttagaaaacctactcttagctgacccgtcaagcgatgatgctttatcctcatatgtcgcagcatttacacgtatatctgacacgatgagcatcgagttaggatataattctaaaggtgcatttgttcttgccctactggtcattaaatggatgaggggatatccgctagcaagattgatatctgaaagaatagattattttaaaaagaaaaagaaagaatacaaagaaccttctgtaataagaaacgttatggaggatgtagagcgagttgctaggtatcaagccccgaaattactttcttgctataatgatctattaaggtatttttatatttctgaaggtcgggcagaccttgtcgaatacattgatgatgtaggggtttttttagaacttggagtaagtataaagacgcaaatatctctgattagcttaggtttctcacgaacgtcagccgttatgatatctgagtatattacaagtgataatttagatgagctatcttgtatgcaatggattaatgaaaatagcagtttacttgatgacttacctgcattagtaaaaatggaaatttactcaatcgttaatgggattgaattataa

SEQ ID NO: 401921 - DNA, 591 bp, Salmonella enterica
gtgacctgccgcccggcggacctgctgaagccggaactggctgaactggaagccgacgtcaggcgccaggcgcaggagaagggcatcactctggcgggaaacgccattgacgacgtgctcaccgtggcgctgttcccgcagattggcctcaaattccttgagaaccgccataacccggcggcgtttgagccggtgccgcaggcggaagccgcgcagccggtggcaaaagcagagaagcctgccgcctccggtatctacaccgtggaagtggaaggcaaagcctttgtggtgaaggtcagcgacggcggcgatatcagccagctcactgctgccaccccgtcttccgcaccggttcaggctgccgccccggcaggcgccggcaccccggtcaccgcgccgctggcgggcaatatctggaaagtcatcgccacagaaggccagacggtggccgaaggcgatgtgctgctgattctggaagccatgaagatggaaactgaaatccgcgccgcgcaggccgggacggtacgcggtatcgcggtgaagtccggcgatgcggtctccgtcggcgacaccctgatgacgctggcgtaa

SEQ ID NO: 401922 - DNA, 240 bp, Salmonella enterica
atgaaataccgcatcgctttggctatcacgctttttacacttagcgccggtagctacgctaattcgctttgtcaggaaaaagagcaggatatacaaaaggaaattagctacgctgaaaagcacaacaatcagcgccgtattgagggtctgaacaaggcgctcagcgaagtacgcgccaattgtactgacagcaagctgccgagcatcagaaaaagatcgctgagcaaaaagaagaggtag

SEQ ID NO: 401923 - DNA, 396 bp, Salmonella enterica
atgctttttagtttccgaacgctattgtttatcaccagcctgtttgtcagcgccggaacatggtcgtcatgtatcaaagtcaccgataagagcgcgctctctgacgcggcgataaaagcgggctacacggcgcaaaactggatcggcgcaactgacacaaataccggtaatatcggtttgccaacggtgattagcgtcagtaatagtgaaacatttcaaccctccggcacgctattggccagtgggatcggtaacttcctgacggccgccaccggcacgccctattccagtaaacaggtactttaccgctgcgatactgccgatgccgggaagctctatgagatgtattcgacaaatggcgatagcgcttttgcgggggcattttttactccctaa

SEQ ID NO: 401924 - DNA, 507 bp, Salmonella enterica
gtgcatgtacggattgtacccaaagaaaatggccaggagatcgcgtataaagttaataataaataccttttaacgtatggcggtattcccgtctttggtctttacccggattatgtcaataccgttgaagttgaatatacaagtatccagggtagtaaaaccgaaaatgtaaaagaaagctataaaatgtatgcaccgcctgcctatattgaatcagcgggtacaaaagaagaacaatcagcactctttactatcgatgttaaaaaggtttccccagaatttaaagatcgcttgtatcttttgaataatacgaaagataagtctgggaatggaacgcgtactgtctggaacaaccctactgggggtgcattagaatggaacttcactacagctaacgctattatcgacacctccggtgatattcgttggtttatgaatccaagttcaatttatgatttaaagtcaatttatcgtgctggcgttatgatgggctttaaacaaaactag

SEQ ID NO: 401925 - DNA, 612 bp, Salmonella enterica
atggctaaattaccgcgccgtaagtgcgcaaacaaagaatgccgccagtggtttcacccgatacgcgaggggcagatcgtttgctcgtaccagtgcgccagcgccgtcggcaaagaacagaccagaaaagctcgcgaagccgcgcaacgtaaggcgcaatcccttcagcgcgccgctgagaaaaaagaacgcgccgcctggcgccagcggaaagccgcggttaagccgctgaaacactggattgacttgacgcagcgcgccgtaaatgacatttgccgcgaaaccgaactggcagaaggactcggttgcatctcctgtggaacgaagacggcgttcgcatggcatgcaggccattacaggagtacggccgccgccgggcatctgcgctttactcgcttcaacatccatcttcagtgtgatgtctgcaacgtctacaaatcagggaacatcgaagcatatcgtgccgcgctggttgagcgttacggggaggcggcggtgctggcactcgagaacaataacaccccgcaccgctggacggtcgaggagctgaaggaaatcaggctcgcggctctggcggatctgcgtgcgctaaaaaagctggaggccgcatga

SEQ ID NO: 401926 - DNA, 207 bp, Salmonella enterica; identical to SEQ ID NO: 376599

SEQ ID NO: 401927 - DNA, 603 bp, Salmonella enterica
atggcgcacgaattacaactcatcaagcagtcatctggaattctgatccccgctacgccggagaccagcgaaattctgcagtcaaaaattaaactcggcgccgtgctggtggctgagttccgtcaggtgaggaatcctgcattccatcgccgctttttcgcgttgcttaatcttgggtttgaatactgggaacctaccggcggcgccatttctgccaatgagcgcaaactggtaaacggttatgcaaagtttctcgctgcatatggcgggaatgaaagcgcattactggatgcggctgaacagtatctggaacagattgcaaaccgccgggtaacaaacgggattagcctgtgtaaatcattcgatgcctaccgcgcatgggtgacggttgaggctggtcactatgacgccatccagttaccggacggcacccttcgcaaacatccccgcagcatcgctttttccagcatggatgaggtcgaatttcagcagttgtataaatccgcgcttgatgttctctggcgctggattttatcacgtacattccgtactcagcgcgaggccgagaacgccgccgcccagctcatgagctgggcggggtga

SEQ ID NO: 401928 - DNA, 234 bp, Salmonella enterica; identical to SEQ ID NO: 376453

SEQ ID NO: 401929 - DNA, 270 bp, Salmonella enterica; identical to SEQ ID NO: 376350

SEQ ID NO: 401930 - DNA, 312 bp, Salmonella enterica
atgagcaacatcgacaaacgggcgcttcgtgaagtggctgagagggctacgccggggaattggcgccgcacctcatcactgttcaatggcatcacggtaacgccattttctctttgcggtgaagaagtgacgttggcccatactgttgagaaacgtgacgcggaatttattgccgccgctaaccccgccaccgtgctggcgctgcttgacgtgctctatgagtttggagaggatgaggtggccatctctgaatacgtcacaaatcttgaagatgctttgcgagttgcggcagcacctcagcaggaggaatga

SEQ ID NO: 401931 - DNA, 348 bp, Salmonella enterica; identical to SEQ ID NO: 376349

SEQ ID NO: 401932 - DNA, 750 bp, Salmonella enterica
atgaaaaacgtaatcggtactggcagtgcgcttgatcgcctgaaaagaattatcccagccagtgtgcagccgaaattctcgactgctgatgagtggcgggcatggcaggaagccgaagggcgtaaacgcagtgaagagcttgacaggatgaatcagaaatcccgcaccgagaagattttcgggcgatctggcattcaggatctccatcgtagctgtacgtttgctaactacgaagtaagcggggaggggcagcgaaaagcgtacacgatggcaaaaagttatgcccagaacttcggtagtggatttgcgagctttgtgttcagcggtggtccgggaaccgggaaaaaccatcttgcggcggcaatcggaaatcatctgctggccggcggtcatagcgttctggtggtaactattcctgacctgatgctcagggttcgtgagtgctacgacggtgggcaatcagaagcgtccctgcttgatgacctttgtaaagttgacctgctggtactggatgaagtcggtattcagcgcggaagcagtggtgagaaggtcattctcaatcaggttatcgatcgccgtctctcatcgatgcgacctgttggcgttctgacgaatcttaaccacgaggggctgttggattcactgggcgcgagggttatcgatcgcctccagatggacggagggatgtgggtgaattttgactgggaaagctaccggaaaaacgttagccacctccggattgtgaaataa

SEQ ID NO: 401933 - DNA, 978 bp, Salmonella enterica
atgtcaaataccgctgaaatatacaaattccctgcgccgataccgacgcaacaggagtgccgtatggctgatctggaaaatggctatttacgtttagctaatcagatccaggacgccttgtgtatcgttgaactatcggggcgtgagttccgtgttttgaatgcgattatccggctgacttatggctggtcgaaaaaatcagatcgtattgccaacagcctcattgcagataagacaacactgaaggtaaagcatgtatccgaagcggtgctgagtcttgcctatcgtaacatcattatcctgcgccgtattggtcaaacaagatacatagggattaatacaaacctggataaatgggcttattccaagccacattgctcaaaatgtccggtgtcttttcctgatgatgaaattgccacatggattatttctgtacctgaaaccagggatagttatccccgaaaagggggaagggcatccccgaaaacggggatagttatccctgaaaacagggatagcgttttaccccattcagccatccctgaaaacggggatagttatccccgaaaagagggaagggcatccccgaaaacagggaacaccaaagacattattccaaagacaaatataaaagatctaaccccctttaatccccctaagggaaaagtgaagtttgatccgttgagtattcctgttcccgaatggctgaatgctgcgtcgtggaacgaatgggtcacataccgccagcaatccggaaagcccataaaaaccgaactgacggtaacaaaagctttcaggcttctgaaggagtgcctggatgaaggccacgatccggtaaacgtcatcaacacaagcattgccaacggctaccagggactattcaaaccgaagttcgctctcaacgaccgaagagctggcagagatgtgaaccacatttctgcgccagacaaaaccattcctaccggattcagggggtaa

SEQ ID NO: 401934 - DNA, 321 bp, Salmonella enterica
atggagaacgcaattgcacgaaagttagacccaccagaaatcaacccgattgagatagagagcgtcctgctcaaccggcttgcatcagtagggcagaaatcatacgccgagcatatgggcatcagcgagtcgacagtcagcaggcgtaaagctgagggatatttctgcaacatggcgaaagagctggcttttcttgggattcaggccgcgccaccggaagcggtactggtatccagaaactatctcacagcagtagagattctcgctgatgccgggctaaaggctgaacgagccaggccggatgcgctggggtgggactga

SEQ ID NO: 401935 - DNA, 240 bp, Salmonella enterica; identical to SEQ ID NO: 376348

SEQ ID NO: 401936 - DNA, 411 bp, Salmonella enterica; identical to SEQ ID NO: 376347

SEQ ID NO: 401937 - DNA, 159 bp, Salmonella enterica; identical to SEQ ID NO: 373931

SEQ ID NO: 401938 - DNA, 234 bp, Salmonella enterica; identical to SEQ ID NO: 27754

SEQ ID NO: 401939 - DNA, 1866 bp, Salmonella enterica
atgcagaccgaattaataaaagaacttaacaaggttttaaaagcgttcccgcaattctggaatggagaggaattacaacgttcaatggtgagtgacgctatcagtcaaaagcagccagatcttatcaaggcattagtcgataatgaaaaagtccgctctgtttatggtgtggatattgatggcacttttatctttgattttgacaaattatgtggtcttctaaaatacaaagaatattgggctaatagctttactaaataccggaacaaagtgggattaactagcgaaggtaaataccttgattacagttctgatgtggtgctggattttcctttcaaggattgtattcttgaaggtggaatgaccaaagaaaatcagggaaaagatgagatttattataatgaaatcatagcaatggatgaagttgactctttgctttctcccaaggtgttcactaatgctaagcgatataccaaagagggggtaaaagaaaatatcactaaatttaacgatgatgaaaatttaataattaagggaaacaatctcattgcactacattcaataaaaaaactttacgcaggaaaagtaaagttaatttatatagacccgccttacaatacagggagtgatagctttaagtataatgatcgattcaatcgctcaacatggttgacattcatgaaaaataggcttgaggtggctaaagaaatgctttccgatgatggctttatttttattcaatgcgatgataatgaatcagcatatcttaaagttttatgtgattcaatttttggagaagagaattatagaaactcaatctattggcatagaacctacgcagggaaaactgtaaaaagtaagttgccatggaatacagatacaatattgttttattctaaaaaagaaagttcattattagagccatatacagcagaacttagtgctgctgacattaaatcctataacaaggatgattttgatggaaggggtaaatacaacactgttagcttgcaaaaaacaagctctccagggccgcaaacaacttatgattatatagataatacaggtaagaaatggagttgccctgaaaaagggtggagaatgacaaaggaaaagttaaaggctttggaaaacgacaataggctatatatcactgacaaaacaatacgagaaaaatattatcttaaagaaagaaaagagatcggaaaacaaatagataatttttggcatgacattgggaatttaaatagggtttccgatgttgcttttattgatggacaaaaaactgaaaaattaatgcaacggataattagccttgcttccaaagaaaatgatatcgtcttggactttcatctcggcagcggaactagcgcagcagccgcccataaaatgggacgtcgctatatcggtattgagcagatggattacatcaatgagatcaccgtgccacgtttgcaaaaagtcattgagggtgagcagggaggtatctcaaaagacgtcaactggcaggggagcggcagctttgtctacgttgaactagtggaactgaacgcttacttcatacatgaaatccagaaagcgcagtccacggaagaactcgaaaaactctttgccgtgatgaagacagaggcatatctcaactatcaggtggctctggaaaatgtgctgtccgctgagtacgaagtggatgggatcctccataaggtagcattcagtgaactggaactgcatgagcagaagcagcttttgattgaaatcctagataagaaccagctctacgtgaatgtctctgatatggaggacagcgacctgaacatttcagagagtgataaagcctttacccgcagcttctacggaatggagtga

SEQ ID NO: 401940 - DNA, 189 bp, Salmonella enterica
atgcagaagcgcgtcatcacgtttacgttgcgtgtaatgcaggtaacgcagtgcgctgtgctgatagggacgcaggatatctttcaggtttgcctgaatatagtccggcgtctgatagttatcgtggaacagtcctggttcatcgaactgcttcagcttgttaaacagcagcttctctctacctgctga

SEQ ID NO: 401941 - DNA, 534 bp, Salmonella enterica
atggccagcacagaagaaaaattactcacgctcctgttatcggtggagcatctgcaacataccgcaatggagcaacagaaagctgttgctgattctctggctgtggcaagggaaacacttcgcggatatcgggatatttctgacggtgtggcaaaacaggtcagggatgaagtcagaaacgaggtgcagaagctggatgttgcagggctgataggtgagcgcatcagccaggattttcagcggctggaagagtcagtcgcaaacatgaaggcaaacgcggatgccctgaacagggatattgcgacaattcacagcaatatcgtgcaggaatacaacacccttaaagggtatagctggaaatggctgggtggggtgtcagtggcttttctggttatgttctgtgtgcttggatggggaatgaaaacaatgctcgacaggaactacaacgccacagcggcggtgtatcagaaagttgtgacactggaagataaactggcggagaaacctgtcacgggcaagagccggaaaaactga

SEQ ID NO: 401942 - DNA, 927 bp, Salmonella enterica
gtggcaacctatcacctcagcgttaaatttggtggcaaggggcaggctgcaaaccacgccgattacatcgagcgcaaagagaaataccgcgaccgtcaggatttggaatattccgcacacggaaacatgccggaatgggcgcgagataatccctcacatttctggcaggctgctgaccagtttgaacgtgcgaacggttcgacctatcgggaacttgaaattgcattaccccgtgaactgacagcggaacagcgccttgaactggtgcaggattttgtacgtcaggaagctggcgaacggcacgcctggagttttgccattcacaatccgaaagcgagcattgacggcggcgaacagcctcatgcgcatatcatgatgagccagcgtgtgaatgatggcattgaacgtacaccggaacagtatttccggcgctataacgccaggtatcccgagcggggaggtgcgaaaaaggattccggaagcctgactctcactcagcaaaaagagcagttgcgggaattgcgaaaacgctgggaggtgaagcacaacgaacatatgagaaagcatggctttgaaaggggcttcattgactgccggacgctgaaagaacagggcattgaacgacgtcccgaagtgcatctgggttttgaagctgccggacggcttgatgatgcccagcgtcatgacatcatgcaaaaacggtctgaaccggactattcccgccatcttgaacaggcgcgaacggtcgggtatgacatcagggaatggctggacactccggttaagcaacatgaactggtcagaaggctgcaacatgatgttgcgcgggagcatggctttgacatgagagacagagtgagcagacagaaccgaactgaacctgaacgggttaaatcaccgtcacgtggattttctatgggattctga

SEQ ID NO: 401943 - DNA, 399 bp, Salmonella enterica
atgcgcatcagcaacatcgaatggctgaagaaacggatcggattcatcaggaagctcggagaacagaccgcacgacagagacagattattgacctgctcgacaacgaagcaggactcacagaacaggaacgcaaactcctccacgtactggcaacagcggaaaaaaacgacttacaggcacaggagagcgaacgaaaacaggcggtccaaaaacgaatcgagggaaaaaaacaacgacgagaacgcaatcaccgactctttctcgcggctgggctactgatcgaagcaggactggtagacacaaaaacaggcgagctatgctataaaaaagacaggatattacaggcacttaaggaaattaagtacgatctggagacatccccaaacccagacgcgtaa

SEQ ID NO: 401944 - DNA, 282 bp, Salmonella enterica
atgagcggaatcaaaaagatcgccagagagcgaaacatgacggcgagggaggccgcgcaaaaattcggaaaatcaccgcgcacaatccagcgccttgtagcgctcgatcgtgacgaatacctagaacgcgccgcggaacggcgtcagaaggtctacgacatgcgcgttactggtgcaaaatggcaggagatagccgaggcaatgggcgtcagctacggcgctgtgcgtagcctgtattaccagcactgccgccatctaaaagcagcgatgccgagacaataa

SEQ ID NO: 401945 - DNA, 864 bp, Salmonella enterica
ttggaattataccaacaagacctgtttgcaaccatgccatttcccagtcgtccgctgtgttcggacgatctgagccacggcatatggcgcgaaacgctagaggacgcgctacggcgtccctacatccaagcgaacccacaacgccgcgtgtgggttctcctgttcgacgttgaccatcccctggcggcgatggcgtgggacgcagccggactgccgccgccaacatggacggcacaaaacccggaaaacggacacgcccacattgcttacgcactgagcgctccggtggcgaagtcggacgcggcgcggctcaaacccctgcgcctactggcacgcatacagcacgccatgacagacgctctgagtgccgacaggggctatgtcggactgattaccaagacgccaaaccatgcccgttggcgcaccaccgtatggcgtcctgagccatacggcttggatgaactacgcgactacctaccggacaatctggagttgcccaggcatatcaaaaaaaccgaagcggtcggcgtcggtcgcaatgtgtcgctgtttgaatcactgaggcattgggcgtacagccaccgccgcaactacgacaaccatacggcgtggttttgcgcctgtttgagtcatgccgaagcgctaaacacctttgctacgcctttggagttcaacgagctgaaagccaccgccaagagcgtagccaaatggacatgggagcgattcgacgttgccgccagtaatgccagattttcagaaaaacaggcgcgccgtgggcgcttaggtggtatgaaaggagcacccaaaacaaacaccttacggcaaatgcaattgattgatatacaagcgggtttgatgcaatga

SEQ ID NO: 401946 - DNA, 318 bp, Salmonella enterica
atgaccgatgcaaagcgcaccaaatccatcaaaatccgcgtgaccgatgaggaactttccgagcttagggagcggtgtcccgctggtgagcttgcgccgtggttgcgtgaacttgggcttggtcagaagcgtccgcggcgagccgaacgtgtggaccccgcgctgctgcggcagttggcgggggttggtaatttactgaatcagatcgcccgtcgtatcaattcaggtcagtggagttatggcgatcgcgtagagattctcgcggcgctgtggcacatcgagaagcgattacaggacatcaatatcaatgctggttaa

SEQ ID NO: 401947 - DNA, 420 bp, Salmonella enterica
atgagcgagattttgaatttagccaggagcttcgaggaaaaattgaagcagcaggcatcggataccgacgagaaaatcaaagccgcgctgaagcagcacgaaagcgccttgctggaatgcttgaaaacagagcagaagaaaatcgaaagcgctatccaagaacacagccggcgattgagggccagcctgttaaagagttggcttggagcgcttatcgcgatgctggcggtcctgatgctaggaggcgggattctgtactggatgacgaccgaaatccgcaaccgctatgcggagctggacaagttgccgaacgccaaagttaccacttgtgggaagctgggacggttatgcgtggagatagatcccatagcaccgacttatggcccgaatggcgaatatcgggtagtgaaagggggctga

SEQ ID NO: 401948 - DNA, 210 bp, Salmonella enterica
atgagccagagccagatagagcaacagcttgcccaagccctgcgggaagtggaaacggagagggaagctttgcgcagattattgcagactttgaagagcgagtacgaacagacacgacgcgacaacaggaaacttcgcgaacaagtcgagcaattgagcgaggaatttcaggaattagcgcaagtattgagcacctggaggcggtggtga

SEQ ID NO: 401949 - DNA, 342 bp, Salmonella enterica
gtgacgcgtaaaggggctgtttcggcgcggcgcggtgagttcggtatcattcccggttcgatgggggcgaaaagctttatcgtgcgcgggctgggtaacgaagagtcgttctgttcgtgcagccacggcgccggacgtgtgatgagccgaacgaaagcgaagaaactgtttagcgttgacgatcaaattcgtgccaccgcgcatgtcgaatgccgtaaagatgcggacgtgatcgacgagatcccaatggcgtataaagatattgatgcggtgatggcggcgcagtccgacctggttgaaatcatgtacgccctgcggcaggtggtgtgcgttaaaggatag

SEQ ID NO: 401950 - DNA, 570 bp, Salmonella enterica
atggcttttaaaatgagcgaacaggcgcagacaattaaaatttataatctgcgttcagatacaaacgaatttattggtgcaggtgatgcatacattccgccgcataccggattaccggctaattgtactgatatcgtcccatctgaaattccggccagtcatattgctgtatttgactttgaaacccagacatggagcctgaaagaagaccatcgcggtgagacggtttacgacataacaaccggtaatcagatttatatctccgaacctggcccgttacccgaaaatgtcacatcagtttcaccagatggtgaataccagaaatgggatggtaaggcgtgggtaaaagacgaagcggctgaaatagcagcgcagcttcgtgaagcggaagggacaaaaaaccgccttttgcaaatggcatcagggaaaattgcgccgcttcaggatgcagttgatcttaatatcgcaacggatgatgagaaagcgcagctcgacgagtggaaaaagtatagggtacaggtaaaccgggttgatacatcttcccctgactggccggatataccacgttaa

SEQ ID NO: 401951 - DNA, 615 bp, Salmonella enterica
atgtcccgtaaagaccttgccaatgcgattcgtgcgctgagcatggatgccgttcaaaaagccaattccgggcaccccggcgcgccgatggggatggcggatatcgctgaagtgctatggaacgattttcttaaacataaccccaccgatccgacctggtatgaccgtgatcgttttatcctttccaacggtcacgcctccatgctgctctatagtctgctgcatttaaccgggtatgacctgccgctggaggagttaaaaaacttccgtcaactgcactctaaaacgccaggtcacccggagattggctatacgcccggcgttgaaaccaccaccggaccgctgggccaggggctggcgaatgccgtcgggctggcgattgccgagcgtacgttaggcgcacagttcaaccggccggaccatgagattgtcgaccactacacctatgtctttatgggcgacggctgtctgatggaggggatctcgcatgaggtgtgttcgctggctggtacgctgggactgggcaaactgatcggcttttacgatcacaacggcatctccattgatggcgaaaccgaaggctggtttaccgacgataccgccaaaacgttttga

SEQ ID NO: 401952 - DNA, 672 bp, Salmonella enterica
atgtgtggacgctttgcacaagcacagacccgtgaagaatatctggcatatctggccgacgaagccgatcgtaatattgcttatgaccttcagcctataggccggtataacgtggcgcccgggactaaagtcctgctattgagcgaacgcgacgagcaattacatctcgatccggtgttttggggttacgctcctggatggtgggataaagctccacttattaacgcccgcgtagagacagcggcctccagcagaatgtttaagccactatggcagcatggccgggctatctgttttgccgatggatggttcgagtggaagaaggaaggcgacaagaaacagccgtatttcattcacagaaaggacaggaagccaatattcatggctgccattggcagtacgccatttgagcgtggtgatgatgcagaaggttttctcattgtgacatcagcagcggataaaggtctggttgacattcacgaccgccggccacttgttttgtcaccagaagccgcccgggagtggatgcgccagggcataagtgggaaggaggtaaaggagataattactgccggtgccgtgccgacagataaatttacctggcacgccgtgacgcgggccattggcaatgtgaagaatcaaggggccgagctgatcaaacccattacctga

SEQ ID NO: 401953 - DNA, 417 bp, Salmonella enterica; identical to SEQ ID NO: 177149

SEQ ID NO: 401954 - DNA, 597 bp, Salmonella enterica
atgctgattatcgtcagtgactgtcagtttacccgcctggcgctgacgcgcctgctcgcacatctggaccccgtgaacatgagtgttgcccggtggttacagaccgcgccgccggcaggcagccatgtgctgctggcggcctctcccggcatgctggcatcgctggtcccggcctgccatcacgccaggacatcactgtccctgaaactggcgctgctgggctcaggaggacaggctgtcttcctgaacaccctcggtctcaggccggactgcctgctgccgcgcaccgcctccgcgactcagctgaaggccgcggtcagcagctggctgcgccgtgcgcacggcgcccggctcggcatcagccccaaaaccttttacggccatcgccgcagcgcgctgaaccgcctggagctgctggccaatccggtgatcggcctgcctgaccctgcggcgcactacagcatgatgctccacccggggtcgccgccctttttcagcagccggacgaccggcgccggtagccacaacgtttctgcacatcaccccgtgcaccttccggtaacacaccgttctcattatacggacatgacactatga

SEQ ID NO: 401955 - DNA, 633 bp, Salmonella enterica
atggtcaccggcgtgtcggccaccaccttcaggcatttatccgaatcattgcagtggtatatcttcgccgttccgccttccattaatgcccggataatagcccggtcggtggttctggcaggcaggggcatgatttcgccgttgggtccaaaaaccagtgaaccggtcagcgtcatcacgaactctttcagctccttgttgccgtcaaacatcctgtttttggacaaagcattccacatgatgttgatatttttggtcacccgctccttatccttgtcactggctttatccctgacgctgtcggattgcccgcccacagtacatccctgccgggacgccgcccagtcggcaaaaatattgctctcaccggcaatgtcctggcagaccttctgctgggagacctgtgtttttgggaaaagccccccgacaatcccctgcgccgcctggcaggagctgaggttcatactgttaatgtcggaggccattttctgcagaaaatcctttgccgttttgatttccggcaccgtcgtctgcagcgcaaggtcaaaaaagtaccctgcggcgttactcataatctgcttcacaaaacgctgcagctgctcgccgttaatgaaactgaatgagccgagatag

SEQ ID NO: 401956 - DNA, 351 bp, Salmonella enterica
atgcccccgcaaccggcattgatatccggcagggtcatggagaccagctggacattttttacctgtgtccgggcatataaagagccgccggaggcatatcctgccgcctgtccctgccagacggagggctgtgtggtattggaagcaaagcccagcttattgaagaactggttcatgtcgctgttcacatcggcagagacggcgggtgcgacggtcatcagcgccgtacataatatgaaaagcggtttaattctcgttttaccctgcatgtttttctccgtacatctgcagaacggtatccatccgggccataaaaccggcggcgtcggtggccccctgcaaaagaggtaa

SEQ ID NO: 401957 - DNA, 270 bp, Salmonella enterica; identical to SEQ ID NO: 15286

SEQ ID NO: 401958 - DNA, 258 bp, Salmonella enterica; identical to SEQ ID NO: 15284

SEQ ID NO: 401959 - DNA, 744 bp, Salmonella enterica; identical to SEQ ID NO: 15283

SEQ ID NO: 401960 - DNA, 582 bp, Salmonella enterica; identical to SEQ ID NO: 21694

SEQ ID NO: 401961 - DNA, 285 bp, Salmonella enterica; identical to SEQ ID NO: 10278

SEQ ID NO: 401962 - DNA, 243 bp, Salmonella enterica
atggatcaggaaatgacgttttcactcagctatgaacaactgacccggtttgcggaacgacgcatccgggaatgcaatctggacagccagggcgcgatttatctctgcgagtcagccaaagccggagccgtgctgatcttctggcatgaactggccataaatggctatgcctcaatgaggggtcgtctcagaaaacggaaaataaagcacgctaagccggttgcagaggccgtagcggcctga

SEQ ID NO: 401963 - DNA, 333 bp, Salmonella enterica; identical to SEQ ID NO: 38928

SEQ ID NO: 401964 - DNA, 576 bp, Salmonella enterica; identical to SEQ ID NO: 38929

SEQ ID NO: 401965 - DNA, 792 bp, Salmonella enterica; identical to SEQ ID NO: 38930

SEQ ID NO: 401966 - DNA, 249 bp, Salmonella enterica; identical to SEQ ID NO: 38931

SEQ ID NO: 401967 - DNA, 246 bp, Salmonella enterica; identical to SEQ ID NO: 38932

SEQ ID NO: 401968 - DNA, 864 bp, Salmonella enterica; identical to SEQ ID NO: 38933

SEQ ID NO: 401969 - DNA, 423 bp, Salmonella enterica; identical to SEQ ID NO: 10831

SEQ ID NO: 401970 - DNA, 192 bp, Salmonella enterica
atgaatatcagcacagaaacccgcgaaattctgcgcaattacaaagccgtgattaatgcgcggcgtcgtgaaatggggcagaaaccgctcaccactgcgcagattgttgatgaaatctgcgattttgtggcgaatcagcaggctgtattcctcggtggtcactatatccttcagggcagcagaaacaggtga

SEQ ID NO: 401971 - DNA, 273 bp, Salmonella enterica
atggattatcccatcctcatgacagcaaggtatttccagaccttccagaacaccaagataatccttcgcaattacgcctccaacatgatggtcttgctaccgatgataaagccaggctggaaccaatgtgtcttgctgaataccttatctctggaccaggaggaatggatcctgatatcgaaattgatgatgatacctatgatgaatgccgtgaggtgctatcacgcatacttgaagatgcatacactcaaagcgggacattccgcagactga

SEQ ID NO: 401972 - DNA, 303 bp, Salmonella enterica; identical to SEQ ID NO: 376631

SEQ ID NO: 401973 - DNA, 387 bp, Salmonella enterica
gtgaaacagcaactggatacactgagcgccaccgtgagcacgcagttcagcaccacagaggccgaactgtcccggcagcagaaaaaactgctctggcaggtgatcaaagggcggatactgtttccggcgctgaccgcgctcagcgtcacgggcggcattttcctggggtgctgggggctgatggagtggcaagaaagcaagattgcgaaaaatatcctgactatcagagagcaggaaaacacgctggcgaaactcgaggcaaaaacctggggggtgacgttcgtcaatggcgagaacgggaaatttctggtgctgccggacggggtgaaaggggaaaacacctggacggtgggcgacaagaacgccgtgaggctggtcagggagtaa

SEQ ID NO: 401974 - DNA, 1044 bp, Salmonella enterica
atgtctgataaagaaagcaaagaaccaacgggaaagtccaaaggtggtgtggcaagggctaatgctctttctgcagaagaaaggtcggctattgcaagaaaagccgcagcggctaggtggggtggcgatggtgaggtggaaattgccaaaagatctggcgacattgtcattggagacttaaagatacaatgtgccgtgcttgaggatgggacgagggttctgtcagagagagctatcactaaagccttcggcgggaagcgtggaggctcccactggaagaggatgaaagagaatccagatggcgcctatcttcctgttttcttgtcagctaaaaacattaagccattcattaataatgaattatcagaaggcctatcccggcgccgtcttttcaaaataaataaaggagcggcgccagcttacggcattgaagcatctttgctcccaaagatatgcaatgtttatttgaagatgagagatcagggtgatgcccttcagtcatctcagatacctatttctgttcaggcagacattatcatgcgcggtcttgcagaggttggtattgtagcgctggtagacgaagctactggacatatcgatgaaaagagacaagatgaatatcgaattctctttcaagagttcatcaaagagcaggtcagagaatatgagaaggaatttccgaagcagttcacggatggcctttatcgactttacggacttacgcagaaaaaagcaggtcggcaccctcagtttttcggtaagtttacgaggaagtatatctacgagccattagcatcaagtaaaggcgccatccttgagatgctagatgaaaaaaaccctgtcgtttatgcgaatggcggtagaagatataagatgtttcagttcctaaccgatagcatcggagttccgatgtttagggcgcacctttggcaggtagttggcatcctttcaagctcaagaaataaagctgagtttgacagagcattcaaaagagcctttccatcgcccgggactcaatttgagttgctagatgaagatgagtaa

SEQ ID NO: 401975 - DNA, 501 bp, Salmonella enterica
atgtctgttgttgcacctgctgtatacgttggaacctggcacaaatacaactgtggaagcatcgccggacgctggtttgacctgaccacgtttgatgatgagcgcgactttttcgccgcctgccgtgctcttcaccaggatgaagccgatcctgaactgatgtttcaggattatgagggattcccggggaatatggcctctgaatgccatatcaactgggcctgggttgaaggcttccgcctggcacgggatgaaggctgcgaagaggcttatcgtctctgggtggaggataccggtgagacggattttgacaccttccgcgatgcctggtggggcgaggctgacagtgaggaggcttttgcggttgagttcgccagtgataccggcctgctggctgacgtgccggagacggtggcgctctattttgactatgaggcgtatgcgcgggatttattcctggactccttcacctttattgacggtcatgtgttccgtcggtga

SEQ ID NO: 401976 - DNA, 270 bp, Salmonella enterica; identical to SEQ ID NO: 376350

SEQ ID NO: 401977 - DNA, 339 bp, Salmonella enterica
atgtggaacatcaagcaggaaggcctgcgtgcgaagttgcaccgggaaatcatcgatcgggactatcacctgagcgcggccatgtactgcgaaactgcggcgctggaccagtttttctggattttcgtcaacaaagacgagaactaccactgggtcgccatcattgaggcgtctaccgagttgctggaacttggcatgctggaataccgcaaaacaatgcgagagatagcaaacggcttcgacactggtgaatggtcagcgcctatcacagaagactacaccgacgaactgaacgattttgatgtgcgccgccttgaagcgttgcgcgtacaggcataa

SEQ ID NO: 401978 - DNA, 339 bp, Salmonella enterica
atgtggaacatcaaacaggaaggcctgcgtgcgaagttgcacagggaaatcatcgacagggactatcacctgagcgcggctatgtactgcgaaaccgccgcactggatcagttcttctggatattcgtcaacaaagacgagaactaccactgggtcgccatcattgaggcgtccaccgaactgctggaacttggcatgctcgagtaccgcaaagcgatgcgtgcaatagcgaacggtttcgatactggcgaatggcctgcaccgattaccgaagactacaccgaagaactcaatgattttgatgtgcgtcgccttgaagcgctgcgcgtacaggcataa

SEQ ID NO: 401979 - DNA, 993 bp, Salmonella enterica
atgaaaaagatattttgcggtgttgttttatacattttttgcaactttagttatgcggccttgattgaggtaaacctcgggggaacattagtatttaacaatcgtctctatggttcactgtttccttgttccaccgtttgcagcctggcacctatagagtcaaattataccaatactggtaccggagactactatactattacgtcaacccttagtatccctgcaggattagaaattgccaaaataggggattatagtgtttcagttagccaaaacattaatgtcacaagcgtaagtacttgtgatagcaagcccagaataccgaccgtattccctaccccgtgtcaaagtaacaatccaatcgatgtagctattcccttaactattgataaaggcgcagtaatcacacataacactattagaataagagatacaagacaaagttggttgaatgcgagtagcagtgtaggttccatacaattaactggtgatatcactgcaagtaatattacttatgcaagcgcaaactcaatacgcgcttcactaagcaccaccataggcaatgatattaactcttccatatcgattaatggtcccactgcaacaagtctttatggaacagccacctatttcactggcactgaaactgcatcaacaatggacagtaaattaatacccactgcacttgatgcttcctttgatggagatattattactcacaacatagaaaaaaagtatattggaagcgctgataaactaaatatcacatctatttatacttttagcgatgggaatctatgcagtggctatgattgcatgtacactaatgaaaatgccaaagtaaatgttcaatgccctgatgaaaaagcaactttagagtttaaaccagcatcgtatgtaagtggtggtaatataggtaacctagttggttcatggggaaatgtaaatattgatacaacttgtgcaatcaccgttttgataccctacgaataa

SEQ ID NO: 401980 - DNA, 162 bp, Salmonella enterica
atgaagggtatgcgacagattcgcaggggtaagaacattgctggtgtggtccaatacgcattgaaaccgggagcacatcataaatgcgatccagtcgtaatcgggggcaatatgctgggtgacactgtaagtatcccgcataatcgtgccattcacatttag

SEQ ID NO: 401981 - DNA, 624 bp, Salmonella enterica
atgtctcaaccaaagaaatgggggtttactgagctcgtacaggactcagacgagccggaacagttgatcgcatatgcgatgtataaagcagacaaagatgatctggcaatacaatgccgtgcgagattgcttcccgaggcagacatagtggttgaactcaccagtttccatgacagcatagcttattcagaaagaaggcttcaggactatcgtgacaaggcaaaacgggctgtagatcagctggtaagcagtgtaagtgagaggctcgcagccgcatatgatcagacaatctctacgatgacggatgagcatcagattgacctgcaggaaaaatggaaaaagtggggcgaagatgcggcgttgtacagtgctcatcttacaaagccagtatggtatacccggtttgggaaaggcattttgtcgtggctcggtggcggggtatccggcctacttgcgaccgcgatttccacactcctgattgtcggtgcagtgtcccttttcactccttcagttagggatacagctcgagattcattgaaaggtgtagttgatacgttgatcccagaaacacccattccaggcgtgactgaaacagtcaaaacaaacaagcaaacacagccctga

SEQ ID NO: 401982 - DNA, 525 bp, Salmonella enterica
atgaacaacgtactgctcaaccactaccagacctgtctggatgattatactcgcccggctgttctccatggtcagtgccagcaaggtattaaccgctggcataagctggcgatggtgccctgcacacttcccggtggtgagcttgccgggctggtgatccctgaacgcctccagcacgttctcagtctcccgacaacagcaccaatggcagcggtgcaggacatcaacacaggcctgatgtcgttactgctgccgggtgtgctgcttagcgaatgcgagcggctggggatgcgtcgtctcagcaataagctacagtcattgtttcaacaattcaaagggccaggaatcagagaaaggttaacactgttatgctgggctgaactggcaactgacatcgatcacaacgaatggaaggagttacaccggttatcctcggaatccctgatagcatggacagatcagaagctacagatattctgggcattgcagccgcagatagaagactacgtcgctttgaataactaa

SEQ ID NO: 401983 - DNA, 345 bp, Salmonella enterica
atgactccagaacaagcatgtgtagtattgaaaaatgtatcggcagataatctgctggctctctcaagtcaacatactgacttgttcctggcagaggtagcccgcatcattgccgcaatgcacaatctgagtgaatcagacgccacacaaacccttcgaaacttcggatcactgacagcaagggagcttactgtaaaagatttttgtgagtatattcaatgcgattcaataagtatcgtcaatgaattaggcgatcatccacttactgacgcacaattgctggatgcgatgtataacggtgatgatgatgccgaaattgagtggcaaatacgccatggaaagtaa

SEQ ID NO: 401984 - DNA, 1230 bp, Salmonella enterica
atgggaaagtcattcagcaccatatttcgttcactaaatgaaacaacaaaagagattttgcgtgatgtaggtgtcttcggcggcccctattctcattccatattgaacattgtccaatcttgtttacaagataaatacagcccaacagatatcgtcgcatcggtaaagtgtagtaaaccgtacattgcccggcgggctgcgttaaacaactgtggggaccgcaagcaacggttcacagcatttggaatattagatgtcgttgtcagttaccaaaatagtggttttgaactggcaaatcatatagtcagaataagtcaatacgcagaagaggcccgacaacgtcgtaccagcactatgcgggttttggcaaggtgcaatacccgggagaaacgattgatggcatttggcgtgctagatatcgccgaacttgactcttattcaattcctgatactgcgctggcaaggcatattcaatatattacccagcgaaaggtaagcgactcaaagattgcccttcatcaacagcgtaatgcatttattaatacaatgctgacaaactctaggcatctgactgaacgcactgccctaccaaatagtaagataccagaccaagatgctcctctatcagagcttgtgcgccgttacatcccaggtggaaaagcggcagaatttcgtgcatttatcgctaaaaaaaattccctcccatcttcccctctgacgctagtcgagtcttttttagggcatagcgtacatcagcaggaaagcggttcaaggatcgtttcaacggaaactatagcctctatagaatccagcgtaccaaaattcgctacaacgacaaaacgcgaaggaaatgcaaccagtgtgatcaccagaccggatcaggcgacattttctgaatcggtccgtcataactgttatggatgttgcgtcattactggcgcaactttgcgacaacgaactgaagctgctcatcttgtagaacaccagctagcaggagccgatcacttcacaaacggattgctaatgcgccgggatattcacagtctattcgacgacggacttattgccattgatccaacgacactgatcacttatgtgcagatggaggctctgatagaagatccagatttaaggcaataccatggcaaaccgattgccaccactcgccaatcaattaaccgaaaaaacctattggatcgctgggaagtattccatcgactcaataaatag

SEQ ID NO: 401985 - DNA, 1713 bp, Salmonella enterica
atgaataacgctgaacaacagtttctgaatgagctggataacaaattctggaaggcggctgacaagctgcgcgccaacatggatgccgccaactacaagcatgtagtgttagggcttatctttctgaagtatgtctccgatgcttttgaggctcgccagcaagaactgatcacattgttccgcgatgtcggcaacccggacaacatctacgccatatcgcgcgatgattacgactccgacgaagattacgcacaggcgattgttgatgaactggaagtcgaagattactacaccgaaaagaacatcttctgggtgccgaaagccgcacgctgggatacgctgaaaacgaaagcgattctgccgaccggtacggtgctgtgggtggatgaaaccaccggacaggatgtgaagctgcgctccgtctcctggctggtggacaacgcgctggatgaaatcgaaaaaaccaacccgaaactgaaaggcattctgaaccgcattagccagtaccagttgggcaacgaggtactgaccgggctgattaacaccttctctgatgccaacttcagcaacccggaatataacggtgagaaactgagcttaaagagcaaagatattctcggccacgtatacgaatatttcctcggtcagttcgcgctggcggaaggtaagcagggcggccagtattacacgccaaaaagtatcgtcaccctgattgttgaaatgctgcaaccgtataacgggcgcgtgtatgacccggcgatgggttccggcgggttctttgtttccagcgaccgttttatcgaagagcacgcgggcgagaagcagtacaacgccgccgagcagaagcgcaatatctccgtttacggccaagagtccaacccgaccacctggaagctggcggcgatgaatatggcgatccggggtatcgactttaacttcggcagcaaaaacgccgataccctgctggacgaccagcacccggatctgcgagctgacttcgtgatggcgaacccgccgttcaacatgaaggagtggtggaacgccaagctggaaaacgacgtgcgctggaaatacggcacaccgccgcagggcaatgccaactttgcgtggatgcagcacatgatccatcaccttgcgccaaaaggctcgatggcgctgctgctggcgaacggttcgatgagctctaacaccaacaacgaaggcgagatccgccgcaacctgatcgaagccgatctggtcgagtgcatggtcgcgctgccgggccaactgtttaccaatacccaaattccggcctgtatctggtgcctgaccaaagacaaaaccggcggtaacggcaaagcacaccgcaaaggcgaagtgctgtttattgatgcccgtcagattggctatatgaaagaccgcgtgctgcgtgactttactcgtgaggatatcgccagaattgccgacaccttccattcatggcagacggataaagactatgaagatgaagcgggattctgcttcgccgcgacgctggaagatataaagaaaaatgactttgtcctgaccccaggtcgctatgtcggtgctgccgagcaggacgaagatgatgagccctttgccgagaagatggcacgactgacggcgcaactgaaagatcagttggaagagagcgcgaacctggaagcacagattaaggcgaatctgggggggctgggttatgaaattatctga

SEQ ID NO: 401986 - DNA, 1314 bp, Salmonella enterica
atgaaattatctgatttggttatttttaatccaaagcgcccactaaaaaaaggagaaagtgcagcctttgttgaaatggccgcacttcccgaaaatggtagagatataaatagagttgatgaaaaaatcttcaccggtggcggttcaaaatttgcaaataaagacaccttgtttgctcgtataacaccttgtcttgaaaatggtaaaacatcgcttgtttccggtttatcggatggtgaggttgcttttggttcaacggaatttatcgttttagctgcaaaagagcctgagtacgatagtgattatatttattatctctcacgccttggggaattccgttcatttgctcgatccagaatggaaggaacttctggacgtcaacgcgttgcatggcaatcattagccgattatgaatatgatttccctgacaaaagattgaggaaatttgcaggtgatgttttaaagaaattcgacgataaaattttattaaatcatcaaatcaaccaaactttcgaacaaatggcgcaagctctgttcaaaagctggtttgtcgattttgaaccggtaaaagccaaaatggcggtactggaagcgggtggttcgcaggcagacgtaacgcttgccgccatgaccgccatttccgggaaagatgcggatgcgctggcgttttttgagcgtaaacatcctgagcaatatgccgagttaaaagccacggcagaactgtttccgtcagtgatgcagggccatgaattgggggaaatcccggaaggatggcaattaaatcgtttgtctaatcttgcaattcttcattatggaaaagcacttaaaaagacagagagaattgaagggccgtatccagtttatggatcaggcggtattactggttctcacaacaattatcttgttgaggggccaagtattatagttggccgaaaaggttcaattgggacgctttattgggaagatgggaaattccatccgatagataccgtttattttgttgaaggcaaagatgagatcccgttgacctatttatattatttaatgaaaacattgaatctttcagggatgaataccgatgctgcagttccagggttaaatagagataatgtttatcgtcttgaagtgcttcagcccgataagtttatattaagtctatttgacaaacacatgtcagctatcaggaataatattcaaaaaaatgatttctcgacagtaatattatctgatctccgcgacacccttctccccaaacttctctcgggcgaaattaccttgccggaagcagaacaaataatcagcgaggaagcctga

SEQ ID NO: 401987 - DNA, 3132 bp, Salmonella enterica
atgctaagcgaagacgatttagaacagcaatgtctgcaatggtttgctgaacagggctgggatgtgctgcacgggccggatattgcgccggatggcgataacccgctgcgtgcctcatttcatgatgtgtttctgcgcccggtgatgctggaacagttgcaaaccatcaacccccatctccctgtttccgtgctggaagaggtgatacagcgtatcgcccatgcccacagcccggatctggtcgtcagcaataaagccttgcatcatctgctgctcaatggcgtgcccgttgagtacaagcatgaagacaaggtgattcacgacaacgcgctgttaatggatttcaatcatccagacaacaaccgctttatggtggtgaaccaggtcgccattcagggaatcaaacaggtacgtcgcccggatgtcattggctatatcaacggtctgccggtggcggtgatcgaactaaaaagcccggttgatgctaacgccgatatctgggcggcgtttaaccagttacagacctataagaacgaactgagcgacctgtttatttgtaacgaggcgctggtggtgagcgatgggcagaatgcgcgcgttggctctctcacggcggatgaagagcgcttcctgccgtggaaaaccgtggcgaacgaaaatgacaaaccgcagtttgactggcagcttaaaaccgtcgtgcagggcttttttaaccgtgaattattgctcgattacatccgctattttgtcctgtttgagaacgacggcaaacggctgattaagaagattgccgcctatcaccagttccatgcagtgcgtgaagctgtgacggcaacgattgtggcctcgaccggtaaacacctgccgctgcacagcaatattcagcccggcagtaaaaaggcgggtgtggtctggcatacccagggttccggcaaaagtatctccatgtgctgctatgccgggaaactgctacaacaggcggagatgaacaacccgacgattgtggtggtgacggatcgtaacgatctcgacgggcagttatatgccaccttctgccaggcacaggatttactgaagcagacgccactacaggccaatgaccgagacgagctgcgcgagctgcttaatgcccgtgaatccggcggtatcatttttaccaccgtgcagaagtttgcgccgttggagggtgagcagagtcatccggcgctcaaccaacgcagcaatatcgtggtgatttctgatgaagcgcaccgtagccagtatggcctgagcgccacgctggacagacaaactggtgtctataaatacggctacgccaaacacatgcgcgatgcgctgccgaatgcatcgtttatgggctttaccggtacgccgattgcctcggaagataaagatacccgtgccgttttcggtgattatgtctctatctacgacattcaggatgcggtcgatgatggcgcaacggtgcctatctactatgaatcccggctggcaaagctcgacctgaaccatgaagagctggaaacgctctccgaccaggtcgatgaactggtagaagacgaagaggcggagcagcaggagaaaaccaaaggcgactggagccgcctggaaaagctggtcggttcagagcctcgtattcagcaggtcgcctccgatctggttcagcattttgaaacgcgcaataccgccatgaacggtaaagcgatgattgtcgccatgagccgcgagatctgcgtgaaactgtacgatgctatcgtggcgatacgcccggaatggcacagtgaagacgttgaacaaggggcgatcaaagtcatcatgaccggatctgcgtcggataaagatcatctgcaatcgcatatctacaacaaacagaccaaaaaacgcctggaagcccgctttaaagatctgaacgatccgctgaaactggtgattgtgcgggatatgtggctgaccgggtttgatgccccatgctgccacaccatgtatatcgacaaaccgatgcgcggccataacctgatgcaggcgattgcccgtgttaaccgcgtgttccgagataagcctggcgggctggtggtggattatatcggcattgccaacgagctgaagcaggcgctgaaaacctataccgattcaaaaggtaaaggacagacgacggtagatgccagggaagcctttgctattctgctggaaaaaatggatgtcattcatgggatgtttgcccgttcggcgggtaagccggggtttgattacacgggcttctcccacgatccgctggccttcttgcgtgatgccgtgaactacattctgggactggatgacggtaaaaaacgttacctcgatgtctcgctggcgatgagcaaagcctggtcactatgtaacacccttgatgaggccgaacctttgcaggaagagttcgcgtttctttcggcgatccgagtggggcttatcaaactcgatccgaaggccaaatttagccagtcagaaaaaaattcgctgctgagtaaaattcttgataatgcggtcgtcgcgaccggcgttgaagatgtgtttgctttggctggattggataagccgaacataggtttgctgtcggatgagttcctggaagaagtaagggagatgccgcagcgcaacctcgcggttgagttgctggaaaaactgctcaatgacgggattcatgcacgttccggtaataacgtagtgcagcagaagaaatattctgaccgcctgaaagccgtactgctcaaatacaataaccgggcgattgaaaccgcacaggtgattgaagagctgatcgagatggcgaaagcgtttcaggacgcaatggcacgcgatgatgcgctgggcttaaatccggatgaaatcgctttctatgatgcgctggctgaaaatgaaagtgcagtccgtgaactgggcgatgacacgctcagaaagctggctattgaagtcacacggcaattgcgtaaatccaccaccgtagactggcaagtacgagacagtgtgcgggcgaggttacgggttctggtacgccagacactgcgtaagtacaaatatccaccggataaaacagcgggtgcggtcgagctaattttaaaacaagcggaagttatttcgaatcattggacggtgtaa

SEQ ID NO: 401988 - DNA, 801 bp, Salmonella enterica
atgttaatgaaccatttggatattatcagtgatgatgtatggaagaggcttgagaatggaaaaaaatataatataatccagggcgaggaaacgttaactgataatattttactatatcttgcatcacaaaatctttcagaaataaaaatcatccagacgcctaaaaatatggagagtgttaaaggtactgattgggaatggtggattggaaaccgtacgcatggctatttacgctatgcagttcaggcgaaaaagcttgatgcaaaaaccaatcgttattcatctttaaatcataaagtaggcgtaggatcaaaaacattatttcagcatgatattttagaaaaatatgcacatgtgaatcaggcaattcctttatatgccttttacaatcatctagatccttgcaattatccaacgaaatggaattgcccattaccttttgatttaacaaagcttggttgtacagttacctcattacagaatgtaaagtatgctattaaaaatagagggtacagaacatttggagcaatacatcagttccctgatacagtccctttgagatgccttgctgaatgtctgagcattgctgctatctctgaaaaaagtaaaatcgccaaagttcattgttttggcgttgaagctaaaatttatcaagatccctgggagtggcttagtcaaatgggtcacttaaatagctgtgagcaaatgccgaatgaatattataatcgtgagttgggtttttatcctaagcggatattatttataaatacaagcgaaaggctaactaacatagcagactga

SEQ ID NO: 401989 - DNA, 1320 bp, Salmonella enterica
atgccattaataattattgcggcaggcgttgcgctgctggtgatcttaatgattggctttaaagttaacggctttatcgcccttgttctggttgccgccgtggtgggatttgccgaagggatgggcgcgcaagacgtcctgcactccatacaaaacggaattggcggtactctgggcggactcgccatgatcctcggttttggcgcgatgctgggaagattaatttccgataccggcgccgcgcagcgcattgcgacgacgctcattaatacgttcggcaaaaaacgcgtgcaatgggcgctggtgatcaccgggcttatcgtcggcctggcaatgttttttgaagtcggattcgtactgctgttgccgctcgtttttacgattgtagcctcatcgggactgccattgctgtatgtcgggattccaatggtcgccgccttatccgttacgcactgcttcctgccgccgcatcccggccctaccgctattgcgacaatttttgaggcaaatctcggtacgaccctgctgtatgggttaatcattaccataccgaccgtgattgttgccggccctctgttttcaaaattgctggcgcgctttgagaaagcgccgcctgaaggattatttaatcctcacctattcagtgaagaggagatgccgtcattctggaacagtatttttgccgccgtgatcccggtcattctgatggccatcgcagcggtatgtgaaatcacgctgccaaaaacgaatgccgtgcgggttttcttcgaatttattggtaatccagcagtggcgttgtttattgccattatcatcgccatttttacgctgggccgacgcaacggacgtacggttgagcaggtgatggatatcgtcggcgagtccattggcgctattgcgatgattgtttttatcatcgcgggcggcggcgcgtttaagcaagtgctggtggatagcggcgtgggtcaatatatctcgcaattaatgaccggcacctcgctatctccgttattaatgtgctggacggtagccgccgtgctgcgtattgcgttaggttccgcgaccgtggccgcgataaccacagcgggcgtcgtattgccgattattaacgtaacccacgccgatccggcgttaatggtactggcgacaggcgcgggaagcgttattgcatcacatgttaacgatcccggtttttggctatttaaagggtattttaatcttagcgtcggggaaaccctacgcacctggaccgttatggaaacattgatttctgtcatgggattgctgggcgtactggcgctgaatgcggttctgcattaa

SEQ ID NO: 401990 - DNA, 417 bp, Salmonella enterica
atgttcatccggctgcaaatcagggatccgatggctagatttgttgcgcatgatgagtatcttcaggctgggtttgcgcgggatagtttatttctcgttgaagcaaaacggcgtggatcgcgtcttgaaatcatcgtggaacgaaatgacgacacaaaattctgtctaatattcaaaggaatgcttttttcttgttgtgcggagcttgatagttttgagcgcacggcaggtaatgactatttatttgactggaattgcatcaccggaaattttggtgaattatttgattcccgattgatgtcatcatttctaccgcgaagtgatgttgatccggagagttgccatcactattttctggcaacctatgatgatatttttaacatcatcgccgaatcagtctctattgaagccatctga

SEQ ID NO: 401991 - DNA, 174 bp, Salmonella enterica
atgggcattattcatcgattgatggatgaccattgctttttcatggtcgtccatttcagaaaagggtgtcgcattttccactgtagtcagggcgctgggtttctgtgtctgagccatttgctggtgcgcgaaggcgtcaccgttattcatcatctcatgcgccgtggcggataa

SEQ ID NO: 401992 - DNA, 375 bp, Salmonella enterica
atggcaatgaataaacgagaaaaagaacaacttgaaaacgctgttcgccttatggatataaaccgatcgcttagatggtctgactatggagcagatcgcgatgtaggcgtaccagatagcatcacccagtatgttaacggttggtctatcaacacatattcctgccgtgtatataaatcatggtcatccactgtatctcatggtgacggatgggttgaaaatgaagaaagaccccgctccgcatcacagaaagggattgcgcaatacagcaccaaagaaaaggcacttaaagcattaaggcattgcatggaaatgaagtttgcagaagcactatacgagatagaccagcaaattctcgccaccgacgcggagtaa

SEQ ID NO: 401993 - DNA, 126 bp, Salmonella enterica
atgctgaagcgcagcagctcggctctcagcaccgcaaaaataacaatcctcgcactcgcggggatttttttatctgaactcgctacggcgggttttttattggagatagatgatggcaatgaataa

SEQ ID NO: 401994 - DNA, 189 bp, Salmonella enterica
atgattcctacagacctagccagaactccagaattaagcaggataaagcgtcagtatcacctgactgaggcaatgtactggcgtaaggccggtgataagtcgatgaagtccttctgtcttgatatggctcgtcgtgagcgaatgaataaaggcgagtttctggctaatccttccgaactcccattctga

SEQ ID NO: 401995 - DNA, 195 bp, Salmonella enterica
atgcaaaacacattaaccgttattcgccagtgcgtaactccaggaatgctggttattcaccacggaaagccatggagagcagcagttaacaaagacggcaagttgcacatccacacactgaccgaagctaagccacttaaagacctgctggtagatatcgtgcttaaccataaaaacgagccggagattatttag

SEQ ID NO: 401996 - DNA, 135 bp, Salmonella enterica
atgatgcaactaagcctcgcgggtagcggcgtcatgtccgctttttatcccgctgaatccgaattatccaagcgtattcgtcgtcttattcgcgctgttcgtaagcaactggaggcgttatgcaaaacacattaa

SEQ ID NO: 401997 - DNA, 255 bp, Salmonella enterica
atggaaatcgacgttcgaaaagttgcaacttattcatcaaatggtggatggagagaagtaaccgtcaaagaagataatacgactattaagtttgacttaaacacttatggcgaaattaaagagttttgccatcacctcttggataccgcttttgctgagatggaaatggatgaaatcatcgcctatctaacggaaaacagctatagcgacgagattatcgagcgctacgaagaagagaaatcagaagccgcctga

SEQ ID NO: 401998 - DNA, 198 bp, Salmonella enterica
atggatggagaaagttttaattttgacaatactgatattgaattccttgcttcaatgtatgcatcagctaaattatcggcaaacacaagccccataatgcatataatagtaagcattccaagagataagaaaaaacatttttataatcgagttaaacattatctcaacttatattccgataaaaaagacactccttaa

SEQ ID NO: 401999 - DNA, 582 bp, Salmonella enterica
atggcattcagaatgagtgaacaaccacggaccataaaaatttataatctgctggccggaactaatgaatttattggtgaaggtgatgcatatattccgcctcatacaggtctgccagcaaacagtaccgatattgcaccgccagatattccggctggcttcgtggctgttttcaacagtgatgagtcatcgtggcatctcgttgaagatcatcggggtaaaacggtttatgacgtggcttccggcgacgcgttatttatttctgaactcggtccgttaccggaaaatgttacctggttatcgccggaaggggagtttcagaagtggaacggcacagcctgggtgaaggatacggaagcagaaaaactgttccggatccgggaggcggaagaaacaaaaaacaacctgatgcaggtagccagtgagcatattgcgccgcttcaggatgctgcagatctggaaattgcaacggaggaagaaatctcgttgctggaagcatggaaaaagtatcgggtattgctgaaccgtgttgatacatcaactgcacctgatattgagtggccagcagcacctgtaggataa

SEQ ID NO: 402000 - DNA, 3123 bp, Salmonella enterica
atggcagtaaagatttcaggtgtactgaaagacggaacagggaaaccggtacagaactgcaccattcagctgaaggcaaaacgtaacagtaccacggtcgtggtgaacacgctggcctcagaaaatccggatgaagccgggcgttacagcatggacgttgagtacggtcagtacagcgttattctgatggtggaaggattcccgccgtcacatgccgggaccatcaccgtgtatgaggattcaaagccggggacgctgaatgattttctcggtgccatgacggaggatgatgcccgtccggaggcactgcgccgttttgaactgatggtggaagaggtggcgcgtaacgcgtccgtagtggcacagaacacggcagccgcgaagaagtcagccagcgatgccagcacatctgccagtgaggcggcaacccatgcgactgatgccgcaggctcagcacgcgcagccagcacgtccgccgaacaggccgcatcgtctgctcagtcagcatcttccagcgcaggaacggcatcaacaaaggccacggaagcgtcaaaaagtgctgccgctgcagagtcctcaaaaagcgcggcggccaccagtgccggtgccgcgaaaacgtcagaaacgaatgcggcagcgtcacaacaatcagcagccacttctgcatccactgcgacgacgaaagcgtcagaagccgccacttcagccagagatgcggctgcctccaaagaggcggcaaaatcatcagaaacgaacgcctccacaagcgccagcagtgcagcctcctcggcaacggcggcaggaaattccgcgaaggcggcaaaaacgtcagagacgaatgctaagtcttctgaaacggcagcggaacagagcgcctcagctgcggcaggctctgagacagtagctgcatcatcggcccgtgaagcatccattaaggcagaggaggcagccgccagtgccaccgccgccgggaaatcggcagaaagcgccgcatcgtccgcttcaacagccacaacgaaggctggcgaagccactgagcaggccacggcagcagcgaggtcagcttccgcagcgaagacatccgagacgaacgcgaaagcgtcggaaaccagtgcagaatcctcaaagacggcagccgcatcgtcagccagttcggcggcatcatcggcatcatctgcgtctgattcaaaagatgaggcgaccagacaggcgtcagcggcggcagagagtgcgtcaacggcatccacgaaggcgacagagacggcaggaagtgcgacggaggcagctcagagcaaaaatgcggctgaatccgcggcaacgcgcgccgagacagctgcaaaacgggcagaggatattgcatctgccgtggcgcttgaggatgcaagcacgacgaaaaaagggatagtacagctcagcagtgagaccagcagcgaatctgagacgctcgctgcaacaccgaaagcggtaaagtccgcatacgacaacgctgaaacacgccttcggaaaaaccagaacggggcagatatacctgataaagacaccttcgtaaaaaatattggcgcagcgaaagctgccagcggcaatatcagcatcggaggagacagcaataactggacgacggcgcaatttatcgagtggctggagtctaagggggcgttcaatcattcatactggatgtgcaaaggctcatgggcttacgctgccaataaaatcatcacggataccggttgtggaaatatacaactttctggcgctgtagttgaggttatgggggttcgagaggctatgactattcgcatcaccacccccacgaccgcaacgaacggcggaaccgtcaaggcacaatttacctacatcaaccacggtgacaattatgcgccaggctggagacgggactttaatcgagctggtgattcaatgtcaggccagttaactttggcggatatgtcacagccattaagaacaccaggtggtggcatatttgccaatgatggcaacttgtatatcaataaaccgggtttcgctggatggattgatgcgctctttttgaaattaacaggaggcacaataaccggggcgcttaccgttaatggcggcattaagggtaatgcttcaacagctacgaagttgcaaacagcgagaaacatcaatggtgttaagtttgatggctcaggcgatatcaacattaatacattggtatctcgtggccgagttacggcgttaagcggctctactcaaggcactgctggcattcaaatgtacgaggcgtacaacaatggctaccccactgcttatggcaatgtgcttcatatgagaggtgcgaatgctgctggagagggcgaattgcttatcgggtggagtggtacaagcggtgcacatgctccggcatttattcgttcgcgacgggatacaaccgacgccaactggtcgccgtgggcgcagctttacactactgcccatcctccggcagagttttatccagttggcgcaccaatcccgtggccatcagataccgttccgtctggttatgccctgatgcaggggcagacttttgacaaatctgcctacccgaaacttgcaaccgcttacccatctggtgtgatccctgatctgcgtggatggacaattaagggcaaacccgccagtggtcgcgctgtattgtctcaggaacaggacggtattaaatcgcatgcccacagtgccagtgcatccagtacggatttggggacgaaaacaaccagttcgtttgattatggtactaagaccacgaataacaccggagcgcacacccatagtgtcagtggtacggctgcttctgcaggggcacatacacacacggttgcctgttacccatctggcaataccgagcagggcgataaagccctcaaaggtgcgtctcgtgcaggctcgagtactggcacatcgtcagccggagcgcatacccacccggtgtcaggtactgctgcaagtgcaggtgcacacgcgcatactgtcggtattggtgctcatacgcactccgttgcgattggctcacacggacacaccatcaccgttaacgctgctggtaacgcggaaaacaccgtcaaaaacatcgcatttaactatattgtgaggcttgcataa

SEQ ID NO: 402001 - DNA, 600 bp, Salmonella enterica
atgcgtaaagtatgtgcaattcttttgtccgcagcagtattcctgaccgtatcgggtacgacagtgagtgcagcagaacaccatagcacattaagcgcaggatatattcatgctcatacgaaaatgccaggcggtgatgatctgaatggtattaacgtgaaataccgttatgaatttacggacacgcttgggatggtgacgtcattcagttatgccaacgccgaagatgagcaaaaaacgcattacagcgatacccgctggcatgaagattccgttcgtaaccgctggttcagcgtgatggcggggccgtctgtacgcgtgaatgaatggttcagcacatatgcgatggcgggtgtggcttacagccgtgtttcgactttctccggggattatctccgcgtaactgacaacaaggggaaaacgcacgatgtgctgaccggaagtgatgatggtcgccacagtaacacgtctctgacgtggggggctggcgtgcagtttaacccgaccgaatccgtggccattgatattgcttatgaaggctccggcagtggtgactggcgcactgacggtttcatcgtgggtgtcggttataaattctga

SEQ ID NO: 402002 - DNA, 3489 bp, Salmonella enterica
atgggtaaaggtagcagtaaggggcataccccgcgcgaagcgaaggacaacctgaagtccacgcagctgctgagtgtgatcgatgccatcagcgaagggccggttgaaggtccggtggatggattaaaaagcgtgctgctgaacagtacgccggtgctggacagtgaggggaataccaatatctccggcgtcacggtggtgttccgggcaggtgagcaggagcagacaccgcctgagggctttgaatcctccggctccgagacggtgctgggtacggaagtgaaatatgacacgccgatcacccggaccatcacgtcggcaaacattgaccgtctgcgttttactttcggcgtgcaggcactggtggaaaccacctcaaagggggacaggaatccgtcggaagtccgcctgctggttcagatacagcgtaatggtggctgggtgacggaaaaagacatcaccattaagggcaaaaccacctcgcagtatctggcctcggtggtggtggataacctgccgccgcgcccgtttaatatccggatgcgcaggatgacgccggacagcaccacagaccagctgcagaacaaaacgctctggtcgtcatacaccgaaattatcgatgtgaaacagtgctacccgaacacggcactggtcggcgtgcaggtggattcggagcagttcggcagccagcaggtgagccgtaattatcatcttcgcgggcgtattctgcaggtgccgtcgaattataacccgcagacgcggcaatacagcggtatctgggacggaacgtttaaaccggcatacagcaacaacccggcctggtgtctgtgggatatgctgacccatccgcgctacggcatgggaaaacgtcttggtgcggcggatgtcgataaatgggcgctgtatgtcatcggccagtactgcgaccagtcagtgccggacggctttggcggcacggagccgcgcatcacctgtaatgcgtacctgaccacacagcgtaaggcgtgggatgtgctcagtgatttctgctcggcgatgcgctgtatgccggtatggaacgggcagacgctgacgttcgtgcaggaccgaccatcagataaggtgtggacctataaccgcagtaatgtggtgatgccggatgatggcgcgccgttccgctacagcttcagcgccctgaaggaccgccataatgccgttgaggtgaactggattgacccgaataacggctgggagacggcgacagagcttgtggaggacacgcaggccattgcccgttacggtcgtaacgtcacgaagatggatgcctttggctgtaccagccgggggcaggcacatcgcgccgggctgtggctgattaaaacagaactgctggaaacgcagaccgtggacttcagcgtgggtgccgaagggcttcgccatgtaccgggcgatgtcattgaaatctgcgatgatgactatgccggtatcagcaccggcgggcgcgtgctggcggtaaacagccagacccggacgctgacgctcgaccgtgaaatcacgctgccatcctccggtaccacgctgataagcctggttgacggaagtggcaatccggtcagcgtggaggttcagtccgtcaccgacggcgtgaaggtgaaagtgagccgggttcctgacggcgttgctgaatacagcgtgtgggggctgaagctgccgacgctgcgccagcgcctgttccgctgcgtgagtatccgtgagaacgacgacggcacgtatgccatcaccgccgtgcagcatataccggaaaaagaagccatcgtggataacggggcgcactttgacggcgaccagagcggcacggtgaatggtgtcacgccgccagcggtgcagcacctgactgccgaagtcaccgcagacagcggggaatatcaggtgctggcgcgctgggatacgccgaaggtggtgaagggcgtgagcttcctgcttcgtctgaccgtgacagcggaagacggcagtgagcggctggtcagcacagcccggacgacggaaaccacataccgcttcacgcaactggcgctgggaaactacaggctgacagtccgggcggcaaatgcctgggagcagcagggcgatccggcatcggtatcgttccggattgccgcaccggcagcaccgtcgcggattgagctgacgccgggttattttcagatcaccgccacgccgcatcttgcggtttatgatccgacggtacagtttgagttctggttttcggaaaagcggattaccgatatcaggcaggttgaaaccagcgcgcgttatcttggtacggcgcagtgctggatagctgccagtatcaatatcaggccgggccatgattattatttttatgttcgcagtgtgaacaccgtcggcaaatcggtatttgtggaagctgttggccagccgagtaatgatgcgtccggctatctggattttttcaaaggagagatagggaaaacacatctggcccaggagctgtggacacaaattgataacggtcagcttgccccggatctggctgaaatcaggacatccattacgaatgtcagcaatgaaatcaccgagaccgttaacaagacactgaaagaccagagcgcagcaatccagcagatacagaaggttcaggttgacaccagtaataacctgaacagtatgtgggctgtgaagctgcaacagatgaaggatggacgcctttatattgcgggtatcggtgccggtattgagaatacccaggacggcatgcagagtcaggtgcttctggctgcagaccgggtggcatttattaacccggcgaatggtaacaccactcctgcactggtcacacagggcggacagacgtttattaatgaggcgctgatcaagttccttattgctcccacgattaccagtggtggtaatcctccggcattctccctgacacctgacggaaagctgactgctaaaaatgcggatatcagtggcagtgtgaatgcgaacgccgggacgctcaacaatgtcacgattaatgagaactgtctgataaaaggaaaactgtctgccagtcagattgagggcgatattgtcaaagcggtgggaaaggcttttccacatgatccgcgcgaatcagaatttaaaccgtggccgtcaggtacgattactgtgaggatagatgatgatcaaaaatatgacagacaaattgtcattcctgctgttgcgtttcgtggggcgaagcaccggcaggcatccacaaacagtgaatattattcatcctgtcgtcttgttgtaaaaaagaatggttctgtaatttatgacaaatcgaccaacgatgttacagccatttacacaggcatcatggatatgccagccggttctggaggaataactcttgagttttcagtttctgcgtcaaacgggaattattatccttcagcgactatcagcgatttgcttgtggtcattatgaaaaaatccacagctggtatcagtatcagctga

SEQ ID NO: 402003 - DNA, 543 bp, Salmonella enterica
gtgaaaacgggggctgaagccatccgggcgctggccacgcagcttccggcgtttcgccagaaactgaatgagggctggtatcaggtgcgcatttccgggcgtgatgcaggcgaaaacgaattatctgcccgtcttaatgagccgctggcaaatggtgccgtgatccacatcgtaccgcgtctggcgggtgccaaaagtggcggtatttttcaggcagtgctgggtgcggcgctaattgctacggcaatctggatgccggggcttagtattgttgcaagtaatctcatgttctctcttggggcaggtatggttttaggcggtgttgcgcagatgctggcaccgaaagccaaaacgcctaaagtgtcagccactgataacggtaagcaaaatacctatttttcctcattggataacatggttgcccagggcaatgtcctgcctgttctgtacggtgaaatgcgcgtggggtcacgtgtggcatctcaggagatcagcacggcagatgaaggggatggtggtcaggttgtggtaattgggcggtaa

SEQ ID NO: 402004 - DNA, 600 bp, Salmonella enterica
atgtcgccggaggactggctgcaggcagaaatgcagggtgagattgtggcgctggtccacagtcaccccggtggtctgccctggctgagtgaggccgatcggcggctgcaggtgcagagtgatttgccgtggtggctggtctgccggggggcgatttacaagttccgctgtgtgccacatcttaccgggcggcgctttgagcacggggtgacggactgttacacgctgttccgggatgcttaccatctggcggggattgagatgccggattttcatcgcggggatgactggtggcgtaacggtcagaatctctatctggataatctggaggccacagggctgtatcaggtgccgttgtcagcggcgcagccgggcgatgtgctgctgtgctgttttggttcatcggtgccgaatcatgccgccatttactgtggtgacggcgagctgctgcaccatattcctgaacaactgagcaaacgagagaggtataccgacaaatggcagcgacgcacacactccctctggcgtcaccgggcatggcacgcatctgcctttacggggatttacaacgatttggtcgccgcatcgaccttcgtgtga

SEQ ID NO: 402005 - DNA, 699 bp, Salmonella enterica
atgcagaatatccgacaggaaacactgaatgaatgcacccgtgcggagcagtctgccagcgtggtgctctgggaaatcgatctgacagaggtcggcggagatcgttatttcttctgtaatgagcagaacgaaaaaggtgaaccagtcacctggcaggggcggcagtatcaggcctatcccattcagggaagtggatttgagatgaacggcaaaggagccagtgcaaggccaacgctgaaagtctctaatctgcacggcatggtcaccgggatggcggaagacctgcagagtctggtcggaggaacggtggtcaggcgtaaggtttacgcccgttttctggatgcggtgaacttcgtcaacggaaatagcgatgccgatccggagcaggaggtgatcagccgctggcgcatcgagcagtgcagcgaactgagcgcggtgagcgcctcttttgtactgtccacgccgacggaaacggatggcgctgtttttccggggcgcatcatgctggccaacacctgtacctggacctatcgcggtgatgagtgcggttatagcggtccggctgtcgcggatgaatatgaccagccgacgtccgatatcacgaaagataaatgcagtaaatgcctgagtggctgtaagtttcgcaataatgtcggcaactttggcggcttcctttccattaacaaactttcgcagtaa

SEQ ID NO: 402006 - DNA, 3075 bp, Salmonella enterica
atggaccagatagccaacctggtcattgatttggggattgatgcggcagagtttaaaaatgaaatcccccgtatcaaaaaccttctgaatggtgcagccagcgatgcagaacggtcttctgcccgtatgcagcgttttatggagcgtcagactcaggccgcccggcagacaacgcaggcggcttcttcggctgcaacagccgcatccgtccatgcgcagacggtggagaagaacgcacaggctcatgaacgcatggcccgcgaggtggagaaaacccgccagcgcatggaggcgctgagccagaaaatgcgcgaggaacaggcgcaggccatggctctggcggaggctcaggataaagcggctgctgcgttttatcgtcagattgacagtgtgaaacaggccagtgcggggctgcaggaattacagcgtattcagcagcagatccgacaggccagaaacagtggcgggattggtcagcaggattatctggcgctgatttctgaggttactgcgaaaacccgtgttcttacacaggctgaggaagaggctacccgacagaaagtggcgtttatccgtcagcttaaagagcaggcaacccgccagaatctttcttcttctgagttgcttcgtgctaaggctgcccaactgggggtaagcagtgctgcagaagtgtatatccgcaaaatggagcaggcaggaaaagccacgcattcgctgggtctgaaaagtgcagcggcccgccaggagataggcgttctgataggtgaactggcccgcggcaatttaggtgcgctgaggggatccgggataacgctggctaaccgtgccgggtggatagacacactgatgtcaccgaaaggcatgatgcttggcggggttattggcggtattgccgcggctgtctatggtctgggtaaagcctggtatgacggtcagaaggagggggaagaatttaaccgccagctgtcgctgacggggcattatgccggagtcactgccgggcagctgtggacgctcagtcgtgctatttccgggaatggtatcacgcaacatgctgcagccggtgcgctggctcaggtggtgggtagtggtgcatttcgtggaaacgatatcggtatggtggcgagagctgccgcacagatggagcgatcggttggccagtcggtcagcgataccataaatcagtttaagcggctgaaggatgatcctgtaaatgccgcgaaggctctggacaatgagctgcattttcttactgccactcagcttgagcagatacgcgtccttggggagcagggacggtccagtgatgctgcacggatagccatgtctgcactggcagaggaaaccggtaggcgtactgcggatattgataataacctcaatgcgcttggcagtacgctgaagtatctgtctgatttatggagtcgtttctgggatgcggccatgaatattggtcgtgaagactcgctggatgaacagattgccactttacaggagaaagtgtcgcgggcgaaaagactcccctggacggcatcatcttctcaggttgaatacgatcagcagcgtcttaacgatcttcaggagaaaaaacgccagaaggatttgcaggatgcaaaagagcaggcagagcggaattatcaggagcaacagaaacgacgtaatgctgaaaatgctgcactgaaccggatgaatgaaacggaagcagcacgacatcagcgtgaaattgcgcgtattaatgccatgcagtacgccgaccaggctgtcagggatgcggcgatacaacgtgaaaatgaacgttacgagaaagccctggcatccggtaagaaaaaaacacgcgaaacccgtaatgatgaggccacccggttattgctgcagtacagtcagcaacaggcacaggtggaaggacagattgctgctgcaagacagtcagctggcattgccactgacaggatgacagaagcgcataaacagcttctggctctgcagcagcgcatcagcgatctggacgggaaaaaactgacggcagatgaaaagagtgtgctggcccgtaaagatgaactgattcaggcactgacgctgttggatgtaaaacagcaggagcttcagaaacagacggcactcaacgatctgaagaaaaaaacaattcagctgaccagtcaactggctgaagaagagcgctctcagcatcagcaacatgacctggatatcgccacggtgggtatgggtgatcagcagcggcagcgatatcaggtacaactgagtcttcgccagaaataccagcaacagctggagcagttgaggcgggatagtgagcagaaagggacatataacacggatgactacagaaaggccgagcaggcgctgacggagagcctgaacaggcaactgaatgagaatcgccgttactggcaacagcttgaaattgctcagggtaactggaaaaacggtgccatgcgggcgtttcagaatttcacggcagatgcggataatgcggcaggcactgcggagcagatgcttacagcggcatttaatagtgcaggtaatgcactggcaacattctgtaccaccggaaaactgaacttcaaatcttttaccgcctcgctcctttctgatctggcaaaaatcatggctcagatgtccatgatgcaggcagttaaggggattggttcggcgtttggctgggggagtgcagcaactgccagtgtgacgcccaatgctgatggtggtgtttatcagtctgctgatttgagtcgctacagtggcacggtggttaaccgtccgacgttttttgcttttgcaaaaggtgcaggtgtgatgggggaagctgggcctgaagccattctgcctctgcgtcgtggtgctgacggtaagctgggggttgtggcggatattggtggttcaggtatggcgatgtttgccccgcagtacaacatcgagatcaataacgatggcacgaacgggcagataggtccggctgccctgaaggtggtttatgacctcgggaaaaaagcagcagcggactttatgcaacagcagtcccgtgatggtggtctgttctccggaggtggacgatga

SEQ ID NO: 402007 - DNA, 318 bp, Salmonella enterica
atgcggcttgcccgggagttccggcgggcagactggcggcggatgctgtcggaaatgtcggccactgagcttggtgagtggggcgattatttccggatgcagagcttcagtgatgtgtggatggatgcgcagtttgcctcgctgaaggcattgatcgtgagaatggtgtccggcagcagtgatgctgcggtggctgatttcagccttttaccggaagagaacgggataccggagcgaacggacgaagaactgatgcatcttggggaaggtatttccggaggtgtgcgttatggaccagatagccaacctggtcattga

SEQ ID NO: 402008 - DNA, 387 bp, Salmonella enterica
atgtttctgaaacagggcacgtttaattatgaaaaacagtccgtggtgctcagtgagctgtccgggctgcagagaattgaatatctggcgtttgttcagcagcgaacggcaaagtttgatgccgaagagggagaactgccggaggctgaacgacagattgcttttctgcggatggggatggatatcaatgcctggctggtttcccgctcactgtggaatgcggatcagtctaaggatgtagagacgctttgcgcatccgttattacaacatggtcgtatgatgccctgggtgcgggggcggagatggttctgtcgctgagcggtatggggaccattgataatgccggggatgatgagcatgaggcgctgacgccggaaaagtcctga

SEQ ID NO: 402009 - DNA, 744 bp, Salmonella enterica
atgaccacaccaaatccactggcaaaaactaaaggtgcgggaacgacgttctggatgtacaccggcaagggcgatgcgtttgcgaaccctttatcggacactgactggctgcgtcttgcgatggtgaaggatctgcaacctggcgaaatgaccgctgatgcagaagatgacacttatctcgatgatgaagatgcagactggaaaacgacaacccaggggcagaaatccgtcggtgatacttcggcgacgctggcctggcgtccgggtgacagcgggcagaaaaaactggttcagttgttcgactccggtgaagtctgcgcgtttcgtatcaaatatcccaacggtactgttgatgttttccgtggctggctgagttcactgggtaaaaccattgcctcaaaagacgtgatgacccgcaccgtgaaaatcagcggtgtggggcgtccatatctggcagaggagggcactgaaactgtgggcgttaccgggctgacggtggcaccggcatccgccagtgtcaatgtgggagcaaccaccacgctgacctttacagtaaaacctgacggagccagtgacaaagcgatcagtgtgcattcgacagatccacagacagccactgtgaccctgaacggacttgtggccacggtgaaaggcgtgaagcagggcagcgtcagcattgtgggcatgacttctgacggcgattttgtggcagtggctacggtggctgtcagcgccgcaggttaa

SEQ ID NO: 402010 - DNA, 402 bp, Salmonella enterica
atgaaccgacatacacaaatccgccaggtcgtactggcacgccttcgggaacagtgtggagacagcgccacgttttttgacggacttccggcatttgttgatgcgcaggaactgcctgccgtggcggtgtggctgagtgatgctcagtacaccggaaaaatgacggatgaagatgactggcaggctgttctgcatattgctgtcttcatccgggcacaggcaccggattcagagctggatatgtggatggagagcactattttcccggccctgaatgatgtaccggcactttccggactcatcgacaccctgatcccactcggttttaactatcaacgtgataatgagatggccacctgggcgatggcggaaatcacgtaccagatcacgtacacgaattaa

SEQ ID NO: 402011 - DNA, 579 bp, Salmonella enterica
atgaaggggcttgagaatgccatccgtaatctgaacagccttgatacccgtatggtgccacaggccagcgcatgggcgataaaccgtgtggcacagaaagcggtctcggttgccacccggcaggttgccgggaataccgttgcgggagataaccaggtgaaagggatccccctgaaactggtacgtcagcgtgtccgggtgtttaaagccagtccgtcaggaaaaatgacggccaggatccgcgttaaccggggcaatctgcccgccattaagctggggacagcccgggtcagactggcccggcgtggtggaaaactgcagtaccgtggcagtgtgctgaaggtgggtaaatatcttttccgggatgcgtttattcagcaactggcgaatggtcgctggcatgtgatgcggcgtattgatggcaaaaatcgttatcccattgatgtggtgaaaatcccgctgtccggaccgctgacacaggcatttgaagatgcccgcgaccgcatcattgctgcggaaatgccgaaacagctggggtatgcactgaaacaacaactgaggttatggctgacccgatga

SEQ ID NO: 402012 - DNA, 213 bp, Salmonella enterica
atgaaccagaatgatatcgaagccatgattcagcgttatacggaagctgaaatggcggtgctggacggaaaatccgtcacctttaatggtcagcagatgaccatggaaaacttatctgagatccggcagggacggcaggagtgggagcgccgccttgcggctctgattacacgacgacgggggcatcctgggtaccggctggcgaggttctga

SEQ ID NO: 402013 - DNA, 177 bp, Salmonella enterica
atgagggacaaacccgcgaaccataaacgcggtaaaaacccggtgtgcatcgtttttgattattcccgcacactcgcgcagaaggagttccccgtcgggctacggtctctgttaatacgggaatacggcgacgatacagcgcatgatgtgtcaggcttgaatacctttatccgttaa

SEQ ID NO: 402014 - DNA, 498 bp, Salmonella enterica
atgcctccatcattacgaaaagcagttgctgctgctattggtggcggagcaattgctatagcatcagtgttaatcactggcccaagtggtgacgatggcctggaaggtgtcagctacataccatacaaagatatcgttggcgtatggactgtatgtcacggacacaccggaaaagacatcatgctcggtaaaacgtataccgaagcagaatgcaaagccctcctgaataaagaccttgccacggttgccagacaaattaacccgtacatcaaagtcgatataccggaaacaacgcgcggcgctctttactcgttcgtctacaacgtgggtgctggcaatttcagaacatcgacgcttcttcgcaaaataaaccagggcgatatcaaaggcgcatgtgaccagctacgtcgctggacatacgctggcggtaagcaatggaaaggcctgatgactcgtcgtgagattgagcgtgaagtctgtttatgggggcaacaatga

SEQ ID NO: 402015 - DNA, 216 bp, Salmonella enterica; identical to SEQ ID NO: 33067

SEQ ID NO: 402016 - DNA, 864 bp, Salmonella enterica
atgaagaaaacagcagtcttgattgacggcggctacttcatccgtcggattgattactttctacgaaaacatttccctgggcatgagttagacagccaacaacttgttaaaataatctggcgaattgttaaatttcatgtagaggttccacatggtgctcacgctgaccgtgaaccacttgagctttaccgtatttactattacgactgcccgccgcttgataaacagattaagtatcctttgcctgatggagacaacaaaaccccatcaactaaaaacttcaagacacatgctccgaatgttttacgaaacaagcttcatgaggagctaaggaagaatcgtaaaacggcacttcgtatgggtgttctttcaaacgtcggcaactggcaaataaaagaacatactcttaagaaactattacgtaatgaaattcaatggtctgagttaactaacgacgatttctactacgaatataaacaaaaagccgtcgatattaagcttggtatggatataactatccttgctcatgagaaactagttgatgtgatcgtcctgattgctggcgatgctgatttcgttcctgccgctaaacatgcccgtataaagggtgtggattttatcctcgatccaatgaaccaacaagttcctccctcactggcagagcacgtcgatggagtgcaatcgagcaacattgttgttgcaattgctgatatttgcagaatcgtcccaacagtaaaacctgattggtgggacgattatattgacagacgcaaagagaaaaaactcaatcgtcaaaagaaaacaaaatcatctaagaacgagcccaagaaaaaaacacttcaatctgaaacatccccggcttaa

SEQ ID NO: 402017 - DNA, 261 bp, Salmonella enterica; identical to SEQ ID NO: 39042

SEQ ID NO: 402018 - DNA, 648 bp, Salmonella enterica
atgaaaatcgccgatctcgctgaagcaataggagtggatgcggcgaatatctcgcgcctcgaaacaggtaagcagaaacaattcactgaacaagccctgagtaatattgccaggagcttaggtgttgatattgctgatctctttacctcagacctcaaaagtaatactgtatgtaaaaacagtattagtgaggatgttgcgcaggtgaaggatgtattccgtattgaaatgctggatgtcagtgccagtgcgggaaatggccttatccagggcggtgatgtcattgatgtgattcatgccattgaatacagaactgataatgctgtatcgatgtttggtggacgaccagcaaatcacattaaagttatcaacgttcgtggggacagtatgtgtccaaccattgagccaggagatctcatcttcgttgatatcagtatcaatcagtttgatggggatggtatatatgtatttggttttgatgataaaatttacgtcaaacgactgcaaatgatacctgataaactgctggtaatttctgataatcagatttaccgcgaatggggaattaccagcgaaaacgaacaccggtttatggtctttggaaaggtcttaatcagtcagtcacaaacccttaagcgacacaattaa

SEQ ID NO: 402019 - DNA, 1224 bp, Salmonella enterica
atggcgctgtctgatgcgtggttgcgttcagtcgttggaaaggaacgtgataaggttttggttaaatccgatcgtgatggtctgtctgttagagtatcaccgaaaggtcgcgtagtgttccaatatcgttatcagtgggcggggaaaggtgagcgtcttgatatcggaacttacccggcaactggactaaaagaggccagagaagaagttatccgtcttcgtggtgaactcgagtcaaaccgcaatccacgattggtcaagcaggctgaaaaacgaaaagctactgaagccatgacggtagagtctgtgatccgtgcttggtatgaagcatattgtgtaaaaaataaaaaaggttctgaacagatactccgctcgtttgagctgcacctgttctctaaaatcgggaatatccctcacgatgcagctacattgcatgattggttagaagtcctggagcctcttagcactaagactcctgcaatagcagaccgattgctaattaacgcaaagcaggcccacgtctgggcgtataagagaaagcttattgaaactcgcccgctgtcggatatcacgggtaaagatatggatatccgtaaaggtcagaagaaacggtttctgacacatgatgaaattaaaatcctttatgctgcgatcgatggttctcgaatggttcctaaataccgggccttcattaaactattgctgcattttggctgccgtagttcagagctaattaccgctagggtggatgattttgatttcattaataaggtatggactgtaccgccagaacgacataagacaggggatataacaggtgaaccgctaaagcgccccattattgaaccggttgaagagcttataaagtacgttatctctatgaacaatggttccgatatgctttttactaaggaaggatgtagggaacccgttggtcggacatcattgcagtcgctgccttacaatttaatgcagtacgcatggcggcgtttagggtatcaattcccccattggtctcttcatgatttgagacgaacagcacgaacaaacttttctgatcttactgcgcctcatattgcagaaataatgctcggtcataaactgccaggggtatggcaggtttatgacaagagcgattatttagaagaacagcgtaaagcttaccaggcatggtgggagagagttgaatcgatcgttacttgtactggttcagacagcaactga

SEQ ID NO: 402020 - DNA, 1323 bp, Salmonella enterica
atgggttatgcgcagaagccattcattgcaaatgtgatattactaatgtgctgtatggccggagggcagtctgcgctaaccctggctgcagaatctagtacgcaacaggttgatatgaagatgaatactatgccagagacaattaatgccaataagatgccacgtactctttttgtgggaacgtatggtgatgaacatcaacccggagggatctattctctacgtcttagctctgatggaaaaaaaattgagcagttgaatcatttggcaaatccaaaacttgctggatacctaatgtacgatcctaagactacaattttatattcggtagacgagcgtaaaaatgatgggcgtggacccgtggaacccgctgcaagtgttatggcgttttctgtaaacttagaaagtggtcatttaagtcttttaaatgagcaaattgctccaggcccacgtccaacttttttgagtcttgatagtcataatggtcgattatttagtgcaaaccatggtgatttcgagcatgtagaaaaagtagtttttaaagatggaaagtggggatcagagtatgtttatgatgattccactgtgattatgtatgggctaaacaaagatgggtctatatctggaatcaatgatttagtgattcttcaggggcagggtaaagaccctaatcattcgaaacaagctggaggccatgctcaggctagcccccatgctcatagcgcagttatttcacctaacggcaaatatctccttgtttgtgataaaggcacggatacggtcttagtttattctgttaccgaaaaacttaatctggttaatagttataaatttccagatgaatcggcacctcgacatttggtttttgctgataataagcatttatatctaaatcttgaaatatcatctgaattagcgtcaatggaatttgatactaaaactggggggttgacattattggataaaatttcaaccttagacaatagctatcgtggtcataatgagcctgctgaaatcaggcttcatccaaatggtcgttttatatatgtaaataatcgtggcgaagatactattgcgtggtatagcattgatgaaaaagcaaaactaacccgtattggggcagtcaaattggctaagtcaatccatccaggattggcatcccgtagttttgcttttgattctacagggcagtatttagtttctgcagatcgcccagataataaagttaaagtttataatgttaatgctgatactggtgttttagattttgtctctgatttcacgttgccacaacctgcattcatagtatttgccgaaaactaa

SEQ ID NO: 402021 - DNA, 1110 bp, Salmonella enterica
atgaaacgtggtgtatcgctctatagctatcagcagtctcagttcttcaaagaatctactctggagtcgcaacttaatgaagttgccaataatttgtatggcgctgatggtattgaactaatcgatgagatgtcaattaagtatcctgttccagacaaagcattcatgcagcgctggtataggcttattgatattcatggccttaatcctgttgctatggatgttagtatggatgtactacagttccgatctcatgtcatgagccatgaagaatgtgctgaacgtttgagaagtgatatcaagctggcgaagacattgggatttagcatagttcgagtactatctattgttcctctggatgttatggtcaaagccctgccattggctgaagctcttgatattcgcatcggtaaagagattcaccagccgatgtctttagaaggacagcaggttagtgagataatcgagttcaatgagaaaaataatactcggcatttaggtattgttcctgactttggcatttttggtacgcgcccctctgaagctcagttaggatggtttgaaagacgaggtgctaatcccgaggcttctaaagcagcggttaaactagctgcaatggttaaagcagatcctaaaacattcaatgtagcgaaccaaacagctggaaatgttcgagcagcattcggacagttcattactactggtgaatgtaatgatgaattaaaaatatgtttcaatgcggtgaaagcattggctgagggatttatcaaacaaccaaaacctctagactatacggtagttgctgaagggctgacattgtctaatacttcagctgagacactccgcgaaatctgccctcatatcactcatattcatgcgaagtttaacaacatgtcagaaatacccgacaaaccaggacaatatcaggatattgcgattgactatgtgtctgcaatcgatgcactacgccggggggggttcgaaggatatctcaattcggaatatgaaggacaacgctacttccaggatcgtggacgtgagtacatgatgaatgaatttgagcaagttcgccgtcatcaggaaatgttgcgtcgtttgattacagcttga

SEQ ID NO: 402022 - DNA, 453 bp, Salmonella enterica
atgtttgataattatcttattcgtccaggtagcctgagaaatgaaaaggtgaatggtgaggtggtagggtttactttagcggtgagacatgccaattacagagggtgttttgtttctttacataatggctattatctctctatagatggggttgaatatcctaattcagtgcagtcattcgagatcaatggaaaagcacctcgcagctatgaagaattatcacatgctgtttatgaacactgggattatggcgatgatggtattttacatgtgtcacatcccggagggttaaaaccaggaaaacatacaattttattccaacaatctgtccttgctgcttatggatatttgcctacagatgaagagtgggttaagaatccaccagttccaggcaatggtgcaggatcggataaaacaccgcacattgtaaaatttgaaatgattgttgaataa

SEQ ID NO: 402023 - DNA, 1272 bp, Salmonella enterica
atgcccagttacttaggtgaagataatttgaaggtagagagtgcatcggataacaatcaaataatgtctgatgggaaatttagttcaagctctacctttatgtttgccagacttagtgttctgatgttgttgcaatttattgtttttggatcctggtttgcaacattaggattggttttatttacttataaactaggaagtataattggccttgcatacactttatgtgcagtagccgcaataatttcacctttggtctttggcgctgtaagtgatcgttttatttcatctgagaaaattcttggattcttacatgttattggtggtgcaatacaatttatgttgccggggctagtagcttctggaaatggtagtatagcacttattgttattttcctttacatggtattctttcagccaactcaaggtttagttaattcactatcttttcaacatctaggaaatcggggtaacttatatccttatctacgcttatttgcaactggtggttgggcaatcggcggtttcatcgtaggaatacttgggtattcgtctacaattgggattttctatgtggcaggtatttctggtatattactgggcgggtattcattcactcttcccaagactaatccaaaagtaaaaaacattaaatttaacttattagacgctttaggatttaggtcattagtgttgttcaagcataaaaattttgcaattctgatgatttgcgctctattaacctctatatcgctaggtgtttacaatacgtatgcttctccttttttaggctcccttggtatcaatggtgttgcatcagtaatggccctaggacaattgtctgaagttgcattcattgtttttgtaccatttgtcatcaaaaaagttggaatgaaatgggcgcttctaattggtatggcaatgtggggtattcgctttattctttttattttagccgccaaagggcatcattggatggcatttgttggtataggtttacatggaatttgtaatgattttttcttaattgtgagtgcaatgtatatagaccgtttagcacctcatgaaatgaaagtacaggcacagagttggttaataattgcaatctcaggatttggcgctgcatttggctctcttatctcaggatatgtttactctattactataaatgcggccattgttcagtcttggattatattatggtcaattccaatatctattgccgttgtaacaagtattgtctggtttattggttttgaagaaaataaataa

SEQ ID NO: 402024 - DNA, 177 bp, Salmonella enterica
atgaatgaatggtggttttcatttaacagcatgataaatatagataatatttgttttaagacttttgggagtgaaatgtggggaattattattattcaaaaaatgaagcatagatcacaaaaggaaaagttcttcattgtgatattttgctatttagaatttattaagcaccaataa

SEQ ID NO: 402025 - DNA, 1125 bp, Salmonella enterica
atggtaaaaaaactacgaattgggattattggttgcggacgcattgctgttgttaaacattttcctgccttcgccaaagcaaaggatcgtgttgacttagttgctttttgcgacatagagattgaacgggcgatcgaagctgctgagaagtatggcgttcccggtgctgaaacatataaagactaccgtgacctgttgaaggacaaatcaattgatgttgtctacattcttactcctaacaattcccatagccctctgacagtagatgctcttgaggcaggtaagcatgtcctctgcgaaaaaccaatggcggcaactacagcagatgcgcagaaaatgctggatgcggcaaaacgcacgggtaaaaaactcacaattggataccaaaaccgtttccgtaaagacgttcaaatcctgaaacacgctagtgacgaaggtgaattaggtgaagtttattttgccaaagcacacgcggtgcgccgtaaaggcgttccaacttggggtgttttcttggataaagaaaaacaaggcggtggcccactgatcgatattgggacacatgctctggatatcgcactttggacaatggataactacaaaccaaaacaggtatctgggtcagtctttcataaaatgaaagacaactatgaaggcaacctatttggaccatggaacactgaaacaattgatgtagaagactctgcattcggtttcattaagatggaaaatggagccactattttccttgaagcatcttgggcactgaatattttgaaaccacgtgaaggtcaagtgacattatgtggtactaagtctggtgctgaactggttggtgatggggctgcagcgccaacatctgcagtaaatggtactggtagtgtcgcattcaacaccgcccgcttcggagagctagtagatatcgagccgtttgttcttggcggtcctggccctgctgatctcggacatgatcctttccgcgtggccgatgctgaattggcagcttggatcgatgcaattgaaaatgataaagaaccagtggttactgcccagcaagccttcatcgttactcaggtccttgaagccatctacaaatcggctgaaaccggacaaacaatacaactgtaa

SEQ ID NO: 402026 - DNA, 1056 bp, Salmonella enterica
atgaatactctcaaaggtcccggtatttttctttcgcaatttatagataatacagccccattcaacactcttgaaggactggcaacttgggcatccagcctgggttttaaagcattacaaataccttgtaatcataagcacatcttcgatattgagcaggcagctggaagccagcaatattgcgatgatgtcaaaggcatgcttgctgaacacaatctacagatcagtgagttatcgacgcatctggaaggacagttggtggcggttcatccagcttacaatcatccttttagtggttttgcgcctcaaagtgttgcgaacgatccaatagccaggaaggaatgggctattggcattttgaaaaaagcagcacaagcatcagcacgtcttggacttgatgcacatgctaccttttctggctctctagcatggccatacttatatccttggccacctcataattccgagctttttgatgaaagctttaaagaactggcgaaacgttggctaccaatactaaatacattcgatgaatatggtgttgatgtttgctatgagattcatccaagtgaagatctacacgatggtgcaacatttgaacgtttccttgatgaagtcaattaccatccgcgttgcaacatccttttcgacccgagtcatctgcatctgcaacagatagattatcttgcttatatagatatttatcacgagcggatcaaagcatttcacgttaaggatgctgaatttaatataaatggtcgcagtggtgtatacggcggttatcaaccttggatacagcgggccggacgtttccgttcacctggtgatggtcagattgatttcaaatcaatctttagcaaactcacccaatatgacttccgtggatgggctgtacttgaatgggaatgttgtctaaaaaatagtgaagatggtgctcgtgagggtagccgttttattgaagatcatattatcagtgtatctaaccgatcctttgatgattttgcagaaactgaaagcaatatatctgaaataagaaagatcttaggaatattctga

SEQ ID NO: 402027 - DNA, 1668 bp, Salmonella enterica
atgaaaaaaattttttatgatgcgattgttatcggctcaggagtagcgggcagtatcgcggcaaaagaattaacagaaaagggaatgaatgtagttttgcttgaagcaggaccatttttgggtgaaaaagattttcccatcaccccgggcaataacgagaagataaaaaaaatagatgcacttgcccgctttaaaattgcattgaccggtcaaccactacaggctcgagcaacctacatgagcaatgagtaccgccacctgtttgtaaatgattggaaaaatccgtatacaacaccaaagggccaatacttcttatggatacgcgggcgccaactcggtggaagactccatacgtatggccgtgtattgcaacggatgtctaattatgacttcaaagcagccagttatgacggctatgggcaagattggccgattagttatgaggaactggcaccatggtacgatcacatagaagaattccttggtgtatatggcacaagagaaaatataccgaatcttcctgatggtaagttcattcaagctccaattttgacaaaaccagaaaagacctttaaaaataagattgaatctctatggcctgagcgcaaagtcatcagttggcgtttctctgccccaaatcttaagcgaattcctgtcggtgtacaggctgcgatagatacgggtcgtcttgagttgcgaactgatgctgtagcaaaacaaattgatgtagaccctgtcagcggtaaagcagttggtgtaacttttattgacagattgacaaagcaggagcatagcgtccgtggcggcatggttatgctatgtgcttctgcaattgaatctgttcgcttattactcaattcacgttctacacgtcaccctgaaggtattggtaattcaacgggattattaggtcgttattttttagaacaagcaccgagtcttatagctggttcagtacctgacagtatgggttgggaatatgactcatcacttccacaagacccattctgtagacccgcaggcggcattgttattccgcgctttcagaacgttggtgtccaaacaggtaagaactatcttcggggttttgcgtaccaaggtgttatcggccgtggttatgtgccacctgatagtcccgcacaatttgggcttatgggctttggcgaaatgctacctcgagcagaaaatcggataaccttggatgctcgtaaaaaagatgcatggggtatccctgctccacgaattgattgttcattcggaaataatgatcttattgtaatgaaagaacaactcaatacaattaaagaaatggtctcagcatgtaattacaaaattgatttcgcaggtactgctcttggacttgaagatgcccgcaacgtaatgcctgatgaatcatttttaatgaaaatgatcttccgactttcttttaagaaaagtgttggccttggagctgcaatccatgaaagtggtggagcaagaatgggagaaaccccgaataactcagttctgaataattacaatcagtgttgggatgcaagtaatgtcttcgtaactgacggagcatgctttgttactagcggcactgttggtccaacattaaccatgatggcgattaccgctcgcgcctgccattacgctgcaaaccaatatatgcaagggcaactctaa

SEQ ID NO: 402028 - DNA, 969 bp, Salmonella enterica
atgtcgaaatttatccttgttggtgacgtcggcggtacaaacgctagacttgccctgtgcgatatggctgatggagctatctcacatatccatacctattccgcaaatgattacgccactcttgaagatgtcataacacattatctagaaggtcagcgggttacagtacatgaagcttgtattgctatcgcatgtcctataaccaatgactgggtcgatatgaccaatcatagctgggcattttcaatcaattcaatgaaacttaatcttggtttgaataatcttgaagtcataaatgatttcaaagccgtttcgatgtcgattcctatgttgcacgacacagacctattgaaattcggtgggggacacgttgaaaaagataagcctattgttgtatatggggctggcacagggttaggagtttgccatctaatacaaactacacagcaggttatcagtctgcccggcgaaggtggtcatgtagattttgcacccaacagcgcagaagaagaccttatcctttcagccctaagatcagaacatggccgtatttcttatgagagagttctatccggacctggccttgttaatctgtatagaggcattgtcaaagtagatggaagaattccggaaaaactaaagccaaaagatataacggatcgagcattaaacaatgaatgtaccgactgtcgtcgtgcactatcgctattctgtatattattaggtcgctttggcgggaaccttgcactgacaatgggaacatttggtggagtttatattgctgggggaatcgtcccgcgtttccttgattttttccgttcatccggattcagaagtgccttcgaagataaaggacgattcaataattatcttaaagacattcctgtttttttaataacacatcctcaacctggattattaggtgcaggagctcacatgcgacaattgctaggatattcacttaactaa

SEQ ID NO: 402029 - DNA, 720 bp, Salmonella enterica
atgattataggtccatatataaatagcatagcaattatcgttggcgcaataggcggaagcctattatcgccctggatcccccgacgccttcacgaaggtatgccactaatgtttggcatttgctcaatggcaatgtcagtaatattaataatggatactattaatatgcctgtaattgttctagccggtatccttggagcccttactggtgaattagtatcacttgaaaaaaagataaacaatattgcaacaaaggcaaaaaactgtatagagtccatcttaccaaaaccacgtggcgacattactaatgaggaatttttaaacatctttgtagccttaattatcttattcggagccagtggtactggtattgttggcgcaatgaacgaaggaatgaatggaaatagttccgtgcttattaccaaagcgttcatggattttttttgcgccattctttttgctacacggcttggcttttctattataatcctttttatacctcagttagttattcaactaattcttgcctatagtgccgtattacttcttccgttaacgacaacgtccatgcgagctgatttttatgccgttggcggaatggtgatgatggccactggtctaaggatatgtggtattaaaatgttccctgtagcaaacatgcttccagcactgctatgggcaatgcctctctcctggatttggaactatatttcgaactaa

SEQ ID NO: 402030 - DNA, 1173 bp, Salmonella enterica
gtggaaaataattctatcaaaaaacgaaaaagtgtttccttagttcgagagttattactcaatgaaggcccacactctcaggcttctatatcgcgtaaaactggtttgtcgccagctatggttaactatgttgtaaaaaaacttcgcgaactcggcaatgtcgatattcattgggttaatggtcgtgaaggtattgtttcactaatatctaagacaggacggtatatttctatattagtagcggttgataaaattagctgctcattgtttttattcgaatcagaacagcgatttgattatgagtgctttgtggaccaaaattcacctgaagaaaataatcctcatgctgtagttcaaatcataaatgatcttttaaaaaatcatgagctaagtattggtgatatttccggggtcgcgattagtatcgttgcaccattggatatcaacggtgaaactattatttcatggtctgcaggccggttacctggatggtgcgatattaagataaaatctttttttgagcgtgaattgcaattacccattatcattggcaatgatgctaatcattcagcattagcagaatggtcatgggggagtggaaagggcgttgaaaactttatctatatatcctgctcccgccagataggtggaggtatcattataaataatcatatttacaaaggggggaatggaatggccgctgagttcggtcatctgattatcgataattctggagcggtttgtttttgcggatgtcgaggatgcctcactactttcatttcagaacgcgctattataatgactctctcaaaatcagagatctataagaactctctgaccgaaataattcttgctgctgcggaaggtgatgtagcatgtcaacgagtgttatttgatgctggcaggcatctcggcaaggctttggcaaatattgttaaaatattggcaccagatgtgatttccattggtggtgatttatccaaggcgggagctattttctttgacagtgttatctcgacgatagaagagcataacctcggaacaacttcacccacagtggacttaaaatcagctcactttgctgatttgccagaaattctaggtgggattgctgctctactggcccaaaaaaatcaggggataaacaatcttcctgattggatgaaatcgtaa

SEQ ID NO: 402031 - DNA, 870 bp, Salmonella enterica; identical to SEQ ID NO: 385000

SEQ ID NO: 402032 - DNA, 216 bp, Salmonella enterica
atgggcattaatatacctgaggaactttcaattatcggatttgataatataccaattgcaaaaatgttgtcgccccaacttagcaccatacatcaacctgcagaaaaaataggtgagatcgctttaaaaatcttagatgataaaattaactttccagaaaaaccaagtcaggcggtcatattagaatggcaatttatggaaagaggaacaaactag

SEQ ID NO: 402033 - DNA, 417 bp, Salmonella enterica; identical to SEQ ID NO: 15292

SEQ ID NO: 402034 - DNA, 633 bp, Salmonella enterica
atgcctcatgtggcggccaggacggccagccgggatcgggatactggtcgttaccagagccaccgacccgagcaaacccttctctatcagatcgttgacgagtattacccggcattcgctgcgcttatggcagagcagggaaaggaattgccgggctatgtgcaacgggaatttgaagaatttctccaatgcgggcggctggagcatggctttctacgggttcgctgcgagtcttgccacgccgagcacctggtcgctttcagctgtaagcgtcgcggtttctgcccgagctgtggggcgcggcggatggccgaaagtgccgccttgctggttgatgaagtactgcctgaacaacccatgcgtcagtgggtgttgagcttcccgtttcagctgcgtttcctgtttgccagccggcccgagatcatggggtgggtgctgggcatcgtttaccgcgtcattgccacgcacctggtcaagaaagcgggccatacccaccaagtggccaagacgggcgcggtcaccctgatccagcgttttggatcggcgctcaatctgaatgttcacttccacatgctgtttctcgacggtgtgtatgtggggtctgacgctcagtggaacgaaaactcacgttaa

SEQ ID NO: 402035 - DNA, 564 bp, Salmonella enterica; identical to SEQ ID NO: 272946

SEQ ID NO: 402036 - DNA, 372 bp, Salmonella enterica; identical to SEQ ID NO: 272947

SEQ ID NO: 402037 - DNA, 1026 bp, Salmonella enterica
atgagcatcagaaaacagcctaacggaaaatggttgtgtgaatgctacccgaacggacgggatggcaagcgtgtacgcaagcaatttgcgactaaaggcgaggccatagcattcgaaaaccacaccatggatgaggtgaacaaaaaaccgtggctgggggagaaggaagatcggcggcatttgtcagaagtgattgatcagtggcattcactttatgggcagacgctggcagaccccaaacgcctgatggcaaaactcagcattatttgtaatggcttgggcgatcccattgcctcagagttaaccgcaggcgattttacgaaatacagggaagcacggttaaaaggtgaagtaaaaaatgaagatggcgtgcttatgtcgccagttaagccccgtacggtaaaccttgaacaacgtaacctatcatctgtttttggcacactgaaaaagctgggccactggtcagcacccaacccgctcgctgggctgccaacattcaaaatcgcagagggcgaactggcgttcctggcaccggaagaaattaaacgtctactggatgcctgtgctgattctcagagtcccagtttgctgatgattgcaaaagtatgcctggcaactggcgcccgatggagtgaagctgaaaacctgcagggccatcagctatcaaaataccgcatcacttataccaagacgaagggcaagaaaaaccgtaccgtgccaatatctcaggatctgtatgacgaactccccaaaaacagagggaagctattcacgccatgcagaaaagcttttgagcgtgcagtaaaaagagctggtattgagctaccagaaggccaatgtacccacgtgctgcgccataccttcgccagccactttatgatgaacggcggaaacatactggtactgcgcgatattctgggccacgcagatataaaaatgacgatggtttacgctcactttgcccctgaccacctcgaagacgcagtgacaaaaaacccgcttcacaacctcaattggaaacgctaa

SEQ ID NO: 402038 - DNA, 480 bp, Salmonella enterica
gtgaacttgttacttccacgcgatatagttgaagctgttcttaatgataagaaaacaaaaaatgcacgagtggctaagtgtgatggaagtgaattttttctagaactgccaagcatgaatgcagactttcccgcagggaaaatcatcctcaagctaggagattccggtttttacaacaaaaggacaaaaagtctcgagggagcctatggccttaggcatatatgggacaagcatcgtgtcgagataggagctacttccgctgaggatattgtcatctttttggagagcatattattagctggggcagaagtgctcatagatcctaaaaaaggccaaaacaaagcgattgttgtagagtcaggaacggggatgatgatactagaattgaaaaaaccaaacggcgaagacccgtactacagcatcattactgcttatgataggaagagccatccaggtacaaaacttcataccataatatga

SEQ ID NO: 402039 - DNA, 345 bp, Salmonella enterica
ttggcagacaaacgcagcaaaatgctcacgatgtgggtgaccgaagatgagcaccgccgtctgctggagcgctgcgacggtaaacagcttgcagcctggatgcgccagacgtgcctggacgagaaacccgcccgcgccggcaagcttccctcgctctcgccggcgctgcttcgtcagcttgccggcatggggaacaacctcaaccagattgcccggcaggttaacgccggtggtggcagcgggcacgaccgcgtgcaggtcgtcgccgcgctgatggccatagatgccggactcgagcggctgcggcatgccgtgctggaaaagggtgcagacgatgatcgttaa

SEQ ID NO: 402040 - DNA, 387 bp, Salmonella enterica; identical to SEQ ID NO: 15296

SEQ ID NO: 402041 - DNA, 246 bp, Salmonella enterica; identical to SEQ ID NO: 401911

SEQ ID NO: 402042 - DNA, 1206 bp, Salmonella enterica
  misc_feature (1171)..(1180): n is a, c, g, or t
atgggttcacgggaaatcacggtcactgccaattcgaaaaataattactttgcccctcctgaagcgcagaagctaacgctgacctgggattaccgtcctcctgttgttgaccatactctctggaatttcacggatgaagctaaaacaataagtattggtggacaggagatctatacaggagctagaacggtggccgtagccgtcaaagtgcctcaggaagaaactgagggtgagtggtggttaccaaccgctatgacgctaacgatgaatcctgatggggtgtttaagccgacaacaaaagttactttagaagatggtacggttatcgactttaagcaatcctgggcaacaccgctacgtcgtactcttcagcccgtgagcgggccacagaaagtcggcgatgaatatctgtatatctttgacttaacagacttgacgaatggttcttatgccgcctcgttcacggtagagaacaatagcaagaatacctctacgtacaatgagcctgaaagcaaactgatgctttctgataacccaacactgatggtgcttaaggacggtgcagctctggccaaacgagctcctgtgtatttcttaaatgaaattattgttgccgcattccagggccaggccggagtcgcggatattaaagctgttacgatagataacaaacttgttgagctcacccccacgaaccacaaaggcatttattatctgccggttggggatgatctagaagtgaatgctgaccatgaaatcacggtcatagctgaaaacctgtacggcaagattgtgacatttaatactactttcacgtatcaaccaacaggattcacgcttaaaaactttgagaaagacatcacattgtactcacgagttcggcagtataccgatctcatgagtcagacggccggtgataaatgcactctctttactacagaagagaacgcactggcataccttgaatggtatggtgacaaatctgatatcaccgcctgttaccctcagtggaacaatgtgcctgacgggcttgaattttactttaaaggccggacgccaggcctgacagggttcttcaataaaacaggcgataacctgctcgactatcaggtctatatgataaacggcaagggctctaaagctgtatcgtccagaaaccgccatgtgctgnnnnnnnnnngtgctgattacgcagttaccttataa

SEQ ID NO: 402043 - DNA, 246 bp, Salmonella enterica; identical to SEQ ID NO: 401911

SEQ ID NO: 402044 - DNA, 1098 bp, Salmonella enterica
atgatgaaagagaaaaaaacactgctcaacaataatgagaatggaactggcttaccatccaagccctcaattatgagtgaaaataaactccagaacacagtgttttccgctattggcagtgcatccccagctcacaagctggtacagggctccagcgctgccgctttcctgaaaaaccatgaatcacttcttgccggtaccgctgtcagcagcgcattcgcaactcagaagctggcacagggctccagcgctgccgctttcctgaaaaaccatgaatcacttcttgccggtaccgctgtcagcagcgcattcgcaactcagaagctggcacagggctccagcgttgccgctttcctgaaaagccatgaatcactttttgccagtaccgctgtcagcagcgcattcgcagctcagaagctggtgcaggactcgggcattaccgctcttttcaaaaagcagggggggatattcaacgaaaattatttcgctacaagcattgctaaacaattagaaaaattagatgcaaccgaaattcaaacattacaggaagcggccattctattttcacgctcacctcaaggtgcagcaattattgcaacaaatatccatgcagtagaagtaaaagagcctgacgcattaacaaaattaaaaaattatatcgaaaaaagccctataacttcaaactttagaaaattaccattattagtacaactcatcatcatttatcttgtaaccaccatgtattcagtcgttgtggataaaaacaaagaattagcaatgaatttaatggaacaagcgcaacaatatgttagtaaatctatatcaccaagaactcattttaaagaattaacaaaacagttaccccgcgaagttgacattagcacattaaaacacataagaataattactggagaaaatgtccgattacggaacacaccatcaatgcaaggcgatgtattggttaagttggaaaaatatactcccgtgatcgttatcgataaaagtgacaggaaatggttatatgtacaactgtcattcggagaacaaaagatctatggttgggtcaatcgttcctatacaaaagcaataaatcattaa

SEQ ID NO: 402045 - DNA, 165 bp, Salmonella enterica
atgagccacaaggagcgcaacggcgtgcgggcggcgtatgtgcataaggcggagcatctggaagcgcgtatggagatgatgcagtggtggtcggattatctcgacatgagccgcgaggggtacgtcgcgccgtatatttatgcgcggcggcataaggctgcctga

SEQ ID NO: 402046 - DNA, 603 bp, Salmonella enterica
ttgattttggctttaccattctgtaatgctttattttcaatacaacgctatcaagaacagacttatcaaacatctgaagcacatgagttaggctttaaaaacatctatgaattaacaaaagaacgactttcaagagcatcccaaagaattaaaaaagaacatcctgattttaacggtgatctgggattcaaaatatttgaaacagtcaatgattttcgtacaaaagatgagtcagagcttacgttatcgaaccataccttctttgatgatgttgtactaactcctgaacagtatgacaccctattgactacatggtgtgtgtatgatggcagcttgttaacaacaccaattgaagatgtagatcttaacggctacaaagcacacttatgcgatggtcgtttgtatctgattgcacctaacttcaccagtgaagcactgaaatctttacttcaaaagctggattcagacaaagactttgcccctaacaaagttgtgttttatggcagcaactttgaaagtgcgaaacagatggaacttaatgaagcactaaaaagttatgctaataaaaaatctattgatttagatttggtggtaaggaactaa

SEQ ID NO: 402047 - DNA, 750 bp, Salmonella enterica
atgtcaaaaaacaaaggaacagattacttttactttaaacccttccgttctggttctgttagctttccacgaaaaaatgaagctatctatgtcatagatgttttatcaagagatgatatagtttactttgatgaatatgaaggtttaattttcattctagaagtcaaaggcattggcggaacatccacagatgctcaatgttcgcagatttctaagatagagttgcgtagaagaagacaatatcctgaaaaaaaatttaagtctgtttatatagtcaatcatcaacgctatagagaacctaaagcaagacaatcgataccttttacatcagaacagatagaaaatgccgaaatgacttatcggggcatgacgttcacatatgaactctttcatgtttatcatatgttagaaaagggtattctgcggaaagaagatgtaagagaggcatttaaacaggatggcgttattgattttaggcgtagcatcaagccattaaactttaagacctgttttaaaaaatacaatgcttactcatttattcttgacggtacttttagtatcacaaaagcagataagcttgctatacaagataaagacgatcactggcatttacttagtatcatcaatatccaagttgatagtatcgatgttgatgaagcaagcgaaggcagtgcagccatacaggtcgaacagcttgtagcaggggcaaagtcatactatctgataaagcaatatcaaaagccccgttag

SEQ ID NO: 402048 - DNA, 429 bp, Salmonella enterica
atgtaccccaatctggcaaaggcttatcctacaaataaactaccggatctacggggtgaatttatccgtggctgggatgacggacgtggcgtggatgcggggcgagccttgctaaggcttcaggatgactcttttgaagcgcacaggcatgagtcctttttttatgcgggtatttcacgcaatgaaatcccattaaaaaatcttccaagttcagacgagatgctgactttaagttccacaactaatgccttgtcaccggacggtattgatgccaccaattcgttaattggtaatgacgattacaactgtctgatcgaagggaataaaaataacaaacgaacagcaacgggtctaagtaccagtattgtcggcgcaactgaaacccgcccccgtaacattgcgtttaattacatcgtaagagcggcatag

SEQ ID NO: 402049 - DNA, 369 bp, Salmonella enterica
atgtaccccaatctggcaaaggcttaccccacgaataaattaccggatttacggggtgagtttattcgtggctgggatgacgagcgcgggattgatcctggtcgccagttgcttgagtggcagaaaggtactttggttggtggtagagatgacaatgatgccgcagttgatatttcatatatgagtaacggaaatagtattgattacggtggcgataaaacattttcaacgaattaccggagtgattatttatggtatgcaattctgggtaacgtcactggtcgtgccaaagctgctttaagtgggtccttttttaatgtaactcgtccacgcaacatcgcctttaactacattgtgagagcaacatag

SEQ ID NO: 402050 - DNA, 141 bp, Salmonella enterica
atgctaatacaagttctgctggaaatggtgatgatgaatcgagtaataaaacaagttcacctaagccaactgatggcggtcaagatattacaagtttcaactctgacaaataaaaaacacgttaactataaaaggggctaa

SEQ ID NO: 402051 - DNA, 1683 bp, Salmonella enterica
  misc_feature (1049)..(1058): n is a, c, g, or t
atgaatgctcctatacgtatggtaatagactggaacgcgaagccaggaaacggctatcatttttatgatgaaaatggtaatgaagttgggccgctttaccaatttattaaagatgaccaccgtcgtatggttattgattgggatgcggagccttccaatacagaagtaactcttgatgaaaatggagatgtaatagaatggacagatgaaaatggcattatgtatgatgcattcggtaatgctatccccaccaagatattatgcgcaattgaacaagaagaaataaaacttcaatccgaaaagcggttacgccctataattgagcatttatttaatcgaaaacaagtgggattcctttatggtgaatcaaatacaggtaaatcatttgcggcactatccttattaaactgtgttgcacaaggtaggccgtggtcgggtttgcgtgttgctaaagaatgccatgctttttattttgacggtgaaacaggcgtggaagttaaagacaggaataccgcatggagtaaaaaatttaacggcggaattaaaaatgaaaggatgcatattctatcaccgcaaataaatctttttgatgtgggtgttcaaaacataattattagcgacataaatagcatcaccaataacaaagggggcatcatttgctttgatacactttcttcttttctggcgtattacagcaaacaatgtattgatgggaaaaccactttagacatggataatccagatgaaaatgatgctattgcaatgcgcaaactggtttcaatattaaaaaggattgcggttgaaactaattcctttgtgcttatggttcaccacggcggcaaagatgcagctaaaggcatgaaaggcgcaattacattaaaaaatgactgcgatacggtaattaaattagcggctagtgatagacaaactgaaggtgaaggcattacgttttcagtgtcattaaccgtggaaaaaaaccgcagcgccgcaaagcttccggtaatggaattcggtttatgcttagaggataacggtattacacaacaagnnnnnnnnnnacaagagttacatgaaatcgacaatgaattatgtgactatcccgatgaaggcgaaacaggctatgaggtaaaaaacagcactaaaacattagtgtttattgataagcctaataagattgatgatactgggaaaactaataaagagggtgcattcccaggtcgaaaacaagctggtgatgaatcacttgacgcgaaaccttcacagataaataaatatgctcaggcacatacgcatcatcatcccccaatgacacaacaacagcaacaggacaaaatagaaatcaatcagagtgacggttatgcgcgagaagtcgcgaaggattttacagaaggagcaaggattaataacaataatcatttcctgtataatttagcacttgagaaattgaaaaaatcgcccgaccaacgagaatattatgaggaaatacacaaaaatatttgtcttaacccctacgacaagacaataaacttagagtgttttttgaatgagagagcacgtgccacaggaaaaagaaaagatgtaataaaaaaggcattaaccataatggttggcaagggaatcatagaaatggataacaaaacaatatcactaccaaaaaaacaagcaccaataatgtcagtttaa

SEQ ID NO: 402052 - DNA, 213 bp, Salmonella enterica
atgaccaaaacagaaaccaagcgccatttacatgggatttaccttgaatggattaaagaaaatatggataccagcgaaaaagaattatctttttatggatatattttccatctcccagatttttcaacttttagatttggtgctgccagcgactatcaacaaacagctatgtgggttagagaatggaatgagcaattaggaattaacagctaa

SEQ ID NO: 402053 - DNA, 138 bp, Salmonella enterica
atgttccagtacatcgccagattgtggcatactggctgcctgaaactctgctcagaaggtcacgccaataaaattattgtctgcctccaacactacgttttccctgatatcggcgcaatggatatttcggcgacttaa

SEQ ID NO: 402054 - DNA, 696 bp, Salmonella enterica
atgtctagatgtacagcaccagtacgtgggcatcgctcagcagcagcgcgcgcagcctgtccggcatgtagtcaccatagtagttaccgtagcagctatctctataatagttatgactcactctactctccatcgggcagtagcgggggaaacagtggtggtgggtccagcagtggttcgagaccgcgttggtcgaaagcgggttcaaccgtgtcatacacccctgtccaagtgcagtcactcacaccaattcgacaaactattgagactcgagcagtagaacaacctgaccttcgagatgttttcctgtgtcacgcgtgggacgaccgacagggagtggccaaagagctacacgatttacttgaggctgcaggtgtcaaagtctggttcagcgagaaagatcttggacttggagttcctatgatgcgtgccatcgataagggtttagctaattcgcgaattggacttgtattggtaactccagcgctgttgaaacggctacccaaagagggcgtcgctgacaaagaactctcagcacttttggcgggtaaccagctcgttccaatcgtgcatgatacaacgtatgaagctctccgcaacgttagccccttgctggcctcacgaagtggtttggacactggggaagattcaatgacagttgtcgcgcaaaaaatcgccgagctggttaccctttaa

SEQ ID NO: 402055 - DNA, 828 bp, Salmonella enterica
gtgctaatcccttcatttttttatccgtattctagtgtcttagaactgtttcctaatgctgctgatatgaacattattacgcaacttactaacaaatgggaaagagcatttatctcatttcacgctccgaaagctaatagtaaaaaagaactgctaacagtaggtagtggttttttaatgatgttgaatggtatgccatttatagtgacagccagtcatgtgattgatgaaattaaggaggttgacgatagatacatcaccattgaaaaacagctctatcaacttaaaaaagcagaaattcatagggataaagaacaagattatgcctttattgaactccctcaggcgattttatccttaaaaaagggttttattttctttagtaatattgttcgaaacgatctcagtcctacttcgacaatgattattagtgggtttccatcatcaaaaaataaattccataaagacaaacccaatacaggattgcagcgcttaaattttgcattccatcactttgaatacaatacatcgaatgaagaattacactttccgtttgattcaagaccaggtaaaggtacccctattaagatggagtctacgagtacgatcacttcattaccatctttagctggtatgagtggggctccgattttacaagtcatggaaaatattagcactggtgcattaacacttcgcgttgtaggtatatttaaagaacatagagctaaaactgaaaaatgcttagttgcaagtacatttgttcaattcgcagaggagatgaataaaattttccaaatagatagcccttacgaagaagctaaggattaa

SEQ ID NO: 402056 - DNA, 2235 bp, Salmonella enterica
atgagttttgtatccacaaataataaatccggtatgggagggctgacgacaaccacgccgccgataaccggagaaagtggcggtgtcaccgcagattcagtcgccggaagcgtggcagatgcggcggaatccgccgtggaacaggctgcgggatcgctgtttggcgcattgccggagccatcaggactggtgaaagccgcggtggcagcggcgcaggctgccgccgctgcaggtatggcgcaggatgcggtatcggccatcgtctctgctgttgcaggcgggccgggggcgcataatgtgacggtcagcggcagcgccgtaccgccgggcgcattactgttcgccagcctggacggcggcgaaacattaagtgaactgttcagctatgtggtacagctaaaaacgcccgacaccctgaatctgggctatgtctccccggcggccaacctgccgctcaaaccgatggtgggcaaagatctgtgcgtcaacatcgaactggatggtggcggtaaacggcatatcagcgggctggtcacggcggcgcgggtagtcggtcatgaagggcgttcggttacctatgagctgcgtatggagccgtggctaaaactgctgacccataccagcgactacaaagcattccagaataaaaccgtggtggatattctggatgaagtgctggcggaatacccctacccggtggaaaagcggctggtggaaagctacccggtacgcacctggcaggtgcagtacggtgaaactgattttgattttcttcagcgactgatgcaggagtggggcatctactggtggtttgagcacagcgaggacagccacacgctggtgctggcggatgccatcagcgcccacaaagcatgtccggactcgccgctggtcgagtggcaccaggaagggctgaagctggacaaggagtttatccacactatcacggcaaacgagagtctgcggactggacagtgggtgctggacgattttgactttaaaaaaccacgctcgcggctggcaaacacagtggcggacccgcgcgaaaccggtcacgcgaactacgagcactacgaatggccgggcgattattttgacaaaggcgagggcgagatgctgacgcgcattcgtatggaagcgcagcgcagccccggcagccgggtgctggggggagggaatatccgcacactcatgaccggttataccttcacgctggaaaactatcccaccgccgaagtcaatcaggaatacctgctgatgcagaccttgctgtttgtgcaggacaacgcgcagcacagcgggcaggaccagcactttaccttttccacccgttttgaactgcacccgacccgcgaggtgttccgcccgcagcggacggtgagcaaaccccacaccaaagggccgcagagcgccatcgtcaccggcccggcgggccaggaaatctggacggatcagtacgggcgggtaaaggtacagtttggttgggatcgctacggcaaaatggatgaaaacagctcctgctggatacgcgtcagctacccgtgggcgggcaaaggcttcgggatgatccagatcccgcgtatcggccaggaagtgctggtggatttcaaaaacggcgatccggatctgccgatcatcgtggggcgtacctacaaccaggacaccatgccgccgtggggactgccgggcgcggcaacacagagcgggatatacagccacactatcggcggcggaccgaccaatgccaacgctctgcgttttgaagataaacccggtagtgaagaggtctggctacatgctgaaaaagatcagcgtattgaagttaataataatgaaagtcactgggtggggaataatcgggttaaggtcattgatcagtcagaaatagccactattggcgctgtccgcgaccataaagttcagtatgacgatacctctctggccggaggaaataaaaccattcagacggtaaaagagttatatctggcagcgggtgattctattactctgagttgtggtgacaccgttctgtacatgagcagtaagggagaattttacgtaacctgtaaaacgttcaatattactgcaacagatgccgatggtcagattaatactataaaagggcagctggatttaaatatgaataaaagagaacccaaagtgggaacatttggtgagtcagaaaaaacagcaatggcagcagtaattaaggaaactttcccacccaaagaatag

SEQ ID NO: 402057 - DNA, 1047 bp, Salmonella enterica
atgttggtcgcattattttgttcaatcatcaaaaaatttgatgaaatatcgacactggaagaattcaacctaacccaaattgaaggtattgtaatcattgatgaaatagatcttaatcttcatattgaatatgcaaaaaatgctgtcccggaacttttacggttattccccaaagttcaattcattataacaagtcattctccattttttttgcttggcatgaaagagtgcttctcagataattatcaaattatcagcacaccaaatggagaaattattcaagaatctgattttgatgagatacaaacagcatactctattttcattgaaagatttcaagatatcaaaaacaatctcaaaatccttgaaaaggatctatataaatcaacaaaaacattagttataaccgaaggaaagactgactggaagcatataaagtctgcacttttattttttcaagaaaagcaagagaaatttattgacttagactttgagtttcatgagtacaatgatgcttcattttcagatgataaacttaatagctttttgacaaatgtcagccaagtgcaaaacacaaaaaaaataattggtatttttgatcgcgatgaaggtaatggaaagcgatatagtaaaaacaaaataaatagtcttggtaataaggtgtatgccatcagcatacctcaaccagaacaccgtaattatcatgaaggaatttgcattgaattcatgtataaggatcaagatttatacagatgtgatgaagccggacgtagaatttatacctcaaaagaatttaatgaaaatggcagattaactgaaaatttagaaattggagtcaagaaccataacaaaataaaagggaaaaataatccagcatttgataatatcatagattcagatgttattgacatctatggtaattcattggcattatctaaaaatgacttcgctgacaatatcttaaataagaacgaaagatatttggatttagacttctcggcatttgaagaattatttgaaacaataagagaaattattaattcttag

SEQ ID NO: 402058 - DNA, 1086 bp, Salmonella enterica
atgcatgatcgtaaccagaccaattacttctacatgttccctgcagtacgtggaatgcaggcaggaagagagttttacattgcgacctgcccattgctgacaattccaaagatttttagctttgatgaagaagaggttccacctgagttgcgggcgcaacgctcattaaataaagcacggatacccgacatggtgcgttatctgttggacaatccagataactatattttttctgcacttaccgtttccgttgctgttgatgtgcattttgaagctcttaatgatgctgggagcctaggaacactacaagtgcctatgggagcccaaattctgattaatgacgggcagcatagacgaaaggctatcgaagaagcattaaaagcaaaccctgagcttggatatgacaacatcccagttttgtttttcgttgatcgtgggttagttagaagccagcagatgtttgctgatttgaacaaatatgcggttagaccgagcccttcgttagcaacactctatgatcaccgagatccaagtgctcagcttgcctgccatttggctgaaaatattgagccgtttgttggtttcacggaaatggaaaaatcaagcatatcatcactttccaacaagctttttacgttgagcagcatcaagcaagcgacgagagcgctactcggtaaagggctgaaagatatgtactcagacgacgaaaagcataaagcggaacgtttctggcgtgctgtgtttggggttatgcctgaatggcaaatggtgcgacgccgtgagatttctccagcgagtatgcgtcaggaatttatccattctcacggtgtaggtttacaggccattggcttgatgggtaagggattgctgcaacatgcgccatataactgggagcaaaagttggaaggtttgagagatattgactggcgaaaggcaaatccagaatggctaaaacgcacgatgctgcatggaaaaatcagcaaatcagcaatatcgatacatctaacttgtaatgccttgaaacagaaactcggcattcctttaaattcagaagaacaaaaattagaagagcaactgaagtcatga

SEQ ID NO: 402059 - DNA, 1632 bp, Salmonella enterica
atgagtcaattgcaacaagtatatgatttagaagtctatgaagactttatcaaccaggaaaattttgctggaagaccgctatctgacttcatttcagaaattcagcgagtttacttggctgataagcgtccatgggttattggatatagtggcggcaaagattcgtcagccgttacaacactcatttatcttgcgttgctggggctttcgcctgatcaacgagagaaacctgtctttgttgtgtgttcagatacattggttgaaacccctgtggtggttgatctaattagccgtacaatgaaattgattgaaaaaggagctgaacgggataatttaccaataacggtgcaacaagttatacctaaagtgaatgagacattttgggttaacctactcggtaaaggctatcctgctcctactcgacagttccgttggtgtactgaacgaatgaagattaaccctgtgagcgattttatacgcgataaggtaagccaatatgacgaggttattgttgtcttgggatctcgttctgctgagagttcttctcgtgctcaagttattgctaagcataaaatagatggaacccgtcttgctcgccatacaacactgtctaatgcctttatttatactccgattgatacctggagtgtggatgatgtatggaaattgttgaggggagcattccgctattctcctaacgatgtagaagagtgggaaaatccgtggggagggaacaatcgcccgctatggacactgtatatggactcctctggtcagggagagtgtcctatggtaattgatgatagtaccccatcctgtggaaactcgcgttttggttgctggacttgtactgttgtgactaaagatagggcgatggaaagcttggtgcaaaatggtgagcaatggatgactcctttactggagtttcgcaacatgcttgcaaatactaccgatccagcacaaaaggataagtatcgtaattataagcgtcgcacaggtaaagtaagttatcagtacgcgaaagagggagaggatatttctgcggataggaagcatgtcccgggcccatattggttgagttatcgcaaaatgtggttggagcagttgcttaatcttgaaaaatcactcaatgctgaagggcacgagattaagttgatcactgaaggagaactacacgctatccgccaagagtggcttaaagatccaaatgaaccggattggaaagattcactgcctgaaatatacaggcgtgttaatgggcatgatctgaattggttgctagatgagcgagtacgtttcgctggggctgatgctggtttactcgtagatctggctaacgaccatggtattgtgccagaaatgatcatgaagcttattgagttagagatttcattcgaaggaatgggacgtagacaaaacgttcaaaagaaaattgaattaattctgcagcaagactggggtacattcgaagaaattcaggagaaacatgccggcgttcagaaaaaaagtcaatttgatgtattattaagtgagaaagaaagtatagaaatgggattaaaagatctcagcgatgatatggataaattagagaaaattttggccactgtaaccagtaaagaggtgaatgaatga

SEQ ID NO: 402060 - DNA, 1047 bp, Salmonella enterica
ttgaatactaacgagattaaagcgttgagactcgatgaaccttccgtggatgaacaacaggtcacgagtaagcaggttgcccgagaagcaaatgtttctcagtctaccgtgtcgctggttctgtcaggtaaagccgagggccgggtttcgctaaaaacacgtcagctggttgaggaaacggcacgacggatgggataccggcctaacctgagtgctcgctcattacgaactggcgtctccatgactattgccctggccgttcctgacgtgaaacagcccttttttggcgaagtactgtatgcggcggagaaactggcggcatcgaaagggtattccgtcatcctggttgacacttcctctgagccgctgtgggctgagcgtatcgttcagatgattgaaagtatgaccatcgccgggtgtattgtttacgcctgtgacagggcatcagacaaggttctggcccgtaccggcaataagattatttacattgaggctgaggattcagatctgtgccacatcgatctgaatgcaagcagtggcatagaacaggttctgcagcacctgacatctctcggtcacacgaaaattggttattttgccgcgcagtataataaatcccttttccgctaccgttttaaggtttttaccgacagagtggcgcttcacaatcttcctacagacgaacgctggtatgtgggctcgacctttgaactggataacgccacagaaaaggccatgcgtctgatacgttctggcgtgacagctatcttctgtgacgatgatcttcttgccggtgcggtgtatcgggcctgtcgccaggcagggcttcgcattccggaagatatgtctgtagtgggatttaacgatatcgaaatggcccgcatgctgtatccggaactgacgacggttgccattccggcagcaggcataggaacgatggcgctggagatgttttttgctaatgtgctggggaataccggtcgtgcgaaccccgaaattcttgaactcgagctcgttgtccgggattcaacatgttcaccggcataa

SEQ ID NO: 402061 - DNA, 525 bp, Salmonella enterica
atgttcaccggcataacaggtaacgctggccagaacgacggcatcctggatgaaattgatggctgtcttgcccgtgtcccgctatgccgcgatcaacgggaacggtttatcgcgctttttgacggagccagccccctggcgtcgcgtcgctctttcccggtgcatgtcaccgcgagtgccctgatcctttctccttcccgccatgacattttgctgcttaaacatcgcagtttcggtctctggcttcagcctggcggacatctggaacccggagagacgcccctgcaggccatgtacagggaaattctggaggagacgggcattcagcgtagtcagctcgtgctgctgaacccttgggctgttgatttcaatgtccacaaaattgacgcaaatgccgccagagacgaacctgctcactggcatgccgacctgtgtatgccctggccgcagattccctacaggtcacgctcaacgaagaatcgcgagcatttgcctgggtgcctgctcgggatccggcggtcgtga

SEQ ID NO: 402062 - DNA, 1254 bp, Salmonella enterica
atgaaaatacagtcaacgctgaaaatcatgctgttttcccagtattttatctggggatgctggctggttacattcgcctcctatgccatggggacacttaaattcatcgggtctgaggtgggttttatctttagttctttgggccttgcggcagtggtcatgcccccggtcgtagggatcattgctgataaatggatcagcgcgaacagaatctatattttttgccatcttatttccgcagcctcgttgtatggcatgtccaccattgcggattccagtgccatgttctggatgatgctgctgaatgccgtggcctatatgccgaccattgcactgtccaacaccatctcctatttctcgctggagaaaaacggacagggcgtactcgatttccccagtattcgcatctggggcacgatcggcttcatcatcgccatgtggcttatcagcttcctggggttcgaagtcagccgtaatcagctgtatatcgcgtcaggcgcttccgtgttcctcgccctgttctccctgaccttaccccgtgtcgtttcgtctgcaaaaagtacgaaaacgacatggctgcagaaaaccggactggatgcgtttgtccttttcagacagaaaaatattgcggtatttctgttattcgcgacgctgctcggatcgatactgcagatcacgaacacgttcggtaaccctttcctccatcacctggccgcgctcccgggcgcggaaaacagcgtaatagcacgctatccgtcagtactgttgtctatttctcagatctccgaagtggtattcattctggccattccgttcctgatgagccggctgggtctgaaacgcgtcatcctgctcagtatgatcgcctgggtcgcccgctttggcctgtttgcctacggcgattttacctccgccatcggggtatccatgctgctgctttccatgatcgtctatggttgcgccttcgacttcttcaatgtgtccggatcgatgtatatggcgcgggtagccggtgaagaaatgcgggccagcgcgcaggggttgttcatgaccatggtgaacggctttgggctctacatcggctcgattatcagtggccacgtcattgattatttcaccgtcaatggtgtacaggactggtcttccttctggctcgtgttcagttgctatgcactcattcttgctgcggttttctggttggtttaccggggagaatctcaggaatcaggccaggtgtcttcagccagtcagtaa

SEQ ID NO: 402063 - DNA, 486 bp, Salmonella enterica
atgaaaaagtccgaactgggaaaactgctgtgtattaaaggaatgctgctagtctcctctgccgccttagccgaaagtaatgaatatctttcttcctggtggcatcaaagtgttaacgttgttggtgcatataataccaaatttggtccgcagccaaataatgatgtgtatctggagtatgaagtctattcgaaaaattcctggctggatttttacggctatgcggatattccaaaaacatttggcatcggaaacagtaacgaccgtggggtttgggacaaggggtctccatttttcactgaaattgaaccccgattttcattcagcggtatgagtggccttgatttgagttcttttctgttcaaggactggtatttcgccaataactatatctttgatctggcacggaataatgcgtcccggcagagcacctggtatatggggctggggacggatgtggacactcacagcccgctgtatctctag

SEQ ID NO: 402064 - DNA, 1152 bp, Salmonella enterica
atgactagtcgtattgaatgggttcgcgataattgccgccttctgaagcagctctctgctgaatacaaaaaaacccgtccctttgaaggcctgactatcggtacggggatccatctcgagccgaaaactgtcacgctcctgctgaccctgaaagacggcggtgcacgcgtggtgtctaccggtaacctgaacagcacgcagaaaagtgccgtcgattacctgcgtgaacacggtgtggaagtgattggtgaagccactcgtgataaagcgcagcatctgaaatatctccaggctgttctggcggaaaaacctgacctgctgctggataacggcggcgacctgttcgcagagtacctaaaagcaccgtacggcaacctgcagggcggtaccgaagaaaccacctcaggtcgtatgcgtctggttgagctgcgccagcaactgaacatgccaattctggttatcaatgacagcccgattaaacagtttgcggaaaatgaacatgctgttggccagagcgttctcgagtcctacatgcgtattactaaccgtgtgacaaatggccagcgcgtaaccgtattcggttacggtgcctgtggcatgggagttgcctacaacttccgtaacgccaacgcgaaggtcagcgttgtggataccgatccactgaaacgtctgcaggctcacctggacgggttcgataccccgtctcgtgaagatgccattcgttctgccgacgtgattgttaccgtgagcggtggtggccgtattatcggcggtgaagacattccattgctgaaaaacggcgtgatcctggcgaacgccggtcacttcccggttgaaatcgatgtcgattcgtttgccaggagcgaacagattgaaaacgtcaatgaatttgaagaaagcattgcctcttatcagaccaagtctggtaaaaacttcaaaatcatcactgaaggccacatgtttaacctcgctggcccgcgtccactggggaactccatcgagtccatggacctgggctttgcactgcagtccctgtgccttgaagccgtggcccgcaaaaaagttaataacacccactgcgtcgttccggtcactcgtgaaattgacgagaaggtcgcgaatatgtacatcgacctaatctatagcaaataa

SEQ ID NO: 402065 - DNA, 261 bp, Salmonella enterica
atgattccactgtcagaagtggcagcgaaagatgagtttctgaacatcaagaacgtgagccgtgatgacattatggcggctcaccgcgttccggcgcagatgatggataacatgccgaataacgctaggggatttgacgatattgatatgatggtaaatgtgtttatgcagcatgaattaatcccgctgccaaaaatattacataagctaaatgattggattggtataaatataataaaatccgagccatgcgtgatttaa

SEQ ID NO: 402066 - DNA, 843 bp, Salmonella enterica
atgaattttaatcgttatctttgtcaagagtttatagaagctgagttgggatgcactgatcctactcagctacaccttttcaaagagcaaattgccaattttacattggtgcaagataaagtgccatctctaaacagtgcgattatttcagatgcttgtgatgtattttttaaatcagctcttagctttctcgaagcactgtttagcttaaagagagggcattcatcctgggcaattgtgaagctatattattcaattttctactcattaagaacttatctcttacttggtggttatgcccctataaaaaatggaaagggtgaaatctactttataaaatgtgaggataactcgtcgccaattcgtatttcaactggcagtattaagggtgaccataaaaccactattaaagctttctctcaattttacccatcacacaaactcaatactaacaccattgattctataaatatttttgaatgggcaatgcagtgtcgtgagcttgtaaattatagaaactcatcttttattgaacctgattatggatatgatgcaatacctggaactttgagcgatgctgaccacattaattacctcataaaacaatacttgaatgatgaatattacacttattgctttgatcgcgagcatagtttactttccaccgcatcagttttgatatttgaagcaatacagaaatttcgcaacttcaatattccatttctaacacgggaaagacaattggttttcaaacagttaattaaaaaatcaggcttaaaaaatgccgatgctttaattgacctattttatagtgatgcagatgtagcttttagtgaaaattaa

SEQ ID NO: 402067 - DNA, 1044 bp, Salmonella enterica
atgaagaaacttagttatcaatgtctcgaaactgtttttggtgacatacccgcttatactttctcaatgaaagtcaaagatcttattccaatgtattacgtagcagtgcgtgggcgcgataatgaagaaggcgctgtacaacgcgtcttaaacagcagaagaatcacaagcattaaaaaatatgttttggatggcaatattttctttagctcattcattctcaactggactaattcagataaaaaaataaaagctaaagacggtaatattgcatttgattttatcccatcgtcaatacaggttatcgacggacagcatcgcttagctggacttgaagaagcaatggaggaagattcggacgttggcgaaatgaacatcctcgttactttatgcgaatcactgacaacccagcaagcggctaaaatcttcttaaatataaatacagaacaaaagccagtccctaaaagtctcatatatgatttatttggcgaaattgaggatgatgatactcatgcgatcaatcggataaccgatatcgcaagggacttaaatgatttggacgattctcctttttataaatcgataaaatttcctggtgcccctcgcggagttggaaatatcgaactatccactatcgtccaatcattgaaagagcatgttaaacctgcaggtacttttgcaaaatataacatcaggacttacgacaaccagcgtaatttattgataaattactttaacagtattaaatattattacgacaaagaaaacatttggaccagtaaaactaaaaatccgtttgtaaaagctgcaggatttgctggtgctgtggactttttaactgaaaagcttatttctcaatgtgtagagagaaaatcctttacagttgacacaattaagtcagttatatctcttgaaaagtcaacgttgatcacgtgggatgaattgaaaaatcatgatggcaaaacagccagaaaacgtgtgaaggagttactggaagaaaacgtattgtcagcgctgccttcgcaggatgaatatgaattttaa

SEQ ID NO: 402068 - DNA, 474 bp, Salmonella enterica
atgacaatcgacaaacgtgcgcttcgtgaagtggcggagagggcgacacaagggccgtggaagttattttctgatatcgatactaaaactttttccatccacaccccgcgagataagcgctgtgagaacgttattaagtggggtgggtttgattgtcagccgaatgctgaggccaacgctgaatttattgctgcatttaacccgaaagttgcgctggcgctgctggatgagttggatagcgccaacggttacgccagcgcatacgaggctgaaaagtggcattaccacggactggctgagtctgagggggaacgggctgatcgggcagaaaagcaagtggaagaattaacgatgtgggttaagcgtctggcccactcgcttagaaacgccaggccgaacagcaagttacacggcgccgcaatggactatctgagccataaagggttaatcagtgtggaggatgtcttgcgatga

SEQ ID NO: 402069 - DNA, 1194 bp, Salmonella enterica
atgagtagaattttacttccatgcatgcgtggagctattggtgattgggtaacatatacatgtttgatgaaactggaagatataggtaatttaatcagatttgctgatgatatacacaaaaataaaaaactatcccaaatgatacagcgagagttaaagaaagataggcaaaaatcaattggagaatatttattaaatgattccgaagcttttttcaatgccattgttgttgcaatatacgaaggggagcctaaatggcatccatttgactcaatacaaccaaatgatatagatacaaatgatatcaacataccagattacgctttagaaagcatgggttatttgagtttaaccaaggaagaaaaaatatttgcattagatgggcaacaccgtttatctggtattaaatatgctttagataaaaatccagaaattgggacacaacaaataccagtaatttttttaccgcattttaacgacagtgccggtataaaaagaacacgaagactgttcacaacattgaataagaaggcaaaaccagttaataaagctgcaattattgctcttgatgaagatgatattagcgcatgcgcaacaagatatttagttgaaaatacggagatattcaatggcgataagataaaatttcaagccagtaataatatttcttatacagatatttcacaaattacaactattggcaatctttatgacttatgccgaattatttgtaaaaatggattaaagatctctcctaaggatatagataattaccaaggtgatgaaaaaagtaaaagtgaaatattttcagttattgaatcaatattcacctgtatgtttgacaccattcagccacttaaagaatttcagtcatctgtaaaccgtgaattaacaataagaaaatacaggaataaaactgagggagggcattttctatatcgtccattagggttaaaaatatatttaatctcaatgttcgaatcaatagagaaaccagaaagtacagataatctcattgctcagtgtgaatccttcattaattatacgcatgacattccattatggttagagagttacccattaaaagatgttgtatgggacaccaataaaaaaacaataattaactttaaagctgaagagcgaaaaagaataataaaagaaatcattatgtattacaattcaagaaaagattaa

SEQ ID NO: 402070 - DNA, 696 bp, Salmonella enterica
gtggctaatggtaacatgctgataaagttattattttcttaccatatttgtgagcatagtgcacaagaagttataactaaatatctttttgtatattattatttattaaggcaggactatgttctaataaaatggaatgaatggaagattaattatatgaatgctcctttggacttagcaagagcccatttagctaatatgagtgaagaagaacggctgaaagcagatattgctagatataaaacaaggcatgtattgtatcctccctttttccaattattaaatgaattacctaacttagaatggaaaaaagtcagtttttctttagatgccagagactgtataccaaaggaaaaaggtgtttatgcatttgccatagatataggggactcgaagctaccagttacttcatatatattatatataggaaaggcaggagatttgaactctcagaatacgctgtggaacagatattatgactatattaaaacacaaaggcgaaacgatcggccgagaattcatgaaatgctgaatttatggaagaatcatttaagttattattatgctgttgtatccaatgatcagtcaactggtgagcttgagaaaacactcttaaatattctcattcctccctataataaaggtgatttctccgcagaaatgtcttctatattaagaggtatgaatatactatga

SEQ ID NO: 402071 - DNA, 207 bp, Salmonella enterica
atgttcaattccgctacgcagggtggtgatatcaccatggatacgtggatagtcgaagtagtaacgctcgttgatgccggttctggcgctttgctgagcgcggtggagcgaggcttcgatttggctaagctggttgagggacagggtcagttcttcgcgctcggtgagtggggcggcgaaggcgggggggcagatccaataatatga

SEQ ID NO: 402072 - DNA, 951 bp, Salmonella enterica
atgcacgactattcattacttattggcaatggtatcaacaacctatccgaaggaaatacttggaatgatgtattaaacagtttaggggagaaatatcatgtcgatatcaatacaaaagataaaccattcccattagcttatgaagaaatatacttcaaaatacttaaaaatgcgggtaataaaaatgccgagattgacattaaaaaccatatcgctgaaaaaataagaactataaaacataacgaaatacataaaaaaatactcgacctcaattgctgcaatataatgacaacaaattacgacctcgcattcgaaggtgctttaaaacaggccccctccacccctgacctgaaaaacaaaggtgtaataaaagaacaacgctatagtattttcagacatcactgcataagcgacaaaaagatttggcatatccatggagatattaacgttccgaactcgattactcttggctatgagcattacagtgggcacttacaaagcatgcgaaattatgtaactacaggaagtcgttactcaaaagaaggatttactgacttaaaacctctgactaacaggctcaatatcttaactgaagaatatagctggattgatagtttttttatcagggatatgtatatcgttggattaacattagattttgttgagatagatctatggtggttgctaaccttccgagaaagaaacaaatatcttcacaaatgtgagatgaatatacacaataggatcatgtattatttaccttcatgttttctcgacaggactcagtataaggatgaagatgtaaatcatttaactgcaaaaatagaacttttaaggagtgtcggcgtacaagtgaattctactttcggtattaatttcacaaattctaaagaagaccaaaaagaattttatctatctgtgataaccgacatccattctcggaaatcttag

SEQ ID NO: 402073 - DNA, 2532 bp, Salmonella enterica
atgatcgattttactaataagttgaagaaaagagaacttcccaaaagaattaatcctatagaaatctacgaatcattagacagaagaagtgaagctgggccattacgcccatcacaaaagaaaattcttgaggaatggtttaataaaagaaaaaatgaaagggacaatataatcaagcttcatactggcgagggcaaaacattaattggcctgctaatattacaatcaaaaataaatgaaacaaacgccccttgtatttacatatgcccaaatatttatcttgcaaagcaagcagttaaagatgcagaaaaatttggcataccatattgtataattgaccaaagcaaaacaatacctgatgatttccttgcaggaaggaaaatattaattacacatgtccaaaaattattcaatggaaaaacagcctttgggctaggtagtaagtcgatacaagttgattcaataattttagacgattcacaagcttgcatagatgctattaagaatagtttcacaattaaagttgataaaaaatgcaaattatattcttcaatattaaacattttttgcgatgaactaaaagagcaaggtgaaggcagttatttagaaatggaaaatggtgtaggttacaatacattgctaccgataccatactggtcatggatcgataaaaaagaattagttgcaaaagaactgataaacaacattgatgataaaagaatttcatacatttgcccattaataaaaaatgatcttcatcattgccaagcatttatatctggtgaatatttggaaatttcacctatcgtttctctaattgattcttttggaacatttagcaaagcaaagcatcgttttctaatgtcagcgacaactcaagatgattctttttttatcaagggattaggttttgatgttgatgccgtaaaaaaaccattaatcaatggtgatctcgtttggtctggggaaaaaatgatattgatcccatcactgattgacgaatcacttgatagagaaaaaataataaattgggttcttcaaccttatgataaaagaacatttggtattgtttgccttgctcctagtttcgccaatagaaaacaatatgagaaaataggtgctatagtctcaacaaccgaaactatttatgagaatatagaaaatttaaaaaaaggaatattctacaatgcatttgtcttcgctaatcgttatgatggaatagacctacctgataattcatgtcgtatacttgtgattgactcaaagccatactcagaaacattaggagataggtatgaggaagaatgccgaccaaatagtgatattatcaacgtaaaaatagcacaaagggtcgaacagggattaggccgcagcgttagaggtgaaaaagattatagtgtaataattattaccggtggtgatcttgttcaatttttaaaaagccctttgactacaaaatatttctctcctcaaacacgaatgcagattgaaataggaagtcaaattgtagggtttgctagagaggaaataaaagatggtgtcaacattgacaatttattcattgacctaataaacaaatcgttaaatcgagatgatggttggaaagaattttactctgagaaaatgaatgaaatcaatatttcggaaggcaatgatgatctttatcatataattaaattagaaagtgaagcagaaaacttattgattaaaggagaaaatgaaaaagcttgtgatatcattcaaaatatctgcgataaatatgcagaagatgaaatggaaaagggatggtatttgcaattgcaagctagatataaatacactctaagcaaaatagaatctaacaaactgcaaaaatccgcttttcaacgcaataatagtctcctgaagccaaaagacggagttgtatacaagaagatagaaaaaataaatgccacaagagccaatagaattataaaatggattgagtcacatgatgattatcaatcactaatgatatctatagatggtatactacaaaacgtgtcatttgggattcaatctgaaaaatttgaggatgcaattcataatttaggtctatctattggatttgtttgccaacgtccagataaagaaattaaaaaaggacctgacaatctttggggggatgttgacggtcaatatttcctttttgaatgtaaaaacgaagtggacgagaatcgctctgagataaataaaacagaagcgggtcaaatgaataaccattgtggttggtttactgaagaatatggtgaggctaagtgcaaaaaaataatcattataaatacaaggattttatcataccaaagtaatttcaatgaggaaatatttgtgatgagaaaaccgaaattaaaactgcttaaagataatattagatcattttttaaagagttaaaagcatatgatattcactctttagatgagactgttattcataagtttattaaaccacataaattggatatagatagtttgttaacaaactataccgagtcaataataaaagctactagataa

SEQ ID NO: 402074 - DNA, 684 bp, Salmonella enterica
atgtccgaacatgcgccaccgccgcctgcacgccgccccggactaattggctggctcgcattgttacccggcgtgctggttggcttttgcctcggcgcatggatgctggcaatagcgctggagtggctgggtgaggcgtttttctggcggaacacctgcgccagccacagtgaacaggtattgcaggccacatggcagtggtggcgaggttccgctggcgcaccagtgtggttagtagaagatctggcgcttgtcagcgatatgttgctgaaagggagcgcagtgctgattgcttcgctcaacgggcaacgtgggatgttctggacggaaaccgtcacttcgatgatccgctgcgcattgctgtcttcggaaaatatcaccctcacctttctgctgcggctggcaattctgttgcaggcgctgccgctgtttgtgctgattatcgtcatcgggctgattgacggactggtaagacgtgacttacggaaatttggcgcaggccatgagtccgggtttgtttatcatcatgccaggcgtatgatcggctccagcctggcagcaacggtattagtgtggctggcgttgccggtttttcttgagccaagagtcgttttgctactaggagctttactgattggattgacagaatcgataatgattggagcatttaaaaaacatctataa

SEQ ID NO: 402075 - DNA, 567 bp, Salmonella enterica
atgcttaagcgtctggcttacctgattgctggcagtgctctccttctgctggtagcggcggtgttctggggctttaaccgtctgaatgccctgacgctggcgcagcaacagacacaacggcagataacacagtggcgcgaacagccgcagccggacagcgattatcgcgagcaggaagctgccgtaaaaaacatcaccgttcgcacggaagcccttgctaaacagcttaacgatgccgccagcgctcagaccgagctgcttaaccccattaacgaacaaatcaaggagctggagagacaggtccagaccctgagcaccagttatcaacacctgcaacaacagtccaccacgcacagccgcgccacggcaaaaagccccgtcacaactccgctttgggccgcaaaggcccctttttctcttatcagcagcgagtttcgcgccgggcggcagttcgccgtcattgccccatccggctatcgctcgctctcacagtttcagcttgtggcccccggcgagttattgctggaacaacagggggagcaatggcgtcccgtctctgccccctga

SEQ ID NO: 402076 - DNA, 1359 bp, Salmonella enterica
atggatcgtaagctatatacaacattacttttactcccccttgtcgtttcagcaggaacaacaggatataggggggaggttctttattttacgggagagcctgataagaacccaaacgccattatttactataaagatggttatctcattgtaaaagatggctatattgaaaaggtaggagagtacaacctccttaagaacattaaggttgatgatatcgttgactatcagagaaaaatcattacccccggatttgttgatactcacactcattatcctcaaatttctatgattagcgagtatggagagcaacttataggctggcttaatatttacactttccctacagaaataaaatataacgaccatcagtacgcgtcgcaaaaagcagaaatttttatagatcagttaatcaatcatggaactactacagctttagtttttgcaacgagttcgctcgcttcggttgatgctttttttgagcaaagtcttaaacgcaatatgcgtatgattagtggaaaagtattgatggaccggaatgctcccgccgaattactggatacgccgcaatctgcctatgaagacagtaaggctttaatcatgaaatggcaacataaaggacgactggattatgccgtaaccccacgttttgcccctacttctacgaaagaagagctacaagtagccaaacgactgttaacagaatttccggaagtgtattttaacacgcatctagctgaaaataatcaggaggttaaatgggtaaaagagttatttccggacaacagaagctatctggacgtttacgataaaaacgggttggttactcataaatccgtattcgctcactccatccaccttgatgaagaggattacaaggttctctctgaaaaaagagctagtattgcattctgccccacatccaatcttttcctaggaagcggattatttaatttcgataaagcaagagaaaacaacattacagttggcctgggaactgatgttggtgcaggcacaagtttatctattctacaaacgatggatgaagcttataaagtgacccaaatacggaaagctttcacggataatcctgaaaagattcataacctcactccgatggaaaacctttatttggccacgcttggcggtgccacagctctctcgctacaggataaaataggtagttttacgccgggtaaagaggctgattttattattctcaatcccatgcaaggccaaattcttaaaggccgtgaagaaaatagcaaaaccattgaggaaacgatttttggcatagaaatgcttggggacgatcgcacggtagagcatacctatgtcatgggtaaaaagatgaaatag

SEQ ID NO: 402077 - DNA, 318 bp, Salmonella enterica
atggaacatataaaaaaagagagaaataaactcactgaccattttgaattaactccttcagtattaaaaggagataagctacaatttaaactaaagaccggagaggaaagatggtttacagtagcgtcgataaaaccagacagtttgatttccacatcaggggacgaatattttctggagcagattcaaaatattaaccgtagaaaaatatctacaatgaaaaccactgttgcaggtttaggaataaccactattattgtaagctctatttttctttttggggcgatggaagctgcatctgccgctttatctgtatag

SEQ ID NO: 402078 - DNA, 459 bp, Salmonella enterica
atgattcaggtaagtagtaagcttatctatcataaatctagctttaacaagctcaattacatttggttaaaaaagatttatttatatattaatgcctggtattcctcatgctttcttggagttaaaatgattcgacatattttgtttatcacatttaataataatgttttgccgggtgaaattgaagtggtgagatggattttcttgcgtattccaatgtttgtggaaggggttactcgtgtagaatggggtgtcaatgacagttctgaaaataaaagttctggccatactcactgtgtgttaatgacgtttgctgatgactcagcacggcagaactatctgccacatccagttcatcaggtgcttaaatctattttatgtcctgctctgcaggatatagttgtatttgattttactctattgcctgaaaacagtgctgagagtgagtcaacaagttag

SEQ ID NO: 402079 - DNA, 924 bp, Salmonella enterica
atgcgcagagtgactatttttgtgttattcatgctggttacactgacctggggtactacatggctggctatgcgaatagcagttgaaacaatccctccggtgtttgcaaccgggatgaggtttatgtttgcagctccctgcttaattcttattgcatatataagaaacaccccgcttttatttccgccgggacaacgtttgtttcaggttgtgatttgtgttttttatttttcaattcctttttcattaatgatttatggtgaatcctatgtcagctctggacttgcctcaattatttttgcgaatatgccagtggctgttttgatagcatcagtcttgtttttgaatgaaaaaataaatgcaatgcagattgcaggtttaactatagcaataatatcacttgcaggtattcttctcgaagaaatgaaagtcagcacggaaagccactggcagggagttattgcgcttgtttctgctttaattatacacgctataatatatacccaatgcaaaagaagaagctgtactgtgtctgttataacgtttaatgcactgccgtgtttttttgcaggattgatactttctacagcaggatggtttttcgaaagaccgcagatatctgttttttcagcgcagtcaatattatccactatctatctcggcacttttgccggggttttggggatactctgctactttgctcttcagcaaaaggccagtgcttttcaggcttcacttgtatttcttgtttttcctctgattgctgtaagtctggaaaaatatatttatggatatgcaatctcaactcactcaatcctgtttgtcattccgttagctattggtatatttctgcccattttttcaaataaaactcttacaactaacaaatttgcagggggtaatcaaagacaaaaaataaaataa

SEQ ID NO: 402080 - DNA, 1257 bp, Salmonella enterica
atgaaaaatcgttggcttattgctgctgcggcagtagggattcatatttctttaggttcagtctatgcctggagtgtgtttaaaaaaccattcatggattcttttggctggagcgattttgaggcaggtctgccgtttggcctggctatttttctgcttggaatttctgctgctgtgatgggtaatattgtggagcggcggggttcacgtttttcaggcattttatcagcattaatgtggacggctggcctcctgggggctggttttgccacctctggtgcccttaccgacaatacacttcggctatggattttattgatttcttctgccgttggtgggattggtttaggtataggttatgtcactcctatttcaacgctgatgaaatggtttccagaacggcaaggtttggctactggactggcaataatgggctttggcttcggggcttttttgggcgggccaataatgacatggttaatcagtgtggaagggatttcatttacattctatctattggggtgtgtgtactgccttattatcatcgtttcagcctgctacctgtctccaccgcctgaaaaatggactacttcaggtatgaaaaatccagagataccaaccgttctcccggctaaagggatcataccgatgcaggccaacgaagctgtccgtaccccttatttttatggtttgtggttaatgatgttcattaatatcacctgtggtattgccgtgatttcagttgcttcccctatggcacaggaggcaaccggaatctcagcattgtcagcaggaactctggttggaatgattggtttattaaatggtgttgggcgcatcctgtgggcatccttctcagatattattgggcgtcccaacacctatatcactttttttattctacaaactttcgcattcaggttacttccatcgatgaatgaaatagtgttatttgaagcaactctattactcataatcacctgctatggtggcggattttcgacgttacctgcttacattggagatttatttggtttgcgacagatcagtactatacatggttatgttttgaccgcgtgggctatggctggtctggtcggttcaaccttgtcgtctctcattcgacaaaatacagggagttataacgctatgatgcaggttttttctagcatcttagctgtagcttttacgatttcggtattaatgaagctatttatcaaccggaggtttcgaaaaaacactatgatatcgatgtaa

SEQ ID NO: 402081 - DNA, 804 bp, Salmonella enterica
atgatgcgccatcaaccggactggattataggtctgggggggtgttctgcgattgacgccgctaaagccatgtggatattctatgagcatcccgatactaaatttgaagatattatccctccatttacgattaagccattacgtaataaagccagattcatcgctatactgtccacatcaggcacaggaacagaagcaacctgtgtatcagttatcaccgatagggtaaaaggaaccaaataccctttggtctcttacgagctatgtccggatattgctattgttgatggtgagctttgtcgttcaatgccatcccacgttacagccaatactggtcttgatgctttgacacattctctggaagcttacgtcactcccctcgctgatgcttttacagacagtctggctgaacgagctgttgtcgatattttccaagctttacctatggccgttgaagacggtgaaaaccttaaggccagacagacgatgcatgacgcttcatgcttggctggcatgtccttcagtaatgcattgctggggattgttcattctctgtcgcatcaaattggcggtatgtttgatgtccctcacggacgggcgaatgcaatacttttacccaatgtaatacgtttcaatgctatgatatctgaagctaaatacacaaaacttgcctcactcattggtgaaaagttttccgtggatggcagacaatgcctttcacatttccagagccttatccatttaaacattgacgtcatgttgtcgggccagcgcagcaacacttctcttcaagtgccaacctga

SEQ ID NO: 402082 - DNA, 156 bp, Salmonella enterica
atggcaggaaattttattgtcccggcggaaatttttcacggattaggagcgttttccgagctaattaatgtaaaggggaaaaaggccttaattgttaccggtcaggattcaatgcggcgttcgggatatattaacaaagcaacagaacacctctaa

SEQ ID NO: 402083 - DNA, 519 bp, Salmonella enterica
atgaaaaaatctgtaatggctcttattctgggttcatgcttcgtgtctggctgggctatggcggcgactggtgatatgactcctgttggcgttccgactgaagcgacctttaccgtgaacgccgctactgacctttctgtcatcgcttccaccgatggccagcagttcggtaataaaattgcagtaaaaaccaagatggttggctttaaactgcacaacggcggtgcgaataaactgcccgccaatacagtgggtatgaaagtctccgatgctaaatatgtcagtggtgtggatgttgtggccgttaatggcaaggggggaaggtttggactcacctttggcggaacgaactggacggcaggaagtggggcgcatttgggtgaatactcttttaatgccgacctcgcggcaaacacgtcgagtgatgaactggttgggacgtcctcttacgctaaagatcaagctgacgcaattgggctctggaccattggcatggttgcaacaacaattgcgcaataa

SEQ ID NO: 402084 - DNA, 438 bp, Salmonella enterica
atggcacagaacgtaataaagggattactgtcagcactggttatcctgaatgcagtgcaggcgcaggcaaatgagaagctggtcttaacgttgcgggtagggccttattttagtgagcaggtccgggatggtcaggtgattggtcatgggcaaatcagtatgcgggaagcgcatttgggatatcaggtctggctggatgcgctgaagtcgggggcggccccgaaccagtatgtgattacgggaaagaataacgcccgacatgaattacgcgttgttattggtcgggatggctggatcccggacagtaaaacgggcaacggcgtaattaaacagaccagtgatatacaggcgaattttaatattgtggcgctgggaaaccagactgtgccggccgatgaatatcggataatagcgcagggcgcttatcttgaaccttaa

SEQ ID NO: 402085 - DNA, 2718 bp, Salmonella enterica
atgtgtttgcatcattcatcagagaatattgttgttaagtctgtcttcgcctgtatcccacaaatcgcagggtatacgcaggtcagccccgtgagcgctatccggttcattgcgctggctattgcatccagtctggcgctgtacagttctgcttcattagccagagcctataccttcgatgcttctcagttgggggatggcggacgtaatgttgatatctctttatttgagcaggatgttcagttacccggcgtctacccggttgacgtgatactgaatggtgaacgcgttgattcgcgtgatataccttttcacctggagaaggacgcggaaggaaaaacctttttgcagtcgtgtctgacgcgcgaaatgctggtgcgctatggcgttaaagtcgatgattatcctgggctatttccgagcgttagtcgcgccgggacatccggcagtgatgccgcccgggctgagtcgtgcacacatctggcggcaattcctcaggcgacggagacgtttcagttcaacagccagcagctgttattgggtatcccgcaggtcgcattgcttcctcattaccagggcattgcgccgcaggctctctgggatgatggtattccggcttttctgatgaactatcaggcgaatgtttatcgctctgaataccgcggtagccagaattcagccaccaataacctgaacgtgcaactggagcctggactgaatctgggagcttggcgccttcggaacctgacaacctggcagaagcaggggaaacaggacgggaagtgggatacgtcctatacctatgccgaacgcggtttgtatgacttaaagagccgtctgacgctgggggagcgctttacgccttcggatgtgtttgacagtgttccgtttcgggggggcatgctgggttctgatgatgccatggtgcctttcagccagcgtaatttcgcgccggtggtgcagggtgtcgccagaacacaggcccgcattgaagttaaacagaacggttatgcgatttacaacaccacagtggctcccggtcccttttcgttgacggatttatccaccaatgggtctgacggggatttacaggttaccgtctttgaagcggatggtacccgtcaggtctttacggtgccgtataccacgcctgcaattgctttgcgacaggggtacctgaaatacaacctgatgggcggacagtaccgttcttcggacaactcggttgataagtccacggtggggcaggcgaccgttatgtatggttttccctggaacctgacggtttatggcggggcgcagtgggccagtcattaccagtccggtgcactggggctggggatggctctgggtgatttcggggcgctttctctggactgcattcgggcccgggggcagaagcagcatcaggataccgagcaggggcagacctggcgggtccggtacagcaagtcgtttgagtcgacaaataccgggttttcgctggccagttatcagtatgcctcgtccggttacaactccttatctgatgtcctggacacgtggcgttcaggcgacggatggtattcacggaatgcctgggacccggatatggggtaccgcccgtattggtattacaccgggaccaccgatgaacgaaaatcgcgtaccagtgtgacgctgagtcagccgctgggggaatggggttcgcttaattttagcggcagccgtgaaaactactggaaccggtcacaacatcaggatgaggtgtcagcccgttacagtggaccgcagataaaagggatttcctggtcagttgactggacgcagcgtaagcagagtcatttcgtcagtcggggaagtgctgaccgcaggaccgagcagtccgttaacctgtgggtgagtattcctcttgaacgctggatgggaggcgactccacgaatgccacgtaccagatgcagaccaacagtggtcaggatacccagtatgacgtggggctgaatggccgtgcctttgaccggcggttgtactgggatgtccggcagcagatggttcccgggcgcgagtcagacagtcaggacagcagtgacctgaccatgcggtgggatggcacctatggtgaactcaatgggggctatggttaccgcaaagacagtcgccagatgaatgccggtgttcaggggggcgtggttatccatcagcacggcgtgacactggggcaacgactgggtgacaccgtcgctctggtggaagcgccgggtgccagtggggtctcggtcggggctctgcttggggttaaaaccgacttccgggggtacaccacgacagactacctgagtccgtatcaggagaatgtggtgtcgctggatccggcgacgttaccccctgatgtggagataccgcagacggatactaaagtggtccccaccgcaggtgcagtgataccggcgacgtttgtaacccgggtgggtgggcgagcccttatttcgctgacccggactgatggtaaaccggttccttttggggctgtggccagtattgcaggtgatgccagtcagcaaatggccacgggtgtcgtgggtgacagtggtgatgtctatatgactggtctgccggacaagggacagttgctggttcagtggggaaatgggcaacagcaacactgcagagcagattatcagttaccggaaaataacgatgtatccggggtctcgaatctgaaggctgtgtgtcgataa

SEQ ID NO: 402086 - DNA, 831 bp, Salmonella enterica
atgcggcgacagccagttcataatcgtcatgtgccctgtgtatctgagtccccttttttccgggggacggggttgtgtgcagcctccttcttggcggcatctttagtgttaggtttgatgtccaggcaggccggggcggttgataaacctaaaatggaaactcatacacagactttttctgttcgcctgagtgcgacccgcgtaatttatgacccgtcatcaatgggggcgacgctaacggtaaccaatccgcaggattaccctattctggtgcagtctcatgtgctggctgaagacatgaaaggtaaggcgccttttgtggttacgccgcctttatttcgtctggatggtcagcaacagagtcgtctgcgcattgtgcgtaccgggggggattttgcaaaagatcgcgagtctatccaatggctatgtgtcaaagggattccgcctaaagcagacgatgagtgggctaaagacaaggatggtaaatcagcagctgataataaaaccatttcgttgaacgttcagatgtctatcaatagctgtattaagctgtttgttcgtccctatagcgtaaaagggcatcctgatgatgttgctgcgtcgcttgtctggtatcgacagggtaatcaactgaaagcgacgaatgattccccgttttatatgaatctatcttcactgacggtcggggggcgggtcgttagaggccttcactacgtaccgccattctcatcatataactttaccctgcctgaaggggcatccggaaagatcgcctggcgcattattaatgattacggcggcgaaagtagttaccaggctgatatgaaataa

SEQ ID NO: 402087 - DNA, 978 bp, Salmonella enterica
atgaccgaagccaacgcacgccgtccgtcaccgctgcagcgtcgggtgctgattgtgctggccgctctcgatgcgaaacgtccgggaccggtggcgacgcgggatattgagcgggtgctggagcagggcggggataccccggtgtacgggccgaacctgcgtggctcctgccgtcgtatggaggcggcgggctggctgcgcaccctgcgtgcccaaaacctacagctggccgttgaattgacggacagcggtcgggcaatcgccgcccccctgcttgccgccgaacgcgaacgagtgcagactgagctgcgcgtgacgacggtccgggttctgcccctggtccggctaaagccggtatatgagtccgacacgttcggtgacgatcggccggtggagttgggcgatctctggcacatggcgtgccggggcgactacgttatccgtctcaacggaaccacttgcctgcagctgtggagcgcggccggacaggttacgcgccttgaaggcgaccccctgcaggtggcggagtggttacaggcctgtcacgatgcaggcattgatatccgcatgcagatcaacgaaagcaccgcgctggaacagggtatgccttcattgaaaggggctgagtttcccggcggacaggcttcatccacgacagtaacctggtaccagcacctgctcagggcactgcgacaatacgatgtgaaagggctatccgcaacaaacccggatcagcttaaaacaatgaaacccggctggcgtaacagggaacagccattacaggaacgttttctggcgttggcgaaaaccgtggaggggacttctgatgctcttcgctcggatcagaatgaagaagataccggccagttgctgacagagatgctggctggattcgggtttacgtcggatcaggcttcccggctcacccgccttatccgttggccgcagatgagtcaggaagaatttgaccggggctaa

SEQ ID NO: 402088 - DNA, 450 bp, Salmonella enterica
atggttaaatttccaggtgaagttatgagttcgtccgctgctgtaaccgttataactggtgttcttgtttttgttggtggtcagctcattgtaaagagcgcgattgaaccttatatagaattcaagaaacaattgggaaaaatatcaaatctgttattagctaaccaagctaaattagctaatccttgtgctgttgaaatgtctgagatcatccatgagttgaaagatgccgcagctcagttaatgtcgaagcattcagctttgcctttctatatcaaaaaattccatatcggattccgctttgttccatcaacgcctgaaattattagttcggcgcaaaaattgaatttgatagcatcaatacatgaaggtaaaagcaaggaaagtacatatgagcacatagccgagattggacgtatgctcaaaatcccaaccacctattctctttaa

SEQ ID NO: 402089 - DNA, 774 bp, Salmonella enterica
atggaactggatactgaatttcgttaccccaatgttatagatttcttcggtacaaccctttttcacctttgtcatttcacaaccatagatcttcataattacgctacatataataaatattctgagaataatattgcgaaaagtaataaaaggctgtgtgaagaaattgaacagcgaataaaggaaagtgataataaataccacgaggatattatcgatagctaccatcaggagatgcaggaatttggtgatatttatccccctatgcaccgtaaggcgatggttatcacgctgtataacttcttcgaacatcaaatcaaaacgttgtgcaccgaaataaacatgctgcttccgaaaaatatgagtgaatattattcattgagtaacgcatgtattaaagagtatcgtaaatttctgcgacgagaagctatttttgatatgaatccgggcggggaatcgtggaaacgctgggaggatatgctgaaagtggaacaaatcaggcatgtgctggttcactccgaaggtgagatagagaaacacagggcggaacggcttgctgatatagaaagctactgtaaacaaaaaaaagggattaggctaattcgacaccgtatcatcattgatgaaggttatgtggcagggcttatcaccgaacttatctcactgtttgagctattagacaggcaggtgaaggtcttcatccgtagatacgaaagcgagcatggtagctacgaagttccgcttccgcagggagcatcacgaacaccactgtga

SEQ ID NO: 402090 - DNA, 453 bp, Salmonella enterica
atggatcgcatcgaatatttgaaatggcttatagctgaatcgccttctacgactcagcaacttatggcatggctacaaagagcaaaacgctatacccctgaaatgaaagaacaccgtgatggagtacagatcgaagagaatggtattatcgtaggtctgcggcaaagaacgaacctgtataatggtgactgcctgactattcatgttgtacagcttcccgaaaaaatacagaataaaggctggtttaaatcttttcttaaattatgctgcaaatctaatccgtggaacgatgtagttattgaggatgtaaaaaatccataccttctggctttttgtcaaaagcataaatttgaagttctggatgatttttaccctgacacctatatagttaattcagaagaaattatggcgttggagatacctccactgaaacggtacgaagattatctttag

SEQ ID NO: 402091 - DNA, 183 bp, Salmonella enterica
atgaaaaaacgctcagtggctcttttttttgtgcccatctgtacgcgcttaaccgcacaaattgtaaaagttgcggtaaatcagccagtagcgattcgcagttcaatgtgggcaaaaaataaccagaacatccattttatgaatttgcatgttaaaaaactagagaaattgttgctgttttag

SEQ ID NO: 402092 - DNA, 504 bp, Salmonella enterica; identical to SEQ ID NO: 379919

SEQ ID NO: 402093 - DNA, 228 bp, Salmonella enterica
gtggtgatcccagaggtattgataggtggaatcaacgtcattgttgatcacacgaattacaccaacctgcgtagagatgcgcaggttttttttgtttcgcctgaacctgtaacagtaacggataatttacacaactcgttgcatttccgtttattcctttgcgttttcggactggcgatgcagacgcgcgaagcccacaatcaagatcccagaggtattgattggtga

SEQ ID NO: 402094 - DNA, 312 bp, Salmonella enterica
atgcctggatgtataagtgcctgttcgtgcgttgccagcccgacgcctcccgagcctaagacccccactgcgcctaagtggatagagttaaaaggttattgtattacatgtaatagtcaggaggatattcgtccatctaaagagggtgaaccaaagcaaagaatgtcagcccttgaattagtgatggcacgccgtcttttaaaagacctgggggtaacacaacatctctggcaagacccgacagtaaaatccactaactgtgggttgccatttttcccggtagatcctggggaacgagaaaccgatgtttga

SEQ ID NO: 402095 - DNA, 900 bp, Salmonella enterica
atgacctttttgaaagaatatgtaattgtcagtggggcttccggctttattggtaagcatttactcgaagcgctaaaaaaatcggggatttcagttgtcgcaatcactcgagatgtaataaaaaataatagtaatgcattagctaatgttagatggtgcagttgggataatatcgaattattagtcgaggagttatcaattgattctgcattaattggtatcattcatttggcaacagaatatgggcataaaacatcatctctcataaatattgaagatgcaaatgttataaaaccattaaagcttcttgatttggcaataaaatatcgggcggatatctttttaaatacagatagtttttttgccaagaaagattttaattatcaacatatgcggccttatataattactaaaagacactttgatgaaattgggcattattatgctaatatgcatgacatttcatttgtaaacatgcgattagagcatgtatatgggcctggggatggtgaaaataaatttattccatacattatcgactgcttaaataaaaaacagagttgcgtgaaatgtacaacaggcgaacagataagagactttatttttgtagatgatgtggtaaatgcttatttaactatattagaaaatagaaaagaagtaccttcatatactgagtatcaagttggaactggtgctggggtaagtttgaaagattttctggtttatttgaaaaatactatgatgccaggttcatcgagtatatttgaatttggtgcgatagagcaaagagataatgaaataatgttctctgtagcaaataataaaaatttaaaagcaatgggctggaaaccaaatttcgattataaaaaaggaattgaagaactactgaaacggttatga

SEQ ID NO: 402096 - DNA, 471 bp, Salmonella enterica
atgtttcaacatttatatgtttctgaaaaattaatacttgattttatatgtgttttttcacgattggaatatgccttaaaagtttcaggatttgctagaggtgatagtaaaaaagttgagccatgttgggattgttttgctaaaaaaattaatgataattttttaaaaatcgagaacgaagatcttaaaaaagcggtaggctatttattagagtctcctccaagaaagcaaatccttagcgaaggtaaaattatttttcaagatcaaccagtggataaaaagcaacgtactacccaacaactacttttgatgattagaagggtaaggaataatctatttcatggtgggaaatattgtccagatggagaaaaagaatcaggtagaaatgaagatttgctgaatgcctctttgattattttaaaacactgcattcctattcatcaaaaagtaaacaataattttcacaattag

SEQ ID NO: 402097 - DNA, 147 bp, Salmonella enterica
atgagcgccgccatcaatagcgttgaaatgtcccatagcgccgatgaaattcgcgagcgcgtccgcgcagcgggcgttgtcggcgcgggcggcgcaggttttcccgctcacgtcaaactacaggcgcaggtagagattttctggtga

SEQ ID NO: 402098 - DNA, 585 bp, Salmonella enterica
atgattcgttttaataactaccgagagcttgatgcagaagcttctgacttgattcaacaattgttctttaccgccgatagtgaaacgtctgcatttccttcatttgtaattcgttggatggggtttaacggttggatggagtgcgtgaccggtgcagagaccgacgctgatatgattagccaactagcagatgaaaaaagactttctgatgcttatgacagcattatacagagcgatactgaatttcggcatcatgtgaatcagttcgcagtgatgttgccggtactaaatgtacgtgatgtaaaaaagaaattgggtcgtgatgccttttggcgttattcaagagatgagttaatggctgaagtcatactctacaatgttaagcgtcggccggttgactggataaatggagaaactccaacctggaagcaggttattttaactatatatgctgttagatgtaatctattccatggttctaagtcgccgacgaattttcgggatcatcagttagttgtcagttgcgataatattataaaaatattcataattcgtagtgagtgtttagattggtgggatgaataa

SEQ ID NO: 402099 - DNA, 3123 bp, Salmonella enterica
atggactttattgacaaacagattctcccgccaaagtcgtgggagaaattcgaagatttgactcgtgcattgtttgccgctgtgtggaggtcgccccttgcacaaaagaatgggcggtctggacaaaaacagcacggtgttgatgtctatggaacgccacaggctacacctgacataaattttggtgtgcaatgcaaagggaagaatgaaggttatggagccaaggcgactatcttggagttcgatgcggaacttgccaaggcggagaagttcaaaccaccgcttggacattggacgtttgctactacagcacccaatgatgcgcgacttcaagaacatgcccgcctagtgtccgaacagcgcgtgaaggaaggcaaatttcccgtagttgctattggatgggatacgattcaagcgctgctctccagtcatcagatagtgattgaagaaatctatcccgaacatgcaagtgatctgccgaaaatcatggcagctttgcgcgcgttaccaggatccgatgaactcgatcagatccggcggagccttattgcgttcgcgccacgatcatcagaactcgatattggggcatctgtgtggtccgaggttgagttcaaaacggcacgtgatcttgggcctgctctaatggggcgtccacttgggcccgcagatgtcgctgcttgtcccatccttccagaggtagctctactgactgctgacctggagcgtgccggatctgctcgattagcgggggtgccgggagctgggaaatcaatcacaattcttcaagtggcacgccaaatgtattgtcgcggctggcgtgtcctcagattagccgaccctattggaaaggtgcctccttttgacgagagtccaaaaccgacactctacattgttgatgatgcacacctgacccgctccgcattacttagtgagttggaagagcgggccactgcatcgcgatgggtgttgagcgcttacacgatttccgaagacaagggaggctttccgggggccatccagcttgatgctaagcgagcggtacgggttattgcggatggtttgttggcttctcgcgaagcaacccttaccgctgttcgtcgtgctgatgattggatcggcgatcgtcctggagatgagcagctcgatctgcgccttgagcacgcagcggagcaagcgctctatccgtggcaattctgttttatccttggaggagggtggcggcgagcgagcgcaatggcaagctccgcgcgtgcagcaggagcggacttggtgcttgccgctgcatcaattcgccagttggcagcacgtgatgcgcactgttcgtgcgaagcgttgctgcagttggtcggggacgcattgccgaactctgatggcaatgccgcaattgcttggcttgttgcgcaacgatttttactaagtatcaatgaccttcgctgtccacaccagcgtctcgctagcgttctcctttcacgtattctcgacggccagacagccgaagagcgtcagacaatagccgttatgcttagaaccgtgctggccgacgttgaaatgccgctcggtggcctgagtgtgctgcttggcgaactttcctctgcaggtgaattcgggatgtggcgtcggcttgtgcagtctgcatggcttacacctgttctagaacgctgctggatagcgacagaaccactcgatattcggcatgcttgttggttactcaataagttgcatggctatctgtccgaagagataaatgtgattgccgatcacaaggaaactcttgcggagtggatacagatggcaccagaaggagcatgttatgcgattggccgcgtgattaatcatgtgctcaataccaatagggcacttggcgaaaacatcgttgcgctagttgatccacgcgcattggcgaaggcaataagtgctgcagccccgttacatgcgggtgagattgctaatttgctttcgatgataggcgctggcagggatgatgtgtggaaggcatgttatcttgaacacgttgatcacgacgcgtgttatcgtattgtgtcaacgtggccgcaagatgcctacctgtctgtcgtcgccgatttttgcgaacatttctgcgacttcgaaccagaattcgggttcacgttgatcgaagcactgatcccagctatcgccaatcgactgcgagccaatccgcaagatgcgttccacgaactgaacgatatcgtgtggaacgcgttgcggctctacgatccgcttaacatctatgtaggcaagttggcgccttctcgacgaatgcggcaggtagggcgaaagatctgccgttgctggtcgccggtggatctcgctatctgtttatcgcgcagtacgcaacgaaacttccaagcggccgcagggcttcttagcttcatgcgtaaagtttcaccgaagcagttcgaggagacggtattagcacttgattggggtgagatcgaccaagcaataggcccatattggtcagaagaaatcggcgatgcaagaatgctgctcgggattgcgtacactgtacctgcggcgagactcgcaatccaagcgatggttgcgcgcaatgagccgcgtatcgtcaacatgtcgacacatctcgcagcgatcgctcctgctagcgcgttacgtcatgtagcagcaggcaggcgcattgcgctaagccattggggtcacgtcgattggcaactaggagcattagttttagcgaggatggctcagtcggagccaaaactagtttctacgtttcttgaaccgcactacggtgggttagcagaggcgttgtctcagcccagccccactttttacaatgaaggcataatgtttctacgccttctcgtgcaggtcgaacctactggcctaattcgggtgctggatcaaatcgatgtaaacagggcaacactgggctggcgtaatgcgcttcgcgggaaggataacagtcgtgagcctggcgcaaaggctcaggttcggcaggttgcgtctttgctgattcaccatgcgttggagcgcagtgatgcagttggcgagcttgcgcgccaactgcggcgtgactttcccagtcaatctgtacctttggcgaagactgttgagttcattgatctaagtgagccgattgaatga

SEQ ID NO: 402100 - DNA, 813 bp, Salmonella enterica
atgaataaaattttagactacagtgagtttgttaagggtggttgccaccaagataggggggcacttcctcatggggagacagaactttttttcaacacggcaaaagatggtttatgcccattttgtaagatacgtacagagatcgcctatgcagatcaatcaataacttatcctgattggctaggtggcgggtattatgatgtggaagagtatgtaaccctctataaaatttgtgggtggtggaaacttagatgcaacaaattaactactgggtatattgatgctcgttcggtagaaactaccaatgctgttcttaaaaaatatgacctaagcagcaaaaatgttcctataacagtacttcagcaatatttaaataataattgcgatgatatcttttatatccatgataaccgcatggagaaactcgttcaggcagtatttcgagagcattatgcatgtgatgttattcatgtcggaaagtctcacgatggaggaatagatctcatccttgtggactcagaaattccaaccgtagttcaagttaaaagaagaaaaacaccatcacatattgaaaaagttagtggtataagagagttcttgggcgcagccatccttcatggtagcaagaattgcatatatgtatcaacatgtaataaattctctgaaccctcaaaattagcggctaaccacgctgtaaatattggtgcggtagaaagctatgaactatatgactttgaaaaattctgttctattctaaagttaacaacacctaaatcaaccccatggaagaaacacttaagaaacggatggtaa

SEQ ID NO: 402101 - DNA, 615 bp, Salmonella enterica
atgttaaaatttaggacgatttttttaaagaagatttttacattgaagaattcaatccttgcccgtcgcggggctgttatcgttattgtttcagcagtttttacatcaataatgttttttgcccatagttgggcatctgacaaagaagtggcaatgacactttccgttcttaacagcaatgagtataacttttcatcaacttcggatgttctatctaccactcgaaaagaatacgaaaagaaacatgctttagaaataaaagagaaaaatgataaagagttcgaagaatgtgaaattcaaaacgaaaactcgaaactaccatgtttgaatggaaatgaattttcagtagcgacacaatggaaaataaatggagtaaatagctcttgtaatgaatatgatatgcagggagattctggtaagggatatgactctgaatctcaatgtaaaattagtctcaataaatggttaaaagaaaataataaaataactccatggcatatagcccaaacttcatttttctggttagacattactggtttactgtttatgtttggagggtttttgacaactctttttgctggaatgcgagcgttatggggtaaatcagattcttaa

SEQ ID NO: 402102 - DNA, 873 bp, Salmonella enterica
atgaaatacccaagtctttatgatgtaacaaataaaagatctgcttcatatcagaaaaggtatttcttctttttaaggcttgaatattgcattttgatacttaatgcggtcaatgctttcttaacttatgaaaaaaaacacatagtcgcattagtactgttctccatgcttatgttaatgatggttttaaaaattaaaaaaacatcagaacaagagtggtacaaatacagggcgattactgaatcgataaaaactgtctcatggaagttttccatgagagctgaaccatttaatgatgaagatgaggttaaaaatataaactcattatcagagtatctggaggatattgttggtggtagtgagttcatatctaaaactattgatcctaagtcagtggatgaaagcacggtgactgatgagatgaaagggcttcgaaccctatcatttgaaaagcgcagagacttttatgtagatggaaggattaatgatcaaagagattggtatgtaagtaaggctcaagcaaacaaagatgcagggaaaaaatggaacatttgtatgttcgttatctatgtattagcgttcttatgttcactttataatgcatattattcagttccaggtagcataattccaataagcattttgacaacaatagcatcgtcattagtaggttggattcaagttaaaaggtatagcgaactgtccgcttcgtatattcttaccgcgcatgaaataggggtaataaaagaacaggcgtcatatgtttcaagtgagagtgatttctcctcatttattagagatgcggaaactgcattttcgagagagcatacccaatggattgctagacgagtggccaacagaaaaccgaagtaa

SEQ ID NO: 402103 - DNA, 906 bp, Salmonella enterica
ttgcataacgccgcactcgaactttttaacgaccgcttaccgcacaagccgtacttttcggacgatctgcactttggtgtacgcattgccggtaaggaacgcgccattctggcgaaatacattcagttcaatcagcctcacgctatgttctggctgggattcgacgtcgatcgcgccggtgccgccatcgactggagtgaccgcaacgcgcccgcgcccacgctgaccatcactaaccctgaaaatggacacgcgcacctgctttatgcgctgaaaacctcgatacgtaccgcgccggacggaaaaatgaagccgctgtgctacgccgccgccgtggagaacgcgctacgtaaaaaattagaggctgacacggggtattcgggactaatctgcaaaaatccgaaccacggccactggaaagttgccgtatggcagccggaactctacacgctggactggttggctgattttcttgatttgaacgccgcgaacgagaaagaaatcgttgccgactacggattaggccgtaactgcaccctattcgataaaacccgtaagtgggcctatcgcgctatccgtcagggctggcctgagtatgagcagtggctgcaagcctgctacgaacgcgccagcgcctataatctgcaattcgcagtaccgctggatgaaaatgaggttagtggaatagctaaaagtattgctaagtggacttcatcaaaatttagtgaggaatcattcagcgattttgttaaaaagacacatacaaaaaaaattcaatcaaagagaggtgttttatcaggaaaatcaagacgaataggtagtctagaggatactcgtccgtgggatgatttgggcataagtagaaggaagtatttttatatgaaaaagaatggtgaaggaaaatga

SEQ ID NO: 402104 - DNA, 276 bp, Salmonella enterica
atggtaaaaacaatagatgaattagtaagtgaaattgaatcttttcttgcattttcaaatgtcgaagagtttgatttatttgattgtaatgataattacatttttgaccgggcagttaaacaactaggcgtattagctaataatgaaatgtttggtttggaacctgcatacatttttggcggagaaataaaaattgaaaatttgagtaaagtggactgtcaaatacatttgatgattctgagagagttatctccccctaatattatagtcttctaa

SEQ ID NO: 402105 - DNA, 555 bp, Salmonella enterica
gtgcgctccagcgaactgcgctttgcccgctggagtgaaatcgactggcagcagaagctatggataattccggaagaacgggagcagatcgagaacgtgcgcttctctcaccgcggcaccaaaatgaaaacgcagcacatcgttccgctgtccgatcaggctattactgtcttaaagcaaattgaagcgctctccggtcatctggcgtttatcttccccggcgaatacgatcaggataaatgcatgagcgacaacaccatcaacaaagcactacgcgtgatgggctacgatactaaaaaagaaatctgcggccacggcttccgggcgatggcgtgcagtgcgctgagtgagtcaggactgtggagtaaagacgccattgaaaaacaaatgagccatcaggaaagaaacagcgtgcgtgccgcttatattcataaggctgaatatctggaggagcggatcgcgatgatgcaatggtgggcggattatcttgatgcgaatctcgacaggtatatttccccttaccagtacgccgcgcctctgaaaaacgtatcgtaa

SEQ ID NO: 402106 - DNA, 501 bp, Salmonella enterica
atgacgctgctaataggtgataaatcacgtatagctgttgagtattcaatatataatctggaaaaatttattggttgtgcgaaaatatggcttaaccattcatttattggaagtttaagtgataccatatttattgatggatatttgatcggcgggtttaatgaagtgttatctaaaacgatgcttaatgataggtatttatttgataacccggttaaaatatatgaatcaattaatgatgatatgttatgtgatgatgacaatttatatgaattagcaaaatcttatcgtgttaattttggtacgtggtcagattattttaatgtttattcgtataagttatcagaaagcactggtgtgattttatggcagttaactgaaagaaatgatgaattaaaagacttaataaattatccgtcatgtgtattttatgagacttttaattatagtgatttacttgaagttatagatcatcttaattctataaaaacacaacattaa

SEQ ID NO: 402107 - DNA, 450 bp, Salmonella enterica
gtgatactttttgcgcacctcgcggaagtacgcggcgatattttccagcttcaggatatccagcccggtgtcgtgctcagtacctgccaacgtcgccaccagcgcttcggtggccgggtggccgtaggtggcgctcatggaggaaatcgccgtgtcgacgccgtcaacacccgcctcgatagccttcagcagggccatctccgccatcccggtggtggcatgacagtgcaggtgcaggcgcacctcaaaacgttttttgatttcgctcaccagttcaaaagcggccatcggggtgagaatgccggacatatccttgatggcaatcgagtcgacgccggtttccagcagctgttcggtcaggtccagccaggtctgcagggtgtgcgccgggctggtggtgtacgagagcgtgccctgggcgtgcgcgccgtggctgcgcaccgcctgtaa

SEQ ID NO: 402108 - DNA, 372 bp, Salmonella enterica
atggaaggtcagttaattttttgttccgattcaatactacggtttcagtccgattacgatgaaaccgctgccgttccattgctatccatccagaacgtcatagccgataccgatccgttctttcttctccgtttcttccaccataccgttctgattgaagaaggaacaacgctggcaagtatctttctggcaatagaaccgtggaaggctttgttagcggcttatctggacagagatgttggtgcttatatagatgaggtaagaaaaccgtccgggccaacgacatgggatattgaatggattgggattgatcgccgtagcatggtttaccgcgcttataaacgtcaggagatgcaggatggaagagtgtga

SEQ ID NO: 402109 - DNA, 465 bp, Salmonella enterica; identical to SEQ ID NO: 375900

SEQ ID NO: 402110 - DNA, 306 bp, Salmonella enterica
atgagtcaaagcacacgacgcaaggtgttgagatttctcggaacgatcattgtggtgttacttcctatattgctggcgatctggtttgctcatatccgggcagtctctgaaaccagaaatcagttacattcatttgcgcagttggtattagataaaacggagcgggttatcctgcaagcagatttagcccgcgatgccgctgaacaatatcaggggcaagcctgtacgccagcccatcaacagcgaatgctgaatattatccgcggtcgtttgtacattaatgagttgatttatgctaagggctag

SEQ ID NO: 402111 - DNA, 654 bp, Salmonella enterica
atgataattatttctttgacgatcttaattattatccttacctactttatagaaattaattcagtggttcatggtcagggcgttatcactactaaagataatgctcagttaatatctctttctaaaggagggacgatacaagatatttatgtagccgagggtgatactgtaaaaaaaggagaactccttgcaaaggtcgttaaccttgatctgcaaaaagaatatcaaaggtatagaactcaaaaagggtatctggataaagatgttaacgaaatatctttcattcttgataaagaaaatgagagtgggttgattaccctggatggcacccgttctttaagcaataaagaggtaaaagcgaatattgaattagtgcatagtcagataagagctaaagagttaaaaaaaacctctcttgattctgagattagcggattacaagagaagctgagttcgaaagaaaaagaactcgcattgcttgccgaagaaataaatattctttccccactggtaaaaaaaggaattagcccatataccaattttcttaacaagaaacaggcgtatataaaagttaagtctgaaattaatgagagttgctgtagctttaaaatatacaggctatatttgctgtcgatcatgcttacatatgcctga

SEQ ID NO: 402112 - DNA, 336 bp, Salmonella enterica
atgttcaagcgtcgttatgtagcgttacttccactttgcgtattgcttgctgcctgtagcagcacgccaaaatcttccgagactcaagcgacgacgggcacgccttccggcggctttctgcttgagccgcagcataacgtcatgcaaatgggcggcgacttcgccaacaaccctaatgcgcagcagttcattgataaaatggtcaataaacacggtttcgaccgtcagcagctgcaggagatcctctcgcagtctaaaagactggattacgtcctgcgtctgatggacagacaagcgccgaccactcagccgcccgccggaccaaatggcgcctga

SEQ ID NO: 402113 - DNA, 294 bp, Salmonella enterica; identical to SEQ ID NO: 82469

SEQ ID NO: 402114 - DNA, 216 bp, Salmonella enterica; identical to SEQ ID NO: 12971

SEQ ID NO: 402115 - DNA, 1095 bp, Salmonella enterica; identical to SEQ ID NO: 82471

SEQ ID NO: 402116 - DNA, 240 bp, Salmonella enterica
atgagcgaaatccgatttgtaactctggcatccgacattaacaatattaaagaagtttattctgatgatgagttaaaacgtttgctggaagctgttaatcagaattgcccagccagaattgtgttgggtagtgtggagaaggggaaagaagtaccactcaagtggtgttttaggacaataccagagcgtatttcaattgaagaaatcaatgaggttaaaatttatccagagttattctga

SEQ ID NO: 402117 - DNA, 213 bp, Salmonella enterica; identical to SEQ ID NO: 31389

SEQ ID NO: 402118 - DNA, 216 bp, Salmonella enterica; identical to SEQ ID NO: 21515

SEQ ID NO: 402119 - DNA, 180 bp, Salmonella enterica
atggattttatgagcattttggggcgctgtttacttcttcctttccctgttgcgatgtttgtcggttgcctgtttcctggcatcgatgatcgcttatccggaatgcttatgagtgttgctgtgggatgtttatcgtggtatgtcaccagaccgaagaaccaacagacaaaggccgcgtaa

SEQ ID NO: 402120 - DNA, 648 bp, Salmonella enterica
atgattatcgtaatcggtggtgataaaggcggtacaggtaaatcacatctggcaaccaacttaactatttgcctctcacaacagggaaagagaacggggcttgttgaaacagacctgaatggctcgaccaaaaaatggaataaacgcagagaacaggccggattaccgcccgtcgcgttaaatgaagcctatggcgacatcagtgccaaaataacaaaaatggcggatgtagccgaaatcctcattatagatactgccggatatgacagcacggagttcagaactgcactaaaagttgcagacattgtgattgtcccgatcgacccgcttgcccaggtggaagcagacagtcttcagactgtgacaaaaattgtcagggatgcgcaaaaaataaatcccaggctggctgcacatgtgctcctgtataaatgccagccaaatacgttcagtgaacaacaggaattaagagactctctcaacagccatgattactggcttaaaccaatgaaaagcacggtttcttttctccgggcctttgtaagagcaatgaatcagggaatgggggttcacgagttaaaaagtaatgttagcggtgccagccaggcaaaagcacaaatcgaacttttgctgaaagaactggaactgtaa

SEQ ID NO: 402121 - DNA, 270 bp, Salmonella enterica; identical to SEQ ID NO: 21518

SEQ ID NO: 402122 - DNA, 216 bp, Salmonella enterica
atgaaacaatgcatctttgatttaggcatcatgaactatgatgccgtcattacatggactgtaccagttgtatttttctttttagtgttactggctggtatagcatttaatattggcaggaaaagtaatctgattgtttttgccctggcaatgttgctcccagtaacaacggttttcatttttatgttacttggcggcaagatctatatatgctga

SEQ ID NO: 402123 - DNA, 354 bp, Salmonella enterica
atgaaaaataaagttgaacatatacggaaaatgttaactacatccatcactggcatatgtactatagtgatgtcctctgtcgcaattgcatctgaaacaaaggctattagcctgaatgatttttatggtacggaaccacaatatctaatgctatttgagcctaaaacaaaatgcaaatatcaagcaaaagctattaaagatgaaaaatcggtagaacgatggagatttgttataataagtcgtgattgcaatggcattgtccaaaaaggagatgaaataaaatacaaatcggttttaccagataataacaccgaaaattttatagcgtcgggttcattatttacaatttattaa

SEQ ID NO: 402124 - DNA, 846 bp, Salmonella enterica
atgatgaagctgaatatttatatgaacctggctcaaaaaactaaaatccggcatcgaaatgaactgaatttaacgcttgcacagttaccactcgcagcaaagcgggttatgtatatggcgttagcctctgttgatagtcgtaagccgatagaaacaggtcaggtattcagggtcagagcagatgatttagcgtctgcggcggatattgaaatatctgtagcgtataaacaattaaaagatggtgcaaagttattaagaggtagtagtttaactttgactggtgatgatattatagctctctccgatgaactaaatttaccttatggttccaggaacaggccatctgaaattgatttatcaataacagattattgtgcatattttaataatgaaggctatctggagttaagattttctcgcgtcattgagccttacatatcaagtttgctgggtaacaaatataaatttactacacagctattgacgtcttgtctgagattgagcggtcaatattcatctgcattgtatcagttgataagaaaatatcactcgaagttttctggcaaaaatagtttcatcatttccctgaatgaacttaaagaggaaattatcgcctatacttttaaagatgatggaacaatagagtataagtaccctgatttcccgatatttaaacgcgatgtgttgaataaagctatcgctgaaataaagaaaaaaacggaagttaaagaattaacatgtgcaacatataaaaaagatggaagaaaggttagtagtttgatctttgaatttgttattgaagaaaacgtgttccctgaagaaggtatgcctgaatctgaaaactga

SEQ ID NO: 402125 - DNA, 321 bp, Salmonella enterica
atgacctgtgatggttttatattagtacctggagttgcgcccgtagctcgctggcgctcacacgcgcagtacagcgccccgtccagggaaaccctggacggcgtaaactcgctggcgcgagcgctaactgcggcattctgcggcgcaaatcagcataatcatggcctgctggtcagttgggctttgcagggtgaagggatggcctgtgcaccctggtacgttcgtcagcggctgcgccgcgcttcggggcgatgtggctcctgtgctgccctggtattttcgttcgccccttccatccgcttacgcggattaaaaacgtga

SEQ ID NO: 402126 - DNA, 273 bp, Salmonella enterica
atgagtgcatttgttttcagaaccacctttaaaccgactggtgaccagcaaaaagatgctattgcccacatcgaagttatgcaggaacgagcagtaaaagcctttgtttcctggatgagctgccaggaatgttcagattttttaagcaatttgcaggaaatcacaacagaacttaattcactgattgatgcggtagagtcccacacccctgttttcagaaagaaagctgatgaactggaagcgcttttagctcattacaaaacgttgctgtaa

SEQ ID NO: 402127 - DNA, 306 bp, Salmonella enterica
atggctcgcttacctttcattgaatcaaccacacaacagatttttgtttttaatactttgacgctttgtactattggattaattcatttggagactgaaaaagaatatgttgtagtgtttacagataataataagattcgggattacaaaaccggaattgttactcagtttggtgaacttaagcagagtgatattgatttaatccttttctatcgggacgaatatgaaaaatattttgacactttaaataacggcgaggagtatttgagttttaaagaatatatcggatgtataaggggggaataa

SEQ ID NO: 402128 - DNA, 192 bp, Salmonella enterica
atgaacaaacaacaaaagacagccgttaacatggctaaattcatccaggatcagtccctgcttcttctggacaggcttaatgagctggatctggatcatgaggctgatttctgcgagaaactccatgaggatgcggaacgcctttaccgaagcctgtcagcgcgcctgaatgatcagcaggacggtgcgtaa

SEQ ID NO: 402129 - DNA, 396 bp, Salmonella enterica
atgcgcatcagcaacatcgactggttgaagaaacgaatcggctttatcaggaagctcggagaacagaccgcacgacagaggcagatcattgacctgctcgataacgaagccggactaacagaacaggagcgcaaactactccacgtcctggcaaccgcagaaaaaaacgagctacaggcacaggagaacgcacgcaaacaggccaaccaaaaacggatggaggggaaaacacaacgacgggaacgcaatcaccgcctgtttcttgcggcggggttactgatcgaggccggactagtggacacaaaaacaggcgaactgagatacccaaaagacaatatattacagaaacttaaggcaatcaggctcgatcttgaaacaagcccagatcatcattaa

SEQ ID NO: 402130 - DNA, 1017 bp, Salmonella enterica
atgaaaaatccagacagtccggtactctcgttacgtgattacagcacgcgggatacaaaatgggacagcgatcgagtgatggctgacagggtggcgcagatttacgaaaacgattcgatgttttcctctcgtggagaacggatgtttgattgttcccgtcggttgttgtttgcgccgaaggtgtcccgcctgactggcgaaatgaagctggcccttcggaagggggagttttgtcatgttccgttttgtccggtgtgtagtcgtcgtcgctctctccgctggatgcgtcgcctctgggaggccttgccaaaattgctggttgaacgtcctgcggcccgctggttgttcatgacgctgactgtcaaaaatcctcctgtggaaaatacccgcgaaacactcattcggatgaatgcagcatggaaacgcttgagtgatcgtaaggaattcaggttggttcttggctggttacgtacgacggaaattacttacgggaaggtgccaggatgttgccatccgcattttcacgttctgatgatggtccccccttcgatgttgtccggtaatggttatgtgaaacatgctcgctgggtggagatctggagtgaatgccttcgtgtcgattatgaggcgggtgtggatattcgggtggtaaaaccgaaacagggctggaaacggccggatggtgtaaccctgcctgatatgcatcgtgcggcgctggagtcaggcgtcattgagacgatgaaatacacggtgaaatcttcggaagttgtgcgtgatccggcgtggtttctggagctggcgcggcagacctacgggcttcggatggtggcaaccggcggtcgtctcaaagaggttctgaaagtcgataaaccggagacagacgaggatttggttggggcagatattccggcagaaccggacgagttcgaggagcaagccttctggctggcgtttgactggtggcgggatgagaagcgctataagcggaatccgaaagctgacaagaagaaggattga

SEQ ID NO: 402131 - DNA, 1557 bp, Salmonella enterica
atggcgagcaaagctattttagtaaatttggatgcaatgattaagcgtgcagattttgctgctgagactgatgacgaaacgacttttgatacaataaatagtatttcggttagagatttgaatgatttcactgctattttaagaaagcctgattttcaacgtgagacaaatcactggtcacctaatcaagtggtatcaatgcttgaaagttatgtaaatggtgatttgataccggcagtgattctatggaaaagttcatatatattcgtgattgacggaggtcataggctaagtgttttgaaggcctggattgaagatgattatggtgatggtccgttgtcattaaagtattttggctctgaaatttcaaaagagcaaagaagtattgcagacaaaacccgaaaacttattaatgagcgagtcggaagttggagtcactttaaacaacggttattagatgaagatatatctgcaactgaaaggaataaaataacaaatattttgactagaggattaacaatccaatgggttaaaggaaatgccgataaggcagaaagttcattctttaatatcaatatgcagggtacgcctcttgatgaggtagaggaattacttttaaaaaacagacataaacctacatctatatcggcacgagcggtaattcgagcagggaaaggacatcgttattggtctgcattcagtcaagattattcagataaaatagaaaaggctgctaaaaaacttcatactatattgtttgatcctgatttaaatactcctattaagactcttgacttaccactagggggggctagaggagtaagggttgctattcaattacttatcgatttcattcttattgcaaatagagatcagcaaggtaatcctaaatctttagataaacaggatgatgatgaattgggggctacaactatccagtcgctgactaatgcaattaaactggcagaggttattacaggaaatggtgatggtagcttaggtttacatccagcagtatatttttatgggccaacgggtaggcataccagtcccatgtttttaggtacttcagctttaattgctgaaaaactaaataataatgataaaggatttttcaaaagattcacagctgttagatctgatttagagtctattttagttaaagataaagagttgatctctatgattattcagaagaatagccatagagcaagggatgttaaatataaagagtttttggataagttaataaaaagattagaactgagtgatgaggttactgaagcagagttaattcaacttgctggtcttcaagggaagattgttgctggggatcttgcatcaaaatcgaagaagttcagtgatgatcagaaaagtaagatatttattaatgcagcactaatttctgcgataaagtgccctatttgcaaaggttatttggataccaccaaatcagtgtcatacgatcatgtcattagagttagggaaggaggggttggaagtagtgataatggtcagttgactcacccttattgtaaccaagcgattaaaaactga

SEQ ID NO: 402132 - DNA, 660 bp, Salmonella enterica
atggatgagttagcaaaaaaagtccaagaaaaatatatagaggatcttactagtaagtatcctctacatcgttttttgatattgttcatggtaattttctttatgctaacttatcaaaatggtaatgttgatatttacaatattctgaaccaaacatcgcttaaggaagtctttgattttcagggcggcgtgttgtcagggctttcaatgttgcaactaatgcaagctctcatcatttctttgattttgaatagttcgcataaaaaaataaatttttctattttcaatcgattgattttaatcggtaattctaatgggtatattgcaaaaattcatgaaaaatataagagtttaaaaagaaatgatgcctatgatttctttctcatcaaggagatagataacaaaataacagataaaaaggcttgtcttcgtgttaaggtaattaactccgagattattttttctcttttgttttgtatactttggagttttcatatatctgcagtgaatatagtctcgatattttctttattattattgtggttttatgttcaatgggatatttataagttttacacctctgatttctttccgttgtatgttgcaaaacaatatttgctagatgagcctatagtcgctacagaaggctttcatgattga

SEQ ID NO: 402133 - DNA, 180 bp, Salmonella enterica
atgcaaaaatatgggtgttccgtgaaagtgattggacaattatggaggccgaccaaaagcaatcgggaacgaccaaggatcctagccatccaaattatcgttattatcgtccttatcatccagttacaggtaagcctgtcgctatgccttctcgtggttggaagggtacacagtatatag

SEQ ID NO: 402134 - DNA, 357 bp, Salmonella enterica
atgagccgtaatcaaatttggcgtgtcgttgcttattccactgatacatacaaggggcatgaagaggttcatgtgtttgttgatgctcctgattacgaaacagcaaatgagcatatttacgagcgtctggctgaggaatggggtcttccgaggggttttattgatatatacaacctgtggaatgaatcagaacttcgcgatatgtccacaggagcacaaatgccagccgggctgccgttgctggagtctggaggcgggaatggagaggtgtattacgattgggagcctttgattctggttgcgtctgcccgcctgcgtaaagttctggagtgtgcgctgcaggaggtgccagcatga

SEQ ID NO: 402135 - DNA, 243 bp, Salmonella enterica
atgagcaacatgactatcaatgccattctgacgcagcttctggagcgacagccttatgacgataatcccgttggaactgaaccagcaacctgtgttggatgcggttgtacagacaataacgcctgcgtgaacgaataccgtgaaacctgctactggcttaaggtgaatcgcgaaacagggatgggggtttgttcctgttgtcctgagttcctgagccacccttgcacaccagatttcgactga

SEQ ID NO: 402136 - DNA, 426 bp, Salmonella enterica
atgacgaagcatcaacgggtgttgctgtcgggtccctcccattgtctgtggtgcggtgtggtattggggctgctggccgcagatatgtatcccggtgacgttccggcattttccggggccgttttacgggggctggctgttgccagcttcatttctgtcctgctgtggatgatggtgagttacctggaggacatttcctggacgtatatctggggggcgatgttcctgcctccgctggccgcattactcctctgtcatgtgggctggctgggttacagctttattttctggaaatgggactacgattttgctctcttcatccgggaggcggttctgccagttgttttccttgtgtggggagcatgtaacttcttaatagtcccctttatctttttgtttatcttgtctcccggaggtgttgagtga

SEQ ID NO: 402137 - DNA, 249 bp, Salmonella enterica
atgaggatgaaaatcgttggccccgacctgtgggcttctcccggtgtgccatcgcagtgctgtcgtaaagccttacggctggtcagtcagtatcatcgtggcgatcgtaattatacccggcttgaggaccggggctgtggatacgtcaagattaatattggtccattctggcgtctgctcagtcgtaacgggggcagaacctggttactgctgagtcacgggcggtacaactcagcgatccgcaaatag

SEQ ID NO: 402138 - DNA, 1239 bp, Salmonella enterica
atgacgctgcctgcggacagcctgatagcgtttacgctggaaaaaatgaatgcccgtctggtggctaatccgctgctcgatgacggacgggtacgcagcggcctgctgtttacggggaacatgcatgatgccatcccccgaaggctgttgctggatccacggctttccccccttgataagatgggctggatgatgatccgcctgtatgcgcagaataatgaaggcgcgatattccccagttatgatgagctgcaggtgcaactggcttccccgggtaaaggtaaagcctcccgtgaaaccgttagccgggtgttgctgatgttacgaataaccggctggctcagcctgtgtaagcgggttcgcgacgataaagggcgggttcgcggcaatatctacgcgcaacatgacgagcccctgactttccgggatgcagaatcactggatccgcgttttcttgatgttgttgccgacgcctgcctgagtaaaaaccggacggtcagtcagatcgcccgggatgtgctggacgagattaaaaacgatcccaccatgcggcactatcacagccatctgtctctgcttgaaacccgtctgggtcgcccacaaactgctggtcagttagcagcgcggcagcattcctcattattaaccccgaagccgggttcgggatccgaactcagtgtaaatcgaataaaaaacaaccatcaagaactgagtacggaaaccgaactcagtcagaattcgatgcgaataatacagagttcggattccgaactgccagtaaaatcaggggattatgacagagttcggaaaccgaaccattacgtacgtagtttcacacacagtgtgaataaaaaaacgtatgtggacaatccggttgtgttgcctgatgcgctgaaagccgtagtgtcgcaggaagaccaggcgatgttgattcgccagcttcaggctcttcctgaagaacaggcacaacaggtcctgtttgccctgcagaatctgatggccaggcagcgagtagacaatccgctcggctggatgctggcggtgatgaaaaaagcccgggaagggactttcaggcccgttaagcaaccgcaatcggttcagccggagactcagacgcgaccatgccgacctgaacaacagcctttttccgcgcctccgcgacctgtggtagcttctgaagagcaggtaaggaattacgtcaccagtctgcgggaacaactgagacataatacccgatga

SEQ ID NO: 402139 - DNA, 435 bp, Salmonella enterica
atgattaaaaagtatacggcgctggcactgccagcagtggttaaaaagcgtacggcattggcactgccaacagtggtcaaaaagtatacggtgttggcactgccagcagtggttaaaaagtatacggtgctggcactgccagcagcggtcaaaaagcgtacggtgttagcactgccaacagtggttaaaaagtatacggtgctggcactgccagcagtggtcaaaaagtgtatggcgttggcactgccaacagtggttaaaaagtatacggtgctggcgctgccagcagtggtcaaaaagtgtacggcgttggcactgccaacagcggtcaaaaagtgtacggtgctggcactgccagaagtggttaaaaagcgtacggtattggcactgccagcagtggtcaaaaagcgtgcggtacatactggcaatggataa

SEQ ID NO: 402140 - DNA, 756 bp, Salmonella enterica
atggaaaagggtaaaaagaacgcggatgcgaaggtcggtaatgaagcatcttcaccgcgggcaggcgcactacagtccgcactctcggtagagcttcatactcactatgccatcagattatgggaagggcgtaagcaaagtgacagtaattcccgtagtctccatgagaaaaaacggcctgaaatcattagtatgccaaaggccattcagcgtgccggggtggcttcccgggattcagcagcagataacccttatgctgatatggtactggtgaagctggaaaccacacttcacatggcgtccaataagatcagtacgatagtgaatgaactggatgtgattctgacagctgttcccaaagggataacgctttctgacattgcgtctgcgcatcctctgaatatcagcgtttacagtcgttcccccttggggtaccggtgcgtatggcttctggtcggttacgaccaactggcaatgaaagcgtttcaggctttccattatgggctgatttcacgcgctcagcgcgatcagtatctcaacagaggcggacatgctgtcagacaggtttatggggctattcagccttattacaccgtgacggttaaccgaagcgatattattaatctgaccgcccgcgggaaagaggccctggcgcggttgggtgaacccgatccagatattttctccggtaaaaagcgatcttctttttcatcgcctctgcgggaacactctgttcgccagagcgaaaagcgctga

SEQ ID NO: 402141 - DNA, 2046 bp, Salmonella enterica
atgcagctttatctgtgtgagaaaccgtctcaggcgaaagatattgcgcgggttctcggcatcagtaaacggggacagggatttatcagtggtggcaatatcaccgtcacctgggccattggccatctgctggagcaggccagcccggatgcttatggcgaacagtttggtaaaccctggcgggccgatgtgctcccggttttacctgataactggaaaatggtggttaaaccccagacccgggatcagttcacggttatcagtaagctgctgaagcaggccggagaggtgattattgccactgatgctgaccgggaaggtgaggttatcgcccgtgagctgctggcgtattgtggatatcgtggcgcggtacgtcggctatggttatccgcgctggacgaagccagtgtccgtgaggctctggctggtattcttccaggggaaaatacggcaaaactgtatgacgccgggctgggacgcagcagggcggactggcttatcggcatgaatctgacccgcctttatactctgatagctcgtgaatccggtgtttccgacgtgttgtctgttgggcgggttcagacgccgacgctggccattgtggttaaccgtgataaagaaatcgctgattttgtcccggtcccatggtggcaggtgcaggctctgcttgagaaagatggcgtgcgtttcagcgcgatctggcaggcggcggcgcagtactgcaatgatgaaaagcgctgcgtgaatcagcaggcggcgaaagctgttggacaactctgccagcagcagaagggcgcaacggtacttgaagtgagccagaagcgcgataaaacaccggccccgctttgcttcgatctgggaacgctgcagcaggtctgctcccgtaaattcgggatgggggctaatgagacgctggctgtcgcccagtcattatatgaaacgcataaagcgacgacctatccgcgaaccgactgtggttatcttccgacatcgatgcagcaggaaattcctgatgtactgaccgccgtcaccaaatccgatccgtcagttgcaacggtgctgacccaactggaccgcgggtttgtctcccgggtctggaatgataaaaaaatcacggcacaccatgccattattcccacacgccaggcatttgatctctcgcgcctcagcgcggatgagctgaaggtttatcagcttattcgacagcattattttgcgcagtttttgccattgcaggagtctgatgtgaccgacgcctcttttaacatcggcgggcagttgttccgggccagagggaaagtcaatgttgtcacgggctggaaactgttatttcagaaggaccatcagaatgagcaatctgaagataccagtgataacgatgccgacatggtgctgccaccgttaaacaaaggtgacaactgtattgtcaatggcgcagcggtggaagacaaaaaaaccagtccaccacccccgtttaccgagggaacgttgattgctgcgatgaaaaatgctgccagttttgtcagcgacccgaagctgaaaaaagtgctgcgtgataatgcgggactgggaaccgaagcgacccgggccggggtactggagacgcttttctcccgtcattacctggagaaaaaaggcaaacatatccacgccacgttgctggccagggaactgataacggcgttgcccgaaacgctgaccagccccggtatgaccgcgctgtgggaacaggcgctggatgatatcgctcaggggaaaatgccgctggatacctttatgcagaaacagctgcagtggacccgccatctggttgacaaagggaggagtgatacagtgaagattaccgcgcctgtgacaccactctgcccggtatgtaaggggccgacccgcaagcgtaagggaaagaatggtgatttctggggatgtattcgttatccggagtgtagcggtattattgcagggaaaaatggcgggaagggccggaaaaccgcgcggggcaaaaaaccgacagcaaagacgaaagcggaattctctgcaccgcaataa

SEQ ID NO: 402142 - DNA, 465 bp, Salmonella enterica
atgtctgcaaataatcctgcttccggcaaaacggaatatttcaacctgaccattaaaggtctgggatatcttagcaatattcgccaggtcaatcttcagaacggctcttttctcagttgtgtgattaacgcgctgagtggtccgacggataacccggtatatgttcgctttgatgtttccgttgccggcaaagaagcgaccagcctgattggtcgctgtcagaaagccgttgatgaggataaaaaagtccttatcggcttcaccttaagtaatccgtccacggatatctttacgcttaacaaaggcgatcatgccggcgagcagcgtgtcagcctgaaagcccgcttaataaaagtggactggataaaaataggccaggatatggtttataagactgaaaaaccggaatccatgccgcctcagaacggtactgctcagcccgaatacgctgaaaattctttctga

SEQ ID NO: 402143 - DNA, 204 bp, Salmonella enterica
atgaataattcaacaggaattctggcagcagagtccggttttactttacctttgcaggtgctcaaaagcggtcgcggttattatatcggtacggcaaatcatgagggatctgtttcccgtgagtctgaagaatacttcagtacccataaaaaagcggttcaggcgttcaccactggtgcctggactcaacgtgagtgggcataa

SEQ ID NO: 402144 - DNA, 561 bp, Salmonella enterica
atggcttcacgtggaattaacaaagtcattctggttggaaatttaggccaggatcctgaagtgcgctatatgcccaacagtaacgcagtgaccacgctgtcgatcgcgacttcagagagctggcgcgataagcaaaccggcgaaatgaaagagcagaccgaatggcaccgtgttgtgctgttcggcaaactggcggaagtggccagtgaatatctgcgtaaaggctcacaagtgtatattgaaggccagttacgtacccgtaaatggcaggatcagcatggccaggatcgttattctaccgaagtggtggtcaacgtgaacggtagcatgcagatgctggggagtcgtcagcactcgggcagcccctcctctcaacaccagggctctcaacagcagggatggggacaacctcagcagcctgtatcaggtggtcagccgtctcaggttgggccgtcgtcaaccggaagctctgctgccggcatgccgatggattttgacgacgacatcccctttatcgggtgtggttatggcgttaatcgcgtgaccatacacgcaatctga

SEQ ID NO: 402145 - DNA, 237 bp, Salmonella enterica
gtgcctacagtattaaggatcggcgcttatcgattctacttttacagccatgaacctaatgaaccggcgcatgtccatattgataaaggcaatgcaaccgctaaaatatggttacatgatatcagtgtcgcgcgtagtgtgggatttacttcgcacgagcttcgtgaattacaacgtctggttaaagaatatcagataacactccgggaggcctgggatgcttactttacaaagtga

SEQ ID NO: 402146 - DNA, 264 bp, Salmonella enterica
atgcttactttacaaagtgagaatgatattcgcgtaatgaatgtctatattgatgatgatcgcctgacggttgatctcatggatggacgcagtatctctgtgcccgttgcctggttcccgcgtcttgctgctggtacaactgagcagcgacaaaactgggagctgtgtggtgctggtcatggtatccactggcctgaactggatgaggacctgagtaccgaagggctgcttcgtggtgctaaaggtgcgcttccacgacattaa

SEQ ID NO: 402147 - DNA, 597 bp, Salmonella enterica
atgaaatttcaaccccgttataagaccctgtctgttgttctgccgctgcttttactggccggctgctcctctccacctcagaaactacaacagcgtgaagccgctgtacccacgccttccgtggctgtcacccgcaatgttcagaccgtcgcgcctgatgaatatgccagaacgccggaggtggtgcgttatgaccgttatctgctggtcagcacggatccgatggctgcccagcgcgatccgctgttgcagattattgatatacgtatcccgtcatccctgcatccgacagtggcggatgccctgcgctataccctgaagcagtccggctattcactttgcgccacgggaccggcaaacggtgttctgtatcgccagccactgccagccgtgcagtatcagctggggcccatgcgcctgcgtaccgcactgcaggtgatggctggcccggcctggcaactggaggttgatgatgttcagcgagtggtctgccacagtctgcgtgacgggtatcagttaccggccagtcagttaccgcctgtccaggttccccagaagatacccaccccggctacgggagggtttctgaaaaaatga

SEQ ID NO: 402148 - DNA, 723 bp, Salmonella enterica
atgagcgaaaagaaaatcactgagtctgttcccgccggggaaaagaggcgtctgtggtcatggtggtctgctgccggcgtctgtctttgtctgatgatggcagcggccggctttgtattgtacgtgctggtcagcggcgtgactgacctggatactcgcctttcacgtctggaagcacaggataatacagccacaaccagcacgatgttatccactcttcagtcgcaggtctcaacgctgcaggccgggctggccgataaccagcagcgcgtggccgcactacagaaagagactgaagcccggaccgggccctcgcaggaactggccactctgcaggcatctgcagcgcggctgcaacaggcgcagcaggagatggagacccggctgagtgcgcttgctgaccagctgaatgccctgaaagcggtaccggctgctgcaactccggttccggaaaaaacaccgacagaagtcaaaaaacagttacccgttaaaccccgttcgacggctgttgttgcacgtcatgcgccgtttgtgctgaccggcgtggaaagacgaggcgcggagtcctgggcggcggtggccccccgtggttaccacagcctgtcgcagatagcgcttatcggggaaggggaaacggtctccggctggacgctggttcgtgccggttacagcgaagcgactttccgtgtcaacgggcgcctgactgcccttaaggtggagtaa

SEQ ID NO: 402149 - DNA, 705 bp, Salmonella enterica
atgcaattgaaactgacttttctggcgctggtcatgctgagttcgcaggctctggcgggcacagatatctccgtcgttgaaaactcgcaaaccacacagagccagacgcagtccctgcagcagaaagctggcgaatgggggctaagcccggaggattaccagcggtatcagcaactgatgaatggccccagggggattcagtccccggggctggacccactctcggcgctggggattgaggcccgcacgccggcagagcgccgtcagtatgcggaaaaatgggttaaagaggagtttgcccgtacgcaaaaagaactggatttccagcgggaaatcaatacggcatggcaacggctttatccggacagactgccggtgaaactggggaatgctgccggtgttgcccgggataccggggggcgtctggcgttgttcgttaagtcgaagaactgtccgacctgcgatgcgcggctgtctgcggtgctcagtgacaatcgtccggttgatatttacctggtcgacagcgaggggagtgacgataagttacgccagtgggcccgtgctcaccgtatcccggcggaaaaagtccgttcccgccagattacgctgaaccatgacggtggccgctggctgcgctttggcgacggaatgatgccggtgttgctgcaacagggagaaaaaggatggcatatcgccgcattctga

SEQ ID NO: 402150 - DNA, 675 bp, Salmonella enterica
atggcatatcgccgcattctgatcgccctgatgctggctgtaagtggcagtgcaacggcagcaggtgagactgtaccggaagggtatatccgggtggccgttgcgcatggggtaccgccggaagcgctctattctgtctcgctaacggaaaccgctatggcgccacgatcaattgctgcggtggtcaggcagaagacaaatctgcctgcggtgagtcgtccctggccgtggacgattaatgtggcgggtaagggataccgctacgccagtcgtctggaggcctggcgggcgctgcaggtttttatgtcacgctattcccttaaacgtattgatgtcggtctggctcaggtaaacctgggctggaacgggcatcactttgtgtcgacctgggcggcgtttgacccgtacaccaacctcaatgccgcagccagcattctgcgcgagtgctgggagcgtaaaccgggtagctggctggatgcggctggttgttatcaccatccagcgggtgggcaagctgcagcacgatacaaaactatcgtgaaacgtcatcttgcccgtctcagcggcacgacccgccagccccctttgttgccgccttctttattaccgcagacagtggcagccattgcccctgaaccaggttttatctggactgagcccgggagtgaaccctga

SEQ ID NO: 402151 - DNA, 513 bp, Salmonella enterica
atgaaaaaactgtttttaatgatgtgtctttttctgcccctgacgggccatgccggactgaacgtcctcgctgacctcggcggagaagatgccacgccttattttgacggcattaataaacaacccggcctgccggaggcatcgccggcaaccacacagccgccagtttctacaatggcagcgatgtttccgatcaacacgccggagatgacgccggggacggtggaggatcgtccgctacagttgccgggcattggtgcgcttttccttatcggtgatgacgaacagtctcggtactggctggcggagaatgcgcaggcgctaattgcccggcatgcggcaggcatgattgtcagtgttgacagtgcgtcggctgttgaatcattgcgggatctggctcccggtgttccgatggcaccggcatccggctctgagctggcccgccgtctgcagttacggcattacccggtgctgatcaccgataccggattgtcccgacaggtacggccgtga

SEQ ID NO: 402152 - DNA, 600 bp, Salmonella enterica
atgagtgcactgcaactgagtgctgcgctgttggtcaacccattgccggccctgcttctggcggcgctatttatcctggtgatgctgcgtctgagctttcgccagcgggagaaagccagcgttcgtcgccaccgtcgctatcaggctgcggcggcacgggtgctggaaaaactgggcactcttccgggggatggccagcgtatgcggtacctgcgcaaaattaacccttatgtatttgaggaattgctgttgctggcgctggaacgacaggggctgacggtcgttcgtaatgcgtcttacagcggggatggcggcactgacggacaggtcattattgatgacgaatgctggttgatccaggccaaacgctacagccgggcgattacacctacccatattcgtgactttgaccagcttcttgaacagcgcacctgctgcggttttttcattcacaccgggcggaccggacacatgagtcgggcggtctgctccacctctccgcgtctttttatcatcagtggtcagcgcttgctggatctgcttgccggccgacatagctggctgtcaggttgttcatattttcagaggaaatctgtatga

SEQ ID NO: 402153 - DNA, 504 bp, Salmonella enterica
atgacattttctttactgaggacctggtgtctcatccttggccgtttattttttgtgtggccggcgttactgaccggaggtgtgatgctggtgatggccttcttgtcgcatcaggggggcgtcgcatcgcggctggattattacacatatgaggctacccgctggcgcaacgcgccggaagggagccttatggtgcggcgctgtatcgatgccgctacggacaatgccgtattccctgttgcaccgctgagcggggatgagtggcatgtgatggcagcaagggaaactgactgcccgacagtggcggaaccgtttgaacaggcagcagaaaacgatatccgtgcattacacctgctgatgaaaattgttctggtgatcagcgtttgtctggaactgtttatgacggttcgtgctcgtaggggaagggggcacagtggcgcggtggcgcatgttcgcatggcaaagggcggcgtccgtatcgtcagggaggaagataatgagtaa

SEQ ID NO: 402154 - DNA, 2091 bp, Salmonella enterica
atgagtaaccgctacgtgattgaagccctgttgcgtccggcggttgagctgaatactgctgtcgtggccggtatggcggcatatgtttgtgtacaggctccctgggctgtggcgctggcaccttcagttagttatgtaaccgcgtctggctttgcagtgttatctgttgtgcgtgcccggcaagggatgaagattcttcgttatcgccgcaatctgacccggctcccccgctacgtcatgagcgccggacagataccggtcagccgtcagcgcctgtttctcgggcgcgggtttcgctggacgcaaaaacacacccagcgactgcaggatacgctacgtccggaagtggcgaagtacctgcagccgggctggctgtatcagatcgctcgctggctggaaatgaggacggagcactcagctccgggactgggaaaactgctgcgtacggattcgcccctgaacccggttcgcccattgccgccggttggtggtaatccggtgttgcatggtattgagccgaatgagcaggatgtctggctgacgctgctggagcgtgtggggcacaccatcgtctatggcaccacccgtgtggggaaaacacgcctggcagagctgctggttacccaggatattcgtcgcggtgaagttaccattgtttttgacccgaagggcgatgccgatctgatgaagcgcgtctgggctgaagcacaccgtgccggccggggcgacgcgctgtatattttccacctgggctggcccgaaatctccgcccgctataacgcagtaggacgttttggtcgtgtttccgaagtggcgtcccgcgtggcggggcagttgtccggcgaagggaacagtgcggcgtttcgcgagtttgcctggcggttcgtcaacataatcgcccgggctctggtggcactgggggaacgtccggattacacgctgattatgcgctatgtgaataatattgccgatctgtatatccgttacgctgagaaggttatccgtgagcagcttccctcgttacaggcacaaattcagaataacgagcaggttctgggggatgatgatgttccacggaatatgcaggggcagccggatgcggtacgtatctggtccattgaggtggcactcagttcagaagagggaaagcagctgtatgatcccattctggatggtctgcgtagcgcagtacgctatgaccgtacctattttgataaaattgtggcttccctgctgcctttgctggagaaactgactaccgggaaaacagcggagttgctggcaccggactatctggatatgaacgattcacgaccgatttttgactgggagcagataatccgcaaaaaggccgtggtgtatatcggcctcgatgcgctcagcgacagtgaagtggccagcgccgtgggaaactccatgtttgccgatctggtgagcgtggcgggtcatatctacaaacacggtattcatgccgggctaccgggagagggggagagcaaggtcccgattaacctgcactgtgatgaattcaatgagctgatgggtgatgaatttatcccgcttattaacaaagggggcggcgccggcatgcaggtgacggcctacacccagacctcatcggatattgaggcccggatcggcaatgcggccaaaacggctcaggtccagggcaacttcaacaatctgattatgttacgtgtcagggagaaccgtaccgccgaactactgaccactcagctgccgcaggtggagatttacaccaagacgctggtctctggtcatcaggataccgatatcagtgcgggccaggattttacctccagtacgcaggatcgtgtcgggacggtcaaggtgccgctgctggagccggctgatgtggtaacactaccgaaagggcaggcattcgccctgctggaaggcgggcaattgtggaaaatccgcatgccgctgcctgccggtgaagtggatgataaactgatgccgcagagtattgcgaaaattgccgaggaaatgcgccgcaattatcacagtggtgaagcgtggtggaatgattcgccggccattgtgccagcaggaggtgaacgtggctga

SEQ ID NO: 402155 - DNA, 759 bp, Salmonella enterica
gtggctgaacctcagcgtaatagtcctcctccgccccggccggagaagccacatggtttgctttataatgtgttctggggctggccctgggcattgatcggcatgctgctgggttcgctgatgttgagcctgctgattgagtacaccggcatagcgttcttctggccggaagcgggggcagcccacagcgaggcggtgatgaataccgaactgggctggctgtcgacagaattcacccgtagcctgttgctgtctgagccttctgtgactgttgttaaatgggtaacagtagcgtatcagtggctgtttgttgacagtgggtttactggctggataaagcagcagaatgtgttgcagactggcagcgataacgagctgacccgtaatctgaacaactggagtgggtggctcgcgggctatctacatgaatatctgatggcgaccgtatggatatgcgtgattaccctggtgcgggtaaccatactggttctgtcagtcccgctgtttctgatggtggtgctggtttcgctggtcgaagggctgggacgcagggatctgcggcgctacggggcgggttatgaaagttcgtttgtttatcaccatgctaaaaagatggtgaaaccagcgatcgtggtacccatgatgttgtatctttcctggccgacggcggtgtaccccaatctgctgttgttgcctgctgctatattgctgggtgccgctatcacggtcaccacggcttcattcaagaaatatctttag

SEQ ID NO: 402156 - DNA, 537 bp, Salmonella enterica
atgcacattatcaaagctgaagaacagcacattaccgcgatacgcaatatctatgctcaccatgttctgcatggtacaggtagcttcgaaaacgaagctccggatacgcaggaaatgcttaaccgactgaggaacattcagtctcgaggattcccatggtatgtcgccctgcagggcgataaggtcatcggctactgttatatttcccgttaccgcgaacgccatgcctatcggttcacggttgaaaattcgatatatattgatccggcttatcagcgacagggcgtcggaaaagcactgctcgatcatgcattaaaatgggccgaatctcagggatatcgtcagatgattgctgttgtgggtgacagcgctaacgtcgcttctgttgcgctgcatatccgcgcaggatttactgaaataggcacattaaaggacattggtttcaaacatggccgctggcttgacacggtcttgctgcaaatgaaacttggtgaagggaatagtactctgccagaagattcagatcttatgctttga

SEQ ID NO: 402157 - DNA, 342 bp, Salmonella enterica
atgaatcatccccgtccggcctggcgatatattgcctgcataccgggcatcaccggtctgttgctgttggccacattgtccacgactgcacaggcggcagaaaaagacgagcttgcctcagcccagcgtcagctggatcaggtccaggcctcgcttgaacgtgcccgcgtagcggcggcccaggccgatcctgctgagcaggggcgtttcttttttgactaccgtcaggccatatccgatttaaacaccattcgtgccggtattgaccgctatctggagccatcccggtcccaaccccgggcttcatctgtcagcggcaattatcgtcgggagcgtccctga

SEQ ID NO: 402158 - DNA, 243 bp, Salmonella enterica
atgggcatgacctccgcgcaatccacagcttttaaagctgcctccggcaatgtcgaggtcagcattctgcacctggtctgcatcggtgtgttgctggcctttctgtttttgtgggccgcatgggcactgtccgatgtgtggaccggctggagtaacgagaaagttcggaatgctgcgctggggcgctttgctatccgggccgtgctcctgctggttgtgagtatctggatgtttgccagttga

SEQ ID NO: 402159 - DNA, 387 bp, Salmonella enterica
atgtatcactttgcgtctgttgccacccgcgtgcgtcgtggtattgaccgcgttattaaccgtacgttcacgctggcgcttctggtctggctgacctgtaaacccgcatttgctgacctgccaacggttgaagcgccaacctctaatggcggatctggtctgatgggacagatcaaaggctatctgcaggatggtgtcgttattggcggactggtggtggcggccattgcgttcattaatgtggcgattgctgcagtccatacctttaccgaggtccggaatgagaagtcaacctggacgaagtttggctccatcatcgtggtgggtgtggtgttactggttgccgttatctggctgctgggcaagtccgccgacattattctctga

SEQ ID NO: 402160 - DNA, 357 bp, Salmonella enterica
atgcagaccattcgctttttacctgaccgtctgaacagtgaaccggtggtgtttcgcggattcactacaccggagatggggcttgctgccctggccggtttgggcgtgggtctgctcctgtctctgccatttattcctcttgccggctgggtcattatcccgaccggcatgttactggcgccgttactggttatcggtttcggtggccggtggctgagccgcattaaacgcggcaagccggaaaactatatctggcagcggctggaggcgttcaaacgtcgtcacagcctgggtaacccgacactgatcgttgatgcccggggatggtctctgaaacgaaccgggagagaaaaatga

SEQ ID NO: 402161 - DNA, 660 bp, Salmonella enterica
atgagccgttttcgtcatgcggtcaaagaccgggatcagcatattctgacactgcgtattgcctgcggtgtgctggcctttttcctgttaatcacctgcgccggctggatgctggccccaaacaaactgactgtccataacccacctgatttacgtactggcagtacccgaccctggtgggaagtaccggcgtcatcggtctattcctttgccttctatattttccagcagctcaacgcctggccgaaaaatggtgaagtggattatccggcaaaaattcatgcgttgtcagcctatctgaccccgggttgccaggactatctgaataccgaggcccggaaaagaagcaacgctggcgaactgactgaccgtgttcgtgtggtgtatgaaattcccggtcggggttatcagtcgaagagcgtcagcgttatcagcagagataactgggtggttcgtctcgacctggtggcggatgagtattttcatgctgaaccggtaaaacgcgccctggtccgttatccactgaaagtggtgcgctgggagggggatgctgaacgcaatccgtttggtctggcgctggactgctatgacggtgtaccgcagcgtctggaggcggcattgccgacggaaatccccgcgaaatcaggagcatttcagtaa

SEQ ID NO: 402162 - DNA, 936 bp, Salmonella enterica
atgaagatccgtaatgatacccgcgccgggttgatggcgctgtcactgtcattgttgctgttgccgctggtctctctgatcagcgagccggccagggctgatgaatttatgaaatgggagcgtatcccgttgcaaatcccgctgcaggtggggctggaacgggtggtatttgtggataaaaacgtccgggtgggttttcctccggcactcaacggtaagctgcgtgtgcagagcaccggtggagctgtctacctgaaagccgacagcgcttttcctcagacgcgggtgcagttgcaggatgtggaaagtggcgaggttattcttctcgatgtcaccgccggtgaaaaaggcccttccgagcccgttcgtctggtctacagcggcgaggtgaacacggtaagcagtacggtcgatacccgtcggcaggcggaaaacagcagcggcagcgtccagccgggaagtgatgacggtacgcaggcgaagcgtaaaaaggtacagtacagcgctcccatcccggtattgctgacccgttatgctgcacaaagtctgtacgcgccgctgcgtacggtagaggccgtgccgggcatccgcccggtgaatccgcatctgcctaaacgcctgacaacactgtatccgtctgaagccataacggccacgccgctggccgcgtggggcgtggcaaatcgcgccgtcgtggcagtccgtctgcaaaacaccgccagtcgcaggattgtactggatccccgggcccttcaggggcagtttgtggcggcgacgttccagcaccgctggctggggccggtgggcacgccggaagataccaccacagcctatatcgtgacgggcacgcggccggagagcgctttcatcgctgaaccttccgtggcacgtaaggctgttcgtaccgcgaagaaggaggtcagccatgcagattaa

SEQ ID NO: 402163 - DNA, 1506 bp, Salmonella enterica
atgcagattaagtccaatgccatggtgaaatttattgttcccgcagtagtggtggcgggcctggctgtgggtctgaaaagctgtaaaggagagcgaccaccagagaattcatcgggtgatgtgacgacagtactgaaaaatctctcacaggatgagcttaaggcgctcggagtggaaggtgatacgccggaagatactctgcgcacactgataggccgactgaacgacgttcgcgatcgccagaaaacactggataaacagaatgccgatttgctgaaagagaatgagcaactgcgtaagcgcggcactaatgtatccgggcaggttgacgaggctgtgcaggggttgcgtaaagagtatgacaaacgccagcagcaactgcagaacgaacagaccagcctgctggcaaaagtgcaggctctgtctgaacagctgaaaactaccggcagtggttccgcaggcgtaaaaccggcttctgacagcgatattccactgggcctcggtctggatggtctggggggcagcacctctggtaccgccacccggggtgatgatggactgatgtgggtgactcctggcgatcaaaaagctatcgatccacgcgatgctgccagtggtaaggcttcaccgcagtttcccacctcctttctggacaacaaccctctgacccggcagaaagcggcctatgagcagcaggttaagggccacacgaacgagaagggggggcaggacagcgctgaacccgtctataccctgccggaaaactccaccctggtggggagtcgggcaatgacggcgttgttagggcgcattccgattaatggcactgtgaccgatccgtaccccttcaaggtgctgattggtaaggataacctcacggcaaatggtattgaactgccggatgtggagggggcgattgtctccggcagcgccagtggcgactggacactctcctgcgttcgtgggcaggtgaacagcatcacctttgtttttgctgacggtacggtccgtactgtgccccagccagatgccagtgggaaaaacaccggtaacggcaatacgcagaataaaaccggtacagacggcggtatcggctggatttcggataatgacggtattccgtgtatcagcggtacccgcaagtctaacgcgtcaacgtatctgccgactctttttgcgctctcagctgccggcgccgccggggaagcactcagtgaggggcagtacaccacgcagaacaatgttaacgggatttcatccacgctgaccggcaatgctggcgaagcggcgctggggaaagccctctcaggtggcatgagtgagaccactgactgggttaagcagcgctacgggcagacgttcgatgcgatttatgtaccaccgggtgcgaagctggccgtacatattacccgccaacttgccattgactatgaagataacggtcgcagggttcgctacgatttcaccctcccgggtggggtcagcgataacggcggtctggattga

SEQ ID NO: 402164 - DNA, 837 bp, Salmonella enterica
atgaatcagaatgtcacacagggttttaccctgacctggctgtttcgcggacagggtgaatgggggatccagttcaccagcggtcattttgacaccatggaggaagcaaaacaggtgatgagtctggcgccgttcgctcagttgctctgggtggatgcgagtctgatgctggatctgagtgccggatacaagatgattccggttgagaacgacacgtttattgccggtccactggtgaaagagtctgatggtatccgggagtcactgtttcagacaacagacgttcttttctgccgccctgaatatgcctcctttgagctgatttcatgtaagacgacccggctgggcctgcagggcgacgtggtcgtatccaccgttgtgccggaggaaaagaacgcgggcttttctttgataaagcctacgtaccgcgtttttctggtttgcctttttattctgacggttattttactgaccggctgttcaacgacaaaagaggagatgctgccaactggcgagcataccatgcttgaactgtggaacggggcggacggagaggggggaacagcacgacagtctactgctgcaagggatgcactgcgccgcccgttaaccgacgatgaacaccggaaaggtacacaggacgatcgcagctacagccgcacgcaggagagtgaaatttcacaacaattctcccgtttgcccaacccggatatggtgatgtacctgtatccccatctggctggcggtaatacgccagtgcctggctacagcacagtatttcctttttacagccagacacagtatgcaatgcctggtgaacgtacggaggcactgtga

SEQ ID NO: 402165 - DNA, 2865 bp, Salmonella enterica
atgttctctcttttcggtcgtaaaaatgtagtgaaaccagatggcacattaggacaaccagagggggaggtctctcctctggttattcatggccgggaaccattaatgcggcccggacggatgagcagacaggatgaggcgaaaatttatcatgccagtccgtccatcattgattatctgccgtgggtggaattcctggatgaagaggagtgtcttctgcttgaggacggtatctccgtcggcgccgtttatgatgtgacgccggtggccacggaggggcgcacaaatgatcgtctggagcagatccgagatacggtggaagatgccctgcaggacagctttgatgaatatgatgagaatccctgggtggtgcagttcttctgccaggatgaagatgatgccgaagcgtatctggaccacttacgcggttacgtgaaaccgcatgcgcagcgcacggcatttacggaagcctggctgggtgagatggcacgtcatatccgtagtatctcgcggccgcaagggctgtttaccgatgcgttgatcaccggtcagccgtggcgcggtcagcagcgtcgcacccgtatggttatttatcgctggatcgggaagtccgcgtcccgggacccgatgccgccggtggcgatgctcaaccaggcgtgtgaacgtgtggtcagtgcgcttggcggggccggtattcgttgtacccgccagaacggcctgcaggttcatagttggctgctgcgcctgtttaatccgtctccggactgggtggagaaatccacactgtatcatcaggcggcgtatgccgatccgcgcaacttcccggcgggcgtggcgccggttagcaatgattttgctgaaacgctgtggtttacgccacccgtttcggatccggagaacggcgtatggtggatagataataaaccccattgtgcgctgccggttgagaggctgcgtactccaccagagccgggtaccattaccggtgaacaggcccgtggtgagaaaaaaatcaacgcgctgatggatatgtttccggaagggacactgctgtgcatgacgattgttgtgcagccgcaggacaggctggaagaacagtttaaccgcctgtcgaaaaatgccgtcggggagaataccgaatccggccgtgtccgccaggatgtgaaaacggtgaaagagtatctgggaaaccggcataagctgtatcgtgccgggatcaccttcctgctgcgcggcgatgatatggataatcttaagcgtaaacgtcttgatttgaccaccgtattgcttggggccggtctgcagccggttcgaccggaatttgaggtggggccgctgaatacctggctgcgggcgctgccaatgtgctttaacccggacagcgataaaaaacactggtacacccgtctgacctgggtacaacaccttgcggggttgctgccggttaccgggcgggaaaccggtaccggcaacccgggtttcagcttttttaaccgcggcggcgatattctgacgtttgatcccctgaacaagtatgaccgtacccagaatgcgcatctgttgttgttcggaccgacgggggcaggtaaatcagccacgctgtgttatgccttttctcaactgatggcggttcaccggccacgtctgtttatcgctgaagccgggaacagttttggcctgcaggctgattattttgaaagccttggactttctgtcaacaagataagcgtcaaaccgggtagtggggtcagcctgccgccgtttgccgacgcgcataaactggtcgaagaagggctggcagcacatgctgttgatgaaagcgacctccccgatattgatgctgacagtgacggagagggtgaagacgaggataagcgggatattctcggtgagatggagatttcagcccggatgatgataacgggcggcgatccgaaagaagaagccgaaatgaagcgtgccgaccgggctatgatccgtgaagcgctgctgatggccgcgcatgcaacatataacgaagggaggcagatgctgccttctgacctgcagaaagcgttatacagcattgccggtgatgactgcgatgaggggcagaatgtccgtaatgcccagcgtaaggcgaaagccgcagagatggcggaggcgctggggatgttcactcaggaaggcagctttgaggcggagctgttcaaccgcgagggggaattgtggcctgaagcggatgtgaccctggtggatctcggtcatctggcgcgtgagggttatgaagcgcagatggcgctgaccatggtgtcaatgaccaacatgattaacaatattgcggagcgggatcagtatctcggccgcgatatagtcttcgcggtggatgaggcgcatattgtgacggttaatccactgctgtcgccgtatatgaccaaagtggtcaaaatgtggcgaaagctaggggcctggctgtggctggccacgcagaacctgaaggatttcccggatattgcggagaaaatgctgaatatggcggaatggtggatttgcctcaccatgccaccggaagaggtgaaagacatcagccggttccgtgcactcacacctgaacaggaagccgtgctgctttccgcccgtaagctgtcaggttgctataccgaaggggtggtgctggccaaacgtattgaggcgctgttccgtgctgttccccccagtctgtatcttgcgctgggcatgacggagaaagaggaaaaggcggaacgtcgggcgctgatgcgtgagcatcactgtagcgaactggacgcggcgaagctgattgcccgtaaactggaccggttgcgcggactgactgacgcacacgacgaggagagcactggagcatga

SEQ ID NO: 402166 - DNA, 387 bp, Salmonella enterica
atgatgacgttgaagtttccggtaccctgtgtctgcggtaatgacagcccggataacactgttttcaccctgccaccgcagggtgaacccgggatgtctgtggtgacgcaggctaatctgcaacgtctgagcgaacacatccgacagcgactgaatggcccggtgaccgttacctgtcaccctcaccgggtaggcctgagcagctgtgtggcggttacggtggagggcagactccgcagagcggttaatattcttatcaccgttagtgggcagggaagctggccagcagaggaggagtatgaacatccccgctggtatattacggtgacggacgcggcggatatggtttacctagtgctatggctcaacagcttaattgtccattga

SEQ ID NO: 402167 - DNA, 489 bp, Salmonella enterica
atgattgacgacacgaatagcagtgatgacctgaacggctggctctggaatgctgttaaaaacagaagccagcttttaacgcctgtagggttaactgaagaacccgcgaaaaaacttcttctcgtccattattcagtaaaagaaggtatccgacccgacttcacaagcactcgttaccactggacaacacacatatctaaccgacatctgaacacggcgaatagcacaggtaatgcgttgtggtatacggacctatttttcctcaaattgtggcttccggcagaatgggacgatttggacatttttaacggcgaacatttcccgccgatcagggcaggaagaacaaaaaatggttcggaaattgcgctggatttcaccaggggatggcttggtgaacatggcatcagccttcccttaggggagcgctatatgggacatatcaaactaggaatagacgagaataccggattattctacgaacgtgtttaa

SEQ ID NO: 402168 - DNA, 402 bp, Salmonella enterica
atgaagttacgtaattttatccttctgccggcattgttgccggtatccgttctggccagcacggtggtatataccgacagccagcacttgcctgaaaatctttccccggatgtcgtggttgtgttgttggatgaacctgaacgcctgcaggcgaaagtgtttggccagcttccggctgacccggagctggcagcaatgcaggccaggcaggtgatgtcctcccctcagtggcaacaaaagcagcagcaactggtcacggcatatcgccaggtagtgcatgcccgggaactcggtatccgcaaggtgcccgctgtcgtttttgacgaccgggatgtggtttatggcacaactgatgtagcgcgggctcaggcactacggctgcaggcaggaggtggtcagtga

SEQ ID NO: 402169 - DNA, 993 bp, Salmonella enterica
gtgaatcagcccccttcccgactcagaaaaacgttctgctctgccactgtcgccaccgttctggccacagcgtcaatacctgcagcgtttgctgcgctgaatacggcacagatagtggccagcgcagtgacgcaggactgcattagttggagggtaagcggtatctgttactggctgttctgtactgcattcggctgtaccgtaaaaacctctgtaaaggtcacccattttatcccggaagcagtggtttcgacctacgttgcgcccggtggaaatccctggacagagatggcttttgtcagccagacggcgggcgggctggaaaatgtcgttactggcgctttgtcaggggtgacagccggtggtgccaacccggcagatatgaagaacccggggcagcgtaaatctaatattcgcttcaaatacgccgatgccattgggcatccggccacgtctcttatcgggggcagtatcgccgggtattcctgcgacagcgccgccactcccctgatgccgtatttcctcagcacgctggactcgattgcctggcgaacgggtgttccggaatcgctttatcccgaggcactgatccccggtcgacgggaaatcggtagccaggcatccggcaacatgtggggcaacgtctacccgcgctccgggtttgtcagccagaccgatgatgacaaagcgtcggcggtggtggcacagcgtgtggcggacattatcacccggacaggccagccgcacgtttatcaggtgctaaaagggacccgccgcgacgggtactggccaccgggagaagtcacggaaaacaccggcactaagaaccataagtggcagcgtctggcgcctcagatgactcaaagctgcgcggtatttccggacgggagccacagcgcggctactgataataacgaggcctttgcgctgtggcagccctacagttgctgcaagcgtatggggcagagattcctgagcagcacggatttttga

SEQ ID NO: 402170 - DNA, 1434 bp, Salmonella enterica
atgaacatcgatacatttaaatcagcaaccggcgcagtgctactgcttgccggaactgtgggtaccctattgcctgtccgggctgaaatttcgctaccgcaggttaatgacagcgcttttggctacggcaaatccgttgacggcgcggtatccgataaattgttttataccctgggcggtgggtcggtgatatcgcagccggcgacgcgcagcaatatgaaaaaaatgggtctggatgtggggtggagcagtgacctgatgtgcggcaactttgacctcaaaaccacaattggcaaccagttaaacggcgtaaccgatggttttaaaaacctgatgggtgacgttattcagggtgcaactggcgcggtggccagcctgccagcaatgcttattcagcgggccaacccgggattgtatgacatgctgaccaacggtgtactgcaggcgaatgtctcgttcgacaaagcacaactgaactgccagaacatggcgaagaaaatgatggatttcagtgataccagcaagtggagccaggcagctatagctgaagaatataaatcgctcgtcaatagtggggaaacggacgcaatacgtgcagaccaaaaatatcaggatgcagatggaaccgctggcaaaaaatggattggtggtcagataagaggaggaaaagggcagaaggcgatccggccgacctatgatttggcatctgctggttacaacatgatgaacagcctcaacgtactaagttcagaaaccgtgagtagcaccagttgtaacggtggtgcctgcagtaagttcagtaatgctgaagaagctgcaaaagccgtggtgagagttcttggtgatcgctcaatgcgcacctgcagcaatgcgtcgcaatgcaccagtggagataccgatgatcagcccggtctgtccgttgctggtacaggatttgccccgatgctggaagaagccacaaagaacaatacagagcaactggtgaaactggttaatggtgccgtaaaacccacggcaaatgaactggcgaagctgaaaacgggtggtttgccggtaacggccaatgtcattaaggcactgcaacgtgacccggataataccgcactgacagttcgtctcgccagtgagcttgccatgtctgatacggtcgaaaccgctttgttgatgcgccggatgctgacaacaggtatgagtgagccaaatgctcaggatcaacctattgcactggaagatggtgttcgccggattgatgcactcgatcgcgaaatcatggcattgaagaatgaaatggaccttaaacgagagctggcgaggaactcggtactgaccatcattgagcgggacaacgaacgtgtcggcacaaacccgatgattcagcagacggacaatgccgacagccggttccagaaacttgatactcctgatgcagagtaa

SEQ ID NO: 402171 - DNA, 354 bp, Salmonella enterica
atgaaaaacagtcaccgcgaccagctgcgtaaaacaggaaaagggttaaaagttgggacgctttatctgctggttctggcattgataatggtcctgggattctggctggccgatacgggaatgcgtcatccggagagcgtggcatccctgaagcgatggatgcacgcaacgcgctacggctggctggcgtggcggctggttatctactgcaccgtcgggtggggactgtggaaaatctggcatgcaccgggctttcggcaggaatatcgtcgtccactgctgcgcatcgccggcgccagcacattattctttctggtctgcgagtactccattttttccggcgtgggaggctga

SEQ ID NO: 402172 - DNA, 1542 bp, Salmonella enterica
atgacaacgaacagctatctggagtatttcctgaccctgctgggctggctggtcaataatggcctctgggacgtccttgtcagtaccggactgtttgcgctgccaatggcctttaaggtcgtgggtatctggctgaaggttcgcgaagaaggggaagatgaaggtaacaagggtatgctgtcgctaccccgtatcgagaatgcgctttatggtgcgttcttcgtgatgattgcctgttgcgttccgctgattcaggtgagcctgactacgttggagtttgataaaacccgagcgaaaacgtgtggaacctggacaccaaaagcgcctgatgaaagtggttacaataacattatctccagtatggacggcgaaagcgcggctgcgccggtctggtgggtgctggtccataagttatccaaaggtgtgactcaggcagcggtggccagcattccctgccggccggatctgcggcaactgcggtttgaggtgcagcggacgttcattgagaaccgtgcgctggctgatgagttgcaggattttaccaacgattgctactcgcttgcgctttaccagtggaaacggcgcgatcaggggcagacaacagataaggcggctttgtcagacctcagttggataggcagcagtacctttcttaaaggagactacaccaccctgcagtcgaaattgccgcgcgggatgttctcctggagtgatgcccgtgacagtggtcggccgaataccggtaatgggggatacccttactgttctgagtggtggtcggcagcagataccggcctgaaggccagggtgatgaagcaggttgatgacagctactggctgcggttatctgcggcgatgaagatgattggcagcagccagactgattatcaggaggaggtaatacgccggctcgtcagtccggcgaacctgacggtatcgcatggcggtgaagtatataacggctatggtggtaatgcggatatgacggcaatgaatgcggtttcccgcatcaccggaacggcaggcgcttcggtggcctcactgggcgcgttcccggctctggacgcgatgcgtcaggcattgccgatggtgcaggccgttatgctgatggccatttatattatggtgccattaatcctggcctttgcggcctatgagttcaagacggtgatcaccctgacgtttgtcatttttgccgtgaacttcctgacgttctggtgggaactggcccgctggctcgacagctggttgctgacggcgctatacagttctgatacccactcacgctttaatatgatgggattccagaatacatcggatgatctgattatgaatctggttatagggacgatgtttatcgtgctgccaaccgtatggatcggtgcattgtcttgggcgggtgtaaatattggtgtggctatcagtaatgcatctaaagaagggactggcagttcacatcaggcagctcagaatggcggaaatcttgtgaaaggagggattagcagtttccaggcgggaatgagtaagggaatgaacaaataa

SEQ ID NO: 402173 - DNA, 180 bp, Salmonella enterica
atgaatattttcatgaaaaagctactgaatgcggtgctacctgaccctcaaccagacaatcacgctgacgacagatctttactgacaagtttcaacgatgatgaagcggaagaaacgccggcattgtttgatacacgcccttacttagattttgagcaatggcataacgataacaactaa

SEQ ID NO: 402174 - DNA, 558 bp, Salmonella enterica
atgttcaggaagaaagtattggttgtttgtattgtctctatgtttataacagcatgttccatggatgagttatcttcagtaaataagaaaatcagtgattttggatcgtcaatagcaggaaatcagtcatcgcagaatgaatcaggcatgcctaagttagcacctaaagttgaagccagtcaggattccacatcaaaagatttatctattccagttgatgtcgatactgccgctgctcgtttgcgccgttattataaatttatgacgacagatgagttaaatagtattaaaaatagagaaagtacttcggcccgtttggctgctgctgcgattgaggaacaaaggcctgaatggtcggcatcggcaggaagttattataaaatggggcgaaactggggggaaggcaaagatcatattacactggaggttgaaacgaatggtgttggaagtcgtgtctatattcagtttttttcttcaaacccacaacatttaacagaagcctatttaggtaatttgtatacgcaagtgaaaggtgttgcagagggcaaggttcgataa

SEQ ID NO: 402175 - DNA, 702 bp, Salmonella enterica
atgaaatcttttcatgattggttttattcatcatgttacaattcatttaaagttaaaagcaagagacaagttattttaactatggagagttggcataaatgttctgagggggtggcggataaaattaaaaacgaaaaagggataagttctatatgccataaaggatgctcgcgttgctgttctttacatgtttccttaattacgccggatgtgttttttatagctgagaatttaacaaagaatttgagtgagtcaaagttgtttttcattataaaaaggctaaaacttcgagctgataaggttgaggaatatattgatgatagctatagaatggagtgtgtttttctcgggaaaagttctgggcaatgtgttatctataattaccgtccggaagcgtgcagacgtttctttactaatgatgaaaaagattgcattgaaagtaatggttcaccacttcaggatggtgcggtgttttattcaactggaattctttcttcttatatggctcttgcagcacataacaatgacctatttatagatagtcatgagatgagtaagtctttatatattgctctggataatcctttgctttttaaaaaatggctgagaggcgagcctaatgtttttccgggtgttaagtgggaagggtatcatcaggaaattaaaaaaatgaatgctgatatgaagatcaaaataaagtaa

SEQ ID NO: 402176 - DNA, 903 bp, Salmonella enterica
atgtccaaattcagcaagcaactcgaaaaacagcttgtcacgcttgcccgtaaggggcagggcagttttaaaactgtagctgatcgttccagaattgcagaacggttctctgaacgtctggcaaagttaaatattcaaattcgggatgtaaaacacataaaaacagtgcatatccaaaaatatattcatagtcgacagaatgaaaatatatcaagccgtacgctgcaaaatgaaatggcggctgtacgtacaatcatgtctgtcgccgggaggaataaactggctgatccgcagcatgaaatgttgagtaacaaagcgctggggatttctggtgcaagccgggatggtactaaaaaggcaatatctgacgacacgcttcgtgaggtaattaattatgcaatgaaaaaagacgaaggtgtggccctcgcggttcaactggctcgttatattggacttagaactgaagaaactgttcagtcagctaaatcattaaaaacgtggcagcagtcgcttttaagtggaaatgaacgtgtccgggttgtattcggaacaaaaggggggcgtccgagagagacaacagtttttgacagggaaaaagttctgacgcttttaaataaagctattacgtattgtgacgataataacgggaaacttatcaacaagccaaccttgcatactgcaatagaacgctatcgtaatattcttcgcgatgccggaatgacaggggagaatgcgccgcattctttgcgctatgcgtatgcaaaagatgctgtgaattttcatgtcaaaaatggcatgagccggaatgaagcggaggctttagtatcgatggatttaggtcatggagatggacgaggacgttatataaagcaagtgtattttaaagagggtttggatgaatga

SEQ ID NO: 402177 - DNA, 588 bp, Salmonella enterica
atgaatgtttataagttagagcatcagtattcccgctcgcataagttttatggtgtgcgtacaacgttgacatttcacgaactgaatgtcctgtgcgcatatctgcaattgttacattttgaacttccccgtattgatggcgcagaagataccatcgcagaggataatggagagaaattacttaaaaccatctttaatgctgagtctgtttatgaagaggaaaaatattcacaaacactggattttcatgataactggaatgaatactgtggtggccgtttgggtgaatatatgcatgagattattcaggttgccagaccagatgcgtacaaaaaattgctgcaaaatatgatagctgaatgtcgggatgcgatcagtcgatatcgcgaaggaaagttctggctggaaaaccctgacaaatggcgcagcgatgttgaaagtaatattcatcggctccaccaccttgttgaaggggacgcagtaaaacctgagtggggctggcagacgatgggtggtgcttcgtgtacaggacgtgtttatgtgcgtaatgataatcaacccgacgtaccgtctccgtatgatgactga

SEQ ID NO: 402178 - DNA, 159 bp, Salmonella enterica
atggctgttatggctggaagcgataacgaaagtgagcaagatgctcggcctgccggcacgcaagtcggtaagctttacgccatctggcattttcaggaaccgggacagctaaacgagaataaacatattcaccgctgtgccagcctctgcgtagtgtga

SEQ ID NO: 402179 - DNA, 1005 bp, Salmonella enterica
atgactgaacatttcttaccagcaggccaccctgttgtttacactatcgagcagcggagtaccgttccggtcgagacctggaacaaatttacctcagcgattatcgatatataccactgcctgccatgctgcatgcggccggtgaatccgcgccggaacaatgagcaaaccggtgctttctcacttttccatcccgacagtagtccaaaagctgacgagctggtcttcagcggtaaaacgggcgaaggttacaggcatcgtatcattaccatatcgcgtgagcgtacccgggatgtcctgagcgtggatgagattgaaacagagcatcagatgtcggtagatttgtttacccgcatggtgatgctggcgcttcataatatctgcggtgcgcattttcttgttcattccacggcaggtgcctgttcatgggcgctgccgctggccatcctgaaccgggcccgtgacgaccagtttgcgggctgggaaattcctgatgcggtgcagtatgccacatcgttttcgcaggaaaatgcccggctgactgaacaggctattgctgcaaaccttaccctgagcccgggaataaatctgtcccgcgagcagtgggaggatattgccgctctggagttcaggttgtatgaacccctggagccgctttccgacgatccggaaattcatccggtggatatcattcttggttccagctccggatctcatgagctggtgacgttgagtggtttagacgctctgctttactgggtcagcgtcaatatgccggactatgcggaaggcgttccggatcaggaaccgatatttctgtcccgcaatcatctcgcattactgcgcgatgacatccgcaacggctggttctcgtcgtacaacaacgatccgacctacggagagatgttctgtaccgagttgcagctgattgccgtgtgggcggaatactgcatccgtacgctggatatggagcgggaaagtgttttcctgtttgcgatctggtaa

SEQ ID NO: 402180 - DNA, 618 bp, Salmonella enterica
atgctgcgttttcacggaaaagacctgaaagctgttttgaccgagtccttaagtaacgacaggcctgtggtactcacctgtgacgtaaccgtgtctttgtccgttcaggatggcgaacgtttccgttcggcccccggacgtgaagaccagttacggcacaaggcatttgcagatggctgccatcccgacagggatcagggatgggctacgctgacctctgtgctggtcgacaatgctgttttcactaaacctctcgtcctgacggaagggcgtatatgggacatgctgacgaagaatcatcagctcactctgatgctttcagagaacgatattgcggtatacagcggcgaaaagcgttatgtgccactggccgattatcgggatctgacggacaggctgcatgtgacagcctccgggcattttactgcctgcagcagtcgcagcgagctgaagtgctggcgtatgacagcattgcggttgcttgaggatgctcgtcccgttgcgtgccgtcatgccagacctgcggaccataaccggtttttgattgccgctcataatctgcagcgccggacagaatgtgtttcacctgacggggcgctgctgcttctgagcgcctga

SEQ ID NO: 402181 - DNA, 1056 bp, Salmonella enterica
atgaaaactgataaccgcaaaaccactgccacggtttgtaaaaagccggcggcacgcaaaacctcctcctccggcaaacgtcgccaggcaggaacggccgcgacgctcactggcagtggcgatatttatcgtctggtcactgaccggataattgtcgcgctggaaaacggtatacccccctggcgacggccgtggcgaaacgcgcagcaggggataaacaccttgatgccggtcaactcgcttaccggccgggactacagtggcgtgaatgttctgctgctgtggctcgcggctgaagagcgcggttttaccagcgaccgctggctgacatacaaccaggcacaggaggccggaggtcaggtccgcaagggcgaaaccgccacgcttgcggtgatataccgcgactggacaaagcaggcagaagacagcaacggcaataagctgtttgatgctgacggtaagccgcagatggaaacggtgccgatgttgcgccagtttcctttgttcaatgttgaacagtgcgatgatcttcccgaccaggtatgtggcactgccaccgtcacccggccgcaggaggatttcgctggtgtcagtccggcacaactgcagcaggtcctgtcggtggtgaatgccaccggcgtgcagttttcaccccagccgcagaaccgggcgtattaccgtgccgccacagaccagatagtgctgcccctgacatcgcagtttgatgctgagggtgactactggtcaacggtgcttcacgagctggtgcatgccagtggccatgcgaagcgactgaaccgtgaagggataactcgggcgtcaaagaaatttggcgacccggtgtatgccttcgaggagttgatagccgaaattggcagtgcctttctgtgcgcacatctcgggataaccggtgatttgcagcatgaaagttatgttgacggatggctgtcaaaactgaaatccgacaaaaaggcgctgttcagtgcctgccggcaggcccgggaagcgtcggaatatttgctcgcgccacttaaccgtcaggctgaaacggcgtaa

SEQ ID NO: 402182 - DNA, 936 bp, Salmonella enterica
atgtctgaatggtgccagaaccgctttgaaattaccggtaaatcggtctgtatcgatgtgttgttgcagtggataaacggtgcagacacgccgcgttatcgccacgcaatactgcagagtatacagctgttcctggcagggtgtgcggggatactgaaaccggtgagaactgtctcgtacatcccctttcaggggctggttcgtcatggtgtcgggcagtcaacggccgctaatcttgcgtttgagcagtggctggagctgctgcagaaagacgtggcgctggatacggagactatacgccggattgaccggctgtatcaccagtcctgcctgggggcgctgaagtgggaaaatatccctcaggcgtcacgggacatcatggctatgctgatgaaaaggcagtatgcggactggttcggtctggccggcctgaacgatgagcctgatgctgcagcttgctgggaacgtctgcgggaatacccggaacggtcgcagccctgcgatatgctgatggttattccgacgcggctggccacagagcttaatggctccggtgggctgttgacgggagtatccacaacgttgagcttctacagccgcatttacgggatggagtggccagccgggcataatgtaaacctgcaccgccatgccgctaacgggttaacgttgcggctggattctccatggtatccgccgtcaggtgaggtggtggccggtatttccgctctctttgagtgtgaagtgcgacatacgtacagcgaaccggtcagcggcctcagtggttatgactgttatgacctcggggcgcatgtggatggccacctggggttgccggtggacactctacagtccgcgccggcgctgtatctggtcagtagtgaaccgccgcatcctgaaccggagacggctggttacagcgaagtccgtggataa

SEQ ID NO: 402183 - DNA, 684 bp, Salmonella enterica
atggccggttttattgaccatgaaaaagcgtttatctcactttttaatcagaccgcacgatatcatcaccgccataaggtattcgaagattttgtcagctgcagcgttattgcactggaaaaccgtctctgtttcagcgaaaagcgagaagctaaatatcttcgaataatcggtggttatgaaaagccggatgttgtccgtatggcgcaactgctggctcatgtggttaacgggctgcagaatgggttctgtgattttctgggtaacgtatttatgcagctggaactgggcgataagtatcgcggccagttcttcaccccctgggatgtggccagaatgatggcgcagttgcaactgggggatgtgaaggctatgtttgatgaaaagcctttcatcactctcagcgagcctgcctgcggtgccggttgcatggtactggcttttgccgatgctcttaaccaggcaggctatgcgtcacaccgttatctgtgggtttccgcgacggatattgatccactggccgctggcatggcctacatccagttatcgctctgcggcgtggccggtgaggttgtcattggcaacgcattgtgtgacgaacggcggcgggtactgctgactccgggccattatctcggtaactggtcgcttcgtctgaattcactgcgaaaaaaggtcgcataa

SEQ ID NO: 402184 - DNA, 1482 bp, Salmonella enterica
atgacctggaaaaccacaccagaacaaaatgccatcgtcgaatggcggggcaatcagcttgtggtcaacgcgtttgccggcaccggtaaaacagccacgttggtacagtttgcacagacgaacccggacagtaaaatgctgtaccttgcctataacagagccatccgcgacgaagctgagcaaaagtttcccttcaacgttgagtgcaaaacttcccatcaactggcctggtcgcatttcggccgacatttcagacaccggctgacagcaaatctgcgaattaccgatgtggcccgtaaactgaatactcgtcactggccgttggctcgcctcgcgattaccggcctgaatacgtttctctgtagtgcagagccggaacccggcattatccatctaccagcagagggtgagcgtcatgggctctctgcagataaaattctgggtgccgtacaggttctctggtatgaggtgaatcgtactgaatctgatttcccgatcacgcatgatgtttatctgaagctttttcagctgtccggccccagtctcgccaataagtgggacaccattctctttgatgaagcccaggatgccaacccggttaccagtgcctttgtcctgagtcagccctgtcggattgtgctggttggcgatcgctaccagcagatttatcgctttcgtggcgcagataatgcgctcagttcttcccggttagaacaggccgaccggctgtggcttacaaccagtttccggtttggccctgcggtcgcagaaatggcgaacgtgctgctggcaacgttgggggaggagatgaaagtcaccggcagcgctggggatgatgaagtggttgctcatctgcctgctgacgttcctcattactccgttctcagccggacggtatccggtgtcattggtgtcgcgctttctgccagcctgcaggagaaaaaagtcttctgggtgggcggaattgaagggtacaaaacggaagagctggaagacctttactggttctctgccgatatgcctgaacggatgcagttcccacgtctccgtcaggattaccgggactttgaggaatattgctccattgcgaaggcgacacaggatgtggagatgaatcaggccatccggttgcttgatgagtattttccgctgccacaaaagctggccatcatgcgccggcaggttgtgacgcatgaaaaggatgcgcaggtcactgtttccacagcgcaccgcagtaagggactggagtgggacgttgtcgtactgaatgaggatttttgtgacatcaccgacccgttactctctgcagaagagcgacaggacgaaacaaatctgctgtatgtggccgtcacccgcgcccgtaagaccctggtgctgaatgagttgatgcagtgtctgaaggctggtgaagagcagaaatattgcgaacaacctgcaacggatgatgttcagaaggatgggggagaggcgattttcccatga

SEQ ID NO: 402185 - DNA, 1590 bp, Salmonella enterica
atgataaataaaatcaaaacgtttttgtccggtacgtcggctatcacagaaccctccggcaaacaccctgtttcggcgccgacagggtatttctctccggttaaggctgaagaactgaccatcagcgcattacgccaggaggccctgcagaaaatccgggaaaataacgcgctgtcgggcgaagtatatcagcgactttatctggctcctgtgcaccacctgcttgaacgggcccagaacgtgccggcggcacctgatggccggtgggcttataccggaggatttggtgatttaagcctgcgttttaccgcttatgctgtcaggcttgcccgggggtatatgtttccgcccggtgcaaagccggaagaacaggctgcgcagggtattatctggcaggccgttattttctgggccgcgttatgctatcacctgccattactggcaagtattgaaggcgaaaccgccagtggcttcaactggcaacctggcatatctgtgcctgatacaccttatcgcttccggtttcgttcttctcccccgaacgcgcatgatgcttctgctctggcggcgcttgccgccggtcaactgatgcccgcagaagcgataaactggctttcaggtaactccggggcgctgctaagtcttgcctgtgcattccgcaatggttctccagatatgcctcttatcaggacgttgctcgaccaggctgcagagaaggttgactcaccggcgcttcggaaggagacaggtgaatcttccgtggtaattgcgccgccagattctgtaacatcacagaaggggacgttggccgttcagacggacgataatttatcctcttctgtggtggagctggccgcttcggagctgatgacgtcactcaacgatactggtggcggggacagacagccaccgctgaacggggtaagtacagtggagtctccggaagagcaggataacggcagcccgggccaagatgatgcagatatgctgctcagtcttttttctgcagtggcggatgcagaagtctcggaggttgcagatgacgctggtgtgaatacgccagccacagcagcgccggatgaaatggtgcccgttgggaaagacgttcctgatgagcctgctgagatggaagatgcaccccagcataacgatatcagtgctgactgtctgtcgtatggtacagagggagtgctgggctacccggttaatgtcggtgtcgatgcccgacggtcgggtgaggattttctcgcctggctgtctgacggcatggcatccggcaggatcaccgtcaaccagcctgattcacgggtgcattccgttgccggttttatttaccttctggtgccggatattttctttctttttctgaaagataccggaagtgacagtcacagagagcagattcagacgtcgtttgaaaaactccagctacatcgtgtccgcaaaggagagcgttttacccgggcgaaactgtactgctcagaagataaacaggggcggttcagcaaggttaatggttatcttatcaaagctgcccgtctgaaaggaatgagacctccagaggacagcaagctccttttctttccataa

SEQ ID NO: 402186 - DNA, 1011 bp, Salmonella enterica
atgcgtaatgaaataacctgggatgaactgcttgaagaatacttttttgctcaccggctgagacccgctaccgaatggagttacaacaaggttgtcagagggttcaggcgttattctggtgataccctgcctgcgcaaattacgcaccgtcaggtactggagtggcggcgttatctgcttcaggagaaacaacaatcggcgcagacatggaacaacaaaattgcacatctgcgggcgctgtataattacgggatggaacatgagatccttcccccggggaaaaaccccttcaataaaagcaatgttcagcgggataccaggaagaaaaaaacgcttacacggccgcaactgattcgtgtttatctggtcatgcagcaatttgaagaggctgaacgagtaggacgcggtatcagaggaggacgtaatgcgctctggccggcgtggtactggctgactgttctgaatgcattcagatatacgggaatgcggttaaatcagttgctgcatatccggctgggtgacataaatctcagcgagggatatctggatctctgtctggagggcagtaagacacaccgtgaatggcgggtacccattgtcagtgcgttaaagcctcggttgcatcacttgatggaaaaatcaacagcgctgggtgcggggaaggaagattatctgtttgatgtgaacagaatttaccttaaccgtcatgttgtatgggatgcagctaaggtccatcagaagatccgatcatttttccggcgtctgtcgaaagagtgtggttttaccgtgtcaccacatcgttttcgccatacgctggcaacggaactgatgaaatcaccagaacgaaatcttcaactggtaaaggacctgctggggcaccggagcgtcagtacaaccatggagtatgtggagctgaagatggatattgtcgggaaaacgctggaagccgaattgtctcttcacactgatattacagcggaaagaaatttacacctgttgacacaagcgtag

SEQ ID NO: 402187 - DNA, 126 bp, Salmonella enterica
atgaacctgatgacgtggctaacaggaaaaacactggcggagctggtgaaaaaagggcagttgatcccgccagaaattaagttacctgtgtatccggccagccactacaaaaaaaaactggtatga

SEQ ID NO: 402188 - DNA, 261 bp, Salmonella enterica
gtgggacaagtggtacaaccgcgccagccgtggctttgcgctgtaccacctgaaaaatgccagtcggaaaagtgggacagatttagcaacggctgtcccaccctgtaccacctttttttaagacacgttagactgcactcagatactgaggatgcgggaggtaagccggtaaaccctggttttgccgatctccggcaggcgaacctgcgactggtatttcccgtcgctgccgggctgcaggcattctgcttcctggcataa

SEQ ID NO: 402189 - DNA, 303 bp, Salmonella enterica; identical to SEQ ID NO: 376343

SEQ ID NO: 402190 - DNA, 129 bp, Salmonella enterica
atgggcagcgttaacttcataactcacgccgatgttctgcaacttattgcgaaaagaacggctgaagattgtattatttttctttctggtcctacgtccagaaagacgccgctgtccaatatttgctaa

SEQ ID NO: 402191 - DNA, 699 bp, Salmonella enterica
atgaacgatacactttctaatacccagcaatcacgtgagacaatagaatgtgatgttcttattgtgggagcaggacccgccggattatctgcagctcttaaacttaaattacaggcaaatgacgcaggaaaagaactgtccattatcgtccttgataaaggagctgagcctggttctcatattctcagtggggcagtcatggatccccgagcgctgaatgaactaattcctgattggcaggaaagaggcgcacccattaaacagcctgttactcaggataaattactgttactgacgaatgaaaaatgcattaatttgccggatgcattgattcctgataattttcgcaaccatggaaactttatcgtaagcctcggtaatctcattaaatggctcgccggtcaggcagaaacgtcaggcgtggatatttatgcaggcttttcggcaactgagatactgtatgatcaggatactaacattatcggtgtagtaactggtgatatgggacgtcatcgggatggcagcaagaaagaggggttcctgagtggaatagaaattctggcaaaatatacaatttttgccgaaggggcccgcggtagtctggctaaagaactgatcaaaaaatttcatcttgatacaggcaaagcaccccagagttttagcaggttccatcagaccagtcccatccggggcttgtaa

SEQ ID NO: 402192 - DNA, 3201 bp, Salmonella enterica
atggaatttttctatgtagtaaaagctacgcagaaatccggaaagcaagatgcgacggtctggttcactgcaaaatcagaagcgcgcgccaaccttatgctggatgtcgttctggaagatgctgaaattgaaaccggccgcggtaaggattatgcaaggccgatccgcaccaattttccggtagtcaacgagctgccgccggaaggtgaaataagttttaccttcactaattattatcgcctcggtgaagatggcatgacttgggaacaaatccccggcgtcaccctgccatcatctgaagccgccgccgcggcgcgccagcatatcgtcgatggtgttgataccgaaacaggcgaagtgctggaagaccacaccgaaaattttggtaacgaaagcaacagccctgcccaggcaacagccccagcccccgagctgactgttgtcgcaactatgcctctccgtcaccgcgttcttgctcagtacataggtgaaggtgagtatctttatcacgtcgatacagaccagaaaaaagaaatcgcgtgtctggagatggatactcagaataccactgcccagaacctgatactcgcagcagaaaatgtagagccgttcaaaaaagctatcgagcacgatattcacaaagcagtgaatgcgtataaacaggtatttcctgtcgatggaaaagtacctgagttatgcaccactattaagttttttaaggaatggttcagtgctgaacacattaaccgcggcctgctggttaaggaatgggctgaacgcctgaagaataaacctgtacccgttaaaaaaaccgggcaacataaagtaattgtcgacgacgtaaataagccagaacgtccacgccgtagcgaaaaaccgacacacagaacgattaactatgagctcgcctgtggtttctgtgaggagctggttctgaataacctgcgtcctgcaatggattttgcaaaacgtatcatcgccgaagaccgggaagactggaagcgaatgtcgatgacagtgggcactattcccgacatcaaaggctacgaccgacagaccattattgacctggtacgcaaagcgccaaaggccgtacataacggtaatcctgatcttcgccggacgtggtgcgaaagctttcttgccgttcatggtgttcgcgatccggactggtacgaatatgtgcctgataacaccccaacaacccatgaagaaaatgcagcaagacttcgtcaggcgggcaaatgtctgcgggatattgagtcagggagatttcagtgtgatgaagaaaaaccgcaaccgacagacgaactggcagatgaaccagcaacgcctgaaacagtggaacaggacacaactgaacatcatccggacccgcagccgctggagaatgagccacctgtaagccagacagaagcaggctaccagaaaatacgggcagaactgcacgaagcacgtaaaaacattccacccaaaaacccggttgatgttggtaaacaactggcagccgcgcgcggtgaatatgtcgaaggcatcagcgacccgaacgacccaaaatgggtgaaaaccgagacaagccaaccggcatctgagcctgaactggttaaaaatgttggcaacggtattttcgacgtgtccgctttaatgcagaactcatcaactcatggcacagaaacgaatccggagaccaccagcaatgtgcaggttcaaaaagctgacagtgatgaaaaacaggctggtgatgcggtgcaggcaggcgaaggcgatctgggtactggtaaagaagcagttaccatagagaaccagagtcaggctgaaacgcaccagaataacacttcagtgagccaatctgagcctgaggagcaacaaaacgtgccagattcgccacaggaaaaaccagaagcggcctggccggaatacttcgagccgggccgctatgaaggtgtaccgaacgaggtttaccacgctgccaacgggatcagctcaactcaggtgaaagatgcgcgcgtgtcgctgatgtactttaacgcacgtcacgttgagaagaccatcgtcaaagagcgctctccagtacttgatatgggcaacctagtgcatacgctggcgctgcaacctgaaaacctagaagcggagttcagcgtggagccggagatccctgagggtgctttcaccaccaccgccaccctgcgcgagttcatcgacgcgcacaacgccagcctgccagcgctgctgagtgctgacgatatcaaagcgctgctggaggagtacaacgccaccctgcccgcgccagtaccgctgggcgccagtctggaagaaacaggccaaagctacatggcgctacctgctgaataccagcgcattgacgcagaccagaaacaaacagccgcagccatgaaggcctgtatcaaagaatacaacaccaccctgtctacgccggttaaaacgagcggcagtcgtgacgcgcttcttgagcaactggcaataatcaaccccgacctggtcacgcaagaagcgcaaaaatcggtgccgttgaaagtatctggcacaaaggccgatctgattcaggccgtgaaatcagtaaatccggcagcggtattcgccgacgaattgctggatacgtggcgggagaaccccgaagggaaagtactggtcacccgccaacagctcagcaccgcgctgaacattcaaaaagccctgctggggcacccgaccgccggcaaattgctgactcacccaagccgcgctgtcgaggtgagctactttgggattgatgaggaaaccgggttggaagtccgggtacgccctgaccttgagatcgatatgggcggcctgcgcattggcgccgacctgaaaactatcagcatgtggaacatcaaacaggaaggcctgcgtgcgaagttgcacagggaaatcatcgacagggactatcacctgagcgcggctatgtactgcgaaaccgccgcactggatcagttcttctggatattcgtcaacaaagacgagaactaccactgggtcgccatcattgaggcgtccaccgaactgctggaacttggcatgctcgagtaccgcaaagcgatgcgtgcaatagcgaacggtttcgatactggcgaatggcctgcaccgattaccgaagactacaccgaagaactcaatgattttgatgtgcgtcgccttgaagcgctgcgcgtacaggcataa

SEQ ID NO: 402193 - DNA, 249 bp, Salmonella enterica
atgaaaaatgtacgtatgcaattcgatctgcctgaagataggttggacgaactcgattctttaatgaagaagtgcggcataagtactaaaaaagagttgttcaactacgcgttaacaatgcttgagtgggctgtggacgagtccgaaagtggtcacgaaatcgcagctatcgatagagacagtaagcaattttatgctctacgaatgcctattcttaagcgagtgaaccgtacatctactgcaaattaa

SEQ ID NO: 402194 - DNA, 372 bp, Salmonella enterica
gtgtcagacagcctggatgggtttactgagggcgatacccaaaaagaaaaacaaaaggtaaagcagcccaaaccgttctttaatgacgtcgaggagtctgctgatagaagacatcttagatggactaaaagtggtgttactttagctatgactattttggtcgcagtaatgaactggatggtcataagtatgttatatcatgttcttgatgaagaactttcgctcataagaagtggctttatgcgggcggatgaaaggacggtaactactagtgtttacttggctttgattgcaggaacagtagcagaggtgtcagctttattcttgattattgtaaagtcagtttttaagaataataacaatgatatatag

SEQ ID NO: 402195 - DNA, 483 bp, Salmonella enterica; identical to SEQ ID NO: 379699

SEQ ID NO: 402196 - DNA, 426 bp, Salmonella enterica
atgtccactatgccgcccatcatgacgaggtttgttgcctcgctcctatgtttaaccatctcagttcttccgatacattcttatgcgggtaatcaggaacctaacatcggagctgttggtcgtgatgccaaacaatttggtttatctattgcgaacggagttaagcaaaactctgctcaggttcaagatggtaaaatttctctaccagtcggtaatggtcaatcaacatccataaacataaatgaactgtttcctggagttcaacctggtcaaaataccgcagagtatttccctgatgcagcatctccagaggagctagaacagatatttagtgatgctgatgctatggatcagtttgggaatgaggtgatttatgctgtactggaaaagaatgccttcactatggataggtatcaaaatatctga

SEQ ID NO: 402197 - DNA, 1407 bp, Salmonella enterica; identical to SEQ ID NO: 290963

SEQ ID NO: 402198 - DNA, 201 bp, Salmonella enterica
atgaaatgcgccgacagcttgagtacaagcagctctggcgaggtggtcaggtactggcaataccccctgcctacaccagtcagaagtgcgcttgctgtggtcatacagcaaaggaaaaccgccagtcacaaagtcaattcgagtgccttgaatgtggatatacagcgaatgctgatatcaacggggcacgtaacattttag

SEQ ID NO: 402199 - DNA, 219 bp, Salmonella enterica
atgggctactgtatacacgcagcaaattacagttttttagacgatattcatcaatcaaaagcgttattgtacgacttgcaagcccgctatttgtgccgtcatcaaccgagaacatggcagatcgccaatgaaaaagccgcaccttataaatacaaccaagttttattgagttaccaccgttatatcgcctgtttaaatacccaaggagaaatgaaatga

SEQ ID NO: 402200 - DNA, 300 bp, Salmonella enterica
  misc_feature (200)..(209): n is a, c, g, or t
atgaaacatcatgcttttatgctttggtcattacttattttttcattccatgttttggccagttcaggccattgttctggtttacaacaggcatcatgggatatttttatctacgattttggtagtaaaaccccgcaaccacctacaaatactgataaaaagcaagccaggcagattagttcaccgtcctgcccgacgannnnnnnnnnggacggtgaactaatctgcccgacgacaaaacccatgatgtccgcaccagtcaatgacgccaggaaagggaatactttctccagaacataa

SEQ ID NO: 402201 - DNA, 126 bp, Salmonella enterica; identical to SEQ ID NO: 402187

SEQ ID NO: 402202 - DNA, 249 bp, Salmonella enterica
atgggattctgggataaagcttttgatgtagctaaaaccgtaggaaaagctgcatgggaagaaacaaaagctgcaaatgaacgagccaagcagtacagagaagaggtagtgtcacttagcgatcgcgaactagcaagaatcattgcaacagaacgccacagcacaccattaagagctggcgctgcaatggctgagttaaaaagaagaggctatgctaatgccgaagaaataaaagccctcctaaaataa

SEQ ID NO: 402203 - DNA, 1095 bp, Salmonella enterica
  misc_feature (1001)..(1010): n is a, c, g, or t
atgtataaagaagaaaataaaaatatagctcgtaaaagtgttttaaaagctgcgattgaggcgcttactttgtgtagaaaagactcgactttagctcctaaagactatattcgaaaagttaaagcgttttataggaaagacgagagtgatccacgtgcgtttattgttgatgagttatcggaggaaacaataattcggtgggaggaattctatgattcagtgattcaggataggactgcacgtagtattaaagtcgcatatttatctgggcctaaccctgaaaatgatttaactgaaatgactgatatggggcttttgccagaaaatatttgggcatttgaaagtgatgctaaaatatataatgaggctgtaatttcagcactttcttcaaaatttccgtttataaaattaattaaagctaatgttggggatttttttgaggtgtcaccgcagaaatttgatcttatatatcttgatttctgtgggccattgccgagtaagaaagctggtcagaaaacattaaaggcaataacatcaatattaaaatatcatgcgctttcacctcttggtgttatgataacaaatgtaagtctaccgtcaaaagaacaaaacgcgaatgaacataaaaatatcgtaaatttagttgcgagttatctctatccaaaatcaacactggagagtaataatcctgaatggaactgtactgatggtgcaatttctgaaggttatagccttgatgagtggcataaaaaagttgaatgtgaaattgaagatttctatgggcagtatataacgagattattagttgatctgatttcggtgatctctccatatgataatttcacctcatcgcattctttatataaaaatatgtttaaaatttctaattacaacgatctaactaaaagcgtaaatgatttatttcattttgatagtaatgggaatggtggggatattatagttgattcagggctatttccaatcctttggacaattgcatnnnnnnnnnnaataataaagataagaattactatcaagatatttattgcgatgatgattttaacgattatgctcagtcttttttatcgcaaatga

SEQ ID NO: 402204 - DNA, 465 bp, Salmonella enterica; identical to SEQ ID NO: 375900

SEQ ID NO: 402205 - DNA, 165 bp, Salmonella enterica; identical to SEQ ID NO: 371553

SEQ ID NO: 402206 - DNA, 426 bp, Salmonella enterica; identical to SEQ ID NO: 238011

SEQ ID NO: 402207 - DNA, 1533 bp, Salmonella enterica
atgagcggcgcggagtgcgtcagtgaagggtttgccgacaaactgatacagcctgtaaaagcaatggcctgtattcattcaaaacgtgttgaggagtttgagcatatgccacagagcattaaaggtatgattatcgccccgcagggcaatgcaggcgcgcaaccgcagccacaggcaaaagcccctgagtcacagattcagtcgcaggctcagtcgccggctgtagatgaaaatgccattcgcgcacgcctgcaggaagaacagcgtaaccgtatcaccggcattcagaatgtgttttcactttccggcgatcgttatgcctcgctgatggcagagtgcattgctgatgtggattgctctctggaaatggcgaaggacagactgttggccgagatggcgaaaggtattacgccgactaaccagctgaatggtccgcagaatcgcgcagagtttcatgccgggatgtataccggaaacggtaatattaccggcgacgccgttcgcgctgccgtgatggcccgcgcaggctatgaagaagcgcagaaggataacccgtacaactgtatgaccctgcgtgaactggcgcgaatttcgctggtggcgaggggtacaggcgtgtccagcatgaatcccatgcagatgatcggcatggcatttacgcacagcacctccgatttcggtaacattctgctggatgttgcaaacaagtccattctgcagggctggcaggaagcgccggaaaccttcgatgcctggaccaaaaaaggacagttgtctgatttcaggattgcgcaccgtgtgggtatggggggattcagttcactgcgtcaggttcgtgaaggagcggaatacaaatacgtcaccacaggggataaacaggcgaccattgcgctcgccacctatggggagctgttcagcattacccgccaggccatcatcaatgatgatatgaatatgctgacggatgtcccgatgaagctgggacgtgcggcaaaagccaccattgccgatctggtttatgacgttctcatcagtaaccagaaactgtccagtgataatgtggcgctgtttgacaagacgaaacacgcaaacgtccttgaaaaagccgttatggatgtggcgtccctggataaagcgcgccagctaatgcggatgcagaaagagggcgatcgccacctcaatatccgtccggcatttgtactggtgccgacggcgctggagtctgtgtcaaatcaggtgattaaatctgtcagtgtcaagggggcggatattaacgccgggatcattaacccggtgaaagatttcgccacggtgatcgcggagcctcgtcttgatgacgccagtcagtccactttctatcttactgcagcaaaaggcagcgataccgttgaggtggcttaccttaacggcgtggatgagccgtatatcgaccagcaggaaggattcacggtggatggcgtaaccacgaaagttcgtattgatgcgggcgttgcgccggtggattatcgcggtatggtgaaatgcaccgtataa

SEQ ID NO: 402208 - DNA, 255 bp, Salmonella enterica; identical to SEQ ID NO: 379364

SEQ ID NO: 402209 - DNA, 216 bp, Salmonella enterica
atgagcgtgataaaaactcatacaggaattgttatcacccgagacggtgacaagcggatgaaattacattctactgaaacgtcctgggttgccggacgttgtgaatcctacgacaaaaagactggttaccgttggggggcgccaaacatgcgtcgccgtctgctcctggacagcatcaggccaattaaacaggtagcaaccagagagcaaaattaa

SEQ ID NO: 402210 - DNA, 225 bp, Salmonella enterica
atgagcaaccgcttcctgactgatgaagaactgatagaggcgacagggtcttcccaaaagtcactacagaaagaagtcttaacgcagaatggcattttttttattgaacgcagggacggttctgtaaaaacgacctggtttcatataaatcatcccattcagcgtttggctccaccagcaggtttctcgcccactccgggtatgaactttgatgctatagagtga

SEQ ID NO: 402211 - DNA, 987 bp, Salmonella enterica
atgggtcgaaaacgagcacctggtaatgaatggatgccgaagggggtatatttccgcccttctggctactactggaaaccagggggaacaacagaaaaaattgcatcagccaatgcaacaaaagcagatgtctgggttgcttttgaaaaaattgtagaggggagaaaaagacgaataacttttgcccagctttggaagaaatttctcaatagtgccgattatgcagatttggcaccacgaactcaaaaggattatctatcccacgaaaaatatctccttgctgtttttggcgaagcggaagcaaagactattagaccagaacatgtaaggcggtatatggatgccagaggaaagaaaagtcgtgtccaagctaaccatgagcacagttcaatgtctcgggtatttcgttggggataccaacgaggatatgttcctggaaatccttgcgttggagtagataaattccctaaaccaaagcgtgatcgctacatcacagatgaggaatacatggcgatttatgaacacgccagtgagccagttaaagccgcaatggaaatagcttatttatgtgcagcgagggtatccgatgtcctgaaaatggactggccgcagataatggataaaggaatttttattcagcagggcaagacgggagttaagcagatcaaggcgtggactgatcgcctgcgcgcggcagttgatatttgcagatcgtggggggaaacagggtcagtaattaaaaccatgtatggagagcgttactcttacaaggggtttaatgaggcatggcgaaaagcaagaacagcggcagccaactatcttggaagacctctggattgtacatttcatgatctgaaagctaaaggaatttctgactatgaaggatcatcaaaagaaaagcagctatttagtgggcacaaaactgaatcacaagtcatggtttatgatagaaaaatacgcatcacaccaacattaaataaaaattag

SEQ ID NO: 402212 - DNA, 756 bp, Salmonella enterica
atgaatagtatagcaattttagatgcagtgaacacctcttacgtacctttcaacggtcagcaaattatcaccgccatggctgccggagttgcatatgttgcgatgaagccaatcgttgaaaaccttggaatgagctggtcaacgcagcaaacaaaactcatgaagcagattagcaaattcaactgtgttcatatgaacatggttgccgctgatgggaagcttcgtaagctactctgccttcctttgaagaagttaaatggatggctgttcagcatcaaccctgagaaagttcgtgctgacatccgcgataaacttattcagtaccaggaagaatgctttactgtgctgcatgactactggacgaagggaaaggcagaaaatgcacgtaagaaaacatctgttgatgacaggactccgcttcgtgatgctgtaaatatgctagtcagcaaaaagcatctaatgtacccagaagcttatgcaatgattcatcagcgtttcaacgtggaaagtattgaagagcttgatgcatctcagataccgcaagcagtagagtacatccacagggtagtgcttgaaggcgaattcatcggcaaacaagagaagaaaaccaacgagctttctgcaaaagaagcaaacagccttgtatggttatgggattatgccaatccgctcacaggcattattccgcgaactgtatccggcgctaaaacaaattcaatcgaactattccggcagatgctacgactacggtcatga

SEQ ID NO: 402213 - DNA, 255 bp, Salmonella enterica; identical to SEQ ID NO: 21843

SEQ ID NO: 402214 - DNA, 1053 bp, Salmonella enterica
atgaattcatctagcgcatttgctacgcctgttgttgccaacaataatcaacaagtattatctgatttgattactgcgcttgagcagaccaatctatattcctttatttctcagatagcaactgtgtatggatttccacctgttaaaggtggaatggatgcggttttgaaggcaatcgaggcatctatacagaatccaacagctgcatttcctaatgctacattaaattcacttgagaaaatgatcgatagaataataatttctggtagtaactattattctattgacgaaacacaagacccaaatttccaaagtgtgatccaacatgtttttagtacaagtgtaactgattcaaggtatgaaaattcttatccaagaaagttatatgatgggaattcacttgggaacaatgtcaaaggtctttatctgactaaattaattgatactggcgatggctttgcttttattttctcatatgtttatagtgttaagattaagggaagtcgcggtttaggactatcgtataccccacagcaacaatttataacagtatttgttccccataataaaaataggatcgagtatcgtcttccaaaaaatttagggaaacgggagacagcaaaagcgcttgcatcggtgcgtaataaattttttgatatgctcatcagtactaataatactattcatttcgaacaattgaatttttataatgtgatcaatagcattattactgatagatcgttcgggaaagcagttcagataatttatgttggttctaatacaggttgtgatgctaatgtcattggccgcaaagatccgacatatgaagctcgagatgtcgagattactaataagaaaagaaatgatatttatacaccacgtgctgtagccgtaagattttacagaaataacggtgactttacagaattgggtctagatccaaataagaaatcttggttggatgataatttttgtggcgaattttatgttgattttcctgaagatacaatctcattaaatggtttaattgaaaatgtcatctcacgaaaatga

SEQ ID NO: 402215 - DNA, 396 bp, Salmonella enterica
atgatgcttttgattgaacaaaggatattattggatgaaatgaaagatatctttcctgaagaagatatctttctattcaataatgttttggatttcattcaaaataattatgataaaaattattacccgattaatgtattaaggcaagcggcaggctgtgaatcggactcggatttgctaaagttagtccgttatttttgtggtgcacattctaaattatttaatataacttattgctattatgattttgatggtgaagaaatccctatttcagcagaatgctactataatgctctgattagtgatatttctccgatcagtttattgtctgggcgcgaaatagatgatttcgatgttaataacatttctttttactgtatattaaatgtcaaataa

SEQ ID NO: 402216 - DNA, 189 bp, Salmonella enterica
atggacgatagcttagagatatttgaagagtggtgcgctgatgaacttggtgtctccgcttacttcattcgacaaatgcgaagcaagaatattttgggcgtgattgagtataaacgagttgaaataaacaagagatacagggcttggatggccgcagttcgcgccgccggagtcaaagtgaaggagtga

SEQ ID NO: 402217 - DNA, 792 bp, Salmonella enterica
atgtcacaccaggtgatttgcgaggatttacccagcaccacttttttgcaggaatcggagtttggagctatgcacttagaaaagcaggatggccagacaacaagagtatctggacaggaagttgcccatgccaacctttcagctcggcaggcaaaggaaaaggggttgatgacgagcggcacttatggccggcattcttctggcttattgaaaaatgcaatcctggcatcgttattggcgaacaggttgcaagcgcagacggcctcgcttggctcgaccttgtacaaactgacttggaaggtgcgaactacacctctgcaggtaccgatatttgcgctgcgggcttcggttctccgcacatcaggcagcgattgtattgggtggcctactccaacgacaaatatcaactttcagccagagacacgcaggggaattcagaacctatctggatgcgtgagactagctggatggcaaactcctttagcgaacgatgcaacaggttcaacgcattgctacagcggaaaagacaagagcggaacccaaagaatctgcttgaaacttcccgggacggtgaaactatgtacccattaccggttaacggcttctggagagattcggactggctttactgtagagatgaaaaatatcgtccagttagacccggctcattcccgatggttaatggcattgccaaaagcttgggacgaggcaagtccacactgggaagaatggcaaagcgcaatcaagatcagcgaattattggatatggaaacgcaatcaatgcagaagtag

SEQ ID NO: 402218 - DNA, 468 bp, Salmonella enterica
atgagtcggttaaccgcaatcatctgcgctgtggttatttgcctgctggtttcaatggggtgggctgttaatcattaccgtgataacgccatcgcctacaaagagcagcgcgataacaaggccagtgaactggagaaggcgaacgccaccattactgacatgcagcagcgccagcttgatgctgatgcactcgatgctaaatacacgaaggagttagctgatgcgaaagctgaaaatgatgctcttcggcgcaagcttgataatggtggtcgggtgctcgtcaaaggcaaatgttctgtgccatcctcagccgaaacctccagcgcctccggcatgggcaatgatgccaccgtcgaactctctccagttgctggacgaaacgttctcggtatccgggacggaatcatcagtgaccaaacagcactgagaacgcttcaggagtacatcaggacgcaatacctgaaataa

SEQ ID NO: 402219 - DNA, 1386 bp, Salmonella enterica
atggctacgtggcaacagggtattaattctggtgggtttcttgctggcatcggtgcgcaaaatgagaatgcgccaaaggcaagcgacattaacgcaacgcttggtctgatccgcgaaaacaatgaactggctcgatcaggtgcaaataacgttggtctgaccgcgttacgtggtctggctggagttgctgatatttataagcagcagcaacagcaggagcgtaaagcggcattccagaaaggttatgcagatgcttatgcgtccggcgacagggagcagatgcgtaatcttattacagcattccctgaagagtttgaggaagtccgtaaagggatggggtatgtcgatgacgcccagcgggatgattttggcaatctggcgcttaaggctcaggtcgcttcgtcgcttggtccgggtgcatttggcaggtttatgatggatagcgaaaaggagatgcgtcgtttaggtatccctccagaaactattgcggaaatgcaggttaatgacccgcagggcttccagcatttcgcaggtaatctggcgctgttttctctcggtcatgagaagtatttcgatatcaaagatcaaatggaaggtcgggatattgagcgtggcaagttggcagagacaatccgcagcaatcaggctggagaagcacttcaggcgagagggcaaaacctttcctatcagtcagcaatgactggacacggacttgcagcagaaagactggcacttgataagcagaaattcggttttgaagtacaacaggcacaaaagaaggccgatgaacttattaatgctgcgccaaaactatccgtgaacatggaaaaggctatagaaaaatcagcaggtgatgcggcagctagtcgtaatgctgccgattcaatgacaactcttgctgacacgcttgagaaggagaagccaactcctggtttgttcggtaacgctgaaaatatgttcgctaagcttacggggcaagataactacctccgagatatgcggattagattcaaccaactagccaatgcgcaggcaaccaagcttctcccccccggccctgcatcagataaggatattgagtttgcaaggaaaggcattccaagcgaaacggataatccaatggtcatggctcgatggttaaggggtatggcaaaaatggaaagtaataacgcgaagttcaacgagtttaagtcagagtggatgagtgcaaatggcagcccaggacaatctgatcgcaaccgaaacatcatggggatggatgttaagaagggtgagtcattgaactctgcggcaaaacgttttctttcctcaagttatggcgatagccaacctcaacagcaattgtccgatgacgaattaattagcaaatatctcggagagcagtaa

SEQ ID NO: 402220 - DNA, 237 bp, Salmonella enterica; identical to SEQ ID NO: 96025

SEQ ID NO: 402221 - DNA, 705 bp, Salmonella enterica; identical to SEQ ID NO: 8686

SEQ ID NO: 402222 - DNA, 144 bp, Salmonella enterica
atggcatctttgctgaattttgaattacagatccaacatcttggttctccttgtgaagattcaattaagtctaatttgtgttgtttggtaacacgttgtcttaatcgccctgaaacgctctctatccttttgaacaaaaaataa

SEQ ID NO: 402223 - DNA, 309 bp, Salmonella enterica; identical to SEQ ID NO: 290961

SEQ ID NO: 402224 - DNA, 459 bp, Salmonella enterica
atgtatttagcggtcgttatcgatctttttgcccgcaaagtgattggttggtcaatgtctttgtcgcctgatagtcggttgacaggtaaagcgctgtctatggcctatgaatctcgcggaaagccaaaaggtgtcatgttccatagcgatcaaggcagtcattatactagccgtaaataccgtcaattactgtggcgctttcaaataaaacagagtttatctcgccgaggaaactgttgggataatgcgccgatagagcgcttctttagaagtctgaagacggaatgggtgccaactgtgggttatcgtagcttcgctgaggctcaacaagagatcacccgctacattatcggatattactgccaactcaggccacatcagtataacggtggtctaactcccaatgaatcagaacgattatattgggaaaactctaaaaccgtggccaattttagttga

SEQ ID NO: 402225 - DNA, 786 bp, Salmonella enterica
gtgcccgccgagatttcggtgcaactatcacaagcactcaacgtcatcgggcgccacttggagtcgacgttgctggccgtgcatttgtacggctccgcactggatggcggattgaaaccgtacagtgatattgatttgctggtgactgtagctgcaccgctcaatgatgccgtgcggcaagccctgctcgtcgatctcttggaggtttcagcttcccctggccaaaacaaggcactccgcgccttggaagtgaccatcgtcgtgcacagtgacatcgtaccttggcgttatccggccaggcgggaactgcagttcggagagtggcagcgcaaagacatccttgcgggcatcttcgagcccgccacaaccgattctgacttggcgattctgctaacaaaggcaaagcaacatagcgtcgtcttggcaggttcagcagcgaaggatctcttcagctcagtcccagaaagcgatctattcaaggcactggccgatactctgaagctatggaactcgccgccagattgggcgggcgatgagcggaatgtagtgcttactttgtctcgtatctggtacaccgcagcaaccggcaagatcgcgccaaaggatgttgctgccacttgggcaatggcacgcttgccagctcaacatcagcccatcctgttgaatgccaagcgggcttatcttgggcaagaagaagattatttgcccgctcgtgcggatcaggtggcggcgctcattaaattcgtgaagtatgaagcagttaaactgcttggtgccagccaatga

SEQ ID NO: 402226 - DNA, 477 bp, Salmonella enterica; identical to SEQ ID NO: 291010

SEQ ID NO: 402227 - DNA, 258 bp, Salmonella enterica
atgatttacccatcaaacaacccaccagtttgcctgattggataccagccttgcagtttttatggaattaattatgccatgctcaagagccttgttagcatccaaaatggtcgagtctgctatcagggatgcccacctaatatgggttccgatgtcgatattgaacgtctcaacgaagcgatcaagatcgttatcgaggcatttcccgtactctctcaatctggcatggtcggcggctggggtggcaaagccccataa

SEQ ID NO: 402228 - DNA, 1452 bp, Salmonella enterica; identical to SEQ ID NO: 370178

SEQ ID NO: 402229 - DNA, 630 bp, Salmonella enterica
gtggattttattcagaaccacgatcaggtcggtaaccgcgcccagggcgacagactgataaccctggcgggcgctgaacgaacaaaagtattgctcgccacgttgctgctttcaccgcatattccgctgctttttatgggcgaagagtatggcgaaagccgtccttttcttttttttaccgatttccatggggatttagcccgcgccgttcgtgaaggtcgcgcaaaagagtttgccgatcatgcaggggaaaatgttccggacccgaatgcgccagagacctttcaacgctcaaaacttaactggaagcaacagcacagtgaagagggtaaagcgtggctggcatttacccgcgaactactgcttttgcgccagaagcatatcgtgccgctgttgtccgctgcccgtgagagctcaggaacggtattgcaaaccgcgcccgggtttattgccgttagctggcgttttccgggaggaacgctgtcactggcgctgaatattagcgccacgacggtattgctgcccgatttaccgggtaagaccctcttcgcctggccgaatgaatccaccgggtcgctttcccaacattctcttattgtccgcttagcccagggagagtctgcatcatga

SEQ ID NO: 402230 - DNA, 384 bp, Salmonella enterica; identical to SEQ ID NO: 379821

SEQ ID NO: 402231 - DNA, 612 bp, Salmonella enterica
atgatcgttaacctatcacgtttaggtaaaagtggtacgggaatgtggcaatactcgattaaatttttaacggcactgcgagaaatagctgatgttgacgcaataatctgtagcaaggtacacgctgattattttgaaaagctcggttatgcagtagttactgttccgaatattgttagcaacacatcaaaaacatcgcgacttagaccattagtatggtatgtatatagttactggcttgcgctgagggttttaattaagtttggtaataaaaaattggtgtgtactacacatcacactatccccttactgagaaaccaaacgataaccgtacatgatataagacctttttattatccagatagttttattcagaaagtgtattttcgctttttattaaaaatgtccgttaagcgatgtaagcatgttttaacggtatcttataccgttaaagatagcattgctaaaacttataatgtagatagtgagaaaatatcagtaatttataatagtgttaataaatctgattttatacaaaaaaaagaaaaagagaattactttttagctgttggtgcaagttggccacataaaaatattcattcactcttataa

SEQ ID NO: 402232 - DNA, 438 bp, Salmonella enterica
atgattattggcaatattgaatatctggaggcctggctgccgacggcgttacggcaggcgattgagcacgtcaatgcgcatgtcacggcaacgaccgcgccaggtaagtatgacattgacggcgacaggctgttttatatgatttctgaaaatatgacggagccgggcgaatcgcgcagcgcagagtatcacgcccgttatcttgatattcagattgtgctacaaggtcaggaagggatggcattcagtacccggcctgcgggaacgccgcacacggactggctggcggataaagacattgcatttttaccgacgagcgtcgacgagaaaaccgtcgtcctgaacgaaggcgactttgtggggtgttttatcccggcgaagtgcataagcccctgtgcgcggtgggagaaccggcgcgggtacgtaaagcggttgtga

SEQ ID NO: 402233 - DNA, 708 bp, Salmonella enterica
ttgatacactgtgttataatttttttctctaatctaactgaatatgatgataagagtttcaaaagttatgatcaactttcgcttgattttttcactttcttagagaatgaaggtgaccgagtattttattatgctcccggtagtcgctcaaaagtgagcgtaaaaaaatcatttaataaagtagcaaaattaacaaaagaatattgtgaagaagctttatctgctacaagtgaaaactcaagaaacttagcttggaaaaaagtttttggcaggccttttccaaattatacgacaaaagcactcagtaatgtcaatgtatctgaacagtttattgaagatcaatatgagatgaatttatatggtcatgtttcgatagaatgtgagattagaaagaataatttactggaagctcttctttcaaatcttcttggcgaagggcatgatattagcacgaatcgcaagttaagattctatgttgatgagataaataatatatctcacccatataagattaaatggaaaataaaaaatgtaggtgatgaagctgagcgccgaggaaatgttagaggtgaaattttagacgatgaaggcggttctgagcgtttcgagaccgcagatttctcaggacctcattttgttgaatgttatgttatttatggtaatcaagttgtagcaagagatagaatcgacgtacctatacataattag

SEQ ID NO: 402234 - DNA, 600 bp, Salmonella enterica
gtgaataccccctttacgtctggttacataataacgtatcacgacgcgttgctgtctggcttacacaatagcagccaaataaatatattggcttatactcgtcatacttcaagttgcatgtgctgcggccgcgttccctcaccccagtcacttactttaagccaaataaatatattggcttatactcgtcatacttcaagttgcatgtgctgcggccgcgttccctcaccccagtcacttactttaagccaaataaatatattggcttatactcgtcatacttcaagttgcatgtgctgcggccgcgttccctcaccccagtcacttactttaagccaaataaatatattggcttatactcgtcatacttcaagttgcatgtgctgcggccgcgttccctcaccccagtcacttactttagtaagctcctggggattcgctcgcttgccgccttcctgcaactcgaattatttagagtatataacatcatttaaaataataaacacggcattcgttttaatactacgttcaggactcatcccactcattagcagaaaacctattaaaaagcgtgttcaggcgttttattaccgccattga

SEQ ID NO: 402235 - DNA, 246 bp, Salmonella enterica; identical to SEQ ID NO: 4284

SEQ ID NO: 402236 - DNA, 1326 bp, Salmonella enterica; identical to SEQ ID NO: 4313

SEQ ID NO: 402237 - DNA, 510 bp, Salmonella enterica; identical to SEQ ID NO: 4315

SEQ ID NO: 402238 - DNA, 138 bp, Salmonella enterica; identical to SEQ ID NO: 372437

SEQ ID NO: 402239 - DNA, 288 bp, Salmonella enterica
atgtcactcaaaaaaacggaaagcacacagcacaaactaaaacaaaccacccaactacggctgtgggccacaattggcggcgtctgttcacttgtcatgggagtactgaatatattgtcgtcaggctattttgaaccgtatgatggcggtcaaattatcttaggcctgggatgtctgggatatagtctggcactatcaaagatagatatcccatttgcaggcagagaatcagccccaaaagccataataatagcggagggggtgctcccctccctaagcgtaaattag

SEQ ID NO: 402240 - DNA, 468 bp, Salmonella enterica
atggcagaaaatttgcggcaattacttagctttcttctgaaggcgaaacaatgcacctacgcaagttcgggtggcatcacaaacaaagtttctccatttaacggagcaaaaatcctggagtacgaagaaggtgagctgttttatcgggatctctattttggttccctgcagttcactggtcaggaggttatttaccaaaaggggaattctgtttggtcgatgagttattccggtaagtgttccaaaggagttagccccgaaatcatctatgattttttacgacaggcattattaaaatcgactttagaagcgccgttccgagggccgctgactctttacggagataatggtcttcactataccaatctctatacaggcaatattgatttctttagcgggcacgaacagatctggcagaacgaagttctcgcctaccaactccattattctggcggatggatagattag

SEQ ID NO: 402241 - DNA, 306 bp, Salmonella enterica
atgcttccaattcggttaaaaaaagcccggctaaacgctgggttaactcaagagcagctgggaatacttgtgggtattgatgagagctctgctagtgctcgcatgaatcaatatgagaaaggtaaacatgtaccagatttttcacttactaaaaaaatcgctgattcgctaaatgttcctgtctcatatttttacactcccgaagatgatttggcagaaataattttgacaattaatcaactggacaagaagcaacgattactattattaaaaaaattagtagatggaattataaatcatgaataa

SEQ ID NO: 402242 - DNA, 819 bp, Salmonella enterica
atgaataaacaagaagttgtacttaaagtgcaagagtgtgctgcatggtggattttggaaagacaaagtaaattaacaaagttaatgtctgaaactatgtctataaatcctttcatgactccatttatatttgattatcactcacttgataattttgatgagcttgttgaagcaataattgccaaacatttaatgactggacacgatactggttttggaaagttgatcgatgagaaaatactgcctagggtatttggagcatataaattagataaaagttacagagcttccaatgagccttttatacactcttgtttcgatgaaatagatcatgtaatacaaagggatgatggtagaattgaacttttatcgcttaaagcgggtaagtggactattcaattgacaatggctgttcaacttaataaagcatttaacgaaataataaatgattatccaggcgtggccgataatatcgtagtcggtgttttttatggaaatagtcatggattgactgataagtataggattctacgaggtattaataccggcgctaatcataatgtcatagatatacgtgataaagtgcatgtgtatgcaggtaaagaattttggtcatggcttaataatggtgaggatgaaacgcagcattgggtgcttgaaggaatagaacgagccgtcaaggaagctgatataaaagaaaaaaataaagaactcattgaaaggttcaaagagcatgttgctaagaaatataatgagcaagtattgaatgcagatggcacggctcaatggcataaattactaaaaatgattaatgaataa

SEQ ID NO: 402243 - DNA, 1260 bp, Salmonella enterica
ttgtctagtaaaaagtttatttcgctatttagtggcgcaatgggtttagacttaggtcttgaagaagcaggatttgagcctttagcttgtgttgaacaggatagggctgcgctgaaaacaattaaaactaacaaacccaaccttgcggttttcgagggtagcattgttgactgcactggccctgaattattagctttggcaggtgtgaaagataaagaagaaatagatttaattgctggcggcccaccatgccaggcattcagtgtttttggaaatagattaggcttagaagatgccaggggacaacttattttcgaatacattcgaatgataaaggaaatctcccctaaagttttcgtaatggaaaacgtccgtggcttattatcaatgtcgatagttccagcttctaaaaagaaagaactatcagacatgatcgaatcatctgcttttgaaaaaggctctctaattaaaagggtcgctaaagagtttaataaattaggttatcatgttgattgctttgtagttaatgcggctaactatggagcccctcaaattagggaacgtgttatcttaatcgggaatcgtttcggaatgaaagctgatttcgccaatcctttatttagcaatagagcagaagataatctaccaccattcaaaactttgggcgatgtaattggtcctgagagtggatttatcgataaatacccagaggtcatgaatttttcaccaagaaaattgaaatatctttcaatggttccgccgggtgggaactggagaagcatgacagaagaaattcaaaaagaatctatgggaaaaagctggtaccttaagggtggaagaagtgcttactggagaaaactgtctttccagtttccctctcctacagtagttactatgccaaatcatgctggaacaagtatgtgtcatccaactgaacttagagctatttctgttggtgaggctgccgcgatacaagaatttcctaaccattggaagtttgaaggtactactacagaaaaatttagacaaattggcaatgcagttccagtccgattaggaaaagttgccggtgaagcagcaatgaagcttcttaatcgtatacaagaaaataatgcagctgatctagcgaccccaagttatacagaaacccacattagacctcatattagaactagatctttctataaaaatggtcaagcatttagcggtgatgtttcttactacgatctggaagaagaatgtcaggatgaattattttaa

SEQ ID NO: 402244 - DNA, 351 bp, Salmonella enterica
atgcgttatatcagccggggatggggggcttcagtgatatatcatgatagcgagttatttaaggatgagctttactatactggcaggcgtattgtcggctatcgcagtgattcgcttaacggtttgatgagcatgatcgaacgaacctcattgattgcattgatgcctttgaaattagcgcttttttataaaaaccatcgtaaatatgacattaaatttattcagcctccgcccgaactggctttgaagtcagttcaggtctatgcatcctggaataaaaatagtagaaatatatcgacgattaatgagatggtaagtatgttacaaacgctttcctccttccgtcgctaa

SEQ ID NO: 402245 - DNA, 1773 bp, Salmonella enterica
ttggatcaaagtggattttgggacacaaatgttacccgcgaacttctttttctgctcactgatcgttgggaagaattctcgcaagaaaatcagaatcgaattatagagcatattttaaccggcccgaaccatttactttattttcccgagaaaaacattccaaaacaaagggagatactggcagctagatacgctcgctatctcgaactaagcggctgtaaaatgtccactattcatcgtgaccaactaactgcgatgattaaaagaattcctgactggaatgatggctgggctacatctgttgtcatcaattggggttcacggacaggttgggttcgtacagacgaaaagccagatataatcttagatcttccagcaaacgaaataatcccaaaagtaaaagagatacttaaacgagaagatgacagctttactagtaggcaaccctttgtcggattgataaaagaaaacccgcgtaaggctttgtctgcactagctattgcagggagaggcggtgattaccctaaggaattttggtcgccaatgataagtgagttacctaaagatcttaaaccaagggtgagacgagtattcctgaaccgaattgtgcggttgccagttacagctttggtcgagttacgacatacattaagtaactggcttgaacaaaatttagctgcgactcttgaattcgatgaggatctcggatgggcagtttacgatcatgtcatagagggcatactgagcggtggggctgatgcaacacggagtggtttcggagaagttatccgaaatggtgaggttgtaatacagtctcggcgtacattcagccatgcaatcaatggtcctgtcggtaaatgtactcaagcgctttttcaagtaatgccaagtgaagaaaaaaaagctggttcgcttattccgtattctattaagtctcgtattgaacgtctttttactgcaccaggagaaggtgcggaccacactatagctataacgactcgcaatctaaattggctaatgtttgttgatcctgcatgggcaaaagaatggcttatacctattttggacttaaaacatcctgcagcagaaccagcatggaatggttatcttcattgcaatgatatgccttcgattgcagtagctgaacttattaaaccctattttcttaaccttataccttggatcgaatctctttcgtgggaaaaaaattattcagttcgagcttcgcaatggcttggtttaatgagaatgtttcaccctgatgagccctccagtccttccaggaatgaaatgcgctccatattacgagaattatctgacgaggctcgaaatcgttttatttcctggttaggattggtcgggcagaaaaacgagagtggctgggttaagtatgtgatcccattaatcagagaggactggcctaaagaacgccaatatagaaccacgagctctgtaaaagcatgggttggtttacttgacgatactggcgataagtttccggaggtttacgattcagtaaaaacatacttagtaccaatcgagacaattgatcacttgttctacagattcactagggagctcggtggtaaagaagcaattgcagctatttttccagaaaccacacttgatttaatggacaaaataacaccacagatattcacgcgtacatcaggagagctgcagaagatccttgagctaattggagatacagatacaagtctgatcaaggactctcggtacttacggcttattgcactggttgagaaaaattag

SEQ ID NO: 402246 - DNA, 1542 bp, Salmonella enterica
gtgccgccagctttcccaaatctgaatttcggttcgacaattgagggaattacatatcttcacggtcgcctggtcgacgaaaatgctgtaaaccatccttatgtgctgagcagtgcagactttggacgagcatatctttcagaagggtgggcgaccaattttattaagcttcttctggaacgatacatcgttgttttggtcggttatcaggcagaagacccaccagttaaatacctccttcagggtctcaatcatgatggccagtatgatcgttccagactttatgcatttgatcgcggccttgctgaggatatcgaagccaaatggcgtgacagaggagttacagccatagcctattccgatcatccagctctttggaagactttggaagcatgggctgagcgagcagatgatccacgccgatggcgagcttctattatcgctaaaagccagcaagatccgaaagttctagcaccgtatgaacgtggtcaacttgcccatatacttcgcactacacaaggtgcgaaattgttctctgaagctgttcctcttccccatccagagtggctttgtgtgatggatgcaaatattcggtcagccaaacagaagaaaagatactacgaacttgatgacaatgatgcagagaccttcgatccacaagaagcttatgggcttgatgacgatctgcaagatatctctgaagatgaatataaacgtggagtggtgagtaacgataatctccttgaatggcgcgacgaagatgataatccgtcagattaccatcgcttggctggatgtttggagacaatgccgaaacgattgagccatctcatggcctggttctgcaaatctcttgatagccccgtgatggcttggtgggctatccgaaaaatcagcattcatcctctactactacaaaatattgaacgcaatattgagcattcaacatcaatccacaaacgctcccgtcaactgtggagcttaattcttgaacatcataaagatccccgcaatcgtcgttatgacgtcgattggtacgacttaaaagatcgaattacaaaccaaggctggacaacttgtgttttacgagagtttcgtagagtaatgacaccccgattggaaatgaaattgccgtatggattgggtgaagtcagaccgccaagcagctcctgggaggaaattcagttcagcgaattaggccaatttgaagttgtgttcaccgaaagacatgatgacgatttagacgtacctgataatgtattactacaagtatttagtgctttagaagcgcaaataataattgcctccgggatgttagacgatattgatacgtactactttccaagcccaagttgttatccagaacgtgcggttgaaggagaagaacatttcgcgaaaggtgcggagatattgacatggtttgtccaccttttagaccgagttgttatgaagtggccagaattggctaaggcacacgtaacaacttggccagtaaaggagccgtttttcttccggaaacttatcgccagtatcgtcaagtaa

SEQ ID NO: 402247 - DNA, 474 bp, Salmonella enterica
  misc_feature (406)..(415): n is a, c, g, or t
atgagattccaccctgaagggtcttccatacccgatatcctcttagaacgctgtgatacaggtcgagttgtatttctctgtggcgctggggtttcattaccttcagggatgccaagctttgtagagcttacccagcatgtaattgaatactttgaccctccatacgattcagaaatcatggcagcatttcgcccatggcttcacgaccaatcttcggcaaatgtccctctcgaccaaattttcaacctcctacatctggaatatggcaaggatgaggtgaatgctttggtatcaaagcgtctgggtactgcaagaactgatatagaggttggacgtgagcatgccctgattaaaagaatttcctcaaatcagagtggagttccacagattgtcacaacgaactttnnnnnnnnnngattgtcacaacgaactttgaccgactgttcgaggttaaccaagcgcaagataatttaa

SEQ ID NO: 402248 - DNA, 918 bp, Salmonella enterica
atgataaaacagtatgcttaccctataggtaaaccaggtcagccatgggcagaacctgagctacagcagtggcgtaaatgccagactcgttttcgtagttatcagaacgacgtacttgatgcactggaaattatcaggtctgtctatgatgttatccagtatggagagctaaactacgatggcgaaatctatcctctgatggctgtaaaatctaaggtctgggacgatactctacctgttgtcctgattaccggaggggtacacggctatgagaccagcggtgtaatcggtgcattggagtatctatcaggagatgagaccgactacaaagggaaagcaaacttactggttgttccctgcgttagtccctgggcctatgaacgtatatcacgatggaactacaacgccgtggatcccaaccggcagttctttagtgaaggaaaagcggaagaaaccagtgcattgatggcacttatctccccttattcaggccggtttgttcttcacgttgatttacacgaaacgactgacaccgatgaaagtgagttcagcccggcactggctgcacgagacggtttgaaatatgaacccgaagaaatcccggatggtttttacctggtcagtgatacgcagaattcaaggctggatttccaacaggcaataatcaatgcagtctcaaaagtaacacatattgcgccagcagatgccaaaggcaatctgcttggttttcctgtggtcagcgagggtgtgattgaatacgataacagcgcctatcatctttgcgccacaatgaccggtgcgccatttacaaccacgacagaagtttatccagacagccctgcaacgtctccggacgaatgcaaccgggcgcagattgccactatccgcagtgcaattaaattcgccctgaatgggtag

SEQ ID NO: 402249 - DNA, 576 bp, Salmonella enterica
atgaaagagacaaagacgcgatataacagtttgctagtcagctatcaacgctggctaaacgggttcacaaaactggccatcataaatggcatgtgtcatcccaatattcaagccagccaccatctgatggtgggcagtctgtactttcccggcgtagggcagatgactgcagtggtaccacaatgcctttaccgactgatttacggaagtcagcatccagagccagtgtcggtattgactgatatgcaaatcagccttgagacaaggcaaaaaactttactgcaccacccaatgttggaagggatattactgagtgaatgtatccgcctcaaacaacgcccactggcaaataggctgattagcctgttacaccaattcagttcaccggagcatcgccacaaactggtctggctatgttggtacgatttgatgatgggtgcgacgctggaagactggttggataacctgaaacataaggcacctgaagatctaggcttgtggctgattggacggcaggaagaaaacctatccctcacgcaaatgatggatgaatatctgctatttaccggccattaa

SEQ ID NO: 402250 - DNA, 207 bp, Salmonella enterica
atgactattcaaatttccctgctcgaagaccagttcatcgatatggctttcattacgcaactcacccagttgaccgataaatggttttacaaacttattaaggacggtaagttcccaaaacccaccaaatttggtcgcagctcccgttggcggaaaagtgaagttgaagcctggcttcaggcgagaatcgacgaatcactcagctag

SEQ ID NO: 402251 - DNA, 588 bp, Salmonella enterica
atgcaaagacattacccacatttaaagaaaatcatccctaacgacttcctgctgaatttgattaatcaccatctcaatcagatcctggcatgtcacgccaagatactggcgtttcgaatggattttgattatcagcggggtactaaccgattcattcgtaattcctccgccgaaatacaggacgaccttagagaactcactcaggcgatgatgaaccttccaggcgtcactggtattttttgggtagtggaatggacttcagaaggtgcggtgcatgcccatgcgattttctatcttaatgctcaggaacatcagaaatcattcccgttcattttacaggcagaagaactgtggttagagattacccatggcgaaggcaaatctcagcgatgtaagccaaatgaatatcatcgggataacattaacaaagttgttgaatatcacaatcatgaagccctaaacagcctaagacgtatagccagttacctgacaaaagaagaccagaaatatagttatccgatctggggatgcaatgaggtcccactacctgcaagacagggaagacccagaaaatatataccaagctaa

SEQ ID NO: 402252 - DNA, 930 bp, Salmonella enterica
atgagtgcaggaaaacgagtgaccagtctctggacgaaaagagtaaatttatggctttactgggatatcttccgctcagcattaatgcatgttgatgagtctcgtgaattagtggaaagaataggtgatgccaatcttttcaaagagtcttgtattaaatatatgaataaaaaagaaatgcttaagtataggagtgcggaagatttctttgaaaagagtaggcgagaggttgagggtaagttaataccttttagtgaacttgagtggattgattgtgagcgttcgttgtcatttgttgctaattatattcatgccgaatataagctatatgcaaataataataccccctctctccttgatatcactttacctgaatggagccttgattctggtaagggtggcgtaaattatgacgggttaattcttttgatagaccatcaatgtcgtgtatcaagctttaaccatatccgctcaaacttagagcgtttgagaaattcttggctccgtatccagaaaaaatttggcaatccgttttggttctcatcagccagatatgatgctaaatgcttagcagattatcagtgggtgatgtcttacttcgataagaacaaaatgattaatggtaatgtggatttttggtttgaaaaaaatttgaatctgaaagttcactcaatctttgatcaatgggttgagaataaatccgatgctgaaggtgagttgtttattataaaaacaaaaaaagcatggggtcagaaaaaattcagagatagtgttgcaaacaaaaaagttctcaatacctatattagcaaagacagtaagagacaacttgattatctggcaagccaaaatgaaatgaaaatcaatgaattgattgagatgctgatcaatgatgcatacgcaaaagctaaactgaaaagttgggaaaattaa

SEQ ID NO: 402253 - DNA, 864 bp, Salmonella enterica
atgaaacaatttgacggtctgcagtcactgcagcaaccgctttccggcctgccccagtgggtctctgaacgcattctgcagcagataaatcagttaacccactacgagcctgtaataggcattatggggaaaaccggagcaggcaagagcagcctgtgtaatgccctgtttgctggggatatatcaccggtcagtgatgtggcggcatgtactcgaaaaccactgcagtttcgcctgcagctcggcaaacgctttatgacaattatggacctacccggtgttggagagtctgaactccgggatgctgaatatgccgcactctaccgtgaacaacttccccggctcgacctggtgctgtggttgattaaggccgatgatcgagcactagcggtggatgaacatttttaccggcaggtgattggtgaagcataccggcataaggtgttgtttgttatcagtcagtccgacaaggttgaacccaccagcggtggtgaaaagctgtctacagagcagaaacaaaatatcagccgcaaaatctgtctactgcatgagttgttccaacctgtaaaccctgtctgtgcggtgtcggtacgtttgcaatgggggctgcgggtaatggctgaacggatgattcattgcctgccgcgggaggccagtagtccggtggcggtacagcttagtgatccacttcgtaccgatgccattaataaaaaagcccgtgacgattttggtgaaacggtcggctcggtgttggacacagtaagttccatgcccctgataccgtccccggttcggactgtcatccagtctgtacgcgacatcgtggtatcggtcgttcgtgcagtctggaacttcttcttctga

SEQ ID NO: 402254 - DNA, 711 bp, Salmonella enterica
atgacacaggcagagcgccgtcatgaccggctggctgtcaggctgtcactgataatcagccgcctggttgcaggtgaaacgctgaacatggcgcggctggctgcagagtttggtgtgtcagtccgcaccctgcgacgggattttcgcgaacggctgatgtacctcgaccttgagtatcgacgggggcaatgccgcctgcgcagtaccggtggaggcgtacagggcgagctggatgcgctgacctttgctcaccgggcaggactggccgatatttttccggggctggaccggcgtctggcgggcatgctgctcaccgcaggagggatgccctgcctggtgtggcaacccccacagtcagtgtcaccggtcagctcgctggtgttttaccgcctcgtcagtgccattaccgcatgccagcgggtactgctgctggccgagggagagcgctgtgacgggctggccccgtaccgactgatttcattcgacggctgctggtacctcaccggtgaacttaacgggtatatcaccgtgcatcctctggcgaccatccatgcggtgacagtactcaacaccacgttcaccccactaaaacgtctcagccagttaaccacacaggcgggctttatccgggctcttccgcacttcagctgtatccgcgaagtcctgtctcctgggccctctgaggaggagccgggcaacacactgatttaa

SEQ ID NO: 402255 - DNA, 537 bp, Salmonella enterica
atgacctggcattacgagaaaaatggcatacgtcacgacaatgttactgaagatgacatcaccggcctgattatgcgcggtgaactgactgcatccactttggtatggcgacagggcatgacggagtggcagccaatctccgctacctcgctggcttcggcgctgctccacagcactacaccaccggcactgccaggaaaccgcattccgggcggagtggtatgggcgctggcatttgctcccttcattggttatgcgctcgagctgtggacggcagggctgaacggaatgtcttttgacgaggcatatgaggccgtctcgggtgggcagtactggttcatcacgctgctgctcaatatcgcactggggtatctcgatgaacgacgcctgcgtaaggccggagtggataccaccacgttcggcaaacttgcctggctggtgccgttctatttgtggcgacgggcgaaaacccttggtcagaaaccggcttacttctgggtatggctggtgatgctgggcctgactgtctgggcctga

SEQ ID NO: 402256 - DNA, 438 bp, Salmonella enterica
atgaaaacgctgattaaaatactgggcattactggcagccttctgctctgtacagaagttcaggcccagccttataaccggacgcttcctgctgtcgtcaatgacaacaacgggaatattttctggtgtgatgcgcatcgtcaggttaccggaaaatgtgaagccatgtctgttgaccgcctgggtgggatggtaacagttcgttcagcaccctttaaggactgcgaaggcggcctgtggggctggataactatcatgcgcaacgatgtgtcgaagggattcaccattactccggacaagaaattcggtctcaccgtaaaagacctgtgtcgtccgggtacggtagtgacctttaagcccaaccagaagaagcctgaatatgacgacctggtagcactttaccagggaaaagagctgtttcgctaccggcgcttctga

SEQ ID NO: 402257 - DNA, 411 bp, Salmonella enterica
atgctgaaaataatgacctctgttgtacccgccctcattctgtcacttgctgcattcagtgccggtgctgctcaacttccggcaagtctgatggataaagacaatcccggccaggagtactggtgccagggtaacgatatcaacacctccatgtgctcactgaccggtgtcagcgacgaccataaatttgccctgattcaggacctgccgggcccggcctgtgaggacctaagcttcggggttatcgatctggtgcgccagaccggtgtcaacattccttacgacggtggtgactgtaagggcgatgtgcaggctggttttctacgcggcacgaaagataatgccctgtatgtgaaaattgtccggggcagcaaaaccctgcggctgtataaggtacaaaccggttactga

SEQ ID NO: 402258 - DNA, 237 bp, Salmonella enterica
atgcctgaatctcacatgctgccaccggaagctttcacgcgacagcaggctgaagctgttacccgtcggtatcacaacctcagcattgaagacgaccaaggcactcactcccgcctggtggttcgtgactctgaaggtcgaatggtctggcgggcatggtgctttgaacctgatgctggcgaaggacttaatcgttatatccgcaagtcaggcatcctcagaacatcctcctcctga

SEQ ID NO: 402259 - DNA, 459 bp, Salmonella enterica
atgacgacacaaacgcaatgcgaattgatgaccgctaatgaatctcaatttgaccttactgcaacaccagtacctgacgagcagcgtctcgatttctggccgctgtactttggcgatatcccgaagtggatatcgctggaaccccgtattttcgcctggatggagcacttctgtgatgagtacagcggtggtatctggtccttttacacgctcagtaatggcggcgcgtttatggcccctgatgctgacggtggtgataaatggcatctgttcaacagcatgaacggtaatgatgcggaaatgagcgtggtagccgcaggtatcgcggtctgcctgattgaatacagccatcacgcctgtcgtacagaatgtgacgcaatgaccgcacactattatcgcctgcgggactatgccctgcagcatcccgaagctcacgccattctgcgtatcatcgactga

SEQ ID NO: 402260 - DNA, 477 bp, Salmonella enterica
atgaaacagctttcctttttacccggcgagatgacgccacaggaccggcatctcattcagcgggcgctcagggctctggagcggcacctgcatgagcctggggtagccttcacctccactcatgccgttcgggagtggttgcgactgcatatggccgcacttgagcgggaagagttccgggtgctgtatctggataatcagaatcagcttatcgctcatgagacgctctttagtggcacgattaaccgcaccgaggttcatccccgggaagtggtcaaacgcgccctgtatttcaatgcggcagcagtaatactggcgcataaccacccttccggcgacaccactcccagccaggcagataagaccataacgcagcgtctggtgcaggcgcttcagttcgttgatatccgtgtgcctgaccatctcatcgtcggtggcacgcagatattgtcgttcgctgaacacggtctgctttga

SEQ ID NO: 402261 - DNA, 369 bp, Salmonella enterica
atgaaaaatctacctgctacaatttcgggggcggcgaagccctgtctgtcgcccgttgcagtctggcaaatgttacttactcgtctgcttgagcagcactatggcctaatgctaagcgacacaccttttagcgatgaaaccgttataaaggagcatatcgatgccggtatcactctggctaatgccgttaactttctggtagagaaatatgagttagttcgtatcgatcgcaatggatttacctctcaggtacaagcaccatatttgactacgacagacattcttcaagctaggaaagcgtgcgggctgatgagccggtgttcttacagggaggtaagtaatattgttcttagccgatcacggctgtga

SEQ ID NO: 402262 - DNA, 462 bp, Salmonella enterica
atggttatacttggcggcttaggaaatgttgcagcacaagctcttaaagctagtttatttattgctggcacatcagagcaaaaatttcagcgtaaaatagccgaaatgcttagaagtaggaatgagattggcgagaacttacaaggccatccagaggctgctggcgggataacggatctcacatttgaagacattccgatagaactaaaagttgaaaataataaggttcttttccccaaggattttcaaaaatatttcgatcaaacagcagcttatgccattggattaggtaagcgtatcggtattttggttgttctggaatcaacgtcaaaatcagcgccggtgggagtaatagaggatgatattgaagtattcacacatccaacaggtcaatctcaagttgcaattgttgttgtcgtcgtcagaggtggtttccctaaacccagttcttattctcgatag

SEQ ID NO: 402263 - DNA, 1047 bp, Salmonella enterica
  misc_feature (964)..(973): n is a, c, g, or t
atgaagaacgagccaaatttcgagattttccgccaagctttttctcctagagttgagattgcagcagcgttggatggtgcactcaagtccattccgaatgacttggtgaaacttaaagaagcgtgtcaaaagctcaatgaaacgctcgatgagctcggtcagggatatgttgaagatcaatatcgtgcatattacatagcaatgactatatttgtatctctagctgagtggaaacatgctatacgtaatgctgagactgatgctcaaaggtttttaaattcagcacaattaaaagcatcagagatcgacatgacgccgagtctctcggagaacaaacaatttaatgaatttatagagcaagtccgttcaatcagtaaattagattcattaaaacaaatacaagaccagttaacaagctggtcattgccactactcttattcgcaaatcttcgcgataaaaatattgaggagattaggcaaggaatatctagtaaagggacaaaagagaataaaacacaagaatcaacagttgcatttttaaagtttgatattgatggggaaccagctcagcaatggaattatcttaagccgggtacggcttatgaccttaacatagaggtcagggtttcaaattggccaaaaagtgcaaatttcctctcattaaagccagtgacaattgatgctcgtgagcgagactggttgcctgattttagatttgagaaaccagagggggaaggccccttcacactgaaggggatcggtcgtgtcgtcttggaagtggcaaattcatttggctcgagaccttacgaattcctatatgctgccgagtttgacaatttaagtaattgccaaaatgttgctatcgtaggacataggcgcttactacttgaagggagtgattccgctcaagctccattaactggattttcaaacgtcgataggcatcttataaaaattcgtaacnnnnnnnnnntaacatattacgagctttccctggattacactcagatgacattgctaatacaatggttatacttggcggcttag

SEQ ID NO: 402264 - DNA, 2439 bp, Salmonella enterica
atgattgaggctgaaacagggttacccattggtcacatgggagttcaatgcaaatttgttaagcaaagttcaatgcttagctggctgctggaagactcggtttacagcttctataaacagaactgtaaacattgtaatcaacgggttccggtgggatttcccaatattttagagtttgtaggcccaagagaaaaatctgccgaagaacgaaatttggctcgcaaagaagaagaaaggcagagaaagcagaagcagctcaatagacaacaagaacgagcagtattacgtctttcccttactctagaagaaacgtttgtgcttgatttgcttgatgaactcgatcaagaggatatagagaacaacgatccccgtttggaacaacttgctaatctggcacctgagacatttacaagtaaaataattgaacacttgttgcccgcagtgttacatgagaaattaccatattcaatgccagcagcaaaagctttaataagaactgaattatcacaagcggaaaaactggcaatttcagtatatttaataaacaacttcgaatattgtccacctgctatagaagcaatcctcttggaagcagagaatctatctgaagatgatttcttaaaagtcctttaccactttgtgagaatggctgttgaatctcctcctggaatgatgattggcacatttgagcgaaaagtacttaataaaggccccattcagtcactttttaaaaaaagacaagctgatatctgtgatgtggttgatgaatacataaaagatactcatcggggaaaatttcaatttgctattgagataattattgcatcggatgatgatgagctgcttctaagacatattagaagtatatttgctaagctgatgcgtcgacggactctactcccggaggagcggagagatagcagcattcttttctttcttcgggaggctgctacgaaatgcttagatagatttcccgatgaaagcgataaagttattcaatcctatcttgctgacaaagatgatattgggagacatgaggccaatagagcttacagatctgtactgcgaaataactatagaaaaaaaagtaaaataggaaagacgcaaaaaatagcttttaggcgtttgctctgggctgcagtggaaaatccagaggatagcatggatgatgcaggacaattctttagacactcttgggacgaatttgctgagcttgcagttgataattttgacgatttgatcggagcggctgcaacgctaagcgagaaatttgaggcgttgaataaagaaaaagtcatagaaataaatgagagttttctagatcatttagataaaagtaataagcgtaatgctattgatggcttacagggtgcattgattgaatgggctgcgattggagctaaatctagagggagcgaaggaatcgatgattttcttcagctctatagaagcttaccagaagaacaaactcaaatgcgtgggaacatgattgcccatgtttctaagttattaactggtattgacagcctaacactagtgctctctgattggtatcgtgctcttatggatgagagtacattgattcgagcccgtgccgtacaagcttgggaatatgttccctatgatttagtgaagaatttcccagatttattcttcgaagcatattcagtcttgctattagatcaatatgttatggtgcatcagtatgctgttcgcgctttgagccgtagatcttttcctgaggataaacggggacttgtgagaacccggctatggaatctaatttgctattatactcaacaagataaaaaagataatttcattgtagaatgcattgacgtttttgcttctctttgcttatcagatgaagatagaaagggaaaaattggattgcttctctctaatatattattaattttagaaggaagtgcactttatgatgctatcaatcgattgcgttttcattttgatgatattcccggttttgtcaaagtcgcactcaaagcaattcaggataagtatactcgcagtatttctattgatgactgcatctcagtgatattaagagcgccacatgatgagcttcgaaattgtaaagacgatctccaaaaagcattcaatgctctgaaaccatttaaacctcaacaatttattgaagcattagtgtacgtggctgcgttaagtaagtgtggtgataacgtaactgcaaatgtttgtttaaaggaactactggaagaaattccaaatgatgaaagaaatacacaatggaaacttaaggctgctttagttacagaagcaactagcattgaacatgccataagtgtttgcgaaccctataatggcttaattgaaaaatggaatggccttacggctgagttggagaaagaatatgaagaacgagccaaatttcgagattttccgccaagctttttctcctag

SEQ ID NO: 402265 - DNA, 1197 bp, Salmonella enterica
atgaagctaaatgcacgacaggtagacgctgctaaacccagagagaaagcctacaagctggcagatggtgctggtttgtatcttgaggttgtgccctctggttctcgatactggcgaatgaaatatcgcttcaatggaaaagagaaacgtctggcttttggtgtttatccagcagtgtctctcgcacaagcgagggcgctacgtgatgaagccaagaaaaaactggccgagggtatcgatccatcgtttgccaagaaagaagaaaagctggttcgcgatgtgcaactcaacaacacgtttcagtctgtggcacttgaatggcatggaacgaaggtgagccgatggtcagaaggttatgcctcggacattatcgaagcctttaataaagatatttttccctatatcggccaacaaccggtgaatgaaatcaaaccgctggttctgcttaatgtgctgcgtcgaatggaaagccgtggtgcgacagagaaggctaagaaggttcgccagcgctgcagcgaagtttttcgttacgccatcgttactggccgtgcggaatacaaccctgcagcagatctaaccagcgcgatgtcagggcatgaatcaaagcattatcccttcctgactgttgaggagctaccagacttctttaaagccctcgcaggctacacaggaagcccgttagttgttcttgctgcacgtctgctgatccttacgggagttcgcactggcgagctccgaggtgcttcctggagtgagtttgatcttgaaaaagcggtgtgggaaatacctgctgagcgtatgaagatgaaacggccccatcttgtccccctttctacccaagcgctggaaatcgtacagcagctcaaagtgatgactgggcaatatccactggtattcccagggcgaaatgatccccgcaaaacgatgagcgaagcgagtataaatcaggtgttcaagcggattggatatacggggaaggtaacagggcatggttttaggcacacgatgagtacaattttgcatgagaaagggttcaatacagcgtggattgaaacccagcttgcgcatgtcgataagaatgcgattcgtgggacgtacaaccatgcgctgtatttggaaggcaggagagagatgatgcagtggtatgcggattatattgataaaattggaagggttgctctcaggagtgcttcataa

SEQ ID NO: 402266 - DNA, 1440 bp, Salmonella enterica
atgagttgcatcgcattaaaaggtaaactgcaatattttctagaaacgctagaaagtattgaagacgcattaccatcattaagaaaaaatttacgtgatgagtactataaaaagaataaaaattgcgatgattttattgagacaaatgctaaggatattgagcggaatgaagacggtaaaattataagattttcaatacaccgaagtgaatcttaccaatttaaacgaataaagaaagagagagataaatcaataaaattgtctcttgttatcccaaataatcttttagttgctattgttagcgaatatgacgcttttttaggtgatttaataagagaaatatataatagcaaaccagaaagtgttcatggtttcggtaaagaattctcttttaaggaaataattgaatttggaagcattgacgctctcaaagaacatgtaatcgaaaaagatattgaatcaatattaagaaatagccatttagaacaaatacataccctagaaaaaaaattcaatatcgaactaactaagggcttagacatcctcccatcattcatagaaataactgaaagaagaaatctttttgtacattgcaaaggaatagtatcttcgcaatacattaaagtatgcactgaaaacaatgttcaactcgataacataactgttggaaaaaaattatacgcatcaaatgattacatatttaaagctataaatatcttttccgagatggcgatcaaacttacacatgtactgtggaacaaaatcttcaaagaagacagaaaacatattgaaaagagcattcacgacatttcatacgagactctcgacagaggcaaatatgaacttgttatcgctatttcacctttatttctatcgaaatcatttaactctataggagaagtggtaaaacgaacagcccttataaattactgcatcgccctgaaggaaaatggcaataaaaaggcttcggatagattattagacgagtatgactggacagcctgcgaccctgctttcaaaatggcagaaaaaatattaagagaggattataaaactgccgctgcatatatgaaaaaatcctatgacatgggcgaccttcaaaaagaagatattgatcaatggcctttattcttacaattcagaaaaactgatgaatttaaagaattatatgatttattatttgggaaagaggaggccatcaacataacgctcgttgatgaagatagccaaaccaaagaagctgaagctgaagtacaagctcaggaaactgctgaagtacaggctcaggaaactgctgaagtgcaggctcggaaaactgctgaagtgcaggttcaggaaactgctgaagcgcaggccatgctaagcacggaaaagagccagcaagcaacatcacaaacaatggactacaccaaacaagattcagcgataaatgctatgtag

SEQ ID NO: 402267 - DNA, 591 bp, Salmonella enterica
ttgagaaataggatttggcatcgaggtttatatatattacgatataaagcattagatgagtttgtttgtaattttattctgccactggtcgttgagtttgtaaatttaaatcagtttagtggtaatgaccacctttggaaatataaaaaattaaattgtaaaatttctataattgatgagcttattaaagagtataaatcaacagaacctgttaatacacgaaagattgcattactaaaggagctgggaagagcggcctataataacccgttgactgaagcaactcactcttcacgtataatgacattcgcaaaaatacttgataataaagaaaagttaagagcaagaaaaattgttgaggctattactcaacatgaaaattcatcagtaaaaaattgccctgtatgcggagtggatacattaatagcttacaaagatagtgagctagaacttgatgatgaaggaaatttaattaatgcctatgactacacatatcgtttagtgtgtgaatgttgtggcttgtcgttaaatagtggttttagtgaagctaagtcttacggacttgttggtatcgaaaacttatgggattaa

SEQ ID NO: 402268 - DNA, 156 bp, Salmonella enterica
atgcatttcgttgtgctattaattcttttattatttgtgtttgagcggtcccacgaggtaaagatatgtctttatgccattgaagagtatagtcaaatttatcaactgaagagaacctgtcaatttgatcttttaactttttcgttatttctatag

SEQ ID NO: 402269 - DNA, 138 bp, Salmonella enterica; identical to SEQ ID NO: 380384

SEQ ID NO: 402270 - DNA, 675 bp, Salmonella enterica; identical to SEQ ID NO: 400151

SEQ ID NO: 402271 - DNA, 123 bp, Salmonella enterica
atgtttgctatcgcctccagctgtgaaaaccctcggtgggtgcaagaagttgagagccgtggggggatgacccgtaaggaatgggctgactttgtggatcgaaattttaaccctcctaaatag

SEQ ID NO: 402272 - DNA, 144 bp, Salmonella enterica
atgcggccgttcttccacttgagtgactgctttaatcactttttcttgaagttgcgccacagccccattaacagcattgaacacgccgtcaagatcttccggggacaccttgagcgaggctttgttttcacgattatcgactag

SEQ ID NO: 402273 - DNA, 834 bp, Salmonella enterica
atgcgaaagagctatacctatgggattcctttcggactccatcgcgaaaccggacggtttctggacatcacggaagtcagcagaggaagcgcatgcaactgcatctgtcctgggtgtcgtacggatttgatagccagacagggagaggtcaaactttggcactatagccacagtaccgatctcctcggtgattgtgatggcctgatggaggcgattcggggaaaaattattgaaattattcaggaaaaacaacttctaggattcccgcatcttctggccggttacgatggaggcacggtcccacttgatgaagtcagcggcagcggaagcatgttcggcgcaacggcagatctgtttgtgaaggtgaacgatctctgcgtagctgtgtttctggacattgaccgcagtgtggccgggaaactgacgttcgaccatctccatgcctcggagatggtagctgcattgcgcattgatctgccggatatagaatacgaaatcagtcaggttcagcttggtagacgagatggtacctacagtgaatgtatcgagaaaatcatcattgatgcgacggagtcacgcgaatggttgtatcaccccatgatgcaggaactggggaccgagcccctgaaggtatatgagggccgcgagccagcggaagcaggaccacttctacaacgcctttccgactgccccctgaagctgccggacaacttaccccagagcatgaatgtgctgataagaatgcagcaggccaccattgtgtgtttgtgtcggctcaccgtcagagcttcagatatggggtcgtttgcgggagagggcgaaatcctacgctaa

SEQ ID NO: 402274 - DNA, 924 bp, Salmonella enterica
atgacgagtgtagcaattgcagaacatacaatcaacgttccatttcacggaacaaatctctttttggttagcattaacaatgaaccttacgttcctatgaaacccgttgtagaaggcatgggtatggtttgggctgctcaatttgttaagttaaaacagagatttgccaaaggtatttcggaaatcgaaataccttctgctggcggtaaacagctaatgatatgcctttcctttcgtaagtttgcggcttggctttcaagcattcaaccaaacaaagtccgccctgaaatccgcgacaaggtaatcaagtatcaggaagagtgtgacgatgtgctctacgaatactggactaaaggccatgtggttaacccgcgcaaagctaaaaaggcgttgtcgggtaaaatcaccactgagcagcaggaagccattaaacaactcgtcatgagtcgcggtcagtctctgccaaaagaaaaacaggctaaggcgatgatcaccatgtggtcgtcactgaaatcccattttggatgttcgtacaaagaaatcagtgaggagcagtttaccgaagcactgtcacttgctgctcgtgttccgcttgaaggcgagttcatcggaaaacaaaagaagaaaaccaacgagctttctgcaaaagaagcaaacagccttgtatggttgtgggattatgccaaccgctcacaggcattattccgtgaactgtatcctgcaatgaaacatattcaatctaactattcaggaaagtgctacgactacggccatgagttctcgtacatcattggaatggcgagagatgttttaatcaatcacacgcgagatgttgatattaatgagccagacggaccaacgaacctttccgcatggatgagactcaagaataaagaattacctccttcattacatcgctactga

SEQ ID NO: 402275 - DNA, 147 bp, Salmonella enterica
atgggcgagggctttgttatttcaaaaggtacagatgaagccctttgcgacttatgcattacagatattgtaattctcttgcataacgagaggaaagtagctgaaaagcttaagagcattcaaagtgaagacattattaaaagttga

SEQ ID NO: 402276 - DNA, 153 bp, Salmonella enterica
atggaaaacgaagttagtagaatcttagtaagaatgcctacgtcactgaaggatgcaatcggcggtagagcaaaggaggagtgcaggtcatttaactcagaggtgatcaagcgcctgatggatagccttaagcgtgaaggggtagcggtgtga

SEQ ID NO: 402277 - DNA, 135 bp, Salmonella enterica
atgattttgcaagccgcgattgatgaagatagatcgccaaagtccgttgagtcatttgctcagcaagaagctgacaagttcaaagaggcgctgcttgagacgctgaaaaccatgtatggtaaggatgataaataa

SEQ ID NO: 402278 - DNA, 321 bp, Salmonella enterica
gtgtatatatcgctatctaccatttttttcatctgcttggctatttggcttttaagaatatggcaggattgctctgtaagccatgctgctgcggtgagaaataaaaacgcccttataaaagaagctgaaaacgttgtcttatccatggatcacctgtcatggaccgagatgactacagggcaacaagaggtttatgagtgtgcgattgagcggttaaggctgcttaagtcgtacaaaaagaaccacgcacccgactcattcccattcctgaaagaatggccgagatggtatgacccgaaaaaagcaaccatcaaccgctaa

SEQ ID NO: 402279 - DNA, 546 bp, Salmonella enterica
atgttaagtgaaaacgcaaaagatattcctggatatgaaggtttatatgccgtaacagaggatgggcgagtgtactctcactctcgtgttgttaaggctgcgtatggcagtacgcaactcagaaaggggcggtggctaaaacaacacgagaataataaaggctatctatatttgccacttagtgttgatggcattaaagtaaaatggcttgtgcataggcttgtcgctcttgctttcgtccccaatccagaaggcaagccgttcataaatcacatagataacaacccaaaaaataataatgcttcgaatttagagtggtgtactcaaaaggagaatatgaagcattgctcatctcaaggtagggtgaagtttccggctttaaaaggagaaaataatccaatttcaaagctttcatatgagcaagtaatagaaataaagaaatcaaagggagttaatcaaagagagcttgctaaaaaatattgtgtcagtcagacggtgattcacaatatccagtctggtaaatcgtggaggcatgtgaatggctga

SEQ ID NO: 402280 - DNA, 420 bp, Salmonella enterica
atgaattcagcatatttatcgaagattcttgaagaacacaaagtgtggattacctcaatgcatgagagcggatcgagagccgacctgcgcgatgccgacctgcgcgatgccgacctgtgcggtgccaacctgtgcggtgccaacctgcgcggtgccaacctgcgcggtgccgacctgcctgatctcactttcgtgatcctgggtgagaaatacttcataagtataacgaacggtgaatatgtacgggcaggatgccagaaccacacagttgaggaatggcgtaaatacagtaagcatgaaattgctgagatggatggtcgtaaagctcttaaattttatccacgcttgctttcgataattgacttttacctcggtgctggagaatggcctgattgggttaaaaacgatggggaggagtga

SEQ ID NO: 402281 - DNA, 231 bp, Salmonella enterica
atggctaagacacaaatgcagctagcaaaccgggcatggcgtaccgaaacaaaggctttgggatggcatcaggggcaaagctggaaaggtggccgtaaagcgtggaaagcattctgtcgggagaatgccgcaatcacagttgaagaacacctcaaaacagatccgccatttgaggaccaggatgacgccaattatcacgtagctgaagaattaacgtactggacgaactaa

SEQ ID NO: 402282 - DNA, 876 bp, Salmonella enterica
gtgccgaaaatccgtcgtggctactttcagtacgccgggctattgggtttcgaaaaggatgaggcgcaaggcctcgcctggctcgatagcgtcgccgacattcaatataaccatagctggcgggcggcgattaaaaatttcaactggttcgggctcccggaacatttcgtgccgctggcagagctgggcgcacaaagaaatatacccgccgcgctaaacctgctgggccttgaacacaataataaagagaacaacggcctactaccttacgatcctgccatcgcgttagggtattttcagcgcgcggcggagattttgcaccggcagttagcgctgcacgagagcactccgtacaaattaatagataacggaggctataccgactatgaaaatgacctgcaaaatattcatttcagcatcggcgtctgcaaccagcgtctgagtaaacaagaacctgataccgaaaaacgttccgcttatgaaaaagaactactcgataatctctggctggcgcatcagttcgggcataaagaggcctggggcttgttcctgctgaatatttttgaagtgaaggatattacgctggcgcataagcatctggaactggtgcaacaagaggccaacaaaggcacgctacacgctatggtgaccctatcgcgcctgcacggtaataaacacgatcgaacgctgtttaatatgaagctaagcgcacgctgggcgcattttgccttcacactttacccggataatgaaatcgttatggactgcctggaccacctgcatttcgattctttctggaaacgctttcgtttcgcctggtataccgtccgtatcccgaattcagagctgccgggacaggtcaactcaatggtgtaa

SEQ ID NO: 402283 - DNA, 1116 bp, Salmonella enterica
atgataaaagatatccacttaaaaaattttaagtgttttgagagcataactctcaaacaactaaaaacacttaatgtaatatccggaaaaaacaactttgggaaaacatcgatattagacgcgatattttcattttatgacgtaaaaaacccagcagctctgttaaaagtaaaaagctttagaaatgaagcatctcttttaaataaagagaactcattttgggatagctatttttataacatggacacatccaaagaaatgtccataacaataagagatgaaaggtcagaagtaacacaaaaatactcaacgatagataacacacaaagtgaatcaagcgtgtccctcaatgttgagtcaatattatcaaacacccctccattgcgacaaaccctcggctctcaggaaaaggggaatgttttaatgattaaggttagtgaaacacagaacggaaaaagaacccacccagaagaattgattactataaaaataacacaaaaaacacaagaaataaacggagaaataaaacaaactaaaaaaggtaaactatatgaattcaaaaccgcagcgataataaccacatcaagaaacataaacaaagaagcaacgataaaaaacgtatcaaaactactaacacaaaaaagaaaagatgaaataataggcaacctaaaaagaatagataatagaattaacgatattgcaataatagcaacagatcaaaacaaagagatttttttagatataggactaagtgaattaaatgaaatatcaatgcttggtgaaggagtaagcagagcgctgtctttcattagctcaatcttagttcaaaaagactcaattattctcattgatgagatagaaaatggaattcattactcagtaatcaaagatatgatcaacgctttgatagaagcagcaaaaaccaataataatcaaatatttacaacaacacacagccatgatgtaatatgtgcgataaacgaattagatgaaaaaagaaaagatatatcttacataagactgggaagagacaaggaatctcaaaaacctacagcaatgcaatttaacatggatgatttttctttttcagttgaaaatggctgggaggtgagataa

SEQ ID NO: 402284 - DNA, 639 bp, Salmonella enterica
atgaaaccgagaaaaataaatgattataaaaaagtcattttcgttgagggtgatgatgattttcacttcctttgcaatctacttgaaatagaaggaattaatgatgtttatgttgaaaaaataaatggaaagacaaaactaaaacaaacccttagagcatttaaaagcatagagtcttttaatgaaaaagaaagtatattcttaatcatcgatgccgacgaatcgttttctgacacggaaagatcgataatttcaacattaaatgagcttaacatttcatcaccaagctcgcataatgaaatagccattaacggaagcacaaaaatatctttctttatcatgccaggaaaaaacaagaatggcgcaatagaagatctaatcattgctcacgcgtgtaagaaagaggtgtttagatatatagacgatctattcaataaaataaaagaacaagaatctattattacatccttagatcctgattacgcttacccaaataatgaaaagaaagcaaaagttcaagtttaccttagttgtaataaggaatcagattctagaataggcatatcaatgaagaacaaaaccattgatactgacgatgactgcttcagtgagataaaagaatttatatcaaaaatatga

SEQ ID NO: 402285 - DNA, 324 bp, Salmonella enterica
gtgcgcaggcaactggatactgacgcacaccagtacaaccgcaccgtcaacgagatgtgtaccgaactgcgccagttcgcagaccaacacaaacaggtggtaagaatccagcagcagacgcaggagcaacaactggagcgcgtgaacgccaaataccgcgagtgtgccagcgcgttcgacaacgcggcgagacgttacagccgcgacagctgggcgttgttctgggggaacgtagccgccatcgcagtgacagcagtgttagccgccgtggtggttgtattcgtgctggacatgaccggatttctgcaaaaaccgccgcagtaa

SEQ ID NO: 402286 - DNA, 126 bp, Salmonella enterica
atgtttcaggccaatcccaagctgaactggaccgctcagaagctgattacctatataacacatattggccgcaagcttatgctgtgggcgaaatatacgaccgctattatccagattggctgttaa

SEQ ID NO: 402287 - DNA, 1365 bp, Salmonella enterica
atgtttatgaatagcggtggatttattgtcgtaatactctgcctgtatgttattcccgctgttatggtaggtttgctactgttttttctcattcagtttgccagagggcgagcgactggcaaagcagcgttgataatgctgggaatgctgcttgtgacagctattatatttgctaacctgtccacaaataaagttgaaattacccctgaactacgtgactccattcgaaatattgacgattttaaattctcagaatttacgccagaaaagttacccgaccttgaccgtatattcaaaagcaagtcccaaccacaacagtatgatgcttatctacaagctatttacaataatgattcaccaaaagaattgtatcaatactttgttcaacagttaggtagcccattaaagaatcgacagggttcctgggattattcgtcaaataaaagtgaatattatgatattcctttttttcaggccatccaggcagagaatctgacggcgctacaggttttcattgacgccatcaaaaatggctcccctgaagagcgcaaacaagccaaagatattgttgatgcggtaccctcatactggctggaactggaactggtattttatccacaggtcagccgtcatatcgcttccgatagcgagcttaaacaagccgacctgatactttccgcgttccctgaactggccatcaccaaagaaggggtttccattatcgatcttacgattctcagtgcggacgcgcgcgccacgaaattattcgcgaagtactctcaccccagttcagcggcactaaccgccgcaggctatgttctgaccggggagacagataaggttattgatgtgctgaacgtacagccgtcattactgaataaaaaaatcgccacccaaaaatattactccagcatgagtctattagattatattacccgatttgggaaagaagatattgttcgaaaagtttattccatgataagtcggcaagacggagagttgtataacaatagtgacagtattttattccatgccaccgggcgtatacacgatatactttcaaaaggaacgaaagaaaacgaacaggagtccgtcgctattttttcttttatattaaactcgctagctcacgaatcagtcaatattagcaatgagcaactttggacgattgtaacggaaaaattttacattgataatttatattatgggcctaaagtagaaagattcaatgatgaagcaataaaagctatttgtacatccccttttgggccacagttcttacattatgtcaataatctggataacccagataatgaccacaaaataaaaatttcgattgccgctatcagaagaaactgtcaataa

SEQ ID NO: 402288 - DNA, 372 bp, Salmonella enterica
atgaaagttaaagtactgtccctcctggtaccagctctgctggtggcgggcgcagcgaatgcggctgaaatttataataaagacggcaacaaattagacctgtttggtaaagttgatggcctgcactacttctctgacgacaaaggcagcgacggcgaccagacctacatgcgtatcggcttcaaaggcgaaacgcaggttaacgatcagttgaccggttatggccagtgggaatatcagattcagggcaaccagactgaaggcagcaacgactcctggacgcgtgtggcgtttgcgggtctgaaattcgctgacgcaggttccttcgattatggtcgtaactacggcgtaacctatgacgtgacctcctag

SEQ ID NO: 402289 - DNA, 138 bp, Salmonella enterica
atgaaaatctctcttgtcgtcctggtttttaacgaagaagacacgataccgattttctatagaacggtacatgagtttaatgaacttgaaaatataaagttgagattatttttattaatgacggaagtaaagatgtga

SEQ ID NO: 402290 - DNA, 144 bp, Salmonella enterica
atgaccagtaacgccgcccgctacagccccaagaattgcgccgaaggtctgagcggtttttttattggcggtattatctacggcaactttcgctggcaaaacagagataatattgacggtctttgtttcttgcttcgcgtttaa

SEQ ID NO: 402291 - DNA, 1080 bp, Salmonella enterica
atgaatgtagggcatctcaatttcttcaaggttaataagtgcggtttatacaaggtaaatgatgacaatacctatggtttagaacttagcgaaacatttgacctcatacaggattgggtgggaactaaatctcttgcactcacgataccatgggatccaaaagaaaaaccaaacagatcaaagtgttattgcaaggatatttataaggatgaaaatactggtgatttcttaatcatgttatggaaatctgatactgatagtacgggctctttattaggagctagtgaagacggtgaaatcggaagctcatcggtggttaaatatactaatagctacagagggaaaaaagttatctggggtcggccatgcttttattgggttatacctgaacttgaaactatagtatccattaaattcgaccattctgtttgtgattctgaactatttcaagactatgtacactcatctattactaatagagttaaacatagcaaaagggttaaaaataaaaccgagaaagggtatataaggctatctaataccgatgacgaagacttatataaatatatgtacaggtttgatatgaagctcagaagcttagaaaccactcatactgagttaggtaaactaataccaaaaataacacacatagttcgcagggaaactattattataaatccaaatgatgcacgagctgattggttaaagacctttagcactctcgttccatttgtgtccggaaagaaaaatgccaaaacaagacaaattgaaataaaagcagaagcaaaaccatccttgaatgaagttcaagaaatcattgaaaagtattcggctgaggatagagaaaaacgtctttgggacaatgttggatttgctacagacaagggtataacttgggtggataaatatagaatgcgtgatattctcaatgtcccttctgacgactattcaacatattccgccgcatatatttacgaacaaatatcacacaaaagaaaagaatttatttcccctatattaaaagaattaaaagcattacaatctcaaccaagaataaagaaagcatctggagaggattga

SEQ ID NO: 402292 - DNA, 492 bp, Salmonella enterica
atggcgatattcattatatcgctgatgattatttcgtcatccgatattaactatgtgtataacgattttgccaactattgcactcttctcgtatcagtttctggaatggtttttactattatgggaatttggttagcgtttctttacccaaatgctttgcagcgtattgtgaaccccaaaactatagaagccgttgatttcaccgaacaactggaagatacaagaagattagaagcaatagttggaagtgttctaaaatcatctttcgttatgattactttacttgttgtatacttagttaaactagtgtttttcaaaagtcatctttatttagagagccaagatgtaataaaaaacacatctttagcattaattattgctatttcgtacatgcagattgaggcagtaattagcgtaatacttgcaaatgttatgtttatcaatgatttacataacaagcgagagcaaagagacattgatgatcaagtatga

SEQ ID NO: 402293 - DNA, 954 bp, Salmonella enterica
atgaaaaggaatatacgtgttatacctaaaaatattcatagcaagttaagaaggcttggtaatacagttgttgctggcacttctattgcatttacggaaaaccaattaaaaagtggagcattagagcaccttggaatatattttgataatggtgttaatgcttatgtgacgtcggtcataccagatccattgcagggtaaatattcacttaaaaatgtttttggtgaagaaattgtcagaaaagacctcccaaaagaaactcattacactgaaattgagtcacctaactggggcgatagctctaacggtacacatactgttagattaccttacgagaaatatcccagagacattataccaccaacactcatagccattgaaattaatcacaaacagccctcggacggccatttcatatttaacttcagagtaactagaattttagataaacaatcaaataagtttgatgatgaattattatttgatttaaatcttcttcaagaaaatcttggtaaatgtggaattgagaatgctgataaacccatatcgacttatgctgatacacttatagtctcatgggaaatatttccaccaggtagtaaagaagaaactttagcaagaatttttagaggtaaaaatatcacttccgacaagaaaaatgtcgctgaaaatagatatgacttcttcatgagtcttgaacctaaaaaaatcgtcacaggaaacagcacgttcagtaattatattggagctatgctggaggacgatttggttgtatttgaaaacatagaatatggtaatgcgatatatatcctctatgataactgggatgatatcagcaagctatctcgaattgacttattatcaggaagagcaggaagtaatttcgatagaataatccatagtggcaattggaaagatgaagtacgaaaaaaagttgctgctggaagattatga

SEQ ID NO: 402294 - DNA, 243 bp, Salmonella enterica
atgccgcaggcggggtttattaacgagatgcccgtcaagatccgggtcatgcgcgactgcatcgtgatcacgccgcagcatacccgcgaaccctttggctgtattgaaggtatgagcgtgacctatatcaaccagcgaaacgttaaagcatggctggaaaattttccgggggcgctgaacaataccggggatattccggtgattaaacgcaaaagaactgaacaggagttaatgaataattga

SEQ ID NO: 402295 - DNA, 327 bp, Salmonella enterica
atgaatgggaaaatttataagcatgtaagcgaaaggttgtatgctgatattgataatgaaagagttgccgatattgatatagtcggattaactcagtctgatgaggtaaaagatttttttggtaactcagtcatcattcatgagggcgattatgtatatttatatactgattcgatagaaggcggcgagttgtcttatatattttctgaagggtatgttattcccaatccatacgaatttaaaccatataaatggtgttgtaaattagcaggtgatgaaccatattttgaatatttagatgaatataataaacgatttgatgtatga

SEQ ID NO: 402296 - DNA, 369 bp, Salmonella enterica
atgtcatgggtatacaaaattaaagcacatacatttcacttaaatggcgcatatcagtttgatgccagatatgctggcaggccgggtttcaaaaatgactccgctaacgaatgcgtgagagacaaaggacctctgccaagagggacatatacaattggacctgcattttttcatcccagaacaagagcatggacgatgaggctcatgccttatccggagaatcaaatgtgtgggcgtggcgcattcatgatacatggagagagttcatcccatccgggagaagcttctgatggctgtataatcctggatttaccttatcgaaagattatcgctgccagttcagataaaatattagtggtagaggattga

SEQ ID NO: 402297 - DNA, 693 bp, Salmonella enterica
gtggacacggagaaaacaaagtctctcgatacaggaacggcttttcactgccggatactggaaccagaggagttcagtaaacgcttcatcatcgctccggaatttaaccgccgtaccagcgcaggaaaagaagaagagaaaacctttctggaagagtgcgcccggacaggaagaaccgtgcttacggcagaagaaggccggaaaatcgaacttatgtaccagagtgtgatggcgttaccgctggggcagtggctggttgaaagcgccggatatgctgaatcatcagtctactgggaagatccggaaacaggaattttgtgtcggtgccgtccggacaaaatcatccctgaatttcactggatcatggatgtgaaaaccactgctgatatccagcggttcaggacagcttattacgattatcgctaccacgtacaggacgctttctatagcgatggttatcgggcgcagttcggtgagatacccaccttcgtcttccttgttgccagtacaaccgccgaatgtgggcgttacccggttgagattttcatgatgggtgaagacgcaaaactggcaggtcagcgggaataccgtcgcaatctgcaaaccctggccgaatgccttaataacgatgaatggcctgccattaaaactttatcactgccccgctgggcgaaggagaatgcaaatgcctaa

SEQ ID NO: 402298 - DNA, 684 bp, Salmonella enterica
atgccattaagttttccaaatgtatatttaaatatccgtgggagaatagggacattaccttcggatattctagacagtatacgtaatgtagccagacctcctgatggcgagactgggccgactgaaatacaggtgcaactacgtgatgcgttataccaggtacgtcatagccccgacgaaggagtatttgaggtggttccatggcgtgagccggggcaggtttatagtgatattcgcaggaattatccagaaaggtttagcaatgcagaaagcctggcacaccaactaaatcgtacatgggatatgcctacaccacctacatttttaagaagagctgaacatcagaacgccagatatcattttaatactcaacctgccaacataaatcattcattacacgcctggattaatctatgtagttttcaggttgaagcaggaagttttgcatgttctgaagaacatttaacttgtccgataacgctggatattccaacagaaggtgtttttgttaaagtatcatcacagtcagatatttgttgcttatttgacaaagaggcattcctcaacctgctgcctctggaattcgctcatcctttgagtagggaaaaaatccatattgatatgatagttagaaagagcgaatgtttttttaataccgagcgtgagaattttaccttaagatag

SEQ ID NO: 402299 - DNA, 144 bp, Salmonella enterica
atgtacttgcatttccatgagcaggtttttttattatctgtaacatcggctggtgaagacgaagggcctgaccgtgatcttgtgtcatgtgatattatggtttcctcaaatgataacaaccagaatctgaatttttcaatataa

SEQ ID NO: 402300 - DNA, 363 bp, Salmonella enterica
atggtgagtcgggaaaaacaaatatgtcaacatcaactggtcaggcaggaactactggtcaaagaggctccacaggagggagagggagtgggacaacagaagatacttatggtcgccccggaggcgatccatcgtcaggacaacagggttattctgacggtactggggggaatggcggtaatggggggactgggggcgaaggtggaggagctaacacaccctttacagggagacctggcggtacaggaggaagaggagggaatgggggaaacggcggagattcgactgcctcagcgctgggcggccccgggggaaacggcggaaatggtggtgatggtggacaaggtggttggtcaacggtag

SEQ ID NO: 402301 - DNA, 294 bp, Salmonella enterica
atgaatgccccagcggcttcttacccgatttcatcaggcgaaattactggctgtcaggcgcgtgccctccccccggagtcggctgtaacggagtgtctgttggctacctgtccgggggatagtaaaaattatgccagtcgccgtgattatgctgcttctacagtgcttgcccccctggcagtaccgcacgggtggaaggtcatgatgttgattatatcgctgctttcccggctcatggtcaatcagaagttttctataaattcattaattgatacaggtcgcccaaagacataa

SEQ ID NO: 402302 - DNA, 462 bp, Salmonella enterica
atgactgagcgccaaatccggctgatttgtcagcagtgtatggagcgatgccgggcggctgagacatggccgccggacctggctgagtttatttcgctggtttctgaaagcggagctaatgcgtttggtctcacagccgatgcggtgctggcggaatatcgtcactggcgtaacgagtcctggcgctactccggcagtgataaatatccgtggcctcagccggttctgtatcacatctgcaccgagatgcgcagaacgggcgttgagcaccagatgacggaaggcgaactgaaacgacttgcagaacggttactggcgaagtggacaaaacacgtcggtaatggttccagcataccgccggtacgccgtcaactggcagcgccgcgccatccggcagggccaaccccggcacaactgatgatggaagaattcagacggcgtaaggcggcgggaaggctttaa

SEQ ID NO: 402303 - DNA, 147 bp, Salmonella enterica
atgctgaacaccccgggagacgtggatctgcaccggctgatgcgcttcctggggataaaggaaaaggagttgccgccggtcagcgtggtacagcacaacctgagcagttatgagcaactgctgcgtggcaagggaggtctgcagtga

SEQ ID NO: 402304 - DNA, 720 bp, Salmonella enterica
ttgcatgatacgttgaaactggagatgtctacggaaaagacgttgattacacatgcccgcactgaagctgcacgttttcttggttatgaagtagtcacacttgacgctatgaccaagcaggaccaccggggacaacgctgtatcaatggtgtagtacgtctgaaaattccggtagaggtaatcaggcagcaatgccagaaatatatgcggaatgggaaaccttcccatcggcccgaacgcttgtatcatgatgactatagcatagttgcacaatatcaggctgagtacaggggatttgtccagtattacctgatgggatttaatgcccatcgtttgtggaatgttcatcgagtcatgcgaaaatccttattgggaacgctggcgaacaaacacagaacaacggtaagccgcctcgtcagaagcctgaaaaccgaggttacggttggtgataagactatcaaggcattacagatagtccggcacaaagggcaaggaaaaagaccgctggtcgctacatttggcggtttgtctctggcatggcagaaagatacagtgatctccgataacccgaagcagatatttaacggggttcgcagcgaactgatatccaggctactggctcagacctgtgaatgctgtgggacaaatgatggccctttcgaagtgcatcatatccgcaaactgagcgatctgagtcaacgagtattagacgtcaactag

SEQ ID NO: 402305 - DNA, 384 bp, Salmonella enterica
atgctccgcgccggatattttgaagactggcaatataacaaaaccctcagcggaaccccgcagggtggagtgtgcagcccgttactcagtaatatctgtctggataaactggatcgctttgtagaggatgttttgcttccgaaatataatcagggtgaacgtcgcagaaattatccgccttataaggcgctacttaatgcctcaagacatgccggggacaagggtgagtatcaacgggccaaaatgttgtgcctacaggcacaacatatgccgtctcgtgaccctgaagatccggatttcaggaggctgtggtatgtcaggtatgcggatgattttcttttgggtttcagcggccccagacatgaggctgaagaaataaagtag

SEQ ID NO: 402306 - DNA, 330 bp, Salmonella enterica
atggcaacagccgaaaatatactggccgtctattccgatcgtggcaggaggcaactgcctctggagggagtctaccggcagctttatcgggcggacctctacctgcgtgcttatggaaaactctaccgtaattcaggggctatgaccccgggaagtaacaatgaaacagtggacgccatgtcgctggagaaaatcgacgtaatgcgtcgggaagcctggcgctggactccaacaagaaggacgtatcttcctaaaaagaaagggaaacgtcctcctggattaccagcatggtcagataagcaggttcaggaagctggaagcttactatga

SEQ ID NO: 402307 - DNA, 321 bp, Salmonella enterica; identical to SEQ ID NO: 376522

SEQ ID NO: 402308 - DNA, 540 bp, Salmonella enterica; identical to SEQ ID NO: 368517

SEQ ID NO: 402309 - DNA, 429 bp, Salmonella enterica
atggacagcgtcctgaaaacggctgaaaaaaccacctatactcttcagttatttctgacgctggtggctgtcatttcgctggttgtcggcggcatcggcgttatgaatattatgctggtttccgtcaccgagcgaacgcgtgaaatcggcatccgtatggcggtaggcgcgcgcgccagcgatgtgctacagcagtttcttattgaagcggtgctggtttgcctggttggtggagcgctggggattagcttgtcgatgttcatcgcatttatgctacagcttttcctgcccggctgggagatcggtttttcactgactgcgctggcgagcgcgtttttatgttcgacgtttaccgggatactgtttggctggctaccggcgagaaacgcggcgcgactggacccggtggatgcgctggcaagggagtaa

SEQ ID NO: 402310 - DNA, 180 bp, Salmonella enterica; identical to SEQ ID NO: 372403

SEQ ID NO: 402311 - DNA, 330 bp, Salmonella enterica; identical to SEQ ID NO: 400270

SEQ ID NO: 402312 - DNA, 885 bp, Salmonella enterica
gtgagggccgttagccacattcgtcagccaggtgtaatcccagacgcccgacgtcgcgctctgcgtggcgtcaaaccacgttttgccgccatcaatactcagtcttacaccgttaacatccgccggtactgtcacctgaaagtgcgggcgcgcttcattggtcagattatcgccggggataccgctgtcgttaaccagttcaatacggtcaatggcgatatgcgtatctactgtcaccgtcaacggcgcggactgcttcacatttccggccctatcttctaccttcaccgtcaggatatagtcgccgtccgcccagtcgctggtcggcgcaaagcgccactgtccgccggtctgaaccagtggcacctcctgtttaatgccattgtgcattacctccactatcacccggctgacatcggtatcaatattgttgagggtaaagcccggcgttttaacattggtgatattatcgcccgcgatgccgctgtcatctgcgctgtccagcgagagggtcggcacagacagagtggtatcgatggtgaaatcaagttcctgcgtcgtcttgtttcccgccttgtcggtcgcctccactgtcagggtatgcttcccctctcccacatcagccagccaggtataatcccagacgcccggcgtcgcgctctgggtagcgttgaaccacgtcttgccgccgtcaatgctcaggcgtacctcgttaacatccgtcggtaccttcacctggaagtgcggacgcacgttattagtcagattatcgtcgggaataccgctgtcattgaccagttcaatgttattaatggcgatttgcgtgtccaccgtcaccgtcaacgatgcagaatggctggtgttccccgctttatcttcgactga

SEQ ID NO: 402313 - DNA, 864 bp, Salmonella enterica; identical to SEQ ID NO: 372423

SEQ ID NO: 402314 - DNA, 138 bp, Salmonella enterica
atgctccacgctgaccgtaacgcgaacggcatcatcatcaatatgctgcagggcaaatgtcggctgggtgcgattcgtcatgttatcgccctggacaccggtatcgtccgcgctattcagtacgatgaccggcactga

SEQ ID NO: 402315 - DNA, 354 bp, Salmonella enterica
atgcatgatatgtatgaaataatggaccgctggggtgcttgggcagctgcggacaacagtggggtagattggcagccgatcgccgcaggatttaaaggcctgttgcctcatggtaagaaatgccgtctacagtgcaatgatgatgatggtattatgatcgacggatgtgttgcccgcctgcggaagtataaaccagaagaatatgagctattaattgctcactttgttatcggcatttcgcttcgcgctattgctaaaaaacgcaaatgttcagatggtatgatacgaaagcgattgcaagacgcaatgggttttatttcaggggtgttggcgatgttaaacgaagcccaatag

SEQ ID NO: 402316 - DNA, 1041 bp, Salmonella enterica
atgactaagaagatacatgtttatgattttttctccggatgcggcggtactagtgctggcttgaaatcagttggcatggatattgtttttggattggatattgattttgactcgtccaatactttcaagaaaaacaacccattagcacatttcatccaaggtgacatcaagcataccaatgttgaatcaattgaacatttggttactcagtcacaaaaaaacaatgcttacacgcttttttgtggctgcgccccatgccaacccttctctaagcaaaataaggcgcgaaatgaaaatgacccacgaaaagaccttttaagtgaatttactcggttcgtttcgtactatgcccctgacttcgttcttatcgaaaatgttcctggcatacagaacgttgatattaataatggcaattttcagaattttttagaatgtctcaaaagactggattataaattcgattatggtgtaattcctgccttatggtttggtgtgccacagacacgtgagcgctttgttttattggcatcaaaacatactgctatatctttgcctacaaaaacccatgatggtataaaaattccattcgcaactgtaagggactggataggttctcttccgcccattgccgccggtgagagtcataaactggtagttgatcatactgccgccaagttatccgctatcaacataaaacgtatacaggctactcctgaaggcaaaggacgtgaatcttggcccgaggatttgatattagattgccatagaaaatattcaggtcacactgatgtttatggccgtttgtcgtgggataaaccagctagtggtttaaccacacgctgcatcagctattctaacggccgatttggccatcctgaacaagaccgagctctatctcttcgcgaagctgctttgcttcaaacattcccttttgattatatcttcactgggtctatggtttccaaagctaaacaaatcggaaatgcagtacctcccaaaatggcggaagcactgggaagagctatcatttcttcttgttaa

SEQ ID NO: 402317 - DNA, 1752 bp, Salmonella enterica
atgaagtcagcggacattgagcccttcatcagacatattcgctttccttttttcaaaaaccttacagaaggatgtaaggttgattttaactaccctatcacagctcttgtgggccagaatggaacaaataaaagctccgttcttagggctctttttggctcaccaaacaactattcactcggcagtttatggttctcaacagatgttgatgaaattaaagatgaaggacgttctcgctttatttacgggtattttgatgcaccaacaaaatcgatcgtagaggttatcaaaacgcgaatttcgaaagaagacgatcctgattattgggagccatcaagaccaataaaatcggatgacatggcagcaatgcctgaaaagatactctcgcctaatcagttgaaaaccagatggaaagcaattgaaaaaaacgttatatacttagattttcgcgctactattagtgcatttgataaattcttttatcattctgactttcatacgtacccaaaaaaagattatctcagaaagcgcagccagatgcttaaggagattattgacaacgacctcaaaacctacaaaccacacaaagggaaaaaagataagttatttatcaataccttactagaaaaagataaagttaaaatcattggcgatatacttggaaggaaatacaaaagcatccgattactggagcactcattattcaccaatgatagagcaccaacaattattctccaatctgaaaacttgaaatattcagaggcgtttgccggaagcggagaatttgcagtttctattttggttcataaactaatggactgtcaaaaagcctcattaattttattagatgaacctgaggtatcacttcaccctgcggctcaatgtaatctaatgaatttcttaagtgagcaagcattaaagaaaaaacatcaaatagtgatatccacccattcatcatcgatagtcaaagacttaccgaaggaagctataaagttattttgccttaatgataagattggtaaagtggatgttcttcaaaacgtcagtccagaagagtctttcttcatacttggcgaacgtatcgagaagaaaacaattattgttgaagaccgtttagctaaaaaattcgttgagaaagctttaaaaattggtggtatgggacttttaaactcctttgatgtgaaatattgccctggtggtgccggaagcatttatcaaaatattgccgtaccattgtgtattgctaatgttaaaaatgtaatgtttttattagatggagatcaatgccagacaaatgatttcccaaggtcgaattcaattcctgagaatgaaaatccgaacttgcaggaaattatcaaaaaaaccattaatcaagatataaagtttcactgtgacggttccaatggggcagccaatattaagcagaaaagcaagatgcaaagagattttattgatttcattcatgataaaatcgcctttctgcccgttctgacaccagaaaaatttcttattgaaaatacacatggtgattataaaaactacagagactccatctctaaggaaattactgactccaagcaaatcaccatggagatttgcaaactcgacacaggagaagaggatataactggagatagcatattcgaaactcaaatcagaatattaaataaaatacctaacgatcatatagcttttacaaaaacacgagagatgctgcaaattttcttagataatgatactatcaggccatga

SEQ ID NO: 402318 - DNA, 270 bp, Salmonella enterica
atgatcagtgccggaatcaggaaaaatagcccgaccgggaatattcacccggataggctgacaaagaaatttgtaaaagccagaaaaatttcagacgttaaatgtagtgataacccaccgacatttcacgagatccgtagcctgctcgggcggttgtacaaagacgaacgcggcgaggaattcgctcaaaaactcctgggccacacctcagagaacaccacgaaactctatctcgatgaacgcgataataaagcttacgtgatgctctga

SEQ ID NO: 402319 - DNA, 561 bp, Salmonella enterica; identical to SEQ ID NO: 379871

SEQ ID NO: 402320 - DNA, 189 bp, Salmonella enterica
atgtttgaactcgataccttatcgacccttgtcgccgccacgctggtgctgctactgggtcgcaagctggtccagtctgtctccttactgaagaaatatacgattccggaaccggtggcggggggggttactggtcgcggttgctctgcttgtgctgaaaaaaagcgtcggttgggaggtcaactttga

SEQ ID NO: 402321 - DNA, 831 bp, Salmonella enterica
atggaaaatgccctttctatcgcctttgaggatggaatcatccagccagagcagtacagcgccgtgctgatcgacgaaggccacgattttaatcctgagtggctaagaattcttacccgaatggcagacaccaaaaataacacactgcttttcctttatgatgatgcacaatcaatttatcagaaaaagaaagcgctcgacttcaccttatccagcgtcggcattaaagctcaggggcgaacgacaatcctgaatattaattaccgtaatactcagcaaatattacatttcgctagtagcattgcatttaactatctcaataatcacattgaggatgctcttaaatatcagcagcccgactcaggcggaattgcgggttcttatcctgagttgacctgttttgataaccaggatgaggaaataacgcatatccttaactgggttatcgaacagcaccagcggggcattccgtggtttgatattgccatattgtgcccatcaacctatagcattaaagacgtgctgggaccacaactgacggctcgcaatatcccttatcaaatgattattacctctgccgataaaaaaaactggtcgccacagcaagaacggctgtgtgttatgcctctgccgagcagtaaaggactcgaatttcagtcagtcgctgtcatggacgcagccagatccaaaaatgaagaagacttgagcaatgatatcaaaaggctttacgttggcttcacacgggctcgctataatctgctgataactatgaatggagaaaatgcactcagcgagcatcttctcactacctataagcagataacacgatag

SEQ ID NO: 402322 - DNA, 630 bp, Salmonella enterica; identical to SEQ ID NO: 402229

SEQ ID NO: 402323 - DNA, 864 bp, Salmonella enterica; identical to SEQ ID NO: 372423

SEQ ID NO: 402324 - DNA, 885 bp, Salmonella enterica
gtgagggccgttagccacattcgtcagccaggtgtaatcccagacgcccgacgtcgcgctctgcgtggcgtcaaaccacgttttgccgccatcaatactcagtcttacaccgttaacatccgccggtactgtcacctgaaagtgcgggcgcgcttcattggtcagattatcgccggggataccgctgtcgttaaccagttcaatacggtcaatggcgatatgcgtgtctactgtcaccgtcaacggcgcggactgcttcacatttccggccctatcttctaccttcaccgtcaggatatagtcgccgtccgcccagtcgctggtcggcgcaaagcgccactgtccgccggtctgaaccagtggcacctcctgtttaatgccattgtgcattacctccactatcacccggctgacatcggtatcaatattgttgagggtaaagcccggcgttttaacattggtgatattatcgcccgcgatgccgctgtcatctgcgctgtccagcgagagggtcggcacagacagagtggtatcgatggtgaaatcaagttcctgcgtcgtcttgtttcccgccttgtcggtcgcctccactgtcagggtatgcttcccctctcccacatcagccagccaggtataatcccagacgcccggcgtcgcgctctgggtagcgttgaaccacgtcttgccgccgtcaatgctcaggcgcaccacgttgacatccgtcggtaccgtcacctggaagtgcggacgcacgttattagtcagattatcgtcgggaataccgctgtcattgaccagttcaatgttattaatggcgatttgcgtgtccaccgtcaccgtcaacgatgcagaatggctggtgttccccgctttatcttcgactga

SEQ ID NO: 402325 - DNA, 1368 bp, Salmonella enterica
atgaagagagttctgacggcgcttgccgccgcactccccttcgccgctcatgcggcggatgccattagcggcgcggttgaacgccagcccaccaactggcaggcgattatcatgtttttgattttcgtcgtgtttacgctcggtattacctactgggcctctaaacgcgtacgttcccgtagcgactactacacggctggcggcaatatcaccgggttccagaacgggctggcgattgccggcgactatatgtccgccgcgtcatttctcggcatttccgcgctggtgtttacctccggttatgacgggctgatctattcgctgggctttcttgtcggctggccaatcatcctgtttttgattgccgagcgcctgcgtaatctgggacgttatacttttgctgacgttgcctcttatcgcctgaaacaggggccaatccgtattctttcggcctgtggctccctggtagtggtggcgctttatctcatcgcccaaatggtcggcgccggtaaactgattgaactgctgttcggcctcaactatcacatcgccgtggtgctggtcggcgtgctgatgatgatgtacgtgctgttcggcgggatgctggcgacaacgtgggtgcaaattatcaaagccgtcctgttgctgtttggcgccagttttatggcctttatggtgatgaaacacgtcggctttagcttcaataatctgtttaccgaagccatggcggtacacccgaaaggcacggcgattatgagcccaggaggattggtgcaagatccgatttcggcattgtcgttgggtctgggactgatgttcggcaccgccggcttgccgcatattctgatgcgtttctttacggtcagcgatgcccgcgaagcgcgcaagagcgtgttctatgccaccggttttatgggctatttctacattctgacctttattatcggcttcggcgctatcatgctggtgggggcgaatcccgcctataaagatgcggcgggcgcgctgattggcggcaataacatggcggcggtgcatctggccaacgcggtaggcggcaacctgttcctcggctttatttcggcagtggcgtttgccaccattctggcggtggtcgccggtctgacgctggcgggcgcatcggcggtgtcgcatgacttgtacgccaacgtgttccgcaaaggcgcaaccgaacgtgaagagctgaaggtgtcgaaaatcaccgtcctggtgctgggcgtgatcgccattatcctcggcgtcctgtttgaaaatcagaacatcgcctttatggtggcctggcgtttgctatcgccgcgagctgcaacttccccatcattctgctttccatgtactggtcaaaactga

SEQ ID NO: 402326 - DNA, 300 bp, Salmonella enterica
atgtactggtcaaaactgaccacgcgcggcgctatgctgggcggctggttaggtttactgacagcggtggtgctgatgattcttggccctaccatttgggtgcagatcctcggccacgaaaaagcgatcttcccgtatgagtatccggcgctgttctctatcagtgtggcgttcctggggatctggtttttctcggccaccgataactcggcagaaggcaaccgtgaacgtgagcagttccgcgctcagtttatccgctcccaaacgggattcggcgtagaacaagggcgtgcgcattaa

SEQ ID NO: 402327 - DNA, 369 bp, Salmonella enterica; identical to SEQ ID NO: 369492

SEQ ID NO: 402328 - DNA, 549 bp, Salmonella enterica
atgaaagcattgacgtatcacggtccacatcacgtaaaggttgaaaacgtacccgatcccggcattgagcagcccgacgatattattttgcgtattaccgccaccgcgatttgcggatctgatttgcacctgtatcgcggcaagatcccacaggtaaaacatggcgatatttttggtcatgaatttatgggcgaagtggtcgaaaccgggcgggaagtgaagaacattcagaaaggggatcgggtcgtgatcccgttcgtcattgcttgcggcgactgctttttctgtcgattacagcaatattcggcctgtgaaaacaccaacgacggacacggcgcggcgttgaataaaaaacagatcccgccgccagcggcgctgtttggctacagccacctttatggcggcgttcccggcgggcaggccgaatatgttcgcgtgccaaaaggtaatgttggcccatttaaggtgccgccgctgttatctgacgataaggcgctgtttctttctgatattttgcctaccgcctggcaggcggcaaaaaacgcctag

SEQ ID NO: 402329 - DNA, 381 bp, Salmonella enterica; identical to SEQ ID NO: 400508

SEQ ID NO: 402330 - DNA, 654 bp, Salmonella enterica
gtgacaccgcagacaatcacctgggtaagaaataacgttatttttgcgctgaactgcggggataaaccgcagcggggtcaactggcggcatttgagggatttgcccgcgcaaccagtaaacgctatggccgtcaccgggaacgcacgctgaaaataggcaaccgctggtactgtcgggacaccgatcctgtttacgtgctggaaacggcaaggaataagaagcagaaggatatgataacgccggaggcgtacggcacagcgtcatggcgccgcgccataaacagcctggatgattacgaaaaggcgtggatattgtattgctacggtggcgagcatacctatatgaaccacatgctgatttgcgagtacctgtggctacagatgcataaccggctcagggcaagccggaagcgcactactgacgacatgacgggaaacctgatcaccctggcgagtataatgacgtggaacgccgggcaactgattagtgggcgagaaggtgctcaggtatttgcatcaacatacgccgctcaggaaattggagtaaaagccaattcatggagccagaactacaaaaaacactggcagtttatgtacaacaaatgcgcggaattggatcagacatcgctggaaaaactgatgagaaaaatttaa

SEQ ID NO: 402331 - DNA, 210 bp, Salmonella enterica
atgaccactattaacagactggtcgcgctaatcaccctgtttgttatccccgcagcaatggctgcggatacccctcactgtgttgtcaaggaatcgtggccgatcatcatcactcaatgcgatgacgggacagtaactgtgaccaacgtgagtaaaggcaaggcttccgtatgccgtaagggggatttatgccaggagatttctctatga

SEQ ID NO: 402332 - DNA, 2289 bp, Salmonella enterica
atgaaaaatattaaacaaatggtcttttatgccaaaaagtccatacaaaaactgcgaggtattattgcagggaccatctggtttgataacgacgatcaggacgaaatcgacgcactctcgacgctggctattaagaaagcgggatttaaaagaagtgatttctttaaacccgtccgcgtggatcatcttgtcgttgatgatatgccgatggagggggtttttgataccgcgttctgcgaccgctacaaactggcagaagatggtaaaagctggctgctgccagcgtcagtcgctcagcctgaatcaaccgattccggcacaggagaaaatggcgacagcatcagtgaggggtatacagatgaaaacgccaccgacaacgccgacaacaccgattccggcgataccaccagtgccgccagtgccaccagtaccgacacaggagccgctaccgcagccactaattccgacagtgccaccgatgccgctggatctgccaacgcagcagccaacaccagtactgaaggcgtaggcgctgagacagccactacagccactgatgaactacccgcctgggaatttaacgtcaacggcgagcggatggcggatgttgaaaaagagatgctgcagccggttgttggaatggatgatcgccatcgcatactctctcagttcatccttgaggataagttctcacacaacatcacgccggaacagcttgccgaggtaagccgtctggaactggatgtaagcgacaactatatccaggatatgttgctcgccaccaggaacgctccagccatacacaagctcaatacgcctgacctgtggaaatataccgacagttttaaaaaggtttttgcgcgggataagcgtcaccccctcagccggatgattaattttaaccaggcatacgctgacgcacaccccatcgatcgcggactgctggttaaagagtggataaaaggcaattacgtgtcacgcattgagaaatcaggagcaaccagcgacagtgccagcgccaacgtcagcgccacaccagagccacagaaaatcagtgtgactaaagtggatgcagcgatatcaggtaagccagccacaaaaacaacgtacaaaaccattgatacccgtatcgggatcgcactaaccaaaggggtgatcacgtttccgattacggcaaaggtcgttgagcaaggcaaggctattgttgaggctgacggcgaagaatttaaacgctggtccgcaacttatcgcgtaaccgaaaacatccagttctatgacgagagtacgcatatatcgatgatccgccaggctccccgagaggtagttactggcagccctgagttgcgccgcgcgtatgtggataactatctgtcagcctacggaacgttagatcctgatcaaatggtgtatatgccgaagcgagcccctgtagatcataaagaaaatatggagcgtgtacgtaaggctggtaaaaatctgcgagatatagcggcagggagatttcagcatgaagaagaaacgcaacagacaggcgcactggcagatgagccggcagcgcctgaaacagtggaaccggacgcaaatgaacatcatccggatacacggtcgatggcgactgaatcatctgtagctgtagtggatgatggcgagcaagcccttcgcgaaaaattcggcgagcaactcgcggccgaacgtggtgattttgtaccaggtatcagcgaccccagcgatccgaagtgggttcataacgattacagcgccagcgcctcaaatgagggagagaaaacggaaaatgaggatgccgacgaggtaaaccagaatgacgatactgtcatccagaacaccgattctgtaaaccattctgaaccatccgctgaccagatcgaaccagaagtaccggaaaccgagccaaaaagcctacaacccgaaccagtaaccaaagttgccgatggtgtttttgatgtgtctgcgttctttgcgacaacctcaaaccagggtgaaaaaacagaaacctcactgcccaataatgatgactgttcgcaggaatgcgcagaagaaaaagcgacggatgtacctgccacagtgaaatcatttctgcacgaaatagttcgtttgcagtcaataaataaccagttactggaagcctgtattgcgtatcagagccgggtggaaaccagacaggaaagatttctggaagcgcttttctacgggataacacgctttgcataccagtgggtggaaggtgaggaggatcgggaatctgaagaaaaattacggggtgattcatga

SEQ ID NO: 402333 - DNA, 234 bp, Salmonella enterica
atgcaaaaagctgaacgtgaggcagcgatcgccgccaataaagaacccatatcgccagagcagatgttaattctttgcgcggaatgggaaggaatggaaaagaaaattctcgataacaggggaatcagaaccaagacggaaattctggcgattttccggggttacagaaaatcaaaagaaaagaacgcctggcgacagattaacatgaggaattggcgaaatgaaaaatattaa

SEQ ID NO: 402334 - DNA, 591 bp, Salmonella enterica
atgaataacgtaatgattgatattgaaacaacaggcaccgcgcaccattcggcaatcgtatctgttgcagtggcaatatttgatccgttaaccggagagattgtggcggtactttatatcagggtggactggaaagaagactgcaaaatctgcggcgggaaaatagacgccgacaccgtggaatggtggctgaaaaaatcaccagaagcgcgagcggagttaattaccagtgatgaccagttacctcctgatgatgcgctgatgcgactttttaactttatccgaaagcactgtgatgaaagcccggtttatgtgtgggctaaatcgccgtcatttgatttatcgcttatcaaagacgccgccgaacgctgcggcattccagccgaaatgatcccgtggaaatactggaacgaacgcgacgtccggacaattgaaggtgtcggcgctcagttaaatatcccacttccttacggcaaaaaggacgtaacccatcacgcgcttgaagatgttcgcggtcagattcgaaacgtagcggcagtcatgagcgcattaagcactttaaatgccagtcatgaggcatcggaggcgtga

SEQ ID NO: 402335 - DNA, 342 bp, Salmonella enterica
atgagtatctcgtcaagagactattcgcaaaaattgcgaaaagtgagaaaagcagaaggcctcacccagaaagagtttgctgatttaacgggactttctttgagtaccgttcggaactacgaatcggggcaaaagacggcaagagctgaaattatggaatcggctttacaagtgcaacgctttgaaaaatatacaatgtggatacttcacgataaaacattcccacaagccggacaaatcgccccggctctctctcttgatgggtccattcaatcggaggtagatcaggtttcaaccgaaacaacgcaaaaatcgccccgatcacgccgcaatgctggctaa

SEQ ID NO: 402336 - DNA, 183 bp, Salmonella enterica
atgcacaaatttactaaggtgttggcgccgggctgctgctgggcgtactgtgacggactggtcagtggctttgtgattgcgcatctggaaattgccgcactcgccacaatgcagattgtgcgcagtctggcttatatcatctccgagggtaaatcggtaggcattgaagacgagcttttctga

SEQ ID NO: 402337 - DNA, 207 bp, Salmonella enterica
atgagtatgattgatattcacagcgaccagatggttgatatggcatttattgttcgttttactggtatgactgataaatggttttataaattgattcaagaaggaaagtttccgaagccaattaaaatggggcgcagttctcgctggttggaaagtgaagtagtcacgtggtttaaagagaaaattaacgaatcccgcatggaataa

SEQ ID NO: 402338 - DNA, 1302 bp, Salmonella enterica
gtggaaaactcacttcactatgtcaatataaagaacaaaagagatctcagattgtttctttggtatctctcagctaaagatattgcagttcttattagcgcgttaggatcatcaaaaagcgtttataatgaaggtgatatatttggaagtaatattgaaatcgcatcaagtgctgttaatcaggccctcttactgctcaaggacaacgttgttaagggggtttactccacatcatttaattactttaaatcacttcaattaccttcttctgagttttcatggataaagaaatctcctgatgcatgctatttttcatggttgtatataaaaactatggttcatgattcaaacagtgagttacaacttattcctgtgattgctggaaaaataagaaatgctgattacaccgctgtcaggcatgactttttgtataagagattactgataaccccctatccagtagataataaagaacgaatggttgcaattgaggatttttttgatcgtgcaccgaccactctgagaaataaaatcaatttgatgcatcgcattcgaaacaaatggaatgatctttattatttaagtgctaatttcccactaacgccaaaagaaaaaaagaaatgtgactgggcctgggaatacatacaaaaagacaggagtaacatgcgtggtaaaagaaaaaaaccggatggtacatattctgattgtttaaatgttccatctgaaactgatagtaacatgctttctgcattaagaccttcaggtgcttatgagaaatacatggctgtaaagttttcatatatttttaaattcgtaaaagatgacttatttattcagcggttcaaaaaagcatggggactgcataagtacaggctctcagctgcttctaaaaagaataaattatcaagacgttacggaactgaaaaagaagatggtgtagccaaacctgtaccttcgggatcagagcaggacggttataaggatttcttgtctgagaatagtactcgtcaattcacccctgatttagcacagcctctgcacagtgaacatgacacagagagcattgtggaaccaagtgaagcatatcaaaatcataaaaatgagaatgttaaagttatgaagccaactcaatcagggagtagctcaaaaggtataaatccccgtggaatagtaattaaatatttgcagtcttcctccctgaaaaatacttttccataccagatgataagcatggcaagtgacagttttgacgcaatagtgaaaacagcgagtaaaataaaaggtaagaaaaacatcaagtaa

SEQ ID NO: 402339 - DNA, 435 bp, Salmonella enterica
atgttgaagactacctctgccttgcttttcagcgcagcattattcagtaccgctgcgcacgctgttagccaggaccagcaatggggggactggttcggcaatatcagtgcgatggagtttgaaatcaatgcccagaacaactcaggtgaagtactcacgctgacctgtacaagcggaaaactggctgttgcttatagcgtccccacagaagactaccgcgtttcttctctgacgggacttgcagaaccgggcatcagcgttaacggtacaaatcattctctggatgaaacagcctttactgcactcaaatctgcgggagataaaggcgtaataacaatcacctctatgaattcagctatctctaaaaaattcagtgctaaagggctgaatgaagcgctggccgatacctcatggcaggactgtattaatcactaa

SEQ ID NO: 402340 - DNA, 261 bp, Salmonella enterica
atgcgccatgttcctgctgatgcccgtcagaccgggatttatccggtgtccctggaaaaccagccgggctgccgcccggtctccgacgatgacctgtgcgcctggtgctcacaccttctctaccgccccggcgaactaagtctgtgccagtgggctgatgccgacggcgtgtggccctcacggtgcgatgctgacggctatgcacaatcctgcccacagttacacctgaatataccgcctgctgatatcacctgccggtaa

SEQ ID NO: 402341 - DNA, 513 bp, Salmonella enterica
atgacctttacagaaggaacaactgacatgaccgacattatcaatcttaataataacaacctgttacgaccgcaatttgccgatgaggcccccacaccggaactgaccgccgcgcctgtacctgacgaacaacgaattgccttctggccacagcattttggcagcataccgcagtggataaccctcgagccgcaaatcttctcctggatggaccgtctctgtgagggctactgcgggggtatctggaacttttacaccctcagtaacgggggagcatttatggcccccgaagccggtgccgacaacgatgaaaaatggatgctgttcaacccgatgaacggcaacggcacggagatgagcgctgaggccgcaggcatggcggcctgcctgatggcttacagccaccacgccatgcgcaccgaatgcgacgccatgacggagcactattaccggctgcaggactatgcactcaaccacccggaatgcagtgccattatgcacatcatcgactga

SEQ ID NO: 402342 - DNA, 480 bp, Salmonella enterica
atggaaacacagttaccgctgtttgccgccgaattaccggcatcggcacagcacaccatccgtgaggcattaaccctgctggagcgtcagttacgtgaacccggggcgtcatttacttccagccacgccgtccgggactggttgcgtctgcagcttgccacactggagcgcgaagaatttaccgcgctcttcctcgataaccagcaccgactgattgcccacgaaaccctcttcaccggcaccatcaaccatacgcaggtccacccacgggaggtggtgaaggctgcactgaaacataacgctgctgccattctcgtcgcacactgccacccgtcagggcacgctgagcccagcgaggcagacagacggatcacagagcgtcttaagcaggcactggacctggtagacatccgcctgctggaccatctggtggtgggcgggatggagatcgtctcgctcgcggaacgtggctggctgtaa

SEQ ID NO: 402343 - DNA, 855 bp, Salmonella enterica
atgtcgcccccgatgacttacgaggatttactcaagtccatttctttgcagggattggtgtttggtcatatgccctgcgccgtgtgggctggccggactcccgccctgtctggacaggttcctgcccatgccagcctttcagcacggcaggcaaaggaaaagggtttgctgacgagcggcacttatggcccgccatgcattggctggtcgggcagtgccgacctgtcgctgtctttggcgaacaatctgcaagtgctgacgctaacaactggatcgaccttgtacaaactgacatggaaagtctgggatatgccttcggggcgtgtgcgtttccgtctgcgagcgtcggtgcgccgcacatccgcgacagagcttactgggtggccgacgcctacagcgaacgcctggaagcatccggggaatcagggacggcttggcgggctgaatctgcaatcggcggcagcctttgtcggttggacgactccatcggcgagcgattcccgaaggggaggatcggggataacagagggtatgtccggcagcagcctggcgcaacttgtgaaaatggctggctggccgacgccaacagcgtcagatcacaagggtgggtatcagggcggcagagtgcgcaacggaaagctatcaacggaccgtctggatgtggccgcgcaactggcggagccaatccgcttaacggattctgggacggtgctgactggttgttctgccgggatggaaagtggcggccagttgagtccggcacattcccgctggctaatggcgctaccaccagagtgggacgtcttcgcgcctacggaaacgctatcaatgttgaagcggcaacagcgttcataa

SEQ ID NO: 402344 - DNA, 264 bp, Salmonella enterica
atggctatcgagctggagtttataggatttgacccagccagcccggatggggaaatcaccgcgacgatggtcgttgatcgcattcatgaccgctggcaattgggcaacttctggttggttgagtttgacgctttttatgacggcgtttgtgttcgtgacactgcggcctttgacacttacgcagaagcactaactttccagcgcggcagcccggtagtgctcgctgtcgatcctgatacatccaacgacgagctgcctttctga

SEQ ID NO: 402345 - DNA, 948 bp, Salmonella enterica
atgattcgatctctcgttaaatggcctggcggtaaaggccgcgttatgtccgatttacagccggtattgccgaaaggtgaatgcctagttgagccgtttgtggggggcgcttccgtctttctgaataccgattatcgtcgctacattctgagcgatataaaccccgatttgattaacctttatcgtgttgccagaagcacccctgacgagctgataagcctgtctcgcgatttgtttaagaaccgcaataccagcgcaaattacgccaaacttcgcgacatgtttaatcatccgaaaggccgccacctgcgccaccgtttcactagtgttgcccgcgccgcgttctttttgtacctgaaccgccacggctacaacggtgttgtgcgctacaacctgaaaggtgagtacaacaccccttacggaaaggggaaggataaagaaacgcagtatttgccggaagcggagatccgcttgttctctgaaaaggcccgcgatacctgcactttatttctttgtagtgacttcgtggacgccatcaacgcccctcttttccctgatagcgttatttactgtgatccgccgtacctgcctgcaagtgacaccgccaattttacccagtaccacactggcccatttggtaagaagcaacaccgccagcttgttgccgcccttctgaaagcaaaccgagagactggcgcatctgtcgtgatttctaacagcgacaccccgctgactcgcgagatctacaaagacttccgcttccaggaaattgccgtccagcgttcggtaagcgccaacactaaaaaccgtgaaaaggccaaagaggtgatcggcgtcctcaaagtctgcgcaacttgtcgccgtgccggtggtgggtgctgtcctgactgcggcccttgtgctggttattccgtgtggggtggaacggctgacgaggtggtcttctga

SEQ ID NO: 402346 - DNA, 666 bp, Salmonella enterica
atgaatatattaaattctggcttaactgccagcggcattactcaacctgaaatcagcaaggcagaagccacgccggaagggatcaggattgtttacagtgctaacgccgtttgcgctaatagtgaaaagctggtggtctacaaaaaggccgttacgtggctggacaaggggcgctatgactacgatcccctttcagggtacaggataacagaggctttccttgctggtgcgcagatgggctatataccgttttatgatgatggtgttatggcggtgtatcgctggattgcttcaattgtttatttcgatgaacaggcacgtaataacagcgttgttgatgttaaaaataatattggtggaacctgcaaggcggcgatatacaagggtaaacatgcatcaataacggtttatccgttgcagttgcgaatactcatgaatgacgcattcgaacaaacagctttcaggcagtacggcagaaaaggcggcttaaaggtggcaattatgtcacttgtcagcatggtggagccagccggggaaattcttgttatatcgccttttggcaatgagttttttagccggatgctggagcaattaatattacatcgtaaaaactctcgtgacggcagcggcggcaacaatgagctagtaaaacccgttattcactaa

SEQ ID NO: 402347 - DNA, 291 bp, Salmonella enterica
atgcgaccctttggcattatgctctacccaaataccgagggcggtatttcgccttcggaacaaaatcaatcagttagcaaccaaggccggaattacggccttggaacaggccaaagcactaaaaagcgctttggaacaaaatcaatcagttgtgttaaccgttgctcacatgtgagcatcggtctacaggcaatcgcgatagtacaaaaacaggctaaaagcgggtgtaaaacacacctgaacggcattaaagcgccatttaatggcattaaaacgcacaaaaaagggtaa

SEQ ID NO: 402348 - DNA, 369 bp, Salmonella enterica
atgacaaggctcattgaaatctattcccggcttgaggctatcgacggatttttagcgctgatgctgcaacagcccgacagttaccgcgaacgaatgataagcgaacgcatcaccgaactggtggaatacatcgatcacgttaacgccgtgatgtggacgcagcaggaacggggcaaactttgtgatttcgatacccgctacatactgcccgccatttctgaaatatggctacaggtcaaacaggaactaaccagagacagcaggccgctatgtgaattagccgccagcattacggggctaatcagtctggtcagtttttatctttcccgcatcgagggcagcggcgataaaaacagggtgctacattga

SEQ ID NO: 402349 - DNA, 546 bp, Salmonella enterica
atggcaggaaatagtctggtaatgaataagacggaacaacaaaagcgaatcagaaagataatgcttcacgccattaatgaagcggtaaaagttggcgttattcctttgatgttcagacaccgaagaatgacagccgaaggatacgcaaaaataaccgtatgtgataagcccacaatcatcaactggacagataccgggcacgatgatttcagggttacagtctggtgggactatcaaccagagaaaatccccaggctgataaagggcagacctgaaaaccttaaattgttattgcctgacgtggagcgtaatcactttagttttatcgttggcgcgtgtgcgagtttctattttgactatctgcacaagggcatattgtcagacagagggaaagaattttttgcggtttatgttcgcgagtcgacaggcagcggtatagacgaactggaagatgtgaagccttttggctattccatatcggagctatccaggccactacaaagaatgatttcaccaacagcaggcggtaagtacggaaaatattaa

SEQ ID NO: 402350 - DNA, 192 bp, Salmonella enterica
atgtggcaggagcctgcgaacgggaacaccatgtccatggcgggaggcgaacgacttcatgtcgcaggtgttcatacaggtagccagatactggatctttggatccatctgaaaataacttttcctcatcatcatgtttttccagataaaaccggcctcatgatggaggggggctttcccgatgatttatga

SEQ ID NO: 402351 - DNA, 552 bp, Salmonella enterica
atgcgtctgttatcactgccgttacctactgtattatctggtctggtcgccgttctggtcggctatgcaagttctgcggccattatctggcaggcggcgcttgctgctggtgcaactcccgcagagatcgccggctggatgaccgccctcggtatagcgatgggcataagcacactggcgctaaccttgtggtatcgtgcgccggttttaaccgcctggtctacgcctggcgccgctctgttggtgacagggcttcagggattatcgttgccagacgccgtgggcatattcattgtcgccaatgcgcttattgtgctgtgcggcatcacgggagtgtttgcgcgtttgatgcggataatcccccattctcttgccgccgcaatgctggcgggaatactgctacgcttcggcctgcaggcgttcgggacgctcaacggagagtttgtgatgtgcggcggtatgttgttggcgtggctactctttaaagtattcgcgccccgctatgccgttattgccgccatggtgacgggaataacggtgacgctcatgtag

SEQ ID NO: 402352 - DNA, 657 bp, Salmonella enterica
  misc_feature (579)..(588): n is a, c, g, or t
atgttatacaaaaaattcatcttatcaatgatagtgttgggaataatgtcatcttcagcttttgctgatagcgtcgttgaagggaaaacactcaacgtcgcagtatcaccggcttctccccccatgttatttaaaaacgctgatggcaaattacaggggatagatctggagcttttttcgtcttactgtcagtcacggcattgtaagctaaacatcaccgaatatgcctgggatggaatgcttggcgcagtagcaagtggtcaggcagatgtagcattttcgggaatttcaatcactgataaacgaaagaaagttattgatttttctgatccttattacatcaactctttttatctggtcagtatggccaatcataaaataaccctcaataacttgcatgaattaaataagtattctattggataccctcgcggaatggcttactccgacattatcaaaaacgatctggagcccaaaggatactactcgttaagtaaagtaaaattgtatccaacatataatgagacggtggctgatttaaaaaatggtaatcttgatctggcattcatagaggagccnnnnnnnnnnggtttattttaccctcaaaaacaagcaaaagatgccgatagaaagtcgttatgttttcaagaatgttga

SEQ ID NO: 402353 - DNA, 1458 bp, Salmonella enterica
atgagtaatatatatgatgcgtcgaaacttcccccattttctttgttggaagaacctctgctaacttttaatccagaagatacgttgcttgatgtgaaccctttaagggggatcattcataacggtgcttacagtggttcaatttttcctacttatacgccagaactgcggatagcgactattgggcctgttagtggatggaaaaacttgcgtcaattagtcgatacgttgagatccaagcaagccccaagagatcgaaagcaatatgttccagaatttcctggttttgaaaatacattcaatgttccgttggttgccgccaaaatcggtgaggcacatatcagattgcctgatgatctcttatctttcggagttgaaggctcgccacatatccgactgttaaatgcattgcgtataggaatgcagaggctagcattagcgcgcgatcattttgatgttgtgctagtacatttaccagatcattggcagagtgcatttcgtggccctgattttgatgtacacgatacgcttaaagcaattggtgcgggatacagtattcctactcaggttatcaatgatcgagtatttacgtttggttacaaggcttcattagcatggcgtctgtcgattgcgctttatgtaaaggctggaggaattccgtggaagttagcaccactaaaaggtgtgccagaaaatactgcgtatatcggattagcttatgcgctaaggggggacccaaaaaattctcattatgtaacctgttgttctcaggtatttgatgctgacggcggtggtatgcagttcgttgcgtttgaggcccgagatcctgtcatggacatcgaagatgctcgtcgaaatccattccttagtcgaaatgacatgagagcggtactggctcgcagcttagctctttatcaaagtcgtaatggtggtttgcttccccgccgcttggtaattcataaaacgacatcgtttaaaccagaagaattggaaggcgctatggacgctctatctgctgttcgtgaagttgagtgtgtggagatatccagtaatgctgggtggcgtggtgtttggttacaggaaaaccgtaatacttcatcccagagaagaagtgagcctgatggatatcctgtgccacgaggcactatactacagcgttcaggaaattcagccttcgtttgggttgcaggcaatgctcctcgtgctgcgtctggcggagactattaccaaggagggaaaagtattccgcgcccactaaatattacgcggtacgctgcggtggggccaattgaagtgactgcttttgaagtacttgctttgacaaagatggattggaataacgatgcattgtatgaccctgttcctgtcaccattagatattcacaacgtttagcgaaaactatagctaatgtaccctcattgccagggaatgcgtatgcctatcgattattcatgtag

SEQ ID NO: 402354 - DNA, 1863 bp, Salmonella enterica
ttgattaagactctcacaggaacacaatttgccaatacattttgtttgaggcctgaacaattttcttggtttctcggggcaggggcttcagcggcggctggtattccaaccggttacgcgatgattttggacttcaaaaaacgtctgttctgtcagttgacgaaaatcagcccccgtgaagtggatgccaatgatcctttgtggcaacagcggattgatatgtttttcagtatgcgttcggagttaccagcgcctgacagccctacagaatatgcaagggcctttgaggctgtatatccgacagcagaagatcgtcgtatctatatagaaaaggctgtaacaaaggggacgccatcttttgctcacaaagtccttgctgctcttctgacaactcatcgtattccatgtgtttttacaactaattttgatcaattggtcgagactgcaactacattgaccgatcagttagtgtcggcccctgagcgtgcaaacctaactactgctgcaattgataatgcagaacgtgccgaacgttgtttacgcgaatcgaactggccatttctggctaaattgcatggtgatttccaatcggttgaactgaaaaatacaactgacgaacttagagagcaggatacgcggatgcgccatgtttttggtactgcttgttctcgttttggattagtgattgtcggttatagtggtcgcgatgaatcagttatggcagtgctaacagaagtattggagcaaccaaatgcgtttcctggtggaatctattgggtggcacgctctgcccattctgttttacctgctgtaaaagaattacttgagaaggctactcaggcaggagtaaggacagcgattgttgaatcccctacgtttgatgagttagccggagatatttttgatggaatcaatttgccacaaatcttgttgcagcacgttcaggaatctcgtactgctcaagttttatcagaaataccacttcctgttcaggaacaacgaaacttccctgtgttgcaatgctcggcactgccaattctcgctatgccacagcaagcccgtcgtattgagatccttacttcaataacgacggctcatgctcgtgaactggtacgcgaagcacaaataaaggcagttgtagccagtacggggcgtgaaattgtcgcctttggtcatgatgcagaactacttaaagcattcttacctgttggaggaaaacttgcaggtatcgtagatattcatcctgagaacgacagttgggcgttgggcttgatttacgacgcattgatttgggctatcagccgagataggcctttgctaccacgtttacgacgaaaaggtcatgcaatcatagtggctaacggcttccacacggacagaccgcaatttgtagcatcatgtaaaagacagttatcatctcttcgacaagcatactcagtccccttgaccgggaaagtcgatgggtctggttatccgtttagtgaaggtgtgcagattcgattggatctcgtggcaggccgttggtggtgtgtatttgaaccttttactttcgttgaatttcctcgccaagaaccaaatagaataaccaacaaagatgacggcgtttcatcatatatacatgttgcaaatccctccatagattggcagcgagaacgatgggctggtagacgcaataaagtatggtctcgtatcattttgggatgggcacaaattttgcccggtgataatggtggcgtccttaaagccatcggtttcaaagatgattctggattaagtctggatgcagaatttcagttgtcatctataacagcatgggctcgacccagccatgagcatgattactttcagcggagcggccgatga

SEQ ID NO: 402355 - DNA, 387 bp, Salmonella enterica
atgaataattttaacgccttaaaaaaatacacacataaaaccaatgaaagtgaaatattcattgaggacgttaaacgtgtttcagaaaattcttttaaagcaacttgtattttacttaaaaaccatttccattactcagattttcttcctacaaaaaatttaataaatccgatttatttactagagtgtgcgcgacaacttgaaacatttatatctcatacagaatttaatgtggcgttgaacacgaagtttttattaaaaagctggtatcagtgctataaacgcacccctattgaaaacgctcaatcactggacattgatatacaaacaaaataccccataaataccaataaaaggtctaatgaatattatttcacacttaaatga

SEQ ID NO: 402356 - DNA, 2847 bp, Salmonella enterica
atggatcccgaacgtgaagcgctggaaatgatttaccgtaaccatgttgaatttgcagtagggcatggtgttgctgtgcatgctaaacctgcagataacactgaacttgcgactgaaattcgcacgactgttatgccacagtacgaagtccagagaacagagactcccggtcttgatccatcagatcgtccagcgatgcaagaaatggtcaaaagtggtttacttgacatgcagaaactggccactttggaagtggaaccactgatcgatgcattaaatgtactaaccaaggactatctggattggattagtgaacaacgtgccagtgtaggtattaaaattacaggttttgaaacccaatctcagatcgcaatggatcgttgtaaggagatccattctcgcctgcaaaagggtattgatacacttaagcttaatgaaaaagcgctggcagcatttcgtttcgccaacaaagcaatggcaacgcagcgagtacgaagtttatacgcgttggctaaacgccgtggtgaagatacaactattgaaccatttgatattgaaacgaatcgtagctggcgcccttttcagttggcattcttattgctctctataccttcgttggcagacccaaaccattccgatcgcgtgcagcctgtaaatgcctatgctgatcttttatggttccccacgggtggtggtaaaactgaagcttatttaggcgttgcggcttttacaatggccatacgccgcatgcagggtaatttaggggggtatgatagttcgcgcggcttggcggtaataatgcgatacacattgcgcctgctaacattacaacaattccagcgtgcgacagccttaatttgtgctatggaagttttgcggcgagaagcactcaataatggcgacgtgtctctcggattagaaccatttactattggtctttgggttggcaacaaagtaacgcctggttcgactgaagagagtcatcgagctattgaagatgcccgtaatccgggaaaaaaccatgcgggaacggcctcacctgcacaattaactagttgtccatggtgtggttcatcaattatccccggacaggatgttgaagttaaaaaggataaattggggggaaggacgtttgttttttgcggtgataaaaaggggcgttgtgacttttccaaaggaaaatcaagtaaacaagcccatccaggattgccagtattagtagtggatgaagagatctatcatcgccctcccacaatgatgattgctactgtagataagtttgccatgatggcatggcgtggccaggtgagaacacttttcggccgtgtaggattggaatgtgaacgacacggtttgctctggcagggggctagctgcacaggaaatcatcccgcagccaaaggacaaccttcaactaaagttaaggttatcaatccaatacggccaccggaccttatcattcaggatgaattccacttaattagtggacctttgggcactatggttggattgtatgagactgctgttgatgaattatgtagttggaatcttgacgggaagtcggtcagaccaaagatcattgcttcaactgcaacagtccgtaaagctaaggaacaggtaaataatgtttttatgcgccaagtggcagtatttccaccacatgggatagacgttgaggataactttttctcagtacaacgacctataaaagaaaagtatggacgtcgttatcttggggtatgctcgcctggcagttcaaggcccgcaatgctgatccgtgtttacactgcattcctgaccgcagcacaggaattattcaaccactttggcgagcctgctgacccttatatgacaatggttggctatttcaactcgctacgcgaattaggcgggatgaagcgacttgcagaggatgacgtacaaacacgttcttaccgggtgcgaatgagcatggtggaaagaccggcattggcacaacgtagtataagcaatattcgtgaattaacttcccgagtatccagtcaggatatccctaaatatcttgataatttagaggttaagtttaaatctgactttgatactactactggtaagtatgtgactaaatggcaggagggggatacacgggctattgatatcgtccttgctactaatatgttgtctgtcggcgtcgatgttaaccgacttggtcttatggccgtaaatggtcagcctaaaggaacggccgaatatatccaggctaccagtcgtgtagggcgttcatttcccggtttagtttgtaccgtactaacatgggctcgtccaagagacctttctcattacgaaacattcgaacattaccatgccaccttctacaagcatgtagaggcccagtctgttactcctttttctcctcgagcgatggaccgtggtttaacaggtgcgttattaagtcttgttcgtctggaaaacgacgaattcagtccaaacgatggggctggtaagttgaatatgtctaatcaagtcgagatctgtaatgcaatcaaagctctggcgaatcgtgcaggtaacgttgcagaagataattctcgtaaaaaattggcagagaatgaactgaaagagcgtgctgatgaatgggcaaagaaagcgtctatgggggggcggattctcgcatatgaaaaacgtgggcctgaaatagataagacagttagtttaatagactcaccaggcctgaagccttgggacaactggaccgtgcctatgtcaatgcgagaagttgaaccaggtgtgagacttataatgaacaccaaccatatagcggacgatcacaattggaagcctcgtcccgcaactaaggatgaggactga

SEQ ID NO: 402357 - DNA, 1872 bp, Salmonella enterica
atgaaaattaatgagaaaacacccgttggtgaagttcgcccgagccaattgctttggacatatggtcctggagccctcattgatttgcccaacttgtcagttgtaacacttggaatcgacaggtgggaaaagaaccgttgtcagccaattcaggaaacccggttactagctgccgttagaaaggtattaggtgaccaggttgaaagcttgcgaatgccaccatttaaaaaaggcgaagtcacagatatgttgtctgccgaggcaaatatcggggtacctgttcgtcctttccctagatggttacgatgcgttaaatgtgggttactttcaccttacgatgccgggcttttcgaaataaaaccaaatcaatatagacctgaacgaactcgttttgtccataaagattgccggggttctaagggcgatcaaccagccagggatgctgatgcagtaccagcccgttttcttctggcttgtcgcgatggccaccttgatgattttccgtggcattattttgttcatggaggaaacagttcgtgcaaagggacactgcgattctttgaaagtggtgcttcattgcagacagaaaatctgtgggtaaaatgcgattcttgtgaatcatcaaggagtatggcgcatgcatttggtaaggccggtaaagaaaatcttcctgcatgtagaggacgtcatcctcatctggattactttgatgctgaatgtaacgaagaaccacgtgcagtactgcttggggccacgaatagctggtttcctataacgctttcagcactagtgatcccattatcaaacgttaccccattacatcagatagtcattgattattggaatgatttttcggatgtagaagatcctgctgaacttagagggacactaaaaatcctcaacaaacgtggtgaagctcaaggtattgaaaagtatgctgtagaggaaatatggtctgcaattgaagctcatcgctcacattatggtgaggagtttgtcggcgaggctgatattaaaggtcctgaatgggatgtattgatagaacctaatccccccgcagattaccctcattttatgagtaaaaaagctagtactccgacgcgttttacgccatatattgagcgagttttactcttagaacggttacgtgaggttaatgctttacttggttttacccgggtcgaagctcctgaagaatctgaggatcccaatgaacgaccacaaatggccagcctgtcacggagcaaacctgattgggtacctgctaatcaggtccatggtgaagggatatttctgcagttcaatgaacaagcgcttgtggcatgggaatctctggacgctgtaaaacaatcggacaaaatgcttcgcggtgggcatacaggttggagaaatgctcgtcacttggatccagaagaaggttatcccggtattcgctatgctatgttgcatacactttcccatttactgattcgagaattggctctggaatgtggatataatgccgcgagtattcgtgagcgtatctatgcaaatacaaccaatggcactcctcaggcgggtatccttatttataccgctgccgctgattcagatggtactttagggggactggttgatcttggcaaaccagaaaatcttggacgtttacttgaacaagcattaaatcgctcaaggatctgctcatcagacccattatgttcagagcatgatccagagaaggatcgttcgctgcatggagctgcttgccatgcctgtagcttagttgcagaaacctcttgcgagaaagggaatcgctatttagatagagccctgcttgtaccaacactggagcatactgaagcagctttcttcaaggatttattaaatggatga

SEQ ID NO: 402358 - DNA, 762 bp, Salmonella enterica
atggatgatcttctggacgctattacagcgctgagctctctaatatcatctgaaaaaataagagctatcgctgaaaatattagccatattgatgataataaatctatggccacattatacaatgtggtcaatactccaatagctgtaacaatagtcaaacaactcactatggcctggcaaaaaacgtctgtcagttctagtgagttggctgcaatgctccttactgccagccatgtctattcaaaagccacttcagagcaatctaccgagttagtgtggactggccccacaacaccatttgtttcagcacgtcgtactgaacaggctttgcttcaagttattagtaccgctgagcgcactctgtttataaccagcttcgtcgcttatgatgtttcaacgatagtgaaagcattaaatgctgcaaatgaacgcggagttatgatctcaattttacttgaattatcgcaagagaaaggtggtagtttaaattttgataccattgagaagatgagaatacaggtcccttcagccaaactttatgtatggaataataaagataatgaatattatggcggatgtgttcatgcaaaagttgctgttgctgatgctcgggagtgctttatcactagtgcaaaccttactgggtatgctatggaaaaaaatattgaagccggggtgcttatttctggcggaagtattccaaggcaacttaatgagcatcttttctatcttattaaaacaaaaattattagcttgatttga

SEQ ID NO: 402359 - DNA, 1329 bp, Salmonella enterica
atgagtgattttaaattccatactcccaactcatggatattatcttcactgccagatattgctggaatcaatatgggacaatcaccctcaagttctgatgtgaatgaacaaggtgagggtattgtctttttccaggggaaggctgagtttggaaaattgtatccaacccccagaaaatattgcacaaaaccaacaaaaattgcatcagttggagatattttgctatcgataagggcgccggttgggccaacgaacattgccactgaaacaacggcgattggtcgaggactggccgccatcagtgctcactgtggtttaacagatcctaaatatcttctttattattttagatgtatagagccatggttaagtacacaaggcacgggctctactttcaaagctatttcaggccagttcattaaggaattaaaagccccattaccgtcttttgccgaacaaaaaatcatcgccgaaaaactcgatacgctgctggcgcaggtagacagcaccaaagcacgtcttgagcaaatcccacaaatcctgaaacgttttcgtcaggcggtgctggctatggcgctaaatgagagttcagaacaatcacgaaaccctgctaaaatagttaaactcatagacgtcactaaaaaaattactgatggagaacaccttacacctaaaacaattaatagcggcattccactattatcagctaaagatgtgcaagaagatgaattgttatttgataatgtcaagtatttatcagataccattgcagctaaagcactgaaccgatgcaaaccagaaaaaaatgatattttaattgtaagtaggggagcaactgttggcagaacacatttagtttcaacgagtaaaacattttgtctgatgggtagtgttttacttattaaattggatacagaacaagtagtaccggaatacatgaaattaatatttaatgatatttctgggcaacaacagctggtctctgcctctggagcaacagcccagcaagcgatttacattcgtgatgtcaaagaattcagtttcgaacttatatcgcttcatgaacaacacgaaattgtccgccgtgtcgaacaactcttcgcctacgccgacaccattgaaaagcaggtcaacaactccctgacccgcgtcaacaacctcacccagtcggtcctggcgaaggccttccgcggcgagctgaccgcccagtggcgtgcggaaaacccggatctgatcagcggtgaaaacagcgctgccgcgctgctggaaaaaatcaaggccgaacgcgccaccagcgacggtaaaaaaacctcgcgtaaaaagtcctga

SEQ ID NO: 402360 - DNA, 1284 bp, Salmonella enterica
gtgggcacccacacgttacgtcaggcgcaaaatgccgctgattttctcaaacgcgcggaaaaggttattccctacccaatagagattatttccggtaacgaagaagcgcgcctgatctttatgggcgtagaacatacgcaaccggaaaaaggccgcaagctggtgatcgatatcggcggcgggtcaacagagctcgtcatcggcgaaaacttcgaacccaggctggttgaaagccgtcgtatgggctgcgtgagcttcgcgcagctctactttcccggcggtgttatcaataaagaaaatttccagcgcgccaggatggcggcagcgcaaaaactggaaaccttaacctggcagtatcgtattcaaggatggaacgtggcgatgggcgcttccggtaccattaaagccgctcatgaagttctcctggcgctgggtgagaaagatggcttcattacgccagagcgcctcgacaaactgaagtcagaagtgttgaagcacagctcctttaatgcgctcagcctgccgggtctgtctgaagaacgaaaagcggtctttgtgccgggtctggcgattctgtgcggcgtttttgatgcgttggctatccgcgagcttcgcctttccgacggcgcattgcgcgaaggcgtcctgtatgaaatggaaggtcgcttccgccatcaggatgttcgcagccgtaccgcaaaaagtctggccaatcaatacaacattgacagagaacaagccagacgcgtgctggaaaccactatgcagatgtatgagcagtggcaggcccagcagccaaaactggcgcatccgcagctcgaagcgttgctccgctgggcggcaatgctacatgaagttggactgaatattaatcacagcggtttacatcgccattcggcttatattctgcaacacagcgatttgcctggctttaatcaggaacagcaaatgatgatggcgactctggtacgttatcatcgtaaagccgtaaaactggatgatatgccccgctttacgctgtttaagaaaaaacagtatctgccgctaattcagctattacggctgggcgtattattgaacaaccagcggcaggcgacaaccacgccgccgacgctgcggctaacgaccgataacagccactggacgttacgttttccgcatgactggttcagccagaatgcgctggtactgcttgatctggaaaaagaacagcagtactgggaagcggtaactggctggcgtctcaatattgaggaagaaagctcgccggagatcgccgcgtaa

SEQ ID NO: 402361 - DNA, 123 bp, Salmonella enterica
atgaaggtaatgcttgttggcggaccgtataatggcatgatgatagatgttaaagattcaaaaggaattcaagagagagagcgtaaacatgggattcccatcacctgcggcagattatgttga

SEQ ID NO: 402362 - DNA, 417 bp, Salmonella enterica
atgaccctcggcgacattacagatatagggaaagggataatttctcgggaaacattagccgaattttatttgtacgtcggaataaaaacggcgggcctgcgggacgttggcaccggcgcaaatcagatccctgatatgtcagcgttccctgcatctgacacgctctatgcactgccgtctggaattgttcatcaggtttttgagataacaacaactgggtctggggataaatcagtcaatttccccacggcgtttgcgaataaatgcctcgggattttcactcagcaacaatacccctcgggtatcaacgctgagacgttggctgtcacattcaaaagccgcgctggatttaactatcacatcgacggcgataactccggtacgatgacgtattcagtactggcggtggggagataa

SEQ ID NO: 402363 - DNA, 444 bp, Salmonella enterica
atggctatattttttagcgcgtcagactgtgcattttacaacgacgaaattcgtgctgtttattacgagcgataccaggcgtggcctgatgatgctgtacttctctcagatgaagaaagtgagctttactggaaacaaaacccgccaacagggaaacaacttggcgcgaaaaatggtcgccctgtatggattaatattcctgcacctactcaggacgagcttattgctgacgctatacgtgagaaacaacgacgtatcgatgccgcgaacgatttaatgaacagtaagcagtggcccggtaaagcagcaattggtcggctgaaaggtgacgaactggtgcagtacaatctgtggctggattatctggatgcactggaagcggtagacacctccagtgcgccggatatcgaatggtctacgcctccgggggaacaggccagttaa

SEQ ID NO: 402364 - DNA, 801 bp, Salmonella enterica
atgataataaaggatgaagtatttgactcaatgctaagctcaggagttctggatgatttcctagatttaattgaccctcaaaaatttgatgagttcagccgcagtgtttttataactttaagaaatgcagtcaaatctatagagagtaatgcggataagtattatgaccagtcggaggagcaaatcagtacgactatttcactccttattgagaaagctggttttcaaaccaaaagtgaaccatctaatagaggacatgttgatatttttgtagaaaaagatagattcaaatggctgattgaagccaaaattggatacaataaccagaaaatattcgaaggacttctacaattgacctctcgttatttaactgatcagcggtccgcgtgtcttttattatacttcaaaaaagaaaacataaaaaataacttcgaaagctggaaagattatattcagaacaagaaatggaaagattatgcaaagatgcatgacatacttaatgactgtgaattaatgtatggtgaatcaattataaaaccggatccattttgtgttggatatagtttcttagctggtgctaaaacaacagcaggtgagtctctagatatttacaacctaggtgccaatctgcatttccgcccagtagatagtagtgggcgaaatggtgtcacattaagaaaaaaccaagcaaaactatatctagaacacctatatcatgataaagaaaatggtttgccaatagatgaaaaagaattatacaagaatctgaatgattattttgattttgataaaaaacaataa

SEQ ID NO: 402365 - DNA, 420 bp, Salmonella enterica
atggggcacttagagcaggcgaagttgaaaataagtgatgatcctgttctgcagttagaactcaaggaggagatgcttcgcctaatctattttatagaaaacaacccttccataaaatatttccctctatctaaaatcaaaagtataacaaaaactgacaataacaaatgtttaaatattgccgtatatttttgcggggagactttaaaaatattagaaccgcgatattcgtatattctagaggataatgaagaattagagctaactaaagtcgaatttaaacattatttataccatcgcaatgaatgtttaaaaaaagatgggcattttgtatgccctgttctcaaagaaagactttcattctattttacaacaagtataagtattataggtgacgatggagattgggaaatagattaa

SEQ ID NO: 402366 - DNA, 444 bp, Salmonella enterica
atggctcgcttacaagatactttcgttgaaatattatctaagaatggcattagccttaaagattcaaactcaataaatctaaataaatctataagcactatctataataatagttcaataggccgagttgttgattgtgttttttatagcaaagataatggcatttctattcctcgtacatgtcgtaaagaagttgatgtatgtttacgtgaacaagaatatcatttagcaggctctgaaaaagaagatgttgagtgtgttgcagttactgtccgttgggaagaaattgatccaaaggtcaaacttaaaatcaaaacacagattagcctggagtcaatggctaactttaattatactgtatgcaagcggtttataatcgataatccgaaggggctgtcacattccatttcgttagcttctatagtggagaaaggtactgagtga

SEQ ID NO: 402367 - DNA, 624 bp, Salmonella enterica
atgtctcaggttgagtcgtgtgtatccagttcatctttaccaattgagcaattactggaagttattggaaccatttcagatacaaactattcgcgttactatcttaaacggtttgactttgatacaggcataggctggaaagagactcgttcaaatatccttgaacaattttcaggaaaacgcaaggcctcagaacgtgctacatatagtaacttagtcagtattactaaagcattaatgttcttaggtaaacattactgtgaaatttttccacttacagcaaatgaacattcagtcttagtggctaacgctaataaaattaaatacgatggtaaaccttactccgaatgcttcccactttttgtgagtccagaagatttaactgtatcctcactccctgttttgacacacatcgaatataagaagagtggtataattttcttcttttccacccctcgtagagtcagtgagcgcgttgaaaagcttgaaacggttcagggtgtcttaagaaaagtttcttacagagaagatataaaaaaaaatttattgatactgtattcattcctaaagagcataacagaattgaatttaaaatatcgacagaaattggtaagcgcgatatag

SEQ ID NO: 402368 - DNA, 453 bp, Salmonella enterica
atgaaaaatggagtgagaacagggttattagcgctggcgatactgagcaccccggtactggcgcaaaaaagcggcgtatccttcagccataaggactgggaagtggtgtgtgataacacgctgacctgccgggcagctggatacagccctgaagaaggaaaagggggatcggtactgctgactcgcctcgccggggcgggtactccggttacgggaaaagtgatgttggcaggagttgaggctgatgacgatactccggttgcaagactgacgctctggatcaatgaccagccagtcggcgaactgaagcgcggtaaggagggcgactggttgctgtcgaacaaacagaccagggacattcttgcggcagtcaaaggcagtggaaaagttgagtttaaaggcgggcctgatccgtttgttctctccggtgaaggggcttatgcggtgttgtga

SEQ ID NO: 402369 - DNA, 279 bp, Salmonella enterica
atgcagatagtttctgtcgatatcggctcaacatggacgaaggccgccctcttcgcccaggaaggggacgcattaacgctggttaatcacgcgctgacgccgacgacgacgcatcatctggcagacggattttttgccagtctgaaccaggtgttaaatgtcgccgacgcgcgccccctgctgaaaaacggcgacatacagcttaaatactcctcttccgcaaaaggcgggctggccgtcgccgcgatggggctggtgccatcaatcaccctggaatag

SEQ ID NO: 402370 - DNA, 174 bp, Salmonella enterica
atgagcgtgggtgatagcgattttaaaagaaaagcagaaatgagattaaatagctttatttctaaagcgggcattatggtaatggccactcacgatgatgaactggctaaatctgtatgtaataaattcatcaggcttgagcacggtgagatagttagcaaaggtggattttaa

SEQ ID NO: 402371 - DNA, 549 bp, Salmonella enterica
atgaaaatctcttgcaaaaatgttggcgtaatactccccatatttaactccagccaccgttcatttaaaaaaacttttctacaggctgcttcaggtggacgaattggctcatcgaataccgggattattgaagtagaggcattaaaaaaaattgattttacgcttactgaaggtaatcgtcttgcgcttatcggacacaatggttcgggcaaaacaactcttctgagagtacttgcaggggcctataaaccaacttcagggaagtatgaatgtatcggccgggtcaccagcctcattgatcccatgatgggaatggatggtgagcttaccggcctggaaaatataaagctgaggggactatttctcggtctgtcaaaaaatgaaataaaaaatattacagaagatgttatcgagttcagcgagttaggtgattttattaaaatccccgttagaacatattctagtggtatgattctgaggcttggtttttctatttccactgcaattaatcctgaaattttactgatggatgaatggatgaatggatga

SEQ ID NO: 402372 - DNA, 153 bp, Salmonella enterica
atgccccacgtcaaagaggaatgtgtacggcaccttatggtgctctttgttccgtctcttctacgcaggaagtcagtggaagtcaacaaaaaagaaggggctgcttgcggagcccccaggtatgagatggtgtctgagtcattgtttatgtag

SEQ ID NO: 402373 - DNA, 585 bp, Salmonella enterica
atgagtgatcatgtaaaagaagtacttcaaaatgctatcgaggcaaatgaaagggttgatatcatttatcttggtgggagtaagccaggatcatcacgaagcatcgcaccaataagcatcagtaacgatcgtgttcgggctaagtgctacagttcaaatatggttaaatattttgacatcaaaaaaataaaactcccctcatcttctcctctggtgcgttatgaagactacacggagaaaaaatacaaaaccactcaagatgtatttgatgacttttgcgttctataccccgacacccgtttgatctgtaactataccgaggccaatatttccatttttgggtatgtcaagaatggaaagagaaaaagtaaaagaagcatctcaatagaatattatgagaaagatcctgatacgttatctttcagaatcaacgcaaatttcgaaatggaatcctataagccaaaaactcgtccgtggcgcgtttctggcccgttaggaaatacaatagcatactcagacttacataaagcggctatggagttcttcaagaggctctctattttcacaccggagtgcgtcgattaa

SEQ ID NO: 402374 - DNA, 447 bp, Salmonella enterica
gtgggtaacgtatccaatttagccgaagccagagaggccagaaggctccagaaaccgcgcacgaatgacggtaaggggtttgccttgctgcaccgtaaaattatggatttgccgttctacaaggacgctgaggcatctcacttatgggttcacttgctcctgcgcgctaatcacgaacagacactggtatcgactgatgtcggcgatgtgatttgcgaacgcggcgagttcgtcaccggacgaaacactctggcaatggaaactggtttaaccgctgatcgcgttaaatcactgctccgtaaattccagaatctgggcatgatcaccaccaaatctaacaaccgttttactgtactaaaagtggtcaaatatgacgaatatcagtcatttttttgtccagccggtgtccagcccaaacacagtaatatcaatgcctgtagaggatga

SEQ ID NO: 402375 - DNA, 312 bp, Salmonella enterica
atgaatacagaacaaagtctgtatgagatgaattatacctggctaagcctggcgcaaaaaatgctgctcaaagacaagagtgtcgccatgttcagattagggctgaataagccgattgccgacctcattagccgaatgacagaaagccagttgcaccagttgtccctgcatccacattttatcttcaccctgcgcattaaggagcctgccgcactggagggactgttgcaggattcgcgggtggaccacctcaggcctatgcatgcggccatcctgtgcctgtctgatgccggaggtgctcatggcctctga

SEQ ID NO: 402376 - DNA, 516 bp, Salmonella enterica
atggcctctgaaagtctgctgcaggaactggaggacatccagctggccgttgaactgatttcactcggcgcacgaatgcagttactggaacataccgtcagtctcagcagggggaaaatgacccgactgtacaaagaagtgcggggaacgccaccgccaaaaggtatgctccccttttcagccgactggtttatgatttgggagaataacgttcactcttccctgttctgtaacatattcgactgcataaaagcgcagatgcctggtgagtcaccggtgaaaatacttatccaggcttatcgtgcatatttaaaatacgccggtaacacagagacgttgtccctcacccgggcgtggatcctgaggcgattcgttgattcggggatattgagttacaccccttgctgtcaatgtggcgggaaatttattacccatgtgggtgaacctgcacacggttaccagtgcgttatgtgtcacccaccatcacgggcaataaaaaaagccgctgtgggataa

SEQ ID NO: 402377 - DNA, 648 bp, Salmonella enterica
atgagaacttcagacctgtttaaattattgaagaaagcagataccagcttgccagtcactgttgacgccccctctttgacaaaagaaggcgagtcaacgccattatatattgaaaagtggttaagttacgacattattattctgctggaggttatgcagtcagatattacttttgacagatacaaaaaaactgttgaatgtttaaacgtggcagagttatctgttgatactgaaaaagttatagttaatctgacaaaactaataaagcaaaaatctgggttttcaggaaaaaacacgttaagtcgtctacgacactggttccaaatgacggttcaaaaggcaaggagagtgactttttccattccattactcgctaataaaaagacaaatacatatgtcatccactaccgtgaaaatacaggcattgatattcgtaaagaccaaccttccctggcaagcagcataattgaatcagaaaagctaaaaacgctgagtaattacatggtatgccttgaagaaaacaaaaaaagaattaaacgttgggacagggagatatttagcaatgaagctaaatggcgttcatgccccccagacaaattcgaaatcctcggcaaactgactttagtatataaagtcgccagagattaa

SEQ ID NO: 402378 - DNA, 201 bp, Salmonella enterica
atgagcgagcaacccgacgatctgctcaccccggacgaggtatgccagaagctgggcataacccaaaagacattatgcgactggaatataaaacaccggcatcgcgctgtgctggcccccatccgtttcagcacgaaagtggttcgctatgagcgccgtaatgtcgacgccttcatccagaaatgccgcagccagtattaa

SEQ ID NO: 402379 - DNA, 1065 bp, Salmonella enterica
gtgcggggagcctattacaacgaaatagacccattcgctgcacagtggctgcgcaacctgatcgccggcggtcatattgcaccgggcgaagtcgatgaaaggagtattgaagatgtcacacctgacgacctgcgagaattcacgcagtgccacttctttgccgggatcggtgtctggtcacattccctgcgcctcgccggttggcctgacgataaaccagtctggaccggttcctgcccgtgccagcctttcagcgcggcaggcaaaggcgatgggtttgctgacgagcggcacctttggccccacttcttccacctcatcagcgagcgcagacctcagcatgtctttggcgaacaggttgcagctggtaacgcaaacgcatggttcgaccttgtacaaactgacctggaagccgtggactacgccttcgggcttgtcccgttcccgtctgcgggcatcggtgcgccgcacatcagagagcgggcctactggctggcccacgccagtagcaaacacgaatcctcagccggaaacgaaacgggggttgcaacacgtctccggagcagctcgactgacgggctggcagacaccagtggcgaacgactcaaccgggtcgactcattgctacagcgggaagaatcaggacgggtcaccaaaagtgtgcttgaagttgccgggcacagcgttactggcgggatgggttacgccgacaactcgcgactggaaggacacgtccgggatgacagcgcagcgggatgggaaagaacggctggatcagttacctcggcaggcttatacagcaggccccttgaggttaacggtttttggcgagatgcggactggttgttttgtcgagatggacaatggcgtccagttgaacccggcacattcccgctggttgcaaggtttgccaaaagcctgggacacggcaagtcctcattacgagcaatggctggacgcaaccgcacagggagacttaagggttacggcaacgccataaacgcccaggccgcgaccgctttcatcagtgcttacatgggataccagggctatgacctcatctaa

SEQ ID NO: 402380 - DNA, 189 bp, Salmonella enterica
atgtggatactcatcttctggatgtcgtcgccgttctcaatcaccttgagcgacgcagcgcagccaactctgcaagtacaaacgcaggaatttaccaaagagcagtcctgcaaagatgctttcgctgctatcaaaaagctgaatgatggcgacctgaaactgcgcggtgtatgtgtgcctaaggactaa

SEQ ID NO: 402381 - DNA, 372 bp, Salmonella enterica
atggttatttgcgactactgcaggaataaagctgcactggttaccgggcgcaagatttatccccatcgacccgatcttttccctctgcggttctggcactgcgaaccatgcaaagcatgggtgggctgccataaaaacagtgacgcccaaccactcggcaggcttgcgaatgccgaattgcgattagcaaaaagtgcagcccatagagattttgatccactttggaaatcgggcgaaatgacgcgaaaacaagcttatcagtggcttagcaaccaattaggaatccccgctgatagttgccatatcgggatgtttgatgttgcaacatgccagcgcgtccagaccgtttgcgcttcaatgaatttattctga

SEQ ID NO: 402382 - DNA, 1305 bp, Salmonella enterica
atgccagacgttcatgcacgactttccccatcatcagcgcatcggtggatgcgctgccccggcagtctggcactggaagccacacagccggataaaagtagcgcctttgcagaagaaggcaccgcagcacacaccctggccgaaaaggtactgcgaaaccgccagagccacccggaacactatgcgggctgcaatgtcgctatgttcctcggctcttacccgctcgctgaacaccctgatgatactaccggcccacaggtagatgaggaaatggtcgaagccgttggccgttacgtcgacaccatctgggcgctgtcgcagggctatgagctgctggtcgaacagcgtgtcgacttctcccatatcgtgggcgtagaagagtcctttggtaccgccgacggtgtaatcatcgcgggcaacgagctgcagatccacgacctgaaatacggtaaaggtgtgcgcgtcgatgccgaacagaacgagcagctgcagctatatgccctgggcgcgctcgagcagttcagcatgttgtacgacttcgagacggtgcgcctgttcatccaccagccgcggcttaaccacgtttcagagtgggccctgacggtggaagagctccaggcattcggcgaacgggcgcaggaagccgcggccaatgtgattgtgatgttcaacattgccgaatgcgacggcgttaattcgttgccgctggaaaacttcaccccaggcgaaaaacagtgccggttctgcaaggcaaaaggtggtctgtgttcagcagaagcgcaggccagacttaacgccgttgcggacgacttcgttgacctgacccagcaagtaggcgagcaactcgctgatgcggcagaacgggttccgctactgactaacgaacaactggccgatatttacagccaggtggggctgattgagtctttttgcaaggcagtgtgcgaccgagtaagcgctgagcttaacgccgggcatccggtaccgggctttaagttggttactggtaaacagggtaatcgcgcctggagcgatgaagaagccgcccgcacgctgctgaaagaccagttccgctataaaactgaggaggttttcgaccttaagctgattagcccgaccaaagccgagaagcttatcaaaaaggccagccctcgccgctggacgaaagtcgaagcactgatcgcccgcgctgacggtaagcccactgtcgcccccgaatccgacccgcgccctgcgctcaatatcaaccctgttaacgattttgacgacgtgtccgacgacgcgctcgccgcagacctcatttga

SEQ ID NO: 402383 - DNA, 930 bp, Salmonella enterica
atgagcttagaaacaaatcttgaactgaataatcagttagtaacccgtaacaacgaactgctggaacgtcttatcacagctctggcctccggtgtggctcttcgctcggacaccgtagcacaggtacaggaatatcacgaaacagcgaccaaaacagtggccgaaacagtggccgaaacaggcagtgctgttccgacgctggacgacctgacatttagcgacgttatagctctagccgctttctacccggtagcaaaacccattaccgaagaaatgctgcaacgcgccatcgcatatcgcgacataaccggcgaacagcgtgttgtgcagatcgatgcactggacagcgcacttcagggcgttaaacgcgccagccatctgaacaatccagcattactggatctggcacgtaacgtcctgcgcttctgggatgatttaccgaccatcgccgaccgccgtaactttgccgaccaacttcttgatgcacccgcagacggtcgccatgaagtgaagccgaagaagggcagcaacaaagacagtaaaaccgaagaacgtacaggtccgttctattgcaaaagcgtcgacggttcagcagccagcgaactgcacactttacgcaaactgaacgcgatgctggagaaaggccacattgagatcaaccgggttgaatatctccagttgcaggaagaattcgcacgtaaagatgccacaagtagcaatcagcaagtgaccactgatactgacgaccagcctgattttgcggcgctgcgtaaacaggccgaagggctgatcctgcaactggcaaaaggcggataccgcgcagaggctgtcgccattctggaaaaacagggggctaaaaagttgggtgaagtcgccgacgagaatatcgcagacgtgatcgcccaggcggaaaaggcgctggagggttaa

SEQ ID NO: 402384 - DNA, 978 bp, Salmonella enterica
atgttcaaaaagaaaagtatatttgtttttttagggcttctttgctctatacttcttgcgttacctttagctatgcaaggcggttttgatgattccttagtttactattcacaagctgattatatatggagttacggtttatatgatggactaagagctatttatatacaaacaaataaatttgagcccgctatggggctactattttttatagaagggtttattgttaccgaaaaattctattttttattacttaatttaacactagtaaattttattacagttttgatatatataaaaattaatgaacaatcaaatacaagtataagttttatatatgcaatactattgctctctacatattatattttttctaataatatttacgtgtggaggacaatcatttctttatacttttttattttgtttgttttttctaaatcaaagagttgcaaggttatttttttctcattggggtttttgtttcattactcatttttactattttatttttgttatataatatgtaaatttaataagtcaagtttgaaattttttttgatatatgcatttttattttctttatttatttctaatgtattaaattttttaagttatttttctttttttgtttcagggggggaactaacgatcttcttggataaaagtagtgatagtattaagaggattattattggagtatcattccttattatattgatcatggttaaggttgataagaaaagttatagttggagtctttataaattatccttgtttttctgtatattatcgattgcgctttatcaaaactggcagttatcctggagggtatttgttcccgcagctactttagggagtgctatagttttagcgaatataagaaaggataatataatcccttttttgggggtggttttatcaactatccccacaatgagaataatttacaatttattatatctaggacatccataa

SEQ ID NO: 402385 - DNA, 255 bp, Salmonella enterica
atgagtggcaaaaaaacacctttagcggaatatctcgacgatcgccagattggacacttacagacaatgagccttggggaatacaaattccatctaaaatgcgatgcttttttatttatagatagtcatggcttccttgttgatgattttaccgggcgtacatttgcggccagcaaggaacagttagatctcctgattggtcatcttcaggggttacgtgatgaaatggatgatcatcacgaaaaatatttataa

SEQ ID NO: 402386 - DNA, 336 bp, Salmonella enterica
atgtcagaacataaaaggccagtactgagcattagcggtaagcgcaagccgtctttgatgtaccagaaacaaaagccagacagcgaacagagcgccgcgcagatggagcagcaggcgcagaccgtgaccgccagcagcacaaaggcgaaaccaaaatacaaggggcttcctgaatggcgggaggtgttacgggatcgcgcagatttgctatacagccggataccactaacagggaaaccgaaaaagaatgcgccgtattacggtaagagcggcagggcggataaggtcatgccagcgccagataaaccacaatcagacaacaacagcgggaaatga

SEQ ID NO: 402387 - DNA, 1794 bp, Salmonella enterica
gtgaagaacgcaccgaactacaggcatcttcccgccgacaaagcgacagaggcaattatttttgctggcgctgatgcgcattctcacgtcaaaggctgggaagaaagtatgggtaagcagattgccggggataccacgccgcctgtttatctgggcaaaaagcagctcgcagacctggctaatatccgcatcgtcgataaagggagagaacgggcgcgggtttatattgccgccaaccaaaaaagcgtagagcgcgtcagtgaaagcacgatcagcgccattgttgaaaaactggcagtcgctggcgtacgtgaagtgaaaatatttaagggaataaccgacagggagccggaaacgcttcaccgcgaccgcatggacgccataagggaaagagcggagagcggtgacagtgtttttaccaacggcactgttacaccaatggcggaggacgatccagaaatcaacctggtgcagatggccgacaacgaaaaagccgctttactggctgaacggtacgaagggatagcggttcatcctgaaacagaaggcgtgtatgtgtaccgttctggcgtatgggagagcatttcatcactggagttaggccgcgaaatggtagcgatttacaacgagcgcaagaccaatttcagcaagcgcggggtaagtaacgtaatagacacgttaaaactgattaccccggttatgagggaagcgccggacaatgtgatcccgttcatcaacggcgttttcgatatgagtacgggggaattttccgaacatgagccggataactggataaccaaccataacgggatcgagtacagcgaagcgctaccgggtgaaaatcttcacgaccacgcgccaaacttccacaagtggctaagtcatgccgctgataatgatgcgctgaaaatgcagcgtatagcggcagcgctttttatgattctggccaaccgtcatgactggcaattattcctggagattaccggagagggcgggagcggaaagagtgtgtttacgcatattgctacattgcttgcaggtcagcacaacaccgcaagcggcaatatggccgcgctggacagtgccagaggccgggcgcagttcgtcaacaaacgaatgataacgcttcccgatcaaccgaagtacacaggcgagggaacgggtatcaaagccattacgggcggtgatgcggtggagatagacccgaagaatgagcaccagtatacggcggtactgcgtgcggtagtgatagcaacaaacaatacaccgatgatctttaccgaacgcgccggaggtgtggcgcgacgccgggttattttccagtttaacaacaaggttagcgagaaagacaaagacccggcactaccgcagaagatagccgcagaaatcccggtaattgtgcggcggctgcttgcgtcgttcgccaacccggaggacgcgaaaaatctgctactggaacagagaaacagtgatgaagcgctggaggtgaagcgggccgctaacccggtgattgctcttgccgctgcactggattttttaccctccgcaaatgggatgatgatgggagggggaaagaaagctgatggcaatcttaatccccgtaactatctctaccatttgtatcttgcctacatcgagtatatgggactgtcaaaaccgttgagcgtgacggagtttggtaaagcagtaaaggaagccgccagagagatcggggatgagtacctgaccagattgataaagggatgcacgcagacgaacgccaaacctaacgagagagcggaagagtttttataa

SEQ ID NO: 402388 - DNA, 228 bp, Salmonella enterica
atgcgtaaaaaagccccccttatgccagtgcagaaacttagcgcggatctgcataaacgaattaatcggagccagacagtatcaaattttatgcatctggagttttacgaacgggatgctggtaataattatccgcttttatggcttccgttcattttcagttatgtagctgatgatattaccgccattaaggaagaactcattaagagagatttacttaagcgctaa

SEQ ID NO: 402389 - DNA, 378 bp, Salmonella enterica
atgcctaacttcaaaccattagacgacttttcacaggctcatgctgatgatgttttttatttcgatgcaaacgccagcaatgaagtgctgatggataacgcaacgaatagaatttataacctgatgaaactgcattcagatatcggaaacttgccagcagataacccaatcagcgccagtcatcttggcacggtaagtgcgtatctgctttctgatgcgtactcgttgcttgctgagttgtcagatcgacagatgaaaaaccagggtaacagcgataaaacgttaattgaccagcaggcaaaagccattatagcccttactgaaatcatcggaaaaaacgccagggcaaaagacgaacaggagagggagcatgagtaa

SEQ ID NO: 402390 - DNA, 162 bp, Salmonella enterica
atgcgtaataatcgcccctgtttcgtctggcgcttctggtcatgccagaacactacatacacagtaaccgccaccagcgaacgggaggcgcgcttacagcttcccgccgttcgcctggtattcgttgcccgcattcgccaggagggaccgcgccatgcctaa

SEQ ID NO: 402391 - DNA, 276 bp, Salmonella enterica
atgcgtaaatttgccctgcaaatcagcctgtactatggcgacacgttaacccgcacgctttacgattcgcaggtgttcatctgccagaacaccgcacagcaatacgcagagcggcagaccagcgaacgccagccggggaagtttacccggcatgtcgaagtcacggagttaacgtcgcaaattgtcaacgaaatacgccatgaatacggctggaatagtccggtaacgtcttaccatgttttgcctgataaccgtaagggggttagcaatgcgtaa

SEQ ID NO: 402392 - DNA, 228 bp, Salmonella enterica
atgaaagagcatatcacacaatctcaaatcgtctttttgccatatgtattcgccgttgatccgtctggtggcgagttttaccagatgatttccggcatcgagcaaaggcttcttgaccgcgtaaaagccgcgcttaatgaagctggtgtagcctggattgacccgcgcatcaaagagcgcagcaaacccgccacaaccgatagcgtggagggttcagacaatgcgtaa

SEQ ID NO: 402393 - DNA, 552 bp, Salmonella enterica
atgcaggacattcctcaaagtacccttaatgaaacaaccaaaacagaacaacccgccaggattgtgctgtgggaattcgatttaaccctgatcggcggcgagcgttattttttctgcaatgaagctaacgagaaaggtgagccggtaacgtggcagggcaggcaataccagccttatcctgtaaaaggctccggatttgaaatgaagggcaagggggccagcaaccgtccctcaatcgaagtttcaaacctgtttggcctggtaacgggcatagcggaagacttaaacagcctggtggggtctcgcgtttatcgtcgccaggtgtattcaaaatttctcgatgcggtaaactttaccgatggcaatccgaacgccgatccggagcaggaaactttgatgttttatatagttgagcaactgagcgccctgaatggcaaaggagcaaagtttacgcttgcctctccggctgaggcggaaggcgctgttatccctgcaagaaccatgctggcaacgccagatggcttcccgtcaattggtaaactttcccggtaa

SEQ ID NO: 402394 - DNA, 936 bp, Salmonella enterica
atgggtaaattcaacagagtcagtctggcgacgattcttgctgtattttctgtacaggtgtttgctgatgataacagctggttcactccggaaaatatatcggcgggtctttcgacagggtttttaagtggtgaagccagagaaagagtttatgaacctgcagaaggtgggagaaaaatcagtcagcttgactggaaatataatcatgcccctgtaattaaagggagccttaactgggatgtgatgccccggtttaccgtagggatgtcgggctggacgacgctgagtggcagtggcggttcaatgactgacagcgactggcttgatccggagcagaaagagaagacggattacagccgccatccggacacgaagctgaattatgcgaaccagttcgatatcagcctgacgggctggatactgaatgagccggattatcgtgcaggactggctgtggggtatcagcaaagtaccttcagctggacgtcaaagggaggaagttatctctatgacaatggtactgataccggaagttttttacccggtcagtctgttattggttacagtcagacgtttaaactgccctggattggtattgccggaacttatcgtttccgtgattttgaacttaatggtcttttcaaatacagcaaccagggtaaggtgacggataatgatgagcattacctgagggataccacattcagggaccgtgctacaggacagaagttttactcactttcagcagatgcgggctattacataacggataaggctaaagtatttgtggatgtggcctggagcaggatgctgaatgtcaagggggatattactgagaatgactatggagaaaacacaaagacccgttataaggattcatccggtacagagcacagcaattatatggttacaggaggcattcagtaccgtttttga

SEQ ID NO: 402395 - DNA, 918 bp, Salmonella enterica
  misc_feature (886)..(910): n is a, c, g, or t
atgacagtggaaaacaaattcaaacgcaatgttctggcagcgtcaatccttgttgggttgagtctgtctgcagcatccggggttgcctgggctgagggtgaaagtgctttgcagatgaagggggagagtgaagctttatcagccgatactaatgcggatgcaggggatacaggaaaaaacagcgaagttcagagtgctgaaagccttgctaccattaaagacgatgccctggaaactctttcctctggtgataagttaagcgagggctctcctgggaatttgcaggaaggcacaaatccacaaaatgaaacctccaccattaaaaatgaaaacgatgaaataaaatcagatgaaaaaaaagagggtgacacctctgaacaggttccctcagaagcagacccgaaaaaggctgacttaaacgccgaacagcaagacgcccccgtagcgcaccacgaggactcagaaagtcttaatggagggaaaggtgatgaagataagagtttgatcgaaaaagtgggtgatggtttaaataatcttgtcaatgctgctgctgaccttatcactggcgggggagcttcaacgccagaggacaacaaggaaggtggtggtcaggctctttctgatggggcggaagataatagtcagccctcagcgcctgtaagtccgtcagcggaaggcggtgacagtaatgttcagtctcctggtggttctgaggctggccatgctactgaacctgataagcaaccagaacttgatggtaagccagtggtcgatgacggttctgaacctgacaagcagccagaacttgacggtaagccagtggtcgatgacggttctgaacctggcaagcagccagaacttgatggtaagccagtggtcgatgacnnnnnnnnnnnnnnnnnnnnnnnnngaacttga

SEQ ID NO: 402396 - DNA, 441 bp, Salmonella enterica
atggcatctgaaagcatcctccaggaactggaggacactcagttggccattgagctgatatcgcctggcacccggatgcagttactggaacataccgtcagactcagccgggggaaaataacccgggaacacaatgttcactcctccctgttctgcaatatattcgacagcataaaaaaacagtcctccggtgagccaacggtgaaaatacttatccgggcttatcgtgcatatttaaaatatgccggtaatacagagacgctgtccctcacccgggcgtggatactgagacggttcgttgactcaggaatactggattataccccctgctgtaaatgtggcggaaaatttataacccatgcaggagaacccgtacatggctatcagtgcgtcatgtgccaccctccatcacgggcagtaaaaaaagccgcagcggaataa

SEQ ID NO: 402397 - DNA, 219 bp, Salmonella enterica; identical to SEQ ID NO: 395834

SEQ ID NO: 402398 - DNA, 390 bp, Salmonella enterica
atgaatttacccaaatcacttgctcatgaaatccgtaagactctttccggactctctcctcaacatttatacactcaggaatatttcccgttgtatgacttacctcctgatgcctgctttgtcatccgaagaacagaacttgagaaattactcaaactgtacatttctgctcccgtctcaccccgcgtctccagcgcccttgcccgcttcttctggctggcctgctggcataatgaatccatccgttcattaatcagtcacccctataagttactgcccatttttgaacagtgggccagggacaatgggatcaccgacaacctcagcgcagaaacgctcaaagccgcactggaacggggttccccctatacgaacgcccatcgccagtaa

SEQ ID NO: 402399 - DNA, 279 bp, Salmonella enterica
atgaacgacgaaaataaagtgcctgtgccggacgaggtgcaggcatccccggcacacgctgaggatgatattgccacgcttgagcgggaagcccgcgttaaaagggaggcagagcttctcaatgcgcaggacgacgaagagaaagacccggtacaacccgccgttaacaagctgaaaaagcgcaaacggggcaaagcaaccgcctttcttgccattgtcgcggtcgcgcttatcttcctggcatggggtggtaactgggtttatcgcaatatcctgtag

SEQ ID NO: 402400 - DNA, 387 bp, Salmonella enterica
atgaacgacagaaaaaacctttttatcgtcaccacaacagaaaaaataatagccgatgatttcagtgacacagttgtcaatggcctgacgcatcatgtacccggtatcactaagctaattctgtcgtgttaccgtgccggatgtactgttgctgagattactctttacagggaggacggagattttttcatcctcacagtgtgggaaggcgggcttgatataccgccgttttcccctgacgatatcaggctaaagcacaaagaaatatcgctgccagacattacagatattcttattcttgtcaccagcttagcgcgtcatgccggattatcaccatctttacctgctgataccgcttcgtcttctttgctggaattcagttcatag

SEQ ID NO: 402401 - DNA, 1005 bp, Salmonella enterica
atgccgaaaacaaaagtcttgtttgcttactgccacgaactggagaaaatagtgtctattaatgacgcacggactgaatttttttccataaaacccgaagaaagaaaacgattcactttttcctgtagcgatcgcaactgcaacgttattatcagtggtgttaactatcacatcaaagctgaggacggggtaaagttcagggctgcgcattttcgttcacctcaccctcatatgtttgggtgtgaatggactcagttcaccgatgatgccgatcaagatcgacgtccggatgaaacagaacatgacttcactgaaagaaaagcaaggcggaaactgacggactgcatcaactgctttgatccatcgattgatgatcctgacgcggaagcatccggttccggcctgccgacttccctggggctcgtgatgcccaccgttgggatagttcatcccggtgccggtgatggttcacgatggagccactatacgcggactaatcagcttcaaagacttgtggattcatggcaggaggccaaagaaaagttaccttttaatgaattcatggcgttaaggattaaggttatcaacctcggacaggttcacctgaataaatacatcacgcatattcagaagggggtgaccaatcaatataatggtgtggtatatggcggtggaacgcttgttcatcgttacggccggggatttctgataaaattctttgacaggcatgacgataaatccattcgcctttatgtcgataaagatgttatgtcaaaaggaggatttggtcattacgtcgatgaaattctgaacacagaaaacgtcaggtatttccgcgtatttttattgaatccgatagcttcagaaaggaaaaatagcgcggggcaaagtgttatcaatctcgaaatattgaagttgcgtcagcttgctatttactatgaactgaattccagcaaagaagacgaagcggtatcagcaggtaaagatggtgataatccggcatga

SEQ ID NO: 402402 - DNA, 306 bp, Salmonella enterica
atgataaatgaaaattcattcattaagaatatacactcaaaaaatcaggacagaatatctgtaaccctggtatatgacacgttatcaaaagaagcccacagaggttgtgggctgcattacgaaatatacgaaagctgttttatcggtcttttgcgccatcatctttcagaacttaatgaagctgacgcaaataaattaagacgctatgccgaaagcaaaggcacgaaaattgatgatgagtcctggagtgaagcattggaagctgaaagggagtgtagggctgaaatataccgcgaccagatgtaa

SEQ ID NO: 402403 - DNA, 894 bp, Salmonella enterica
atggatataaagctactgcgtgcattcgttacgctcgctcaatcaggaagctatcggtctgcatcagaaaaactttgtgtaactcagcctgcactgacaaagcagatccaaacgcttgagtatctctccggcgtaagcctttttctgcgtggtcgtcatggtgcaaaattgactgtagcaggggagcaattacttccagaagtcagcgaggttcttaaatgctatgaaaattttctgaaaaaggcaggtgatattcagaaggggaaagcggggaaacttattctgggattcggcatttcatcttttcgcatggctcctgagaaactaactgtttttcgcggttttttccctgatgtaaaggttttccttaacgatatgccttcaatggtacagtgccacgagttgctcgaaggtaatcttcaggccgggtttgtacggctacctgtttctgataagctggaaagtaaggtactggcagaagaaaaactgattcttgcagtggcttctgacggttttgtcggttcagaaaatgtcctgaaactgattgagaatagccagcttcttcaactttccccaaaccgtggtgaaggattatcaacgcagacatcctgttttctcgcgtcacataacctgtctcccaaaagagtggccgcagcagatgacattcaaactctgctggcgcttgtcgctgctggcgatggggtagctcttttgccagaaagcgtcaggtatattcttccatcaagagtaaaactaatcgttctgaatggtgaatatacaacatggcaaacaggtatagcctggaatccacggataaaagaccctttaagagatatttttctgaatatcgtgataactgatgccacagtctttagcaaagggaataaagtatag

SEQ ID NO: 402404 - DNA, 1020 bp, Salmonella enterica
atgatggaaaagagcatccgcgtagcttctgttcaattttgccatcgcgccagcgataaatcgtataacctgtcggttatggaaaatcttatataccaggccaaccaggagaatgtacagattctggcattcccggaaatgtgtattaccggatactggcatgttcccaatctcagtagtaaggaggttaatgctttagctgagcgggctgaatccagtcaatccctggacataataacccgcttgacaaaaaagtatcatatggcaatcggttctggttttattgaaaaagggactgacggaaaattgtacaactcatacgcaatttgtatgcctgatggtgaacgacatattcacaggaagttacatgcattcgaacatcctgacttcgagcgaggtaatgattttacagtttttgatactccctggggagtgcgtattggcgttctcatctgctgggataacaatctcgttgagaatgctcgcattacagcactgatgggagcagatattctaattgcccctcaccagacaggggggacaaattcacgtagcccctttggtatgaaacccattcctgccatcctttgggaaaatcgacacaaggaccctgaagcgcttaaatctgcatttcagagtgacagtggacgaggctggataatgcgctggttgccttcacgagcacatgataatggatttttcattctgtttagtaatggcgtggggcctgataatggagaaatccgtacaggtaacgcgatgatccttgacccgtatggaagggttatcaatgaaactgactcatttgaagatgaagtagtattcgcagatctggatctggggttattacccatgtccaccggacggcggtggctccatgggcgacgaccagatctatacaacattttgagcgaatctcagggctatgaacgagactccagaacggcgagattttcagaggatattcctacattcaggaatgtagggggtaaagggaaagaaagaacaattggcaaataa

SEQ ID NO: 402405 - DNA, 1233 bp, Salmonella enterica
atgacattgttaactgatacaaaggcaaagcgtatcaaaccggatgacaagccgttaaatcatgggggtattactgggcttgctctccatccttcatcatcaaaaggacgggggaagtgggtattacggtatgtaagcccggttacccaaaaacgacgaaatgccggattagggtgctatccggaaatcagtatcgcttcagcggcgagtctggcacagactatgcgtgaacaactggctgtgggtgatgatccgcttgtactgaaaaaggcagaatcaaacaaaatagtcataccgacatttgaagttgcagcacgcatggttcatgccgagctttctcctggatggaaaaacaagaagcacattaaacagtggctttcgactctcgagcaatatgcattcccatcacttgggaataaaactctggatatcattacacccgctgatgtagcagaaacacttcgtccatactggctcacgttacctgagacgagctgtcgggtcaggcagcgtattcatacagtgatgggatggggctgggctcacaggcattgcgctgcaaatcctgttgatgtcgttggtcatttacttccttcacaagcgaatgccagtgtgcggacaatgcatcaacccgccatgccctggcggcaactgcctcgctatgttgcgacaaaggtttacagtgatgagcgctataacgtgacgcgggcgctgttgttaatcgttattctcactggtgtaaggtctggtgaagcacgtggtatgacctggaatgaagttgatttacgcaaacgcatctggacactccctccggaacggatgaaagcaggtgtccagcatcgtgttccgttgtctttacaggctattgcggtgcttgaaaaaatgcagggtttgcatgacgaacttgtttttccttctcccagaaagcagatcgtgttatcggatatggtgctgaccgcttttttgcgtaagacgggagcggtcagtgacactcctgggcgtgtggctacagcacatggctttcgttccagttttcgcgactggtgcagtgagtggggctattcacgagacgtggcggagagagcgctggctcataccttgaaagataaagttgaagccgcataccatcgtactgacttgtttgaacaacgtattccgatgatgcaggcatgggctgattatgtggtatctgcgctccctcaggaacacgaagtcaatgctgaatccaaatag

SEQ ID NO: 402406 - DNA, 147 bp, Salmonella enterica
atgaaacctgaacacctccaccggctgacggggcgcgacgtgctccgctggcgccgtaaacacttcgatttgattaccggtctggccatcgctactgcgttcggcctggctattaccttaattctccttgtagcgaggactgcttaa

SEQ ID NO: 402407 - DNA, 528 bp, Salmonella enterica
atgatcacagttaaacgagcagaatatctgtctgcactgacatgcgctggcgtgaaagacgtccgctactacccgaacggaattttcttcgatgctgagggctttatcgtcggcactgatggacaccgtctgttttgcggtaaagcaacaaccgaaggcgaaagcgcaattatcaacgtgaaagccaaaccgccagccaagttcgaccacatcgttgtcgatattgaaaatcgcagcgcaactttcattgatgataaagcacaggaagttctggcttctccaatcgatatcatcgatggacgctacccagactggcgccgggtatcccacttcaaacctagaaaagtggatgccattggtatacatctgccctatctggcagacgctgcgaaatgctcaaaatatttcgataaaaaggccaacgccattatcgaaacacaaggcgtatctgacgcgatacgccttcagttaagtgctgacgcttatatgctcattatgccagtccgtatgccgtccccatctgaataa

SEQ ID NO: 402408 - DNA, 678 bp, Salmonella enterica
atgggctttacgactgagaaactgaccgcaaatatcaatcatctgatgagtcaaaaagggattgcaaacgtcactgaactggcaaagcagatacgaatcccccagccaacaatgcaccgattactctctggtgatgtgaaagagccaaagtatgcgttgctgaaacagatagctgatttctttaaactcagcgtgcaagaacttgtagagacagacttacttagagccgctggtaaccaatccgtagaaccaacaaaggttggtacattgaaatttactgaggtccctatcatcggtggcgctcagctagggaacggcgggcactggaccaacatgcagtatcccgtaggctttggggatggctatataaactggccgacaagggatcctgacgcttacgcgcttcgttgcacaggcgactcaatgaaacccagaataaaagatggtgagtatgtcgttatagagcctaaccaccagtttttgccaggcgatgaagttctggtggttacgaaagacgaacgggcgatggttaagacttttctctatgaacgcgatggcgaagtcatggttatgtctatcaacgaggagcacttaccgatcagattctctttgtcggaaattgaaagtattcactacgtagccggtatcgcaaaatcctccctccgcatagactactaa

SEQ ID NO: 402409 - DNA, 201 bp, Salmonella enterica
atgagcacgttgaccccgcaagaaataatcattgcattgaacgagttagggcttacgcagacggatatcaaagaccgcaccggcattagtcaggcgtcattaagccgtatctactctggtagaaacggtgatcctcgcttatcggttgttcgtacgctggaggccctttatcaggacgtcatcgcgaaaactaaggcgtaa

SEQ ID NO: 402410 - DNA, 435 bp, Salmonella enterica
atgcgtaatattcaacaagttctagaacgttggggtggctgggcagccgagaacaacaccgctgttagctgggcgccgatcgccgccggctttaaggggctggtcgcttccagttcgtcaatgcgcttgtcgtgctgcgatgacgacgggctggtcatcgatgcctgcgtctgtcgcctgcagcaggtccgcaaaccagaggagctggatgtcatcatgctgtactacgtttacgggtttaccaagcgcgagatagggcggcggcgtcgttgttccgagggcttcgttcgtcagcagttgcaggtagcggagggtttcattgagggatgcctctgcatgctgggtgtgcgtctccagatggatcctgaggtcgaaattcgaagggatgaaaaaagtattagtgcgctacgcaaaaactgcgctacgctggtatga

SEQ ID NO: 402411 - DNA, 534 bp, Salmonella enterica
atgaatattgcgctggtggaaaaatactgtaagccactggcactgatgctgctggtggccttcgcattcatcgccggcagtgtatggagtagccgcggttgggaaaaaaagtgggcggaacgtgatagcgcggaatcatcgcaaacagcgaatgcacagactgcagcccgcatgattgaacaagggcgcgtaatcgcccgcgaagaggctgtgaaagatgcacaagcgaaagccgccaaagctgctgccactgctgctggtctgtctgccactgttagccagctgcgcaccgaagcaacaaaactcgctacccgcctggacgccgcaaagcacaccgcagatcttgccgctgccgtccgaagcaaaacaatcggagccaacgccgcaatgctcgccgacatgctcggacgccttgcagaagaagctcgatattatgctgggagagctgacgagagctacaacgccggaatgacgtgtgagcggatttacgactcggtgagagagctaaacaacaaacctatagcctcgcaatag

SEQ ID NO: 402412 - DNA, 186 bp, Salmonella enterica
atgacaaacgctgacagcgataagccccgttatgatcgcaccagttttgaagatgctgcaaagccgctaatcaagtggttgaatgaaaatgccaaccctcacgtgtcggtcatcgttgaaagcgatggcgcaacactttacaccgctgagatccattctccggtaaaagatttcatcaaagactga

SEQ ID NO: 402413 - DNA, 1272 bp, Salmonella enterica
atggcgactgaacacgttattgagtttctaccctttcatggcggccagaagaagatttaccgaactccggcaaaacgaaaggttattcgtgccggtcgtcgattcggtaagacgaccatgctggagcagtgtgcggggaactggtcggcacagcaaatgcgcgtcggctggtttgcaccttcgtacaaaatccttctgccttcctataagactatccgtgaccagctaaaaccaataactgtcagcgccagcaagactgatatgatcattgagcttatcggtggcgggcatgttgagttctggacgctggacaaccccgatgctggtcgttcccgtaaatatcacaaaattatcatcgacgagggcagtctcgttaaaaaggggatgcgtgatatatgggaacaggccatagagccgaccctactcgactacgacggcgatgccatcatggcgggggcgccaaaaggcgttgacgatgaaaatttcttctatcaggcctgtaacgataagtcgctgggctgggaagagcaccatgctcccactgctgctaacccgacgcttaagcctgaggcgctggcgaggatcaccgccggcaagcctccgctggttgtgcagcaggaataccaggccatgtttgtggactggcgcgggcagaactttttcaaactggactggctgctggagaacggcgcgcccgtcgattatccggtcggttgtgatacggtctacggcgtcgtggactgcgcgcagaagggaggccttgcccatgatggctcggcggtgatctggtttgcgttgaacaatatccctgagcctcatcttgtgattctggactgggacattatccaaatcgacggctatttcctgcagaaaatcattccgcaatggattgctcgctcaaagcacctcagtgagatttgccttgcgcgctttggctcgctggggctttacatcgaagacaagtctaccggcaccactttgcttcaacagggggcgaacgagggctggaatgttcagcctatcgacagtgccatgacggctctcgggaaagaggagcgtgctatcaacatttccgggtacgtagccagcgggaaggtacgcatttctaaatatgcctttgacaaaatcaccgagcacaaggattcgaagaaaaaccatcttctgacccaggtgctccagttcatcatcggcgagaaagaccaggcggacgacctgttcgattgtttcaactacggcgtcgccctcggtcttggcaatggtgacggcttctga

SEQ ID NO: 402414 - DNA, 1656 bp, Salmonella enterica
gtggctatttttggcagcgggataatgtttcgtcagggtgatttcgtcttcctgatccagcgctcagatgatggtacgtggtgtcagcccggtggcaaggtcgaaccgggtgaactggctattgatgctgcgcgccgcgaagtgctggaagaggtgggttgtcagtacgatggcccgctaaccccgcacagcgtttacggcgattatctgacgtttcgcgccgaagtgccggaaaagttcgaggcgaagctcaacgatgaatcgctggccgccgggtggttccacattgaagacctgccaacgccactccatcagccattcgctgagatgctggcgcagcaggcactcaatgaaacggaagtcgccgcactcatcgctgacgggacattaagcagcccgcaatactttatcaacatgtggatgttttccatccgggtgaccggaacaggggttacctggcgctctgcagatcaacagatgaccttccgtaacccggatgactatctcacccccgaatttctccagcgggttgccgggttacctctaatctggctgcaccccgagaaaaatacgctcgatagtgatgagttcgcaaaacgcgttattggcaccctgaccaacagttgggttgctgacaatggcgaggtgtgggccattgcgcgcgtatacgacgccgaggctgctgaaattatggcgaccaggcaattaagcacctctccaactgtgaagtttgttgaggtacctaaatcaatcattgtagacggtcagcctctgctggtggagccatcccccgagctgctcgaccacgttgcaatttgtgaacagggcgtatgggacaagctccttgcccctactggtgttaaatctgattccattccaaatgaggctgaaataatggacgaggaaaaaatcgttgcgctgattaataaagcgatcgatgcacgtatggctaaagctgattcagaagctgcagatctgaaagccaaagccgatgctgaagaggctgccaagaaggaaaaggctgacgcggaggccaaagaggccaaagaggcagaagaagcgaaagccaaggcagacgaggaagcaaaggccgccaaggcaaaggcagatgaaggtgagctgaaaaaactcgagcatgaagcaaagggagaagatgaccgtctggagcgtgaacgtaaagaacgtgagcgcgaaaaagcagactctcaactgcgacaggaaattgcagagcttcgttcgcgcattcctacggaactgagcgacgaagaacgcaacgaagttgccgatgcacaggtgaaggctgacagcgttttctcatgcttcggcaagcgggcacctgtgccgctgtccggtgaaaagccgctgtcctaccgccgccgactgatgatccagcttcaggagcattcgcctgacttcaagtctgtcgatctttcctctatcgctgattctgcattgctgaatgtggcggaaaaacagatctacgccgatgcgcagaaatcagcaagtctgtcggttggtcctggcatgctgcgtgaaattaagcgcgctgatgccactggtcgccagattagcacctttgaaggcgatcctgctgccacctgggcaccgttccagtcgggtaaacgtcaggtcaccagttttaacaaccaggcttaa

SEQ ID NO: 402415 - DNA, 1395 bp, Salmonella enterica
atggcaattgttaacattaacgtatcggtgaccaatccgccgaagccctcgcagctgcttaaatccggcgcgatgatctccatgggcggaacgactctgacggcaggcgaataccagttgctcgcgtcaaaagatgatctgaaagctatcactgccccggggaaaacgatatcaactattacctgggctgcaaacctggtcactgtgaccctcgcatctcctcatggctggacgaatggcagtaccgtgcctgttgtgatttctggcgtagcgccggcggcatataaccgatccgccgaggcgactgttaccagcgttactgagtttacttactcactgagcagcgacccgggggccgcaaccactatgggcgttgtaaaaacggttgttgctggtgaaattacccagatgaacactacgtactgggcacagggggcagctcgagcgatctatgtgctggaactcggtgacatcaccatgacggcagccgtggcggcgctgagtgattttattgataaagatatttccctcggcaacacgtaccagaaattcttctcatatctggtgcctcgcgaatgggattctcaagcgactttcaaaacgctaacaggtcagtacacatcaccgggatcgttggtgtatttctttgtcacaaccacgattgctacctatcagtcctgggtagccacaaagaataaaaccgtgtttgcgggggtcgaagctccgaatattccagccactgaattttcaatggcggcagcgttccagtcctcgctgtcaaatgaccctggttcgtcgaacatggtaccgccgatggcgttccgctttatgtatggggtgactgaatacccggttgagaacaacggtacgttgctgaaaacgctccaggacaaccacatcaactacatcgggtcatctgcagaaggtgggttgagtaacaagatgctggtagccggccacatgcttgacggcaacccgtttaactactggtatgcagtggcatgggccgctattaaccttgaactggacctggctaacgaagtgatcaacgggtctaacaccacaaccaacccgctgtattacgatcagaacggcattgatcgcctgcaaaaccgcgcactgaaaacgctgcgcaatggaattagctatgggctgattctgggccgcgttatcggtacaaaacttattcagtccgattttaatactgaatacgaaaaaggctcttatgccgggaatgctgttatcaacgcggtgccttttgctaactactccagcctgaatccttcggattaccaggaaggtaagtacaacggattaagcgccgtcatcacgccgcgccgtggcttcgaatccatcacgtttaacctgaacgttaccaattttgtaggggcataa

SEQ ID NO: 402416 - DNA, 438 bp, Salmonella enterica
atggcaaacccattagtaccgcagggattccttaaccgcgtccgtggtgcggtttccatcactgacgttccagcgctgaatgtcaccgcatcttatcttggtaaagacgggatcagcatgcgcccggacggtcccgccacggacattctgccgaccatgaccggcactgttggcagtcaggtaccgtaccagcaggttaccttaaccgtccacatgctacgcactcagggacttgccgcgagctatcagcagcgctttacgacggacacagcccttggcgaggtggtggttactccggacgcaaccacatttggcaacttcaccctgcttaactgctatctggtcaactttaatgagatgccatttaacggcatggatgccgggtacgtggtaaccatcagcggctacctcatcactaacgacaacatgtggatctga

SEQ ID NO: 402417 - DNA, 576 bp, Salmonella enterica
gtgaaaatcgataaaaaacttaatctggtctgttcgatcagccgcgatgacggctctctcatttacgttcacacctcacctttcccctacgaggtagtggaagagcattgcctgatgctcggtagtctgtttaccagtttcattgctcagattggtgggcttggtgcggcccgggtagcggcaatgatgctccggaagaaaattaaaaaggaacaggaggtaaccgggcatgatggtccgaacattgttgatgaaatccagcgccagacaacggtcatttttaatgacaacggccagtggaaatctgtgccgttagattctgcgatgaaacagggcattatttccgctgacgagtttcgtgaggtggaaggcgaaatcgttttttttatggtttcctctgccattcagaaaccggaactcatcaaaccgactgtggggagcgtgatcggtatgttcggtggtcagttaacgttatcgaccgctacggagtggcgaggttctttactgacgtcgaaaacggataccgataccccgaaccagactgccccgcaggaaacgtcgtttataccctcctag

SEQ ID NO: 402418 - DNA, 1884 bp, Salmonella enterica
atggcagctaaatccattattgaagttgacgtgaatgatgagaaattcctgtcatttatggataaattcaatgagtaccaggctgctcttgaagagctccccgaagcatggcgggcatctgcgcagggcattggcgacagcgcccgcgaaacgtcaaaagcatcctcagaagctgaggggatgacaaaggcgtttttggatggtgttgatgcgctgaatatgatggtgaataacctcgatcgcatcaataccagccttgacgatgccaataaacgccagagtgaccttaataagaaaactgccagttcttccggcatatttggcaaacttaaaaaggactcaaaagagttcgccggccatatcaaagacgccactgtcagcctgctgtcatggggcggtattgtagggctgttcactggcgttcttggggctggtgggttattcggtctgaaccgcctggcatccaccgcgagcgcccagagatttacctcaatggggctcaatacctcgattggcgcactggattcaacagccattaactaccagcgtgcagttgccaacccaacagctacacttggcgcaatccgtgacacccaggccgatttatcccaacgctggaaattccaggcgatgggcatcaataaccctgaccgttctccggatcagttgctgccggagatgattcgcgccgccaggagtattttcacgcaaacaggtggcacgttgcagggtgctaacgcctacggcctgaccagttttttcagtattgacgacctcaatcgctttaaaaatatgagcgatgccgagatcgacgctatggagaaacgtgcgaagcgtgatgctcaattgctgcagatcactgatgagcaggcccggcaatggcaggacttcaatgttcaactcgactacagcagtcagagcatcaaaaacacgttcatccgtggacttggcccgcttacccctggactgacaaaactctctgatgcgctgtctggtgctatcgataccgttcttcaatctccagaacttgggaaatggatcgacgggcttgctggtggtattcagcggtttggcgattacctggcgtctcccgattttaaaaacgatgtcgaagacttcatggtaaaagtcgagaagcttggaaaagtaattgggaaggttgtcgactggattattggtaaaactaacctgtcagtcgatgacataaaatcaggctcgtcaatcctgagtgataaaccagttgtcgacccgaaaacaggacagagttacattccagggagtgaaagtgatccaaatgtttcagctggtttgaaatggttgaaaagagcttcaggtgtgacgccaacagcctacgattcgtattttgaagaagccgcgaaaaaattcgacctcgacccaaaactccttaaatcagttgcggcagcggaatcatcttgggatcagaatgctgtgagcaaagctggtgctcagggtttgatgcaagtaatgcccatgaattttcaaccaggtgaaaatccttttgatccacgagacaacataatggccggagcacgggttatgtcgtgggcaaaacagcaatctggaggcgattttgacgagatgttgcgctggtataatgggggtaagaaccgcggtagtcaggagaatattaactatcctgggcgtgtgaaagagcaatacgcggctatttacggtacacagccaaatccagtcaatgcccccagccaggaaacttcggaaattgctcgtaacactgctaaaaccaatcagcttatccagcaggcaatcgatagcaacagaaactctggcggcgccggacttgtcgtttataacaatactggtggaaatgcagtcgtaacgagcgctcaactcggagcacgataa

SEQ ID NO: 402419 - DNA, 711 bp, Salmonella enterica
atgggattttcacgcgagatgtacaagctggggtttgagatatccccggttatcctgtgcgacggcatcgctcaggcaatccctggtgggatgctgccgattgttgccctgacccaaagtgccagttttgttactggtcttttggggggcgcgattaaccttacagacctggataagtatttctgtcactggaagccagtgcagggcgcgacgatagtagattatgacattgcccgctatccttttgctaaccaggttgtggccgcgaatgcattactggcacagccgttgcgtgttgctctggaaatgaaggccccggtaaacgaaaacaccggggcaatgacaaagctggtaacaataagcgcactccagtctgtcctacaggcacacgccaacctgggcgggacatttatcgttgctaccccatcagttatctataaccgctgcattttgcgcacggtaaaggatgtcaccagcggaaatgatgcattacctcagctgacatggatgtgggattttgagcagcctctgatcactgaaactggtgcagagcaggcggtaaataactttcttgggaaaattggtggtggagacaaggttacagaatcagcctggacaagtactgtcaatgcccttggtaacacatctcttggaggctctgtctctgaggctattactggtctgcttggtaaattgggagtggcaatatga

SEQ ID NO: 402420 - DNA, 276 bp, Salmonella enterica
atgacatctcaatattacccttttacgggggatgagcgtcaaagcatggcgtttacgccggttcttgatggtacggtttataactgccagttgaaatggaatattaccgcacaacgttggtatctgcttatcacagatagttctggtaacaccattcttaatacagctttaattggatcacctgaagctggtggtataaatataatttccggtatttttagttacacatctatgtactggagagaaaaaaacggacagattgaggtaaccagttaa

SEQ ID NO: 402421 - DNA, 1041 bp, Salmonella enterica
atgcgttattacgatatccagattttctctcaggttgaaggtgataaacaagaaaagttaattcaacagtattcaagccataagaatggtgtttataaccccggcgcattgatgattgaattcgatattctcaggtttggtgagtcgacccctcagggagaaacgcatttagcaatctatggcattggcccaaaagaaatgcagcaggctcgacaggacctgttcggtaagagaataaagatattcctcggcatgaaatcgggtttacctctggctggtaaggttacggcaccaagtctggtgctggatggtacgattaatcaggtgtttggtaactggcaaggtactgagttaaggctggacttcataattgttgcggggccggttaccagcacaccaagaggaaaactggcaccactgccacttacgtttaactggaatgtcggtcagaagctatctgtggcattaactcaatgctttcaaagaattggtggttatacatttaacatcaatattagcgacctgcttgtacttactcattacagggggctgttttgtgattcaattgaagagttggcaaaagatctcaaagctttttctttatctaaaataaaaaataaaggctataccggggttgaaatagcaatagtcaacggtaatgaaataagggtatgggacaatgactacccgaaccatccagacaagacatcaagagacagcgcaaccgaaagaagtaaaaaaccagttcaaattcactttaatgatcttatcggtcagcctacctgggtaaaattcgacgttatgagtgttgcttgcgtcatgcgtggcgatatccaggtgggagatcatattcttatgccgcagcgggcaaccccgatgattaaggctgcgtcgtattctcagtaccgagatgactctgcattctctgggcaatttgaggtttcttctgttcgtttgctcggtaacagcagacaaccgtcagcagagtcgtggataacaatcattgaagcgtatccgttcattgaggtaggtaaaaaatga

SEQ ID NO: 402422 - DNA, 717 bp, Salmonella enterica
atgagcatcggccagaaattaaattttggtgcaaacatgaatcggtttgcagaaagaaaagtggaagctgcgctgcaaaaagcaggaaaggtgctccctgccagtgtagtaaaacagagcgggaatatggtcacagtggcttttgagctgcgcgacatcccttatgtgcttcctcaggttaccatcccgctatttggtcctcagtacatccgatacccaatgcagccgggtgataaggggatagtcatcccggcggatacttatctgggaggggtaagcgggcagggaggtggtattgccgacctgacaccaccggcgaaccttagcgcgctggtatttttgccaatcagtaatacagagtgggaaggcgtcgacggtcaggttgtgaccatttacgggcccgaaggtgtcaccattcgggatgctggcagcaatacaacgtttttacttactcctgacagcataaccatcgccactccaacgcagttcaaagtgaccgtagggtcaacagttttcacactcacggacggtatgtggaatctgactggtcaggcagggaagttgaaggacggaacagccagcacaagtccggcgatcatgcatgagggctggaagtcacttgttacctggtgcaacagccatgttcactccaacggaaacggcggcagcaatactgggaacgcgacagtgcaatttaaagggaatatcactgaatga

SEQ ID NO: 402423 - DNA, 333 bp, Salmonella enterica
atgagaacctacggcaggaattcagaggggcagtggaccctgatcgaaaccgatgagaatggatttaacgacgcggtttacctgaccacgctggtacaaaatctgaagctggcgccgcaagagtctccattctttgcgaacaatggtattccggccaacggatcagtgattcaacaggtgttgcctacgtactacgttaaccgtctgcaacagcaatttagcccctacttttcatcgctacaaattgctttggtcagtgatgatccacctgtctataacatttcggcgataaccaacgctggttctaaaattattgcaacggtgaacgtatga

SEQ ID NO: 402424 - DNA, 1419 bp, Salmonella enterica
atgagtgatttatctgttagctacacagctgctggcccggttccgcaaaccccagaaagtctgcgcgagcaactggtgtcactggccgttcaaatgtcgccaggcattaccacagagttaccaggctcactgattgaggatatcgtgagcacagacgttggcgcactgctaatctgcgatcaggcgagagtcgatctgattaattcggtagggccgcttaaggctaacatttacatgcttaacctgctggctcagcaggctggtattgcaccacagaagacgcagggggcaacgactgttcctgtgcaattcgacggcccggcaggatttggtattccgcaggggtttgtagtgtccgatgggatctatacctatacgcttaacgatgccacgattattccctcgtctggagttacgccgcaggtaacctgtacggccaccatgacaggatcatgggcggtacctgctggcaccgttacccagataattaccagcgttcctgacgaaattacattgacctgcacaaatccggttgcaggagttcctggcttagagcgtgaatcaaactatcagtttcgtgatcgcgtctgggaatcccagatgtcaacagttcagggataccctggcttcatccggcagaagcttactgatgttaatggtgtgcaggctcgcctggtatcagtcgtacaggacggtaatagctggatcattatgtgcgggggaggtgatatttatgaaatggctggggccatttttaaatccgccggagatatcagcaggctaaaaggagcgacagtagacgttactggtataacgaatgctaatcctggtgtcgtcaccacaggtataactcatggattgaccaacggacaggtggtcaacatttctggcgtgaatggtatgactggaattaacaacgttccgctaaacgcaacagtgctcacaccgcatacgttttcaataggtatagatacttcagcgtccggttcgtggaccgggggcggagaggtcacgccaaatgtaagaaataatgtggtaaccataaacgactggccggataactatctaatcccgtttgttataccgttgcagcaaaatgttacggtgaaatttgagtggggatctgaaggggtgaattacctgaccgatgctacaattttaacgctggtatcagcacctgtaattcagtatataaatgggatttatgcgggtaagccgttaaatattaataacctgaaagataccttccttcagtccgtcaatgcaactattgatatgagtttaattagtaaactcaatgttattattacggttaatggtattgttacaaaccctgacccgaacacaaacattataagtggcgacccatttagttacttctacatcgcgtcagatggcgtaactgttgacggagtgtga

SEQ ID NO: 402425 - DNA, 705 bp, Salmonella enterica
atgcttgaggatattatccgttcgtacctgtacacgcagtacaatgatgatgacaatatccgtgctttcgtgactgcgtataacacgatggcaaaaaatatttatgactggatgcggattgcgaatctgcctatttttgttggcgggtataattcaggggatcaactccggtggatagctcgtggcatatatggcgtgaaacctcctatattggcaagcggtcggcagctggtactcggggcattcaatacattcacgtttaacactgtacccttcaatacccgcaaagtaataaaccagtcagagcaagttgttgtctctgatgatctgttcaagcggatcatgacgtggaatttctataagggggatgggttttacttcacaataccctggctgaaacgtcggattatgcggttccttacgggagtaaacggggttgatgtcgtgaacgaccaacactggagtatttcggtgttgttctctggtggtggagccagtgtttcaattattaagggtttcagaaagctgactgattcttcggtatacaacacgcagacgttcaatagcagggcttacaaccagaaaactagcgttctcatcaaaagtaacgagtatgagtacgcatcactgttcaagcaggctttcgatagcggactgctgcacatgccgttttatcaaccagtgagcgtgactatagttggatga

SEQ ID NO: 402426 - DNA, 999 bp, Salmonella enterica
atgaataaaatattgttggctgtatccgttgcttttgctggaagcatttttcatgcgaatggagcatcgtttgattgcagtaaggcaaaaagtttttctgaaaaaacaatttgctcagattctaaactttcaaaagatgatgatgacttaaaatatttatatggacgggctaaagcatctgttcaggatagaaaagcattttccgagatcactaaagcattatggaattcaagggagaggtgtagcgatttcacctgtgtaaactcatggtatgacacggcattcgctatatatggagcaatagccgaaaaaggtattccagaaacgaatggtaaaaatgatattctgttaaatgcagagcaatataaaaatgaaaatgaaaatgaaaatgaaaatgaaaatgaaaatgaaaaggaaaagagagatgtcgcccccatctctggcgagaaagaaaatctcacagccaaagaaaatgaaatgcaagattcaaatggtagtgatgttaaaatagttaacccaaagataacttatcaactcaaaaatgaggcggcctttgttgatgtaattgaaaaagcaataaaaaaatctaaaagtgctaagaatgacatgcaaattggtggtattaaggcgttaagagataaagagatatgtaatatacttcaggttaagtctgtatcaaattggattgggcaggtaaagaaagtatcagcaaatagtgatggtaaaggtgttttagttttaagtttacctaacggtattttaattaaaacgtggaataactcattttccgatacaagatacaacacactcatggagcctggaacagaaatattcaacagagcatcagaattgagtgtcggtgatgttgtttatttttctggaacgtttttcgaggataatgataattgcatttcagaatcaagtttatcgttatcaggaaaggttagagagcctgagtttatattcaggttcagtgatatcagaaagtatcaacagtaa

SEQ ID NO: 402427 - DNA, 204 bp, Salmonella enterica
atggtgcatggctgcagcattactacgcccataatggacataatgccaaaagacaggactgggctaccagcattactgcaaatgttccgtgggttgttgattacaacacatccaacccgcagcgggatattgcgggtaatgccgctacagctactacagctaatgcagccaatacagctaatgcagccaatacagctaatgtag

SEQ ID NO: 402428 - DNA, 261 bp, Salmonella enterica
ttgcacctgacgctggcgatggaagcaggataccagacaggtgaaaaaccgattaccgccacgctggttgaatccgtgctgtcacgtcagctggatgacctggagccgacgctcacgcggcatggttaccggctgaaggacatggtggagcagttcgatgcaaaacctgctgaaatcagggcattatttaacaatcagctagacccagcccgtacggccgaactacgcgacagaatgctggcggtcggtctgccaatatga

SEQ ID NO: 402429 - DNA, 1236 bp, Salmonella enterica
atgtcactatccggtaaacgtaattacattctgttaagcatttttgattttatgtacctgttcgcctggtcggccaccatggcattttttgttatctggacgacacaacatctgggaatcagcgcgacgcaaaatgggctactcttctccgtcaacgcctttattgcactgctgatgcaaccattctttggttttatctctgataaatttggcctgaaaaaacagctcatctggatcctggtggcactgctgctaccagttggtccattctttatttatgtttacgctccgcttttgatgcataacttctggctgggtgcgatgctcggtgggatttatctgggcattatctttaactcgggttccggggtgatcgattcctatattgataaaatttcgcggcgctatcgttttgaatatggtcgtgtacggatgtggggctcgctgggttgggcggcggcggcgtggattgtcggtaaatatatcgacgccatccctaatttctcgttctggttggctagcagtgccattgttgtcgccgcaatctgttttatgttgacaaaaattgaaatgaccgaagaagaaatcgaaaaaaacgactcgctgaaggtaagcaatgcgttggagttggcgaaaaatggtcagttctggatgctgctgctcttcactctgttcgtgacacaaatctacgacacctacgatcagcagtttgcacagtatttttctatgcagttcccgacgcaggaggaaggcaaccactggtacggaattctcgcatctgtgcaggtgtgcggtgagacactgtttttatgcctgatgccgtgggtcgtgaaccgcatcggtgcaaaatgggcgctggtgatcgctggaacgatcatgtcgttgcgcattgcaggttccgccattcaactggggccagtatggattgctgctgtaaagatgatgcactctatcgaaaagccgctgattctggtctcggtgtttaaatttatcgccgccaattttgataataaactctcatcgacagtatacctgctggtactgtttgtggcttctatcgccaccaccgtctactctccagttgccggctatatgtacgatagaattggttttgctaatacatatctcattctgggctctgtctccggtatttttactattgtttctgtctttacgctgaaggataaccgggttggcaacaccctcacacagccgtcgcaggatgccgttatctga

SEQ ID NO: 402430 - DNA, 1104 bp, Salmonella enterica
atggagggaaatgaagaaaatatgaaaaccagagcagccaccctcgcagatgtggcacgtcacgccggagtgtcttaccagactgtctcccgcgtactcaataattcggcgaacgtttcgacaaaaacacgcaggaaaattgaacttgccattgcagaactaaagtacgttcctgaccgtgtggcgcaacaactggtgggcaaagaaagtaaaacactgggacttatcaccacttctctggcactgcacgccccttcgcaaatcgcggcagccgtgaagaaatatgctggtgaacaggggtaccaggtactgatttcaatgactgatgacaacagcgccagcagtattcagtacgccattaacgagctaaaatcccagcgggtgagccgtgtaatcatcaacacgccactggaaacagcagtagcggaaaatctggtggaggaaaatacggacgtgctatgcctgttcctcgacgttgacccatacagccctgtttttaacgtcaccttcaacccggctgaaggcgcacgcgccagcgtgaagtatctgtatgaccttggccatcgccagttttgtctgctctccggaccggagaattccgttcctgcccaactgcgtttgagcacttggcttgacaccctctcctcctgcctggttgccccactggccgtgcattacggccagtgggacgcgcaaagcggttacctggcaacactacagatacttcgcgaaaacccacaggtcaccgcgctgctgatcgccaatgaccagatggcgcttggcgcactgagtgcactacatcagcaaaaacgtaaaatccctcaagatatctcactaataggttatgacgacacttacgagagtgcctttttcgaaccgtctttaacgactgtcgcaattgactttgatttacaaggaaaaatggcggtaaagcagttactgcaatccagagaaatgccgcaaatgtgttgcgtttcaatggtcctgcccagccgtctggtggtacgtaactcagctggtccgctgaacaaacaggaatccgatttacacagtatcgccgatcagctccgcaggttggcggatcaattgacgccaagatattaa

SEQ ID NO: 402431 - DNA, 210 bp, Salmonella enterica
atgaccttatataatcactttatcatcggtgcattgttggaggtcatcatgttgcaaaattccccttcagtttatgttagtctggatgtgcataaagaatcactggctgttgcgatggccaatcctgagcgaggtggagagatccgcttttatggtaaccagggttttcagctttccagcgattttagttgcggtttcgttttacgctga

SEQ ID NO: 402432 - DNA, 201 bp, Salmonella enterica
atgatcccactaccttctggaacaaagatcaggttggttgccggtatcactgatatgcacaacgacttcaatggcctggagagcatgaaaaaccgtggggcaggcgtgagttataccgccatagcgtacacccgcagacacatcttgccggcttcagcggagtgctacaggcggatgcgtatgccgggttcaacgagctaa

SEQ ID NO: 402433 - DNA, 363 bp, Salmonella enterica
atggttaatgtcttaaagaagctttttggaagcaagaataaagatgccagtggcgacacagcaattctttcagaaccagacctcacaattgcgcgagctaataacgaaatgcagttgcgtacacaagtcgcgatagacatgtgggggttcgatactgctgcgtgggatgttgatcttaatacaggttcaccaatgacgaaaaagagatcgtggtcaccgcacctgttcaagtggttggcacctacgatactgaaaacagtacctggttatgggggtgggaccatccgtcagtcagcgaatcacttggagaatacgcccggcgcgtgcgcgactttggtgagcaatatggtagagaaacactaa

SEQ ID NO: 402434 - DNA, 303 bp, Salmonella enterica
atggacagaccactgaccctcacctacgatgaactactggccgcaatggaacaacgcggaactcaacgcgttcgtacgcgggatttggagcatctgctggcgctgggtggggacgccccggtgtacggtcccaacctgcgcgcttcctgccgccgaatggaaaccgcaggctggctgcgtaccctacgggcacccaacctgcagctggccgttgagttaaccgacgctgggcgggttgtcgccgagccgcttctgatttcagaacaggcgcgggtacaggcagaacaacgcgccaagcagtga

SEQ ID NO: 402435 - DNA, 1053 bp, Salmonella enterica
atgtctgccaatgtactgcatctttttactgatacaggcctgctggatttcgagccgaataagaatgccactattattgctgaacttaaagacagtaataaaaaaccggtaccaggaatggagataacatggagttatgtttcggatacctctgctgcagtggtaaccacgtccaacaacattagccataccgatgttaatggccgggcggtatatacgatctccagtaaccagggtaactcgtttagtgttacagcaactgctactggtggggggactgacactattaacattggagtggcatctagtaacgttacggctcctgttgtggttgcttctgatgatccgggtatcgcctatcagattatagtacgcaaacatgtaaaaggggggcatgcaggtgatatatacactttttactgggataatcattgtgtcgcaaaaaaagttgatgaccctggtaacacaagtaactcctatattatacccataaagaagagtgcagaatatttttcaccgggtactcattatatctattacaccattgaaaaagatgtcggcaacttgagctattctccggtggtatcgcaggatgttccttatgtgtattccactcctcagtacgacaaaccgttgtttcctgatttactcgatgcaacgattaataatcatggattaagtcttgataacggcttgttaattaaaatcccatatccacaatcgaaagccggacagggggctgtgatcgaaggcggggatacaatctcagtgtatatgaatatgggcttcccggacaatgattccgtaaatccggacattcctcctgtaaatattgccactcacacagtaagtaaaacggagatctccggtagaaatattttggtcagagctgataaatcttattttattgataatatcaacgacacttttaatggtgttaatgtatttatttactataccgttggagattcagattcattacactcttattcaactgagctatatgtcgacaccgagtctcctggtaattatattatcaagttaattggctga

SEQ ID NO: 402436 - DNA, 723 bp, Salmonella enterica
atgaaaaaaaacagagtgatacctgtaaacataaaatataaacgactggatattccctcctcaacgctttacagtctgagtgagtttatttttaaaagaacacaacagagtcggttctccttactgttcagaaaggtttatccggttactgataaagagatgttcgtcatcgataactatcataatgagtggagagatatttatgacaaaaaaaaattgtggtctctggatcctatagttaacatatgcagaaagcctgaactgacatccctggcatggggggatgatttttttgaaggatataccatgctccttaagtatggagaggaatttggctttaaatatggtgtttctttcattattaatacgctacatggatatgagtgtattctctctctttcaaatgaactctgtaatgtaacatcacaacagatggcttcctgtgaattacactataaagaaatatataactttatcattcattcatgtcagcctcatttacttaatgccagggatttcgaactgacaccaccggtgctgacgtctatggaaaaaatcatattaactcttgtgtcagatggatttacatcatcagaaatagcaaataaaatatttatcacagagagtgctgtgaattttcatgtatataatataataaaaaagctgggatgccggaacagaacgcagattgttgcaaaaggtattattctgaatttgatttaa

SEQ ID NO: 402437 - DNA, 309 bp, Salmonella enterica
gtgtttccgggccgtagcgctccggtgcggttccgtcagatcctgttcttactttttccggatctgaacggaaaaagagagaaagtgtatgtactgaccgtactgcatgtattatctgtatcgtatgtattggagtgtattaatggtattgcactgaccgtatccgatactgaacgaagaggtggtgcccagcagaccaggaatatgaacctgaccgcaccgcggcaggaaagccacggggaagtgaaaacccggtgcgccactgagaagcccctgcaacaggcgctgctggttcgggcacgcagctaa

SEQ ID NO: 402438 - DNA, 129 bp, Salmonella enterica
gtgccgaaatttatatggaaagccgtattaatggatgtcgttctgcagtttataacagtgtcctggccggaaaaaatcctgacgattttgttgcttctgatgttgtttaaactggtacgaacggattag

SEQ ID NO: 402439 - DNA, 282 bp, Salmonella enterica
atgagggtttctgaacaggttatgctggctgtactgagtaaaggcggttgcatccggagtttctggcggcgttctgccagactggctggcaccccgcctccggttgtgccggatggcctggtactggaaaccccgggagagtcaggcgacacgccgctctctcatgtggattttgcggtggtggcgaaatggctcaactgtggagaagagtgggcgcaggtagtcgggggaagtgaattcggtggggccgtctggcgcctgacgccgcaggagccgtcctga

SEQ ID NO: 402440 - DNA, 486 bp, Salmonella enterica
atgaatgttattttagagacagcaatgataggtattggtgcgaccattataatggatttatgggcgagtattcagaggttgttatttaacataccatcactcaattatatgtatgttggtcgttggttaggacattttttaaaaggtaagttttctcataatacaatacttatagcaaagccaatatatggagaaattttaattggttggttagttcattatctcataggtatagtcttctcatttatattaattgcaattgtaggttctgagtggttagtaaaaccaacttttatacctgcgatgatggtaggtataataagtgttatagctcctttttttataatgcaaccaggatttgggtttggtcttgcaggctcgaaaacaccacaaccacaagtaactcgtaggcgtagtttagtggctcatctttcatatgggattggattgtatattagtgctcaactattatcaataatgctgtga

SEQ ID NO: 402441 - DNA, 555 bp, Salmonella enterica
atgcagaagaaacgtattttacttggcgtaactggttcaatagatatcatttttctcccgcaaatattgaaagaaattaaaaaaaacttagattgtactatcactgttcttatgagtgataatgcagttaaatttttatctccagaaactctttctttatgggctgattatgttatcgcaggagagtctccttcaaattggccaagagagaaaccatcaaaaattgtttccgaacatgatataatgcttgttttacctgcgaccgctaacactattgcaaatgtagctcatggcgcaacaccaaatcgtcttgcaactgttatcttagcatcaaattttcaagttttatttttccctgcaatgggagaaatcatgtggaataaaccagcgatgaaacgcaacattattcaattgcaagaagatggttatgaaataataacacctgtatggcatgaaagctatgatacagccttgggtaaaattgtaagacatccttcaattccttcaattgaaaaggtcatagatattttaattgaaaggctaagcattatataa

SEQ ID NO: 402442 - DNA, 738 bp, Salmonella enterica
atgattaaatcctctaaaaatattgtttatgcttttccccatgcaggggcaggtacaggtgtatataatgattgggtcaagcagtccagaagtgataagaatattatcattgttcctgtcagcatccctggacgcgataaacttagcagagaaaatataattgatgatttattttctttggcagaccgtatagcaacagatatctatactgatttcatgcaacgaattaaaaatggaagttttaattttgtaacttttggtcatagttttggtggtgttcttagctttattgtaactcaacagatttctttgaattttaatttaacaccctcactttcaataatctcaggttcaataccaccaagtattcaacaagaagatgatcgtcatttatggacggataaagaaattctttttaagatgcgcactgataagggaacacctgagtgtattctcaacgaacccgccattgcccggagacttgtaacatctctcagaacagactatatacttcgtcatcaatttcttgcatatagaaattctaaagttcaacagccattatctattatcgctgccgataaagatgaacatgtttcgaaggacatgcttttagcatggcaagtacactgttctctaccaataaaaattaccgaaatcaagggtgggcatttttctatttacgaaaattattgtacagtgctgtcattattaaataaaaatgaattagcatgtgagtaa

SEQ ID NO: 402443 - DNA, 3372 bp, Salmonella enterica
atgacgttaattacagactcagcaaaaaaaataggccttaaaatatccaattttgaaggtccagaactcgctaatgcccatgagggtgacgttgtaaataagttatatagctttcttgaaggtatggcccttccattcccaaatgaaaggatagatgttgctaattttaaagaatataaaaaagaatcctttcccctaacagatcttcaatatgcctatcttattggtcgtaacgcagcccttcctttaggaggaatatctcctatacattatattgaaatcaaagcatttaatatagatattaaaaaactaaataatgccttaactcggataatcgaaattcatccagctatgagattagtgttaacggataatgggcgacaacaatttattccaagtcatcaacaatatcatattcaagaagaggactatagccatcttgagtcaactagactcgatcaaaaattgagtttgttacgtaataatataatcgaacacattgacaacaaaaagaaaaatatttggtcttttgatatacatgccactattttaaaagacaattacattctattacatctatgcttcgatttaatgttttttgacatacttagcataaatattataatcaaagatttgtggaatgcttataatgatgtgtcttttaagtatgatagcttatcatattattttccgcttttcattgaaacagaaaataaattaaaacaaactgacttaggtttgaaagataaaaaattctggatggaacggttaataaaaatcccatcctctcccgaattgccattatataaatctccagaattaatcaagaaacataagtttattacgcttactaaaatattttccttggacttgttaaataagcttcaacggcaagcggtgaatcgtggaattacgttagaaactctttttcttggagcgtacgttgaagttatacgccagtggtcccgccatcaaaacttcacactaacattgacacttaatgggcgacgtaattattctgatgaaatcaaacaaacggtaggtaacttcttacaaccatctcttttatgtgtcaatagtaatgaagataaaacttttattgatagacttgtcgatgtacaaacagaattattagtgaatcgctggtattccacgttcaatggaattcaagttctgcgagaaatgactcgtttgcaaaatgatggcagggcaatcagcatgcctattgtcttcagtaatacattaaatagtgaacttagacatattacaaaagatcattcatgggaaggttctgcacaaactatttatacggctactcaaactcctggagtatggcttgaaaatcaattaatgcggattaatggtaatttagtaatgtgttggaactatgtagaagacctatttccagaaggtatgccagaagcaatgtttgatgctacattaaagttacttaatgattgttgcgaagttactaatatatggtctcagaaaggcagtgttgtccaattaccactacaagataagttagagcgtgtggatgcaaatgccacaactaagtcattaaaattagaactattacacgagcctatacttgcagcagctaaaaagactcctgaaaaggtcgcgattatacaaggagatataaaagtaacatatagtgaattagtaaacaccgcctgttatttggcaaaaaagcttaactctatagttaaaataaatcccggagatattattgcagtctcgattaatcgaggaccagaaatgttatcagcgattcttagcatactgctctctggtgctgcatacgtttatattgacccatttttaccagaacaacgcaagattaaattgcttgaccgctgcaatgcgaaagcattgtttacttcatctgataataaaatcttccaccctataataattgacgatataaaaataattactttatcagataacattatatacaaaaaagcttataattcatctttaaacgaccttgcctatattattttcacatccggttcaactggagaaccgaaaggcgtaatgataactcatcataatgctgctaatactataatagatattaattcccgctttgggattaattctcaggatactatttactctatagtaccgcctggatttgatttatctgtttacgattactttggtattttaagtgttggaggaactattcttttccctaaagaaagcgatccttcagatcctgacctctgggctaaaaatattattaaatacgatgtcactgtttggaatacggttccttccccagctaaagctctttttgactctaccaatcatcacttaaagtatagtactttgagactagttttgatgagtggtgattggatccctgtagatctccctagccagatacaaaaaatatcggataagattcaaattattagtcttggtggcgcaactgaaggggcaatttggtcaattatatacccaatagtacacattgatcctgcatggaaaagtataccgtatgggaaacctctaaccaatcaacgatttcatgttcttaatgagtggctttctgattgtcctaagtgggttactggtgaactctatatagccggagatggggtagccaaaggatacttaggagataaggtcaaaactaatgagcgattttttgaacacccttatactggtgagcggttatatagaactggtgatttagggcgttacattagtaatggtgtaattgaaattagaggtcgtgaagataatcaggtaaaaataaatggttatcgtattgaattgggtgaaattgaagcagcgattttaactcatccttctgttaagagtgcagtaattaattctttttctcaccctaaaacaggacaaaaacaactggctgcctacatcgtagtattagattcaattgataataatattgctgattttgaaggtgaactcagagattttttgtcaaatctattacctagctacatgataccaaattggattttgcgactaaatgatattcctttgacagcaaacggaaagatagatcgtaaagcacttccatccatatggttagatcataaagaatccatggataagtgtatgccagaaaatgaaaacgaaactcgtttatattcaatatggatcagccaactccaacatagtgattttggtgtcactgatggtttttttgatatcggtggagattctttacatgccgttagtcttcttagtattgtgcggcgtgagttcaatattacaccttcttgtgaacaaaatattatcgaaagccttttcatgaatgcctcaattagagatttttccaaaatcataacaaacatgtctaatttatctaaggaggaagattatgaataa

SEQ ID NO: 402444 - DNA, 162 bp, Salmonella enterica
atgcttccgtcaattaactacatgacactgatttttgcattacaggctgtcagggagggaaatattaaatactgtaacacccttggactgacgctgaatgaggtaagagagattaataagttatcgctggatgaactttttttatcagcaaaacatccttaa

SEQ ID NO: 402445 - DNA, 132 bp, Salmonella enterica
atgactgcctgtattaacaaggcagagcacctggaagcgcgtaaagaaatcatgcaatggtggtctgattatattgatttcaattgtcagggatatactgccccttatttgtattcacgaattaatgaataa

SEQ ID NO: 402446 - DNA, 1287 bp, Salmonella enterica
atgcaattagattttacccttaatttccataacgacacctggtaccccactgtcgatatcagtggttttaaatccaccactggcgccagcgccgatattcaggagaaaatgatcctgacgtttagcgcgccgggtaaaattaccgccggagatatcaccatatcgacgaacccgtggtgtgaattaaaaacccatattgaaaccagtgaaatttccagcggcgtttttgatagtaaactgacgattaccgccgccgatggttccgccctgggtaatgccatttcaactattcatatgggcgttaatgcctcctccgataccgcgccaaaatgggaaaccttcagcgacgctttcaccgccgccgctgacgaagaggcggacgtggcaggtgagctggcggtcacctgcgccgccttcccggctggactggaaaacaccgttctggaactggttttagttcgcggtgaaaaaagcgaaacgctccagccaaaagcgggcatcacctggttcgatattgacgctggcgcgtacgcggttaccgctgcggagctgcgtaccgctgaaggtactattcgcgcagcggtgcaattaagcgcatcggagctgatcatcactaaaggccagcgcactcagcttgatatcacctttgcccaggcggagcgcagtactactctggacctggcagtgaatttaccagccactcacgcgctgtataatgaagatctcagcgtagtttatatggaaaatgacgttgctaaacagcgtcatactatgcgcgtaggtcaaaagcagcgcctggaacttttgccggttaccggaacctattcggcgcgcattgatgatgtcaaactgaacaatatccactacacctttgatgtggcgagcggcgcactggataatcagctccacgatatcgccttcaccagcactcaccagaacgatgaatctcagtcagcctcaacgaagctgaccatcagcatcgacgcggaaaaaacggttgcttctaccttctctctacgtcttgtggatggcagcacaactccgcgccagtatctcttcaccgatctggcaatgaaagcgggcagtctcacgccgtcggttgaactggcgccgggcctttatcaggttgaatccgcgaccgtgatccataacggcatcgtttactatattgatgtcgctccacagacgctgagcgttgagaaaaataccgcgctgaccttagcggtaacccttactgaaggggcgaatctgcgtgtcaaaggttttcctgatttcctgatttcctga

SEQ ID NO: 402447 - DNA, 699 bp, Salmonella enterica
atgagtatgacagccactttatctctcaaaaagttagaggagcattttggaatacaggaccagttatcccttgaggggtactattctattttcgatattatccacaaaactaaaacagaatttattaagcaacatagtggacgctggggcgctaaggctaaaaatatttatgatgtcgcagccagttacgccacacaaattatgcttttgtcacgtaagaataaaatcactcagtcctttgaaaaatctatggacctactgtccgtagatgcatcactaacatcattatactcaaacagttcccctactatttcacctaaaaatggtccaacctggcagacattatttgctgaaaactggagtgaatactgccaaactagcgcaccagaagctaatgactcgcccgtttcctatctatcctggctgtacaatcaagcactcagttatgaaaaacaaatgggtgaaaatgatattatttcactctcgaccagacgcccggatttagctgaattaatgctggataacgatgctgttaatcaagttgtaccctcactgcaattggtaaatgaaattctggagcaatctgtcacgccttatgtaagcatgattaattctaaaagcactgtaaactacgcgctatccaacgcagttaccttatcattatcctcaccagcaagctttgttatctttaaaagatag

SEQ ID NO: 402448 - DNA, 174 bp, Salmonella enterica
gtggcagctatgtcagaacttgttcgcgatctgtcacggcttggatggagtgacgaacgtacagcgaaagaattagggatggataaagatgaagtacttagacttaaacaaatatgcggactggcagaaatgtttggtgatgaatcgttttcggaagcgtggacagtggagtaa

SEQ ID NO: 402449 - DNA, 693 bp, Salmonella enterica
atgcgcctttcgttgtgtcgtcagccaggcattgcagcgcatgcggggctccatccctccgaatccgtcaggaaccatctgatcgcagtattgcgcgatggcatacagcgcccatttatccacatcggaaataccaatacgctgccccattccgtagcggggatgtgtcagcaaatcaagcacgcaccaggccgggttgtttgtgtatgcaggcttaaatgtaccatcccacaatccggcgtaagtcctggatactggatcataattcgatggcaccagaacaattttcccctcaaggtggtagttcaccatcacctgctggctgccaaactgctctgcatccacctgcagcccaacaaccgcagtattggggtaggtctgtttgatatcgataatttctgtgtacgacgaccacagcgttttgttctgcaacatgctggttgtgctgtcgtcagtgattcgaaccattctcatgttgaatggtcgcggcggcagattactgacaacaacggacgccagaaactgcgttgttgttttgccgtggatatagatatcctttaccagttgccacacgccatttatctgaaactggatctgcatgttgacgctgctttcgttctggtcgcccttgtcgttactctccaccagcgactgaacaccaaaggtaaaacgcagacgatcaatttcttttga

SEQ ID NO: 402450 - DNA, 3108 bp, Salmonella enterica
atggaccagataaccaatctggtaattgatctttcgctggattcacagaagtttaaggatgaaattccgcgcataaagaaaatactggatgacgcttcaggtaaggcggagatatcagcgcagaggcagaagaatttactggaacttctgcagaagcaaggcagggcgtacatcgacggaagtggcgctgtattcaacgccaccacccgacagaagcaggcgctgatactgaattcgcaggcatatgatcaagtggcccggcgcgtagatattacgcaacgtaacattgaagccctgaatcagaagatgcgcgaagagcgggcgcaggcggcagcggtcgcgcaggctcagaatactgccgctgctgccttttaccgtcagattgacagcgtaaagcagctaagtggcggattgcaggaactgcaacgtattcaggtacaaatccgacaggcgaaagggcgcggtgatatttctcaggatgattatctggcgctggtgtcagagaccaccgcaaagacccgggagcttgccgacgctgaagcgctgtccacccagaaaaaagcgcagttcatccggcgactgaaagagcagacagcagcacaaagcctttcccgcgctgaactgctgcgagtgaaagcggcggagttaggcgtaagtagcgcagccgatgtctatatccgcaagctggataccgcaacgaaatccacccatgcgctggggctgaaatcggcaatggcccgccgtgaaattggcgtgcttattggcgagctggcacggggtaactttggcgcattgcggggaagtggcatcacgctggctaaccgggcgggctggatagataaactgtttagcgcgagaggtctggccgttggtgggcttgttgggggcgtggctgccgcagtatatgggctcggtaaagcctggcgggaagggcagaaagaaagcgaggagtttaataaacaactcattctgaccgggaactacgccggtaagaccactggtcaacttaatgagatggcgaaatcgctcgccgggaacggtgtcacacagcatgacgcggcgggcgtgctggcgcaggtggtgggcagcggttcgtttacaggtcctgccgtggatatggtttcccgtacagcggcaagaatgcaggaggccgttggtcagtcggttgatgagaccatcaggcagtttaaacgcctgcaggatgatccggttaatgctgctaaagaactggataaaaccctgcactttctgaccgccacccagcttgagcaaatccgggttctgggcgagcagggcagaacggccgacgccgcgaaaatcgccatgtccgcttattcggaagagatgaataagcggatgggagacgttcacgacaatctgggctgggttgaaagggcgtggaacagcctgggggatgcggcgaaatgggcgtgggaccgtatgctggacatcgggcgtgaagatacgctcgatgaaaaaataaaaaagctacaggagaagatcaaaaacggaggtcaacggattggcaaggcgtttattcctgtaacccagcaggacagggataatcttgccgcactacaggaggaagattttcagcaaaagctaaaggccgcgaaggataaaggtgagcgtgattaccaggaaacgcagaagcgcaggaataaagaaaacaccgcgcttgatcatgataacgaaacggaggagatgcgtcataagaataagattgactggattaagtcacaggaatatgccgatgcctcaaagcgtaatgccgcactggaacgcgaaaacgaacgccataaaaaggcgatggagcgccagacgaaaaagcctggcgcctatcacaacgacgaagccagccgcttacttctgcagtacagccagcaacaggcacaggttgagggccagatagccgccgcgaaactctccacgaccgaaaaaatgacggaggcgcataagcaactgctggcgtttcagcaacgcatcaccgatctgtcaggcaagaaactgacggcagacgaaaaaagcgtactggcccacagggatgaaatagagcaggcgttacgtggtctggatataaaacagcaggaactacagcaccagaacgcgctgaatgaactgaagaaaaagacagttacattaaccagccagctcgcagaagaggaagtgaaggtaagacagcagcacgctatggcgcttgccacaatgggaatgggcgatcagcatcgcgggcgatacgaggaacgcctgaaaattcagcaacagtatcaggataagctggagcaacttaaacgcgacagcaaggcaaaaggtacgctcgattcagaagagtaccgtcaggctgaacaggaacttcaggacagcctcgatcgccgtcttgctgaatgggccgattacaacgcaaaagtggatgctgcgagcggagactggacgctgggggcatcgcgtgcgctggataactttatggctcagggtagtaacgtggcgggtatgacggagaacatcttcaccagcgcctttaatggcatggcggatgcggttggtaatttcgccaccacagggaagtttaatttccgtagctttaccgtttctattctggctgatctggcaaagatggaggcgcgaatcgctgcatctcaggccctgggcggtctgctgaagtgggggatgaccgcctttggcgctggtgctggcgcagcggcgggatcgggcgctaacgccatacaaagttatgggtcgaatttcagtcttaatgctgtgggtggtgtatacaactcagcggatctgagtcgttacagcggcagcgtggtcagtcgtcccactttctttgcatttgcaaaaggcgccggggtgatgggggaagccgggccggaagcaatacttccgctgcgtcgtggtgctgacggtaagctgggggttgttgcggcaggtggcggtatggcgatgtttgcgcctcagtacaatatcgaaatccataatgacggtaacaatggacagattggcccgcaggcactgaaagctgtgtatgagatcggtaaaaaaggggcgtctgacttcctgcagcagcagggacgtgatggtgggcggttaagtggagcgtacagataa

SEQ ID NO: 402451 - DNA, 390 bp, Salmonella enterica
atgtttttaaagaaagacacctttaactatggtgaggcttccgttgagatgtatgagctttccgggctgcaacgcgtcgagtacctggaatacatacaacaacgaaccgcgcaatatgaccgggaagcggagaaatcaacagaagaagagagaagggtcgcgtttttgcgaatgggcgttgatattaatgcctggctggtatcccgttcattacggaatggtgctcaggcacaggatgcggtgataaccagcgataatattgcttccctttggtcgtatgaggcgctgggaaaaggggcggatatggtgctatccctgagcggaatgtctccccctgattctggagacgaaacggaagcggcggaggctgattcaccggaaaagtcctga

SEQ ID NO: 402452 - DNA, 357 bp, Salmonella enterica
gtggaagaattcgacaatctgtttgatgctgcaatggcacgggccgacaacgctattctgggcgtaatgggtacggttgcacgggtcgtatcgggtgctttggcgggggatacgctggtcggtgtttttgatgatccggaaagcgtctcatatgccgcaggtggcgtcagaatcgaaggggtaagtccatctctctttgtgaaatctgtcgcagttcgccagttacggaggctggataccctgattattgacgaacagagttattgggtggaccggattggtcaggaagatggtagcggcagccgtcacatctggcttggtactggagagccgccagcggatacccggcgacgataa

SEQ ID NO: 402453 - DNA, 381 bp, Salmonella enterica
atggcaaaaaaagatgaaaaagtgaaacgcctgcaggaactggcggtgatattggggcgcgaaccggatatctccggcagcacggaagagatcattcagcgcctgaaggaatgggaagaagaagtgggaagccagtctgaaacagttgatacagcctccgaaatatcccccactgaaaatgtaaacgcggatgaaacagacagcagcgacaaaccgcagaccgggattgttatggtcagggcgctttgtacgctgcatatcgacgcactgtctccggacagcgatcgcctgctggaattagttaagaagggagatctggtcagaatacccgcgagcttgctggatgaaatgatcgaagacggactggttgatagggcgtaa

SEQ ID NO: 402454 - DNA, 1029 bp, Salmonella enterica
atgaatttatttaccactcgtcagttgcttggttataccgagcagaaagttaagtttaacgcgcttttcctgaatttgtttttccgtcgcacagtgacctttaaaactcaggaagtgatgctggataaaatcacagggaaaacgccgattgcggcctatgtttcccctgtggtggggggcgttgtgttgcgcaatcgcggaggtgaaactcgcgtgattcgtccgggctatgttaagccgaaacatgaggttacttacgatcaggttgtggagcgtctgccgggtgaagatcctgcaaaactcaacgaccaggcgtatcggcgtatgcgtatcctgacggacaacctcaagcaggaggaacatgccattgttcaggttgaagaaatgcaggccgttaatgccgtgctgtacggaaagtatgcgatggagggggagcagtttgatacggtggaagtcgattttggccgttctgccgggaataacattacccaggccagcggcaaaaaatggtcagagcaggatcgtgagaactttgacccgacatacgacattgacatgtactgcgatcaggcttccggccttattaatattgccgtgatggatggaaaggtctggcgtcaactgaacagctttaagatgttccgtgaaaagctggatacccgccgtggctccgcgtccgaactggaaaccgccgtaaaagacctgggcgctgtagtgtcctttaagggatattacggcgatctggctattctcgtttgcaaaacctcgtacgttgataaggatggcaccgaaaaacgctatctgccggaagggacaatggtcctgggaaatactgcgtcagaaggtatccgttgctatggcgccattcaggatcagcaggcgctggcggaagggattgtggaagcggttcgttatccgaagcactggatcactgtcggagacccgtctaatgagtacaccatgacgcagtcctctccgttgatggtgctgccggacccggatgagtttgtgattgtacaggtaggctaa

SEQ ID NO: 402455 - DNA, 348 bp, Salmonella enterica
atgacctttaaaacgataacgcaacagcgcgatgaaaagcgcatttttgcagggaatgacactgcacataccgccaccggcagcagcggaattgcaaaagccactcctgcactgacaccactgatgctggaagccacctccggaaagctgattgcctgggatgggctgagcgcaggcactgccgttggtgtgctcgtactgccgctggagggtacggaaagccagttgacgtactggaaaagcggcacgtttgccactgaagcgctgttatggccagaaaatgttgatgccgttaaaaaggcgaatgcgtttactggcagcgctatcagtcacgccgcattgccttaa

SEQ ID NO: 402456 - DNA, 1515 bp, Salmonella enterica
gtgcaacgtaatttaccgcacataataagccaggccaccaatgccccgctgttacttgaacccgcctacgcgcgggttttcttttgcgcgttaggcagagaatcggggattaactgcctgcaaatcccccagagccaggaacgtcttgatcaggcggggatgggacttgtcaccgggagttacatgtcgggagaaaagccccgggcgcggttttatcaggtgattgatggcatcgccgttttgcctgtctcgggaacgctggttcataagcttggtggtatgcggccattttccggaatgaccggttatgacggcattaccgcacgtctgcagcaggcaatggatgatccagaggttaagggtgttctgctggatattgacagtccgggtggtcagggggccggggcttttgactgtgctgacatgatttaccggctgggtgagcagaaacctgtctgggcgctggcgaatgacctgtcctgttcggcggcgatgttgctggcctcagcctgtcagcgcaggctggtgacgcagacatccagatttggctcaattggcgtggtaatggcacataccagttatgccggaaaactcgagcaggaaggtatcgatatcaccctgatttactcagggagccataaggtcgatctgagcggaacacgcgaactgccggaaagtgtccgtatggattatcagcaaaggatggatgacgcgaggctgatgtttgccgaaaaggtctcacagtatacagggttatccgttgacgcagtgatggagacggaagcggcgatatacgatggtcaggcgggtattgatgccgggctggctgatgaaatggtaaacgctgcagatgccgttacggtaatggccgcagcactgaagagtaaaacaaaaggaggcaatatgcctgaattaacagcaactgaggcagcggctcaggaaaatcagcgcgtgatggggattataggttgcccggaggcaaaagggcgtgaggcgctggcgcagatgctggccggacaaccgggtatgagcgtggcgcaggcgcaggccattctggctgcagccgcgccgcagcaggacgttgtcagcgaggccgatcgcattatggcgcttgacgatgctaaggggcgcgaggaacttgcctccacgctggccgccatgccggatatgactgcagagcgggcaaaaactattcttgccgccgcaccgcgtgccggtgccacatccctcagtgacagtattttgtcactggatgaggctaagggacgtgaagaactggcgggaaaattagcgaccatgcctggaatgacagttgagcaggctcgcgagctactggcggcggcgccggacacatcgggttctggcggggtaagtatgaataatgcttttgatcagttcatgcaggcgcagtctccgtctgctgtatccggtggcggtagtcagggtgatgatgcaacgatgcagttaatgatgagcattccggggactgtggcagcaaaagaaggaggtaaataa

SEQ ID NO: 402457 - DNA, 516 bp, Salmonella enterica
atggcgacgcaggaggagatagctaaacatcttaatatcactgctcgtcgagttcgcgatcttcagaaagtgccgggagccccgaaagcaagggggcgcggtgattatgacatagacgcctggcggtatttttatctttcattcctgagtcggggagggaagttagctcctgatggtgatgaaggaggtacagcggactatgaagaaaagttactcatcgccagatggaagctaaccgaagaacaggctgttgcccagaaattaaaaaaccaggtgacggaaggggaaatggttgactcgggtttttgcactttcgcgctaagccgcctggcaatggacctgtcatcaatccttgattcaattcctctttccatgcaacgaaagttcccggacatcacgcctcagcagatcgaggggttgaaagtgctcattgctaagggagcgaatcagtgcgccagggcgggagagaaaatgccggagttaatggatgaatatatcagaacagcaaatgaataa

SEQ ID NO: 402458 - DNA, 342 bp, Salmonella enterica
atgaacagtaaaacatcagtcttgttagttaaagacgcattaggcaagcagcgcctggctataggttgcattagtaaactagagtgcagagtttgcgagttgcggtccaccgtaacgcaagatccagacaatcgccatgatggtgtgggtggagttgagtattgctgcactcctgaaaactggaaggagccaacctggactgagggctggaatgcgtactttagcgataaccttaaatctatgtggccgatgtttaccgaaaagcagaggctggagttatcgcgtgtatttcttgagatagctgacgatctttatgatcgggcactgaatgcagcaggttaa

SEQ ID NO: 402459 - DNA, 474 bp, Salmonella enterica
atggtaactgacgatgatctgggttgcttattacgtatccacctgataacggaaaacatgctggaggcatggtgttgtgccgcctcatataatccttatttctttaaggattttggcgctaatttaactatgccatatattgccaagctgaaattagcatctaattttgggcttaactcattttcctataacgagttaaaggaaataaacaaaataagaaatgctcattcacaccagattgataactatgctatttccgatttggaaatctccaccctaatgaaactcattagaaaaggcggtcaaaatgaattagttgatagtcccggttccggtatctgggttgatgaaaaaacgatcctgcttaacgaccaaaccattaccaatagacaaaaacttgtcgctatattgggcttgataattttcagggtatcgagtcaagctaacgggatttacagcccaataaccctgtaa

SEQ ID NO: 402460 - DNA, 207 bp, Salmonella enterica
atggttaaggtggctgtgatgagccgcttcaccactcccgccatactggaaatgctggaccattataactggcacgtacatgagccgttcgccttctggctcagtgacgacgaaagtgacgtgattgaagtaccggccggattcgttaccgaccttgcgacaataccgcgcatcttctggatactgctaccgccagacggtaaataa

SEQ ID NO: 402461 - DNA, 531 bp, Salmonella enterica
atgatttatatcatgactcaggatttgtttttatatcatggcattagtgcaattattggaatacaaagagcccgccttataacccacatggaagggacggatatacactttaccccccaggattttctgattattgatgctcttcacaatgactgtttcagccagtcaagcacctgcatactccagcagatactggtcgataaaataattatactatccgctttcagtatcagtcggctgaaatgtggttctccagttttttttctcccacggaccagtcagtgttactctcttaacaactttttgaatggtgtcagagaaaaaaacgaatcatattttccagtgctatctctacgtgaagcagtcgtactcagggaattaataatgcaacccgacgaacaggttgcttccatagcacttcatatatcaatgggaaccctgcgaacacataaatatcagatcatgctaaaactcagactcaggaaaataagtcatatcgttaaccaccccttaactgcatacctaacttaa

SEQ ID NO: 402462 - DNA, 318 bp, Salmonella enterica
atggcaggcatgagagtgtcaacgatgcagattaatgaggcctttactaagctttcggcaagtggtttaggtcaaaatatacagacggaaatacagcgcaagcaggcggaagttaaagaaataaacagcaaaaaaacagaaggatctcctgaaaataaaagttcgtgcgagtgcaagaagcctgttgatataaagacagagatcaagaacgccgtggaacaaaaggattatgaaaaggtagctcaactggttggagtaaagaatccgtacaatgcatttagctataaaggattgtctctgtttaaagtgaatgcctga

SEQ ID NO: 402463 - DNA, 11223 bp, Salmonella enterica
atgcgtcctatatctataatttcaaaattaactggcgtgagtaacaacgttgaagcctctgaaattacgctaagtgcaccttctatcgtcaagctgcagcttgagcgttcagacatcaccagcattgtccgctccggtcaggacatgattatcaccctgcactctggtgaaaaaatcaccattcataatttctatgccggtggtaatcaggatcccagtcaactggtgcttgaagataaccacggtgcattgtggtgggttcaggacaccgacggtgccttccacttcgaacatattgatgatttaaccccgctgatggccgccgaagggggtcatgacggcgctgccgcctggccgtgggtgctgggtgcactcgcggttggcggtggtgttgctctggcagccagcggcggcgggggtggcggcggaggaagtgacaacaactcaggcaataacggtagcggaaatggcaatccaggaagcggcaatcctggtggcagcaaggatcctgatccctccagcccggaccctaaagccccttctgtacctgtcctcggcagcattaccgataacgtcgccccggtaaccggtacgctgcaacccggccaggcaaccaatgacaacacgccgaccctgcagggtaccggtaccgcgggctccacggtacatatctatgataacggcactgaaataggtagcgtggtggtcgatggtaacggtaactggtcatttaccccgacaaccccgctggccgacggttcgcaccagataacggtcagcgcatctaatgggtcaggcagcagcgaaacctctgccgggtggcccatcgtcgtggataccgacccaccgccggcggcgaccgttagccaggaaattgataacgtcggctccattcagggcgccatccccagcggcggcgtcaccgacgatgccacgccaacgctcaccggtaccggcgtcgccggattcactatttcggtttacgacaacggcggcgtactgcttggtaccaccgttgtggatagcagcggtaactggagtttcaccccgggcacaccgctgagcgatggtgtccataacctgacggtgattcagtcagatgccgcgggcaacccaagcgttgccaccacggttccagcctttactgtcgataccaccccgccgctggccgcgacgatcacagggattaaccctgaaggtactaccgtcaccggtagcgcagagcccggcagcacggtcaccatcatcgacagcaataatcatgttctcggttccgttgtcgttgataacagcggcaacttcagtatcggtattacgcctgcgcaaacgcatggcgaagccctgaccgcagaaattcacgatgccgccggtaacacaggcccggatactccgttcaacgccaccagctccggcctcccgacggtaccggtgattgtcagcatcgtggacgatgttgcaccgggcacgggtccgttaagtaacaatcagtccaccaatgactctaccccgaccatttcaggtactgcggacccaaataccaccgttaatatctataacaacggtgctctgctggtcagcgtctccgttgacggtagcgggaactggagctggacgccgctggtcgcactaccggatggcccacatgcctttacggtgaccgccaccaatgcggcgggcaccggagcgagttccggggcattcaccgttaacatcgataccacgccaccggccccccccaccgacctggccgtctcactcgatggcgtcacggtcaccggtatcacagaagccggaaacacggtggttattaacgacagccacggtaacccgattggtaccggcaccgccgggcctgatggccatttcagtattaccatcgccccgccacagaccaacggtgaaacgttgacggcggtggcgacggatcctgccggaaacccaggtttaccgggcatagccaccgccccggacaccaccgctccggtaccgccttccaacctggtcataaaccatgctggggatctggtcaccggtaccgcagagccgaacagcaccgtgcatattcttgatccgcacggcaatatcatcgccaccgccaccgccgacggcagcggggccttcaccgccacgctggttccaccacaaactaacggcgaagtactggaagcaaacgcgaccgatgcagcgggtaacaccagcaccgacacgccagttaccgcaccggataccacaccaccaaacgccccgacaggcgtcgtcgtcgccggagatggcgcatccgttaccggcagcgctgaagcgggtagcacggtcatcattaaagacgatcacggaaatactatcggccaaggccaggcagatgccggcggtaacttcacgatcccgatttcaccagcacagactaacggtgaaacgatagatctgactgcaaccgacggcagcggcaacaccagcccgaacgcctcggcgattgccccggatatcaccccacccgccacgccgattatcagcgcggtcatcgacgacgtggccaacggcctggggccgattggcaatggtcaactgaccaacgacgacaaacccacgctgcagggcacggcggaaattaactcgcaggtgaagatctacgataacggtgtcctgctggcaaccgtaggtactgatggcagcggtaactggaactacacgccggggacgtcgctgggtcagggcgcacacgtgctgaccgtgaccgctaccgatgcggcgggtaataccagccccgccgccagctggaacatcatcgtcgactctgtcccgccgcaggtcccggtattaaccctggtgaacgatgatgtgggcaccattaccggcaacgtcctcaacaacggtaacgtgaccaacgatacgaccccgaccctttccggtaccggcgagcccggcacgcaggtgagtatctacgacgacggggtcctgatggccaccgttaccgtcgacagcggaggagcctggagctacccggtgccggttggtcaggcgctgggcgatcgcgatcacaacatcaccctcaccgccaccgacgcggcgggtaacgtcactacctctcctacaacggtaaccattaccgttgacactcaggcaccttcggcccccgttatcatcgccgcggcagacaatgtcggcagcgtgcagggcgatctcccgaccacctcgcgctctgacgacaccctgccgctgctgaaaggcaccggcgacgtcggttccaccattaccatttacgatggcgcgacccccatcggtaccaccaccgttatcgccggcggcacctggagcttccaggtgacgcagccgctgagcgaaggggcgcacgctctctccgccgtcgccagcgacgccgctggcaacaccagcgccgccggaaactttgccctgactatcgacaccactccgcctgcagcaccggttattctctcggcgcaggggctggtcggcagtaccaccgtcacgctcgttgacggcggcagcaccaaaagtacggctccaactatttccggcaccggtgaggctggagcaagaattatcatttcggataacggtacggtgattggcaacacgacggtgcagccaaacggcacctggacgtttgttccgtcaccgccgctggccgatgcccagcaccacttcaccgccaccgccaccgatgtggcaggcaacattagtattccatccgccgacttcacgctgacggtcgacaacctgccgccgtcgcagccgctgccgccgaccattaccgatgatgtcctgccggtggtcggggtcgtgaccaacggcaacaccaacgacaccacaccaaccttcagcggcacgggcgcgaacccgggcgatactatttcggtctatctcgatggcaatgctgccccgcttggcaccgcgctggtggccgctgatggcacctggagctttacgccaggcaccgcgataaacccggacagctatcagattactatcaccacaaccgatgccgccggcaacgtcagcctgccgtcgctgccgattacgctgaacatcgatattacccctccgggtaacccgacgctcctcgcggcgaacgacaacgtcggtaccatccagggcgacctagcacctaacgctatcaccgacgacaacacgccaaccattcgcggaaccggagataacggagcgaccatcactctgtacaacggtagcaccgtgatcggtaccactaccgtcgtcggcggactgtggagctttacccctggtactgcccttgccgacggcagctacaccatcaccgccattgccaccgacgcggccggtaaccccagcggcagctccaacagcatctcgtttaccgttaacaccgtgccgctgaccctgccgcaggtgaccgatattcaggataacgtaggggtcattaccggttccgtaagtaacggtggggtaaccgacgacaccacgccaaccttcagcggcaccggtacacctggcagcaccgtactggtctatgttgatggcctgccgattgccgtagccgttgccacggtgggggcaaatggaacctggagcgtcgatgttccgctgggcgtggtcaacggcccgcacaccatcaccttcggcacccaggatgccgcaggcaatagtctgcctgccggtaacccgatagtcctgaatctggacaccagcccgccggcccctccgctggtcactatcgtcgatccgaacggtacgctggtcagcggtaccgccgagcccggcagctccgtgattatcaaagacaacgggggcaatgtgcttggcaccggcctggcgaatgcgatcaccggggcatttaccgtcactatctctccggcgcaaaccaccggaacggcactgacggcgaccgcgcaggatacggcgggtaaccagagtctccagacgccgtttatttccgccatctcaacggtcccgcatccgccaacgcttgaagtgtttgatgacgtcagcccggtaaccggcgtcgtcggtaacggtaaaaccaccaacgacacgctgcctaccctgcagggggttgccaccgcgggcgcaacggtgcatatctaccaggacggcgtactgattacctccgtaccggctgatgccaccaccggggcgtggagctacacgctcccgacgccgctggtgaacggcagcacccacagttttgcggtgtcccagaccgtcaccggggtcgacagcggccagtcgccgacctacagcatcaccatcgataccagcgcaccgctggcaccggccattacctcggtcactgacgacgtagcaccggttgtcggtacggtgaataatggtcaggcaaccaacgacgcgcagccaaccattaacggttccggcgaagtcggcgccaccatcaccatttacgatggtggcgtggccattggtaccacggtggtgaacggcagcggcaactggagctttaccccgacgggtactctcggtgacggtagccacacctttaccgcccgcgccaccgatgcggcaggtaaccagggcgtggcatccggtagctaccagataaccatcgatacggctgcaccttccgctccggccatcgtgaccgtgaccgatgatgtcggtaccgtggtgaacctcaccccaggtcaggtgaccaacgacaacaccccgacgctgaccggcaccaccgaacctaacgcgctcgtgaccatccgcgataacggtacggtgatcggcaccgccaccgccgacggctccgggagctggaccttcaccccgggcactgcactcggcgacggaaaccattcgctgaccgccaccgcaaccgatgcggcaggcaacatcggtactgcctcgacggcgttcccgattgtcgtcgacaccacgccgccgcctccaccggcaatcgtcacggtggtggacgatgtggggggtaccgtacagctgactaacggccagctcaccaatgacgcccagccaacgcttaacggcaccggcgaaatcggtgcgaccatcaccattcgcgataatggcgcacctatcggcacggctgtcgtcgatggctccggcaactggacctttaccccgggcaccgccctcggtcagggaccgcacgtattcaccaccgtcgccactgacccggcgggcaacaccggttcaccgtcggcgtcctttaccattcaggtggactccattgcgccgccggccccggccattgtgacggtgcaggacaataccgcgccggtgaccggcccgatcgccggcggtggcatcagcaacgaaagccatccgggtctgaccgggaccggcgaaatcggggcgactatcaccgtaatgagcgatggcgtggcaatcggcaccaccatcgtgggggcgggtggcacctggagctttacgccaggtaccgcgctcactaacggcccgcacacgctgaccgtcaccgcgacggacagcgcaggcaacgtcagcgcaccgtccgccgggtttacctataccgtggataccgccgcgccagggatcccggcgatcggtcaggtggttgacgatgtgggcgcgctgcagggtgacctcagcagcggccaggcaacggacgatacccgtccggcgctcagcggcaccgctgaggccaactcaacggtgaaaatctacgataacggcagcctgataggcactgtcacggcggatggcaccggagcctggagcttcacgccgggtaccgggcttaccaacggcccgcatgcgctgaccgtcacggcaacggatgcagcaggtaacgtcagtgcaccatcgacggcgttcaacatcgtggtggatacggtagcccctccggcaccggcgattattcaggcggttgatgatgtgctgcctggcaccgggatcctgctgagcggtgcgttcactaacgacacccaacccttgctgagcggtacggcggaagccaacacgaaagtggctatctatgataacggcaccctgctgacaacggttaccgcagcggcggacggcagctggagttatctgccagcggcgctcgggaacgggcagcacgtgttcaccgccattgccaccgatgccgccggtaacgtcggcccgacgtcgccgggcttcaccctcaatatcgataccgttgcaccaccaacgccggtgctgctgacggttgtcgatgacgttgcgggtggcgtcttcaacgccgcgctgaccaacggcggtctgaccaacgatgcccgcccaaccctgaacggcaccgctgaggcaggcagcaccgtcaatatttatgacggcggcaccctgctcggcaccgctctggttcagggcaacggcagctggacgtttacctcaaccgccccgctcggcaccggttcgcacagtttcacggtgaccgcgaccgatgccgcaggcaacaccagcggcgccaccgcgggcttcggtatcgtcgtcgacaccacaccaccggccacgccgtcgatcaccagcatcattgatgatgtcgccggcggtattttcaatggcccgatcggtaacaaccagctaaccaacgacgcgcagccgacgctgaacggcactaccgaagccaacgccacggtcaacatctatgacaatggcaccttcgtcaccagcgtcaccgccgacggcagcggtaactggaactacaccccgccgaccgcgctggcacaaggctcgcactcgttcaccatcaccgcgaccgacgtcgccggtaacaccagcggcatgtcagcagcggcagccattatcgttgataccgtgccgccgccggttccgaccggcctgacggtgaacgccaacggtacgctgctcaccggggtggcggagccgaacagcaccgtcacaattacgtcgagcaccgggacggtacttggcaccgcgacggcgaacggctctggtaacttcagctttacgctgagcccacctcagataagcggacaaacgctgctggtcaccactcaggatgccgcaggcaacgtcggcgcagcaggcaacgtgctggcaccgttcaccggcgccccaccagcaccgctgcttatcagtgtaattgacgacgtcggcccgatcctcggcacggtggccgccggagccagcaccaacgatacccgtccgaccatcaccggtacggcgcaggcaaacgccaccgtcaacgtcttcaacaatggcgtactgatgggcagcactaccgccgacggcaacggcaactggagcttcaccccaaccaacgctatcagcgaaggggcgcatgcctttactgcaaccgcgaccaacgtcaacggtacaggggttctgtccacctcctacagcgttgttgtcgacaccacccctccgggggcaccgacggcgcttatcagcaccgacggcggcaccattaccggggtcgcggaagcaggcagtacggtcactatcaccctgccgggtggaggcacggttacggctatcgccaacagcagcggggtgtacagcgtcaccctgccggtgcgccagattgaagggcaactgctctccgcgacggccaccgactcggcgggcaacacctcatcgccaacgtcgattaccgcaccggtactgccgctgctggcggaagacaacatcaccactctggcgctgcaaactaacgccaccgtcacgacccagcatctggacgactacggctttatgctggtgaacgcgctgggaacggtcgcgaacgtgctgggcaataataccgcctcggtaaacttcagcgtcgatccgaacggcagcggctccgtcaccattaacgccgccgccaccgggatcgtgttgtcgctgctcagtaccatggagattgtgatccagcgcttcgacaccggtctgaacgcctgggtcacggtggttgatacctcgaatccgcagttcgccaacctgctgaccatcggctccagcggcgtgacgctcaactacggcggtttaaccggcggcgactatcgggtggtgacctacaacaccaacctgctggccaccgggtcctataccagcctcgatgtcgcactggtgaaaaccagcgccgggaccatcaccggtaacacctcggaaacggggaacgtgatcaccgacaccgacccgaccaacggccaggacaacgcgccgtcaggtaccgtggtgacctccattaccgatgccaacggcaatactatcgccgtgccggtcggcgggattgatgttcagggtcaatacggcactctgcatatcaaccagaacggcagctacacctacaccctgactaacacctcggcgtcggtgtatgggcgtacggaaagtttcacctacaccctcacccacggcaccgatcactcttcggcgaagctggtggtttcccttggccagagcccggcggcgagcaccgtcacggcggtcgatgacacggcatcgctgacctacagcaccaccgtcgcgtcggtcgataacggtacctcacaccaggcgggcttcacgcttgccaacgtcgggctgggtaacgtgctggacgtgagcctggtcaacggcttaaccgacccagtgaagttcaacgttgatgccggtgccacccgtactctgacggtacaggccagcgttctcggggtgacggtcggcgggttcgatctgtacgtctaccgcttcaacccggccattcagcagtacgagcagtatcgcgtacagccgaactggataaccgcgctgctcagcggtaactccacggcctacaccatcacgctgccgggcggggactatctgttcatgctcctcgcctccggcgggctggcgctggccaccagctacaccatgaatattcaggcggatcacacctacgcggtggacagcactaccgcctccaccaacgggaatattctggcgaacgactcggcgccggcaaataccgtggtgacggaggtgaacggtgtggcgatcaacagcaccggcaccaccaccatcaccggtcagtacggaacattgaccatcgatgcgcagggccactacacctacaccctgaacagcggcgtgggcgccgacaccatcagtacgccggacagcttcgtctataccgtccgcgcgccgaacggtgatgtcagcagtgcgtcgctgaatatcaccgcaacgccgctggcgctggatgcggtcaacgacgtcagcagccagattgcagtcaccaccctgcaggacacctcgcagccgttcaccgacagcagcgtcggcaacgccagctggagtgcgcaactgctttccccgacctcgcagaacgggaccgggacggtcgaagtggcggcgggtacggcgatcaccaacgttatcctgcactttaacgttgcgtcgctgctctcgctcggcgggctgaccgtcacctgggcgctgtacgacaacaacaacgttcaggtggctcacgggtcgttcaacggcgggctgctgctcggcggcaatatcgatatcgccctcagcggtgtcgaactgcacgccgggaactatcgccttgactataccggcagcgtgggcgcgctgggtctggggaatatcaccgtcacgccaaccgttcacggcaccaccgtggcgctggcgaactatgaaacctcaggagtgaacagcgtcaccggcaatatttatgccgacgaccatatcagcagcgtgcataccctgctgacggtgaacggcgcgggcggcagcactgccactctcgatccgtctaccagcagcaccggcaccgccaccatcaacggccagtacggcacgctgaccatgggcgttgacgggcattacacctacacgcttaacagtggggtttccctctcggcgatgacgaccaaggagacgttcacctacacgattaacgaccagagcggccacaccagtaccgccaccctgacgattgatatgaatccgcaggtggtgagtaccgaccaggccgaccgtctggtgggcagcgtgtacggcgatacgttgatttaccacctcctgagcgccaacgacgcgacgggcggcaacggcaccgcggatacctggagcaacttctcgctggcgcagggcgacaagatagacgtcagcgcactgctggtcggctgggacgggcagaactcatcgctcggcaactatctcaccgtcaccagcagcgggaacaacaccgtgatctccatcgaccgtgacggtacgggcaccacgtaccactccactaaccttgtgaccctggagaacgttcacaccacgctcgatgagctggtacagcagaaccatattgtcggataa

SEQ ID NO: 402464 - DNA, 1407 bp, Salmonella enterica
atgggaaaattacagcccgtgacctggtggctggcgtgttgcctgtgttcagcccaggtctacgccgaagacgcaccgcagttcatcaccactcaggggctcgccgaagagcaggagctccccgcactggacggcagcgcctcgctgaaactggcggccgctgcgcccggcacgctgacgctcaacgacgcggtcacccgcgccgtaatgtggcatccgaccattcgtgaagccatcggcaaactctggtcgcaatccgagcaggttaacgtcgccaaatcgaagtactatccgcaggtcagcgccggaatgaacaacggctactccaatacctacaccgacggcggcttcagcccgtcgctggtactctcgctctcgcaaatgctctatgacttcggcaaggtcgacagccaggtgcgcgcacagagcgcgggcgtcgcgcaggagcaggccaacgtgctggtgagcattgataacgttagtcacgacaccgccatagccatggtgcaggtgcagacctggcagcagatggtggacatcgccaaagagcagcttgaggcgctgagcgccatcggcaaactgacccagcagcgtaatgacgaaggggccacgtcgctttcggacgtggtgcaaaccgatgcgcgtattgaatctgcccgctcacagctgatccagtatcagtcgagcctcgacagtgcccaggccacgctgatgagctggctcggctgggataacctgaacggcatcagcaacgacttcccggataaattcaataaaagctgcgatatcgccaaaccggacgaccggctggtgcccgcggtgctggcttcctgggcgcaggcaaacgtcgccaaagccaacctcgattacgccaacgcgcagatgacgccgaccatctcgctggagccgcaggtgcagcactatctcaacgacaaatacccgagccacgacgtgctcgaccgcacccagtactccacctgggtaaaagtggagatgccgatttaccagggcggcggcttaaccgcccggcgcaacgccgccagccacgcgctggaagcggcgcagtccggtattcagcgcacccgcctcgacgtgcggcagaagctggcggaagcccgcagccaggcgctgagcctgtatggcgccatgcaggtgctgcagcgccaggaaaccctcagcgaacagacccgtgagctgtaccagcagcagtacctcgacctcggctcccgcccgctgctcgacgtgctgaacgcggaacaggaggtgtaccaggcccgcttcgcccgccagcagaccgagagccagttgcggcaactgcagatcaactgcatgtacaacaccggccagctgcgccgcgcctttagtcttgagaatcgcagcattcagtcagtggagatccagccatga

SEQ ID NO: 402465 - DNA, 2187 bp, Salmonella enterica
atgacccacaccgccccgcctgtagaagagttactcaccgaacgcgccctcagcaactgggcgctggccatcagccatattgccgggcactatcgcgttgcctgctcgccgggaaccttacaggccaacgcgccgtggtttaaagataaaagtatggtttccgcgctgacgcagcttgcgcgccaggccggactgtcatttaagttactcaccccatcgcaggaggcgatagcccactggcgtctgccggtgatcgtcagcctcaatgacggtaaactggcggtgatcgagcattttgacggcgagaacaccgtcgatatcagccttattgatggcgatcgccagactaaccgcgtggcatacgacgagctgttatcggagctccgttttatcgccgccctgcgtcccctttcggcgctgaaggacagccgcgtggatgcctacgtcacccgcttcagccccgactggctgaaaacgctggtgatgatggacgttcgcccctacggcccggtgatgttcgccgccctgctggtgaacgtgctgtcgctctccgggattatattctcgatgcaggtctatgaccgggtgatcccggcgcagtcttaccccacgctgtacgtgctggcaaccggggtgctggttgccaccgtgttcggctttctgctcaaaattgcccgcagccatatcatggacgtgcttggcaaacgcgcggacatgcgcatctctgatcgggtattcagccacgccctgcgcctgcgcaacagcgcggtgccgctctccaccggcagctttatttcgcaattgcgcgagctggagcaggtgcgcgagatgatcacctcctccaccatctccaccatcgtcgatctgccgttctttttcctcttcatcgtggtgctggcgatcatcgcgccgccgctggcgtggatagcccccgtggccgctattctgatggtgctgccggggctgatgctgcaaaaacgcctggcgatgctggccaaccaggcggcacatgaatctaccctgcgcaacgcggtgctggtggagagcgtgcagggcctggaggacatcaagctgatgcaggccgagaaccgctttctgcagcagtggaacagctatattcgcatcaccgccgaatccggcctgcgtacccgcgagctgacccaggggcttatcagttggggaatgaccattcagagcctggtctacacggcggttatcctcttcggcgcaccgatggtgatcgagggcgagctgaccaccggttcggtggtggcggcctcgatgctggcctcaaggatgattgctccgatggcgaacctctgcggcgtgctggcccgctggcagcaggtgaaagcggcgaaacaggggctcgacagcattatgcagctcccgaccgagacccagcgcgacgaacggatggtgcatcaggaaattttccacggccactacgtgattgagaacgcgcagttccgctaccacagcgaagatcagcgcgtcccgctgcggatcgcgcgtcttgaaattcaccccggcgagcgtatcgccctgctcgggcgcaacggcgcgggtaaatcgaccctgctgcaggcgctggcgggcggcgtggatgtgataagcggcgacgtgcgcctcgacaacctcagcatggagcagatagacgcggcggatttacgccgcaacatcggcctgctcagccagaacgcccggctctttttcggcaccctgcgtgagaacctgaccctcggcgcgccgcacgccaccgacgatgccattttcgaagtgctggaaatcagcggcggcggcgatttcgtcaaacggctggcgaaggggctcgaccatccgattatggagggcggtgccgggctttccggcggccagcgtcagtcaattctgctggcgcggatgctgctgcgctcgccgaatatcgtcctgctcgacgaacccaccgcctcgctcgatgaccacaccgaacgcgattttattcaacgtctgcaccagtggctgggtaaccggacgctgattgtcgccacccaccgggtgccggtgctggatctggtggaacgcatcgtggtgctgaaagaaggacagctggtgatggacgcgccgaaagcacaggcgctgaacaacggccgcacggcggcgcaggccaacgcacgggagtggaaaaatgaaaaccagtccgcatga

SEQ ID NO: 402466 - DNA, 1191 bp, Salmonella enterica
atgaaaaccagtccgcatgatgccgcgatggaagacccggacatccgccgggagagcgaatactccggtgccagccgcattattatgctgagcggcctgatgtttttgattttcttcgtctgggcgtggtttggcaccctggatgaggtctctaccggcaccggcaaagtggtgcccagctcgcgcgaacaggtgctgcaatcgcttgacggcggtatcgtggccgagctgaaagtgcgcgaaggcgacatcgtgcaggcgggggaaatcgtcgcccgcctcgacccgacgcgttctgaatcaaacgtgggcgaaagtgccgcgcgctatcgcgcctcgctcgcctccagcgcccgcctctccgccgaggtgaacgatgctccgctggtcttcccgccgtcgctgaaggcgtggccggacttagtggcctctgagacccggctgtataaaacccgccgcgcccagctcgccgactccgagtcagaactgcgcgacgcgctggtgtcggtcaacaaagagctcgccatcacccagcgtcttgagaaaagcggtgccgcaagccacgtggaggtgctgcgcctgcagcgccagaaaagcgatttaggcctcaaaattaccgacctgcgttcgcagtattacgtgcaggctcgcgaggagctgtcaaaggccaacgcggaggtcgacatgctctcggcggtgttgaaagggcgtgaagattcggtgacccgcctgacggtacgctcgccgatgcgcgggatcgtgaagaatatccaggttaccaccatcggcggcgttattccgccgaacggcgagatgatggagattgtgcccatcgacgaccggctgctgattgaggcgcgcctctcgccgcgcgatatcgccttcatccaccccggacagcgggcactagtgaagataaccgcctatgactactcgatttacggtggactggagggcgaagtagagaccatctcgccggataccattcaggacaaagtgaagcccgaagtggtgttctaccgggtgttcattcgcacccatcaggatttcttgctgaacaaggccgggcgtaagttttccatcgtgccggggatgattgccaccgtagatatcaagaccggtgaaaaaaccgtcgccgagtacctgattaaaccgttcaaccgcgcaaaagaagcgctacgtgagcgttaa

SEQ ID NO: 402467 - DNA, 495 bp, Salmonella enterica
gtgattgcatacagtgcttttactgtaaaaataaacagtatcaaggcgagagtagcgcgaagaggtgatgtatttttgttacccttaattacaaatagaaaaaccccagaccgtgaaatctggggttcttttaaagtgcacgtgcatttcacgtgcatatttttatcttttctcggtctgcctgctgtctggtcagtgtccgtaagtggctgttttttttattgccgctgtccggtttcagtcctatcaaaagtgggctggcgggggttgaacccgcgtccgaaattactacatcctcggtactacatgcttagtcagtctttacattcgcctggcacctgcgaacagacacgccactaccagactagcctgattagttttaacgcttccccccccaggcagggcatccacgcgatctcttttgggtttgacctctctttgatccccgtcttaagagcggaagctagtgagagaggactcagagcaggttattaa

SEQ ID NO: 402468 - DNA, 273 bp, Salmonella enterica
atgccccttctttttttgttgacgactacccactgcaaacacgaaaaaagacacccagcacttgatttaccaaataaagagcgccataaagtgccgattcctatccatgttgcaacagggcttcgaaagcggcccttctttttaccagatgaatcactgatgaaagctgttatacgtaccatcgtccttattccctccatgatcgcgttcacttttcagcgtgcggatgttgctaaccgaattgactatgttgaagaagattctgttttttaa

SEQ ID NO: 402469 - DNA, 180 bp, Salmonella enterica
atgcttaaaactgataactgcgccactgcaacgttttgccccgtgtaccactatgagatagacaatgacagccacctggaaaaagtagaacgcaggcggctaatgagtaaggtgatagtatttgcagtgattgagccaacacgttgtgggctgataactcctgcaatgattaaggagtga

SEQ ID NO: 402470 - DNA, 1053 bp, Salmonella enterica
atgaaaaaagtatcttgtgttgatttattttgtggtgcaggtgggttaacacatggtcttgtgcttgaaggagtacctgttgtcgcaggtattgatattgatcctgcctgcaagtttccctatgagactaataataaagcaaaatttattgagaaaagcgtaagcgattttacatcttcagacttgaatgagctctacgctgattcagatgtaaggattcttgctggctgcgcaccttgccaaccgttctcaagctatgcaaggcgttatgagcatggtggtaaggatggtaagtgggggctgttgtacgagttttctcgcttggctgaggaaactcgccctgatctgatcactatggagaatgtaccttccgttgcaagacatgaagttttcagcgactttgtcgataccttaaaacgtattggctatcacgtttggtttaatgtcgttgattgcactcactatgacgtcccccagatgcgtaagcgcatggtactgcttgcttctttacacggtgagataaaactcgccgagtcaacgtgtactcagccaattacagtgagacaagccataagcgatctgccagctttaaaagcaggcgaaactagtactggggataagctacatgtgacttcaacgttgtcggaaaaaaatctgcaacgtattaaagcttcaaaacccggtggaacgtggcgtgactggcctgaacatttagttgctgattgccatcgtacagatagaggaaaaacatactctagtgtctatggtcgaatggaatgggataaacctgctccgactatgactactcagtgttatggtttcgggaatggccgctttggtcacccagagcaagatcgtgcaatctcattgagagaagctgctattcttcagagttttccgcaggactacgtatttatccccgatgatagcaatgtcaatcttagagttctgggccgaatgattggaaatgcagttccggtaaagctgggtcaggcaatcgctcgcagtataaattcacaccttgacgatttgaacttggtcgcaacaaagtga

SEQ ID NO: 402471 - DNA, 153 bp, Salmonella enterica
atgaccgagacagaactgaaacacgttatagccatgcttctggaggatgcaaaacgcctgcaacaagtagaaccaaatgcaggcactgaggcccgcatatggttggctaataaaacacttaattcattcagagagttaagcggttttgcatga

SEQ ID NO: 402472 - DNA, 513 bp, Salmonella enterica
atgtctttaatcatacgacaagcaacattagccgattcaggattactaaatgagcttggctaccgcatctatcctgcatactttaagcatatgtggcagtcagaatcagaacttgataattatttggagggtgaatattcactacctgttattgagcggaatattaatgacgaaaacattagctggtatatagctgaaatcgatcagccgattggttttgccaagctgacctggcaagcaactatcccgaatacagacatcagcggtgttttacttgacaaactctaccttgccccaaccaaaactaatcagcattatggtcaactaatgttcagtaaaatcatagatcttgcccgaagtaatgggaaagattttttatggctggaggttcttgagcaaaatgaacgtgctcaaggattctataaaaaacagggaatgaaatacatcagcgacatcgttttcgaaacaaattcacagaagatcatactcaagttaatggggatgtgtgtataa

SEQ ID NO: 402473 - DNA, 528 bp, Salmonella enterica
atgagaaaagtaatttttattttatcactgatgcttctttctgttacttcattttctgcggaaactcgctcgtcaaaaaataatgaagagtgtcgttttattgccagtcaaataggcggtatttgtgagaatggttgggcttatgcaataaagaaagatgaattgcgcggagatcaagattatcgggcacttttattaaatgaaaaatcatctagattaaataggaatgatattgcagttttaatggtttacagtaaagataataaaaaaatgggtggagcctctctggatttaaataaagatacttttgtctgtgaagccaaaaaagtttgtaatggattaataagaattaatgatggtgagatttttgtattttactattttactttgtctgacaatgatcatgttgcatattttaaatctggtctatttgaaaatgctcataaaatagtaattgaaataccaataaaggaaaataaaaaacggcagtttgtattttacgcaggggatatcaaatggagtaattaa

SEQ ID NO: 402474 - DNA, 363 bp, Salmonella enterica
atgagattatttattgtatttatagtattaactagcttgtcaggttatgcatgtgccacgtcaacaattgacacatacggtaatactacctacttaggcgacgatgacggaaatacaaccacatataataattttggtggcactgtctacggcagtgacggctcaactatagataattttggtgggactacatatgtcaatgatggaaatggaaacaccactacttataacagatttggcaatacaacttatgggagtgacggttcaacaatcgatacttttggtaacaccacatatataaatgacggtcatggcaacataacgacatgtgataaatacggaaatacaacttactgtaattga

SEQ ID NO: 402475 - DNA, 288 bp, Salmonella enterica
atggccggacagcgctttccttgcggttcctaccccggacttgcacgggtttatcctggttgcgtgctgccggatctcaggggcgctttcattcgtggatgggacaacggacgtggtctggatccgggacgtgatattctcagttaccaggcagaccagagcaatatgaccgccggtggcggcggggcgttacatggtcaccatagcggcatgacttattactacccgggtgggcaggaagcacggcctaaaaacgtggcattcaactacatagtgaaagccggatga

SEQ ID NO: 402476 - DNA, 165 bp, Salmonella enterica
atgaaatcagtaaaatccaccatcagagtcgccggtctgtatctgccttccgtcgtcactgcggcttttgcgttccgggtatggtctgcgggggatatcatgcaggcggcactgctgaccaccctgttctgcattctggtccttctggctattgccatggaatga

SEQ ID NO: 402477 - DNA, 186 bp, Salmonella enterica
atggtgcatggctgcagcattactacgcccataatggacataatgccaaaagacaggactgggctaccagcattactgcaaatgttccgtgggttgttgattacaacacatccaaccctcagcgggatattgcgggtaatgccgctacagctactacagctaatgcagccaatacagctaatgtag

SEQ ID NO: 402478 - DNA, 576 bp, Salmonella enterica
atgactaatttagcaataaacccaacagtttgcactatcaacgtatcatttcacggatctgagctttacgttgttagccacaatggcgagccgtacacgccgatgaagccgattgttgaaggtatggggatggactggaaaagccagcatctgaagctcactcaacggtttgcaaaaggtgtggtggaaatcaccatacccaccgcaggcggtatgcaaaagatgatttgcctcgctctccgcaagctggctgcctggcttaacaccatcagccctaacaaagttcgcccggagattcgcgagcgcgttattcgttaccaggaggagtgcgacgatgttctctacgaatactggacgaaggggcaggtgaagaatccgcgtagcgtggagccagcaatcgacatgctgaatattgatctccatctccgcattcgcgatgggcaggttgagagcatcgagcgcattgggtcagacatgtttgtcggcaaagttgaacagatactaagcggcctgcgtaaaagcggctggatagtcattaagcgagacctactggcagagaaattagctacatggtga

SEQ ID NO: 402479 - DNA, 147 bp, Salmonella enterica
atggaagtaaaaacactacgaatgccacagtggttgattgaggctatggagtcgctggcgaaagaatcggatcggtctttcagcaaagaagccatgagagcaatgcgggagtatgtagagcgaaaagggattaaatacccagaatga

SEQ ID NO: 402480 - DNA, 249 bp, Salmonella enterica
atgtctgagagacggtacaaacacccgcaggttaatctgcgacttcctgatgagttaaaaaatcgagtggtagaattggcggaggcaaatggaagatccgctaatgcagagatggttgccgctattgagtcttgggttaataaacataaaaacatacagccactcgatttagcagctctagcacaacgattagccattcttgagaaagaagtagatctactcaaaaaggtgaatgataatgaatcatga

SEQ ID NO: 402481 - DNA, 693 bp, Salmonella enterica
atgaatcatgatctatctgtcccatctatgactgatgctgagatttacagttcttcgtcaacaaagcttgccctgctgatcccaaaaagcaggtctaaaaatcatgccttagcattaaaatttgcgtcattaatcgaatcctttcaaacatatgttgaaaatcaactatttactatttgttatgttgatttaaaagcgccccgagattgtgaagttgccgtcaaaatcattaacttagctgggaactggaaaggtttttctgcgatattcaaagggagaactttatctaattttcttttatcctataaagtattaccctgcataactgaagcgatgcagtgcgtaaacacaaaagctcattgctcaaaagttgtccgtggaaacgcgtatattaaaaactaccatttcgtagatcaccaaatttgcgattttgagttaatccttccctgtagaattgctggatacggtttttatgagccagcgttaaacattcctgtaaatgaacagtatcaggcttacgctgttgaaatggatgtccattggtgcccattctttgatatcaatgcccttgaaattttagatgttaagcctagccaaccatcagccaatagattttttttcgatattccgaccctcgacacccctgcaaaactgccagcagatgcttccaaaaatataaacaatggtgattaa

SEQ ID NO: 402482 - DNA, 363 bp, Salmonella enterica
atgaaaaaaataattccctcatgcattttccttatctcctttgccgtgcaagcaggcccctacgcagacattgcaaaagcaaaatttgaaagtgaagtgactcaagcactacagctcaccgacgtaagcacaactgaaaaaaacaaggcaatctctagacttccagaggtagaaaaaatgcttagagggataatacgcgatggcctaaaggaaaagaaatcctgtctgaagataaaaagagattttttaagcgaacaaaagaaaagcataacggcagagtcatcaaaaggtgaggactttgactcagcgctcattaacgcttcagctgactatattgcgactatgtgcctcgatatgaaatag

SEQ ID NO: 402483 - DNA, 336 bp, Salmonella enterica
atggataagataaccaacatcactgacgagcctattcagcggcatgttctgatttttgaccgtggtgaggccgtgatcactatgcgttacctgcccacggtagaaatgtggaaaatgcgcgttgagtacaacagtgatcacatcgaaggcgtgaagctgtccctcgggactctacattttcggcacaagaactggcctttcgatgttgcgttactttgcgctgacaattccggcattgacccatatcgggctgatgacttcgccagtggtcgcatcgaaatgtatctggtcacgccggaagagatgattgatattcgcgggggagacgtgccgtga

SEQ ID NO: 402484 - DNA, 1587 bp, Salmonella enterica
atggcgatagttaacgagcttattaccaaattcggctttatcggtgatctggcgccacaggaaaccttcaatgcgaatctgaaagcgtctattggtctgcttgccggtcttggggctgctatcgccggttcggctgcaggagttgctggctgggtgacgtcagtcagtcagtctattgatccgctggtccagttctctcgggaaacgggcgtggcgatcgagaccgttcagacactgggttacgcggcgtccgtaaatggttcaagtgttgatgcgttgcaggcttcgctcggtgagatgacaaaaagagtgggggagttcgtttccaccggagagggggaagcaaaagacgttgctgaaaggctgggccttcagttcaaggatatgaacgggcaggtaaaaaactccgatgtgatttttcgtgaactggccgacaaactgcacggcatgagccaggcagagaagttctccttactggacaagatgggcattgatcgttcaatggtgcagatgctgtcacttagccgcgaggaactggataaatcacttaaacaggcgcgcgactggggcgttgtaacaacagaacaggccgatgccgccgccgagtttaataattctcttaaagatcttcggatgggctacagctctgtatcgacgcaggtagccctaagttttcttcccatgttgaaagatgtaattgacagtatgagggactggcttcatgcaaatgccgatctgattaagaacggcctgcatcatttaggtgaaatcattttttcagtggcgggcatgatacgacgcttattgccgcttattacattggctgttgctgggtttaccatctggaaaattgcgaccttcgggttgggtaacgccttaaaacttgcattttcccctgtgctcctgatcactgcagcaatcgttgggatcttgcttgttatcgacgacctggtggtggcaatgcagggcggccaaagcgttattgctgatttctttaaagatacctgggggatcgatatcgtccccggtttgctggcgattaaagacgcggtcatggtggtggtcgattacatcatcgaggtattcaaacagggcattgagaatatcaaactgctttttagcgcgctgagtaagctggtcacgggggattttcagggggcatgggatgatgttgtgaaatccttcaccgacagtgttgcactgttgagaaagccgtttgatgagtttatgaagtgggttcttgggctgttcgcaaacctcggcgagaccatcaaaaatacgatcagcaacgctgcttcaaatgcctggaacgccacaaaatcattcttcggtttcggtgaggatgaacagcagcagggggtaaccggcggcggcaacggaggcattggacctggtggaatcccttacggcatgaatgctgcggttggcctgggcggtgctggtatgacaagtaactcaagcgtcagccagaataataatatcaacatttatacccctgatcccgttcttgcgggaaatacagcggcagatagtctgcagcaaggtatgaaagatgctaaccggatgttttcggggaatgggacataa

SEQ ID NO: 402485 - DNA, 333 bp, Salmonella enterica
atgacactgagaaccttcgtcaaaacgtcattatttctgaggtttatcctgacgcttattgtcatgctggtgatgtttacctgtctggctcttggactggctgatttaggcattcgatatcagtttgagctggttcagctacgtctgtggatgaaagaaacctggctgttgtggcttctgtggcggttgatgctttacagcgcgatggggtgggggatatggcgttgttaccattccccgaacgcttcgcaggcactgcgtcagagtctggtacggattgctgttgtttctgttggttttgccgcgatatgcgaatattcagtgttgaggtag

SEQ ID NO: 402486 - DNA, 363 bp, Salmonella enterica
atgaacacacaagcacgcggtgccagagccgcaaaactttataaaaaaactaaatcgaaactgattgctctcgaccagttttgtgttcaaaaagccagaaagcacaagctgcccgcatgggctggccatcttcctgtaattactctcacgggtgggcttgttgctgcaatgatttttggctcgttgctctttgtcggcttaagtttgtgcgtattcgcacttatcctgctttctccggtaatatcaaaaagcctcgactttgcgccctcacacaaagcgagttatgaaagattttcttgggagaaaaacaactacgaaaagttttcttgggagcaagaaatgtatgaacgggaaaatgattag

SEQ ID NO: 402487 - DNA, 906 bp, Salmonella enterica
atggaaaagatctgggtacttggtgatgcggttgtggatcttctgccgggtgaggagggcagattactgcaatgccctgggggcgcgccggccaatgtcgcagtaggcattgcccgcctcggtggtaaaagtgcatttattggcagggtgggcgacgatccattcggcaggtttatgcaaaagacacttgcaaaagaacaagtcgacatccaatggatgcggcgcgacccgttacatcgcacgtcaacggtggtggttgacctggacgaacagggagaacgttcgtttacatttatggtacagccaagcgccgatctgttcctgacattggatgatctcccgacatttcaggccggagaatggctgcatgtctgttcaatagccctgagtgctgagccctgccgttccgccacttttcaggcgatggagaccataagaaagtccggtggttttgtcagttttgaccccaatattcgcgccgatctctggcgtgataaggacgaactccgaggttgtcttgagcaggcactgcacaatgccgacgttgtgaaactctctgtcgaagaacttgagttcttagccggtacccgtcaggtaaaagaagggctgaccgtgctcatggataactgtccggccagtctggtgctggtgactcagggaaaagagggcgtgatggtctggcatgaaggcgtggtgacccactatccggctgtgccagtggaatgcgttgacacgaccggagcgggcgatgcgttcgtggcagggcttctctacggactggcctcatcgggctctgttgccaacaacgatcttgcctcaattctgggtatagctcagcgttgtggtgcattagccacaacggccaaaggggcgatgaccgcgctaccgtatctccatgaactgtaa

SEQ ID NO: 402488 - DNA, 363 bp, Salmonella enterica
atgctcatcagggcgatagaaggcgtgtaccttaccgtaaccgtcgaacgattcgcccgccagctcctgcgcctcggcttgcgacttcactacccgcacattcagggtgttatccttgatgcggtccattacgccacgcgcgacggcttttaccttcgcaacggagctgcctttggcttccttgctgtggttggtatcggaaatgaagttaccttccggcgtacgcttcacacccttacgggaataaaacgccacgcctttatcagtttcgcgggttttcagggtgctgaacaggtgatcgaacgcctggcgaataccgccgtccaattcttcgttcgtcggataggcgtaggtatcaggtga

SEQ ID NO: 402489 - DNA, 807 bp, Salmonella enterica
gtggtcatcggccttacggatattcaccaggaagtcattctcaacgccagcggctttggccttatcctgcacataacgctcaaaggcacgcgccgccatctcaatatcagtggaccagtacggcttgctgcgaacatcatcaagacgcagggaacgctcaggcagggagctttccttaatcgccttcatcacgcccttaaaggcgtcataaacttcctgacgcaccggatgttcaatagtgacatacgtattaccatccctctgtcttaccttgcgatggcgctcagtcatatactcaccaccggaaccaacatcactatccttagcgacatcatactgaccaaaataattatccagcgcgtggaaccactcatgcgcaagagagccagccccgttacctttggtgaggttaatcgccaccgcgcccggttcatagtgtgcggcggcggcatttttgccccccttgccccgcgcaccaaatgccaggccaagacgaccattcagggaaagcgcctttgccggaaccttcagcacgtccgccatatccatcagcgaatcgtatgcgcgattaaggtcagactgacggcgcggcccttccacgtagttaccaaactgtacgccacgaaaaccaaaggcatcactgaacttttctggcgtaacgttttgctcaggctccagcgtggctgcaactcgttctgctatagcaattccgcgttcacgttcattggcaaaacgagaatccatcagacggttcaaagcaaatgcatcatttgtattcatcctcgccgcgattttgcgtttaagtga

SEQ ID NO: 402490 - DNA, 264 bp, Salmonella enterica
atgcatttcaccgccacgacgaacgggcccgttacggtcaaggttggaagcattacgctgttcctcgcgggactgttcacgcaacttgttcagcttttccagcaactcagcacgcctggttttcgcataatcacgggcttctgcaactgttttaaaaccaccctgaagcgaggttttgtttttaccgtacgcaatgaagatttccccggtacggcgattctggtaaatatccagtttcgttttgctgtcggctggctctggtga

SEQ ID NO: 402491 - DNA, 582 bp, Salmonella enterica
gtggtagaagatgtcaccattcctgcctggaacaaatcaggcgttttttcttcaacagctttagctgccagaatgcccgccttttctggtgccagtccggacgcaataaatttcttctcaagtccactggtcaacgcttttttcagcgcaacttctccgacctttttagtgagccctcccgccgccagatcgggtaacaaactgccaatcaggtttgtaccctttgccacccatacagcagaatcttcccagccttcgctcatcggggtattcagcgcccgctgtgcgcccggcgacatcttgtcgtatgaccagtctttggtagcaccagcaacatcgctcacacccttcccggtaactttaagtcctttacctatcgcgtcagttaccgcgttcttaccatcagggagcgcatcaatggtttcatcaacgcttttacccgtacccggaatgatgtcatttatagtggaaacaccaggcgaccatagtttaagtaattcattctcgattctggcggcggtttttaccgggctgttaaccagcccgtcacccagacctcttgccagttcacctgtaccctga

SEQ ID NO: 402492 - DNA, 840 bp, Salmonella enterica
atgtgggcgcagaaagccagtgctgacggaataacagcaggtattggtatcgttgccgggaaagacgcggcaggtaatccgattagccaggtggcagtagcttcatcgcagttttttgtttttgacccgaacaattctggcaatacggcgtatccgtttgcagtgtcgggcggtaaagtggtgatccagaaagcggttatttatgacgcagtggttcagactctcgctgcacagcgaattgtggctgatgaagttaaggttggcgcaacgctgacggcaccctatatcagaagtggaactatcagtaacggtaattttactgttgactcaaacggcaacatgaatgccgttaatgcgaacctgaacaatgttacctcgcgaggaggtactttttacgatctgtatgcggtcagggggacaatgaacaatgttcacatcctggagaactgtcagattgatggtcgcctgagtgcggctcagattgacggggatattgcgaagacgtacgttctggcacataacagtgcgtatatcccgcctcaggttgtggcgatgaatcttgttgttatggctactgaagttcaaagtcgaggtaaacatggcagcatcaactggaaagatgcggatttctatttcagcggagaccttcaggccccagtctcatcgtccgagatgagtaattttatatcgggaagttacagtactactggcggggggggttccacatcaactaatactttggatggtcgtttgatggttaaagtttactccctgccagcgggcgtatccacaacaataagctgtagccggtttgcagtagtctggatgtcgaaggcttga

SEQ ID NO: 402493 - DNA, 216 bp, Salmonella enterica
atgcccttacataccgtataccatcacctggcgtttatggtttggggattcaccagaggctttactgaaagttacatcgatacagtggtcaacgaaaacaccagtaaggtcagactggatattgcgtgcaccatgctgaacaacggattcgatagcaataccgtcatgaaaatgaccggtctgactgaagacgacctgacgcagatccgccactaa

SEQ ID NO: 402494 - DNA, 327 bp, Salmonella enterica
atgagcgtcgtcattcagtacacgaaaacggttaaggtctgcattgaagatatagccagtcatttacggcgcatcgaggtagagccaaaggacgtgatctccgccattattgagcactttgaaaaaagggtgagtgatttcccactagggtgtcaggtctgccctgaattgctcaaaattggttgtgcaaaataccgggagtgcaacacaccggatggttatagggtgctatattctgtcgatggcaaagaaataaccgcacatgccatcctttctcataagcaggatattaagcaattattatttaaacgtctgattagcgtctga

SEQ ID NO: 402495 - DNA, 228 bp, Salmonella enterica
atgaaagttgaaaccattagctacgtgaagaaaaatgccgccacgctcgatcttgcagaacctattctggtcacacagaacggcgttccagcctatgtgattgagtcctacgatgcgcagcaggagcgagaaagcgccatagcacttcttaagctgttaactatttcagagaaagacatggctgacggcaacgtattcagcagagaacaactgttggcgaacctgtaa

SEQ ID NO: 402496 - DNA, 807 bp, Salmonella enterica
atggtgattacaatgaagaaaccttacatcatttctttcgcaaacagtaaaggcggtgtggctaaaacgacgagctgcatgtctgttggttgttcattagctctggctggttataaaactctgctgatagatctagatcatcaggggaatctaagtgatgacttgggacgtggtgatgaggattacaccatcaccgatctttttgctgacccaaaatttgatatcaacaagctgatttattcagcgatggatggtgatgatataattgctaacttagacatcattccagctgatataacccttgctgttgaagctagaagcgcagaaaggtttcgccatagacttagcattcttgaagaaggtttgaataaggtaaaaaattgctacgattttatcctcatcgaccttcgtcctgctattgatttgagtatagaaaatgccctgctgatcactgataaaattgttatccctgttgatatggataaacgcgcaattaaaggcattaaagacctgtttcaggtggtacaggaggtgcgcagaaatgaaccttttgtatatacacttgtaaagacaaaggttaatgaatctcactctaaaatgaagagatcaattgagggattaatcgatgaagccggatacgttgtagcaaagaccgaaatacgtcagagcgaactttttaaacaggcgaccgatgttcatcgccctgtaatgttcttcgcaagaaatgagcgcccttacagagactataaggctttcactcaagaactccttgagcaaattaaggaggccgaaattggcaagaagtga

SEQ ID NO: 402497 - DNA, 177 bp, Salmonella enterica
atgaacctgcgacttacaggtttggatgatgatgctctttcaatgctagttgataaaatgcaggagaagcttccccaaaaaaacattacccgctcgagagttttacgggccgcttgttatttggacgatgataaaacgctacaaaagttggctaatttattaattaaaaatacataa

SEQ ID NO: 402498 - DNA, 1260 bp, Salmonella enterica
atgttcctgctctgcgatgtaaatgcgatgtacgccagctgcgagcaactgtttaggcccgacttgaagggaaaaccggtgatcgtgcttagcaacaacgacggagcgattgtcgcagctaacagagaggcgaaagcaatcggcatcaaacgaggcgccccattctttcaagctaaggcattgattcaacagcatcagatagcctgtttcagttcgaattacgcgttatatggcgacatcagccacaggataatgtcgatattagagtcactggcaccgtcgctggaaatttatagcatcgatgaggcatttctacagatagccggcatcgatgccagcgagccgtatttagattatggacgacgagttcgggcgaccgtagcccaacgaacgggcctaacctgtggcattggtatcgcacaaacgcggacgttggccaagttagccaaccacgccgcaaagacctggccagcaacgggtggcgtcgtcgatttaagcgatcgcatacgtcagcgcaaactcatggcgctgttgccggtcgacgaggtatggggaattggccgcaagctgtcagcaaaacttcgcttaatgggtatcgaaacggtcctgcagctggctgacgctaacttgcagttgatgaagaaaacattcggcgtcgttgttgagagaaccatcagagagttaaacggcataccctgtatatcgattgaagcgctgccggcaaaacagcaaatcatctgcagccgtagttttggagaacgcatcacgcagctgcaggacatgaaacaagcgatatgtcagtacgccgaacgtgctgctgaaaagctgcgtgaggaaaagcagtattgccgccacgttagtgtgtttctgcgtaccagcccctatgccaacgagccgcagtacggcaacagtgctaatcagatcatgatgttggcgacacaggatacgcgcgatattgtcgctgcggcgatgaaagcgctgtctcaaatctggcgggatggatatcgctatcagaaagcggggatcatgctcaatgatttctgcagtcgtccgggacaaatagacatgtttgatgagacgccgccgcgcgcgaacagtgaacaactgatgaaagttgtcgatcgcattaacagcacaggtgtcggaaaagtatggtttggcggacagggtattgagaaagtctggcggatgaaaagaaaaatgctgtcgccagcatatacaactcgctggaatgacatccccgttgctaaggtattgtaa

SEQ ID NO: 402499 - DNA, 426 bp, Salmonella enterica
atgaaagcagaaatcatcacggccattacaacctcacgccttcaactgccacttttcagcgatacctgcgcggccggttttccttctccggctcaggactacattgaagcgcagctcgatttaaatgatttctgtatccgtcacccttcagcgacatacttcgttcgtgcgcaaggtgaatcaatggttgaagcgggaattttgtcaggcgatttattggtggtagaccgcgccctgacccctgcacatggggacaccgtcatcgcagccatcgatggagaattcacggttaagcggctttgcacacatccgcagctctgcttgcagccgatgaacagtgcttacagcccaatatttgtcgatcctgacgagttggatatctttggggtagtcacgcacgcaattcatacgctggacaaaggttaa

SEQ ID NO: 402500 - DNA, 468 bp, Salmonella enterica
atgttgaaagtgacctgtattcatcttgataacggtgagtttgcgctctatctcaatggccattatttagccagtgaggacggtagtggtgaaaagttatctctgtgcgatgtgctggatagtttgtctctggttcctgatgtgataacggaaaacgtggagcgcaatataccagagagtgaggagtggagctggaacgatgtggccgacagcgtttttcctctgcctgatgtgaccgctcggtcaatgactgtcgccgcgtttaaacgccgactttcacgctatcccgacgatgctctgtgctgtgggacgttctggctggctgacgactttttatccctcgacgacaccctcgatgagtccacgattgaatcggctatggagcgcgcgcaggacggtcatgatgccaatatcggttttaactgggattccctacagagtgcaattgatgaggtcaaatccgtatga

SEQ ID NO: 402501 - DNA, 162 bp, Salmonella enterica
atgaatacgtggcttgtcggtttcgccgttgaaatcagtggcgtggaaatgatggtttatcacatggtttcgtctgaaaacccggaaatggccgaggcgggagcgatgatgatggggcgcaactggtgggaggacgggaaaagccgttcacgaagggtatag

SEQ ID NO: 402502 - DNA, 681 bp, Salmonella enterica
atgtcacgatttgtacagggcaattgcgtagaaattatgtcgggctttccggataaagccgtcgattttattttgactgacccgccgtaccttgtcggctttcgcgaccgtcaaggccgcacgattgcgggcgacgtcacagatgaatggttacagccagcctgcaatgagatgtaccgcgtactcaaaaaagatgcgctcatggtcagtttctacggctggaaccgcgccgaccgctttattgccgcgtggaaagcggcggggtttagcatcgtggggcatttcgtttttactaaaacctacacgtcaaaatcggcctacgtcggctacacacatgaatgcgcctatattcttgcgaaaggccgaccacgcttgccccaacaccctttgccggatgtgcaaggctggaaatacagcggcaatcgacatcacccgacagagaagccgatcacgagcttacagccgattatagagtcgtttaccgcccctggcgcgattgtcttagacccctttgccggcagcggttcaacctgcgtcgccgccttacaggccggacgtcgttacatcggcatcgaactccttgagcagtaccacaaagcgggacgcgcacgtttggcgatggttcaacgcgccatgcaacaacccgccgccaatggcgactggctaccggaggccgcgtaa

SEQ ID NO: 402503 - DNA, 597 bp, Salmonella enterica
atgcgtaataaaataacactcgctatggcggttgccggtatgatgtgcggaacgtcggcttttgctgcagatgccggtggtggaaatataattttcagtggctctgttattgacgcgccatgctccattattccggaaagccagaatattcaggtaaacctcggccaagtgtctgcaaaatcactaaaaattgcagaagcaacttccagtccagtaccaattaccattaatctggcccaatgctcgtttgacccccttggtgcgaatccacaaccaggtgcaacgaattattcaaaagtggctgtagagtttgggaatgtccaggcacctgagactggtaacggaaccttgcatgatgggcaaataagaaatatggccacgtctggtgctgcaaccaaagtcgctattcagctccttaagagtgatggcagttcgccggtggatctgagcgttcctccaacaggcggtgatattcagctcgataccacctccggcactaatcagctcaaattcttcgcccgcatgatttctgttagcggtggagcgactccggggagtgtcggtgcaacagttacctataagctgaaatatttctga

SEQ ID NO: 402504 - DNA, 567 bp, Salmonella enterica
atggcggggctttttataccagaattcattattcgatttattatgaacgatatcacatggggtaaagaggcagaaaaatggcctcgtgattattctttatttgcccgcagaattcagtatatccgatttaattcggtcctagtcaggatttttagccagaatagtatgtcattgatatgttatatatctaaattcaatgtcaatgaaaatgcgatttatgtctcagatgagccaagaggtacgaaaaggatcaggattgaattgcagaacatttcaacattcgaagagctgccagataatgcagagcataaaatatcagttgtaaatggcgaaaaatttaatgagggatgtattcctgcatcgaaaaaggatttcttttcaatttgtaataaatgctttaagcaaggtgttgatatcagggtttatatgaccgatggtcgtattgtcgaagggaaaactacgggagtaaatgcctgtcaggtcggtgtgataatggacaatggtaaccatacccaaatcctttttgattgggtgtgcagaattacttcaagagattttatgggatga

SEQ ID NO: 402505 - DNA, 927 bp, Salmonella enterica
atgcgccagacgaatttcagtcatatcgatcttaacttgcttaaactgttcgatgcgttagtaaaagagcgcagcgttacccgagctggcttactacttgatctcagccaacctgcagctagtcgggcacttggtcgtttacgacgattgttaaatgatccgattgtggttcgctcatcaacgggactcgaactgacaccgcgagcctcagtcttagctgaacctatagccaggctacttgaagatgctcgttcaatcattgcgccggctgaatttgaaccagcgactgcaacagggtcttttaccattgctacagtggaccatttggcatcacttgttatgccaactctcatatcaaaactggctcagcaagcacctgggctaaatctggaaattcccccaccgttaggtagcaatgtaacgttgatcgcccagggaagcgcagacttagcaattggtgcctatgacaatttacccgcccgtttccatcaacgcttattatacgatgaagatatggtctgcctggtacgccgcgatcatccggtgatcgccgctgggttaacattagataactttattacgttgtcacatatacttgttattattaccggccagggaaaaagtttaattgatgttgctctggcaaaacatgggctaaccagacgtgtcgctatgcgattacctttttttcttgtcgcgcctcgactggttgcagaaagcgatatgattctgtcattgccgcgccgcctggcgacgcagtttattcagtccgaaatgattgaaattcttgagctcccgttaactatagatagtgtgtccatgaccatgatttggcatgaaagacaccatgaaaacccggcccatatctggctacgtcagcaagttctcgacagtgtcaggcacattaacgttaagtcaaaattgtaa

SEQ ID NO: 402506 - DNA, 723 bp, Salmonella enterica
  misc_feature (701)..(710): n is a, c, g, or t
atgaataataaacccttatatgttattaccggagcgaccggacgtacggggtctgctgcggctcagacgttattaaataacggagctcgcgtgcgggtgatggtacgcgatgagactaaggggcgttattgggccgatttaggtgccgaggtcgttatagccgatctaattgatgtcaaagcattaactgcggcattttccggtgcacagggggcctatatcgttagcccgtcgcattacaatttggaagaccttttcacgagagcagaagtaatagcggcagcaattgctgaatcagctattcaggctcagctccctaaactggttgctctatcttcgatcggggccgattgccttaacggagttggttggattgcaatgaatcgtatacttgaagagcatctcattaatacgaggttacccgttgcccttttacgtgcgtcctatttcatggaaaactggggttttgccattgagtcggtgaaaaataaaggaatattgcctagttttctggctccgcttgatagaaaaattcctatgatagcgaccgaggatattggtggaattggggctgaagtgctaggggaagagtggaatggggccagaacgattgagctggaaggaccgagtgaatattcgccaaacgatgtcgctgatgcttttggcaatgcgctgagtaaaccagtaaatgcggttgcagnnnnnnnnnngttcctgatgtag

SEQ ID NO: 402507 - DNA, 162 bp, Salmonella enterica
atggctcatcagggtttttctaatgcgggtttagccggttttattgagatgactcaggcgctgaattcgggacatattgcatttagaacaaactcgggattagagcatagaaaaggccgaattccccttgcaaaggttattaggttgatgatgaaactataa

SEQ ID NO: 402508 - DNA, 171 bp, Salmonella enterica
atggaaaactactttttaacgttatttaaagcctatcatcatataaatccgaccaccaaaacgtataactttaaacgatatgttttattaattaaatttataaccttcgcactaaaaattaaagacaacggtttcaatttgaactataatttctatcatgggcatttataa

SEQ ID NO: 402509 - DNA, 417 bp, Salmonella enterica
atgaatattattttattaaagattgaatcagctaaatatgttcaggagatagatttgaataatgaaacaggggaggtggttgtaaaatttagttgcgaaactccgcttaatgaaatggatacctgtgacatgtttaccttctattttggtgaggtttattacgacgtcagtgatgaagatttttttatccgaaaaggtcctgtgtcggaaatgggcggaaatatgaggttggcggcgtctgaaaaaagcatcgacctgaaagtcggggatattgtaacgatccccattattcctgagatcgaggatgaaattaaaaaggggatatataatcctgataaagacacaagcataaagaaattagtagaaagaagctttggtgatctatttgattccaatggcaatcttatttataagtaa

SEQ ID NO: 402510 - DNA, 162 bp, Salmonella enterica
atgattttctccggatgtaaaaaagcggagaaaaccatcaccgacatcggagggattttccccgatgggcaggatgtcaaacttgaaaaaacgagtatcgatgtacttaagttgaaggtatcttcatcacaaaatgttgcgacagccgtttccaaagattaa

SEQ ID NO: 402511 - DNA, 504 bp, Salmonella enterica
gtgtcctgtaatctgattattcccccgttgttactgagcgtgttgttgctgtccctgtctgcccgggcgggaatggtggtgtacaccgaccatgcccacccgccatccggggggaccggtgatacccgcgtggtctggctggatgcacctgaacaattacagcagtcgatgtttggcagtctgacatcagaccccaaagaagcagaacgccggacgcagaaggtgattcactctgccggctgggaaaagaaacagactgaactggctcaggcttaccgggggctgctgcaggcgtggtcgctggggctgcaaaaatatccggccgtggtgtctgacgaccagtacgtggtttatggcactgccgatgtggtggtggccgaaggactgttccacagtcaccggacgcgggagggggggggcgatgatacgccggagtctgtcatcccgtctgaagccggttacgctgggcctgatgctggtcaccggctctcctgctgtggctga

SEQ ID NO: 402512 - DNA, 249 bp, Salmonella enterica
atgtgccgtgaacagcgcctgatccagaagatagatatcaatcgccgtcgaaaaacccagttgtcgcgctttaagaatgatatttttgttatgcatattccggaaaagctgtcgctgtgccggacgcattctgaaagtaaccagttcgcctttttcgttctgtattttgtacagatgattaagacgccaccaggggttactcagttttgtcagaatgaacaggcgctgttccgcttcacccatatctga

SEQ ID NO: 402513 - DNA, 267 bp, Salmonella enterica
atggtgttgggtcacaaccggggtcacgacgccatccaggtcaaaggccggattatagcggataagaccgcgctgtacggcatgatgcatgattttggtcagatgctggcgtacccgtccggcgacatcatgcacgcccttatcatcgatagctttgactggctcggccagatgccgggtttcaatcctggtgatatccattgcaccaatatcaggaaagacatagcgcttaaggcatatcaggattttgtccacatgaccttctga

SEQ ID NO: 402514 - DNA, 498 bp, Salmonella enterica
atggtgttgggtcacaaccggggtcacgacgccatccagatcgtaagccggattatatttgataatcccctgctgcaccgcatgacgcatgattttggtcagatgctgacgcacccgaccggcaacgtcatgaacgcctttatcgtcgatggatttaacaagctgcgccagatggcgggtttcaacctctgcaatgtccattgtgccaatatcagggaagacgtagcgtttcaggcaggtgaggattttatcggcgtggtcagcagaccagagtttcaggcaactggtgtgccatgcggtggcgatgtactgaaaggtgcgtgtgccgtcaacggcggctttctccgccttgcggggcagggaagggcaaacaccggacaccagcagcttacgcgccgcatcgcgcttttcgcgggcttccgccagcgtaacctgcggataagggccaaaggccagacgattttccttaccgccgaagcgatagcggaaataccatag

SEQ ID NO: 402515 - DNA, 414 bp, Salmonella enterica
atggttggctataccgaattcgtcagtgttacgctttacggccacaccatcagccggcttatttcccagccaggcgcccggaaatatgttgcggtattccggcgtagacataatgcgctgaacatcggcgttcatatctccggcaaggtcagcagagtacgacagcgcacctacgcgcatttcaggatgttttccgaagaaatacgctggcaggtaacgcgagacaatatcggatttaccatgctgaggcggcgcaccgagaatcagtatcgggcgcatcccgttcatcatatccagcaggaactgatccagtgcatcgcaaaccgtctgcgagaacttgctggttatatattcggggttgatatactgaataaagtcgtgaaggctggaccgcgcattacgtcgcttgagtaa

SEQ ID NO: 402516 - DNA, 753 bp, Salmonella enterica
atgataaagaaaataacagtggcggctttggtcgcatcagtggcgggttttgctggctcagtgaatgccgccgcaggtgatgttaccgttacgtttggctacgctcagtcgtcggcgacagggcttaaaaaagacgtaaattattacggcggcgcggtcagggaaggtcagggtgtggcgggtgagattcgcggcattgcggcggcagaaggttttaccgtaccagcggaagatatcgtgtcgaaagcgggtaaatacagcgatccgaacggtatcagcgcaaaggtaagatacgagataaccgacgagtggggggttattggtgcgctgacgtacctgagttcatctacatccggcaggttgtattctcaaaatgcggtcggggataaggcggaaacgatttctggtcatggtgaggtcaattcaaaatattacagtattcaggcaggcccgacataccgcgtcaatgattatgtcagtggctatgtgatggccggactggcaacagcagaagttgatcgttattttaattacgagtaccagcagccgggcaaacagaaaaacgggaagccgtacccaagaaaatcggggactttattcagggataacgatagcaaaactcaactgacctacagcgcagggcttcagtttaatgtatataacggtctggtgctggatgttgcttatgaaggttctggttccggcgactggaaaaccagcggttttaacgttggtctgggttacaagttctga

SEQ ID NO: 402517 - DNA, 426 bp, Salmonella enterica
atgatgaaatacacaatacaaataacccgcgacactaccggctatatggctgtttgtcgggatatgcccaagtttctgacagccggggaaacagaagatgagatcatcgcactggcacccgaagcctttgaaatggccgtggagtgttacatggatgaaaatattcctgttcccctgccatctggtgatgtgatggaagcaggttgcgttatcgtcctttcagtgacgctttccgcaaaaatcgagttgtataacaccctgctggcttctcacatttcaaaatcagaactggcacggcgtatgggtatccccaaccagaacataaagaaattactcagtccctccacaaaatcacgacttgacactatggagtctgcttttgcggcgctgggtaaacgcctggacatctcggtaagtgctgcataa

SEQ ID NO: 402518 - DNA, 381 bp, Salmonella enterica
gtggtgctcctgattaccgcactggtggtgttcatcgcctttagctggatagtgcaaccggcaatgggctgtccggcgccgtctttgagtgtgcctgagattattggcatggaatttacccctgaattcaatcaatacttttttattgacgagcaatctaaaaagattgataatgtttacatcggacaagagaaggagaccatgacttacaacgaatactttaaatggttaaaaaagcagggtgttgagattgtcgatagtggaggacgacaccataaaaaaggcatcttcaacggtaaatcgattcccctgccctatcacggtgcgaaagaaattggtaacggactcgtgagaaggataaacaaggatttggggctgtaa

SEQ ID NO: 402519 - DNA, 534 bp, Salmonella enterica
atgaatattgcgctggtggaaaaatactggaagccactggcgctaatattgctggtggttggtgcgtttatcatcggaaatgtctggagcgatcggggctgggaacagaagtgggcagaacgtgacagcgctgaatcatcgcaaacagcgaacgcacagaccgctgcccgctggattgaacaagggcgcattattgcccgtgatgaggctgtaaaagatgcacaagcacaagccgctaaatcagctgccactgctgctggtctgtctgccactgttagccagctgcgcaccgaagcaacaaagcttgccgcccgcctggacgccgcaaagcacaccgcaaatcttgccgctgccgtcagaagcaagacagccggagccgacgccgcagtgctcgccgacatgctcggacgccttgcagaagaagctcgatattatgctgagcgatctgacgaaagctaccgcgctggaatgacgtgtgagcggatttacgactcggttagagagtcaaataacaatcctatagcctcgcaatag

SEQ ID NO: 402520 - DNA, 729 bp, Salmonella enterica
atgatagatattgttggaggtctagctcttgcaggaattagaccctttgctcacacgttttccagttttcttattgaacgaccttttgaacaaataaagatcgctattaatcaccaaaaagttggtgcagttctagttagtgcaggtgcatcatatgatttatctgttgatggaagaactcaccaagcacctgctgatattgctttattgaacactctagaaaactggaagatagtaattccaggtaatgcggaagaagctgattatgcattacgtatggctgcaaatgattctggtttatattatattcgtctttctacagaaacaaataaagaaaccttttggactgggagcgataaatttaatatattaaaggttggtaagaaagggacaataattgctgttggtccagtagctgaaaaggttttggctgctacacaacatcttgatttaactgtgctttactctgctataataagacctttcgatagtgaaactttaagagatacgctttcagtacccgatattgcaatagttgagccttatctcgaaggaacctcaagccattttatctcatcaactttatctgatatacctcaccgtattttatcaataggtgtcaaaattgatgaacttcgaaaatttggcacgcctgaagaacatattaaagctcatggtcttgatgttgaaagtataaaaacaaaactgcatcaattttacaagaaatga

SEQ ID NO: 402521 - DNA, 615 bp, Salmonella enterica
atgactgaaatactggaagcctatctgaataggatttatgtaaaaaaatattcaatcataataatgaatacacttaaggatgtctgtattatatccaacttaccaactgaatgggagcatgattttattaaaagaaagcttcatttaaatagtgaaatcatgttaaaagcaaaaaacaaaataaccccatttaagtgggtggcacaaaatatggataatgaaaacataagattcttatcaaaaaaatatgatatacattgtggtatttcatttgtcataaaaataagtcatgactttataattcttaccttatattttgatgaagatgacaataatttcttgagattatatgatgataataaaaaagaaatactgtttgatatattgagtatttttgagagtaactatagctcggaagtgggttgtagtttcacgttaagggaaatagaagttcttaatttattgaaaataggaaagacatattttgaaattgctatgattttaggtataaaagaaagaacagtcagatttcacatctctaatatattgaataagctggatgttacatctgttcgttatgctatatttaaagctgtagctggaggggttatataa

SEQ ID NO: 402522 - DNA, 456 bp, Salmonella enterica
atgaataatccgtcagttattccggccttcgacttccgcgaaatggtgcaagccaaaaacggagaggtcgtcaccacttccagaaaagttgccaagtacttcggcaagcgacacggcgatgtgctcaggaaaatcgagcaggttaaggttcgcccgatgtacagcctgacaaaagatggctggatcatggttgtgatgggattcactgggagagctgctgcagcaatcaaagagagttatatctcagcattcaactggatgtccgaacaacttagccgacgtatggcgatgggcgaagaaatgcagcaccgctatgccatcaaagaaacacgctcgaagctgaaaggcacgatcggcagtcgtttgatgaacgaacgcaagaaggaaaagcgcgtcctggcactggagcatgagcacatcatgcaggtgacgcagccagaattgttgattggctga

SEQ ID NO: 402523 - DNA, 372 bp, Salmonella enterica
atggcaaaaacaaaatggcctaagttaccgcgctttttcgttccgttgtttcactgtgcgaatgtgtatctatgtcggtcaaaagatgaatggcagcagtcggaatcggcaatcggagttcctccttcggacataagttttaataacggcgtgtgccgccattttttcgatgatgtaacaggtgaaaacgtttatctgattggtgttttcgataacagcgttagtacccttgttcatgaatgcgctcatgcaacgttttactgctgcaatgatgttggtgtgacaatcgacactggaacggcaaacgaaacctactgctatctgctcgacagaatgttttcggcatttttgccgtatataaaacaggattaa

SEQ ID NO: 402524 - DNA, 216 bp, Salmonella enterica
atggatatcttagtagaattattaacaaatacttttggcgtagacgaaagtgaaatcaatagatataaaacccttgaagatatgggactggattcaatatgtattgtagaacttcaagttgaaatagagagaaaattttcaaaaaaagatgggagcttaacgctaataaatacggatacattagataatatattaataaaattaaacaatatttaa

SEQ ID NO: 402525 - DNA, 1422 bp, Salmonella enterica
atgattaatcaggaacagacctcgctttcatggctcgatgaggaaattaattcttctgtctttagcgatcgccgccatgccagtcgttttaaaagtctcatgcaaaaactctggcggggaatgggcaacagcctcccttttgcctgccaggataatgcagcaacaaaagccgcttaccggttcctttccagcaacaggattgatgagcagcacctgctgcagggacattccgaggctaccagtcaaaggatacatgcactgcaaggcgagaagattctactgcttcaggacaccacaacatttggctaccaccgggataaccctgatgctgtaggatttgcaggcaatcacaccgctggtctaatcaagacagggaatgatgcaggtgtcaattgtgggatcctgatgcattcgagcctggcagtgacgacatcagggctcccgctgggtctgaccgcggtgaaattctggacccggaaaaaattcaaaggtactaacgcacttaaaaggaaaattaatccgacccgcgttcccattgaagaaaaagaaagttatcgctggctggaaaatttacggcagtcgacggcattactgaaatgcccggaacgatgcgttcatattggtgaccgtgagagtgatatttacgaactgtattgcctggcatcggagttaaatacacattttctggtcagaacatgtgttaatcgtctggctgaaaatacgactatggaggaggaaatgaaaagtgtgacccccgaccatcaggggcctcatcggatctttcttcgacatggccaggaaggagtacgcgaaataatactaaatgtcagatggaaaacacttacattacatccaccgattggtaaggcaaagcagtatcccgatctacagctgacggcacttattgcgacagaagaatgtccggataatgataccagggttgagtggaagttgctgactgacctgccagtgacaaatctggctgaagccacggaaaagctggaatggtacagccaccgctggaaaatagagactttccataaggttatgaagtccggttgccaggctgaacgttccaggctgggttcggcggaacggctgacaaatttattatgttgttactgtatcctgagctggagaatattctggctgacaatgctaagtcgggaaatgcccacagcaccggcagaaattgctttcagcgacacagagctaaaaatactggacgcgatggtcaaagacacagcacaaatcatgtcatcacctccactggaaaaatatacgataaaacttgcccagttgggcggatacacggggaataaaaacaagtatccacccggtaatattgttatctggcgcggtttacgacgattaaacgaaatccaaattggatgggaaattgctaccgggagatgtgggtag

SEQ ID NO: 402526 - DNA, 273 bp, Salmonella enterica
atgcgacttatcttttttttaattagtttaatgcctttgacttcaagtgcatttgatatcgatgggatgattaaagtttctgatacagaagacttttttttagtcaatggaagtggcagtggtcgggaatatttgtatgttactctttctgaattaataagtgatcagaacaataaataccatgagataatatttgatgctggtaacgtgacaatctatatcattcttccggagctgacaggatttttggtgtcacatttacacccgatgtaa

SEQ ID NO: 402527 - DNA, 354 bp, Salmonella enterica
atgaaatcacaatccgccaaacgctatccccctgaactgcgtgagcgcgctgtcagaatgttgttggaacaccgtgatgagtatgactctgagccggatgccattcgtgccatctcgtcaaaaatcgggtgccattacgacaccctacgagcctggttacgtcagcataaaaatgatgtccgtggtggcgtcagccccgtcagcacagatgatggtggactgagcaccaatgagcgccagcgtctaaaagaactggagcgtgagaatcgggagctacgccgcagcaatgatatattgcgccaggcctcagcttattttgctcaggcggagctcgaccgccactggaaaaaataa

SEQ ID NO: 402528 - DNA, 1104 bp, Salmonella enterica
atgtgttttatcgaccacttcagtgcgctggatgacccacgaaaaaacattaatatcagatacgacttcctggacattgtttttcttaccgtttgtgctgtggtctctggcgctgaaggctggaaagatatcaagcagtttggcgatgagaaaatcgagtggttacgccagtacagggcttaccagcacggtatacccgtcgatgacacaatagcccgactcatcagggcgatagagccggaaaaaatgaaccaggcgtttattgactgggtgaatgaggttcgccaggaacaaggccatgagcagattgccattgatggcaagacattgcgccattcatatcaggacgattacggttcagccctgcacagtattaccgcatggagcaaacagcaggggctgatactggcccagacgaagtcactgggcaaaaagaacgagaatgcttcagtgctcgttttgctggatacactgaacattaatggtgcactaatcagcgttgatgccatgaacacgcagaaaaagatcgccgataaaatcattagccggggagcggactacgttctgtgtgtcaaaaataaccacagagagctacgaaacgaaattgccgcctacttcactaaaatcagccgtgataccccggaatacctggcccgatatgaagaaaccgatgcgggacatgggcgaacagaagtcaggcgttaccggcagctacgggtcaatgaatggatcaccgaaagtgcccactggcaggggttgcagacggtgacagaggttgagcgagaacggcataccagcaaaaccggggagccgtcacgagagaaacattattacatcagctcactgccaccggatgtgaagcgaatagccggggccatccgcagccactgggaagtggagaataaagtgcactgggtactggatgtgacgtttagcgaagatgacagccgcatcagagccggagacggagcggaaaatgtggctgtgataaggcggttcgcgctgaatctggcgaggctccatcctcaaaaagacagcatgcgcagcaagctaaaacaggctggctggagcgataagttcaggagcgaaattatctttggttaa

SEQ ID NO: 402529 - DNA, 231 bp, Salmonella enterica
atgcagtgcccgacagcattgacgttaaatgccatcatccatgagattaaagataaaatcatcattttctttttcataattcagcctgttacttctttcaaaaaatcaaccggcgattcagtattaagttttctggtatacaacagacatgaaaaaacacatgaaaataaagatgacccaaagaaaaaaaatagcattcctgtagagaaggcaaaatcagaattaaaataa

SEQ ID NO: 402530 - DNA, 162 bp, Salmonella enterica; identical to SEQ ID NO: 402510

SEQ ID NO: 402531 - DNA, 288 bp, Salmonella enterica
  misc_feature (274)..(283): n is a, c, g, or t
atggcattctatgctattctcgcccttaaaggattcatatctcctgaattacttgaaacatatggtgagtatgaaagctgcttaggatatcatcctgatagaacaaaactaaattgtgttgaaatctctagcggctctctcggtcatggtatgtcaatggcaattggatcaattttagctctaaaggcaaaaaaaatagttggtccaatacattgggtactaattggagatgctgaattagatgaaggttctaactttgaagcgatacaatatnnnnnnnnnntgtaa

SEQ ID NO: 402532 - DNA, 492 bp, Salmonella enterica
atggctttcggatttactgactgggatggtgccgacggcactattaaaccaggttcaatcaaacgcgcctccagctctaacgataaagtctggggggaagagaacctgaccgaaacgaagttgccctacggcacgttcgtagctgtcaacccggacggcggcgtgatgcctctcgcagctggcaaacgcattcacgggattgtggtgcgtgatatttacggtgatggtgcaccgcacaacaagcaggtcaacgtcgggcatttttcccacggcgattgtgttggcgcgctgacagtcgatgacgctgattttactcgcggcgcggcggcatacatcgtggcggcgggtgtcgatgccggaaaggtgacgacagaagcggccggcaacattgatttaggctactgggtggaagatgtgagcgcgggtaataactgcgtggctatcaccctgggctacgtacagcaggcagttcagcagacggaaggagcataa

SEQ ID NO: 402533 - DNA, 462 bp, Salmonella enterica
atggttttggtttcgagcagtttctcttttgggtgcaattctggaaccagcgcttcgccctgctcgttgattgcagggaacgccagcaccttagcgcgcggcgtgatttccactacacgcccggataagtcatccgtcgcccagcgggtcgccatgatgatttcgccgctgtttttcgacagacgcgttttaaacgtggaaacgtaccagttccagatagatttcttagttgtcgggctaagtgcttctttggcgttttttatcgggtcatcgatgataccgagatcgattttcttacccgttaacggaccgcctacacccgcacaaacatacgtccccttatggttggctatgccgaattcatcagtgttacgctttacggccacaccatcagctggcttatttcccaaccagacacctggaaatatgttgcggtattccggcgtagacataatgcgctga

SEQ ID NO: 402534 - DNA, 231 bp, Salmonella enterica
atgtcttttcaaaatacagtgtttgcgccatggtgttctccgtggcgcataattgtcaggttactggttgttcaggccagtgcgataattatgattgcgtgcttattgttaagtcaattattagagcccatctctctgacaacttccataatggtatccttagaccagtacaaatcatctcttgatagctttcggtttgttacagaaccgttttgggttgataggatatag

SEQ ID NO: 402535 - DNA, 180 bp, Salmonella enterica
atggcagataacaataagtcaataccatcagtgttctttcgactgtgggccaaaatcctcaatagctattcgattttttcaaacgcaacttttagagcgtcatcttcgtgcatctgggctagctacattgccttttgttccagaaagcccttcaacgtagtgtcggttgagctctattaa

SEQ ID NO: 402536 - DNA, 174 bp, Salmonella enterica
atgctgcggcggcgcaccgagaatcagtatcggacgtaccccgttcatcatatccagcagaaactgatccagagcatcgcaaaccgtttgcgagaacttgctggttatatattcgggattgatgtactgaataaagtcgtgaaggctggcccgggcgttgcgccgcttgagtaa

SEQ ID NO: 402537 - DNA, 324 bp, Salmonella enterica
ttgtttagcaaagcaggtaaaaaggttcgtgaagataatcctgactggaatggtgatgttggttttcgtgttttcaaactcgatacatctaatatccgtccgtgggaagccacagcagaaaccctttcagaacagattgatgcctatgtaagcccaatccttgaaggccgtaatgaagaagatctgctcacagagttgatgctcaaacgtggcattgacctgagtgtaaacattgaaacccgtcagtttgatggattaaccgtttcttgtgttgacggtggcaaattgtttacctgctttgctaaacaaatcccttttggatag

SEQ ID NO: 402538 - DNA, 207 bp, Salmonella enterica
gtgcaactgaccagcacccgtgccggacaggcggtggtgaatgcctccgtggacggcaccaccatcagtgccgccccggtgacgtttgaaaaccgcctggattccgccattgtggtgaacaaaacctccgccgttgctgacgggcaggacagcatcattctgaccgctgtcatccgggatgccgccggtgttccggtcgccgggtag

SEQ ID NO: 402539 - DNA, 393 bp, Salmonella enterica
atggagttgactgcagacctgctgagaagccttaacaacatcagacaaaatgccaccatatatgttcacgcataccactatactgatgatgaaaaatgcgttatggcaccacgctcatccctgccctctctgaagctaacagttctgcagtcagaaaaaattatcgatctgcttctgagtggttccggttatatcaggcatgacggctatgttcagggatatggagaaaaaactgtggcaactttcacaatacaggagggtgggcaccatcatttcaggacaaatctggcactaaataagacgggcaatatagccgataatgcgttgaatctgtggctacatcgtatacataaaacagacatcattgttttgtctgttgttcttacagaataa

SEQ ID NO: 402540 - DNA, 360 bp, Salmonella enterica
gtgataacttatatcgattttgtgcgggtaaatatcatggattgtactattttaatgaaaataatctctgtaaaggagattacaaaagattcgcctttgtggtcacgctacctggcgcgatatattgattccggatatcaggctgagtttgaatgtgaaggaacagcagataaatggggcatctatgatgaatgggacatctgtgagttgattgcggattattttgacgtggagggagatttagactgtgatgtcagacgggcgggaagaaaaatactgatgaaaggtacctgtgtttttcctctgggagaaccgattaagggaacacataatattcctttttggatcgatgttgaatag

SEQ ID NO: 402541 - DNA, 390 bp, Salmonella enterica
gtgaaaatcgtaataacgatttccagaaagcaaatagtaatgttgaaaaaatatgaaacagataataaggtatacagaaatccccgctgggagggaaaagatgaaatattctggggggtgatgaattcgcaaatttgccttgaaagaaaacgtgggccatatttatgcactaatcctgaaaataagtatttgttgaaattaactgagtggtttggtgacatttgttacataaattgtcaggtgtctttagagcaattggttgattttaaggctaaaaataataagcaatttactgaggaggaaagaaggcggttttttagtatctatgcttcgatggcaatggattatgtacttgtgtacaaaaaacaaaaagaattgtttgtgtcatag

SEQ ID NO: 402542 - DNA, 153 bp, Salmonella enterica
atggactatattgttattttcgtagtaggtttttttatcggtcttgtatatggtagcggtaaaaaatatgtaaaagataaacatgtgagttattaccgtgaaaatcgtaataacgatttccagaaagcaaatagtaatgttgaaaaaatatga

SEQ ID NO: 402543 - DNA, 564 bp, Salmonella enterica
atgttgagtaaaaaattgttattggtttgtgtttcatgcatggcgttaactgcctgttctgttgatgaaattgcttcggttaacaagcaaattagtgatggtgcttttgctttaacgggggcattgcgtggaaactcatcgtctgcggattcaaatggaatgccggttttaagtcaggcgcaaaaaccggcgacaaaatccagaacgcaggaatattcagtacccgttgatgttgatacagctgctgctcgccttaaacgttattacgagtttatatctttcgatgaaattgaagctatccgcaaaaaaaacaccagtggggaatgggcggcatcagcaatacttgaacagaaccctgtatgggaggttatgcccggtagttattataaaatggggcaaaactgggacgattatgatcatctgactattgaagtggaaaagaatggggcgggaagtaaattatatattacgtttaaatcgccatcggataaaagactgaatagtgaaagtctcaggaaactgatgttgaatattaaagatgttgctgaagggaaaattcgttaa

SEQ ID NO: 402544 - DNA, 396 bp, Salmonella enterica
atgaaaacgactaacaaagccgcttatctcagaggacaacgatttgccattcagtggaaacgactcgtaagaacgcttcgtcagtgggacaacttctgggttcatgcggccagaaaaaggcatctgccagcttggactggacggcttccgctggctattggattaaccggaattgtggtttgtgcactcttcagtatcacggcagttctcgggtgtctggtgtttatctgggctattacgtatatttttcaatgcattagcgctggaatcagctcctgcgaatacagtacgtatgaagaagagtatgaatatggaagacgtggatacagagacggccctgaaggttgtgggcattacagcggcagcaagtatacaggatatacgcgatcagattga

SEQ ID NO: 402545 - DNA, 975 bp, Salmonella enterica
atgacgggtctgcgaacacgacgttatgccggcgctctgctgctgtgtatggcgactgtttctgtggctgacgcttccctgaatacggcacagatagtggccggtgccatttctcagagctgcatcagctggcgggtcagcggtatctgttactggctgcactgctcctggtcggggtgccgggtcagaacgtccgtgaaggtctcacattttattcctgaagcagtggtgtccacctataccgcaccaggtggtaatccctggcgggaaatggctctggtcagtcagacatccggcggtgtggagaacgccatcagcagcgggattgccgggctgtctgccggcgggggaaacccggcagatatgaaatcaccaggacagcgtaaatccgccatacgtttcaaatacgcggatgcgctggggcatccggccacgttgcttatcgggggcagcattcccgggtattcgtgtgagtctgctgccactccactgaggccttattttctcagcacgctggacagtcttgcctggcgaagcggcatgcctgaatccctgtatcccgaagccatgatgcccggcagacgtgagctggggaatcagcgcaatgcggacatgtggggaaatatctaccctcgttccggtttcgtcagccagaccgatgatgacaaagcggcagccctggttgcccagcgggtggcggatatcatcacccgcaccggagaacctcacgtctatcagtcactgaaaggccgaaaaaaggatggctactggccaccggatgcagtggaagaaaacaccggcacccgtaatcacaagtggcagcgactgaccccttccgtttcttcatcctgcgccgtgtttccggatggcagtcatgccgcgccggaggacggtaatgccgcgtttgccctgtggcgtccctacagttgctgcaaaaagcggggccagaaattcctgggcagtacgaatttttag

SEQ ID NO: 402546 - DNA, 318 bp, Salmonella enterica
atggaaaaaattaccgttgctgaactcatacaaatattcctgctgttcgctatagtaatcggatgcattatcttcatgctgcacgacattgatctgacaaataaaagaaatcggtttgagaaagcactgaaagaatccatccggcaaaataagctaaaaaatgaagatgttcatcttctggcctcacgctggtccgtaaaacctggccgggtaaaatcaatacttctgtttatcctgagtgatttcctgaccagcaatgactgtccggatcatcatattgcacgaatccgggaactgatacgcagccccgccttttga

SEQ ID NO: 402547 - DNA, 519 bp, Salmonella enterica
atgaaacaacacgggcgaatttatgccctgagtctgctgctgttctgtgcggcggcagaagcggaactgagcgtgattgctgacctgggcggcagggatgccgctcctttttttgagggtatcaaccggcaggcaccggcttctgctccggttgtttcaccaccgcctcttctgcagggggacgctgcgatgctgccggtcagcacacctgaaatgtcacccggcgaggtggcgccacgcccgcttcagctaccgggcatcggggcacttttccttgtgggggatgatgcgtattcccgcgcgtggctgcagaaaaatgctgctgcgctccgggcgcgccatgccgccggaatggtggtgaatgtggctgatgaaaacggcctgcgcacgctgcgtgaactggcccccggcgtggcgatggcaccggcatccggttctgcgctggcccgccggttacagctgaagtcttacccggtgctgataacggacaacgggctgtcacaggaggtggagccatga

SEQ ID NO: 402548 - DNA, 456 bp, Salmonella enterica
atgaacgctgttactaatgacgaactctttgacgaaatcctggggcgtattaatcaccatgatgtgcgggatgatattgagcgccgggtttatgaaattgcactggcatcgctggaagcagagccggtggcatatcagtaccgcctgtgggatacggaatatgatgaatggggagaatgggaagattgcggggaatgtgcttttgaaggatttgttgaggaagagaaatgccagggggtaggtgttcagacccgtaagctatacaccgtaccacaggtatcagttgtaccggatggactgattaaagccgtgcgtttctgtgaacaggttaagtgtgaaaatccgccagtcgaaaccggagcatggaaagacgccgttgactgggtgcttaaagaggccagcctggctgtaaatactggtatcaaaggagaaaatgacgccagtattaaggattaa

SEQ ID NO: 402549 - DNA, 282 bp, Salmonella enterica
atgacaatttttgtaacgcgcacctttgttcgcagcaaagtaatcaatgccggatggcagttgtttttctgtattcataaaaatgctcctttaaaacaatctgttatgagtatgcgaatgctgtccgtacgttctgaccggggtcggcaaacttaccggtctgaaaatgtacagacagttaccgggattttattcccgacagctgtacgtccggcaccctttttccttttttcacatagccaggtttccggcagtcagagagggagggtacgccatggctga

SEQ ID NO: 402550 - DNA, 261 bp, Salmonella enterica
atggtaaagctgtcctttaaatccctgacaggacgcagccggacagtgtgtgtcgggtgtggttattccggtgtgcggtttggtgatgctgcaggtcaggatacccggcagtgggtgaaggtgaattatgagagcgggctggggctgtgctccagttgtgataactttcttttgcaggagttccagcgtcgtcagcggcatgaccagcttttttcatgttgtatttccggcaaaaagcgaaaagcggaggaggtagcatga

SEQ ID NO: 402551 - DNA, 1260 bp, Salmonella enterica; identical to SEQ ID NO: 376960

SEQ ID NO: 402552 - DNA, 1098 bp, Salmonella enterica; identical to SEQ ID NO: 376961

SEQ ID NO: 402553 - DNA, 225 bp, Salmonella enterica
atggcctgtagcgccctgaacgagtctgcgctgtggtctaaggacgccatcgagcgccagatgagccacaaggagcgcaacggcgtgcgtgcggcatatgtacataaagcggagcatctggaagcgcgtatggagatgatgcagtggtggtcggattatctcgacatgagccgcgaggggtacgttgcgccctatatttatgcgcagcggcataaggcggcctga

SEQ ID NO: 402554 - DNA, 156 bp, Salmonella enterica; identical to SEQ ID NO: 381860

SEQ ID NO: 402555 - DNA, 294 bp, Salmonella enterica
atgacagaccatataaaaaaagaaccggaagatgaaacaattattgatagtgctaaaatttacgatgcgcttagaaaaaattattttgatagatgcttcctttcttcttacttagatgaaaaaatagatgataacttacatcctttcagtgacgaagcatataataaaatgaagtccttgcatgatgaaagagataatcttaattttaaaaacaaaatgaaagagattaaaaggaatttatctacatcacaaaaaaaagaagtcgaaaaaataatgaaaaacaaaataaaataa

SEQ ID NO: 402556 - DNA, 153 bp, Salmonella enterica
atggacaaatcgcccagccaggccagcacgacggcgatgcaatacgtgataaaggcgctgattcgctcaagcgtcataattcagtcccatagctggacggtctgcacggtggtggtggtcggaatgtccggcagctccacctgcagcccgtga

SEQ ID NO: 402557 - DNA, 1236 bp, Salmonella enterica
atgaaactacattttgaatctgaccttacctatcagcaaaacgccataacatcggtctgtgatttgtttgaagggcaagagaaatgggaaagcgaaatgactgtgctggccccagctcagggtgcactctcatttgaaggcgcaacaggttcaatgcctgttaacccacaaatacccgaagatgatgtactgcttaaaaatctgaacaatgttcagttaaaaaaccagcttccaccttcacctgtgctcgacagccatgattttactgtcgaaatggaaacagggacaggtaaaacgtatgtttatcttcgcaccatgctggagctgaataaacgctatggcatgagtaaatttattattgtggttccttcagttgctatcaaggaaggcgtttataaaacactacaaataactgaagaacattttaaaagcctgtttgcgggagttccatacgaatactatctgtatgattcggcaaaacctgcggatgttcgaaattttgcaaccagttctgttatgcagatcatggtaatgactgtgggtgcgattaacaaaaaagatgttaacaagctctatcagtccagtgaaaaaacaactgtggacgatctggataagcccattgatttaatccgtgctacacgtccaattattattgtcgatgaaccgcaaagtgttgatggtggcttgaacggtgcgggtaaaaccgcacttgatgctatgcaccccatgttcaccttacgctattcagcaacacatgttcataaacatcatatggtgtaccgccttgacgccattgatgcttacaaccaaaaactggtcaaacagatcgaggttgccgggcttgaagtccaaaatgcaagtaatagcccctatgtaaaactggtcagtattaacaataagaagaatagcattagtgcgactgttattgttgatatagccgataaaaaagggaacgtaaatcgttcagagattaccgtatatgacggtatgacactcgatgacgaaacaggacgtgatatttatcagggttaccggataagcgagatccgaactggcaaagagggttatcttacactggaaacaccttctgatacctactatatgaaagtcggtgatgtcgtgggggatattgaccctatgctcatccagcgtcatatgatcagacgtacaatccgtgaacatctttggcatgttctggatgagaaggaagtaaatctttataggcagggcttttga

SEQ ID NO: 402558 - DNA, 819 bp, Salmonella enterica; identical to SEQ ID NO: 37850

SEQ ID NO: 402559 - DNA, 780 bp, Salmonella enterica; identical to SEQ ID NO: 37891

SEQ ID NO: 402560 - DNA, 315 bp, Salmonella enterica; identical to SEQ ID NO: 37890

SEQ ID NO: 402561 - DNA, 441 bp, Salmonella enterica
atggcaaaacacaaccatcgcctgaaacccgtaaaagattatcaggagattgatgacgtactgttcaagttttcgctcaacctaccggatgaacaaatcccgttaatgatcgacaaactacacgttacgctcgatggcattatgaagcccgtcacaagtggttttggctttatcgatctgattattcccggcctgcataaagcaaacggtatttcgcggttactcaaacgctgggatctgtcgccacaaaatatggtagcgattggcgacagcggcaatgacgcagagatgctaaaaatggcgcattattcctttgcgatggacaatgccgcagaaaacattaaacaaatcgcccgttacgctaccgataataataagcatgaaggcgcactgaatgtgattcaggcggtgctggaaaataaagtgccgtttacactttaa

SEQ ID NO: 402562 - DNA, 447 bp, Salmonella enterica
atgaccatgggatccgtattttcggatgctgctccacatgacagacatatagtacacccgttgacatcctccagaaatattttattaccatcgaagaaagcatttttatttacatataataatgatgtggtcagttttccaattacctcccgaaagcatctttcattgcttcttcttactccaccacaggtaaaaaaattgacaaaccattccagtataccgcgtggtgaagttgcacttttcattgcttctttcgtaccggtaccggccgcatgcaaatatcttaatatattttctggggacgcgttagttattggcattttgattccttcttatggaagtgagccgactccttataggtgtgagtcaagtcacatttatacaaggaataataaaaaaagatataaggtgatttttgtatttagagctttggttgagtatgagtag

SEQ ID NO: 402563 - DNA, 216 bp, Salmonella enterica
atgaaacgatttaaagaaatagcagcaattttgcattgctggccgcggggttcacgtcgtcggctatggcatcgtcgggcagtggtggtggcccgtgggattttgatttttcgggtccatggcttttttgtaagctgcaacaacctgattctctgcaattaccgccacctcctggtgagtattgctggcattaataaatccatacaattccagtga

SEQ ID NO: 402564 - DNA, 870 bp, Salmonella enterica
atggctgcggaatacccatgttcctcatacagagttactcttgaccaatgggacttgaaaatcggaggtgatttaccacattttatggaatcagggcttagtgactcggaccgtgtaattgttgtttgcactgatgaatatgtcagaaaagcaaatgcaatgcaaagtggtggagtgggctatgaaaaaatgattattacttcgcaaattatgagagacttaggaagcaatagagtcatacctatagttattaataacgagcaatcaaatgtgccgacatttgtagcaacgcgtttatggttagatttttcatcagaaaattacgaacaaagctatagacaacttatcgcagatttgtggggagaaagtgttcaaccacggccaccacgtggtgaaaacccttttaatcggcaacctgtggcagttgaacctatagtgtttgatattccagagagctttgttagtcctgccttaacgaatactgttacattcaaccctacgctgaacaacggaaaattctgggttggtgctggagatatggctttcgagctatcttggtccagatgcagcaaaggaagtatatggatatacaatagacaagaaagcattcattctttgcgtattccaactggaattactgaaattgaacaaattaataatgccgaatgtaactcgttttacaatgaagatagttccacttcgttgaaggaaggggaattggctgtattgcaaaataaaaatggatattatttagcagtaaaaatagaacgagttctctatcgtggtagacatgctgatgatagagatgaattaatttttagctacgtaattgcacctgccaaaagtatatcgtttagtaggcacgtataa

SEQ ID NO: 402565 - DNA, 1401 bp, Salmonella enterica
gtggaatcattcaagtttaccaagtcaaagcttgccgaactccctgcagcccctaaaggaaaacaagttgattatcatgattctcacgttaaaggacttcggctaagagttggagcttcgggaatcaagacattctgcgttgttagaaaagttaaaggtgcatttattcgtgcaactttagggagatttccagaaatcacgattgagcaagccagggctaaggcattggataagcttggtgacataggtatgacggggcgaaacccaaatgttgtatctcgtgaagaaagtctttctaacgtaactttgcgtgaagcccttgaattgtatatcaagacgcgtggacaccgacttaagcctgcaactgcgaatcagtatcgaggtctattacagaacttttctggtgattggttggatagacctatggcaaatatctcacgtgatgatgtatttaaccgtcataaaaaaattacggatggaacggtttggtatggggaatgtttatctaaacttagagcaggggtaggtaaggggagtcgttctcaagctgatctttgggggcgcgcattgagagctgtttataattttgcaaatgataactatagggatcagcttggtagcaaattacttcctgagccgccaacggttgttttaagtagcaaacggcaatggcatggcttggtcagaaagaatacacgcattcgcaataaagacttgggccgttggttaaaatcagttgaatttgttcgaaagcatgctctagatattagagatgatcatgcattgtctgtttgtgatgctattgatatggcactatttactggtttaagaaggggggaagtatttgggcttgaatgggaacgagttaatttagctggtggttatttttggattgataaaactaaaaatggagaaccgttagagttacctattactaaaacattgcaggttatttttgaaagacgcctacagtttaaaaaaaatagctcaagatttgttttccctgcattgagggggggagtgatcaccgatccccgtaaagttatagataaaattgttgcagctacttcatctggtgagtttgacggtcagttacctattaattttacttgccatgatgctcggcgtacatttgcaacaattgcggagttgagtggtgtaggaacttatattttgaaaagacttatgaatcacagatcaggtagggtttctgatgtgacagctggttatataagtcttcctgttgaggagttggttgagcctgcagcgcggatagaaatgaaaattatgcaagaggcaggtattcaagtaccatttatcaatactaaagagttattagcaagtttatctaaggaagataaatctaagcttcttgaagagttgttaagggagaggaaatga

SEQ ID NO: 402566 - DNA, 783 bp, Salmonella enterica
atgaatactgatttggatgttaagccatttataaacgaaacaataaaggctttaatgggatattcagaacggtccgggatattatctcctcaagctgttcagtgttttaataatgcactaaatcaatcattgattaaccgttatgataccagttttgtgtttgaaacgttacttactattatagaaagtgcatctaagagagatttgaaattcaattttgatagggttttaagaaatacaaagggcagagatttttctggtaatgttttagacttcgattctgtttttaataatataaaattcacggctaaagataactcattatcttttaatgagcatgagttgagcacgttatctatggtggtttttttaaaagaacagggctatatctcacaagcggaagatattctaactgttctaaaagatgaaatattaagacgagtttatcttgattactataaatcacagttcagaagagttgtttctttctatttgaaaaatggtaatgaagtttttcaagatgtaggaaaatcagtatctacaaaaagaggaccaagaaataaaaattataaagaagtatataaaatagtttgcttaacgattggagaatatcctgacgtatcacattactcattaagtaacaagttagctgtacattttgcaaatcataaaaatgccccttctaagcaaacattgatgagatgggtgcaagatatccgtagtgaactatgtcagacacctcatgagccatacataagacgcttcaaactgataacacaataa

SEQ ID NO: 402567 - DNA, 192 bp, Salmonella enterica
atgtacatgaaagagcgactcacaagaaaagaagcggctgaatacattggtgttacaccagcaacaatggcaaattgggctagtacaggtaaagtctgtattcccttctataaggcgggcttgaaaaaggtcatatatttgcgtacagatttagacgagtttataagctcaactaaaagattacatgcgtaa

SEQ ID NO: 402568 - DNA, 177 bp, Salmonella enterica
atggcgactaaatctatcaatgcgaaatccaaaagatttgatgtgcgtgtacctcatgaaatagctgatgccgtagaaaaacttaaaaatacgggtgaaagcactggtcaatttgttgttacagctttagaggcagaaataagaaagcgtcaatttgctattaataaaaacaagtga

SEQ ID NO: 402569 - DNA, 1992 bp, Salmonella enterica
atggctattcaaaaaaaacaaacaaaaaattctgaaagaagtattaaaagccagttagaaaaacttactgtcgaaaaagctatttccgaatatatttggaatgcttttgatgctgaggccacaaatgttaatattacagttattccgaatggtctaagtggaatatcgtcaatagaaattattgatgatggaactggcattgatttcaacgaagtcgatgaaactttcggacagtttttagactccaagaagaaagcaaaaagaacacctgttacaagaggacataaaggtaaggggcggttttcattctgtaaattcgctgataaagccgaatggactagttggcgtaatgggcaagaatttacgctaactatagtttcatcgcatctaaatgaatatgaatattcagatttatccacgtgctctcataaaaattctggaactaaggtggtctttaatcctgtaacaatagctgaagattattttaattcaatagtaataccttatttgcagaacgatatatcttggttgttagtggcaaaaccaaaattaaagttaagaataaatggtcaacctattagcccaatcggatatgcttcaacttcaaatgttactgaatttggagaggaagatttcaattcaaaaacagttatatggtccagtaagccggtagtagaaaaatcatatatatattatttaaataaccaaggtgatattgtttacaaagagttttctgaaatgaacaaaaaaggatttgattgttcatcctatgtaatatcaagttggttcgatgatttctctgagtcaagtgacttgtttagtgaatcggataacagcgttgattcagatgtttttaaatacatcagtcttaaggttaaggggcaattaagggaagagtacaggaaatataagaataatgcagcagatcaactcattcaaagctatttaaatgagggtgtatttccagaatataaaggtgagaatagaatgctcaatgaatttaaaaggaatcaactcattgaaactataaaagttatttatgaggctgaacctcaaatattctcatcattaaacaaaaaacaaaagaaaattctaattaaattattagacagaattgttgaaacaaataacttatctaatctctttgatatctttgaagggatagtttccctatccgaagatgaggttgataaactttcatctgtaataaaaagaagttcactttctaatattactaggactttatcatttgttaacgataggctggatgttattgattatttcaaaaaaatgttatatgaaaagaagaaagagtcgtatgaggtaaaacacattcaaaagagtatagaaaataacttatggctttttggagagcaatacactctagttgcatcagaagaagataagtttgataaagctcttagaaagtacctggagaagattaaaggctttaacgaagaacattataataagtatagtgtgcagcatccagataaaaataaagaaatggacatatttgcagcgcaaaaaacaaaacgttatactgaaaataatgaagaatactttcattgcattgtgattgaattaaagaaaccgagtataaaactcggtgatgaagagcttgcacaaataaagttatataaaaatataatatctgcaactgatgaattcaaagacgaaaacacaaaatgggattttattttagttggaaatgatatatctaatagtaaaattactgctgcaaatttatcatcagatctagaaactaataaaattcatggtgagtttggcttggttcaaaaaacaacaaatatgaaaatttacgtcaaaacatggaagcaaatcttaaatgagtatgatcttagatataacgacctgatagataagcttaagttgaaagagttagaaattgcagaagatatggggcctgatgaactaacggcaaaaattgtagaaaaaacggcagtacttccgagttcgatacaagcttag

SEQ ID NO: 402570 - DNA, 300 bp, Salmonella enterica
atgacaaaaccagtaccaaccagcaaaaagccccgtaaacaacacacacctgaattccgccaggaagccctgaagcttgctgaacgcatgggtgttgccgccgcagcccgtgaactcagtctttacgaatcacagctttatgcctggcgcagtaagctgaagaacgcacattcctcttccgaacgtgaacaggaaatgtccactgaaatagcccgcctgaaacgacaactggcagaacgggatgaggaactggccattctccaaaaggccgcgacatacttcgcgaagcgcctgaaatga

SEQ ID NO: 402571 - DNA, 138 bp, Salmonella enterica
atggttcagaagatggtagtgttattgctatcgatggtaaaacgcttcgtggatcttatgataaaagccgtcgacgcggagcaatacatgttatcagtgcatttgctgcaatggatggcgttgttcttggacaactaa

SEQ ID NO: 402572 - DNA, 360 bp, Salmonella enterica
atggcggatattagcagaggaccagtatcaacgttacctgggcacgtttgcaatttgccggctggcgcaaaatgcgactaccaccaagatcgtgacgccgttcgccgcgttcagggtgaaacagattcattcggctgtgaatatcacgacatgtgccaggagtgtcacgatcaatacgttattgaatccaataacgctgactattcaggaaggtgtgactggtgcggtaagcacgcggatcggttagttccacaccgcgatattgaagaaggtagctatgggcgcgtctatgacgtgtgcaaaccgtgtattgatgcagagcgccagcgctgggaggaagaagatgaacaaagatggtaa

SEQ ID NO: 402573 - DNA, 291 bp, Salmonella enterica
atgaattatacacccggcccatggcaatggtggacaagcaacagtttcctgcgtttaagcagccaggcaacaggtaaagacggtggggtaatcgactcttatgtcattcgtgatggtcacccatcattgcgggttagcaaagaggatatggatctgatagcagcagctccggagttattggaagcgctacaattgcttctcaactcctggtcaaatggtagttctaaagatatttcaaacgctgagagaaaagctcgcgcagccatcagcaaggctcttggggaggagtga

SEQ ID NO: 402574 - DNA, 906 bp, Salmonella enterica
gtgatactttttgcgcacctcgcggaagtaggcggcgatgctttccagcttcaggatatccagcccggtgtcatattttgtgccggcaagcgtggcgaccagcgcctcggtggccgggtggccgtaggtggcgctcatggaggaaatcgccgtgtcgacgccgtcaacgcccgcctcgatggccttcagcagggccatctccgccatcccggtggtggcgtgacagtgcaggtgcaggcgcacctcaaaacgttttttgatttcactgaccagctcaaaggcggccatcggcgtcaggatgccggacatatccttgatggcaatcgagtcaacgccggtttccagcagctgttcggtcaggtccagccaggtctgcagggtgtgggccgggctggtggtgtacgagagcgtgccctgggcgtgtgcgccgtggctgcgcaccgcctgcagtgcggctttcatattacgcgggtcgttcatggcgtcgaagacgcggaacacgtccataccgtttttcaccgcgcgctcgacgaagcgctccaccacatcatcggcgtagtggcggtagccgagcaggttctggccgcgcagcagcatctgcagcggggttttcggcatggcttttttgagttcacgcaggcgaacccacgggtcttcgccgaggaaacggatgcaggcgtcaaaggtcgcaccgccccagcactccagcgagccgtagccgacatcgtcaagctgagcggcaatcggcagcatatcgtcaaggcgcaggcgggtggcgaacagagactggtgggcgtcgcgcaggacgacatcggtaatggcaatggtcatggatccctccgggaaattaaacgtggtggcggtgatggtgaatggcggcggcaatcaccggctttaagcgggtga

SEQ ID NO: 402575 - DNA, 684 bp, Salmonella enterica
gtgattcccgcgtcaacgttgccatcaagcgttgtactgttagtagcctttacggtcacagcgctgtccagtttgatggcggtcgggccggtcaatgtgctgttgttgagctcgatagggtcgttaatattcgttttgctgtcaacgtgcagcgcggcggcgtttttggaagtgacgtccgcattattgacggttaacgcgttagtatcgtcataccaactgctttttccctggcttgtcattaaaatgccgtcgtcgtcggcggtgatggttgctccgttaatctctacgcttgaagcaatgcctttcacgccaacgcctttggagttgacgctcatcggactcttatcatcaccgaaaacgttcagcgtcgacgcgcttgaggcctcaatggcggcgcctgtggcgttattgtgcgtgacggaagagttcttgatattgagaataccccggttggcggcaacaaccgtactattcgcgcccgtagaactcaccgtactatcgctcacattcaggaaggcgttaccgttcgtgtcgccaaccacacgcagttgtccgctcgtgagcgtgatgtcactcccgtccgtgatgttcagcgtgctgccttgctgtgacactatgctgctagttgtttccgccgtgttgacctcggtgccaatcagggtggcttgtgaattattatag

SEQ ID NO: 402576 - DNA, 501 bp, Salmonella enterica
atggtcagccgtcagcgtaccgccggttatggtggtgccgccggagtaagtgttatcgccggtcacgatcagctcatcgctaccgcttttgacaatttggcccccaccggtcacgttgttatccagcgtgccctggctcaactcaagctttgcgttttctgcaatagccacgtcgccgctgccgagcgcggcggcatcatttgcagacagcgtaccgccgttaatgtcggtattgccgtagtcgttcgccgtgttgctgaggacgagcgtaccgtcgccttctttggtcaacgtttcgccgtcccagccgccaggtacgggggaaaccttactcagctcgctggtaacttcaaacgtttcattatcaccgagggtaaaggtgccgttcgcttcgctaatggaagtcgcgttagcattccaactgagctgctgctccagaacgaagttagtgttatcgttagcgtcaacgtcgacgccgaaggtcaggtaatctggcagtga

SEQ ID NO: 402577 - DNA, 1758 bp, Salmonella enterica
atggcggtggaaaaactgattgttgaccatatcgacacctggaccacggcgctgcatacccgttccaccgctggacgcggcagctcgggtaagattgacctgtacggcattaagaagctgcgcgagctgattctggagctggcggtgcacggcaagctggtgccgcaggatccgaacgatgagccagcgtcggtgctgctggagcgtattgcggcggaaaaggccgagctggtgaagcaggggaaaattaaaaagcaaaagccgctgccggagattagcgaggaagagaagccgtttgagttgccggtggggtgggagtgggtgcgactgggagacattggtgaaactaatatcggcttaacttattcacctaataacataaaagaaaccggcactccagtattaagatcatctaatatacaaaatggcatattagattttacggatctagttcgtgtttctggcatggaaataaaaaattcatcttatgttgaagatggagatctattaatttgtgcaagaaatggaagtaaggcccttgtagggaaaaatgctctaattaattcactttccgaaccaatggccttcggtgcctttatggcaatatttagatgtagctataataattacgtcaaaattttcttagattctccatcatttagacgtaacctagacggagttgatacaaccacaataaatcagattactcaatcaaatctgaagcatacattaattccttttccaccagagatagaacaagaaaagataaaaaatacagtatttgagttaatatccctctgcgaccaactggaacagcactcactgaccagtctggacgcccatcaacagctggttgaaaccctgctaaccacgctaaccgacagccagaacgccgatgaattggccgaaaactgggcgcgtatcagcgagcatttcgatacgctgtttaccaccgaagccagcattgacgcgttaaaacagaccattctgcaactggcggtgatgggcaaactggtgccgcaggatccgaacgacgaaccagcctctgaactgctcaaacgtattgcgcaggaaaaagcgcaattggtgaaagacgggaaaattaaaaagcaaaaaccgctgccaccgattagtgatgaggaaaaaccgtttgaactgccgagtgggtgggaatggtgtcgcttgggttctatttttaattttctaaatggatatgcctttaaaagtgagtggtttagccctactggattacgtttattgcggaatgcaaacattgctcacggagttaccaattggaaggatgtagtacatataccaaatgaaatgatagataatttcgaaaattatgttttatcagagaacgatattgtcatttcattagaccgcccaattattaatactgggttaaaatatgccatcatcagcgaatcagatttgccatgcttgcttctccagcgagtggcaaaatttaaaaattatgccaacactgtgtctaacaccttcttaacaacatggttgaaatcttattttttcataaattcaattgatcctggaagaagtaatggtgttccacatatatctacgaagcagttagagatgacactatttcctcttctatctcaaagtgaacaagatcgtattatttcaaaagcaaatgaattaataagcatctgtgaaaaactaaaatatcatattcaaactacccaacaaacccagctccacttggccgatgccctcaccgacgccgcaataaattaa

SEQ ID NO: 402578 - DNA, 4914 bp, Salmonella enterica
atggcgctggtcggtattaataacgaaaacgaattttactccaaccactatctgggcgaagtctttaccagcgatattcgcgatgttctggagccctggattgagcaggaaaatgccgctcgcgaagctgaacgtgctgcccgtgaaaagggcaaagaggttgaggcgggctaccgcgcaccgtggaaccagctttacagcctggcgacagagtttttccgcaaacttactgaacatgagaaacagcgccagatcccacagcgtcttgccgatcagcgcagtcgctggcagccgctgttaaaggcattgggttatgaactcaatccgcatattcagatgctggatgacgatacgcctttgccggtactggctcgttacaacagcaccgacggtagtccgtggctgtggattgttgaagcacatgaccaggaagaaggaacgctggatccgctggcgctgtcgctgctgaccgcgcagttcccggtagataccgataaacataagcgcgacagtctgcgtaaaaaagcgaacggcgaataccgcagctggcaggatctgttctccacggtggtcttcacacaaaatgaaccgccgcgttttgtgctgctgcttggcaatcgccagctgttattgctggatcgtactaagtgggcgcaaaaccgtctgctgcgttttgattttgaagaaattttaagccgccgtgaaacggatacgttgaaagcgacgtcggtgttgctacacaaagattcgctgttgccaggcagcggtgcgccgtacctcgattcgctggatgacaattcgcacaaacatgcgtttggcgtgtcggaagatctgaaatatgccctgcgtgcgagcattgagctgttgggcaatgaagcgatgcgttatctcatcaacaacgagctggcttattacaccgggaaacgagctattaacccggatgagttgagccgcgaatgcctgcggtatatgtatcgcctgttgtttctgttctatatcgaagctcgcccggagctgggctatgcgccgatgaccgccaaaacctatctgcagggttacagcctggaaacactgcgcgatctggagatgatcccgctgacaaacgaagaagatcgcaatgggcgctacttccacgatagcctgaatatgctgttcaagctggtgcgtgacggctacagcggcggcgtgaaaatgcaaagcgatctggagagcggcgatcagatcactattcacagccatcagttcagcgtaccgcgccttgaaagccatctgtttgaagcgaataacacccgcattcttaaccgcgtggtgtttcgcaacgaaaccctacaacaaattattcaggcgatgtcgttaagccgcccgggtaaagggcgttttaaccgccgggggcgtatctcctatcgccagctgggtatcaaccagttgggtgcagtgtatgaagcgctgctctcctaccgaggattttttgccagtgatgacctctacgaggtgaaaaaagccggagaagagtttaacgagctggagacaggctacttcgtcagcaaagacgagatcggcaaataccacgacgacgagaaggtttacgaaaaagacggcagcctgcgtattcaccgtaaaggcagctttatctatcggatggccgggcgtgaccgcgaaaaatccgcctcttactacaccccggaagtgctgacccgctcgttagtcaaatatgccctgaaagagctgtttaaagagcaaattgatccgattaccgatccgcacgccaaagccgacgccatattaaacctcaccgtgtgcgaaccggcgatgggcagcgcagcattccttaacgaagccatcaaccagctggcggaagcttacctgttccacaaacagcaggcggaaggtcgccgtattcctcaggatcgctacacccaggagctgcaacgggtgaagatgtacattgccgacaacaacgtattcggcgtggacttaaacccggtggcggtggagctggcggaagtgtcgctgtggctgaacgccatcagcggcgatacatttgtaccgtggtttggctaccagctgcactgtggcaactcgttggtgggcgcacgccgtcaggtgttcaacaagagcgagctgacctacaaaaaagcgaaagatccgagctggcttaacagtgaaccggccgagctggcgatgaatacgccgcgcgaagagaagcagattttccacttcctgctgccggacagcggcatggccaattacagcgacaaaaccgttaagcagcgctatccggatgatttcaaagcgctggacagctggcgcaaagagtttaccaaaagctttgcaccgcatgagattgccgatgtgcagcgcatcagcggcaaagtggaagcgctctggaacacgtttcgtcagcagctgaaagctgagcgccagaaaaccgccgacaattacccggtatggcctgcggaaaatacggctcatgtccgctcttctttaagcagtaaagatgaaaccttcagcggtcgcctcgaagataacagtacctatcagaaactacgttgggtgatggactactggtgtgcgctatggttttggccgatcgacaaagcggatgagttgccggatcgcggcacctggttgttcgagatggaaaccctgcttgacggtattgtcgtcacggaaagggtcactgaagccgcagaacaggctaccggcgatctgtttgccgacgagggcatggtgcgtgaagagtcttcgctattttccggtgcaggtcgcctgaaaactgaagtgctgttccgtcatttaccacgtctggcgattgttgatgcgctgaaaaagcagcaccgtttcttccattgggatctggaattctgtgatctgttcgccgagcgcggcggctttgacctgatgctcggaaacccgccgtggctgaaagtggagtggcaggaagcgggtgtgctgggtgactatgagccggagtttgtgctgcgtaagctgagcgcctcgaagctggtgacgttgcgtgttgatacctttaacgccattcctgcgctggaagatgcatggcgcagcgagtatgaaggctgtgaagggatgcaaaacttcctgaatgcgcagcagaactacccggtgctgcgtggcgtgcagaccaatctgtataaatgcttcttgccgcaggcatggcgtttaggagcgcagaaaggtgtggcaggtttcctgcacccggaagggatttatgacgacccgaaaggcggccagttgcgtgtgtcggtgtatccgaggttgagagcacattttcagtttcagaaccagcatatgcttttccctatcgctcacagggcaaaatacagtattaatatctatacagctttaccaagtcttcctgtcagctttatcagtgttgctaaccttttctcagccaaaacgattgagctttgctttgctcatgatggctccggtgaagttggtggcattaaagatgatcaaacaggttcatggaatgaatctgggcatcaaagccgtattttaactgttgggatggaacggcttgctctatttgccagtctttatgatggagagggtacgccagctcttgaggctcgacttcctgcgcttcatgctgaaccgcttgtttctgtacttgaaaaatttgcaaagcagcccagacggttgggggacttgcaggggcaatatttctccaccgtcatgtttgatgaaacatatgctcaagctgacggaacgactaaacggcatacccaatttccggaagacacatcacaatggattctgtctggcccacatttctatgtcggaactccgctttataaaacaccacgagagatttgcacagagaaaggacactatgattgcctcgacctgctaactctgcctgatgactatctgccacgcactaactatattccggcatgtgatgtgcaggaatatgccaaacgtaccccacgcgttacgtggactgaaccaggcgaagatgaaccgaggaaggtgacggattattatcgcttggctctgagagctatgattagtattggagctgaaaaaggattagtacctgcattagtaccaaaagatgtagctcatactaacggcgtgagaacatattgttttaattcatccgatttacttattcgcgtctctggatctgcatattctctgatttatgatttcatgatgaagttgtcaggcagaactaaccttcatcagagtatagaagaatacgcgttgcctgattttgttgaaacagcgcatcacttatctgctcgtgtcatgtcattaagtgcattaaccacgagttattctgatttctggcaatccagctactccccagatttcaacactcagcgttggagccgcaacctcccgcaacttccacaagatttcttcgccaatctgactccagagtggcagcgtaactgcgctttacgctccgactacagtcgccgtcaggcgctggttgaaatagacgttctggtggcgcaggcgctggaattaacactcgaagaactgcttactctttaccgtgtccagttcccggtcatgcgccaatacgaagccgatacctggtacgatcaaaacggtcgcattatctttacgccaagtaaagggctgctgggtgttggcctgccgcgtaccgcgcgtaaagcggatctgaaaaatggctttgtctttaacgtcgatagtcctgactggaccggcggcgactgcaccgatcaagctatcggctgggatgatgtcaagcatctgcaaaccggtaccgtcagcgtcacttttggtgattatacccgcagcgacgaaggcgagcgccgcactgtcacttggcaggctccgtttatcaaacccgaccgcgaagatgattacaaagtggcctgggcattctttgtacaagataaggagagcgcctga

SEQ ID NO: 402579 - DNA, 303 bp, Salmonella enterica
atgtcaatagcccaaaatgaaaaattgaagctaattagggagtctgaaaggcttaaattaaaagaaatgtccgatttgataggagttaactattatacgtatcatggctatgaaagtggtaagtccaagatgccactagattttgggattctatttttacgtcactctcgtttccgtaagtaccgggattggttcctttttgatgagatggagcctaaagccggacaggtgattccggccctcgcgcgcgttgggcaggacgaaacggaatcaccccgttacgggagcaattctggggaataa

SEQ ID NO: 402580 - DNA, 537 bp, Salmonella enterica
atgctacagatgaaattcaaaccccgctttattgaggcattcgccagcggtcagaagattacttcactgcgcatgatggattttaaatgccgccactacgaagagacagacgactatccggctgcttatttccacgaagaaaaactgaaatacaacgcgtatgtgagttctgttgacggcataaatatatctctcccatcagggacaaccgttaactattcaaccgaccttaccggacttctggaaagacagccctacaagcccggtgccgaaatcgaactggtcacggaagctgaaggcggcgaaatagtgccgttcgccacggctactattgcaggcatttccgttatcaagggcgacaaaatagaaaacattgacgccatccatgacggctttaaccctgaccgtgacccgctcgccgaactccatgcattcatgcgggacgtttaccacaccgcaacccccgacaaagaaacgtactggctgtacatcttcaccaacgtgcagatgttgccgcagtggggaggtgaagcatga

SEQ ID NO: 402581 - DNA, 630 bp, Salmonella enterica
atgaaagtggccccgcttctcacgtacaaaaaccgcttgccgcaatccgcgctcatgggttacatttcccctgcccctcataaaacgggggccgggattggaaccccgcagatcaacaaagcgcacaaccgcgcgagcggtttttttacgtgcgacgcatcgccacagctttttcgcattatggcggggcgtatgggggcgctttcgggcgcgccgggttctttgttgaccggttgttccaaccctgtacgtctcgccacccaaagcttggaacctttggatggtgagttatcacaacttatcaacaaaggttatccatcatggcaaaccgtaaaccacgccagcgccacacccgcgccgacgttcagcgcatccacacacaaacagaaatcgcccgcaagctcgaccgttctcatacgctggcacacttcctttgcgccgaattacttaacatgccttgcaaccgcctgccgttatggttgcctgccgtcatggactacatcgccgacgatatcggcgacattcagcgactgcttaacaagccaacgcgcaccgcgtaacgcccccctcatgcgcccctgttcgccaggggcgtttgtgcatcctgttaatcgggaggtctggctatga

SEQ ID NO: 402582 - DNA, 702 bp, Salmonella enterica
atgttcttaacctttcctaatgtaacaataactccagataacaggatagacaaattatctgaaaatgatttaggtctcattcgtgatacggctatacaaaatggcggaagaaaggtacaggtacaattacgtgatttattatatgaagtaagtaatcgtgctgttgaaggtgataattatatattcgaagttcgttgttctaccacagaccgagccatgtttagggaacgttgtatggaatggcagggaaacgccataaggttagaacaacaattaaatattgggctgaacgtgtcgcatggaaattttttaaatatgtcagccacatcattttcaaataacagtcaagagttagctgctcacatttcaccaggagcacctgctatttttgatacatctaataaacaacaattagtggataagattaatttatgcagtttctcaccaaatgttgatgaactttcatgtacggaagaaaacttaaaatgcccggtaatgttaattgttcctgaaaaaggcgtttttgtgaaaacctggccagagtcaaacatatgccaattaattgatgaaaaagcacttatccaacttgttattaacggtgccgtacatcctgttagcagggctccgctatcactagatatgataataaataaaaatgaatgttattttgacactgccaaagataactttataatcccataa

SEQ ID NO: 402583 - DNA, 243 bp, Salmonella enterica
atggacgaatcaagaaagcagtttttggagtggtttggtgaagagttcgagtctattaacaacagcgaagaacttcacgttcaggccatcaagatgattgcttggcagtcatgggttaagtctcgcgcagctatcgaaattaaatggccatctcatggaatagacgcttctggcgggacttaccaccgcagagatgacatgagaaaagagctaagcgccgctggaatcaaagtgaaggagtga

SEQ ID NO: 402584 - DNA, 165 bp, Salmonella enterica
atgagcgcatacgaagaaatcatgttagccctgcgattctttttcggtgtggaagaagatgaaaacgtaaatgagattatcgggcaagaccatgacccgatagggactattgcagctgcacttgacgattacaggagcgtaaatggtgaggaaactaacgtttga

SEQ ID NO: 402585 - DNA, 357 bp, Salmonella enterica
atggattattcacagttaagtgattttgaaattaacgtggcggtattcgaagccattcataacggatcaccggattacaaagaaggtgagaatggcgatatggtgtttgtctcatttgagggagacattgtaaacggagacgcagtcgaagtagaagttgagcgcggatcctttaacccatgcgcaaacccagcagacgcatggccgattattgctgataacggagttaacattctctgggactggaacgaaagcggtttgcacggtgcttctgccaaccctatttgtgagcatgagcatgaaaatgttctccgcgccgccatgattgtctttctcatgatgcggagaatccaataa

SEQ ID NO: 402586 - DNA, 438 bp, Salmonella enterica
atggcgaccaaaaataaaactggccgcccttctgagtacttaccagaggtggcggaagacatatgtgctcttctagctgatggtgagagcctgcgtagtatctgcaagcgtccaggaatgccaaataaagctacagtgtttcgctggcttcgcattcataaggagttttgcgaccaatacgcgaaagcaactgatagtcgcgccgatgccgtttttgaagaaatgctctatattgccgatgatgcggcggaggaaagcgctgcggttgccaaggctcgcttacagatagatacccgcaaatgggtattgtctcgcatgaatcctaagaagtacggcgacaaagtgactcaggagattgatcacaagtcctctgacggcagcatgacgccgaagccgacaatcatccagctacttcctgttgagtctaagcatgagtga

SEQ ID NO: 402587 - DNA, 1254 bp, Salmonella enterica
atgagtgataccgttcagcttccgatccctgcaaagttagcgccgctgtttactgccacgaacaaacgctatcgctgctcgcacggcggacgcggtagtgcaaagacgcgcacattcgccctgatgactgcggtgaaggcatatcaggcaatgatgaatggtgaaagtggagttgttctatgcgcccgtgagttcatgaactcactggaagagtcgagtatgcaggaggtgaagcaggcaatcatatctgttccgtggctggcggctaatttcgatatcggtgagaagtacatccgcaccatcgataagagcgtcagctacgtgttctgtggcctgcgacacaacctcgacagtatcaaatcgaaagctagaattctgctgtgctgggttgatgaggctgaatcagtcagcgaaacagcctggcagaaactaagccctacggtgcgtgaagagggctcggaaatctgggtaacctggaacccggagcgggacggcagtgcaacagataagcgattccgcaaagatgctggcggcgactgcataactgtagagatgaactatacggataacccgtggttccccgaggtgctggagaacgagcgccttaatgatttgcgccgactcgacccggctacctacgcgtgggtatgggagggcgcttatctcgaaaactcagataagcaggtgctggcgggcaaatatcgcattgctgagttccccgatgacctgtggaggcaggctgagcgccttttctttggtgccgacttcggctttgccaaagaccccaacacgctaatccgtgatttcatcatcgggaacacgctctatatcgaatatgaggcatacggcgttcataccgagcttgaccacatgccagcgctatacgacaccataccgggctcccgcgattggcccatcaaggcagactccgcccgccccgagacgattagctacctaaaacggcagggattcaacatatccgccgccgagaagtggcaggggagcgttgaggacggcatagcctacctgcgaggatttgacgaaattatcattcacccacgctgcaaaaacactgcccgcgaagcccgtttatggtcatacaaaaccgatcgcattactggcgaggtattgccgaaactggctgatggtgacgagcactgctgggatggaatccggtacggtctggacgggtatatcaaacgcaagcctcaatcgatggggatgctgattcctaagcgccttagggggcaataa

SEQ ID NO: 402588 - DNA, 654 bp, Salmonella enterica
atgaaagcaatcaccgatatcggccaggctgtcattcgcgccggcgacaaagaggtatttctcaacccttcatttctggctatgtcccgaatcggaacgcctgaactaatcgttgatgttttcgtgaaagttcatgcaggccattacccaaagcacaaaatctccgacacgcagatactgaaagccgtcaacgctctctgtttcgctgaaatggcgtcagcggcgtggagggtggtgcgcaattgctcggatggtgacgttacggcgctgattggctcatgctcagtgagcgcatcaggcagactgctgtacaggcctggagtgattcctgttgaggatattatccaacttgcccgtcacctgatgcttcatggcgttatgggcgaccagccgccagaagaatttgagagcaagaaaggcgagtacagcgataaatttaatgtccggtcattcgtttacaccgccgtggcccaccttgggatgagcgagtcagacgcgtggaatatgacaatgaccagtttccgggccgccatgaacgccaaattcccgcagaaagagaaggccaaagtaccgactcaggagaaatacgacgaagtaatggactgggcagagcaaatgctggcgatcgacgcgcaacggagcgggccgcattaa

SEQ ID NO: 402589 - DNA, 756 bp, Salmonella enterica
atgtctaacattgtccctatgaattacgatgaccgttcattcccttttgcttctgattgctggtttaatgccacggttgctgcaaaacaccacggaaggaaagtcactgagtggttgcgcctaccttccactaaagaatatatggcggaactatgccaggagcttggtatagaagggtttaattttaaaggtgggattttcccacctttagttcgcattgaaaaaggccgatacggcggtacctggcttcatccggagttagcggtggagttcgctcgttggctgtcggtcaaattcgcccgcgcctgcgaccgtcatattaaaaatcttctgctgagcaaaaactttcagctcacggaagatcagattgtcggcatgatggtctgccagcaacctacatcttgggaaaagcgttttaaagacccgttctaccaggcgctgtcaaaaatgtctggtcttccttacttcggccatgtcggcggttgcccggcgctgttcgggcagatcaccgctcgctgggtctacggtgttgcgcttcctgattatgtctatcaggcggccaaacaggcggcgggtgacagcggggagaagattcaccaacacctcaagcctgatgcgctggagaaggtggagcagcaactgatcgccgttaccaacatcgccagttgcagcattgatcagaaggacttcgaggctcgttgcatggccgcattcccggttaaaggtcagatgaaactgctgtatgcggcggcgtaa

SEQ ID NO: 402590 - DNA, 372 bp, Salmonella enterica
atgcgaagtcccggcttaaagctgtccttgccatctgatatatctgataccttttgtacaattcttgatgagtacgccattcaacactcctctgtagaagaaaaaagtaacggtcccaagcttgctgtcaattcagcttctggcgcggcaaaagacataatcatcgagatcgtcaattcagcaccattctgggcagcttttagcgcctgttttatcgcttacctcaaccgaaaccggggtaagaaagcgtccattgaaaaagacgggaaaaaaatatcacttgaaaacatcacccatcatgaaatggcgaaattccttgaggatgctaaaacagtggtttttcgtgaagataacgacaaaaagcccacctga

SEQ ID NO: 402591 - DNA, 204 bp, Salmonella enterica
atgctctctaaaaataacgaaacccggctgtgcgcgaacactaaccgggtctctatcgaaaataaccgactaggaaatatcgacatgaaaagtatatcaaaattatcgaagaacgaaaatgctgttattgcgccggtaacatttagctttcatgaaactcatgatgtacgcattcaggtaatcgacggtgaaccgtggttctga

SEQ ID NO: 402592 - DNA, 471 bp, Salmonella enterica
gtgaaaaagttgtcattcatacttcttacttgcatgtttatgtcgggatgcgaaaagaaaagcgatgacgcgctatttgaagaggcaaagacttcagtcaaaagcaccctggcaaaggactataagccaggggagtgccaaagatggcgggtgatgagtgatgataaaattgccccaaaagccagaatgattgctgtgtgcgactcaagctttaatattagtaacgctttagtattttctgacatgaaggtttataggaaagaaaagcatagcgctgtttgcggcgtggtatccgggaaaactgatataagcaggattggggcaaggtttgtctacgtcgacaacaatgaaacgccatttgttaaaatgtctaaatacccagatcggttgtctggaagtgaggtttccaggaagcttacagagcaattgattgatgtttttaacagatcttacgagtcttggtgtaattaa

SEQ ID NO: 402593 - DNA, 2544 bp, Salmonella enterica
atggctacaacggttggtgaaattgagataatcatcaaggcagaaaccgatgcgctaatcaaagcaaataagcaggttgaacgcattactgataatatggaatccggctttaaaaaagcagatagctcagcagacaaactgaacaccactgtaacaaaaacggccagtgcagtttcaggtggcttgaagtcaggaatgcagcaagctggttaccaaattcaggattttattgtacaggttcagggcggacaatctgcgctggttgcctttagtcagcaaggctcgcaactcgctggcgcgtttgggcccggcggtgcagtagttggggcgcttatcgctttaggttcagtgctggttggaactctatcgactgccttaggcagtacgaaagatgaaatggaacaacttaaaactgccgccgaaacactaaataaagtagtggttataaatagccagggagttgcagctctgtctaatgattatgctcggctggctgctaccaacgccactttggccgcgcagttaagagacaatgctattcagcaatacgagatagctgttagggatgcaggcaaggctatcacgaacatcattgatgagcagtcatcctggtggagaagtcttaatggcggtgtggctagcgttaaggcttttggtggcgcaatggatacgatggagattagcgctgacaattttaatgacgccataaaacaagcaacctctttggggccttcattcaactcctcaacgttgacgctggtaaacactgtagcgatgctttcaagtcagtttgatatatcagacgacgcggcatacggcttgggtaaaaggttaaatgaccttgcaaaaaacccgtcgccacagtctgtaagtttgcttgtggattatatgaaatcgcttaagccgaccacgcaagatggggctgaagctatatctaaccttgaaaagaaaattctttatgccgccgctgcaatgcaacaggcccatgacaatggcgagtcgttgcgaaaaacacttgatggtctaaaaacagaggcgcaacaggctaattttgatggcataagcaagcagcttgaggcgcaaagaattgctttgaccaagggtaagcaggcagcaatagagtatggaattgagcagcaagatttaacccgggagcaaaaggatcagcttattgcgctttctagaactaacgcgcaactggcggaagaaaaagaaaagagagataaagcaacaaaggcaggcttaaaacaggctgccgccacagaatcaatatctctaaaacttgaacaacttcggaaaagagcggagctgtccggggatagcactgctgatcttagccgcgaacaagccattctcgcagcccagcaatcacttgggaaaggagctactcaagagcagatcgcgctggctggtaaatatcgaggcgaaatttgggacacggccaacgcccttaaagctcaggccgctgctgaaaaactactaccggaagccagagaaaacgcgagctacaagcaggatgttgaagaccttaaaaccgctctggcagccaagaagataagccaggagcaatttaacgaaacatccctgcgtattgaggagcagcatcaggcgaacctggcaaaaatccgggcccaacaggcagtaacaccgcagcaatctgcaattggtgaaatcgacccggttcagcaattagcaaatcagcacgcgcaggaactggctctcatccagcagtttgaaacgcaaaagggccagattactcaacgtggactcgaactgatgaatgctgccaatactcaatacgagcaggcccgcatcgccgcccaatgggaaatctatcgcaaccagagcaccaccaaccagctcatggctgacgctgtagattcgcttcagggcggggctaccaatgcgataactggtctcatcaatggtacccaaagcctgcaggaatcattcgctaacatcggcactacaatcctaaacagcgttgttggcagtctggtacagatggggatggaatacgtcaaaagcgcggtaatggctcagtctgctaacgccacagcagcaacaagcgcagcggcgacaggtgcgagtattacggcttctatggctccagcagcggcagctacaaacattgccacaatggggcaggcgtcaacaatcggtatggctgctatggcgtcggcgattcctgcaatggtcgggctatttggtggcgctcgttataatggcggccccgtaaatgctaacgccatgtatcgggtaggagagcacggaaagcctgaaatatttcaggccagcaatggtagtcagtacatgataccgggtgataacgggcgggtgattagcaacagggacatgcaggaaggtggcagtagtggcgcttcaatacagcaggaggttcatttccacatccagaccactggcggcatagacgatgcaacaaaggcgtggattgttaaatctatgaagcaggttgctctgtttcagatcagtgaccaggccaatcggccaaatggtatgatacagccgaggacaaaacggtaa

SEQ ID NO: 402594 - DNA, 720 bp, Salmonella enterica
atgcatgaattactcgattatgcggcatcgtcgcaggatgaagtgtgcggcttaatccttgatggcgatcggctgttccgctgtcagaatgtgcaccccgatccgggcaagcatttccgcatcagtgacgatgactggctggtggccgaggaagcaggagaggtgacggctgtctttcactcgcatccgcaaagccagtcagctctttcaagtgctgaccggcagatgcaggtgatgaccggtctaccatggtggctggcatctggcgggcaactgaggaaatacaggcctgtaccactcctgctggggcgcaagtttgagcatggcgtcatggactgttacaccctgttcagggacgcataccacctttgcggaatcgacttgccggacttcgggaggactaacggatggtggctgcgaggagagaacctctatctgacaaacatgtcggccaacgggttctatctggtatccatgcaggatgcccaaccaggcgacgtcattatcaggcagccattcccgggcgccgacccatgccactcaatgattctccttcatgacaacatggtgcttcaccatgaccatgccggacacctcagtagacgagaacaaatgcgcccggcttacatcaagcagacgcattcaatctggagacacgaacagtgctcatctttaaatttgcaggcaatttacgccgattttaccgccagatatccctga

SEQ ID NO: 402595 - DNA, 1347 bp, Salmonella enterica
atgtcagcaggaaccttaactcttaccaatgacacaaatgctgttactggcagcggcacagcgtttacaacagaacttgctgctggtgattttattgtcgtaactgtcggcggcatcccttatacactcccggttaaaacagtaaataacaatacatcactgacgctggttagtgtttacacaggcccgacacaatccggcgctgcgtggtctgcggttccccgcgttgctctcaatatggtcacagccgcactggttgcgcaaagtgctgaagcgttacgtggacttaactacgacaagcagaactggcaacaagtgtttagcgcatctggcgacatcactgtcaagttaccggacggaagcacattcagtggaccatcatggaaatacctgtctgacaacatggctactaaaaccggtggggctgtgcctgttaatcagggcggtactggatcaaccactgaagaaggtgctcgcaaaaacatcggacttggaagctctgcaactaaaaatacagggactgatgacggaaatgtcatgctcgtcggagcgtatggcataggtaaatcttcaggctctatcactgcgaacgaaagccacaccagcacactttttaatgataactttgtcattccgcatttaggattgtgctctttcagaaatgataataatgtcactgctggtgaccccccattttatcaatggtcaccttcgatattctggcgaactggagatacatacgcatgtattaatattcattatagcggagggcctataagaatatttgctggcggaattaatgaacagaatttaattaccagcacaaacggaagaactttatgggatacaagaaatacaaccgttgacactagcggattcattaaacaggcatcaccagtggtgaaaatttttcacgatggtagttttgagactaatgatgaatcagccggagtgttcgtttctaagttagaaacaggccaatatttgatcgagggatgtaccggtcttaacgctgatgccgcctggggaggcatagatggtggatttgagattccggtagatcgaaacaagctagcacgcatctggcttgattatgaagtgaatgcagatggctctgttctggtcaaaacataccatcgcacacatccgcaatctccagaatttgccagaaacgaaattgataacctgacaaatggagatccgattgatataccgccagactcttttgtttctgtgcgtgttgaaatgccgtctgacagcatctggaataagaaacaagaggccactcgtatcgctatggaggaagccaggatgaaagaagagcggacagatggtaataatgtgtag

SEQ ID NO: 402596 - DNA, 426 bp, Salmonella enterica
atgaaaaataattactattacagttttactgaaaaaggattttattggctgagtgaggatgaattgaataatagtactgttcccacggatctggtacctatcagtgaagatgttcatgcggcattgatgtttggtcaggaagcagggaaatatatcagccacacgcctgcaggacccatactgatagaccagccagactactcgcctgaggaactcattgcacaggcagaaatcaaaaaggaaaaacttctatcagaggctgaagttgtcatagcgccactggcgcgggcagtaaaattaaaaattgccacagatgaagagattaaacggctggaagcatgggaactctacagcgtaatggttaaccgtgttaattgcagcaaagccccggatattaactggccggaggtaccggatgtggcgtga

SEQ ID NO: 402597 - DNA, 612 bp, Salmonella enterica
atggctaaaaaatcaactcagacaactgtcgcggcaattgctgcaagccttatggcttcacttgcgccggtcccggcgcagagcacaacgctaccagtaacggcagttgaggttagcgcaaatcatggtgtcgctgcttctttaacttttaacttaccgagtgggcaaattttcttacctctcgaagaggctgcggactatttgaatcatatcaatgaccgtcagcgtttccttttgaatgcgcttgtgcgagaaaggcaggacaagggcaaaggtccgctttttgataaaacagctcaaatgaaacgcttgtgtgttcagggactacagaatcacatacgcattaaagaagctgtccagatggtcatgaaaagcgaaaatctctataaggctttccctggtgatttaaagcaacaggcaaaatacaaagcagatctccttcgctttggtcgtgctgtagcacagggagagttcattctccgggacactttatcactcattgaacaaagtgaggcaccagaaagcacggtacgtttagctgatatgccagctgacgaggaagtgaaagcctggattgccgcagagcataaaaatcttgggctggcggtatag

SEQ ID NO: 402598 - DNA, 381 bp, Salmonella enterica
atggtttgtgtggttagcgtccatattgatgtagaaatgccagatgtcgcaaaaagttatgccagggctcttgagaactggaaaaactccggggtgttgcctgatcattttggcagtgaagggcaatgggaagataacaaaaggctgtgtgattcttacgtttacaaacttcacattagattaccttctgaacccggatggaagaagacaaaggcgcagattgacagacactctaatcactatctggtgttttcaaggcactggcttgattacgacaaaattcagatcattagcgtcatgagtcctaatggccatgagaaagcaaagacttctttcatggcagaactggaacgaagagccgaagattttcaaaacagctaa

SEQ ID NO: 402599 - DNA, 252 bp, Salmonella enterica
atggaggcggttagacagagtaagcgccgctatattcatcatatgtatcagctcagactcaaactgacagtttccgcagacagaatgcaatcgagtctgaccgtccgctctgagcgagaagcggacgcccgcataacgttaacaggcgtccgatattttgaagtgggcagattacttaacccgcttccccgtttcgtcaataaccttctcgccatcctctttggtaaacgctcctttctgaccttccggtag

SEQ ID NO: 402600 - DNA, 678 bp, Salmonella enterica
atggacaaggatgaacaatatttactttttgcgctctccacgccgatggaggtgctatatatcggcaatgagccttcgcatacctctccagcaatgtataccggaattcctgctgtcgatctctccgattcatgggggattgataaccgtgaagatcttattcaaaccatctatcggatgacggacgacggtcatgcggcagatttggctcccttttatacccgctggtttacgctatctcctcgccaatggcgcgaattcaccgtacagcttagcgagcagggccagatttatgcgcgatttgttgccgaaaccgcactatgctgcggtcgcggcggcattaaagcctgggactatgtccgtatgggggtgttgaatcaatggctgacggaagaagaaagcctgtggctgcaatcgcgtatctatgcgcgggcgtactatttttacgacggctggatacagtattttgccgcctattcgttgggtcggctgtactggcagaccgaagggggcgatatacaggagcattttaccctgctgcaatacgaccattcaggcaaacggatgtttaatgaattggcctccagtacagagagttattatgcgcagctaccgtggcgtccgctcaacgaacaaccgatatgcccggaaacgcttaaaggagtgagcgatttatga

SEQ ID NO: 402601 - DNA, 507 bp, Salmonella enterica
ttgattgaatttttatccagcgcaacttggcaggggattggagttataagctcaatcatcattgctgttgtgagttttctactatctcaaaatactcgacgtcgattgttcagatcaaaaaactcaagatttgaaaagaaatcaagtcttcctaaagagttgttagatgggcagataactaccctgtatggaaaagttcgagatgaagtgttccccggaccaccaaattatgaatcaataaatgatggtgacgaaccacagttctactggattctttatactaatgcatcaattacgttgatagggcgaagcatggaaaatggtgagttatatgagaatggctcatcgtgtatgtttcaattatgcgtacctacagatatgtatgataaccgtctagatatactcggaaaatacgtaaaggtggaaggagaagtcttcttcgggcgcactggtcaccataagaccaaagctctattaaatgttagttcaatcaaaattttgaaatag

SEQ ID NO: 402602 - DNA, 810 bp, Salmonella enterica
atgaataataatctgatgaatatatgttacaaaggtgaaactggtgaaagtgacattagaactacgattatttccgatattttatatatttctttaaaagatatattaatcactttaaataaagaaaatagagaaataaattcacgctacgcaacaaagtcaatgatcggacttattaaagcacaactggaagcattggatgttgatgagtataaagcgctggatgtaaataatggagtattcgaaggtgagaaggaaatctttgttacacaacccggactttatagagttatgtccagcgatagaagtgctgctggtaagcgattccaaaaatggcttttccatgaagtaatcccttctctaacgaggcatggtgtttatcctgcgcctcctgaagcaaaagggtctgcatttgcacaaatggccgaaatattagctcaaaactctcgtatgcttgcagatactattgtaaaacacgaaaaattggccgaagatgttttacaagtaaagggaaaagttgctaatgttgaaacacgtttaacaaatctcgaatcgaacaatcaacgtaacactaatgagttccaaactcttgaagaaagactcgtctttctcgatataaaaatgaatgataatgatctcattgaggcattagcttggtgtgaaaatatttcctgttccaaagcacgaaaagtagtccgtggggataaacgagaatctacacgattcgatgtgcaaactatcgatgaagcaatcactataatgaaaaataaatctgcactacatcacattgattcatctataaataattaa

SEQ ID NO: 402603 - DNA, 375 bp, Salmonella enterica
atgaaaattataacacgtattaaccaattggttttggtatccatgttatctgtatttagttgtcagagtttagcatctgactcaccaataaaagtagatgttgggggggatacacttaaagttggccctaattatttacctatttggagctacaatatcactagtatggaagatgaggtcattattacttcaatagttgttaatcgcggtaattgcctgccttcgattgcaggtcgtggaaacaacatgaataaaaggcttgggtatggtgaaacatttacatttactattccaacaaataaaaattatactcagtgtaaaccacttgagttgatagttggtactcctaatggttcattaaaatacacttggtaa

SEQ ID NO: 402604 - DNA, 426 bp, Salmonella enterica
atgaaaaagttgattgatattactttgttgatggccagcgtgttgttatcattttcttctttcgcagaaagtaaactttgtgaaccgaatacaacgttcttctttgctaacaataaagcacatacaaagtctgttgaactttgctatgggaaaaagggagttaaatatatctttggcccagaaagtaaaccagaaatcacattagaagtttccagagataaaattatctatgaatatgagaatggttgtgaaagcattaccattcctaatgggaaaacggattactatatctaccagtgcgggagttcacctcatacagatcccaccttacaggttaaccaacatggtgatcctgttgccacaattgaattagatggcaaggatgggaaatacttaaatgccattgctgacgcaggttttgagtaa

SEQ ID NO: 402605 - DNA, 333 bp, Salmonella enterica
atgaaaagaatcaaagtaattgcaagcaatgtcgctaattcaactgaaaaaatgtggctcgacttaaatatcactgaaaatctgcatattgatctagaaaacgagattctgggaagtggcagtgtgatgtgggaacaatggcatgattttaatattcttgagttggataaaaataatgctttaatggattggaaaaatgattcattttctgaatgcaaaagcactattgacatccttaaccgaaggttagtggtgggggaaaaaattcgttatattgatgatggtgaacactacatatatcgtatagaagaaataagggatgaactgttttag

SEQ ID NO: 402606 - DNA, 738 bp, Salmonella enterica
ttgcttataaaagagcgatatgaatatggttcacttaaaatagacgagagcagagctgcatgtgaaaaaatcgatgaagaggatgagagcgatgatatagataaagaaggtgatatagaagatgaattaatagcaaatgaattaaagccagatattcttactttatcacagaattctcaacgggaacttgagcgtttttatcgagatatagaaatagctgcttataaattccgtgacaacaatactattaaagcctggatacttaaacttgctgaaaatactgtccgtattgccgggctattacagtatttcacagatagtaataaacgtgaaatatctgatgaaatatttgaatgtgcaatgcatattgcagagtattatgcgaataaaactattcatttattccttactacttttgcctcaccagaacaagatgccgagtgtgtatacaactggataaaatcaaaaatatcagagtttaataatggtatcggaagcatatttttaaatcaggacaatgattcagacagtagtgctgaggataatcaacagatagagccaattgttgatcacatcaaaaaatcatatatgcgaagacatattagccacatacatttaagaaatagtgcacgtttaaatgctgccgtaaaacttcttgaagaagaagaaaaaatatggataaaaaaacaaccaaactctaatggtagtgtaactgagaaaatttatttgagagaataa

SEQ ID NO: 402607 - DNA, 129 bp, Salmonella enterica
atgtatcacgtcagtagtcttttttattataaaacctacaactattcgaaacatattatttataagcgtcctgcaatcacctcatacgcatttaatataacgaaggtggaagttattaccttaccataa

SEQ ID NO: 402608 - DNA, 474 bp, Salmonella enterica
atgtctgcatttattttaactccggcttttccggtgaatgaacagcgtattattcgccgtgcaatgcgccggctggagaaataccagcgcaatcccggtgaacaatttcttgcaacaagctttactaaaatctggctgcaactacgtcttgcccgacaggaacgggaaatatttatggtgctgtatctggataaccagaatcgcctgctggagcacgaaacgctgtttctcggtacggttaacagcacagaagtccatccccgcgaaattgtgaaatcggcgctacgccacaatgcagcagcggtgatcattgcacataaccatccgtcaggtacgacagaagccagtcgcgctgacaggctcattacgacgaagattgaaaaggcgctggctctggtagacgtgcgggtactggatcatttcattatcggtgatggtaatacgttgtcttttgcggagatgggctggttgtaa

SEQ ID NO: 402609 - DNA, 900 bp, Salmonella enterica
atgaaaacgataccacatccaatcccctatcaaggaagcaaaagaaaattagcacctgtgatatacaatgttatccctagaaacatacagtgtttttacgaaccatttgcaggctcagctgccatgactctttttatggctagtaataatgcggcagagcggtttgttgtaggggacaaattttcgtctattatcgagctatgggaaatgatagttaataatcctaatcaggttattgatgaatactcattaatatggcacgggtttgatggcgaaaatcataactactttaatgaagttcgtgaacaatataataaatcacaaaatccggttgcgttgctttatttagtatgtagatgcgtaaaaaatgcagtcagatttaattcaaaaggccagtttacacaatctgcggataaacgaagaaaaggcatggccccagaaaaaatggccgttgctatcgatggcgcgtcaaaacttctcaaagggcggaccgaatttcgaattggcgactggaaaaccaccttaaatgatgtgggatatagtgatttcgtttatatggatcctccatatttaggaacttctacaggaaaagataaacgttaccatgaacaacttgagttagactcactcgtatctgggctagcatttcttaatgaacagaatattagatttgctctttcttacgatggaatgactggagataaagaatacggtcctgctctacctgaacatttatctatgtgccgacttttaatcaatgcaggcagatccagtcaagcaacacttaatggagtcaacgctgagacaattgagagcctttatctttccggcaatataaaggctcctataaataaaaaaataaacataaaaaatacaattcaagagagtttatttttctaa

SEQ ID NO: 402610 - DNA, 723 bp, Salmonella enterica
atgaataaacatagcatagaccctcgcatattggcactatgtgggaaagtaacaagaaagcgtgccagaaccgtactcgaccatctaattgagtatggttttattacgacggaagatttacaagaaacgtacggttatgatcatcctccaagagcaattagagatgttagagaggaaggaatacccttagagacttactcgactattagtaatagaacaggaagaaaaatcgcagcatatcgatttgataatcctgataaaattaagaacggacggataggtgggagaagagcattctcaaaggcgtttaaagaagctctaatcgaaaggtatggatcccgcgatgccattacaggcgaacaagtagaacagcgttatttacaaattgatcacagaatcccatatcaagtgactggagataccgagcatgatgagcaaaatcttgaggcatacatgctcattgatgcttcaaaccagcgagcaaagtcgtttacatgtgaatcgtgtagtaactggctagaaatacaggaccctgctatttgtatgggctgttattgggcatatccagaaaaatataatcatgtagcaatgaacccaataaagcaattaagtatcagatggtctgggcttgatgaaattaaagtttatgatgaactaaattcaagagctaaagaagagggtgtagatataaaaaccctcttaactcgttttttagaaaaataa

SEQ ID NO: 402611 - DNA, 1764 bp, Salmonella enterica
gtgtctttacgtggtgtccggctggtgaaccccgattacgattttggttaccagggaacgcccaggaaaggaactgctgctgaacttatcaaatcagacaatgcggtcgcccttaaatttctgcatgggttgttgtggtttgtgaatctggttaacactgaagaagaggctcgtcgacagtatgctatgacaatgcaggttcaggttgatgaggcgacttcgcgtttttatgcgcagagaacggtgtatgaccccatagatgaatttaacaaatcattcttgtcagaacttagtcatgtgcgccatctgagcctccagattgaacccgcatataaatcactccttgcagagcaagcaattatcaaagataagacccgaattatagatgaagcgagaaagaattcggatacatcgttagagaatgcctttaatcttgcagatgaagcattagcgaaatttaacgaagaaaaaacaactcttgctgttgaaagaaataaaattgaagaacaaatcgaaaaaattgaaaaagaacgctctgccacagaagacagaataaaatacgtattgggcaaaagaaatgagttcagcgaacatccgctttttgatcagagccgggctagcaaccatattgaaaaactgacagagtcgaaaagtattgaactcagagcggaacagcagaatgacgctatcgcttcagagattgaggttaacaatgccgttgcaattgcagcccagagacgcgtggatagtgctgagaatagtgcccggattgcaggtgatgaggctagggaaggaaaaatccatttcatggctaattttgagccagctaaccgcgatatattaagggatttagacccgtatgaatcccgcaaatcatttgaaaagcatcttaaatatcttgaggataccgaactagccttacaccgtcacgatgcagaaaaggcctgcacagagatgctcgccacgtttcgtgccgatgtcgtatcgactttgcaggatgcttttcagcgcatgcgacgtacgttcaagcagcttaatgatcaacttaaggacttacctttcaacaacaacacatatcgttttgtctatccagttgttgaaaccaaaacactgaaagatgtgcataactatgttattgaacaaagcagagctgatacagaagcagtaggaacgttgttcgatttctcacagaaacatccggcaatttcagtgatccaggatgtactaatggaagggagagtcgttgagctatccgattaccgcaattttttcacctatgacattatggctaaagatctgagtaccggaaaagaacgtcgcttcagcaatctactcggtaccggttccggtggggagcagcaatcacctttctatgttgcttttggtgcctcttttatgactgcattcagggtccagcgacgactgaaccaagtcaatgccggagcagtgctggcaatatttgatgaagcttttagccgtatggacgggaataacacctttgccgcacttgagtttttctcgcaaatcgggctacaggctttcctggctgcgcctttggatgcagaggttaaaatgggtcatcatgtagagcgtgtcatcacaattattcgtgacggcctgtcagtctttaccgatagtcgtcaaatcagtgatgctggttgggaactgcttgaaagtgataaccccaaacgccatcctgagttgatcgacgcaatgctgacacaggcaaggaaacagttgcatgttgaaaaaagggatgcctga

SEQ ID NO: 402612 - DNA, 1245 bp, Salmonella enterica
ttgaataaaacaactcgcaggatactggaacacatagccaggcaaatcaaccaccccggtatgccaccaaaagaggcaagcatcacgctgacatctaaacggtttgagtactattttggactatcaataaaagaacggctaactgtccatgaagagttacaggtattattcgagcggtataaatgtgcaacagttctgtttgggcctgtggctttaggtgaggttgcttcagttcatgcaatcgacatcaccagaccgagattgtttcttgaagccgctggtgtacagtgtctttacgatgaaattgaacgcgcctgcaaacaacttgctttgctcaggacaacctccaactggcttcaggttatcattgataaagcgcaatatgactggcggcaaggtcgccaggcatatggagtcaaaccttgtgatatcgtgcgcttaactgatgcaatcaggttactggactggctgggcaataatgaacagatgaggatccctgatattcgtaccctcagcgtagttcttttcaatgatacaaaacgtattgaagccatttctggtatcattgttcggctctaccgccctcggttacccgaatatctcttgaatgcagacaatgatcaaattctcgactttttaggtattcgtaaattctctccattaatcaggttcaaaggatcatttaaagttgttatggcctcaggctctatcgactgcactgacgtcagtccttatatagggttcccacccgatgctattaaaggaattcatccagtacaatatcctggatacatattatttatagaaaatgaaacaacattcaatcgttacacacgagatattatagataatggatgggttatttataccaacggttttccatcaagaagctggactgctatttttcgagaattagtaatccaaagtaatccaggtacgccagtataccactggggggatattgatataggaggctacagaattttagtccatatgcaatccattctgggtatagatttgcatccttttcgcatgttacctactgcagagcaatttacagatgatgaaacaaagttaatttctgttaatagattacattccattatttcggatgttgattctcactcaatacaaaatatggcaaagaagcttttaatactcaataaaaaaatcgagtatgttccatgggttgagcaggagaggttgaagctagtttctcctcaatcttttgaaaatagcgattga

SEQ ID NO: 402613 - DNA, 129 bp, Salmonella enterica
atggaagaaataaatttaatcaaagaaatctgcgaactaaaaagccagctatcttacgctaaaaatattggttttttatgggggctggtacttcatgtgcgttgggtttgccaaatatctctcaactaa

SEQ ID NO: 402614 - DNA, 564 bp, Salmonella enterica
atgggggctggtacttcatgtgcgttgggtttgccaaatatctctcaactaactgtccaggttgaaaatgcattaactggcttattgttggatttttttaatgtcattgaaactgacttgtcaaagcctggaaaaacaattagcattgaagatatccttaatcagataagacgaattcgtgaaattactgaagaacgttccgatagagaattcctcggtatttctggcgtaaacgtacgtaatctggatgttgaaatttgcaaaaatatttataatctaattcctgataaggaagttggagctaatctgactgttccaaagaaattttttgcatggttaaatatgcaaaatagagatttttcaaaagagatttttactacaaattatgatctggtaatagaaaaatctcttgaagctattcgcgccccatattttgacggtttcgttggctcttatgagccgcttttttggcaagaaagtgtcgaaacagttgttcgtagaaatgatctaactcaaaactggattcgattatggaagatccatggttcacttagctggttttag

SEQ ID NO: 402615 - DNA, 267 bp, Salmonella enterica
atgaagactgagtctacatatttagataaagttattcgtgttgattccagtactgtagaggtggaagtttcatcagaaataccttcggctgcgctaataatcaatggtcgactatataaaattggccagatcggtacatttgtaaaaatgccgatgggaaatattactatctatgctatcgttgctgcagtaagcgacaggccgttcacagatagtaatgaccctggcatggagcggactgggtgtggcacggagacttcactttga

SEQ ID NO: 402616 - DNA, 195 bp, Salmonella enterica
atgtcagataaatttatccggtttgctgaagttgaacataggacgggattttgccgttcctggatttaccacctgataacacagggagaatttccccgacctgtcaaaacgggtaaacaagcagtttccttcattgaacggaaagttgatatctggattgagaataaaatcaacaataaagattcatataaataa

SEQ ID NO: 402617 - DNA, 597 bp, Salmonella enterica
atgagtcaggacgcactcacgcacattattgttaccggccaggatccgcgcggcctgccggagttcagcgccctgcgggaagagatcaacaaatcgtctcatccgtcgcagccggaactgaactggaaactggtggaatcgctggcgctggccatttttaaagcccatggcgtggatctgcacacggccacttattaccccctggcgcgcacccgcacgcacggcctggccggattttgcgaaggggtggagctgctggcggccatgataagccacgactgggacaaattctggccacaggatgagtcagcccgcaccgggatgcttgactggcttaattcgcgcaccggcaatattctgcgccagcagctgtccttctccggcacggacctgccgttgctgtaccgcaccgaacgggcgttacagctgatttgcgacaaactccagcaggtggaattgaaacgccagccgcatgtggagaacctgctttattttgcgcagaacacacgtaagcggcttgagccgccgtcgaaaagcagcgtggacattccgccgcagaccaccgtcagaacgttgatctacgccccggagatttag

SEQ ID NO: 402618 - DNA, 216 bp, Salmonella enterica
atgaaatcagaaaataaaaaaacatcaagaaaaatcactgattttcttatgcatggtctaatttcagtaatcagtggatggacctttattctgtgtctttactggtttctctatttaaatacatggacactaagaatagtctacatcagtatatcaatactgattgctgggttcattatatggttactatccatctttttggaaaatgatagttaa

SEQ ID NO: 402619 - DNA, 174 bp, Salmonella enterica
atgcgtgcaatacatataaaattcatctttagtatttttctcttatattgtattactgctcaggcagatgatttcgatgaagaacgcgtgtacaggagtgatgaactatattatttatccataaatacacctgaagatattcaaaaaaataaattattacgccagtgtctgtga

SEQ ID NO: 402620 - DNA, 450 bp, Salmonella enterica
atgagaaagttcataattgcaatttcaactctttactttattttttatagtgaggtttcaaaggcctcatctgactattatctgaatagtctctgtgctagtgctgaggggagtcaggttgttgactgttacaaaaatgatttactggcaagtaacgtcgaattaaaaaaagcagaaaaaaatatcactatgcgcataaaaaaatggcacgaaatgaacgatgatcgtctggatacatccgttgacattgcattgaaacgactagaaatgtctaacgaaagttttactcgttatcgttttgcacaacgctcgtttgcacagatgtggggagggggcggcggaatggctagttctacacgaatttattcctgtgaagcatatctaaacaggcaacgtgccgaacagttaaataacgcgaatgtagctgatttcagtaccgatggggattaa

SEQ ID NO: 402621 - DNA, 216 bp, Salmonella enterica
atgaaattaaaaaagaataataaagttccatcctcacgaataattcataaggttattggtgacatggcttcaattgttggtgggctacttgtttttttatgtgtctattggttatttcgtctggatacctggacagaacgagggctttatataggcacatctatatttttgtctcttattctcataaaaatactatcattcttcaatgatgaatag

SEQ ID NO: 402622 - DNA, 846 bp, Salmonella enterica
ttgctggaactagtgcatttagcatttgggatgaaagactgttctgagatgtcagtgaagaataatgtggatgattcaaatatgctcacatacgacaaaaaaagaacactatcaacacaagagagttatggcatttctcctggggaagaaatatggttaaaccaatctgggtttgaagtaccctatactctatatcacacagataaatatatggagcttgctcatcagattgtcgaggtaattgtttcacctgataccgctataggttttatgcatggtattatttctgttcctgttgacctcgcttatttgacccgggcggtttttgacaccgaaaacaacttcaagagacaaggagaaacttttcgattactaaatgccataaaaaatggacttgcaaatgagaataatataaataaagccattaataaaatacttgattgtttttatacttatatcccagaaaagacaagaggcaaaatatacagtcgaattggtggttctgtggctggacgcgcaataacaaactcagttatttcagggcgaattgccacaactattgccgggcgcagtagtttatacattaaattcaagggtggcattatcggaaacattcttcttttgggtggaatgacagagagagccatttactcatcatggggacttaatgcagactgtcctgaaatatacaatctgctatatccagataatcttgatctactctattttcttgttgagccattaatggagccttttatagaatcgatgaaaataagagaaaatgaaggacaaactgccttcaatgagttaatggagatagtagttgatgaaattaaaaaagaataa

SEQ ID NO: 402623 - DNA, 480 bp, Salmonella enterica
atggccaatatagcatatctgacactgaacggacaatttcagggattaatctcagcaggttgttcttcagtggagtctattggtaataaagcgcaaatagcacatatagatcaaattgtaattctggggttagctcatgggattactcgaaatcaaaatgttaatcatcagttactgacaataagaaaacctattgataaatcttcaccgttgctgggtaaggcgatcacagaaaacgaagttctaacatgcgatttcgatttttatcgtacaaatcgtgctggtataaatgaattatactataaaatgaaattatcgaatgccagattatctagcgttcaattcaacatggctcataccatcacagatagcgcagggcaaccagaagaaaccatttcatttatttatgaaacaataaactgggagcattgtattgctggaactagtgcatttagcatttgggatgaaagactgttctga

SEQ ID NO: 402624 - DNA, 567 bp, Salmonella enterica
gtgttcagattaccgacaccccgattattcagcggactgagatcggcgctcagaccggcaatgccccggtttaaggtttccgccgcctggctgctggcgctggcgtggcttttgctgctggtgtggatctggtggaaaggtccgtcatggacgctctacgagcagcgctggctggccccgctggcgaaccgctggctggccaccgccgcctgggggttgattgcgctggcgtggctgaccatccgggtcatgaagcgcctgcaactgctggaaaaacagcagcgccagcaacgggacgaggcgcaggatccgctcagcgtggaactgaacatccagcaacgctatctcgatcactggttactgcgcctgcaacgccatctcgacagccgccgctatactgtggcaactgccgtggtatatggtcactggcccggtgggcagcggcaaaaccacgctgctgcgcgaaggttttccgtccgacatcatttataccccgcaggcaatacggggcgtggagcagcgccggtatgttatcccgcatgtgggaaaacaggcggtgatttttga

SEQ ID NO: 402625 - DNA, 1044 bp, Salmonella enterica
ttgacaatctgtgctgtcatttctggtgctgagggttgggaagatatccaggattttggcgaggcccatatagaatttttaaaagaatatggtgattttgaaaatggcattccggttcatgataccattgccagagttatatcctgcataagtcctagaaaattccatgaatgttttattaactggatgcgagattgtcactcttcagatgatggtgatattattgctatttatggaaaaacacttcgacactcttacgataaaagccgtcgccggggggcgattcatgtaataagtgcgttttccacaatgaacggtcttgtactgggacagataaaaaccaatgagaaatccaatgagattactgcaataccagaactgcttaacatgcttgatatcaaagggaaactgattacaacggatgcaatgggatgccagaaagatattgctgaaaagatacatcatcaggaaggtgactatttattttcagtaaaaggtaatcagggacgattgcaaaaagcgtttgaagaaaaatttccgttaaaagaactaaataatccaaagtatgacagttatgccacaaccgaaaagggacatggaagagaagaaacccggcttcatattgtcagcgatgttcctgatgagttaattgattttacatttgaatggaaaggtttaaaaaaactatgtgtggcggtatcttttcgttcagagaaagatagcggaaagaaagaaccagaaatgctggtgagatattatataagctcagcggatttaacagcagagaaatttgccagtgcgatgagaagtcattgggatgtggaaaataaattgcactggcgtttagacgtggcgatgaacgaagatgattgcagaataagaagaggaaatgcagcggaattattttctggcataagacatatagcggtaaatattttgacggaaaacaaggaattcaaagcagggctgagaagaaagatgagaagagcggcgatggacagagagtacctcgcgtcagtccttgcggggtgcggggtttcgtaa

SEQ ID NO: 402626 - DNA, 747 bp, Salmonella enterica
atgaatcatgtcgccgggccgaccggttattccccggaggggcgaaagccccttctgccgtccacttcttcggggtttcaccccgcagtggacctttccgatggggcgcccgtcaccacgtcacggggcggctgtccgggggcggacgcaaaagtttttgacgcccgcggcaaaaagttttgtggccggtacacctccccctggacggctgaaacgggatgtggttacttcagcccccggaaagtccgcagcgggaaacaggccgcagaggtggcggcaggagggaaaaagccttacgccccgcaaggggtgcggggagcgccgtcaccggcgcgacaatggcggcgcgaccgctccggtcgctgcaagccgggtgttcacgcatcagaccgtagcgaagcccgaaaccgcgccagcgggttcggcggagcctggcaggtgcgccagcagctgcccggcggagtcgggcttgacgaccggatgccgtcaggcagccgggagccgaaggggcgaccaaagaaagaaacaagagacgtgatgacagtatcactgcataatccggccaggacatatgatacaacctctcatcatcccgtaaccggaaaggcggggttgcagcgccgcaggcgctgcttcccgcttttccggcaggcgacagcctgccagtttttttcgcgcgggctgacaggcggcttccccgcctgccatcatgtttacctgctttttcctccctgtaagatgaagtga

SEQ ID NO: 402627 - DNA, 318 bp, Salmonella enterica
gtgcaattctccagagtagagccccgttctcaattagcgttatcgtttctctttatatgctgttccataaaaccagcgttagcgcatgatcattttaatccattatcgttgaaaaatgatgaaccgggcgtggagaatgtcgatctatcggttttcgaaaagggggggcaggcagaaggcacctataatgttgatatttatattaataacgcagtgttgaaacaaaaaatattgcctttaaaaataaaaaatcagcagataataagctctccctacagccgtgtcttagcgttgaacaactcaagcagtggggcgtaa

SEQ ID NO: 402628 - DNA, 144 bp, Salmonella enterica
atgcctgtttacggctatcaactcatgtctgttcgctgtctggtcacaggaaagtacgcagaactgaaacgacaagacggaatgagcgaagagccaggaatctttccacttctcgtgcgagaaaaaacgggaagtgacggataa

SEQ ID NO: 402629 - DNA, 1620 bp, Salmonella enterica
atgggacaaaaaattccgaaaggttgggtaatagagaatgggcgctgtattcagaagaaaataaccagttatcctcctataatctttggaaaagatccgtacagtaataatttcctggcatcttatgggcagacttacctgatacttgctgcgcctccggcaagtggcaaaggtgtcagcatagttgtacctaatctgcttacgtatccgcattcggttgtcgtcaacgacaccaaattcgaaaacttttatttgacggcgggatttcgtaaagcctgcggtcagaaggtatttcgtttttctccggaacgactggaaacgcaccactggaacccattgaaggtgattaacaaagaccctttattccgtctcggtgatacgcggacccttacatcctcgttatatgtaccggacaacatgaagaacgctagttggttttcgaaagctggggatgtggtaacggccattattttgtatctcatagagacgccgtctttgccgttaagcttgccccaagtatatgagattgcagcacagggaacccgtcttggcgaatgggctcagcgagtggttgatgagcggcacggcagacccgatgaattatcttctgaaactgtacgtgagctgggggtgatcatatctgaatcgaaaggcaaagagttttccacgctcatgtcctttgtcactggccgcttgagtgtatacggtgaaaaattggtagcgctggcattaacggaaagcgaaaacgaagaagaaaatatagatttcagcagattacgtgttgaaccaaccagtatctatttttgcgtaaccgaaggtgcgctaaagaaatttggtcctctgatgaatctattcttttctcaggctatccgtgaaaacagtaaagttcttccggaacagggagggaactgcgaggatggatcgctacggctgaaatatcaggtactattcctggaagatgagttcgcggttatgggacgtattgaagtaatggaaactgcaccggcactgacgcgaggcgcaggcttacgttatatcatcatcttccagaacgaaagtcagatttgctcagataattgttacggtcctgaaggtggtaaagcagtaatggagccatttcatattaaagttgcatttgcacctggtgatatagatacggcaaaaaaatacagtgaacggctgggaaatacgacgattaaagttgcctcaaccaacacgaacgtatctgaaggacagcgacgttctcgtgggcgaggtttttcattacaggcaagaccactgatgctcccacaggaaattaatgaattaccgtataaggaagaactggtttttattcagcctacaaaaaataacccgacaatgaatatgagagtagaaaagattttttggtataaggaaccaatatttaaagaaagggtggatgaaaaaaaatacccactacctgatattcctgaaggtgatacttcaaaaattgaagggcttgttgttccagtcagacccccggtgaagaaaaatgtatccatatcatcacctgaaggtgatgaccttaacgcggaacagaaacgccgtattatggctcctggtgtggaatcagaacaagatgtttatgaggatgaataa

SEQ ID NO: 402630 - DNA, 636 bp, Salmonella enterica
gtggccgtattcgcctttcagtatcccggcggtctctttggcgatggttttgtagcgttccccggtcaggacgttgagcaccgcctgggtgccgacaatctgcgaggtgggggtcaccagcgggataaagccaaggtcctcgcgcacgcgggggatttccgccagcaccaggtcgagtttgtccgccgcattctgctgcttcagctggctttcgaggttggtcagcattccgcccggcacctgcgccaccagaatgcggctgtcgtagcctttcagctggccttcaaaggcgtgatattttttgcgcacctcgcggaagtaggcggcgatgctttccagcttcaggatatccagcccggtgtcatattttgtgccggcaagcgtggcgaccagcgcctcggtggccgggtggccgtaggtggcgctcatggaggaaatcgccgtgtccacgccgtcaacgcccgcctcgatagccttcagcagggccatctccgccatcccggtggtggcgtgacagtgcaggtgcaggcgcacctcaaaacgttttttgatttcactgaccagctcaaaggcggccatcggcgtcaggatgccggacatatccttgatggcaatcgagtcaacgccggtctctaa

SEQ ID NO: 402631 - DNA, 2199 bp, Salmonella enterica
atggcagaaaaaaagatgactgactggcatcgcaaggtgctgtgcaactttgataatgcctggtcagcaacgcaggatatgcgtgagcagattattgaggctcaacgtttcgtccgggtatccggcgcacagtgggaaggcagcacaaacgctggttactcatttgatgaaggcaggtttgagcattacccgcgctttgaactgaataagattgcccgtgaatgtgatcgcatcattggcgagtatcgacagaatcgcatcagcgttaaattcaggccgaaggatgacaaggcatcggaaacgttagccgaaaagatgaacggcaaattccgcgctgattatcaggaaacatccggtggcgaagcgtgtgataacgcatttgatgatgctgtaacgggcggattcggttgtttccgcatgtgtgctgattacgaagatgaaatggatccgagtaacgagcagcgacgcatcagccttcttcctgtttacgacccggcgacatgcgtcttcttcgatcaggacagcaagcaatatgaccgctctgatgctatgtgggctatggaaatgttctccatgacgcccaaagcgttcgaggctgaataccctgattccatcgcggcaagcctttctcgtgatgacactggcactcaatatgactggtcaacgcccgatgccatctatgttggacgctactacgaagttcgcatagagaaggtgaagctcacggcatggcgtaaccctgtcagcggagaaacggcaatctatgatgaagagcaaatcaaagatattgtcgacgagctgaccgatggtgcattcgaactgatcggtgagcggacagtgaagaaacgccgagtttattgcggtcttctgtctggcgctgaatggctggaagaaccgaagcgtattccgggcgaacatattcctctcatcccggtatatgggcgtcgttcatttgttgataatcaggagcgaatcgaaggtcacgcagcaaaagcgatggatgcacagcgtcttgagaacctgatggtttccatgattgcagataacgctactcaggctggcggtgatggcattcctatcgtggatgttgatttcattcccggcccattaatgaatcactgggcagagaggaataagaaaagacctgcagttcttcctatgaccagcaagaaggacaaaaacggaacagtcatttcagaagctcaggttgctggctggacacctccgacacaaatgccgccagctcttgccgggctattgcagtacaccggaacggctattcagcaaattacaggtgcgtcgcagcttgagaacatgccgagcaacgtcgctaccgataccgttgatagtatctttaaccggatggatacgcagtcctatatctacatggacaacatggcaaaatccatgcgtcgtgctggcgttgtgtggctttctatggcgcgtgaggtctatggcagtgatacgccgatgcgtatcgttaatgaggacggcagcgatgacgtggcgctgatgactggtgaagtggttgaccgtcagacagggcaggttatcgcgcttaacgacctttcgcagggtaactatgaagtgactgtcgatgtcggtcagtcgttcgctactcgccgtgatgcaacggttaagtcgttactttccatactggcacttatcccaccaggaacgccgaagcacgaccttgtatcgtcgatgattctcgacaatatggacggcgaagggatggaagacctgaaagaatacaaccgcaatcagttgcttctgtctggcgttatcaagccgagaacgcctgaagaacagcagatggttgaacaggcgaaacaacaacaggccagtcagccagatccggctatgattgctgcgcaaggtcagcttcttgctggtcaggctgaattgcagaaagcgcagaacgaacaagcagccattcaggttaaagcattccaggcacagacggatgctcaggttgctgcggcaaatgttgtgaaaatcctcgcatctgccgatagccagcaaaaatctgatatccgtgaggcgctgaaactgctcggacagttccagcaacagcaaggagataatgcccgtgctgatgcagagcttgtcctgaaaagtcaggcacagggccatgcgcagcgaatggacatcagcagcatcctgcaaaaatcaactcagcaacaaccacagcagtaa

SEQ ID NO: 402632 - DNA, 894 bp, Salmonella enterica
atggaccagatggcagaaaacacaccagaagttgaaatcgaaaccgacgcgtcagagcagattcctgatgatgtcgaactggctgaagaagtcgaaacagaagatggcagtgagtcctccggaaatgatgcagaggaagctactgacactgatgacgacgaatcagaacaggaattctactttggtgacgaaaagctggattcgccaaccagcgaagatggcgcagagcatggactggtaaaacacctgcgcaagacgattaaagagaaagaccgcgagctgaaagagctgatgcgtcagtctcagaaacccgtcgagcagcagccggtaatcacgcaaccaccgcgaatgccaaaactggacgatgaggacatcggtttcgatgaagaaatctaccagcaacgcatggctaagtgggcagaggataacggcaagtaccagcaacaggagatggctcgcaagcagaaggagcaggagcttcaggctgcctatcaagagcgattatccaaatatcagcaacgtgttaaggctctcaaagttcctggctatcaggaagctgagcaggccgtactcgaggaaatccccatcgagacacaaaacgcgatcctgtttgagtcggagaagccggaaatcgttgttctggcactcggtcgcaacgctgaactgcgcaagcaactggcagaagctaccaaccccgtagcaattggtcgtctgctggaacgtatcgaatcgaaggccagaatcatgccaaaagcaaaaaccacggcagccacaaccccgacagttaaggggagcaacggcgcagtaatcaataacctcgacaaactgaaagccagggcgctggaaactggtgactggacgccgtatttcgccgctaaaaaggcaaaaaaataa

SEQ ID NO: 402633 - DNA, 1254 bp, Salmonella enterica
atggctaaccaattagcaaaagaccttgaaatcatgttcgaaaactacgttgaaggctttgaggccgcctgcgtagtttcccgtaacgctaaaaaattccgtcccggcgatactgcaatgcagcgagcaggtgatgttctgtatcgtccgcagcattaccacatgaacattgaagaaggcctcgatctcagcagcaaaacacctacagcactggttcagcgccttgttccttctgtattcaaggagccgaaaaacattctgtatactctggatgcgcgtgaaatgcgtgaccctgagcataaaactgaaggtggtcgcgccgcaggtatgcgccttgctgcacagattgactctgacctgatttccatggttacgcagcgtgctactaacgtgatcacgatggcggattcaaccactggttcacagggccgtgatttgtggaactgtgcggcaggtattgatgccaccatgacggcgattggtgtaccgcagggtatcaaccgtcgctctttctggaaccccttcaactacaaagaccttgctggcgagcttggtcaccgtgcctatgctcagggcgcaaccttgacagcatacgaaaaagcgcagatccctccggttgcgtccttcgatagctacaagaccgatatttctggtcgtgttccgaaaggaacagcaacttccattacgctggcagcagcacctgcgcacaaagttgaagcgaaagatgctaacgatatgccagtggataaccgacaggggaccattacggtatctgctgaagatttgcaggttggcgatgcgtttaccattgcaggggtgaattccgtacaccagatcaccaaagataccaccgggcagccgcaggtattccgcgttctggcagtaagcggaacgacagtaactatctccccgaaaattctgccgcctgacaacgcggatgtcgccagccgtccatatgcaaacgttgatgctaatgcggcaagtagcgcagcaatcaccattctcaacaaaaatgccgcaccggctaacctgttctgggctgatggttctgttgaactgatgtacggcaaactggcgttcccgactggtcagggtccacaggtaatgacagcaaccaccgagcagggcgctacgctgatcatgtcttacgccttcgaccacatcaaaggcgtaaccactgctcgtttcactactctgtacggttgctctgtactcgttcctgaatatacgggcatcgttattgccgggcagtaa

SEQ ID NO: 402634 - DNA, 189 bp, Salmonella enterica
atggcacgaacaatgctctataagcctggcaacatgatcacctgtggtcagtttgctgtcgattacatcattgttgatgacgaagaagttaaatctcacctgaaaaaaggctgggtaaaaactcctgaagaaaccgcaacgaagcaaaaagtggctaaggcggaagaagatggcgaaaacgaagggtga

SEQ ID NO: 402635 - DNA, 462 bp, Salmonella enterica
atggcgaaaacgaagggtgatctcgttctaaaggctttacgaaaagccgggctgtattccaatgccacgttgacagatgctgaccctcaggcaattgaagatgccattaatgacctcgaagacatgatggcagcatggcaggctaaaggtatcgagcttgggtatcagtttgctgatacagaaaacggcatcatgccgttacctgacgatgattcaggtatccctgcatgggcaaatgatggcgtcgttttgaaactcgctgtgcaagtgtgcatggataacgtcattcaaccgtcagacgctctccttaccgctgctgacagtgcatatcagacaatctgcatcgctttaaccaaaataccaccacttgagcggagaaatgacatgcctcgcggtagtggtaacaaaagcgcgtttacgtggaatcggttttacatcgagaaagatgatccgagtacatga

SEQ ID NO: 402636 - DNA, 228 bp, Salmonella enterica
gtgaagcgatggttcctcataattactgttttcgcgatcatttacactattttccctgcattaaaagcaccaatgcaaataatttcactagcaataattgcgattggtgctttcattgcagtagccgtacttgtgtttaaggttttaaagtttttagtttggctatcaaaagatgatggatgcaaagttcatcaagaaaaagaaggcaaaataaccaaagttgactaa

SEQ ID NO: 402637 - DNA, 537 bp, Salmonella enterica
atgctgcacacaattcatttcttatgccccgtaaacaccaccactgttgggcaacttcagaaccactgtctcaccgcattatctcaaggcgcaactgaaataaatatccatatatcaagtcagggaggggaaaccgctgctggctttactgcgtataactttcttaagtcactccctgttaccgttagaactcacaacataagcaatgttgaatccatagctaatatcgttttcctggctggctcagaacgtttcgcaaacccattatcaagattcctgttacatcctctattatggggctttgccaccccagccgccgaccatgccagattgagagagtacgggaaatgcctcgataacgatcttgatcgcttcgttgagacgttcaatatcgacatcggaacccatattgggtgggcatccctgatagcagactctaccattttggatgctaacaaggctcttgagcatggcataattaattccataaaaactgcaaggctggtatccaaacaggcaaactggtgggttgtttga

SEQ ID NO: 402638 - DNA, 363 bp, Salmonella enterica
gtgattgaaaaaaatgatgaaatcatcagaaacgcccgggaacatattgttggtattgaagaacggcttaccactgcaaaacagtcactggccagattccttaaccttatctgtcccccagaaatgactgctgatttcaggaaaaagtatgttgaatattacaactccctgaatgatattgctgccttgtctgacaacccattgatcccctggccttctcatgaacggcagggaaaagaaattgtttcaaccctcattgcattcgaaacgctccgggatgctatatctgaagagcgtgacaatgctaaagctcaattaacagaagtagaaaacgatctgcgggagttgctgcagagtttataa

SEQ ID NO: 402639 - DNA, 1080 bp, Salmonella enterica
atgaataccgaagtatccacacatcgcatggtacgtatcactttgatgaactggtatttattcggcagtgaggaccttgatgttgacgcggccagcgtcatgatcagcggagctaacggagcaggtaaaagctcaatcatcgatgccattcaaactgtactgagtggaggaaacgaaaatgtgctttcgatgaatgcacagagcagcaacaaccagaagtccttacgcagcattcaaacttatgcgttgggtgtcattgatgatcaggagtttggcggcgaactgtctgcttgtcgaaatgaatcaaacacgtatatagctctgacattcagacgccccgatggcactcattatgctatcggaatgggattccatgctcgatctggcgacaggaaggtggagaagctttggtttgtgacaaatagctttagcctttcatctgtcgattttatggacgggaacagagtgatgacgctggctgattttcagcgccgccttaaggctatggatcccgcagtattgcttgccaaaaatgctaagaactttcgtctggactactgccagtcaatgtcaagggagggggcgggcttacaaatcaaccctgacgcgatgtggcatgcaatcaaaaatggaattgcgtatcatggcgaaatgagtatttctgattttatcagccgttatattcttccggctgaaaatgttgatattaacaggcttcataacgattatctggaacacgagcgcatcctaaatctgatcgaaaaaaccgaactggaaattaacgcgttacgttcccttttaaagcattatcaccgttatgagatgcttatggttgaccaaatctgttatggatgggtatcagctgaggcctccttgcaggcccttgacttggtgatagagcagtgcgccagtaaacatcaggctcttggcgaaaaactcgaaaaattgattcgccggcaaacagaaatgcagacaaaagaagccggtgtaaacagagaacgtgatgaagcccgcgatctatttataaactctgcagcaactcccgcagatcgttttctacttctgttaattgagctttag

SEQ ID NO: 402640 - DNA, 663 bp, Salmonella enterica
atgttaagtgatttgactaaaacaattacccgttccggtgagggaaatattggtccggaagactttaggcaggcagcccgcgcgttgcgtaagcgtcaatttttgtgggccgatcgtccccatgaccgcaaacattacgaacttatccgcaggttcgaagaatacttcagcaatctgtttgatgcatttgatgatgagcttattaaagatcatctatttgggtacattggtatcattcctcgctcgcctggtgacagtgtcatgggggttctgcctacattgatgctgctcattatggctcgtcttcacgatctggaaagccgtcgggcctgcacggtaaatggacgggcgtcccccagtccggaattgttggtagatacctatgttgaactaacaggaaaaccgaagcccaaattatctgatttaaatcaggctctcgatgccatacgccgtcacaacgtgattgagttgggtgaaaaacaggaatccagcgatatgcgggcaattactattttaccgaatatccacaaggtagtgaacagccagtacctgcagacactggaactctttgcgctcgaatctgggcagccgcttcctgtagttatagcctcacaaagctcagacatcacgttttcagatactgatcagagaattatattatga

SEQ ID NO: 402641 - DNA, 1440 bp, Salmonella enterica
gtgatagcagaagcactttcaccagccatattcaaacctcttgcatcaaataaaaatgccagagtgtatacggcttgcatatgggcactgtacgacaggttagtgcggcatcagcactcactggacgaatgtcatccgaaagaagcccgtgagattattcgtcgggctttggttcagtacaatctgcaacttgatgttgaagacttttctgagaaccctgactcagtcgaaactgatgacacacatcgtatttataccttacttcgtgaaactgggtggcttcatgagcaggcaacaactggatacaggcgcatatgctatatccctcagatcccatcacaacttgtcgccgcgctggatctgatcaaggagggacgcattgatgaagtaggggcgacctgcaaaggtgtttatctgcaacttgttgccgctatgcaggatcccagagaaaatgcatcacaaatcgctatcgcacgctccatggggatcaattttctaaataccctctctgcaatgcaggggcagatgcgtgatctgatataccaggcaactgaaaatgaagccggatttaaaattatcaagctgttttttgaggatttcctgaaaggcattcttcttaaagggtactcccacctgaaaaatgccaatcatccctaccgataccgggaaataaccatccaaaaggctattcatatcatgacggatgacacactgatggataacctgactctttctttgtgctcagaaaacaaacagacttcgacagaaaaagtccggcaggaactgaaaaccgacctgagcataataattgatacattcgataatattgacaaactgctttcccgaattgatgactacaggcgcagtcttactacgcgcacccgtgaaactatcgaatatatgcgttcatcgctaccaggactagatcagcaacttgttgaccagattgtcaaagtcagtggaatgtctgatacaacaatgctgcccagccctggtgaacaatattcttcccttaatgaatatcgattacgacgaccatcgacgctccaggtcaagccgcaggctactgagctggaaatgccatataaaaaccccttaaaactggcagaaaacatggccatccgcgagtacctgaagagacgcagagagaatcccgcccgcgtgtacgcctatctggaacgtcatctgggtaaaaagagctatatcacctcagatgagctgcaaatagaaacgctggaagatatgctggcatttattcagttacgtcgcctactccataatgcagtccctcctaaaagcaggtattacaaacttacacaacactttctggttatgcccattgcaggggaatacaccgagaataaataccttagtaccccaaaattgaagattgaacgtcgttcaccgttacagagtaaggagacccggtatgttaagtga

SEQ ID NO: 402642 - DNA, 861 bp, Salmonella enterica
atggcagaacatgttctgcagcttagttggagtcagcaacaacgccttcacttcatggaacgtcagcttctttggggaaggaaactcactttatcaatggtgcagaaagcttttgatgtcagccgccatcaggctagtcgggatattaagttataccgagaactcgtgccggataatgtcccgccatataatcctgcggaccagtgttatcgccctggcaaatcctttacccctttgtttgctgttacagacccccatgaaatgttgagtgtcatcacgcatcctgttcaaaattctctttctctggatgctgtacctgtgttgccccggcaaatgttggacggagtgctgccagctgttttgacagcaatcgaatacagaactgcttttgaggctatttatgcatcagcctctgcgccaataggtgtaaaaagagtattagctccagttgctatcgcctatgtagacaaccgtctgcacatgcgtgcctggagtgaagagcacaacggttatcgtgattttgtactctccaggatacttactattccaaaattgcttaaaagcataactgagctacctgccgatctgttgtgggaaacgtgggttgatattaaactcgccccaaatccagctctttccgacgatggcaagcgattaatttccagagagtacaagttaaatgagctcggtttataccgtgtaagggccgcattggttcattatttcttacaaacaaacttcctgccaaattctttagaacaattaaatcaagccaaaagaaatccgtgggcttaccccgttgttgtcagtaactgggaagaactaaagtcctacttattttgtgatgagaaaaataattag

SEQ ID NO: 402643 - DNA, 255 bp, Salmonella enterica
atggaggaaaagaagcgaaatcattttcagtgggatactgtcacccttggacatgagcttgccagaacctacgcggtaaatcctacgacacgaagctacgcgcaattttatgcgaaaacgctggcattacccgaagccactcctgagctttctgcgttaagcgaatccgaattgctgtccgagtatctaaaagacatcgctgaaaaacctttcgcgtattacggtcgatacgctggcaatagccttgctgactga

SEQ ID NO: 402644 - DNA, 297 bp, Salmonella enterica
atggaatcacacagcctcacactcgatgaggcctgtgcatttctcaaaatatccccttccctaagttcgattccaaattcggagataaaacctatgcgcgagctacgcgacgactccctcattgacatgaagtttataatggaggattctggcttctcagaccggtacttctataaacatatccagaaaggcgacttccctccaccaatcaaatacggtcgctcatcgaaatggttatatggcgattatcaagcctggaaacacagccacatcacaaacctcaaaaaagcatcgtga

SEQ ID NO: 402645 - DNA, 213 bp, Salmonella enterica
atgaccaaaatattccggaagaattatccacgtcaaagtcggtttaaagaggctctatttttccttctatttcttattttaatggttccaatatcaccgatattcttcatctggttagcaggcgtacaggcagaaaaaatagctgagtggtatagctccatcgtatgggggccatttaacaaactgcacaacaaattaaatccgtacaggtag

SEQ ID NO: 402646 - DNA, 915 bp, Salmonella enterica
  misc_feature (851)..(859): n is a, c, g, or t
atgaagattaagatgttttttctgacgactgcttttattacacaaagcacatacgccagcgagcttccggtcattcctctaagagacttagttaatgccgcattaacgcatcagccctctgttgctgtttcatattatgagactgaaaagaaaaacagtgacttagatctttcacgggcagcactttatcctaccctggatctaacatctggccttaataataacaggaaagagtcatcaggtaccgagagaaacgttgaaaataaggtgtctttatcataccgaataacggattttggagtgaggggggctaatatcaggaaatctgaatacgaaagagataatagtaaaactgactatgaaaaaacaaagaatatagtgtctcaggaggttgtgacaacctattacaacatcagtaaatatcgtgaaatgattgatggcgtaaatcttgagaaagagttttataaaaagatgctggaaactttttcgctgctggtatcttccggtgtagcgatgcaatctgatatgcgtaaagtacaagtatctatcgatgcattaaataccagaagcattatgtatcagtcgatgttggatgatgaaatgtataaaatgcagaatatgactggtctgaatttatcaccagttcagattcaaagcgatgaaaaattcaacctcttcaaaaaatatatctttgtcgaaagtcctgaaaaacttatggacatggtgatgaaatacaatgatgactataagatgcttgtcaatacccgaaaagccgcgaccgaagatattaatgccgcaaaatcatcctattttccgactgtagatctcgcttccagctatgtacagaatannnnnnnnngggttcagaaattcagcccaggaaagaaaaatggtggcaagttactcgcaggctaa

SEQ ID NO: 402647 - DNA, 291 bp, Salmonella enterica
atggaactcacaaatcacagcaaaaagatacgcgaggtggaaacagagcttcgcgcccgactcgtatcaatgggccagacaaatttcgcaaagatggcgggatggtctgattcaaaagtaagccgcctgaacattcaggatatggcggtgacgttcgttcttctggagaaggtatgggagacgagcttaatcagggaagtagcaagacaagcagtggaagctgtgatgccgagaaataaaaaacgcccggcggcaaccgagcgttctgaccaaatccagatggatttctaa

SEQ ID NO: 402648 - DNA, 162 bp, Salmonella enterica
atgacaaaacgtagtaagaaataccaggaaaaagaagagattcgacatcctgattcacctgagggattggtggtagccgcagcaaataacagggcgttctcagagcgccttgttggtgtttacagactagccaaagcaggagtgaaacatgggcgtcgttaa

SEQ ID NO: 402649 - DNA, 849 bp, Salmonella enterica
atgggcgtcgttaagttagcagactacagaccgttagaaccggtcgtggagcgtaatgtggcagatctcgatgatggttacgccagactatcaaatatgctgcttgaggcttattcaggtgcagatctgaccaagcgacattttaaagtgctgcttgccattctgcgtaaaacctatgggtggaataaaccaatggacagaatcaccgattctcaacttagcgagattacaaagttacccgtcaaacggtgcaatgaggccaagttagaactcgtcagaatgaatattatcaagcagcaaggcggcatgtttggaccaaataaaaacatctcagaatggcgcatccctcaaaatgagggaatatccctcaaaacaggggataaaacacccctcaatttgagggagtgttatccctcaaaacagggggacacaaaagacactattcaaaagaaagaaatacaagataaaaacactatgtccgaaagcgttcggacggagtgtgaaaaatcatctgaccgtcacgaagaaaccgataaggcattcgaggaaatattctggtgtgccggtatgcggaaagccgggaagaaaaacgcagcttcggcattcagaacacagttcagggaatggcgtaaaactaccaggggtacggcaagcgagtttgccacgatgctggcagaagacatcgcatgcaggaatggtaagcagttcggattcgacaggttgttaccatcaagctacctgaacggtcagcgctggaacgacgaaaagccagaaacaattcaaccacaatccaaatcatcatccgcaatcaccgtatcgaaaactggctacgtgtttttcgacaggtga

SEQ ID NO: 402650 - DNA, 1881 bp, Salmonella enterica
atgaggccaagtgaacttagcgacctgctttgggcgcaggttgacagggtggccccgcacctgttgccaaacggcaagaaagaggggcatgagtgggttgccggtaacgtcaacggtgacaaggggaacagccttaaggttaaccttagcggtaagaaaaaatgggctgatttcgctgagggcgacggcggtgacatgcttgatttgtggatggcctgtcggggaataaatctgcatcaggctatgcaggaggcaaaggcatttctcggtatcaaggatgatgatcaccatttcgacgccaggcgtgagaagaaattctccagacctgaccgcaagaaaatcgcccgttacgttaccagaacagaatcccatcttgagtacctgcaatcgcgtggcatatctccagaagtcgtaaagcggtacgaggtggtcagcggcaaggtgtggaatggagagcgagaactggatgctttggtgcttccgtacaaacgcgatggtgagttgttgcaggtcaagagagtcagcaccgaacgtccggacgggaagaaagtcatcatggcagaaggcgactgtgaaccctgtctgttcggatggcaggctctcgatgctggcgtgagggcggttgtgctttgcgaaggcgaaattgattgcatgagctatgcgcaatacggaattccggcgctatctgtcccgttcggtggcgggaaaggcgctaaacaacagtggattgagtttgaataccataacctcgacaggtttgaggaaatattcatttcgatggatgttgatgatgtaggtcgcgaagctgcaagggaaatcgcaagccgactgggtgaacatcgctgtcgtctggttacactgccacacaaagatatcaacgaatgcctgatgaacggcgtcaccgaggatgaaatctggcagtacatcgggacagcgtcatatttcgacccggaagaactctacagcgctcgtgagttttaccaggatacagtcaatgctttctacggcaaacagcagtatctgtttaacccaccgtgggaaacgctggcttacaacttccagttccgtgaggcggagttaactcttgtcaatggcgtgaacggtcatggaaaaacggaggttgtcgggcatatggcacttgaggccatgaggcagggggtaaaaacatgcgtcgcatcgcttgaactgaagcccgggattctgcttaaacgcctgaccaggcagtctacatgctgcaaaatgccgccagttctggaaattgaatcagcatttaagttttacgatgaccggctctggttatttggcctgacaggtacagccaaggctgaacgcctgattgaaattttcacatacgccagacggcgatacagcatccagttattcatcatcgacagcctcatgaagtgcgggattggcgatgacgattacaacgggcaaaaggcgtttgttgacgcgctgtgcgacttcaagaataaaaccaactctcacattattctcgtcactcactccagaaaaggagacagcgaggagaaacctaccggaaagatggacgtaaaaggctcaggatcgattacagacctgacagataacctgtttatcatctggcgcaataaagctcgcgagagagcgttacagcgcgttcaggctggcgagcaaattaacgagaaagaccagcaacttcttgctgcgcccgcatctgttttaatgcttgagaagcagcgaaacggggaagggtgggaaggtggcgtgccgttatttcttgacgagcagtctcaccagttcctgcaaatggaaggtgcgtcaccatacaactacatagctaacatgcctaagtcggagtatgacgaagtgtggaggcaggagaatgttacggagtactga

SEQ ID NO: 402651 - DNA, 279 bp, Salmonella enterica
atgaacaaccaaataatacctgaaatgcttttgaatccccgcttcattgctgttttgaacagatgtatcgacgaagaagagctcattatgcaatttgaaaggttgtcaggtgtcactcgaccaccaaagaggaagcattcattagagctgatggttgataaagcgacaggattttatgatgagcagtggaaactgttttttgaatcatttatcccgttcgtctatgagtatatatggctcacatggagagaccgtgacaatgaggagtactggcaatga

SEQ ID NO: 402652 - DNA, 318 bp, Salmonella enterica
atggcaaaacgtatgaatgacgaccataaaattgtaggcctgtcctggctaattctgcttggaattgcctgctggggcggcttagttcgctacctgattgacgtaaagcagaataaagcaacgtggagttggataaacgctttcgcacagatcgcggtatctggctttaccggtctgattggcggtttgataagcgttgagggtgggcttagttttcacatgatcctggtaacgtcgggaattagcggggcaatgggttccgttgctctaacctatttctgggagcgtcttacagggatgaaaaatgcaaaccaataa

SEQ ID NO: 402653 - DNA, 399 bp, Salmonella enterica
atgcaaaccaataagtttaaattttctcagcgtagcgagaagaacctgaacggagttaatcctgacctgatcaaagtgatccgccgagcactggaaattacaccagtagacttcatcgttatcgaaggggtgagaacacaagccaggcagaaagatatggttgctactgggaagtcacagacgatgaacagccgccacctgagtggtaatgctgtcgacattatcccggttaacactacctggaagattgaagagttcaagccgttgctcaaggcggttaaacaggcagctgatgaacagggcatggaactacgattcggcattaactggaagcatgatccgtcactgcccattgaaaccaaattcatcgatgccccccacgttgagatacccgcatga

SEQ ID NO: 402654 - DNA, 552 bp, Salmonella enterica
gtgtccataccaagaagctctttgagtctgggaataaaaccgttatacccgcgttcacgctccttcgtttgcagcttctgtacagcgaatgtgccagcatccatacccgcatccttcgccccctgctccagatccttaagctctttaaagagtgacaccgccacgccaattgtcagcgtcatggcccccatccggccaattttacccagcagaccggaaagccgtccggccagcaggacagactgctgcagggcaccaatggtcctgacggtaaaagaaccagccataaccagaccaaccccttcaatcaccgtctcccatccgcccatctcctgcgcaacgttatcgacctcctgccataccgccttaatcaccggagcaacatcgtcccagttctcaatgatcagcatagcgccggccaccagcgccgcaatggcgactttcgccggagagagattaatgacactgttcaggattttgacagcccgggacaggctgccaatggatacgccaacagccagcagcgccgcgccgaacttcgccgcagactga

SEQ ID NO: 402655 - DNA, 999 bp, Salmonella enterica
atggctaacagctatctcgaagccgcaggttcatcagaacgtattgaccatcgttcccttcaggcccagcatgaagaggcattagaaaaagcggcggctgctctggacaatgaagaacaagcgctatggcttgctaaagccgctgaaacaaaccgccctgcaatgaaacgtatccatagtgccaaatggcgcagtaaagctgctcaagagcaaagagccgcagaacaggctgttcgtgatgctgccaagcaagaagccgttgaagtctacaaaacattcagcgaacttgatcttgaaatcgtcgttgatgtcagaagctttacgattacacatcttgctgaaccagaagaaattgttttaccagaaacgcgatccagctcttctacaaatgaagaacaaagacctttactggtagcaccagctcctgatactcgtttgcgtggagtcaaatcttaccgtgataaaacaaaagtcagtaaggttgttgcttgtattccgccatcaatcagtatttctgattctggtacaaatactattctgaaaacatccacctctcaaaacccaaacagggcatccagaagcgcccctgaccatgaaagaaaggataagactactccacgtcaggataatattttcaaacgtttcacaactcttgtcatagatttcttcaaagaaaaatttgtatggcctagatcaagcagagttaagcatgatcctgtcagtacagaacatgataaacgtattgctgaaaactatgtctttgatgaagtattaggtcatcatgtttctcgtgctgaatatgagaaacaagctaagtttaacagtgatacttacaaaccaacacctgatgagattcgacgtttcccaagccgtcctaagcacgaacgagtcaatgcagataataacatggattttataccgactgtttcaacaataaatgataaaaatcatactcctcgtttaaggccacctacacgccgtggcctagataaactatag

SEQ ID NO: 402656 - DNA, 1587 bp, Salmonella enterica
atgtggcgtaaattccgtaaaatgctaaagggagtcagggcagacaggcctccatcttctgtttcatgcccaaccaaagactcgcttcgacaacgaggatatctggatccactatcagctgtatcattactggatactgagagtcgacaacatttgctcaggcaactgtgggacaacagtctgttgcctcagacacactatgagcagtattttctggcgccactgaagctatgtgtttcactgatgcaacaacttcctgccactgcaaacgggcatcatgccgtaccgggcgggatggtcgattacacgttgaaaacagtagcctatgcggttcgcctatcccgggggtacatgttgcccccaggtgccagtgcggaagaacagtccgcccagagtgcggtatggggggcagtggtattttatgctgccttatttcattctctgtcttctctacgccagattgaaggtgagttgttaaatggggagatctggtatccggggattagcataccgggacagccttatcgtttccgtttttgttctgatgtaccggacggagccgcggaggggctgtgtacgatgcttgggatgcgtttacttcctggtgaggtgatcctttggatgagtaaaacaccacaggctctggatacgctgctgtcatttattcgtggcgacttcggacatgcctgtgttatttctcaaatcgtggaggatgcaatacagcatgcggagggagatcccctaagcattctgaataaaccttcggtatcagtggaactctccctccctacagctacagacggcgcgatggctctgactacatcagtgcagccgctgagcgaaggtgttttaccttctgaagagcatttgcaggtacaaccggatgcaccgttggatgtaccgtctttaacatcggcccttgatgaaaagttatctccaccgagccctacgcttcaggctagccagaaagtggatgatcaggcgattcaggatgtgatatcgctgatggggtttgatcccggatcttccgtcgcagaggcagctcctgagcaggtgactcccgtgagtctggacagggatgaattagcgcctgttgggcctgccgacgcggtaagttccgacgaacagccttcgctgtcgacaacgcaactccctcctgaaaccgaagccagccatcctgacgaaaatgaggattatgggcagcagtttatatcgtggctgagtaagaaaattatatcggggagcttaagtgtcaataccaaagaggcacagatacatatcgtgggagggctgatattcctgccaacgccgagtatttttttctctttcatgaaagacaatgcttacgccccctcgctaaaaggtgatgttcagcgcggatttgaacgcctggggctgcactttatacaaaaaggtaagggcgttttttcctgtgtgaagtatgagtctgaaaacagacagggacgatacgaaaaattttcgggttatctcatcaagtcaaaaatagtctatacctctcatcccatccccgctgattcagcctatctgtttgtgtcaaatcgaaattacagtgaaagagcgacatag

SEQ ID NO: 402657 - DNA, 192 bp, Salmonella enterica
atgtctgacaccgacctgttgtattccggtcctggcacagtgacgtcagagaaccctgcactcacgccgcatgaccttcagatattgcaggggatgctccagccagcatcagaaggattgctgattttatcccgtctggcgccggtaaggcccaaagcgccagagggtatttcaggggaatcacatgtctga

SEQ ID NO: 402658 - DNA, 1800 bp, Salmonella enterica
atggctaaagccccgcttctgaatctgggggatgcactgctgcagggcgcaaaagagccttcttcagcgcccgcagtcccgatcatgccgaccagtgaaatgcctatggtgttgacactggatgagatggcgccgaatccggataacccccgcaccacgcgtaatccaaagtacgatgaaatcaaggagtctatccgggcccgtggtctggatacggttccgaagatgacaaaaaatccggatatccccggttccccttatatcttcagcgacggcggtaatactcgctatgccattctgcgtgagctttatgaggaaaccagggatgagcatttttaccgtttccatgtgctgtttaaaccctggccgggcagacttaagtgtctcctgggtcatctggccgagaatgatgttcgcggtgatctgacgtttatagacagggcattaggagtccgaaaagccagaactattcatgaggaaacgctggggcgagtagtaacactgagagaactctccgaattgctgaaactggagggctatccaatacacaacagtatgattagccggatggagcatactgttgagtttctttacccgtatatgcctggattactgacttctgggttgggaaaacatcaggttgaacagttactgtcattacgtgcatgtatcgaaaaagtctggaaattgcatagtacagagatcgagagtgaaagtgacgtaaactctgtatttggtgaggtttgcaggcagtttgatgatccagatttgtactcatttgagatgttccgtgatgagctgattggtagccttattaaagcattaccacatccctccctgaactatgagcgctggcttatcgaacttgatcccaaagtacagaaccaacgtttgctttttggcgagccagagcccgtagctcctcatttggtggatgcagaccgtcaggcatggcagaacgcttctgcatcattgtcgggtgctgaaaacgatgataatcaacagagcaactcctcttcagattcaacattgatatcaacttcaaataacggcgctgtcttaactcaacaacctgattcagataatgattatgacggagccgggggatggtttgggtcttctgaatcatcgcgtccgcctaaaactgaagttcagaacgatttcctcggagggccctctgttatatccggtgatattccccccggagagtccacatttattcctgatgccggaaatatcgccgtcatggcgtcatcctttgctggcgctcaggcgttgttaacagctgactcctcatttgagggtgatcatgatgccgtcggtgaggcatctgatattccgcttttgcccgctaatgcctccctgtcctctgtggcatttgccaatgttggactggagccagtgaacgacatctgggcgatttcggcacttcaggatgatatcgaccatctgcaggacatggcctatcggctggttttcgaacttgcggaagcgatgggctgtgagatgcacgtcagcgaagataaaagtaccggtgcggccgggttcgctgtatctgaacacggaggagaatttgccctttttctggcgggtgtttccggtcacttaccgtatcagcagttcaacatgtttatgttttgcatgaacttttttggctcgcaatcagcgggtgatgcgcctgtttttgacgatatacatgtggtgaaaacccttcgccttattcgtgttattcgtcgtctgcgtgaactgcagagaaatatgccagttgaacacaatgacggggggatttatgagcattga

SEQ ID NO: 402659 - DNA, 1194 bp, Salmonella enterica
atggaaaccgaaaatatacatgatgattttaatgatttatttgaacgccttgtaaagacggaggatttaaaactccctttcgctgttaagacagacattattaatgattttaaaaacaaatgcgaaatttactttaatactttaaatgactacatagaagataatgacaatgaattatctcggagattgagtgctaaacttgatagaataacaagaatatactttggcgttgtaagctctttggaatattttttatcaggcgatatcaaatcctcatatgatactttcgacagaacattttctgaccgatacacagctaactacattcagaaaatatcaattcccttagagaatatttgcaattcttcaagacctttattcagggttagaaaatctgatacagcggtaaaaaatcgaaatgaaatctttcatataccattttctaagaggcacttggtaaacgctcaaagatactcggttgcgggtctaccctgtttatacttaggttcatccctatatgtatgctggcttgaaatggataaacctgattttgataagttatatatatcttcttttatatccagtgaagaaaactccaaaatattagatttcacttcagaaatcctctactcacgtttctatggtaagactgataatgacaaaatgtcatacatcacaaagatgtcttacatttgtttaatgccactaatttacgcctgtagttttgcaaagattaacggcagcacatctttcactcaagaatatataattccaaatttattaatgcaatggattagtcgtagaagtaaatcaaacattgtcggaattgcatacagatcgacaagaatgattaaaacaaaccatggagaaaaatctattaacgttgttcttccacctaaagttacatatcagcaaaccataacaaaagatttttgtcctaagctagtaaaaatgttcaagcttaccccccccgtttcctggcaggtactaaaaactctagattattcctgtgaaccaagtgaggatgatggtgttaggtctgcctcaagattcttaagaaagaaagaacttatatcaggcatgcaaagttttgatgacaacattgtcaacctctatcctttgacagatttctataagttagagaagtgtatggacaaccttcttgaatacggttctatcaatgacaagaagtga

SEQ ID NO: 402660 - DNA, 579 bp, Salmonella enterica
atgacaatgcaacggcgttatttcaaattaaatgaagcggattcagttaaatattataaggaatatcaggaaaaaatcggtaaaccccgtaaaaaagctatacgtgattttctgaatggctgtaatgctgtgggttattgctcgtatcaacattttggcgttgagcatatcagcgcgctactgatgcgtgagaatgtggattgcggtaagaataaacgcacctgcagtaactcttttgatgatgacggtcaggcgttgtttgaggtcaggccagaccgccgctacaacgaagggaagcggcttgcggctcgtctgaaagagataaacgaacagctacaggaattaccgccgttcagtgactgggcggtcaggcttctcgggtgctatgcagaagcaagcggcgttaagcgcggacagtcttattttacctggtctggtgccggcttttatcctgagaagaaagcgctggttgtgcgtattccggtcggtgagaacggcgaaaaaaccctgcctgccgatatgagtaaggcgcttattgaaattaaacactccgaatttattgccattacggaggaataa

SEQ ID NO: 402661 - DNA, 522 bp, Salmonella enterica
atgttctttaaaacttctaattccgcagcgctggccgcatgggatcaatatcttctcgacagccaaaaactcaatgaagaagcccgaaagctcgctgatgttctggggtgtggtggccgcgcggtatttaaaaatggtgttggcggtcgttggttctatgcaatgagctttcccggtgaagagcgcccgttcgcgcgtgagctatggacggttcagcgagaaaccaccggctggagctgcgaaccgcggcgctcgcgtattccggctcatttgcgcacactggcgaaggagctggcggacgtctggaatgtttaccgtccggtaacaagtgcccggactgacgccctgttaccggcactggggctggatttcagtgtgacgctcttcgggtctcttgagtggtttcgtgctggcgatgtgatttacgtccgtgccggtataaaaccctctcacgatcgcatgattgagatcctgtctgacgagttttacgcggctaaaaagcaggcggaggcttcatcatga

SEQ ID NO: 402662 - DNA, 813 bp, Salmonella enterica
atgataagtgacaggctgacagatgaacaattagccgaaatattatccggtgttgttgacggcgtggaacctaccacgcaggaattagcgatggcgacggagttgcaggagctacgcgaacagaacgaattacaacgcggagaattgctaaaagcgcacattactttattaaatcagcagaaacagcttcagaaataccgcaatgttgatagcgctgagcctgtggtgtggactgatgaacaagagttgcgtgacgtaaaaagagacggtttcggttatctgtttacggttaaccccatcacgccgcacgttgaccctcaccgcgtcattaagttgttcgctgtcccgccagcaccgggcgtttacgatgatgttctcaatatcataggtctactggaaaacaacgaatgggccgagcactgtacgaatacagttttaggttcactcctggaatcagaaataacacgtctggttggaatgacgcagccagcgccgggcgagtcagtatcacagtcattaactgatgccctgcgtgatgtcattgcagaacgtcaacgacaaataagcgttaagggctggacgccagagcatgatgatacatatatcggctacgaactggctgcggcggccattagctatatagagcctgcggaggctgaaaattactggcctgctgactggcatgatgacagtttcagaccctcggactaccggcgcaatctggttaaagctagcgccctgttggttgctgaacttgagcggctcgatcgaatttctgcaacgtcagtgttatcggaggtggatcgtgagtga

SEQ ID NO: 402663 - DNA, 381 bp, Salmonella enterica
atggctggcctgaaagatgaactgccggttgtggcggtggtggttgtggtgatttgtcttgcggtcggggtgtgggctgaacgtcagcaggtcgaacggctacagaccgataacgccactatcaggcagcaacgcgacgaggcccggcgcattctgaacaatcagcagtacaccatgcagttttttaacacgctcagtaaggcggccaccgatgagaagcaacgtaatacgcaggcaagtgaagctgtcagggctgaaatccgtccggttctggcggcagagcctgcggcccgcgtggctgtgcctgcccctgttgctgaccgcgtgcgcgccgccgtcagtgaaatacgtgcaggtgccgccggtgccgcttcccgctga

SEQ ID NO: 402664 - DNA, 501 bp, Salmonella enterica
atgaaagacccgatgtttattaaacaaattgaattaatgaatgaactctgtcagatagagctgaatcaaccgattaaaaattttctaccccagatattcagcagtaatgaaactcagcactgcctctggcctttgggggaatttttccgcccttactttcaccagatagaagctatccattacagaaaacatgccgaacctgacgccaacagggctataagagatttcgttctgtatgagaaaaaatgggataatctcccccttatcgtctggcgcgtgctgtttgagcgttaccgacaactacaaaccgtaattacggttaatatcgcaatcgaaaatcaccaatttatgatccttcctgttggcgtggacaaccctctgaaactacgctttgcagttgcaaggctgttgttcgcaatgaagctcccgtacaaattgaacgatcaatcactgctagacactgattcactgtttgctcatcgaccgccagcgctacactga

SEQ ID NO: 402665 - DNA, 366 bp, Salmonella enterica
atggcaggaaatcagtatcagggcgtggcaaccgttcgcgtgaacggcagcgaatacgccacgctggaaggcgcaaccttcacgccgtcaggctttgaacgaaaggtggttaaggggcccagggtgtatggctataaccagcaggcgaaagaggccacgctggaatgcaaattccctgccggtggcgatgactccccggacagtgacgtgatcaacacctggaccagcgtcactatcgaatttatcgccgataccggcgaggttcacatgatgacaaaggcgtggagttcggagccggcatcgcttgctgctaacggcgagatctccgcgaagttcgccagtgcaaaaagtacccgcgtgcagtaa

SEQ ID NO: 402666 - DNA, 225 bp, Salmonella enterica; identical to SEQ ID NO: 383690

SEQ ID NO: 402667 - DNA, 648 bp, Salmonella enterica
atgtcaaatgcttatgaggaaaaaaccgatgataaaggaaaaaaccgtgatcggattattggtcatggcacaataaaccgtttcggggaaagacttaaagtagccatgaaagggatgagtaacgcggagctggcgaggcgaagcggcatgtctgaaaccacaatcaggaagtatctgcaaggcaagatttaccctgcgcttgatagccttgcaatcgtggcagatgcttgcggggtttctttaacctggcttgctacgggagagcaagaacaaaaagcagacaatactattattcgcgatgaatcaaaacaaaagttcgatatggacattgaggtgcttatccacttacttaacaggcttaaaaaagaagagcgtgatttagtctttaattttatctctcgtgaaggagtaaacaaccttgtaaggctggcagcaatgaacacctctacaatcagtccaaacgccgtagaaagcatcatagatgccttaccattacgaccagtactaaagaacgctattaaaataggcatggctggaagcgaagctaccgaccaagagattttgcgctttattgagaggcacaacgcgagcgataacaccacccagcaaccaggggcggtaagtgaacagaaaaaatcagcaagctaa

SEQ ID NO: 402668 - DNA, 267 bp, Salmonella enterica
atgagggtatccagacaagcatcgattaatttgtttgtgcgtgaagggtgcgactggtcatccagggcgatatacaccgcccttgaactcaaggggatagacctttccgaactggaaaaggaattaggtttgaaaagcggttcaatgcgtaacgtgttctatcgccggtgccgtaattacgaagctgtaatagctaaaaaaatcggggttgagcctgctgtaatctggcccagcagatacccgacaggttccgggaatgtagcttga

SEQ ID NO: 402669 - DNA, 243 bp, Salmonella enterica
atggcagcgattaatattcccgaactttacgggagagattgtctcgttaatttcgacaccgtgaaatatatccaggtgtctgacaatgaggaatgcggtgatttaattattatctttacggacaaatcccggctggttatttcggttggtctggatcgcgatgaggcacttggctggcttgagtcgatttaccgggtgctggctcctgccgcatttaccagcaaaaacaaactgtggaaatag

SEQ ID NO: 402670 - DNA, 411 bp, Salmonella enterica
atgaaagcagcaataaagcgtgaaattaatgccctgtaccgcattagtcagaatgtgatcgaggcatccgtgaataagttcgaccttattccgttcgtctatactggccctcgtactgctgatggttgtcgtgtggtttatatcgacgcactggcgtggtatgacgctaaaaacggtaagcctggcctgatgtatgaaaagtgcctgtttcctgatgtatgggaagatttgcggctcagggctatctttcatcctggtgactctcgcataacctggaaaacagcatatcgggagatacgttgcattctgggtaacagaattcaggaaggatacagtggtatcaggatgcatgttctttataaagcccgccgcctggtggaatccgaactgctcgcggaggctgcggtatga

SEQ ID NO: 402671 - DNA, 294 bp, Salmonella enterica
atgagtaataaagtacaggttatttttacgttcgaactggtaaaccgtgaaagaaaagaggttcaggggggggtagagattatggatggtatttcggttagtgtgaaaagccagggattaagtaacgtagataaaggcgaccctcagcacgcttacgcgcttattcttaaacataacgcacccaatattattcgttttctgactgatgaggtgaaagccagtgctggaaagtttggttttgaaataaatacgcgcagcgaagaaattacagaaatatctgacaatattcactga

SEQ ID NO: 402672 - DNA, 639 bp, Salmonella enterica
atgcaggctcaaaaagataattcagttacggttcaaaaaatccctgacgggtatcgctgtaatgcgatggggcatctggtgccggtcgataaaatcaaagccatcgacctgctgcgcgacgaactggttaatgagctttacgaagaggcgcgcgagctacggcgcaaaatggctgagtttaagttacgctccatgcagcgtatcggtgatttcgttgacctgtcggcgtctgagtatggtgtgacatatggcggcactaagggtaatgtaacactccccagcttcgatggctcccgtcgcgtggttcgggcgaccggagagcacagggtgtttgatgaacgtattcagaccgccaaagagaggattgacgcctgtattgccaaatggtcaacgggtgcgaacgaaaatctgattgctatcgttaatcgctctttccgggcaaataaacagggcatgattgatgttaatgaggttcttgccctgcgtgacctcgatatccctgatgcggaatggcaggaagccatgcgtgcggttgtggactctattaccgttaacggcagtagcacctatctgcgcttttatcagcgtgaaaacggcaaggaatataaacagctttcgctggatatcgccaaactgtaa

SEQ ID NO: 402673 - DNA, 363 bp, Salmonella enterica
atgataatgcattcggttattttctcggtgcgctggccggcgaacgtcgcccactacagccagcagggaaacggtgggcaaacgctggtgctgtgtctggaccatcgcgtaccgttgtctggcgaacccttaacgccgaatttttcggagtcgcccagtcacgtaaaagagtgtttgttatggcaagcactcgatcaggattcgaccccggaacgatattatttgagttcccgactgtgccgccgcgcactgagaactattacggaaggcagaaaaaatccgcatccagtgcttattcaggcattgaaagagaacgccatcgatactgctttgacgccatccctgacaccgccggaacactga

SEQ ID NO: 402674 - DNA, 183 bp, Salmonella enterica
atgagtattgtgaagaaaatttccatgcgttccctgtttgcgatgttttttatgatggagaaaggcatcatgcctcggtttcaccttcttcagattaacgcaaaaggtaacgtgatgtgtcctgaaaatgaaaacgggcgaccaacgccgcccgtttttcagaatgaaggcagaactagatag

SEQ ID NO: 402675 - DNA, 522 bp, Salmonella enterica
atgttctttaaaacttctaatcccgcagcgctggccgcatgggatcagtatcttctcgacggccaaaaacttaatgaagaagcccgaaaactcactgatgttctggggtgtggtggtcgtgcggtatttaaaaatggtgttggcggtcgtcggttctatgcaatgagctttcccggcgaagagcgcccgttcgcgcgtgagttatggacggttcagcgagaaaccactggctggagctgcgagccgcggcgctcgcgtattccggctcacctgcggacactggcaaaagaactggcggatgtgtggaatacttaccgtccggtaacgagtgcccggaccgatgccctgttaccggcactggggctggatttcagtgtgacgcttttcgggttgcttgagtggtttcgtgttggtgatgtgatttacgtcagtgccggtataaaaccctctcacgatcgcatggtcgagattttgtctgacgagttttacgcggctaaaaagcaggcggaggcttcatcatga

SEQ ID NO: 402676 - DNA, 423 bp, Salmonella enterica
atggctgaggtacagatggggatgtttgaagatgatgagcgcttaaatgcactgattgatcatcttgatcaaatccctgatgaagaacttaaccgtaagtggccccggatgttatttgcgctggttgaagttatcagtgcggaattacgccgccagggtatcgaaccggaaaaagcagacaagctggcccgaaaagtgaccgccgctcaggctggttatatgggtggtcgtccttattacttgcctatgggtgaaacgttgtttgctgaactgcgcaatcatgagatgtttacccgctggtctggtggtgaaaaagtggaatcgttacgccgtcattaccggatgtctgaaacgcagatttacgccattattcgcgaacaacacgcgcgctaccgtcgtcggattcagcccgaccttttctga

SEQ ID NO: 402677 - DNA, 381 bp, Salmonella enterica
atggctggcatgaaagatgagttaccggttgtggcggtggtggttgtggtgatttgtcttgcggtcggggtgtgggctgaacgtcagcaggtcaaacggctacaggcggatatcgacaccctcacgcagcagcgcgacgaagcccggcgcatcctgaacaaccagcagtacaccatgcagttttttaacacgctcagtaaggcggccaccgatgagaagcaacgtaatacgcaggcaagcgaagccgtcagggctgaaatccgtccggttctggcggcggaacctgcagcccgcgtggttgtgcctgctgtggctgctgaccgcgtgcgcgccgcagtcagtgaaatacgtgcaggtgccgccagttccgctccccgctga

SEQ ID NO: 402678 - DNA, 273 bp, Salmonella enterica
atgaatttactgctgtggccggagcgtctgctgttccggtccgaaagcgagagtaaggaaagtgatgtggatgaattagatcgtgcccaggagctgacagagcagtttaacgagcgctgtctggccgagcatatgcggcaggcgcatcaaaatacgcctgtgtcagccgttcggtactgtgaagactgcggcattctcattctggctgcacgtctggaggttctgcctgacgccgtgtgttgtgtggactgtcagacgttacgggaggcttag

SEQ ID NO: 402679 - DNA, 198 bp, Salmonella enterica
atgcaacagaaatatgactggtacgcactgatatccggtactcatgaacaggcgttcagagcagcctcaggtgtgagtgacagtgcattgcgtcggtgtcgctgcgccgtcgaaaaggcgattgcttcgggaatggatcaggagacgtttatcagaatagcgctttccatcctgaaggataaggtcaaaaaagtatga

SEQ ID NO: 402680 - DNA, 507 bp, Salmonella enterica
atgtcagatcaggaaaacaccctcgaatccgtcaacgctgccagcaacctttcaccaggtagctcagcggatagcgcaggcgctggcggggataatcaggctgttgagccaggcgttttcatcgttgaggttcgctgtccgcgtgagcgctacatccgcgccggcatcagctttatgcgcggcaaacagacgctggaaaatgtcccgcagtccacgctcgataccctacaggctgacgcatgcctcattgtggtgtcggttcagtcggcagccacgccatctggtgaggctggcgtgcaaaacgtggtggatgttgtcaatgcaggcagtgatgtgacgccggaggaaatcaacgccgctattgatgtgctgattgcccgcgctgacccgcagagcttcaccagatcaggtgtgccaagcgtgaaagctgtcagtgacgagctgggccagtccgtcaccaaagcgcaactggacgctgcatgggcgacacgtcaggagcacccgtaa

SEQ ID NO: 402681 - DNA, 546 bp, Salmonella enterica
atgattgctgataccgaaaaggcttatctggatcgtattcgttccctctttggcaaccatcttaaaaaggtggatacccatccgggcgactggagcgaggccaccctcaaaaaactgatgctgacgccgccttccgtttacgtggcatggctcggtgctggagagccgcgcacgcgtaaccgcatggtgagtcactgggtgttttatgtggtcggcagcatgttaaacggacgcgagacaaaccgtattggcctgtaccagatggtggctgtcctgctgtccggtctggtgggttttaaggcgggctccgcctcaccgctggcgtttgagaaagcgtcaaacctgtacagcgtggcgcagggcgcgtccggggtggtgctctatgccctttatttctcctgtgaggagattatcgacccgctgaccgatatcagtacgctcagtgatttcctgcgccattacgagacgttcggcgaacctgacggcacgcctgcgtttgaggcgcatattgagctgccggggtccggggaggatcgtcatgggtaa

SEQ ID NO: 402682 - DNA, 231 bp, Salmonella enterica
atgaagaccttctttattaaacccgcgccggggcgcatggttcgcgaccccgacacgctggagttcctgcaacctgacggtgaagaaaagcccttcaccccgtactggtgccgccggctcgatgatggcgatgtgattgagtttgatccgaatgaggcgcagccagccgtcaccgccggaaaagctaaagcggcggtggtaacggctgctgacgtggagaaaagtgcatga

SEQ ID NO: 402683 - DNA, 366 bp, Salmonella enterica
atggcaggaaatcagtatcagggcgtggcgaccattcgcgtgaatggccgcgagtacgccacgctggatggcgcgacgttcaccccgtccggttttgagcgcgaggtggtcaaggggccgaaggtgtacggctatcgccagaaacccaaagaggccacgctcgaatgcaagtttccggcaggtaacgacgactcccccggcaccagtgatatcaacacctggaccagcgtcacgattgaggtcgtcaccgatgttggcgaggttcatatgatgacaaaggcctggagttctgagcctgcgtccctgaccggtaatggtgaaatctccgcgaagttcaccagccctcaaagtacccgcgtgcagtag

SEQ ID NO: 402684 - DNA, 633 bp, Salmonella enterica
atgatgaatgacgaacttctccagagaatgctcgccccgctgatgcgcggcgtccgcctgctgttcgggcgcggcattctgaccggcaccagtgacggactgaaaatgcagaacgcgcagatgacgtcgctcgacggcgagacgtttgacgacgtggagcgtccccagcagtacgggcagattagtgtcccgctgccgggggcggagaccttttttggttgcctgatgggtgaccgcgatcaggcggtgattttagtggttgaggataagcgctaccgcccgacgggtctgcctgacggcgacagcggtatctatcactacgaaggtcaccgtctgcgcctgacgaaggacggtcgcgccatcctgacgtgtaaaacgctggaggtgtacgccgatgatcacatcctgtttgacagcccggagagtacgtttaccggcaatctgacggtgcagaagaacctcacggtgcagcagaacacccacattcagggcaatctcgccctggacggcaccgggaatgccaaaggccatttcactatgtcggatgccaccattgccggcgtgacctacagcggtcacgtccaccacgagaatggtcgcggtggcaatacgggaggcccacaaaatggctga

SEQ ID NO: 402685 - DNA, 555 bp, Salmonella enterica
atggctgtaaccctcacacctcaccagcgcgcactcctccagttactccctgacgggctggcatgggataaagcgccggattccacactggctgcgctgtgtctgggcttaagtcagtccacggcccgtgtggactggacggggcagcaactgctcgatgagcgattcccggacaggtcgcgcctgttgctggatgactgggagcgatttctggggctgcctgaatgcgacatgacgggagccagcctgcaggagcgccagagctatgccggtaataagtatcagatgaaaccctcggtaaaccgtgagttttatatccagttagcggcaggtttcgggtttgatattgatattcagccagcgccggaatcgcagtggataagcattattaatatcaaaaccaccacgggctaccggcatatgaacgtgctggacaatattttaacgccgctacgtatttacgacaccagcgcgctcgaatgcattctgaaccgctacaaacctgcctggcagacgtttcgttacgtctatgaaaacagtcagcctcacgagtaa

SEQ ID NO: 402686 - DNA, 591 bp, Salmonella enterica
atgtaccactacagcccgtcaaataatgccttttaccctgacgaacttaagcaggtttatattgatgccggttcattcccggatgataccgtagaagttgacgatgatatctggctggagttcgccggtaatcacccgcccgaaggcaaggaacgcgcagccggtagtgacaatcagccctgttgggtggatatcccgctaccggatattgaagacgcacgtaaccagaaacacgccgaaataaacgcatggcgtgaccaacaggagaacggcagtacgacttttgactggaacggtcacaagtgggatgcaggtaaagcctcacaagaccggttagcaccggttctggtcgtggcaaaatctggtcagttaccggacggctttttctggacagatgccagtaatgaagatgttcccgtcaccgttgacgacctgatagcgattgatgcaggcatgacgcaagcaatggttatccagggctttaaaatccacgaacgccagcgccagatgaaaaaggatatcgctgaattaactaaagtcagtgatattttgaattattccgtgggcagggccgataataacggtaattaa

SEQ ID NO: 402687 - DNA, 606 bp, Salmonella enterica
atgaccggcaacctctttctgaaaaatgacgggcgtatgcatttcgccatactgaatgaagacggcaacgcccgcatgtggctctacaaggacaaaggcggtgacggtattcgcattaataacggcattgatggcggcggtgaatttgtctttggtaaaagcggcgagttttattcacctggctatgtatacgccggtgcagcgagactggcgattgacggtaacgtatgggggactcgatggaatgctaacggcgcatggttgtgggataccatcgccgagcaactcgctatccgcgacaacaacatcaacgcccgcgctaccaaaagcacagccagccttgcagttaacggctggtttcgggatgcatctacaggctggcttattcagtggggattagtaccgttcagcagcctgggaacatatacagtgaatcttcccacaccattcccccaccagggatttatggcgataggaacaggatataaagcggtttactggggggaagatggtgtatcagggagcgttaatcttcttaacaactcgcagttaagtgtgacgctggataacaacttgcctacagcctggttcgcaataggatattaa

SEQ ID NO: 402688 - DNA, 522 bp, Salmonella enterica
atgaccatttacaccggctttaacccgacacccccggtaaagggcctgcatgttaaggggatggttattttgggcgccagtatggcattcccttattcgcttcttcttaaactgcaaccacagaacaataccgggctggggagtacatccagccgcggcaacctgttactcacgcaaaacaacgcgtacccactgctggatgtggtcaacacgtatctgaccgataaactgaccgccgacgaactgaaaacaatcctggataatcgtgacaggttcgagttcgctatcggcgtgggcgacaggcgtagcggcgtggtgggacgttttgtcatcgcgtcaaactggcacggtgaggatgtgaacaatttactgctgcgtcccaatccgaaggatgcaccggagtatgatttgaggctgacgttctccgcagaagctgcgacgctgacactgactgacaatcacgtagcggctcctaacacgtttggcggtctgaggtactttactgtcaggtttaagccatga

SEQ ID NO: 402689 - DNA, 162 bp, Salmonella enterica
atggataaagaagctcgtctttgcccttcctgtcatgaacagatgacgcctatctttcgtggttcatttaccaaaaaaggaaaaacttaccgccccaaaaaggcggcaagctttccgatttggctctgtccgaagtgttcaccagtaggagagagtcactaa

SEQ ID NO: 402690 - DNA, 309 bp, Salmonella enterica
gtgtaccgcgtcaccttccgcgaactgtccgccaaagacagtatcgacgcagaggccgaagcggagcgttacatcgagacccgcaatggcccggtgctgattgcctccccgtcactgcgtggtgtggcactgctgcgccgccagattgccgccgtcggcgatatcgaaggccctctctctatgttgcaaatcgggcaactgagcgagcgtgacctgtcccgcctgatggtggccgtcaatctgcgcgatacggcgctcgccggaaagctggcaggtgacaaggggcgactgggagcggtgtcggaatga

SEQ ID NO: 402691 - DNA, 843 bp, Salmonella enterica
atgccgttactggatatccgcaatctcaccattgaatttaaaaccagcgaaggttgggtaaaagcggtcgatcgcgtcagtatgacattaagcgaaggtgaaattcgcggcctggtaggtgaatcgggttccggaaagagcttgattgctaaagctatttgcggcgtcgcgaaagacaactggcgagtcactgccgaccgtatgcgttttgatgatatcaatctgctgcgcctctcctcacgtgaacggcgtaagctggtcggacataatgtgtcgatgatcttccaggagccgcagtcgtgccttgatccttccgaacgcgtcggccgccagttaatgcaaaatattcccgcctggacctataaaggccgctggtggcagcgtttaggctggcgtaaacggcgtgcaattgaattactgcaccgggtgggaattaaagatcataaagacgcgatgcgcagttttccctatgaactgaccgatggcgagtgtcagaaagttatgatcgctatcgcgctggcgaatcaaccgcgactcctgatcgctgatgaacccactaactcaatggaaccgacgacgcaggcgcaaatttttcgcctgttgacgcgactgaatcaaaacagtaataccaccattccggattttggcagcgcgatgccgcataaaagccgtctcaatacgctgccgggcgcgatcccgctactggagcagttaccgataggttgtcgtctggggccgcgctgcccttacgcgcaacgagaatgcattatcacgccacgcttaaccggcgcgaaaaatcatctctatgcctgtcattttccgctgaatatggagagagagtga

SEQ ID NO: 402692 - DNA, 468 bp, Salmonella enterica; identical to SEQ ID NO: 379862

SEQ ID NO: 402693 - DNA, 447 bp, Salmonella enterica; identical to SEQ ID NO: 371194

SEQ ID NO: 402694 - DNA, 654 bp, Salmonella enterica
gtgacgatgaattatgcccgggagctgtttttcctgaggggaatattattttctttttttttacctggctgcgcccgtcctgtgattgcgcaggagtgggagttcataacgcccttggtggctgatgcccccgccgaggtggaactattttccttttactgtccgccctgctatgcgttctcacagacgatgggcgtggcccaggccatccggcacgtactgccgcacggtgaccggatgatcaagtaccatgtcaacctgctgggccccctcggccatgagctgacacgggccagggcgctggccatgatgatgaaggaaactgacgtggtcgagaaggccttcttcatggccgacatggtggagaaacgcctgcattccccggacgatgtccatcgggtgtttatgtctgccaccggtatcagtcgcggggagtatgacagaagtataaaaagtcccgccgtgaatgacatggtggcattacaggaacggttgtttaaggaatatggcgtgagggggacgccttccgtgtatgtccgtggccgttaccatatcaacaatgccgccttcggtgcattctccgtcgaagacttcaggagccgttatgccgcggtggtctggaaactgctggccggtaaccctgatgccgactga

SEQ ID NO: 402695 - DNA, 186 bp, Salmonella enterica
atgccgcggtggtctggaaactgctggccggtaaccctgatgccgactgatgataaaggcactatacaggccggagatatcctcccgctccgtgcgctgattctcctgctgctgaccagcgtctttatctccggctttctgaccggcgtcctggccatgctctggcttatctgccgtggggcatga

SEQ ID NO: 402696 - DNA, 642 bp, Salmonella enterica
gtgaccgaccacccctcctcgatggtggagctggacacggaagggaacgtgctgcgggtgataccgtcagacggcgatcacgattttgaggccatcgaatacctcggcgggaaccgctatgccctgtcccgggagcgggaacggacgctcaccacccactgcattgacagcagcacgaccgtcctcccgccggcaacatacagcctgacgctggatgtgaacaggcacagcgacaatgccggttttgaaggccttgcccaggggcggggagagcatgccctgatggtggcgcaggagaaaaaacctctgcggctttacgtgacggaccagagccctgatgcgctgtcggtgagtgactcgctgacacaccgggcctccctgccatggttcctgaaggatatctccggcctgcattatgaccggaacaacgggctcctgtatgtactttctcatgagtctgacgtggtcgtggtgtcggacctggacggcgggagaaaggtgatgtcgctgcgccggggacactatggcctgcgaagggatatcccgcaggcggaggggatagcctcagatgaccgggacacgctgtggatagtcagtgaaccgaatctgttttaccgcttcacccgcacggcttcgtcctga

SEQ ID NO: 402697 - DNA, 279 bp, Salmonella enterica
atgcgtaaagcccgttttactgagcatcagatcattgccgtaattaaatcggttgaagccggacgaaccgttaaagatgtctgccgggaggccggtatatctgaagccacctggtacaactggaagtccagatacggcggcatggaggcttctgatattaaaaagctcaaggatcttgaggacgagaatcggcgtctcaaacagatgtttgccgacctgagccttgagaaccgggcgctgaaagacgttatcgaaaaaagctttaaaaccagcctttaa

SEQ ID NO: 402698 - DNA, 249 bp, Salmonella enterica; identical to SEQ ID NO: 371551

SEQ ID NO: 402699 - DNA, 336 bp, Salmonella enterica; identical to SEQ ID NO: 371552

SEQ ID NO: 402700 - DNA, 705 bp, Salmonella enterica
gtgggacgtaaatgggcaaatattgttgctaaaaaaacggctaaagacggtgcaacgtccaaagtatatgcgaaatttggtgtagaaatctatgctgcggctaaacaaggtgaaccagacccggaatcaaactcagctttaaaatttgttattgaacgtgcgaaacaagcacaggttccaaaacatgttattgataaagccaaaggtggcggagatgaaacgttcgtgcaagggcgttatgaaggctttggaccaaatggttcaatggttatcgctgaaacgttgacgtctaatgttaaccgtacgattgctaatatccgcacaattttcaataaaaaaggcgggaatatcggagcggcaggtgctgtcagctatatgtttgacaatactggagtgattgtatttaaaggaacagaccctgaccatatttttgaaattttgcttgatgctgaagttgatgttcgtgatgtaaccgaagaagaaggaaacatcgttatttatactgaagctacagacctgcataaaggaatcgcagcgctaaaagcagctggaatttctgaattttcaacaacagaattagaaatgattgctcaatcagaagttgaactttcaccagaagatttagaaatctttgaaggacttgttgatgcccttgaagatgacgatgatgtgcaaaaagtatatcataacgttgcaaacctctaa

SEQ ID NO: 402701 - DNA, 1128 bp, Salmonella enterica; identical to SEQ ID NO: 379814

SEQ ID NO: 402702 - DNA, 354 bp, Salmonella enterica
atgaaatatcaggtcaaagagtttattaacgaaaaatatgctaaggctgttaacattttaaaggataacctcaaagaacactaccatgttttttatggtttgagattaagtgagattcttttccctgccagtgaatacggctctgatatgttttttcaggagttcgaggcgattaacagtgtaatattgcctttggtaatttttgatttaatagaccgaaagccgattatggttatcggcttcgatgaaatacctggagctgattcacttgtcgattctggtatagaagttgtttctttaaatggtttaagcgatctgctactggttgaaaaactgacaccattatttgattaa

SEQ ID NO: 402703 - DNA, 285 bp, Salmonella enterica
atgaataaatcatggcttgaacatcaggtgctaactgaaaaaataaaaaaagtacaggaagagaaaaaagatggcaccatcccaaaagaactgtacagagtacgtataaaagacaaatacaggtgggatttgtgggaaaatgattgcagaattgttattgcttattcgaaagatgatgcagagctaaaatttacgggaatgacaggttttgatgaccattactatatagaaagcattgaaaaaataacactttcagatatagaaaaactcttactggagaactga

SEQ ID NO: 402704 - DNA, 312 bp, Salmonella enterica
atgttcataatcagatatataaaagctcttataaatttctacttgttatacatccaacctatattgggggtgttccttataagtacaggcttatgggggttctatgcacctgatgagggaacttgtactaatctcaacattgagttatgcgctgtatcagctattgatgttctgaaacctgccatttttgtatttttaggcattatcaccgttgccggatggtactttaccgaacttcagccgaagctaaggggggagggcaagtatatgaaggtaaaaacaggtgtaaaaccggaagatttcgttaagtaa

SEQ ID NO: 402705 - DNA, 483 bp, Salmonella enterica
atgaataaattaagtgataaatcctcaaatcctgtgtttacagtaattgctatcgtgatttttctcttcttccttcctgcaatcggcgcggtactgggaactacgggagaaatttacattgatggtctgcgtgaattaccgtcttttggtatgaaagagataattgtttcaatctggatgcttgtagttgcatatcttatgtgccgcttaatgaaagctgagaaagatttcattcgcatacctgcaattcttacgcttattggcgcagttctcctgcctctgacaagcagttttcagaatgtgatgactatatcagatccagacgtttccaccagaacagacttttatgcaaaggctatagaagggctggaaacaattaaaaatggaattatgtttatagcacctgctttattatgtgcaatatcttcaatcattctggcagttggaatgataagtattttacgtaaacgttattatcggtga

SEQ ID NO: 402706 - DNA, 285 bp, Salmonella enterica; identical to SEQ ID NO: 76452

SEQ ID NO: 402707 - DNA, 279 bp, Salmonella enterica
atgaatacgttatcaatgctgaaaaatacgtttcgtgatatgagaaagcatggctgccaaacagtcatggtcacgcagtctttggccgattttggccgctacagctataaaccgcgccctgcatttcaggactggatcgaacggctgaagactggcgaacgtctgccgcgaggccgttactttgttggcaagaaacctggtggccgcctggtgctcatcgatgaattgggggaagcatggacagaaaaagtaaaagtgaccaataccaacgctggttaa

SEQ ID NO: 402708 - DNA, 255 bp, Salmonella enterica
atggggcattacacaatcagaacgactgacgccgaagatcaggccattaaaaaggcgcaggaagcgaccggacaggcatcagccagcaaaacctttatgacggctatccttgagcttcagcgtaacagagatgagatagcgcagctcaggcgcgcactggcgcaggaaaaagctcggagtcaggagctggtatcatcggtaaaacaattccgttccagcctgaacaatctgtttgatctggctgacgaccgttaa

SEQ ID NO: 402709 - DNA, 828 bp, Salmonella enterica
atgatgacgagagccacagaacgcgcttacagcgagctacaacaggcgtttgatttctataaccagcgcctttttgacggtgaactccccgactgtctgattacgttccagcgcggcaagaacacaatgggctatttcagttacaggcgctttgtcgctgctgacggcagcggcaggatgattgatgaaatcgccctcaatcctgaatacttcccggtatacccgcttattgaagtcatgcaaacgctggttcatgagcagtgccatatgtggcagtaccactacggcaacccgtcgcggaagacgtaccacaatgcgcagtgggcggccaaaatggaaagcatcggacttatgccctcctccaccgggagacctggtggcgcgaaagtcggccagaagattaatgactatccgatccctggtggccgcttccagcgcgtcacactggaactgttccaggggcaatttgctttgagctggtttgatcgcttccctatccaggttgaacaacaaaaagacatgaccgccgtcatcgagcagtggcgagaaacgctggctcaggcacatcaaaatgctgaatccgggattgatattgaagcggtgctgtcaatggcgctgctgccgtcagtgtcaccgcagaacggcagcggcgattcgggtgatatggccgggagcaatgataacgatctgcctgttgcagcttttgaggacaaaccaaaaaggaacaaagtcaaatatcagtgccgggggtgcggtgctgccgtgtggggcaaaaccggacttaatatagagtgcggcgattgcgagctggctttcatcgaaaattaa

SEQ ID NO: 402710 - DNA, 234 bp, Salmonella enterica
atgaattatgttgatattgccagggtatggcgtcagcacaaccaggagcacgctgattcgggcgtggttctgatttgggacgggaaggtgtattgctggaaagatattctccgcgaccctcagcatgagcgccccggagtgatagcggtagatactgaagagaatgtgtatattgctgaaggtggcaatgaatatgacggcgcgaaatgctgggttgtctttcaggagtcctga

SEQ ID NO: 402711 - DNA, 651 bp, Salmonella enterica
atggatatcaaacctaactcagtgatccacctggcgccaggcgaaacattacccggccataccaatctgaaacccgtacctgataagtatttcgatgagttaaaggcactcataaataaactcaatactcaatcaggtaatatttacctcaagttaaaacagatgtacgcctttttggatcgttttaacaaagaatttgtgagcacgtttacctcctgtcaaaaggggtgctcttcgtgctgtaaaatcgatgttcatttaaccgcgcttgaggcaacacatattgcacaagcaagtaaactcacagccagagacaacccgcttacgaccgggcatgagtcaaaatgtccgtttttgtctgagaagggaacatgctcaatctacaattaccgcccgctgttatgcaggacatatcatgtactcactccgccggagatgtgtaacgacccggatgcacaagtcatgcagtatggttctcaaagtgcgaacatgggaaatcacatctacaaaacaatagctgagtggatctattttcagacgtatcactgcactggtaagttagaaaccaaagatattagagactacttcccttatccccgcgaagatatccaaagatttcttcaccataaccccccgcgccctttttgctaa

SEQ ID NO: 402712 - DNA, 456 bp, Salmonella enterica
atgagtgaaaatgaaacatttgatgcaacacgaaagctactcctgaatattcgctctgttcgtgtttttgcgcgagaaaccagctttgagcaactgctggaaatgcaggaaaagcttaatgccgtgatcgaagaacgccgtgaagaagcagagcgtgaggcagcagaacgcgcagaacgcgaaagaaagcgccaggagctgctccagctgatcgccggagaaggtttttcaccggaagaactgcttggcctgtccgaagatgcgccaaaaacacggaaaaagacgttgccaaaagcgccgcctaaatatcagtttgacgaaaatggcgaaacgaaatactggtctggccgtggccggacaccaaaaccaatcgacgaagcattaaaagctggccgttctcttgatgagtttctcatcaaaaaagacgcttccagctctgttggtgacgaacagtaa

SEQ ID NO: 402713 - DNA, 2328 bp, Salmonella enterica
atgagactttttattgcagaaaaaccctctctggcgaaagcgatttttgaagggctgggtggtaacccaaataccgaaaagaaaaacggctattttgaacatggctctgatgtcgttacctggtgttatggtcatatgctggagctttacgacccggaggattatgacgaaaaatattccaggtggagctttggtgatttaccgattaaatcggtttacccgcctcagtataaaatcaagccagaatccgaagcacagacccgcatcattttgtctcttatcgataaagccgacagtatcgttcattctggcgaccccgatgatgaaggatgtttgctggtcgatgagattttaggttatgccggaaacaagaaacccgtccagcggctgcttgttgccgacctcaaccttgcgccagtgcaaaaatcgctggcgaatttacagcctaacgataaatttcgcggtatgacgttaagcgccctggcgcgttccctgtgtgatcagggttttggctataacatgacgcggggatgtacattaaaaggccgtgagaagggctatgacggcgttctgaacgttggtcgggtacaaagtgctgttcttggcctggtgaacatgcgcacgctggcgaaccagaaccacacagaaagcttttattacgatgtatttgccagtctgtcgatgaacgggcatcagattaaggcgaaatatcagacaacagacgacgatcagacagacgagaaaaaacgcctgatttccgaagctcaggccgagcatattgccgggcgggttacgggtaaggacgctattgttactatcgcgacgacaaagccggaaaacacgaaaccaccgctgccgcttaacctttccacgctacagcagctatgcgcaaagcgatttggttattctgcaaaagatacgctcgatgtgatgcaggggttgtatgaaactcacaagcttctgacctatccacgttctgacaatcgctatctttcagatgagcattattaccaggccggagatattgctgccgcgatagcggccaccgtacccgaactggcgtctgcgattgcagatatggataaaggccagaaacacaaagcctttaatgccagtaagattgaggcgcaccacgccatcatcccgacgacaaaaagcggagccggaattcagcttaatgaaaaagagcggaacgtttataacctggtgtccgtctactttatcgggctgttctacccggatgcgatccgcaacaagacgaaaatccactttgatattaagggggatacctttacggccacacagagcgttctggtacaaaagggctgggaagtgctgggtaaagacaatgatgatgaggaaaaaactgaagatgccggaacagacggttttgacctttcatcactaaaattcaatgatagcggtctgtgtgaatcggcagacgtggacaagaaaaagactaacccacctcgctatttcactgaatcaacgttactggccgccatgacgagcgcggcaaaattcattgatgacccggtactacgaaaagcgctggaagcaaaagacgagggcagcgaagatcgtggcagtattggaacggaagccacccgcgcgggcattcttgaaaaactggcggcaaataccgggcttatctccatcgaaaaagaaaaggggtattcggagctggtatggaaaaccacaaaacaaggccaggagttttgcgctgcactgcctcctgaaatcactaaaccggatatctccgctctgtgggctgaaaagcagtctcagatcaaagccggagagctgacggttgaggagtttattaaggaaaatgatgagtatgtccaggggttaatcgacgagctggacaggaacggaatttcgatttcttcaaatgccacgccctgcccggtctgtaacaacggtttcctgcgtaaacgtaaggggcaaaatggctttttctggggatgctcctgctaccctgaatgcaagacaacattcccggacaaagacggaaagccggatatggaagcaaaatccagatcagaaggttccatgtcccggctcgaagccccctgcccttcatgcagtaaagaaattattatccggcctaaaggctttttctgttccgggtgcgagtttaaaatctggtctgaagtatcaggaaaaaaactgacacaaaatcaggttgaaacattaatcaaaaaaggtaaaaccggagagattaaaggctttaccagtaataaaaccgggaaaaagtttgacgctgcaattgttttgcaggataaagctacgggtaaacttgggtttcagttcagtaaaaaataa

SEQ ID NO: 402714 - DNA, 474 bp, Salmonella enterica
atgagacattttcttaatgctctttcctttgctgttgccctgttgccagcgacattgtgtgctgctcagattcaggggaaggttattcgtgtacttgatggtgacaccattgaagttttgcaggagcaacaacctgtcagggttcgtctcctgaatatagatgccccggaaaagaaacaaccctttggacgctggtcaacaaatcaacttaaatccctgctcgcaggacaatccgttaccgtctcttatacgcaaacagatcgctatgggcgagtcctgggacgagtggtgacagcgaacggcactgaggctaaccgccagcaagtgctaaaaggggctgcatgggtatatgacaggtacaacacggataactcattaccggctctgcaacaggaagcacagacacagaagtgcggcctgtgggctgatcctaatcctgttcccccgtgggagtggcggcataaacagaactga

SEQ ID NO: 402715 - DNA, 327 bp, Salmonella enterica
atgaaagttattaatgcacctgctgcaagaagtgtgaggatcgccggagttgaaattatcgatagtgtcaaagcggtcgcttctgtttttactgaaatcttgttgtttatggtctggtttccggcaattgtctatgggctttatcgtgttgttatcgttttgtgggatgattccttaaagccgcaatcggtcatggggtttattaatttcatggttgagttatacagctatgtacttccttcgctggctgttatcgcagtggctttaatcgccgttttattcctttttaaaagactctcagcaatatgggagggaagaaagcaatga

SEQ ID NO: 402716 - DNA, 315 bp, Salmonella enterica
atgaagaagaccgtaactacggcagtgctgctttgtgcgttcgctgccggaactgctcatgctgaggaaaaagccgacccgaacgatccatgtgcaatggtgttatgcctggccggaaaacttgacggcagcagtccggcggagtgtgacccgatgtataaaagttttatgtcaatcaggaaaaagaataaacatggttttttacccaatcacacggcagatgccagaaagaaaaaactaaatgaatgtcctgcggctgatgcaggtacagtaaataaaattatttcaagctttgggcggctgaaaagtttttaa

SEQ ID NO: 402717 - DNA, 393 bp, Salmonella enterica; identical to SEQ ID NO: 112181

SEQ ID NO: 402718 - DNA, 1206 bp, Salmonella enterica
gtgagcgaacaggaaaataaaatcccgaccgctgtagaaattgaacaggcactacgggaacggcatcagaaagaaattgagcaaagcgataaaacggataaggcagatgaagatgacggtaaatcagtaaaacgcctgggtatcgagaagcttaaaaaatcgcgtaaggggctggtgattattgtggccgctttccttctgctcgcggctggcgtgtctgtctattatatcccgtcgattatccgcgctatgtccagcggtgacgaaaaaccagccagtaatgcggtttctactggttcagtaaaacgtgcgacaggcctcagtgatgacgttgatccgttcaacactatgcagacagaaccggctaagactgaagaacggaaggaaagcggcggtaaagcagaaaccccaccggaaaaagtacaacagaacttcagtcgagcgctggatgtcgcctatggggggagcagctctgcttcctcaaattccggtggtagctcgtcaacggccagcaataccaggagtgaggataacggcagcagcaaagagacagaggttcagcctgttaacgcagggcaacccgcgcagctttctaaaatcacgcgcgttccttatgaccctaaccttttcattcctgaaaataccgcaattaagtgttcgctggacaggcggtttatctctgatctggctggcaaactggtctgtacaattaatgaggatgtttacagtgcaaacaggaatgtaaagctaattgaaaagggaaccgccgcatatctgatgtataaaacgggcacgttcaatcatggtcagggagccgtgtttatcgctgcaacgaagcttagaacacgcaaggaacctttcattgatattccgctgattgatacacaggcggcgggagcgctgggtgaggccggggcttcaggctggattgacacacattttgcagatcgctttatgggcgcgatgatggttggcatgatccccgatgtggcacaggccgcaagcggcgcagccaaaagcaacaaggacaaccagacggactatacggcgaacagtcgccaggcttttgctgatatagcacgcgaagcttttgcaaacagtgtgaatatcccgccaacgctttataaaaatcagggtgaaatcattactctgattgtcggtcaggatttggacttctcttctgtttataaactgaaaatgaaataa

SEQ ID NO: 402719 - DNA, 930 bp, Salmonella enterica
atgaaaatgaataaaggagcgctaattgtggcgcttctgttggtgtcgcacgtctgccatgcagccgttacgccagcagccagccgtttcgatccccgtaatcagattgtcagttataacccgcaaaacacgactgttataaacagtgcggtcggctatacaaccacactggtatttgacgaggatgaaacggtaatcagtgccagaaccggctttccccagggctgggaagtgaacaaagaagataacctggtgtatctcgaagtaaagcccgtcaaacagaccgtacagaagaacagtaccgatgacagtggcaagcagtcttcggaggtggtcagtgttgctcttgatcctgaaaacgacctggaacgctggcgaacaaacctgtttgttcgcacaacaaaacgtaattacagcatggagctgaacgcccgaacgttccgtcagccggataagatcgcgtttgttgttaattaccagtacccgcaggaacgccggaaggaacaggccgaaatcgagaagaaacggattgaggctctcaacaagcggcaggaggaacaggcaatcaaccgttcccttgaaaatgcgaagtccccccggaactgggattactggaagcgggtagctgacggcagccagtcaatcagcccggattatgcgtatgacgatggtcgctatacctggtttggcttcagcccgctgaagaaaatccccagcgtctttgttatgagcggcgaacaggaaacgctgactaacccggtagtcaaaaacagcggcagtttcaccgttgttggtgttcctgtagaccagcgctttgtattgcgtatgggaaatcaggttgttggggttgaaaaccggggctttggcaaagtccgtcttccggcaggagataccgtttccccgaacgttgagaaagaggtgatccagtga

SEQ ID NO: 402720 - DNA, 1056 bp, Salmonella enterica
atggcaacttctaggtttttccaagccgcccatgacgttattgttaaaaacattgaccagtctttgactggtcaattggataatttttcttcaatagcgtatcaattgggtaaatatggtatttctatctatgtgttatggtatggatacaccactgtagttgggaagcagaaaaccgcggttcaagattttctatggaatttatgtcgattctggctgattctcatttttgtaagaaatatgggagggtggctggatagtgctaatcaggctatagatggactacgggaaacatttgcaggaggtgatccatggaaatgggttgatgaactttgggagaaagttcagcaagtggcagcgtaccttatgtctaaagatacatctccatatgttaaaactgatggttctattgcggctatattgacatatgctggcggtattttagcgctgttactaacgtcaatagtttatcttgctgctgaagttacgcttaaaatgctaactgttactgcgccgcttttcattatttgcctttcttttggttttttacggcaaatgtttaatagctggctacagttaatatttagttcgtgtttgatttttctattttgcggtttggcaatcagagcgggaatgactttcctaaatggcatcctaaccatatctatagcaaatgcagatgagttaaatcttatctctactggtgctcaagccggggttgcaggtgcattcatggcctggattatctggcaagccaaaacctatgcttcccagctcgcaggggtaggtgttgagggcgcgatgcagggggcagccgcaatggggattggtgctggcgtgttcggcgcttcccgtatggggcgcaatatgcttggtatgggtaaaaatgcaggtattggcgcatggaaaggcgttcgccgtcaggataatggttttagccagtcgccaggtgttgctggcaagctggggaatctgaccgggcagggcgttaatattggcgccaagagacttcgccaggctgcgatagatgcggcgaaaaagaaatatggaggttaa

SEQ ID NO: 402721 - DNA, 771 bp, Salmonella enterica
atgaaaaagcatatcgttgcggcacttatcgcctctgttacggttatttctggtgctcaggctggtgttcccgttgccattgatgcaaaccctgaatgggctgtcgaagcgcagcgctggacagagcgcctcaaacagtggcaggacacagtgaaccactaccagaaacagattaatgcctataagcaggagctgctgactaaaacgggcattcgtgatgttcagggactggtgcagtctgcgcaatctgtcagtaaggagctggagaagatttacgaccaggggaactccttcattgatgattacattaagaacccggaagccaccctgtctgagcaagccagatcactactggccgattataaggtgacaaacacctgtaaggggctgggatatacgggcgacctggtgcggggctgtgaagcctcgttcctgtcccaactggcggggatcgagtacggcaataagctggaaagtaaactgcgtgaagataatcaggagatggccgaccttatcgaccaggtgaagaacgcccaggacacgaaagccacgcaggacgcgacaaacgctgtatcgctggcaagtctgaaatttaacaagctcaaatttcagtatgaaatgtatcgcgataagcagcgcgatcttgcagaatacaaggagaaaatgttacaggccgcatatcagcaaaaacaattaggagcggttactaccgaaacacctgttgtagactataaagcggcgtttgatcagcagagctatgaaatgaactga

SEQ ID NO: 402722 - DNA, 645 bp, Salmonella enterica
atgttatctactactgcttttgcggcgcttgctttgcaatgcgcggccagcgttcatcccgatactgcgcacgaagttgcaagggttgaatctggttttaacccatatgctattgccgagataataccgaaggttgaacgtaagcccggtgacaaaggcgtagtgtcctactttcccaaaactaaggaggctgcactccagatcgtaaatcaaattgaatctcgaaatcatcgttactcagtcggtcttatgcaaataacgagtacgaattttgcaaacttcaatacaaccgctgagaaaatgtttgacccctgcgaaaacctcaaggtttcagagaaaattttggtggattgttataaacgtggtggcgacattttacgtggtctgagttgctattattccggcaatccagaaacgggaactaaacctgaatcagattttaataacaccagttatatacagcgtatagggtttaatccgcctgataacaaaaaaaactgggtggttccttcagttaaagatgcaatcagaaaggagaatgtaacgcagagtatcaaacctaaagaaattatcgtatatccccaatatgccatgcgtggcactgttttagatgaaaaggaaacaaacgatgttaaaactcaataa

SEQ ID NO: 402723 - DNA, 228 bp, Salmonella enterica; identical to SEQ ID NO: 76472

SEQ ID NO: 402724 - DNA, 510 bp, Salmonella enterica; identical to SEQ ID NO: 76471

SEQ ID NO: 402725 - DNA, 546 bp, Salmonella enterica
atgaaaaaagttcaattcaggattgaagaaagccaacatgatgatctacttgattgtcttaaaacactttatccagatgaaccgggtttaaccgtggcaaaaggaatgaagctgcttgccaatgctttactgaaaagcaaggttaaaaatgaagatgttaatgtttcaaaagacaatgatgattttatcaaaaccacaatgtatttaacagggaaacaaagaactttaatcgagaaagcggctcaccgtcatggctggaatttatccagagaatgtcgttaccgaatccagacgacacttgaaaatgaacttgatttcttcgatcaggaacttctggtgatgaatcgttgccgtaatgcaatagataaaatcgggcggaactttcattatattatcgttaatgataatgccagggtacttgataaagatgggttctatcaggacgctgagcggttgagtacagagataatgagtctcaaaagtgagtttgaaaactacattatgttatgcaaagggcgaactgtttctaacaaggttgaggtgtaa

SEQ ID NO: 402726 - DNA, 258 bp, Salmonella enterica
atgaaaaaacaggagtttttagattttatcagtgcagaacagcggcggggagctgtccggttttcgctgggatttaacagcaaaggggaaattgtattgcactggactaacgaggccgggttaagagtctggagtatactaagcggtaacaggggtaaaagtcccagccgggcaaaccgggaaagaatgagtaacctccgtcgctggctccatgatgcccgtcagggcatggaaggcgacactccaggggcagaataa

SEQ ID NO: 402727 - DNA, 165 bp, Salmonella enterica
atgtcggaacgcatgttatcagcaatacagactgttgaaaagggtgggcgtccggtttttcccttgatgccattctctgcttttcctgagtacatggcattactcagaaaagccctggaaaagaaagaaacaaaagcactgataaaaaaacaggaggtgctatga

SEQ ID NO: 402728 - DNA, 339 bp, Salmonella enterica
atgaacacatatgttatcactttccaggctttaaacactaagaaagaaaaaatcacctgctcagcttttgtccattcagaaactctcttccttgccgttcattctttcgaagataaaaatcgcggtcgtggttatgccattacgtctgttagtgaattgttggatgaagaattgacagctaaaaatgccctcaagaaaaatattaacttttggtttaatgaatgtggtttaagtaaatctgaagttataaacgaagtaattaactggaagaattttgcatacacccttaaagaactggaggaagccaaaaatgaagcgataagagaactgcggagttaa

SEQ ID NO: 402729 - DNA, 237 bp, Salmonella enterica
atgaaaaacaagaccataacggaagcggagctgataaacatttttgaaagttacggagcctatatttgcccggatgagatcgaaattacagccaaagaatgcaatgaaaatggttcagtgttacaccgtggcctaaacgcagaaggatgggcgcatctgtttgcaaaggaagaagcctatcagcaggaatgcgaagcccaggaagctgcaagtaatgatggacactttgacgaatag

SEQ ID NO: 402730 - DNA, 516 bp, Salmonella enterica
atgaatattcaggaagcattaaacgtttttggtttatccggtgatctgactgaaaaggacatcaaggcggcatacaaaaaagcggctttaaaatatcatccagaccgcaatccattgggtgccgagctgatgaaagcagtaaatgctgcgtttgattttctcatggctaacattgataaaatcaatcagtttcaaagcactgatgaaaacgcacgttacaactacggtgaagatctggaaaaagttttgaatacgctttcaggccttacagggattgtctatgaagtcattggtaattgggtctggattagcggagaaactaaagaacacaaagatattttaaaggaaatgggctgtaaatgggcatcgaagaaaaaacaatggttttaccgtcctgaagaacacaaaagccgctggaatcgtaaagaacacagcattgaagaaatccgtgaaatgtatggtacagcgggtaaacgtaaggcgtcaggctggagacgtgtagaagctaacgcataa

SEQ ID NO: 402731 - DNA, 873 bp, Salmonella enterica
atgaggcttatcgtgaagacagtaactggattaacgaaagttagacatagaaatgaagttggggtaactcttgcatccctttccctttcagcaaaaagagtgctttttctggctctttgccagattgatacaaaggaaatgttagatgatgatattttggaggttgatgctgactttttttcaaaagctacttctttagataaatatgcctcttatgcagctctgaaagagggagctaaagttctttcttcaactacgttagttttaaacagagatgatttaaaaaatttggctgatgaacttgggatactatcatctaagaataaaattcctgatcgcttggatttaaacttaacagaattctgtgcctattacgatcatcttgccactgtacggataaaattcacaaatacagctaagcgatatttctctaagttgattggttctgaaaatagatataccactcaggtcttgaaatcagttgtgttgttgaatagtgtaaactcaacaaacctttatcaagtcattaggaaatattacagtcagaatagttcaagaaaatcttttgatatatcagtggatgatttaaaagaggaaatggggctttatacaattgaggaaggggagaagaaatataagtatcctaaatactcattttttgttcgtgatgttatcaataaaagcattaatgaaataattgagaaaacggaaataaataagttatctttctctgttgttgggaaaaaaggaaggatggctcacatgcttagatttgagtttagtataaatgaaaaatccccatccttttcggaagatgatatggcatttttagaggagtttgacaaagtcgttccaccaaaaacgaataagtga

SEQ ID NO: 402732 - DNA, 444 bp, Salmonella enterica
atggctaaaatctatgagtttccgcagggagctgaacgaggtaagctgaaaaaagagaacatccgggaacgtaaaaaacgattgcgagaaaagaacggcaacccggttatccggcacgtaaaatggttctggttttatctacgttttgcaacggctggcgcactgcatttagtctctgttattactctggcagtcttgggggctttcagtaaagctattttctggattggtggcctgctctgtgttgttacatggttccatcttgagcgccagttctggacgccgcaaaatttcacgattccagtaatcgtaacgctgtggggattgagtttgtttgccactcccctgatggagctgctcaacaaaaaaatggcgtggtatcgttttctggttcctgatgcaaagcacaccaacactaaggcaaccaatgatgatcagctgtga

SEQ ID NO: 402733 - DNA, 612 bp, Salmonella enterica
atggctaaattaccgcgccgtaagtgcgcaaacaaagaatgccgccagtggtttcacccgatacgcgaggggcagatcgtttgctcgtaccagtgcgccagcgccgtcggcaaagaacagaccagaaaagctcgcgaagccgcgcaacgtaaggcgcaatcccttcagcgcgccgctgagaaaaaagaacgcgccgcctggcgccagcggaaagccgcggttaagccgctgaaacactggattgacttgacgcagcgcgccgtaaatgacatttgccgcgaaaccgaactggcagaaggactcggttgcatctcctgtggaacgaagacggcattcgcatggcatgcaggccattacaggagtatggccgccgccgggcatctgcgcttcactcgcttcaacatccatcttcagtgtgatgtctgcaacgtctacaaatcagggaacatcgaagcatatcgtgccgcgctggttgagcgttacggtgaggcggcggtgctggaactcgagaacaataacaccccgcaccgatggacggtcgaggagctgaaggaaatcaggctcgcggctctggcggatctgcgtgcgctaaaaaagctggaggcggcatga

SEQ ID NO: 402734 - DNA, 138 bp, Salmonella enterica
atgaaaccagaactgatcgagatactccgcgcgcgctggcagcgccttcgcatttaccgctaccggggatcggtgctggtggattaccgcattcttcgtaattttgttcgtatctatcattcagcaggagcagcctaa

SEQ ID NO: 402735 - DNA, 384 bp, Salmonella enterica
gtgaaatacattaaatcaatattatatttctctgctgtattgttattattatcagagcagtcattagccgccgccgtcggctgcgtcgctaaaaaacaggaagtggaaaatcagataacctatgcccgcgagcataacaatactcatcagattgccggtctgcaaaaagcgcttcgtgaaatagaagaacactgtactgacccgcaattactgagacaacgtcagttaaaaattgctgaaaaagaacaaaaggtggctgaacgccaggcagaactggaacaagctaaagaaaccggaaatccccaaaaaatagcgcagaaacagaaaaaactggatcatgcccgggaagaacttcaggatgctcaacttatgttgtataagtaa

SEQ ID NO: 402736 - DNA, 375 bp, Salmonella enterica
atgcctgaatcgaaacatccagttttatttgtggtgtatgtttcaggagctatattgcttctgttactaatggagttgtcacgagtccatgacttagtaatgctggatagacctgatactgaatcatttattacgcaggctgactttcattgtacgtataaaaattatagtgacagttcgagtaattataaaaaatgccttggcaactggtatcgcctcgctgcttatgaattaaatgtgaaggctattgcatatacttttgatgactgtctttctgctaatgataacagggcgctgtgctggtataacctggaaactaactacgctcttatcaaaagacttgataaagctgtattgattgaagacggacaatga

SEQ ID NO: 402737 - DNA, 498 bp, Salmonella enterica
atgagtaatgaaggatttaatcccgaagacatcgaggacaccctgtcccgatttggtcgtggccagaagaaaaccatacgttcctcaacggccggtattccggattttgtgcctcgcaaggctaagttacagagcagtcccgttgaattatccaccaaagacgaggcgctctgggccgcagccgctgatcgtgcagaacaacaacaagcacaggaactccgccctgtcagcccttgttttagccaggctgatatagacgagtttctggcgaggaaaccgcagaaatatcagatgaccgagcgggactacaaggaactagggcgtaatatagttctaggaattggggacttggtttatggagcagcaactacgaccgttgtaagtgctgggattgttgctgaagtagtagcagcctcaccagaattgcgccaatcatcctatgaatatggctacatggggtggggatggtattatgatgatggctctttcgctagttag

SEQ ID NO: 402738 - DNA, 1089 bp, Salmonella enterica
atgagtgtaactgaaaaagaaaagtcagggcttcttacagatacgtactggatggtgggattaggtcttctggccgtcagggttattcagggatttatctactggggaggggggagccgtcgctttatctatgcgccggacaaacttaacccagaggctcctcactggatggcgtacaaattccagacagcaatgcctggtgctttactggggctcgagcatgtcatctcgttcatgctgcaacatttctggctactgtataccggtgtgattgttttcagcgccgcagagcttttggcgggcttgttcctgatagcggggctgtttacccgcatttcagcattgttgtccatggcgttctcggtcttgctgatgctgatgtttggctggcagggagcaacttgcattgatgagtggacgatggcagcgtgcaatctggccatgggtacgacaatattcttatgcggctctcatctatatgcactggatagcgttcttctaaagaaaaagcctcatcttgctgacagccgggtgtttcgctggtgctgtggtgctctaccgatgccaataagtcccggtggttacaaaaaactggcgctgtggctgctcgcatttgtggtggtgtttgatgttggtacctacagctattatcgtgggtcggtgttgacgccttaccaccatggtccggtcagcccgacgacgcaccacattgcactcagtgatggtaagcttctcggtgacgggcaggttagtgtgcatgcctatctgaatgcgggaacaccagaagcacctgagcatattatggacgcctggattaaggatgcgagtggtaacaagctggtacactgggataccgccatgctctcatccttgccttcaggaaattttgaaaatgattatgcatacaatcaatttgcatcaggtcgttatggtattcaggccatcgtcgggtcagcggcaacgatcactctgcctgccggcatcattaaggatggcacggacgcacttcctgccggcccgctgacgcttgtgctgatggatatggaagggcataccttttctacacctcttgtcagaaccggggagtaa

SEQ ID NO: 402739 - DNA, 342 bp, Salmonella enterica
atgcagcgcctgtttgcctacctaaccgatacgggaagcctccctgtgctcagcgcagtggatgcccctgtcaccgaatttgggtcactcgatgcactgttcaaaaaaacctacgaacatgaacaacttattacccgaaaaattaatgagttggttcatgtcaccatgacgtcacaggattacccaaccttcaacttcctgcagtggtatgtcgcagagcagcatgaagaagaaaaacttttcaaatctgttcttgataagctgtctctggcaggaaacagcgggcagggcttgtatcttattgataaagaattgacttcgctgagaacacaaaaccagtga

SEQ ID NO: 402740 - DNA, 780 bp, Salmonella enterica
atgtccataacgagtgattttctcaaacgggtggatgaggccccccctgcatggtccgacaatatcattgctgaacgtaatattaataagtaccagaaatacagtcagtttgtccggcgtgcttactggacggacagtggcagtatcaacgtcttttgtatcagggggactgaccatacggattatcaggggctgacctggcgcgagtttttgcatcgtgggcggcggatggatattaacatccgtctgctggaaaagaacccgtcatattacctcgggacggaggtgaaaaaacccgccatgcattatgtcagctataacggactcgactggtatgtgggcagtgatggtaatcaccgttcctgtctggccaggttcctgttttatgaaaaagggctgacatatctgcacggcgtgtcattacgtcattacgaatttgatgacgcactactttcggtatacgaagagctgcaggcggaacggttgtgccagcaacaggcaggtctgtactgggaaatcgatctgcattctgaaacgcttggccgggaagataccccgggctggaaaatcgatcactattcgccggggtttaccctgaggctggttggtggtctgcagggtggcgaccaggtgccggaaagcctgcgtcgggtcacggtcaggcaggcagatgaaggccgggtattgtttcaacagatccagtccctgcgtcagatgcagataaagccagttaccggggcccactggttgaaccgatggttcagaaggggggcaaaatga

SEQ ID NO: 402741 - DNA, 534 bp, Salmonella enterica
atgttcatggccatttttcttttcctgctgctgtgtctcatcgttttcgcggcgagggggtgtcggcgaacggtatcagcccgtgtccgccggcaccgacgttaccgcaaaacggcgcagcgggtacttggacgtctgccgcaactgtcctctgacggggcgcgtctgagctatctgcggaaaatcaacccgtatgtgtttgaagagttgctggcactggaaaaacaggggctggaggtcatcagaaatcgttcctacagcggcgatggcggtctggacgggcaggtctttattaacggtgagcgctggctgattcaggccaaacgctacagccggagtatttcaccgcaacatgtccgtgagtttggcgagttgcttgcgcgggaaggttgccgcggattttttgttcataccggtcgggcggggcgtaaaagcctcgacaggctgggggggtatccgcaaatacagcttgtcagcggccgacggctgctggagttgctggcccgggagcggactgatactgacggaatatga

SEQ ID NO: 402742 - DNA, 423 bp, Salmonella enterica
gtgacaatcgacaaacatgcgctgcgtgaagtggcagagaaggctgggagagataagtggcaggctaagaaaataaatggcgacttctatgtcattcgccgcggtagctacgaaaagcaatgtggcatcacatcgtatcaacttgtctcggagatgagtgatgtaatgaataataatttcctctgtgcccgtattgaggcgctgaagctgacagcagttcaggacagtatagagcaggctattacagggtttgtcgttgaagggcaactggatatcgcccagttaaaactgcatgcacatttgttgcgaaaaagactgcaggcggaaggtaccacgctgaaaacctcgcattcacaggagctggttgcctgtaagcatggtttcaggaactggcaggcggcgattgtcgggctgaagtcgtga

SEQ ID NO: 402743 - DNA, 585 bp, Salmonella enterica
atgccaaagaatagtgttttcatctgtggcgctgtcctgatggcgctcagcaccggtgcgttcgcgcagcccacgccggcgatcactccgtccgcagaggttgttcctgcagcgtctggccgtgaacctgcggcagccgccgtgccgtctacgtcgaccgcagacacctcagatattgtcccgattaatcccggtgatggtctgacgggcgggcaactggaagagttgcaggctaaaaccctgcttctggaagcgcaggttcaggcggcccggctgcaaaaagaactgacgacggctgaaacagcggggaccggggggaatgtccctgtagacggtccgtttgctgtgggcatgcctgctgacattggggcgactcctgctccggctgctacccgggagccggggcggataaagatcctggaggtgagcggccgggggaaagatcttcaggccacgctgtcgtttccggacggccgccgaagcgtggttcaggcaggaaatacgctgccgggcagtacgctgacagtgaaggccatttcgctgtcgggtgtcacgctcagcgacggtcagcaactgacgttttag

SEQ ID NO: 402744 - DNA, 156 bp, Salmonella enterica
atgaaaatatttttagcgacaaaaaagaggaacaagcgtaaaaacttactttttaagcgtgtcagttataacatcaaaaaaaacaatattattaacaaattgatatctttgaatttacgtaacgtggcgcagccgacgataatttcctgtcaataa

SEQ ID NO: 402745 - DNA, 162 bp, Salmonella enterica
atgaacagttttttttgctttgatgtcgttattgctaatcgctaccacaggggggaatcttttgctcagcctccagtatatgagcaaagaagttatataaagagcggagagtctgaggctttttttattaaaaatatggacgtccgacacgtgagtttataa

SEQ ID NO: 402746 - DNA, 285 bp, Salmonella enterica
atggacctaaaccaacatacgagaatccaggacatcatgagccatcctctggtaaattcagaggcggcggttctcaaacgtcaatattaccgagcaacgctgaagaattgtacaaacatgcaatacctgatgcagaaggcaaacattggtatgcgatggataaagatggcgttattcaccgatatggtaatagtaatgatggaaaagctcactggaacggtgatacatcccaaaatagaggcgtcccagtacctaaagaggttcagaggaggttcgaacaaatga

SEQ ID NO: 402747 - DNA, 420 bp, Salmonella enterica
atgaataatttctttaaaattaaaacattcctttcgacagataaaaaatatttgttttgtaatttttgtttttcgtttggtgatgtagttgttggtgattataatcaagttgtgttagccagcacattaaggctctccttagaggatttactcttcaaattaaggaggtataaatcaatacatatcgatgagcataatcttgcggaaacctttggttctatttcagatgacataaaaaattctattctacctacttttattgaatcatttgatggggattttggtatattgtgctatgttaatggaaaggagtttttaatattaaaaaaatggcagcgctcggatttaataaaaatagagataaataaagatgcttacattaatttgattattaatgcgttgaaagaaattccgatataa

SEQ ID NO: 402748 - DNA, 384 bp, Salmonella enterica
gtgcggcgggagacactgccgcgtgatgcggcgggtcgcctgatggagatggagggtgagcacagtaaacggacgttcagttacaatcggcttgaccaactgacggaggtgatactgacgccgacggcggcggggcagaaacacggaatgcaggcggacagggtgaggctgggctacgaccgcagcggctggctgacggcggaggacgcggggaacggcagcatacgttatcagcgcgacgcgctgggcaacccgacggacatcacgctgccggacgggcagcacctgacgcatctgtattacgggagcgggcatctgttacagacggcgctggacggcctgacggtgagcgagtacgggtgcgacagccttgttgattgttga

SEQ ID NO: 402749 - DNA, 441 bp, Salmonella enterica
atggatgagaaaatcagagttttaatatgtaccgaagttccacgtattgacgataatattgatatgcgctctatatggatggagctaaacacttatgtgaagactcttgagtctaatatcaaccttcaagacttgggggagtggaggattttaattaatgtgcttgctcaacgaacggatgcaatcggtgttgcaaagcgtgttgcaagatttccttccgacaaagagtatgtgatttatatatcaacaccaattccagataacgaacaggtaagttatggtacttctaatgtaaaagaagcattttttaaagaaaataacgaaaaatactcctacattcttgagtctggttttgatagttacgataatttatataattatatgttagagacaagtaaaaaaaacaatacattggattcttactcgtggtatttcatgtaa

SEQ ID NO: 402750 - DNA, 198 bp, Salmonella enterica
gtgtgggaggggttcaggctgttgcaggagaacgtgcagcagcagggctggcggacctatctgtacgatgcggaacagccgtacatgccggtggcgagcgtgacggggcggggagaaagcaggcaggtgtggtattaccacacggatgtgacgggcacgccgcaggaggtgacggcggcggacggaacgctggtatga

SEQ ID NO: 402751 - DNA, 726 bp, Salmonella enterica
atgaaaaaggcaattttatcagtaatcacagttgtttataatggagaaaagtatattgaggacactatcaaaagtgttttatctcagccttgtataaatgatattgaatatataattattgatggtgcttctacagataatacattgaatattattaataaatataaacaacacttagcattagtaatttcagaaaaggataatggaatatacgatgcaatgaacaaggggatagaaaaagcaactggtaaatatattgggttcataaatgccgatgacttctataatgaaggcgcgttatgccacgctattgagattatgaaagctaatgaatatgatataatatatgggaatatgtttatggtcgatgtggaaactttggaggttaagggggtacgcagacctaaacactggaagttaaatattgacatgaacctaagtcatcccgcaacttttgtaaaaagcagtgtccataaaataaatttatttgatcttaattataaaattgcagctgattatgatcttatgttaaaactaaaaaagaacaaatgtacatttcattatatagataaaaatatatcatcaatgcgaaatggcggagttagtgtaagaaatatcaaattagctaacaaagaggctaaaataattaggataaaaagaagtggaattttattttccttggtagctagtatgtatcttgctatgcgaaggataataaaagcatga

SEQ ID NO: 402752 - DNA, 285 bp, Salmonella enterica; identical to SEQ ID NO: 402746

SEQ ID NO: 402753 - DNA, 420 bp, Salmonella enterica; identical to SEQ ID NO: 402747

SEQ ID NO: 402754 - DNA, 1239 bp, Salmonella enterica
atgaaccaaatatcacaaaacaaaaacaccctgaacctcttcaaaataaaatccccagtagaactcaaaaaattattaaaaaaagaggtggacataaacacacttaattcatcgagccagaatgctttgtttcattgcgaatgccctgagcttatgaaagcaatgattaatgccggaataaatattaaccaaactgatacattcaacaggaatgcgcttttttatgcatcctgcccagaaactatgaatatagtgattgaaaacgggattgatatcaaccatacagacacgctgggcagaaacgcgctcttttacactaatgaggctgaatgtgcccggttactggtaaaaaatggaatcaacataaaccatacggaccctgaaaataaaaatgctcttttctttgcagccagagaaagtttagccagagaactaatcgatagcggtatagatattaatcatattgacaactatggcagaaatgcccttttttacacctgtgagcctgacgttgtacgccagctcattcaacgaggtataaatgttaacgtcagggacatatatggtcataattcggttaacattaccgtcgttacccctgaattactgaatgcttatttcgccgcgggccttgatcctgacatacaggactactacggaaacagcatgattttttacccttataaaaaatcaatcacagacattttaatcaaaaatggctgtgatataaaccgcgttaataacaatggggaaaccgcctttgaatacatacagaccatgttattcagcaaccatcaacttgatcagtgtctcagcgtgcttacgcattacattcaccttattaaagtaagaccattaatttttaatcgtcttacttttggctgcattgagctgatcaaaatattacaaaggcagaatatcgattataaaattaatgatcgttgcgttgtaagatactctaataaagacattaaaaattttattactgaactgcagaaagtcactgatatcaaccacattactctttgctcatggtatgacaccccgcttgtcggtttaaaaaacaaggaaattattaagtggtttataagaaataatataaaggtaaacattaatgatattgaagaagaggacgttcgtagtgaaattctgtcttatctcgcactcagggaaaataaggaaataaaagccgttattaagccagatataaaaaatacagactgtaaaagaaggctgtga

SEQ ID NO: 402755 - DNA, 915 bp, Salmonella enterica
atgaaaaacaaaattataaaaagcaatgacgatctttttaacgccaaatcaaaaaatgacattacccgtttactaaaaatgggtacagatattaacacactcaatgagcatgaacaaaatgcattatttcactgccgtacccctgaggctatgcaggctatgattgatgcaggaataaacattcatcacctggataaccgtacagaaaatgctttattccatatcaatgatataaaaatcattgagagccttattcgcaatggaattaatattaatcacaaaaatcagtctggtcagttggcctacccgaacttttccgtcacgccagaagtaatgacactacttatcgagtcaggtcttgatatccattcacttgataataatggacgtacactccttttcaaccccttgttcgctgatatctatattttattaattgaagcgggctgtgatataaaccacagagatcataatggtcagactgctttcgattttcttcaatcaagtcaatatgatattgcgttggcttattctattcatttaaaagaccattcacccgtcacttttaaacatttaacttatgccagtgtagaactaatgttcgaactaaataatcaaggcatagattttaacatagataaccaatgcagaatatctatcgatgaaaacgaggctaaggagatcattatggtagtcagagagatcacagaccttagctatgtaacattttgtcttggtaactctggattacctattataaaacatgcgagtaaatcttttataaagttcctcattgactgcaatataacagtagatacagatttactgaaaaatcaggatatttacgatgaaatcattcaatacaaaacacaaagagaagataaaaaatcatttatatctaaaacaccaagataa

SEQ ID NO: 402756 - DNA, 693 bp, Salmonella enterica
atgagtacgaaaatcctcctttttcccgttttactggtcgtttcactgaacgccgccgcgtcgtccacatgggtggacaaccgctacgcgcacattacgggatcagagaaaaaccagtacaaaatcggtggcggccatacctttgacaatggcgccacgatccttgccgcctggctgtacgatgcaggcaagaacttcgatcagtttaaaagtagctttcaggagtacgagggctggtatcccctcaacctcagcccttactggacgttgtcgccaggcttactcagtgacgtggaccaggcgggaacgaaaattgcgccctatgccatgcttgaataccgtgtctccggcgatctaagtgtggcggggcgttatcgctataaccacatgacgcacaaagacgtaaacatcaatggagagatggaatataacgactcccaccttattgacgtcttcgtgaactatcaggccacagataaattatggctccagttgaaccccgaattctctatcaatgccggtgatttcaggtcgcctaacgggaaaagaacgcactgggagcccaatattgccgcgcactaccagctgaataaacactggagaccttttgcagagctgggctggctggaccgggatgaaaaccatgataaccaggttcgtgtacgcatcgggatccgttatttcctgccgtaa

SEQ ID NO: 402757 - DNA, 780 bp, Salmonella enterica
atgaaactgacacaagtacgaaacgccaccctttttattgagtatgccggcaccactttcctcatcgatccgatgcttgctgaaaaagatgcctgggacggctttgccgggacggcgcgttcgcatatccgtaacccgatgaccaccttgccgatcgcgacagaagcgctggtcaatgctgatatcgtcatcgtgacccatactcatatggatcactgggatgaggccgcacaaaagcttattccttcaaacaagctgatctacgcccagcacgaggctgacgcagaactgatccgctcccaggggttcaccaacgttcgcgtactgcaggatgacaacgtgttcacccacggtctgaccattcataaggtcgaaggccagcacggcagcaacgaagcctacgcggttccgcacctggctgaaggtctgggcgatgcctgtggtctggtgtttacccatcatgatgagaaaacgctgtatatcgccggtgacaccgtctgggtgaagccgtacctgaaaacccttcagcgctttaagcctgacgtggtggttctcaataccggcgacgcgcacattgacgactatggcccgattatcatgggcgcccatgacacgctgcgcacgcttcaggccctgcctgagacaacggttgtggcctcacacatggaagccattaaccactgtctgctgacccgccaggaactgcgcgagtacacgcagcagaacggcattgaagagaaggttcttatccccgaagatggtgataccctgaccttctga

SEQ ID NO: 402758 - DNA, 960 bp, Salmonella enterica
atgtcatcattatccgtcgccgtggttgccacacccggtgttagccctttccacttctccattccctttatgatttttgcccaggccgttgagcccgggctgttcagcgtcagcgtctgtgccgacgcgcccggacaggtccgttccgacatgggcttcaccattaacgtccctcatggtctggagccccttcgcaccgccgacatcatcgtcatcccgtactggagccatcctgaagaaaagcccgatgagcgcctcctcgccgaactgcgggatgcctgggcgcatggtgccgaagtggtgggattgtgtctgggggcctatgtactggcctatgccgggctgcttgataaccgtcgtgcggcgacccactgggagtttgagcaggatttcagaaagcgtttccctctcgtgcatctggacaataatgccctgtacaccacggacgagcgcctcatcacctcggccggtaccgctgcgggtatcgactgctgtctgaatatcgtgcgggaacgctacggcagcagtgtcgctaaccacgctgcgcgcagaatggtggtccctccttaccgtgaaggcggccaggcccagtttatcgaacatccggtaccgaccaacacgcgtgatgagaaaatcaacgagctgctcgactatatccggcgcaatcttgagaaaccgcacgacctggacgcgctggcaggattcgtgaacatgagccgcaggacgtttacccgccactttctgaaggcgacaggtgtgaccgtgggcgagtggatcaacgcccagcgcctgcaacgcagccaggagctgcttgagacaaccagcgccagcatcgagagcgtttccgagctggccggcttccagtcaccggtatcgttccgccagagtttcaaggcccgctttaatgtcagccccagcgaatggcggcgggcgttccgcgggcctgagccccttgcctga

SEQ ID NO: 402759 - DNA, 474 bp, Salmonella enterica
atgaaaaacgcactgatcgttatcgatgttcagaatgactatttccccggcggcgcctggccgctcgaaggggccgaagaggtcgcggcggaaatcgtcggcgctgtccggcaggcttataaggaaggctggatggtggtgggtatacagcatgttgccgcggctgatgcaccgttcttacgcccgggcagccctggctcggatatcctgagcgatgttgccggtgcgctgggtggcgccgtggtgctgcgaaaaaaagaggcggacagcttttataatacggggctggaggagctgcttcgcggcgcaggcatcaccgacatctggctgaatggaatgatgacgcatacggcgctctctccacaggcgaggggcatgcaggtgcatgttctggcgaaagggtgtgccgccccgacgcgggagctcagcgctctggccctgagcgggctgcaggcgcggtgcagggtgaagtaa

SEQ ID NO: 402760 - DNA, 1044 bp, Salmonella enterica
atgggcagcctcggtaccgccctggtcatgtttcctgcatcctttttgatgacccgtatgggccgtcgcgcaggcttcctgattggcgcggcatcgggcatcgtctctgcagccgttgctatggtcgccatgatacagcattctttctggctgctttgcctggccatgctgctgatgggcatttaccaggcctttgcccagttttatcgctttgccgccggtgaggtcgccacggtggagtttcgtaccagagccatttcgctggtgattgccggtggcgtggtggcggcgtttgccggtccctggcttggccgcacgggcagcaacctgctttcaacgccatatgccggctcttttatcctgatgggcgtgatgtcggcgataggcgtactgctgcttggactgaaggtaccggaagaatcgcatactgcgactttcaataccccgcccgccaggcgctggacgacgatcatcacccagccggcctatcttgtggcgctgttttcagcagcctcggcctacgggatcatggtgctggccatgaccgccacccctatcgcgatgacacaccatgattattcgctgggagaaagcgcctcggttatccagctgcacgtgctgggcatgtatctgccgtcgttctttaccggcagactggtggcccgcttcggctcggtgaaaattatgctggccggggtggcaatgatgattgtctacgcctgcctggccctgtcgggaaccagctgggcgctttttgccggcgcgctgatttttgtcggcaccggctggaatttcctttacatcggcgcaaccagcctgctttccacaacctacagcggaaaagaaaaaggggtggcacaggctgttaacgatatgagcgtgtttgtgttcaccctgctgtgctcggttgcggcaggatcgttgctcaacaccatcggctggcagagcatgaataaactgctgctgccgtgggtcattgtcctggcgctgccgcttctctggctgggctggcagcgtcgccgggccgccatcgccgcaaattaa

SEQ ID NO: 402761 - DNA, 126 bp, Salmonella enterica
atgcgtaatatgcacaaacaggtccttattttggcgggatcgcaggccgtattccagacggtaaccatactgctgatgaccattggtgggctggcaggcttatatctcgcgcccgatccctcatga

SEQ ID NO: 402762 - DNA, 1962 bp, Salmonella enterica
atgcaaagaactagctataaattactggcgctcctctgtgcccctttatcgctctgtgcgtggtcacaaacggtggcccagcctgaactgggttatcgcagcgccacgctcattcagcgtgacggctttcagtttaaagacctgaaccatgatggagagctcaataaatacgaggactggcgtcttcctgcagaacaacgcgcagatgatctcctcaaacaaatgtctttaccagaaaaagctggcttgatgatgcatggcactgctccggttagcggaaatattatcggcagtggcgcagtttatgataaagcggcttcccgggacatgatacttaaagcccatgtgaccagtcttcttacccgtctcaatggtgaagatcctgccctgctggccacacaaaataacgttctgcaggaaattgctgaaagcggacgtctggggatacccgtaacagtcagtaccgacccccgaaattcctatcaggacctggtggggataagtaatcctgcaggtaaattcagccagtggccagaagccataggtatcggggctgctggtagtgaagaacttgcaagagaatacgcctcccatatccgcgaggaataccgggcagtagggatcactcaggcattgtcaccacaggcagatattgcaacagaaccacgctgggcaagaataagcggaacctttggtgaaaatccagagctggctcgtaagctggtcaaaggatatatcaccggtatgcaggacggcagtgatggactcaattcaaaaagtgtagcggcagttgtgaaacactgggtgggatatggtgccgctgaaaatgggtgggatgggcacaatgcttacggcaaaaatatagtctttaaaaccaacaatctcaggcagcatatcattccatttgaaggtgctttcgaatctaaggtcgcagccgtcatgccaacctattccattatcaaaggtgtcgagtggaatggaaaacgaccagagcctgtggccgcaggattcagccattttatgcttactgacctgctgcgtgatgaatataaatttaaaggggtcattatcagcgactggctgattaccgcagactgtaatgaggaatgcgtacatggaaccagaggtgataaaaaaccggttccgggggggatgccttggggtgtagaacacctcagtaaagaacaacgttttattaaagcagtaagggcaggtatagatcagttcggtggcgttacagactcagatatcctggttaacgcggtaaaaaagggattactgtccgaacagcgccttgatgaatctgcacgacgtattctcgtacaaaaatttgaacttggcttgtttgagcaaccctacgttgatgcgaacaacgcagataaaattgtgggaagcaaagccacgcaacaggaagcagatcaagctcagctgcgttcgctggtattgctacagaataataatatcctccccctgagaaaagcaactcgcgtatggctctatggtattaaacccgccgaagctgaacatgcaggattaaaggtagttgaacatcctgaagaggctgatgtggccatcatgcgagtatctgcgccttttgagcagccacactatggctatttctttgggcgacgccatcatgaaggttcgctggaatacaagcctgataatgatgtagtgaaaacattgaataaagtcagctccactgtgccggtaattatgaccatgtatatggaaaggccagccatacttactcatattactgacaaaacacatgcctttatcgcgaactttggactgagcgatcaggtgctgttcaaccgtcttatgtcagattcatcatattccggtcgcctgccgtttgcattaccgtcaaacatgaagtcggttcaggaacaagacccttcagtccccggagacattgtatctcctctttacccgacagggtttgggttgtctcgctaa

SEQ ID NO: 402763 - DNA, 1368 bp, Salmonella enterica
atgcaggcggaaagaaaccttccagcgcctgttgcttcagtgaaaggtgctcgtgataaggcagaaggaaataagcttgatgagaaaacgctgcaacagatcagtcgttatattaaagatgattccggactgacgacacaggggtattttcggtctggctggggcaccggaagtcacggttctccggagtcatgggctattggctctctgggacggtctggtaatgagtattctggctggttcgattttaccttcaatcagcgcgtgtatcgcgatgaccgtcatagggttaatgccattgttaagctggacggaaatgcagggcagcaatatgccaaaagctggtttggagatgacacccgtaatgacagtaaacttcagttccaggatttgtatgtctcgactcgtggctacctacctttcgctcctgaagcagatttttgggtaggtagacacggtcttaagggctatgaaatccagatgctggactggaaaatccattcagctaatgccggttctggcgtggggatagaaaactgggatattggtacaggtaagttggatgtggcggttatgcgcgaagattatgatgtctggaataaactacgtaccaattccaggcaaataaatatgaatcagttagacattcgcctgaagaacatccccctggctgaaaacaccgaaatggccgtctcagcgaagtatgcacaaccgaatcatgccagcgaaagcaaaactgaaggtgataattattatgatgttaaaaatgcctggcttgccactgcagtgttcaggcacaaactcagcaggggagcattcaatgatgtcgctctgcaggtggcagataattcattcgcaaccagtttttccagctacgactcggcgacagccctttttggagtaggaaagtattattacggcgaacactctggtgggattgcttatcgctttatcacacaaggtgaaaattatctcggtgaccgtattattgtcgccaatgccctcgtttattcggcaggaaacgatatttatagcccggatactggtcctcacagcgcattcagaagcctgcgtgcagtcgtacgtcccgcctggatatgggacaagtataatcagacgggtctcgaggccggttggttcaggcaggacaatactaatcaggtggacactcgtttcagagaatccgggattaaaacgacgcttttccatacatttaaaattgataccagtatgctgaattcccggccggaactcaggctatatggcacctggattaaagtactggataacgggctggataatttttcctttccggatcaaaaagcagatcagtttacggtgggggctcaggcagaaatctggtggtaa

SEQ ID NO: 402764 - DNA, 231 bp, Salmonella enterica
atgagtgggatcagtacctggcaactggcgattattgccgtcattgtagtgctgctttttggcactaaaaaacttgggtcagttggtgccgatctgggcgcatcagtgagggggtttaaaaaagcgttaagtggtgaagcccaaatgcctgaaactgtcttccacggggatacgacaaatcctgcccgacatcaccccgaaaaactgactgacccccgaaaggaagcctga

SEQ ID NO: 402765 - DNA, 942 bp, Salmonella enterica
atgacatccagaagacaattcatacagctgtcggtgactggcgctgtggccgccgcagcagcatccattcccttcacatcggcagctcaggctgccttaacagccgcgacttccggtaccgcaggaaccgtatccgcgggctccggcagcggccgtataaagatcacccaggtgcgtaatgccacgcttatcgttaactatgccggcgtaaagttcctgatagacccttatctggcggataaagaagcctatccggggtttgagggaacgttaaacagccagctccgcaacccccgcgtggcgctcaaaacgccgatgaacaccattcttgacgtcgatgcggttattgttacccatacgcacaacggcaatccgcagggcgatcactgggacgaagctgcagttaagctggtgcccaagcatcttccactctttgcccagcacgagggcgatgccgctcgcatccgggcgcagggctttacggacgtgcgggtgctgacgcctgattcctccttcaagggcgtatcgctcagctggacgccgggacggcacggaacggaagaagcgacggccgtcgctggagaaggtctgggcgacgtatgcgggattgtcttccgtcataccggtgaagatacgctgtacctcaccggcgacacacgctggaacagctacgtcagaaaaacgctgaaaacgtataaaccggacgtgatcgtgatgaacgccggctttgccgttgcaaccaatctggatggcattattatgggccttgaggacgtgaacgaagtggccgaggccatgcctgacgccaccctgattgcgagccatctcgaggcggtcaaccactgtacagtcacgcgcgctgatctgcggaaatactccaggctgatgggattcgataatcgtctgcttataccggaagacggcgaaacggtttccgcctaa

SEQ ID NO: 402766 - DNA, 198 bp, Salmonella enterica
atgacccgccacagagggtgccgtccgctgttttatcatacgcttttgggatccgaaccggaaaatgcccgcgcatgggctgacacctacatgtctgctgcgctgacattgtcacgtatgctcccgggcggaactgataaatattccggccccgtcccggttagccggtacgggatcccgtcctgcaatattctctga

SEQ ID NO: 402767 - DNA, 1218 bp, Salmonella enterica
atgacaaaaaatctgaccccatcccgttcccatcatgccctgtgggcatcaatggccgccctctatcttaatggactgatgtatgccgtctggggcgttaatattgtcgtcatcaggacccggtttgatctatccgaaggcgcgctgtcgctggccctcgcggccgtggcggtcgggggtattgccaccatggccatggcttcccgcatcgtcactcgtaaaggcagccgctataccgccatggtcagcggtcttttgatgggcggctctgcctcgcttatcctggtgatcccacagtttataccgttgcttgcgctgctttttgtgttcggcattttcgtcgccgcacacgatatttctgttaacactcaggttgcttcgctggagcggctgtcaggaaagcccatgattggcgcgctgcacggcagcttcagcgctgggggactttccggtgccctgctgtcaagctactggcagggagcctcgcttcctgctgaggcaaattttctcgtaccggcagttatagggaccgcgatcattcttttcacatggcactttatgatcccccgggaggctgaaagcatctccacttccgtcaacggcgcgtctgcagctgccgtaacgggtcagtgccacaagggagtccggtcacgtttgcagcttctgggcctactcgccttttcagccctggttgtggaaggggcattttacgactgggcagcagtgtatatgcgggacgtggtaaaggcccctagggcatgggtgggctacggctatgcggcctttgccgtggggctggtcagcgggcggctgagcggtgacttgatccgcgcccggatcgcgcatcagcttcttatcgccgtgggctggatagtagcggcaggagggctggcagctgtactggcgctgcgctcgccagcggaagtggtggccgggttcttctttaccggcctcggtattgcaaacatcattccgcttctgttttcaacggcggccaggctggccgttcaggggggaatgccggcatcagaggggttggccatcaccacgcggatcggttatatcggcctgctggcaggtccgctgattgtcggaccggttgctgaattcatcgggctacgtctgtcgctgttgagcctggggctctcgctcacattcacctgtgcaggatggctgactttgagtcaccggaccggaggaaaaccgtggaggatctga

SEQ ID NO: 402768 - DNA, 489 bp, Salmonella enterica
atgaacattctgtttaagtactgcagaatcggggcctttatgattgacatggccattgttcaaatgtttacgcaactagcacataatgtattcattatgatattgaaactgctggcacttaaaaggcacttaattctaccttttagcaacaatctggctcttccgttattattgtttatatgtgttattttacttctcatatttacagggttatttgtcatataccactggatatgtttccgctgccttggtgtttcgctaggaaaatggattctgggtctgaatgtaatggatacaaatggctattctttgtcattgacaagctatactaaacgcgaatatgaaaaagttgcgctctttacaaccagcctaacgttttatggactctatagcatagcgcaatttatcactttctccagagaacctctacatggaagaaggagtaattcagtggtatctttcaataaagatatcattaggcatacataa

SEQ ID NO: 402769 - DNA, 1608 bp, Salmonella enterica
atgaaaggtttcttcagtaaactatcgcaggcaataatgctgcctatagcgttattacctgcagcaggaataatgttaggcattgggggaagctttactaacccaatgatgattgatgcatatcatatcagcatcctcggtcaggattctgttctaaacagttttttgcaggtaatgaccgctgccggggggattgtttttgccaatcttcccgtaatgtttgcacttgctatagcggtaggattcgcaagaacagagaaaggggctgcggcacttgcagctatgatttcataccttgttatgaatgttaccatatcaaaaacattgtcggttggacatttaattgatactacaaataatacagtagtcgtttttggcgctcattatgcaggaatattaactgatgtcctgggcattacaaacacattgagcatgggcgtatttggggggattatctctggaggaattactgtaatcctacataataaatattatgatgtaaaattaccggactatcttggattctttggtggagttcggtttgtgccgattataagcgcattcgccgcgctgttttatggtattgtattaacttttttctggccttttgtaggggctctgtttggcgtggcaggttctgctcttggcaacttgtctgcaggaggccatggttatattgcatcatttattttcggcatcattgagagatcattgattccagtcggtctgcaccacgtattttacctaccactctggcaatctgaattaggcggcacagcagaaatagccgggcatgtaataaagggaacacaaagcatattttttacttctcttggaaccggagactttactcattttagctcaacaaattttatgacaggaaaattcccgttcatgatgtttgggctaccagctgcagcatatgcgatgtatacggtggccgacagagaaaacaaaagggctgcaggtggattattattttctgtagcgttcactgcttttctgacaggcattaccgaacctattgagttcacattccttttcctctcccctgcactttactattttattcatgttcctctggctggtctgtcattccttctgatggatatttttcaggttaaagttggaatgacatttagcggtggattcattgattttattttatttggtgttttaccgggcgtaactggagttcataacaactggtattacattcctctggtaggaattgcttatgctttcctttattttattatattccgttggtacattctaagatttgacataaagacacctggccgtaaagaaactctagttgaagtcaaaacaaaaaaagattatctggcggcaaaagaaaataatgaacaagtgcgacaaataatagatgccctcggcggcgccgaaaatatactggatgtcgatgcctgcattactcgtcttcgtgttactgtaaaggacagtaattttgtcaaagataatgaatactggattaataaacttggagctaaaggcctggtaaaagtgggaacgacaggagtccaggtcatatatggtgctgccgcagcacaatacaaactattaatcaataacatactggagaaatga

SEQ ID NO: 402770 - DNA, 1320 bp, Salmonella enterica
atgagaaaatataatcttaccattgcaggaggcggatcaacctataccccgggtattgtaaattcgatccttaatgctgcggacgtcttacctcttaataaattggtattactggatactgacgaagagagagtcagtctcatgggaggtttcattagccttctgattaaacaaagggccccggatgtcgatgttgtaatcaccactgacagaaaagaggcctttacaaatatggatttcctctttgcccagattcgttccgggggattgaagatgcgaatccaggatgaacaaatcccgttgaaatttggtgtcgttggacaggagacatgtggaccaggaggttttgcttttgcattacgctcaattccggatatgttagaaatcggtgaagatgtgcgccattatgcgccagatgcctggattctaaattattcgaatcctgcagctattctcgctgatatgtggaacaaacgttttcctgaactgaaaagtttatttatttgcgacatgccaattgttattgaattgcttgtttctgctactctgggttacaaacatgaacaattaaactttgactattttgggctaaaccacttcggatggtggcggcatatatggagtcccgatggcgaagatttgttacccaaactacgtgatcatatgctcagtgataaaccactgacactttatgaagatgaccatgttaatgaagactggatctctacattcgaaagattgcggaaaagtatgcggatgttcccggaattcctttccagtacctatatgcaatattattattttggggaggaaatgcgtggtcattgcaagcctgattatacacgtgcaaatcgtgtaattgatacacgagagaaagatgtgttcgctgaatgtcagcgttgtgtagatgtcggtacggttgaagggagcttcctcacctctggtgttcatggcgattttatcgtaaaccacgcaaaagcgatcctgacaaatacgcccatgcgtacaacggtaaatataccgaacaaaggagcaattaacggacttcctgatgatgccatagttgaagttcatggtatcgtctcagcacatggcattgaacattttaccacaggaactattccacactttcaacgtgctttaatggtacagcaaaatgcctatgagcaactgactgtagaagctgcgcttgaaggttcgtataagaaagcattgcaggctctgacattaaatcgtactgtgccatctgctgatgtggcgcaaaaaatacttgatgaatttatcgatgtaaataaggggtattggcctctacttagatga

SEQ ID NO: 402771 - DNA, 1206 bp, Salmonella enterica
  misc_feature (1187)..(1196): n is a, c, g, or t
atgaaaaaagatctcaaaattgtcgtcatcggtggtggatcaagttatacccctgaactcattgaagggttactgcaaagaaaaaatgaattacctgtcggcgagctatggttagttgacattgataaaggtcagaagaaggtggaaattatcgcttcactggcccgaagaatgattaagaaacacaaccttaatattaatgtggtagcaacactcgatcgtcgacaggcactttctggagccgattttgtctgttctcagttccgggctggttgtctggaaggacgtatcagagatgagagaattgcgcttaaatatggaatgattggacaggaaactaatggtcttggcgggttcagtaatgcctgccgtacaatcccgatagcactcgatatttgtaaagatatggaggagctttgccctgaggcctggttgcttaattttaccaatccatcaggaatggtcacagaggcagtcctgaaatacagtaaaataaaggctgtcggtctttgtaacgttccagttattatgcaaaaaggtgtggccagaactctggatacaccagaaaataaagtcattatgcaggttgcgggtctgaatcatatgatttgggcaagaaaaatacttcttgatggtaaggaccggctttctttcgttattaatgaaattatttccggaaatgatcaactggtgccacaaaatattccaccatttgcctggcctaaggatcttttgtcaaagatgggcatgatcccctgtgcctatctgagatattattacatgtctgaagatattatgtctcaggaacttaatgaagctaagggtgaaggtacccgggcagaaattgttaaagcactggaggaaaggctttttgagttatacagcgatcctgaactgaattataagcccaaagaacttgaaaaacgtggcgggcaatattattcagaagctgcctgcgaactcatgagtgccatttataatgataaacgcactcttatgcatatcaacactcgtaacgatggagccatacaggggctgcccgatgattgtgtggttgaagtaacttcacttatcacgaagagcggtccgcttccattgaatgttccccctttcccgatggatacattgcggcttttgcaactgatgaaagagttcgagatcctgacagtcgaagcagcagtaacagnnnnnnnnnnggtgatataa

SEQ ID NO: 402772 - DNA, 930 bp, Salmonella enterica
atggaacacacacacttgcaactgaatcatatggccacctttctggtggttgcccgttccatgagtttcacagtcgcttctgaagaattatgccttacccagggagctataagtcacagaattaacagcctggagacggcactgggttttaaactattcgtacgtatgaccagaaagcttgagcttactaatgaaggtcagcggttgcaggcgacattatcgagtgtttttaaaacaataaacgaagaaatagaatccattcataataatgagttaagtggagaactgtatgttggagttgcgccaacatttgctctttcatggctggttcccagacttcctgactttcagaaaaaatatccacatctggatatacggttgagagtgaaagccagtaaacttgattttaaacacgagccagttgatctggcaatttattacggcactgggcagaatgctggattttaccaaaagagattatatgatgagtatctgactcccgtaatgtgccctgtatatgcaaacgaattgagtatttatggttgtgaggatattcaaagactctctgaagcaaggttggttcactgcattgaaggcattgatacaatttctccgagatatgaatgggaattctggctgaaacagactggagtggaaataccctttaaaaggcagcagacgattataaaccatgcagaaatggctataagtgccgcgcgtcatggtatgggggttgctatgggaagggtttctttagcacgaccatatcttaatgaaaaaatactgattgcacctttccaatttataaatagtggttttggctatgatgtaatttgtccggctggccttgaaaataggccgcgatataaagcatttatggaatggttagtgcttgaggctgaaagagagcgcagtcttattgatatctga

SEQ ID NO: 402773 - DNA, 441 bp, Salmonella enterica
atgaaaaaacacagttacccaacactgactaactaccttgccaaaaccaaaaagaatgcagatctctatagattatataacccacaattttctgtattcggaaaaccagtaagtgaagagcaggatttttacttttgttacttctccaggcatatgattactgagaggaatatcttaaccatcttttcaattcatacatttctctcttacaatataagcaagaaagagacaattaaatcatttgtacattttctcagaaacgcaaacaatgacaccttcaacaatgcatttcagtttcgcgggtgcaatatcatttatcaaaacaagaagagagaagttaaggagatctcatggttttcattctcacagatatatgacgatatcgtaaaaatcaaagagtatagtgctaacaatgaaatttataacaaattcgcagcctaa

SEQ ID NO: 402774 - DNA, 900 bp, Salmonella enterica
atgaccaaacaaatggtaaacatattaattcaaagtgagacgagagaggaagttatgaattgcataaattcaggaataaatattaatgctgttgatcattgtggtagaaatgcccttttctattgcagccaattagacgctgtcaaagcaatgattgaagaaggcatagaactaaaccacatagacagttatggtaataacgcactatttagtaacactaatccaaacgctctggaattgttaatccattcaggcattaatattcagcacaagaataatcaaggccaatcctgccttcaccagaaacactataatataaaatgtgcagaaattcttattaatgcaggtgctgatatcaacagtattgaaattgaaggccagactgtactctataacctctattccatagatgcttttgactactggatagaaaaaggctgtaatattaatcacactgatcataatggtatatcagtactcgatttgtcaaaggacaatggaaagtggcattaccaatccaacgtcggtgctcttatccggcatatagaaaaaatcgatagcacacctgttttaatcaggcatatcacctataattctttagagttcattaaattcctcaaacaaaatggtgttcatttcctgctttcagagagttgtacagttgaattatatgttaaagacatgaaatcaatctttaacgaactaaaacaacatatcgaaatcaagcaaactcagttttataattgtcgcaatgagcatatgggtatctacaccggcatagagagagtgaaatggtttattcgaaatggtgtccgaatggacgacgatatacttagacagcgttccgactccgataagatttttcatatatcgcaggaagagagaaaaaagacctgttaa

SEQ ID NO: 402775 - DNA, 1242 bp, Salmonella enterica
atgaaaggcatgcagaaaataaaaaggggtaaacaattcacaggtgtggttctctatagcctgaagtcaggttcacaccacaaaatcacgccttatgttatcggtggcaacatgacgggcagcactgctgctgaactaatcagtgaatttgaaggcacccagcagctgcgccccgatgtcgccaaatctgtctggcataattcgcttcgcctgcaaaagggtgagagtctgtcaaccagacagtgggcagcattcgctaacgattatatggcccgaatgggattcactgacacgcaccttcgctgttatatccttcacgacgatgccgacgggcagcatattcatatcattgcaagtcgtattaacatgatcggtggaaaactctacctggggaaaaatgaaaatcttatcagcactcggattatcagtgagctggagagagtacacggtctcaccgaaactacgagtgtaacgggtagccgccgtcaggataaaaggaagccctcccgcaacgaactgatgatggcagaacgaactgcagctccctgccctaagtcacagttgcaagccctgatcgacaaggcattaatccaacgtcccgacttgctaacctttgtccgcttactggaacaggaaggagtgacctgcaaacccaatatcgccacaacgggtaaaatgaatggattttcatttcagtaccagggtatcgcctttaaagcctctcaattgggtaaaaaatatggctggccttccctgcaagcactgattgattttacaccagagcatcttactgtactgaaagaagcacagaagccgacagaacctaaaattgcgccagtgccagtgccagtgccagtgccagtgccagtgccagtgccagtgccatcatgcaagtctgaagaacaggctgcaaaccgggaaacgattctggagaaaatccatcagcttgatgaaaaaattcgtctggaaagacaactggaaacagtcagtgtcattcaactcaggagcaaactgtacaatacaacccgccagataccccgccagcgccgcctgaaggtgtggcttttattactcagccaaattgttgtacttctaaggcgcaggggactgtcacttttgcatgccacaacacatcctttccgcaagattctttatctgcacctgttagcacccgttcctttcacagccggtaattctcttcaggaacaatcagttagtaataaccagaacctcacaccataa

SEQ ID NO: 402776 - DNA, 321 bp, Salmonella enterica
atgaaaacttatgccgttatcacactcgttactgctgtctttttgctgagcggctgtaacagcgaaccctccgaacaggatatctacacggccatgaataaggtcgtggaacagacgaatgctttcgtgaaatctctagcaggcaaggatgtcccaaaagacgcactgcgcgaattaaaatcagtcaaaaagcatgactgcgtagaagtatctgataaaagctataaatgcaatgtgacggctattgtcgataacgaaaagcgtactgctgctgtaacccttgtcaaaacggatgatggctggcaggtcgttgataagtaa

SEQ ID NO: 402777 - DNA, 426 bp, Salmonella enterica
atgagtgctattaatgttttatctcaggaggaaaaatttatacatgtagttgataaatttataacccataatcacaacagcgttaataacaatgccttttataaaaaactttatgttctcttcgcagggtatcatctgaagtatttttattcacgggcgcagtaccgcaattcatgttatcacgttgataatattatgcagatgtttaccggagtcgtttcaacactgaacacaactctgctcaggaaacttgcaaatagcgacacgttgctgcattgcctgaattcactcgtgaattatatttcaggcaatttggatgaagcagagcatatttatgctgatttgctggcacagtatgaaaagaaacgcattacaggctctctggcttatactcctcctggctcagtgatcaggaaaagactgtga

SEQ ID NO: 402778 - DNA, 564 bp, Salmonella enterica
atgtcaatcacaagtgttgtattaactaaaaaacaaaaatccattattgcagaagcattagaggttatgcccgaagatctggaagaaataaaaattaaagcaaccagctataaaaagacttccttcagggacgatttctcaatgatctttaaaggtaatatggcgacactcgccagaatggatttgacacccacagcatttagaattgttctttatctcttctcagccattgattatggcaatattattccggatttttcacagtctcgtactgccagagagttaggactgaataaatctaatgtttcacgtgcatttaaagaattatttggaaggaaaatacttattcgtgacaccatagataatcaggtttacctgaattcaaatttgtgcgttaaggggatccctcgtcgtttcaatgaagatctgatggataaattcaggaagtccagactggagacagaagacttttccaattcgtttaacttttatcgtgcaggaagtaaaacaaagccagttaaaaactccagaagaagatatcctgcagacgacattccattttaa

SEQ ID NO: 402779 - DNA, 300 bp, Salmonella enterica
atgaaacaaaaacgatccacttttcttcaaaagattaaatcttctgttgaaagcctgaatatgaataatactatttacaatgtattctggtcgctttcattaaccgcgacgcatacggcagacaagagccctccctattttttatcatgttatgtatattgtacagcaagaagggatacatatcacaccggctgcttttatcagaccatcgataaactgattgatatgagtattattaaacctactaaattcaaatatcagcaccgtttaaatcctgtatttttcagttttctaaaataa

SEQ ID NO: 402780 - DNA, 276 bp, Salmonella enterica
atgactaattcaatcagagtaccagaagataaagattttgtatgtgcatttgtaacttcaccgaatagcttatatgaggctattgaggcctattgtgattatgtagacccggtcgaagagatatcgtttgagcacgtccttctttatgtgttgtgttctatactggtcgagggtggtacagatgttaccattaatgatgagttacgaaagtgtattgagcacattgtcaatgaaaaaaatagtgtcagaaatagtaacgcagataaaaagatgtaa

SEQ ID NO: 402781 - DNA, 207 bp, Salmonella enterica
atgaacaataaaaatatacgcctgctccgacttcctgaagttatgaataaaaccggctatggtaaagcctggatttatcgtctagtcaacgaaggtttattcccacaaccaataaaaattggttcgcgtgcaattgcatttgttgaaagtgaaattgatgaatggatcgcatctgcaattgaacgatcacgtaataatgcagcctga

SEQ ID NO: 402782 - DNA, 642 bp, Salmonella enterica
gtgaaaaaatctaaagttgcagatctaatcgttcagcatgttccaaaacaactcatcatggccctttccgacgcgatttacgcggcgtcaaagcgttcttttgattctgcaaaaatgaaaagccaagggcacagagcaactgcgcttggccttgaacgctatctcaatttgaatgaaaccattcatgaagtgttcgaggcgaatggctgtaacccggggaaattgtgtggcaaccgtatcgtagaaggccatagcggcatcttcaccattgctcgcgaaagctacaacgacaatcagtggaagaagctttttcgtagcaaacgtaagcaaacgctcattgctgagaatgtatttgtggaaaaagtggtgcaaccggatttattctccgatggttctgatgtgccaaaagctacactgttcgtagtatgccgtttttccggttcgttgcagacccagcctgaagctccgatgtctatagagcttgttgttccaggttctgatgggaagagctgggttttccatgagccacttgaactttttttaacccgatatgatgtagttccgtcccaagaagataatgcattccctgggctcaaaaagggcattatcaaaaaagatggaaccgaggaagatgatgtatga

SEQ ID NO: 402783 - DNA, 327 bp, Salmonella enterica
atgattttgtcgggagagcagttcaaacagcacacgcaacttttgttgaccacttcaaggtgggctggtgcggcttatctgttgtggctgggcataaaaatgattgcgacttcaggcactgatacgcagctgcgaaaaactgccaaaatttctgactggaatgccgttaaggaaggtgcactgaacagcctgactaatccaaaatccctactgttcatgtttgcttttcttcctcagtttgtcgatcccgccgcggatcctgtctggctggaattgtttcccaggggtcagtcgcgatggcatcaggaacatttggaaattggctag

SEQ ID NO: 402784 - DNA, 864 bp, Salmonella enterica
atgaggcatttagatattgatttcaatcggcttacgctaccagatggttggcgagaaaaagcacaagtattgttaaattcacttatagtggcagaaaatgcgaaacaacgatctgacataattaataaaaatcaagagcattggaaggcagtgaagccgatgctggcctccctgttcaactataaatgttggtatacagaggctccacaacagggaacggatgtcgacgtcgatcattttcgccccaaaaagcgtgtacaagaaacactatcgacaacaacacctcatgatggttactggtggttggcattttgccttgaaaattatcgtttaagctgcattgtcgcaaaccgtcgaagagctgatgtagaaacaggagtgacaggcggtaaagcagatcattttccattatgcgacgaaagtatgagagcaaagacccctgattgtgatcttgaagaagagcaaccattattactggatccattgaaggctaccgacgtacagttgctacagttcaaacctgatggtgaagccatgcctaggtttccaaaagaaaaacatgctcgtaagtttaggcgagcagatcagtccattctattttatagcctcaatcactctgattttgttcgttgccgtatagagctaagagatcagattgatagggatgttaaatccgcaaagaggtacttcaacaaattagaagccagcgatgcagataatgaccttgcatatgagcagacaatttgtcgtttgcggaaaatgagaagtaaagaagcaccattttcaagtttttgtattgcttacttggatgggtttaggcataagccggaatttgacggcgtgcttgatgcagtctatttataa

SEQ ID NO: 402785 - DNA, 1623 bp, Salmonella enterica
atgaaagttgacacattgcatattcgctcgcgctttaaaaatcttgaaaacgtgaaagtggactttgatgaaaatcacctgatgaccgtagtagtgggccgtaatggttctggtaaatccaatgttttagaagccttggtggctatatttcgcaatcttgatctaggggaggcgccaccgttttcttatgagttgaattttcaactaggtgaagaaggctgggttaagtggtatgacgtcaaggtggatgcagatccaagccgcggagcgctatcgaagcagtatcaagttttggtgaaagacaaacatagcagcaatatggatttcgagcctataccattctctaaagtgaagcgtgacaagaaaaccaagaaagcggagtaccttcctaactttttgttcgcctactattccggcccatctgatagattagaaaaatattttcgtaagcatcgtgataattattaccgagaactactctacaaaaagctcgacttgagagcagatatccgctcgctattttatgccaagccacttcatagccaatttgttttaatggctttttttcttagtcctgaactcgaacgagagcgaactttcttacacaaagagcttggtatagagagccttgattcaatacattttgtgttaagacgtcctgcatgggagagagacaaagaagacagattctggggggctgatggcgtcgtccgtgacttcatcgagctactttatccccacgctttagctcccgtgaaggtgatcagaaatgaaaacactagtctaacagggaaaaaacaaaataatgaattcattcatatattcctgccatcagttgagacccttcatgaaatagccaagcagttaacaccgagcgttttcttcaaaatgctcgaaagcacagtgctatctgaaattatttctgaagtccatattcgggttaaggttacttacgctcaagagccgatcactttccaagaacttagtgaaggagagcaacaattacttaccgtgttgggcctgctcaagttcaccgatggtaaagattcattatttttactcgacgaaccagatactcaccttaacccatcatgggccgttaaataccttaattttctgcgtgaattcgtacccaaccctgaaaccagccatttgctgatggtaacgcaccaccctctcgctattgctgaattagagaagcagcaagttcaagtaatgtggcgagattctaatctacaggtccatgcgcaagagcctgaggaaagcccgaaaggtatgggctatggtggaatcctaactagcgatatgtttggcctacgaacgacactggataactcaaccgaacgtttgctgcggttacgccgtcgttttacagaaaaaacagaattatcacctactcaggctgggcgtctgaaaaaaattgatcgcgcgatagaaggtctaggctttacaacggcacattgggatgaagagtatgctcagtatttacgtatacgccgagaggtcgaaagggaatctgaagccgttaacattacgccagaacttaaacgcgttcgaaaagagcgggctaaagtgattgttcaacgcatgcttgcagcagaacgggaagagaataaaaaatga

SEQ ID NO: 402786 - DNA, 237 bp, Salmonella enterica
atgggcaaaaaaatcatcaaagtggttgaggcgttaaagcaagccggagaacctcttagcggtcagcgattgttagcggcagctggctaccccgacaacagcaacaccgaacaactggaactattctttctggatcttcgtgacgcccttgccatcgagaaatctattgtgaaacttgagcgcagcgaggacgggcaagattggttcgctttggctaaggcagatggcaatgaatag

SEQ ID NO: 402787 - DNA, 1062 bp, Salmonella enterica
  misc_feature (1035)..(1044): n is a, c, g, or t
atgagtaatgctcatttgccacaaggatggtgcatttctcgaatctctgatatttcaatgaagggagatcagcgaaagccagcggaggaagagccacttatttatgttgatatcggcagcataaatcgagattcgaaaattattgaatctccacagaaactcatggggaaagatgctcccagccgagctagaaaagttatcaatactggagatgttcttgtatctttgacaagacccaatctcaatgctgtagcgctggtcccaagtgaacttgacaatcaaatcgcttcgacaggttttgaagttatcaaatccgtattggttgatagtcgctacatttttgctttgacacgttcaaaagactttattgattctattagtggtgctgtacaaggtgctttatacccggcggcaaagtcttcagatgttcaggcttacaagtttccactgccccctttatctgaacaaaaaataatcgccgataaggtcgaaatcctactgtcacaagtagaagccatcaaagcacgtttggaacgtatcctcaacatactaaagacctttggccgatctgttcttaccgccgccgttagaggggggttgacggaggattggcgaagggaacataacatttcgctagaaggctggttatccactaatgttgggtctgtagccgaagtaaccacaggtaaaaccccgaaaaggacaatttctgaatattgggagggggggacgattccgtggttaactagtgcagtaacaggctcaacatatacaatggaagctgagcagtttgttactgaattagctgtaaaagaatgtacgttaaaaatctttcccaaagggactcttctaatggcaatgtatggtgagggtaaaaccagaggtcaagtaaccgaaattcgattagaggctacttgcaaccaagcatgtgcagctattcttgttgatgaaacgaaaataagtaaagagtttcttaaaatttgcttacaagaaagctacgaggaaacaagaaaggctgctgttggtggtgcgcannnnnnnnnnggcttcctggtaagttag

SEQ ID NO: 402788 - DNA, 1536 bp, Salmonella enterica
atgaaacaagaaacaatcgttcaaaaaatttggggtttatgtaacatactaagaggtgatggtatcacttattatcagtatgtttctgaacttagctatctattgtttcttaagattgctcatgaaaatggttcagaaaaactgatccctgaaggctatcgatgggttgatctggaatctcatgaagaggaaggattacttggattctatcaggagatgctcactcatttgggcgcacatgtcgaaaatgaagttataagggcgatatactcattccctacaacagttttctctcattccgaaaatctaaaagctgttgtggatggcatttcaaaaatagagtggcaccaagtaggaaaagatgggtttggtgatctttacagtggcttaattgataagagcgctcaggatactcgttctggtgctgggcagtatttcactccacgttctttagttaacactataattagattaatacaaccaaaccttggggaattaattcaagaccctgcgacaggaagtggtggtttcttagtttccgctgacagctatattcgaaccagatattcacgagaaaaatacaaatctaaccctcctaaatatcaaggggtagaaatagaaaaaaatacccgtcgcatttgcttaatgaatacttttttgcataatttagatgcgcaaattatttatggagatgccttgactgatgatgtggcgggtttggatgaggccgacgtaattgtcgccaatcctccctttgggaataaagcaggtgggcagcgccctgtgcgaagagatattccatttccaaatacaaataaacaactcgcttttttacagcatatttatttgaaacttaaagctggcgggcgagctgctgtggtgttgccagataacgtactatttgaatctggtattggtactgatatacgccgcgacttaatgagtaagtgtaatctgcatactatactacgcttacctacaggtatattctacgctcaaggcgttaaaactaacgtcttgttctttaccaaaggctccgccaaagacaaatatcagcaaaagaactgtactaaaaacgtctgggtatacgacctacgtaccaatatgcccaactttggtaaacgcacaccctttggtaattccgacattggctttgcaccagaagactttggcacagacccacacctcggtgcattcgagaaagtgtttggcgacaatcccgatggaaccagcaagcgtacagaaggcgaatatagctttggcgcgcaagagattgaagtagataaaggtatcataaaagtaggtcaggataatgatgaagtgttagttcattctcgctggcgttgctttagtcgtgaatggattgccaaaactaaaggtgattctttggatatctcttggttgaaagataaagagcgtatggatgctacttgtttgcccgaaccaagcattctgattcgtgaagtaaaggacgagttagaagccacactgagcgaacttgaggaactattgattacgcttgaaggggaaaattga

SEQ ID NO: 402789 - DNA, 492 bp, Salmonella enterica
gtggggaatcagaaaacaagcgatgccgtgatccgggtttttgccagtagggaaaaccttgaagaggagattggaagtgctttctcgatcaatatgaataaacaggtgaaggcgaggttgcgggagttatgtgtgttctatgggcacgaggacatgctcacaaggaaatcaggaacaggccggcgttttagcgatgtactcgccagactgattgatgctcattacattgcttatgtattcaaacctcaaactgatccagccaagaagttgattaaagctttcaagcatgttcatcttttgaaaatgaggggcaaggataatgaaactatcaaggagtccatgatccataaaggatttgacaggcctggcactattgcatatgtcctgacagataaaaacctggatcccaaattatggacagataaggacatagaaaggatgctacacccggagaaagtactaaagcttttgatgaaaatcgaaaataaataa

SEQ ID NO: 402790 - DNA, 462 bp, Salmonella enterica
gtggaacgggtctgcgggccgggggaattggtcaagcttgagcgccgggactatgacaatggtgttctcacggtcagacagggaaaggggcgtaaataccgtgaaattcacgtggcggatgcagtggataaggctatccgcgcgtggctgaaagttggcgcagacgaggctgacagtgcgttgttcagccgaattcagcgcaacggtaaggtcgccagccagccgctgactacgaccgggttaacgggtatcctggctgatttacagcagacgtcaggtattgcacgtttcaccccacatgacatgcgccgtactttcatcacccgtttgctggagcagggcgtggatattaacaccgtgcgccagctggcaggccacagcgacatatccacgacgacgcgctatgactgtcgtggagagagcatgaaaatcagcgccagcagacggctcaaatgctggtga

SEQ ID NO: 402791 - DNA, 360 bp, Salmonella enterica
atgaacagaaaactgatggccttattgatggtagccataactcttcctgctgcggcagcgcagtacgtaaaacccggagcagtactaaccctgaatccgggtaaaggcaatgctgaattcaacattaattcctcaacaggggatggttcgggcgtatgcaatatggagggaacagcacagcaaatagctgccggagaaagccagaagcgtcgctgggtctggaatgacaataccagtcagtgtgttgcagtaattagtgagctgaataacggcaaggccagagttatgactcgtggttgcgaagattactgtggtgcttccgcgacaggcacaatggatggtctatttaataagaagtaa

SEQ ID NO: 402792 - DNA, 390 bp, Salmonella enterica
atgaaaagaacaatgctcctggtattaatagccgctggtttgctggctggttgtggcgagaaaacaccaaaatgcagtagtgatgatgcaaaaaatctggtcgtggatattgctcacaaacagattaaaaaacaatttgagcaactcagaaactctcagttggaaggcatggttcccggaaataccggtagcttgatactgaaggttattaaggtcagaacaacgcactatgactcttctgtcgatacttatcagtgcgcagccagtcttcaaatgaccatgacagatgaacaatcaaaactgccgaacacgaccgaactaccaataacctatgatatacagaaaactgataataatggtcagttctatataaacgtatctggtttataa

SEQ ID NO: 402793 - DNA, 213 bp, Salmonella enterica
atgaaaaagattatcacattcactattatggctattgccgatttatattggttctttatacacccggcaactttatcagaaaaaggacttcctgctaacgctcctttcattatcaattctcatcggccaggcacatgtatagtcagtacaatcgcaacagctgtcgacactaaacaagatttagccgatgtagtgtgcaaggtacaattgtag

SEQ ID NO: 402794 - DNA, 1140 bp, Salmonella enterica
atgacaatgatcgcagggtatcacttaaagaacggcggttttcttcaggcagatattcttcttaccagctccaaaaacaccccgttaagcccttttcagataccatcattcagcccctctgttgatagtactccattaatgacacacacagtcgttggactatgccaaaaaatccttattgtgaacaaatacttcgccgttgcttttgccggtagcgttaatgaaataatcaaagcaacatatctaatcgataaactccttgcggagaaaattaaattaacaggaaaacgttttattgatactctaattaaaaaccagatcaataaattagcattaactgcaatcgtgctcagtgttgaggataatgaaatcaagctcacaaacttcggtgctgagccaagtatatccaataaatattttgaactacatgtcggtggttcaggggcagagcatgctaaaaattactataagcagtttcctattgctgttttcgatataccagaagacgatatagttgtgcatggtacatgtatggcactccagcagtttgcaaaccacctgattgaagaatatgaagatcaatttgagtccgaaagtattattgacctgtttggtgggggattcgagcttgtgtcatactataatggccagttccaaaagatatctgatgtagtttacgcttacgcagaagctgaatttaacgctgatggtacacttcaggtcgatcatccaaaattcttactcaggtctacctatcaagatgatcatctaataatcagaagtgtggaaatctgccaagatgaggaggatgaatatacaactcgaaatgatcggaccttcaccatttttcctgtaacttgcttccagagcacttttgttaaagatgaatgtaaagatataagctttgtaggggaatttctttgctttattatcaaagtaaaaggagtacacggtagctttacaatcccattcatcagaaaatacgatcaattggttggatttctagctaaggcattcattgcatgtacagaaaaagacaatgtcgatttcatttattcggaaacattcaagcaggaactggaagaacgcgttattaactatatgaaaatggttcgtcaggaaatgaaactgacgaagtga

SEQ ID NO: 402795 - DNA, 861 bp, Salmonella enterica
ttgaacgtgttgatgattcatggtatcgggcaagaagcatcgactaaaaatgagcttctcgaaaaatggacagcatctctccatagtgttcaacctggcttgctagggagttcctcaattgaaatggcatattacggcgagattcttgccaactggacaacaggcaagacaaaacaagcagttgcattgggggaagggagtattgaagttgatatgggcaatgccgatgaactgaaattcctcagcactgttttaaacgagtttgccattaaaaataatatagacgaagcccaaattgctgttgcagaaggcggcattgtacctatggataatgctatcgtaaggcggcttgtagggctggctcgcttggttgaaaaactcgctccggataaaggtaatcttctgcttcgactgataagacaggggcatacttatctttcgtcaccaggggctgcaaaagcggttgatgacattgtacgcccccttttgctcaggactccacaggtcttaattactcactcactcggtaccgttattgcttttaaattactacgagagatggaaaaaaaaggggaaggtattaaaattccacttcttatcaccatgggttcacctcttgctttagaggctttcaaagcaaaacttggtccgccgcgtcgtaaacctgtttttgtcgaaagatgggaaaacttctatgatccatcagatttcgttgctctaggtaaaccgttggatgagaaaaatttcgctagcgatatctttaacgatggtacggtcgataataatactttcaatgctcacggaattgttggttatctaccacatcaaggggtcgtcaatgcgctgaaacgtgttttataa

SEQ ID NO: 402796 - DNA, 1740 bp, Salmonella enterica
gtgaagctgtgtctgaccattggggtttcgaaagcacctccgctttcatatttgcctggagcgattacagttgcaaatgaaatgggggattgggcgaggaataccggatttgtgacggaggttattactgatgaaaacaacatacctgtcacaatagatcgcatcaaaaaaactcttctcaaaatgcttccaataaacgacgaggtggaactttttattttacattttgcagggcatggatttcgtgacggtgcagaacaaaacatttggcttcctagtgactggcaccaagaactgcgtgctatatctgtggaagcactgaagtcacggctttacaggcatggaataaaaagcttatcgatttttggcgatgcgtgccggtcgctaccttcagatattgaaacagcagatatttgcggtgatccggttcttcctcgaggaccttatgaggtttctatccctgctattgctcgtttcaatgctgttgtggatggtcagcaggcgtacatgctaaaaggagataatattgccccatcccgatgcgttttttctacggttttgctcgaaggtctgtgtggtctaaaggacgaagcgtttgataagtatattccggatagtgtgattcctgactcgcttgcatcattctcttcggaacgattaaaggagattagcgaaatatacgatttgaatttttctcccgatttcgcccccggttttcccagagatcatgcaatttatttccttcgtaacaaaggggctagtaatgtagttctgccaaaatggccagaaccgcgttcaaaatatcaactgcatgataaaaatgaagaagatatacaggctggaatctctggagttaacactaaaatatttaagcggcatgtcctagatagcttatttctgcacctaaaccctgatatgccgaaattcaatttggctatacgtggtgctgtgcccaaaaaagtatggagtacatcttcagtcgaaagatactcgaatgatgatgatggagcaacgtattatgttgatgtcgctgccgaaaatgccgttcaaatccttgtagagtttgaagatgctgtttttgcatcggcggtagtgtatgcagatctcactacggtgataagtcgtgatatcagtgggggcatcagttgggcttgcacttctggaatggctttacctactaggcgtttgcgctcgtttattgccacgatagagaatcttcaagcaggcaatcttacggctgataaagtagacaatatagcggcgcagttacgttcagataagcacgctaatccaacattgggcgccatttcaagctatttgtacgattatacaggagatgtggatagcatacgccgtatggcctatttttatatccagcataatcaacctattcctttcgacgtggcctttatgggactcctttcatttaaaaaaatagggcttcacgagacgttggtaaaagttccatcagtaaaggcacgagctcgatctgacgcgaacgatatgtttccacgctgggttactagagctactcatgagagaatgggagtggttgctgggctatggccttggctccgtcaggggtgggtattcatggatgaacctgaacctcaagaaaaagctgtggcggaagaaataagtaatattgctacatttttactaccttcaccgtttacttcattcagtgaaacagggggaagaatgttgattgaaaaattccatatggaggtaagtaattga

SEQ ID NO: 402797 - DNA, 2364 bp, Salmonella enterica
atgaacctaggccaacaaatcacctacattcagctgctgcaacagcatacacatatccaaatcccgattattcagcgtgactacgcccaaggccggcctgatgagcaagaggttcgtgatacttttcttgccgtactggaagatgctctgctcaagcccactcatgacgtcagcttgccgttaaatttagactttatttatggcagtgttgaagaatgccaaggaaagacacagttcctccctttagacgggcagcagcgtttgaccaccttgtttctgcttcattggtatttggcatggcgcgatagcgcctgggaagaatttacagcattgttcgtggcagagggaaagtctcgtttccgctacggagttcggcctagtagtaatgatttttttgaccagttggtggtgtatcgtccaaccgaagctgtggacgaggtggtttcgcttgcggacattgtatgcgatcaaccttggtttttccgaagctggctacgcgacccctctatccagtctgttcaaggaatgatggacgccatccatgagcgctttgcaacccattcgaacttattcgctagactggtagacgaagctcgcccagctgtcacatttcaactcctaggtctgcatgactttggcctctcggatgacctttacatcaagatgaatgcccggggaaagcctctcactgagttcgaaaacttcaaggctcgttatgagcagttgcttaaaactaagtttgtagatcgcaggttttatattggtgacagctcatttcccatccatgaatacgtgtccatccaactggacacgcattggggagacttattctggcaatttcgtgacaaagaaagcaacctatttgatcaatctttccttcgcttgtttagggtggtggctttggtaacgcgagactcagggggagaagcattcaataaagataccgagctgttgcgcaatatatatagcacattgtcattccaatactatcaccaccgagattggcttgatgagcgtttttctacgtcgcttatttatttgctggatacgttacacgcagaagaaaatagattgtacacggggttgctaaacgatcagttctttaatgagtcatccatactaggcaaaattattagtccgtacttcacctccctaagctatagcgaagcggtgcagtttgcggcctatgtgggctatctccacaaacatgagggcaagcctgggccagaggcattccatcactggatgagagttatcaagaatctgtcagtgaatactacctataaccgggtagatgatttccggcgtagcgttgaaagtgtaaatgcacttttgattcatgcagatagtattctggagtatctagcgaatcccgacaactctgtggatggcttcaataggcttcaaattaacgaggagcgcatcaagtgtgcattgatactagcccatgaagggtgggggcctcttatccaaacagcggaggtacatggatactttgctggacaaattgacttcctaatagagtactcaggtgtagcggaccagtttaaaatggtagctccctgtgactggaccgctgaccaacatcttgagctccagcatgcctttgagcactactggagctgggctcatgctaccttttcgaatgttggcttaaaggaattaggtgcgtactattggctgcgggctcttttgagtttaggggactgcttgctgccaaagggaaaaaatcagtccttcttagttgatcgtgcagatgatgaagccagctggaagcgattcttacgctctgaaggaaaacgcggtctgctgaaaaatctgtgggaccgaatgaatccacatattgacttgtcgaatcaactacaagatgtcatttctagtgcgcccctgagtgaggactggcgacgattgattgtcgatactccggcagtcatcaagttttgtgaagctcgagcccttcgcgttgaatctaacgagagagtttacatactaaagcgcagtcaacttaatggtgaacatgccgagttgctcacattctgcctttatcagaaacttagggataaattgcaagcttttaacaatttaaatataacttatatgaccgcagtcggtactgccttctgcccttatatcagactgatctgccttcagactgagggggggcctgaattcagcatcgtcgcagaacgcagccaattcatcataagtacattattacctacaaaggaaattggcccacaaattggtgccacgcttagagacatttttcacttccaagaaaatgattattttcagatagcgacggacagccgtgatgttgaacatgtgttggcgcagctaaatggatactctgtgagttgctag

SEQ ID NO: 402798 - DNA, 1791 bp, Salmonella enterica
atggcgacacaacaaattcaattgaaaaccgttcatgaactacgcactttccttgcagatggacggccccaacgctttttcatcccagcctatcagagagggtaccgttggtcctcgttccagataacccagcttttggatgacattcacgagttcactcagcgacccaaccctcagcctcaggagttctactgcttacagcccttagtaatcaaatcgcggctacaaggggactgggaggtagtagatggtcagcaacggctgaccacacttttgttggtccttcgtcactttaacgaacgtttagccgagcgattccgtcagccactctataagctggattatgaaactcgccccaaactgccggcctttttagaagagccttcctctgaactggcggagactaacgctgactattttcatctttatctagctatgcagaccatagaggactggtttgctcgacacgagagtgaggtggaaacgatcaaggctgcgataataaaccaggtcaagctcatctggttcgagttggcagaaggagatcatccggttgaggctttcaccaggctgaatgtaggtaagataccgctaacatcagacgaacttatccgcgcgctgtttctgcgtcgaagcaccggtgccagtgctgatcccacaagcgctcagttacgcatagcctatgaatgggaccagctggaaaaagccctccaaaacgatgctttttggtacttcataagcaacaagccagctcctgctcagaaccgcattggcctattgtttgaactagttgcgcaagaagacggtttatcgcagttatggcagtatgacacctatgcaacatttcatcatgtcaatgggcggctcaaggcatccggtgccagcgttgaagacgagtgggcacgcattaagtccagcttcctgcaattagaagaatggtttgaggatcgtaggctcttccatatggtgggttttctggttcatcaatgtgtcggaatcaacgaaattcgcaaactggcgcaaggcacgactaagagcagtttcgagctgactttgcgttgtaagatcttccacctcgttacaggtgatgcgctgtctgttcctgtgagcgaggaggttgtacgagagcgcctgtctacacatatggatggactcagctacgatcgtaagtcgagccacggccgcattcgtgcttggttgcttctattcaacctcgcaaccttgttgcaagatgtgcgctcaaatctgcgtttccagttcgacagtttcaagacccagtgctgggatatcgagcatattcgctccgttagcgatgacaggcctggccgtacggacgcgcaaaggacctggctggaacattgccttagatttctcgctacacaaggctcgaatgatgctttatatgaagagattaagatcaacttagttgaccaagcatcttctaagcttcctgaagtgtttgacgaactgtatgacagagtgctggagtttttttccgaagcgggggagtgggaggaggagcatggtttgtgcaatctgactctgctggatgaacataccaaccgtagttacggcaatgctgtgtttgcggtaaagcgccagagattactatccctggatcaggccggtatctttgtgccgctgtgcacccgcaacattttcctgaaatgctacagcccccatgtgggcaatgccctgttctgggctgagcatgaccgagaagcttacgaaatagccatgctggatacactcacccactttttctgcggcagcaaaagggaaattcaatga

SEQ ID NO: 402799 - DNA, 741 bp, Salmonella enterica
atggcaaaaccggactggggagcactgcaacaccagttcctcgccgagcatgctaaatccggtatttcccccaaagactggtgtgaagcgcagggactgaattacgccagcgcaaagcgttatatcaaaattgcgaatggtagtgcgaattcgcaaaaaaaaagtgcgaataaaactgcgaattcgcagaaggggaaagtcagtaaacaaggggcttcagcgaacgcggataaacacaaaaagagcacgacagcctcaaattctcaagaaacgaaaccgatacgcggatccaggcggtcaccgccaacaaacccattcaaacccggcaaccagcaagcccttaaacatgggggctatgggcgccgtatgcttctctctgacgccattaccgaggatgcacaggcactcactctggatgatgagcttttctggctacgcgctgcgaacttgactgcggcggagaacatcggtcgctggcaggcggagttagaactcgctggtgacgagaaagcaaaagaacttcacgagcttatttcctccgcgcagaaagctatgcaccgtaatactgcgcgcatcgagtctctggagtacaccaaaggctcaatagagaagcttcgtgttgatgccgcttaccgtgagcgcgccactgagaaagtggaaatggaaatcgacatcatgaaggacggcgacaaagacaacgcgatcgtcgtacacaaccccctgccgatacctggacgatga

SEQ ID NO: 402800 - DNA, 1185 bp, Salmonella enterica
atgcgactgttacgcctcaagtttgatcgcttgctgaatgatattgatggaaatggatgtatcaactggagtgggcccataaacttcaatggatatggtcagttttctttcgaaggaagaagttggttatctcatcgtctggcctatgagatcgctaatggtgcaatacctggtgatgctgaaaagtggtgggttcttcacaaatgcgacaatccagcctgttgcaaccctgatcatctttatcttggtgatgctaaagacaatgctaaagacatgatcgaccgcaaacgtcaaaggatgggattcaaaaggcacggatggggagagtcgacaagattcggtcgagttttttatgagattaacggagagataaaaacaatttttgagtgggctgagttttttgatgttaatccacgcaccctagagcaaagaattgccgctggttggcctgcaaaagatcttggactgtcacctaaagcctacaaaagacacctgaagagtgatgggaaaactagatacaagagattttctggactgaaagaagtggaagactacaaaaatgaagcctcggtagctgcaactaacgaggcctcgatatcaacaaaccaccgtaggaatgatgacatgaatattgtagcaaaatcagattataacttccaaggattcacctttaacccagtaacagagggcgggtctatctggtttacctccaccgaactagctaaggctctcggctataaaaaaactgatgccatcagccaaatttatgcccgtaatgctgacgagtttacagaaagcatgtcaacgaccctcaaaatgagtgtcgttaggaaaactggggtggtagatattccggtacgcgttttctcccttcgcggtgctcaccttatctccatgttcgccaatactccagtagccaaagaattccgtcgctgggtgcttgatattcttgacagggaagtgggttccgcaggtgccgatcgtctaccgactaaatttcatcagagggtaatgctttaccttgataccaaaggagacatcatcaatacgtatccattgaataaagatcaggtagtcatgtcatttgatgcatttgtcagctatttcaggaaaaagggatggatagtagccccaagggatgaggttgcaaaaggaataatgggggcaatacaggttttatcgtag

SEQ ID NO: 402801 - DNA, 234 bp, Salmonella enterica
atggctatgcgttgccctcaatgccatgcaacggcgaagacaagaaccagcgttgaactcagcgacctggtaagaaaaagctatcatcagtgccagaaccttaagtgtggcctgacgtttatctctatgacagagatttactgcacgcttaaccgtcccgatctgccatcacatacccttgaagccctaccactggacaagctccctgttagccatcaagagaagccgctttag

SEQ ID NO: 402802 - DNA, 1038 bp, Salmonella enterica
atgaagaataatacccgaaaaaaatatgatgagtggtgctcatcgcaagcatctgaaaataatctgaatagctcaagactggatggaatttccttttcactcacgccatctgcatcacaaactattgttgataagatgcaggaaagcgccgatttactgaaacagataaatattctggaagtggatgagcaagaagaagagtcgattggacttacatctgtgccgttgtccagtacaaacaactcaacgactgaggcgcgtcagcctgtacagggttgcaatgcagaaacggaccactaccgttgtgagcaggtgaatactgatacctatgtttcttatgagaaactggatcagtgggctggccttgataacttcttcgggcatatggagagccagatttatcgccgtcaggcacttgatgtaatactgactggcatttatggcacccatcatgcagctaaatcagatattatggctaacccgttacttcaggatgttaataccggctggttagagaagtggcggcaaaacgctcctgcccgcgtggttaatggcgtatcggtcagtcgccgcaataacgccaacattatcgagtccagcggtgattacggtactattgattccctgacgatggaggcataccaggaattattagatccgtggcaggttggggattcggatcttgttgttatatgcaatctctcattaattacaggcaagtattatccctttgttaataatcttggtgtgacacccaataaagaattactggcttttgcattacaaaatgagaatcgtcagatcggagggcttcccgtttgcccaattccgttctttcctcaaaatgcgatgctggttacttctcttaataatctgtcgttgtactggcagacagggacacaccgccgcaaaattgcggaagaaccggaatttaaccgtgtctcaacctatgattcatggaataacgcctatgtggtcgaagactacggcaagggatgccttatcgaagggattatctggggtaacgatcagcgttaa

SEQ ID NO: 402803 - DNA, 738 bp, Salmonella enterica
atgacacaaagcaacatgcaggcattactcgcgggttaccagcagcagaaagaactatttgaccgtgcctataagtctctttcggacgaagagaaggtgcttgccaacctgggtgagacaaagctgaaaatagaatcagaagcaaacgcaggccagacagccggagagtgggggcttgcactgctcaggaacggtggcgttgaaagcgcggaaactgatggtgctgcattgtcagcagcgcaggtgatggtgaagcttcaaaaaattcaggaactgattgaatcccagagcctgacagtgcttgatctgcggattcaggctgccagccaggcccgccagacgaaagaggcttattttaaactttcgtctatgattgcggagtctcttctccaggcacttaaaagcgacctcagagcgctggtcggtgagcggctgtctgtcgtcattgggctttattctttggctggattaaataccagtgatgcagagagaacattatcagatgagttttcgaaattacttcgtactgactccagagaagtggtacgtgaattattgagtgacacggacggcagtcttttcagcgatccggcactggcgcttttccctggtgttttacctgtcagtatccatcattcgttaaataatagcccttcaccgattcaggaatctaaagcacgttctgacatggactataagaaaaggctggctgcgggtattgaacctttcagaaaataa

SEQ ID NO: 402804 - DNA, 210 bp, Salmonella enterica
atgcccacattaccaagaaataacaggtcggtgctgaaatcactgaggatccccaatgaactggatcagtacatagaggcgatgagcaagcgaagtggtgcgagttattgccgttgcctgatcgaactggccggtgctggtttgctggctaaagggatcgggagaataaccattcctgagattgattcctgccggaaacatcgaacataa

SEQ ID NO: 402805 - DNA, 981 bp, Salmonella enterica
atgagtattaaaaaactcagcaatggagggtatgaggtcgatctgtatccgcgcgggcgaaacggtaagcgtattcgcaggcggttcaggaggaagcaggaggcggtacttttcgaacgttacgtgctggcgaacgccgataaaaaggaatggcttggcgccagcgtggatcgccgaaccttaagcgaactgctgaatatctggtggttgctgcacgggcaagcgcaggccaacggtgagactgaaaagcgacatctgatgaaaaccattcaggcgctgggcgatcctgctgttaaccggctgaacaagcgtcttattgcgcaacatcgcgccgggcgactggaagaggggatcagcgccgcgacggtcaaccgtgacatataccgcctgtcgggcatgttcagcacgctaatccgactggatgagttcatgaaagaaaacccctgtaagggactggagccgctgaaagaatcgccggtcgccatgacctacctcacaagaacagagatcggccggttgctgtcattacttgacggcgatgagcggcgcgttgctcttttatgcctgagtacaggtgcccgctggggtgaagccagtacgctgcgaagcgagcaggtaaatcacgggcgcgtaacgttcctcaaaacgaaaaacgggaaaaggcggacggttccggtatcggaagcacttgaaaaagagattaagacctgtgacacagggccgctgttcagcgtcgattatgattgcttttgtgagcggctcagaaaggccaaacccgatctaccgcgcggacagacaacgcatgtgctgcgtcatacgtttgcaagctggttcatgatgaacggcggcaacattatcgcattacagcaaattctgggacatgcgagcatccagcaaacgatggtctacgcccacctttcccccgattacctgcaacatgcggtatcgcttaaccccctttgtggcggcataacaatctga

SEQ ID NO: 402806 - DNA, 2667 bp, Salmonella enterica
atgaagaatatcaaggtatcagaaattagcaagcagtctgtggggaagtgggattacattctgcatactcttggaataaaaattccggaagatggcaaacacggcccctgccctaaatgcggagggaaagatcgcttccgttttgataataaagacggtcgcggaacgtggttctgtaatcactgcggaaatggtgatggcattgatatcgtgaagctggtttttgatatcgataccgttcccgctgcggctcgtgtggctgaatgcctgccttccgcacctgtagttaatgcccccgccagaaaagaagctgcaacacagcccccagcggtgaactggcctgcgctcctgagccagtcggtgacaggtgaaagtccctatctggcaggcaaagggctggccggtcacgcgtcaagactgacaaccagagaactgatagccggtggtgaaaaatacccgtctggctcccttatgctgccgattaaaaatacgcaggggaacataaccgggatacagcttatcagcggtaatggcgtcaagaacctgatgaaatggtctaaatattccggctgctttattccggttagcgattttccggaaggatcgcccgaaaaagtcgttattgcagagggctacgctacggctgtttccgtttcgctgctcagtgatgcgtggccgctggcggcactgtcaaaaaccaacctcagggcggcagcagaggccgtgcgggaaaagtggcctgaaacgcagattattattgccggtgataatgatttcatggacggcaagcccaatgaagggcgggaagtggcaatcaaagcggcgctcgccgtaaaaggctgggtcagtattcctccaggcagggcaaaagcagactgggacgattaccgccgtgattttggcgtccagcgtgcgcgggaagcctttgcggaagaaatgtttaaccccggtgacacggagacccgcctgcctcccggtttcaggctgacgaaagaatttctgtggtgtgagcgcacccgcaatgatgggggcgaaagcggacaaccgcagcggattaagatttgcagcccgttgaaagtaaccgccattacctgcgatgcagacggtggcaactttgggcgtctgcttgagtgggaagactctaacggctcccgtcacgaatgggccatgcccatgacggtacttgccggggccgggcaggatatgcgtgaagtgttgcttgaaaatggcctgcattttatcagcgtgaacggtactgctcgtgggctgttgatggagtacgtcgccacctgtcgcccagtgcgtaaagtcacctgcgtggagaaaacaggctggtacagtggctcttacgtactcaatggcgaggtgattggtggtgaagccggttcggtcatttttcaggccgcccggtcatcaaaaaatgatttcagggtaagcggtgatacccgcgagtggattgaacatgtaggtcgctactgcgccggaaattcccgcctggtcttttgcgtgagtctggcgtttgcggctcccctgcttacgctgctgggaattggtggaggcgggtatcacctcaagggtgaatccaccgatggtaaaaccaccaccatgaaggtggccgcttccgtctgtggtggcccggactactggaaaacgtggcgggcgacggggaacgggctggaaggtgttgcactgcgccgcaatgatgccgcgcttatgctcgatgagatcagcgaggttgacggcaaggaagcaagccgtatcgcctatatgctgggtaacggtcagggcaagacaagatcgagggtggacggaagcccacgcgaacaggcgcagtggacgctgttgtttctctccaccggggaggtatccatagccgaacatgcagcggaagccggggagcgtcgaaccggtgccggggttggggtcaggatggtacagatccccagcaatacgggccagtttggtgcctttgaagaactgcacggattcagcggcggcaagacgttcgctgaacatcttgagcaggcgagcaggcaatatcatggtgcagtgttccgcgactggctgcgctggctcaccgccaacctcaacgcggtaacggagcgggccagagctttacgtaagaaatatgagaaaacgcttcttcctgaaaatgccggtaatcaggtgggccgtgtggttgatcgttttgccctgcttgctgttgccggtgaactggcaactgaagccggtatcaccggatgggaacccggtgaggccgagaatgcagccagaaagtgccttgatgcatggatacaggatcgcgggcataccgccaaccaggaagacgccgacgcgctggaaaaagtacggcggtttatcacagggaaccagtacacccgttttgctgagtggacggaagacgaaaagaaccgccctgcaaacatggtgggttttcgccgggttatcaaaggggataacagcaaagagccagaaaccacgtactacattcttcccagtggctggaaagagatctgcggcacgtctgacgcagctaaaaccgcacgtttgtgtaatgaagcgggctggctggataccggcgatgaaaagcgcctccagagaaaggtaaggctccctgagattggctccaaatgggtatacgtgttcaaaagcgatgttgttggataa

SEQ ID NO: 402807 - DNA, 252 bp, Salmonella enterica
atgacaacaagtaatcatattcagaatattaatccgtctcacctcagcattgagagttatcacaaactgaatcgcgcgaggaatgtcgcatttcagatgcatttacatattcgccagtgtgaagctaacgcgatgccactcttatggataccggatgttttcagctatatcagcgaagatatttctgacgttttgcaggaagtgaagggtattggcatatgtagcaactttctgaacaacaactgtacctga

SEQ ID NO: 402808 - DNA, 234 bp, Salmonella enterica
atggctaatatctttcgcggtaaagtaacagggaataaatcttggcaggtttccggttatgcggtgacgcgtaaaggttatacgcgcagcgcacaggtgacggttgaggcgcttaatcgcaatgatgcaataatccgggctacggcccagctacgctgggaaggattaacgcattttaaagcgcttaaggtgctggaaataaccatgtcattacttattaaccagaaccgataa

SEQ ID NO: 402809 - DNA, 195 bp, Salmonella enterica
atgtataaactgttcattacctgccgtaacgttattactggcgaaatacaaaattatcaaagtatgcagaaatataaatcatccattaaggcggtgaaagcagcctgtaaaatggccgatgttattacctgtaacgggaaatatgccgatgataatgaatacaccgtaacagtcgggaaggtgaaacatggctaa

SEQ ID NO: 402810 - DNA, 192 bp, Salmonella enterica
atgtttaaactgcttataaccctgattaatcacgaagctggcgaccggcgcgaactggttcataatggccgatataaaacccgcgaagctgcatggaaagatgcgcagaaaatggcgtatatccataagaatgccatcggcaccgtaacgcatgaatgtattgtgaaaattacggaggctggaaatgtataa

SEQ ID NO: 402811 - DNA, 255 bp, Salmonella enterica
atgtttaacccacttgataaccagaaagccgcaacgcttaacccgttccatgatggtcagtatgcgccgcccgctttcatcaaaccaggctcaaaagtaacggttgaaattgattcgcgtgaaatggagatctccatttttgccgcttacgattatggccttgacgctttgaacgatgaagggcgggaagtgcttaaccgcttaattgctgaattaaaagatcggataacagctcgtgaggtggttcatgtttaa

SEQ ID NO: 402812 - DNA, 600 bp, Salmonella enterica
atgctttacttaccggaacaacacaattgtatacgttttcttctggcgcttaaagcgtttgacaacagaagaaaaaatattcattacggtctattgacgtcccgcaatgtactgtcgtatcgtttaagcgttgccccacaatgggcaaccgggcgttgcaacccgtaccagtacaaggcgacaccagacgccgattgcgtcttttttattgtcgttaagtcagtgcccccatcttcagcggaacagatccgcacagtatcaatggtggcgctggcagggcagctttcgggctggccggtctccttgtacgccggtattgcaacccctgtcagtgtcaccaccaatcatgagcgttgcaactctggtggtgactccttaatcaagtacgaggagatcatcatcatgatgacaaccccaaccccgttgtatccccagtttatctggctgtttctcgctgtgcgccgttctgacacgtccgcacatccacatcgtgaagaagtcacagccccaacctatcaggccgcacgtcgcgttatagcgcgtgaatttatcgcctcttttgccggtcgtctgccggttcgcgaggtgccccatgtttaa

SEQ ID NO: 402813 - DNA, 222 bp, Salmonella enterica
atgtcattaccaacatcatctaatgaatataaaacacagaaacttattagacttccaaaggttattgaaataactggaaagtcaagaacacgtatttatgaagatatgaaagccaacctcttccctaaagcaattaaaacagggtcacgttcagtcgcctgggttgaacaagaaattgctgaatggatagaggataaaaagaagcaacgatttcaaaactga

SEQ ID NO: 402814 - DNA, 1260 bp, Salmonella enterica
atgaagcttaccgatctcacagtacgaaatgccaagcctgatcaaaccaacaataagattaagaaactgagcgatggtaacgggctatacctcgctgtctatcccaacggttcgaaatactggcgctttcgtaaagtgattaacagcaaagaaacaacgcgggctttaggcatctacccgaccatgacactggcagaggccagaagcgccagggacacgtatttgcttgagttatccaaagggattgatcctttgcataccataaagcctaaaataacctcatttgaggaagtttccagagaatggcataccaggaaacgtggttggagtgagccacacgctaaaaaggtcctcaaagatttggaaaatcatatattccctgaaataggtaaaagagcagttaatgaaataacaactcaggatttgttaatacctcttagaaaaatggaggataaaggcatcctggaaaccgcatcacgtatcaaacaacgcatgaatgcgatcatgcgttatgctgtacaaagcggaatcatcaaatacaacccagcacaagaattagatggagctttagaaactaataaaacaaaacaccgcccagcccttcctcttgaacgcttacctgagttattagataaaatagataattataacgctcattcacatggtaggctattaactcaattagctgtaagacttaacttattaattttcattcgctcaagtgaacttcgttttgcccgatggaatgaaatagattttgataaatcgcagtggattattcccgctcaacgtgaagaaattaaaaatgtaagattctcatatcgcggcgcaaaaatgaaaacgcctcatacagttcctcttgccacagaagcaattgaaactctaaaagcaataaaggtaatttcaggtgacgagatattcgttttccctggcgatcactatcagtcaaagccaatgagtgagaatacgataaataaagctttgcgtaacatgggatataacacccaaacagacgtttgcgggcatggtttccgcgctatggcctgcgcagccctcacggaatcggggaagtggtcaagagaagcagttgagcgccagatgagccaccaggaaagaaactccgtcagagctgcatatgtgcatcaagccgagcatatggaagaacgacgcctgatgttgcaatggtggggagactatcttgacgcctgccgaacagcatacattccaccttataaatttgaatggtcttcgaaaaaataa

SEQ ID NO: 402815 - DNA, 1005 bp, Salmonella enterica
atgaaagttattattaataattttttcgacggtattttgaagcgaggaatacctatatatacaagtgagctcgtaaaaaaattaagggaacataatgtaaatgttattgaaataacctgtccaaaggtgctttataccgctccagtttggtttcttaatattatctttattataactgagcaactttttatcccggtcttggggattatatatagaactaaatataatatttatccatataatagcagctctatcattgatttgttaacaggaaaagcaatagtagttattcatgattttataagtttaaagaaaaataaaaaaaatctcgctgctatatatgtgaaagtatgtatttatctttcatcttttatgatcaaaaaagtaatttttatatcagaaagcacacaaagagtagctaaaaaattagctttatttaaaaacgcagaaactgtattacttccaaacccatttttttcatttgagaaaattgcaaatgttaccaagaaagaagatcttgggtatttattactggtttctggattaggggctaataaagatttacatactgcagtagattattatttttcgattcctcctgaaaaaagaataccattaaaaatattaggatgtggaaatggtgtagataaagttattaatataatcaatgggcgagatttaaataatcaaattgaggtaataggctttgtatcactgaatgaagtagttactttgtacagtaatgcgaaaatagtatgggctcactctctcgctgaaggctatggccgaactttggctgaagcaaaattaacatgcaagaatgttttatgtactcgaatatctgcttttcgagaacaagacgatgtaaacatatattattattcatattactcagagttttttaaaaattattcatgccttatagaaaatccgccacatgtagttgaaaaaacattacgggaacatttattatttgaaactgaattgagaaaaatttatgagtag

SEQ ID NO: 402816 - DNA, 1467 bp, Salmonella enterica
atgactttaaatataaagaaaatagccatatatgccatttgttttataattttggctttcttctacgcttcaatttcaaggcagattttgccaagttcggatgccgtttctggacttcttgagggaaaggacattgcggacggaaattggacgcttagtggatggtatctctctacagtgtcattctattttacagatataatatggtacggacttgcttcaaagatattctggtacgggcagtatcaagcatactgcatacctgctattatgtattcaatggttacattgatgacattttatctttcaaaagaaagactttcatcggtgtgggccatttcattttgtgtcgcgctaccttccgggtttgcagccttaaacatattaatccccgtgatacatgtcggcacatatgttgccatgttgttttgcttcataatgttggataattattccaaaacaaaatcgttaatttctatatctctttatattttagtgttagctctggcttgtttcagtgatgatatcataaagttacttattattgcaccggtagtaatatcatcagtgatttttatggtaaaagacaaaagcccaaaaaacctgatcatatttgttgcaactatatttgcatatgttgcatcaaaatttatggtcatgtacacaagcactcataactggtacattttgccaggcgttcctgatccaacatttgttgcatttgatgatatcctgaagaacttctatttcttcataaaaggatttcttctatacagtggcgctttcttctttggcaaaccaccatctgatattactgcgattatttctgttttttgttttgttgtaatgatttcgcttcttataatctttgcaatgtcagtaaaagaaatattcaaaacatctatgatcaatatggctatttgtatagcttgtctcataatgatcccagcataccttgccagtaaccgccccatagatgaatggactataagatatatagttccattctttatacttgcacctgttgttattggtagatccaacacctccaaagggtggaaattcatcgtcttcgggttggttacaacatctgttctcctttgctctatttatattcaagaaaaaaaagatacttctaacgatattataaatcagataaaaaacactgtaaggcagaataaccttacaaacgggtatgcttccttctggtttgcttcttcagcaagtatagatagagacatatcaattgctccgattgatgtaaacagaggcttaaatatacttgcatgcaataaatggttatcaaaaaactattggtatgagcgcggaggcaattttgtaattacagatgatgacgtcatgagaaatataactattaaagaggttggcaagccatcaaaaattattgatgtcggtgataaaaagatttttgtttacgataaaaacattacattcagctgcaattaa

SEQ ID NO: 402817 - DNA, 732 bp, Salmonella enterica
gtgcccctgtcattcacccgtaattttggcaaagagcctgctttgttcgcaggtcttaaccacgccacgggggacgctgtaattccgatcgatgtcgatttacaggatccgatagaagttatccctcatctcattgagaagtggcaggctggcgcggatatggtgctggctaagcgctcagaccgctcaactgacgggcgcatgaagcgtaagacagcggaatggttttataaactgcataataaaatcagcaatccgaaaattgaagagaacgtcggtgatttccggttaatgagccgtgaggttgtcgaaaatattaaacagatgccagaacgtaatctgtttatgaaaggcgttctgtcatgggttggcggcaagactgatgtagttgaatacgcccgcgctgagcgtattgccggcgattcaaaattcaatggctggagattatggaatctggcactcgaagggattaccagcttctcaaccttccctctccgcatgtggacttacattggattgtttattgcaggtatgtcattcctttacggtgcatggatgattattgataaattagtttttggaaataatgttcctggatacccttctttacttgtatcaattttgtttcttggtggcgttcaattaattggtataggtgtccttggggagtacattggtcgtatttacgttgaagttaagcaacgcccaagatacatactaaaggataagtaa

SEQ ID NO: 402818 - DNA, 297 bp, Salmonella enterica
atggaacgtctacccaccacgccgcacgatgcggtatttcgacagatgctgatgcaaaaagaggtcgcccgcgactttctggctatccacttgccagaagactttcttgcaatctgcgatctggattcactgaagctggagtcagggagttttgttgaagacaatttacgcagccgctattcagatattctctactctctgcatacccaacacggccccgggtatgtttacgcgctcattgagcatttatgcggtgcaccgcataaatgttcttatgcaaagaaaatgattatgtga

SEQ ID NO: 402819 - DNA, 480 bp, Salmonella enterica
atgaattcagcagatttatcgaagattcttgaagagcacaaagtgtggattacctcaattcgtgagagcggatcgagagccgatctgcgcgatgccgatctgcgcgatgccaacctgtgcggtgccgatctgcgcgatgccgatctgcgcgatgccaacctgtgcgatgccaacctgtgcggtgccggcctgtgcggtgccggcctgtgcggtgccaacctgcgcgatgccaacctgcctgatctcactttcgtaatcctgggtgagaaatacttcataagtataacgaacggtgaatatgtacgagcaggatgccagaaccacacagttgaggaatggagaaaatatagtaagcaggaaattgctgagatggatggtcgtaaagctcttaaattttatccacgattgctttcgataattgacttttacctcggtgctggagaatggcctgattgggttaaaaacgatggggaggagtga

SEQ ID NO: 402820 - DNA, 351 bp, Salmonella enterica
atgccttcgctaattccacgcgcctgtcgcaagcgaggttgtccaggaacgactactgaccgttcaggctactgtgagcagcatcgcaatgagggctggcaacagcaccagcagggtaagagtcgccatgagcgtggctacgggagtaagtgggacaggttgcgtcctatcgttcttgacagagataaacatctttgtcaggagtgcctgagaaaaggaaggtatacacccgctgagacggtagaccacatcaccgccaaagcaaatggtggtaccgatgacctgtctaacctcgaaagcctctgcaagccctgtcacagggagaaaacagcggtcgaaaggctaaaatga

SEQ ID NO: 402821 - DNA, 474 bp, Salmonella enterica
atgtcaggacctccgaaaacccctacccatctgcgtttggtgaggggtaacccatcaaaacgcccgatcaatgagaacgaaccaaaacccgctgcaggggtgcccccaacgccgaagcatttcgacaagcaggggaaatactggtttaagcggatggccgacgagctcgatgctatcggtgtgatgtcccaactagacgccagagcccttgagctgctggttgaggcatatactgaatacaggcaccactgcgacacgcttgaaattgaggggtacacctaccggaccgaaacgcagagcggggatgtgatgatcaaagcccacccggcggccatcatgaaagctgatgcctggaaacgtctgcgcgccatgcttggtgagttcgggatgacgccagccagccgctcgaaagtgaatgcaaaaggtcctgatgcggttgatccgctggccgagtttatgaaagcgagggattaa

SEQ ID NO: 402822 - DNA, 1737 bp, Salmonella enterica
atggctaaggttgcagaaggcatccgctatgccgagagggtggtggcgggggaaataattgcctgtgagtttgtgcgccttgcctgtcagcgttttcttgacgatatagcacacggcgaagagcgcggaattttctttagtgagccgcgcgcacagcacatcctgaatttctataagtttgtgcctcacgtaaagggagcgctggcaggccagcctattgagctgatggattggcatgttttcatcctgattaatatttttggttttgttatcccgctggttaacgaagaaacgggagaaaccgtcctgcgtaacgacggcagcggtcggccggtgatggttcggcgcttccgtacagcagatgttgaggtggcccgtaaaaatgccaagtcaacactttgctccggcgtggggctgtatatggctggtgccgacggcgagggcggtgcggaggtttattccgctgctaccacccgtgaccaggcgcgaattgtttttgaagacgcgaagaatatggtcaagaaggcgaaagccactcttggaaggctcttcgaattcaacaagctcgctatctaccaggagcagacggcatccaaattcgagccactatcatcagatgcgaacaacctggacggcctgaacatccactgcgccatcgtcgacgagctgcatgcacacaaaacccgtgatgtctgggacgttctggagacggcaaccggcgcgcgcctgcagtcgttgcttttcggcattaccacagcgggctttaacaaagagggtatctgctacgaactccgtgattacgccatcaaggtgctgcgtggcctggtaaaagatgatacgttttttgcaatcatctacaccttagatgaaggtgacgatccctttgatgaaaaagtctggcagaaggctaatcctgggctgggtatctgtaaacgctgggatgatttgcgccgcctcgctaaaaaggcgaaagagcaggtttcggccaggattaactttttcaccaaacacatgaatatctgggttactgctgagtcggcctggatggacatgatgaaatgggagaaatgtgagtttatcgccccgcagcacgaacttaaaacctatccctcatgggtaggcgttgacctttcaaacaaaattgatatctgtgcagccgctaaagtctggcgcgcgccaggtggtcacgttcatgccgattttaaattctggttgccggaaggacgccttgataaatgttcccgccagatggcagagctctatcgaaagtgggctgatctgcacaagctgatccttaccgacggggatgtaattgaccatgctcagattaaggaagaactgctgcagtgggttgctggtgagagcctgaaagaaattggcttcgatccgtggagtgccacgcagttcagccttgcgctggcagaggaaggtttgccgctggtggaagtgccgcagacggtccgcaatttctccgaggcgatgaaagaggtcgaagcgctggtatacggaggccgcttccatcacagcgatcacccgataatgaactggatgatgtccaacgtaaccgtcaaacccgaccggaacgagaacattttcccgaacaagtccacaccagaggccaagattgatggcccggcggcattgttcactgcaatgagccgcgttctggttaacggtggcaatgaccagcaggatctttccggattcttcaataatcccatcatggtaggtttctga

SEQ ID NO: 402823 - DNA, 1344 bp, Salmonella enterica
atgaataaagaatattatttactgccttcgaataaattaagatttaaacacttgattatatatcttgtggtatgcctgtgccttttttctggctttcttatcaatgatgcaaagactcagatagctcaagaaattactgatatattagcaataatatccagcgcgttgctaattgtgctaattctgtattattatatatatcgggtgcgctttttttctctgacgctactattttcttttgttttttcactaataattggtttgccttcgatatatctcttttattttaaaaacacagataatgactttgggattatttgtatatgggcaatgctaattaatgttgctctctatctactttcaacaaaaactttttataaaaaagaagaaaggcgtttatccaacctcttttatgcgatattttttattgcagcattttgccagatctataaggttatgatttattttctttttattcttaattctggtgccgggcatctcgcaatatatacagaaagcgaagagttattatcccaagtgccctttgttatacgtgctataagtggttttacagtaactatggcattggctgttttttattttaaaagtccaagcataataaaatttattgcatttatcctgctagcttcagatttaattatagggatacgtaataaattctttttttcaatgatatgcatatttatactatatttatattcaaatgagattagagtgaagcatattttcaaaaaaatctcaaaacctactgttcttctggttggttttatattattttctttggtttcatattttagagaaggctaccagattaattttgtaaattatattggtattgtattagattctttgtcgtctactcttggtggtatgcagaatttatttagtggacaaatagggagttgggataagttaagtcctgaagtcgtattcacacagatattgccgttaagtggtttaggttttattaacaaccatcaaattgcaaaggatttttctatcattgtactaggcgatgtttcatcaggtattgcattgtcatcctccggattattagagtcgacaatattaagcctacactttggatctgtattttatttaatctatctaataggctttatttcattaataacacgcgcattgaatagtcaaaaagtattaataaacttcattgctatttcaatgatttccggtttcttctatgcagtgcggggagagttgatattacctttagctttcttattaaagtctctgcctatcgttataatatcccccttgcttgtaaaagggcattttagggctttgtcagtagaatcaaaatga

SEQ ID NO: 402824 - DNA, 327 bp, Salmonella enterica
atgaaagacggtatttatacggtggcgtttgaaagcagcctgcagtccgtgggcgaggggatcgcggtagtgagcggtggtcgggtacacgggggtgatattgcctttacctgtcagggcaggctgactccgccatggcttgagctggaggtatgtccttaccgtaatgatataccgtccacgctggggatagaggggaattacacgctggagatgcgttaccgtgaagagagggaaggggaataccattttagtggttatgtcagggggtacccggcgcgacggctggatgcgcatgctgtgtttttaacccccctgctggaataa

SEQ ID NO: 402825 - DNA, 876 bp, Salmonella enterica; identical to SEQ ID NO: 160057

SEQ ID NO: 402826 - DNA, 813 bp, Salmonella enterica
atgttttttgaaatacaaagaatacttgcaggtaagagaccaaaagcattccttttagaaaatgtaaaacaattacaggggcacaataaaggtgatactttaaagacaattatcaatatcttacaaggtaaaaatgcccaagatataccctctgatatacctatgagcaatgatgcacgaagcgccttatcacaacgtttaaactactgggttgattataaagttttgcgcgctgctgattttggtgtacctcaaaatagagaacgaattttcatcgtaggatttgatagagattattttaaaaatgttgattttgataaactattttcttggcctgaagctcctaaagaaaaaacgcgcttaggtgatatccttctttcaagaaaagaattaaatgagcttgaaaaagttcatggaaaagatttttacactatttccgataaattatggactggtcataaaaaaagaaaagaagagcacaaaactaaagggaatggcttcgggtattcactcttcaatgagaacagttcttacgtaaataccatcagtgctcgttattataaagatggctctgagattttaattgatcaagcatctcttgggaaaaaccctaggaaattgactccaagagagtgtgcaaggcttcaagggttccctgaagaatttattgtagatgcagtttctcatgggcaaatttataagcaattcggtaattctgtttgcgtaaaagtcatagaagctgtagctgaaaatatgattaccgctctgaatagagcaacagatcttattgaagaaaaaaataaagttgcttaa

SEQ ID NO: 402827 - DNA, 570 bp, Salmonella enterica
atgaatacaattaccgctgaaactctttccccgatcacccataaccaaatccccgtcatcacaaccgaattgctggcgcatctttatggcgcggacattaaaaatatccaaaataattttgctaggaatgtggatcgctttgaggtcggaaaacacttctttaagatcgaaggtgaagaactacgcgaattgaagcacagaccatctttaagtaggtctgtgaaaatcgctcgcaatgtacgctccctcatcctctggacagaacgcggagctgcccgccacgcaaaaatgctcgaaaccgatcaggcatgggaggtattcgagagactggaggactgctatttcagccagaaacaacctgttccagcacgccagactcatcccgcaattccatttccaaaagaacggcgtttcattgtaacagtgtcccccgacggtactgctgatacccaacctttgcctgacgacgtatttgtcggcaaagtatcgagcatattaagtgaccttcgccagatggggtggatagtcatcaaacgtgatcggctggttgaaacgttatcgaactggtga

SEQ ID NO: 402828 - DNA, 279 bp, Salmonella enterica
atgaccactattaccagagaacgcctgcttaaaatccagcagtggcgcgaaacatatggcgctggtagcaacgttatgctgccggcagaagaagcggaagagctggcgcgtatcgcgctggcagcgctggaggcggagccggttgtgccagagtccatcagtgttcggcaggccatttctgctcttgagagcgcagattgtgtaacgactattggccaggcgtacaaaatgggatggaacgcctgccgctccgccatgctcaacggaggtaaatcgtga

SEQ ID NO: 402829 - DNA, 1299 bp, Salmonella enterica
atgtcagcaggaaccttaactcttaccaatgacacaaatgctgttactggcagcggcacagcgtttacaacagaacttgctgctggtgattttattgtcgtaactgtcggcggcatcccttatacacttccggttaaagcagtaaataacaatacatcactgacgctggttagtgtttacacaggcccgacacaatccggcgctgcgtggtctgccgtaccccgtgttgctttgaacatggtcacggctgccttggtagctcaaagcgctgaggcgttgcgtggactgaattacgataaacggaactggcagcagttttttactgcggaaggcgatgtgaccattacattgccggatacgagtcagacaacaggcccttctgcaaaaaaacttataagcgagatgggaaggaaggcggacaagtccagtcttggtacagctgcagaaaagaataccggaacgtcagcgtctgacgttatgcagcctggtatgtttgggcttggtagacctgatggcgtactgcgtttcaacacaaccagccaggatgaattacttggtgggcttgcaggatacggcacggtagtgctgagaaacgatcaacaaatagcggagccatggggtatatggaattattcaccctgcatttttacaagaactggagatacacaagctttgctgacgctcccttttcaggattcaggaagagtaaagcttcttggcggaagtgcatctattggctggtcttatgttcgtactttctgggatgacaaaaacaccacgactgactcaaatggctttattaaaaaggcttcaccaatagtaaaagtattcggtgacggtaattttgaaaccaacggagaatctgctggttgtacagtcacccgcctggatgtgggtaaatatttgattaatggatgcttaggcattaatgctgacactgcatggggggggattgatggaggttttgaaatcccggtagaccgtaataagcaagcgcgtatctggctggactataaagtcaatgctgatggctcggtgctggtcagaacgtatcaccgggttcatccctcagcgccggagtttgctcagaacagaatagggaatactgatattaacggtgtgtttactgagaccgttgcggatggtgaaccagtcgacattcctgcagattcttttgtgtcagtacgtgttgaaatgccggaaaacagcatctggaaccagaagaagaaagaaacacgggaggcgatggaaaaagctgaacgcgagcgcgagcaaaatcagcaggatactcatccataa

SEQ ID NO: 402830 - DNA, 321 bp, Salmonella enterica
atgacagaaattttaaaagaagctattgaaaactatcagcacctgaaagcgcaggttcgccagcaggaagaagaagacgatggcattgagtctttcggtgtggttgatacggatttatttgaacggttcatgtttgccaaaagtcagcttcaggagctgattaaccccgatgattattttgcgatgaaggataaggtgtcgcaccttaacagcgagttcggggcgctgatactagaaaatatcattcttaaaaatgaggtagttaggttaggcggcgatcctgattttttgggtaatgtggattctgaggggaaagcatga

SEQ ID NO: 402831 - DNA, 1005 bp, Salmonella enterica
gtgagcacatctaccccaacagacaccgttgtggccattggtcaaatcaatctgactggcaacgtgacacctgcaagttggtggcggcatatcacgctgccaagtgggcgcccggatcagacggcaataacacttttggctgaaattgtgtactggtatcgcccgtcagaggttcgtgacgagattaccggtgcgctggttggttaccgtaagcgcttccatggcgacaaattacagcgtagctatcaggcattcgcggatcagtttggcttctctaagcgtgaagcaacagatgctctaaagcgcctgagagatgcaggttttatcacacttgaattgcgcactatccaaacatctgaggggataacgttaagtaatgttctgtacgtcgaaccggttcctgaggcggtgctcgatatcaacagtatggtgcgtaaatctgatatcaaaaatgtaacccctgttccgtttgaacgtaacaccccatccgtaccaacggaacccctcccacgttctgacgtagacgaccctacgttgaaaagggagacgtatacagatattactacaaagactactacagagattaaaaacactggcgcagatgctggcgcacctccgccgaagcgccagaaaaaaacctcattcgaccctgcagggataaaacctgaaaacgtcagtgatgaaatctggctggactggattaaatttcgccgggagaagcgtcaacccctgacggaaacaacatgcacttaccaggctaagcagctagctgtccaccagaacgccgatgaagtaatccggcgctcaattgctggaggctggcaggggttgttcccggagcgtgtgcccaataagcccgcaatgtcactagctgaaaacgaaacgatgaccgcaagtcaaccgctcactggggcatggtgcacactatctggaaacggctcggcagaggtgtttatcaaccaggctgctattgagcgcatgaagcgcggtgggtaccgccaatga

SEQ ID NO: 402832 - DNA, 315 bp, Salmonella enterica
atgagcggcacaagttatatctatccatcagattttgtttttaagcaccagtttgataacccgttacagcgcttgatcatgatgcgaattctgtcgaacggaagctgtgatggtgaaggtgaacgtgttttcgatcatgagatcctgagacagttctgttgttgctcgaaacaggcgatgttcaaagagatcaaagcacttgaacgagcgggctatctgaaggtaagaaaaatcggtgctctcgatactgatctccgggttcgtctcgaagctgcacgtggttacacgattacccctccaggaggtaatcagtga

SEQ ID NO: 402833 - DNA, 198 bp, Salmonella enterica
atgtcacacgcgaacacatcaccagatccgattaagtcactcgatatcgattatcgcgatctgcgaggtgtgattgtgcatgttaccggctggaatcgggataaacagcaggtttatttcaccaggcagaattacccgcatgaatgcatgcaaccggtctggaagtttcaacagtatttcacgaggtgcgatgaatga

SEQ ID NO: 402834 - DNA, 240 bp, Salmonella enterica
atggctaggggattgctctcaattcgagaggttatgagtgtggatgaatggaaaaggttggcgcaactatcaggcactagtgtcgcctatctaaaccaaatggctttaggttttcgtcgtccatcagttgcaatggctgaaagaattgagatggcggtgcccatggtttctccttccctccatttgacaaaagaaagcctcattttttctccattgagaaatggagaccaaggcgtgtga

SEQ ID NO: 402835 - DNA, 456 bp, Salmonella enterica
atggaaatcaaagatattcgattaaaaaatctacaatcagtaattcaacgcagtggtttaacgcagactgaattggctttgaaatgtgatatatctccttcacttatcagccagataatgactaaacgcagaaacatggggaccgcttttgcccggaaactagaaggaaggctaaatctttcagaagggtggtttgacatgccacactccctgcttgactcgccgtggcatctggcaaaaatgggagaaaaagacaatttagttgctgggcaagatcagccattaaacaaaagagagatccgtcttgtagagctattcagacagatgcctgaaagtgaaaaggacagaataataaatgagttagcacaaaaaaaacgagattttgacaagcttcttgatgaactaatggccgtgaaagcagcaaggatgccaattgataaaaatgaaaatgaataa

SEQ ID NO: 402836 - DNA, 543 bp, Salmonella enterica
atgttcagtacaaatcacgacccaagatcaattaattctcttttgctttgcgctcaggtggcgttattgagtggatccgtttcaaataccgacgttatcaatgttttagacgtagcacaggatctaatttcattaatcgtcaccagctcggctaataataaaataagcaccacgaattcaaacaaagaacaatccacaccgctatgcgccccttacaccgctgacttgagcattggtgatcatatccagatcgcccgcgagaacctcggcatgagcgaagttgaccttgcggagaaactcaatattcatcctggtgatgttttaacctgggaagacggtactgaccagcctctggcaggcatgattatcccgctcgctaacgcactcaaatgcgatccgatgtggctgttaaccggggagagttctaatcatcaatctcctgccactccagtccatcaatcacggaaccagtattccgggcagcaacgatctgacgcttcagatcatgcatctcatcacgtgaagcaccaatcgcaagcgtga

SEQ ID NO: 402837 - DNA, 525 bp, Salmonella enterica
atgaaccaatctgaaatagatagtcttcttgaatcaaaagtttcgcggcgtaggcatttaaaaagcctggagtatggtgttggtcattatgacgtagaattccccagcactattatcatcgacggaaaaatatgccaccacagcgcttaccgtcgttggggtggcatgttatctcgctgctacaaaccgcacacagagcagttagcgcacagttatgccggatgtactgttgccgatgagtggctgcacttctcaaactttctggcgttctggaaagaaaattatcgcgatggatatgcgctagataaggacctgctacacccaggcaacaagatctatggtcctgaatactgcgtatttgttcctccaacacttaacttatttacaggtgatcgcgcccgtttacgaggaaaatacccacagggtgttatctggcataaacagtccggtaagtttcgggcacgaatcagcgtgaacggaaagatttcacaccttgggcttttcaacaccaggaagcccacatag

SEQ ID NO: 402838 - DNA, 171 bp, Salmonella enterica
atgagcggtaaatattatcccgaagagtttaaaattgaagcggtaaaacaggttgttgagcgtggccattctgtttccagcgtcgcaacatgtctcgatattactactcacagtctttacacttggataaagaagtacgggccgggatccgccgactccagaaggagttaa

SEQ ID NO: 402839 - DNA, 651 bp, Salmonella enterica
atgaaaatactaaatattaatgcctttgaaaggctagcatcacaacggttagttactatttcagaagtggtaaatgcactttatggattgaatccaaatgtcaaaactaaagatttagatcccgtgattactgaggaggttcaggatataaggaaaaccataaccagaaatatacgttatttaaaaattcacgtaagcagtgtgaacgatgagcttgattcagatttggtgtttgctgctgctcatgattatatgaggcaaggaataactccagaaataattatagaaagagggaaaagtgccatagtcacttttttttatacaaatgattggcaaagatacatgatggcttttgggggaagaagccttgttgatgaggtggcccagataaggaaaactggccgtgggcagcatagaaaaacagacgaagaaacaggaacattaaaaatgatggggcttctaattaaacttctggcagaaaaacacccgtcaaagaaatatggcagtcctgataaaccgacaataactgagatttacaaggatgtagtgagtatgattgaacgagaatcgttaacaacaaagggggttggtaagtcaacatttgcagcaaaagcatcacaagctttgaggactgttattgacgacggttaa

SEQ ID NO: 402840 - DNA, 636 bp, Salmonella enterica
atgagtgtgttatgcatgggggtggactccggcggggaggatggcgtcacggataacgcgtatgcgttctggcgccactgccggcgggaaggatttgccggtcgggtgtatctctttaagggggacagtaccgcgcggtcaaaaatattctccaaaagctatcccaacaataccgggcgcagtgaccgacaggcccgcgcctgcggcgaagttccgctctatctcctgcagaccaatgcgcttaaagaccggatcgcctcagccctcgaccgtaaagagccgggggcaaactacgtgcatattcctgactggctgggtgactggttttttgaagaactgacctacgaagagcgcggcatggatggcaagtggacgaagcctggcaaaggtgcaaacgaggcgctggatttactctgctatgcccatgccctggtaatgatccgcggctatgagcgtatcaactgggatagtccgccgccctgggcgcgcctgcctgagtctgcacaatccagccgcaacacatcagcagcagtcgaccctgaacctgtgacgaatgagagtgaaaatcacgaaatgacagaacaacataacccggcaatgccgtttggcggcgtgtccggcggaggctggttatga

SEQ ID NO: 402841 - DNA, 378 bp, Salmonella enterica
atgaaaaaattaataatctttattggcctgatcttctcaagtgttgtttttactgctaatgcaaaaactacaagtttatcttgcccaggtctggacaagagagctcaggatttagaagtggttttagatgctggaaatggaactgcatcattacaatctcccagtagtggtagtggtttaaatttcactgaaaaagcctcctttggttctgagttagttacttggtcaaaaaaatcaagttcgtttaaacaaaccttttctgttaaccgagaaacacttgaactgcagagaaaaacttatagtaatgcgactggcgaaacatatttagaaaaaaccacttgttcactcaaaagagcaagcaaatctgcaaaattttaa

SEQ ID NO: 402842 - DNA, 408 bp, Salmonella enterica
atgacaatggaaatacttacagctattcttgttttcattacaggaatttatgcatatttgacataccaaatgtcaaaaattagtgagcgctcagttcagataatgaatgaagaaaccgaggcaatgtctcgtccctatatagttattcaaccaattgtaagacctcactcaccatgtctatatcttaaaatttacaatagcggtaaaacgccagccttgaatgtaagattagaattagataaagatttttatcaatttgatgaaccaaatagaaacctaaaaatacaagtgctttcacttcaacttttgatagtttcgcccccagtcaagagttatttttcgctctcggtcaaggctggattatttttggagaatcaaaaaactctttaccacaaaaatttacaataa

SEQ ID NO: 402843 - DNA, 495 bp, Salmonella enterica
ttgccaaccattaacgaaataaaagaagaagcagttaagtttcgtagattaattgaaagttgtgataaaaagaacaccagtcttgttataaactgttttcctgttatgagttgtaagcttacttcaatgcttctttcttaccattttctgacactatggcctgaacttgagctaaaaggagttagcgcagctaccggaaaaaatagtcaaataactcattattggcttgagatagataacatcgtagttgatataacaggcgatcaatataacattattgatgataaagagctaaataataaaattataaaaaatagaccatatccttctatacatgtcgtgcacacagaaaaaagttatctctataatttatttaaaattcgagaaacagaacctctagtgtgtggatttccaacaattggtgaagattttattgaaaagatggaacttggatataatcaactattcaacaggaaagaatgcaataatagttaa

SEQ ID NO: 402844 - DNA, 342 bp, Salmonella enterica
atgaacaaagaaccacgcatatatggcagtaagtgggaccgtgagcgtcttatattccttcatgctcaccccttatgcgtcatgtgtcacgaacaagacagggtgacagcagcaaccgtcgttgaccacatcattccgcacaagctgaaagaggcgctgcgatctggggacagccaggcaatagcgaaggcacagaagcttttctggagccggaagaactggcaagggctgtgtaagcagcaccacgactcaacgaagcagcgaatggagaaacgcggtgccgtcattggatgcgatgaaagcgggatgccactagaccccgcgtcacactggttcaaatga

SEQ ID NO: 402845 - DNA, 336 bp, Salmonella enterica
gtgggcggaacaattgagatcagtgaagttggcgtaacagtcaatatggctggtggcgggaaaatagttatcggagattttggcgataatacagcacccaaggctgagccactcccaccccttaccccagaagaggagctttacgggcgcgggctttgcctccttcctgctggctgggaagaattaagtggcgaagagcactggcagtatcatcttagcgaatccttgcgtcatctatggccgtcgttcagcagggaacagaagatggctatagcctgttccgttggtgagctgtcagataaattgatgaacgccgcatacgaagcatcatggtaa

SEQ ID NO: 402846 - DNA, 1296 bp, Salmonella enterica
atgtcagcaggtgtaattggtttaacgaatgataaaacaggggttgtaggttcaggaacctcttttacatcagacctgaaatcaggggattttattgtagcggttgtcggcggcgtaacttataccctgccggtggcaaatgtagaaaataacacaacagcctggctggtatctccgtataccgggccaacaacctctaatctttcatggtatgccgttccccgcctggccatgaacctggttactgctgcgttggttgttcagagtgcggaagcgcttcgcggtctgaactacgacaaacaaaactggcaaagcatcttcagcggaaccgggattgttacggtaaaattaccggatggcagcacatattcaggccctgcatggggtggaattactgaaaaactgaatctgaaggctgacaaaaccagtcttggcactgccgcaggtaaaaacacaggaacaacaacatccgatgtgatgcagcctggaatgtttggcatcggcaggccggatggcgtgtttcgttttaatgttacaagcattgatgcaatcctcagtgggatagctggctatggcctgtccgtacttcgaaacgacaatcaaatacccgaaccctggtatgtacacaattactctcctgcgttatttatgcgtgccggagacacctacacactatggtgtgctccgtttgaaaacttggggcccattcgagtgtttggtggtgcagacgggcgtggctggatgactgcccgacgaattctggatgatgtaacaaccactaccgactcgaacggttttatcaaaaaagcgtcacctgtaatcaagctctatggcgacggcagatttgaggtgaatgcggaatctgagggatgcactgtggtcagacaggggcggggtgtctatctgattgacggatgcacggggctaaacgctgatgcatcgtggggcgggacggatggcggttttgaaattcccgtcgacagaaacaagcaaccccgtatctggctggactataaagtcaatgctgatggttcggtactggtcagaacgtatcaccgggttcatccctcagcgcctccgtttgctcagaacagaatagggaacactgatattgacggcgtgtttacagagacagtggctgacggtgagcctgtcgatattccggcagattcatttgtgtctgtgcgtgtggaaatgccggaaggcagcatctggaataagaaacaagaggctatccgtatcgctatggagcaatccatgatgaaagaagagcggactgatggcgataatgtgtag

SEQ ID NO: 402847 - DNA, 738 bp, Salmonella enterica
gtgcccctgtcattcacccgtaattttggcaaagagcctgctttgttcgcaggtcttaaccacgccacgggggacgctgtaattccgatcgatgtcgatttacaggatccgatagaagttatccctcatctcattgagaagtggcaggctggcgcggatatggtgctggctaagcgctcagaccgctcaactgacgggcgcatgaagcgtaagacagcggaatggttttataaactgcataataaaatcagcaatccgaaaattgaagagaacgtcggtgatttccggttaatgagccgtgaggttgtcgaaaatattaaacagatgccagaacgtaatctgtttatgaaaggcgttctgtcatgggttggcggcaagactgatgtagttgaatacgcccgcgctgagcgtattgccggcgattcaaaattcaatggctggagattatggaatctggcactcgaagggattaccagcttctcaaccttccctctccgcatgtggacttacattggattgtttattgcaggtatgtcattcctttacggtgcatggatgattattgataaattaatttttggaaataatgtccctggatacccttctttacttgtatcaattttgtttcttggtggcattcagttgattgggattggtgttcttggtgaatacattggtcgtatttacgttgaagttaagcagcgaccaagatatgttttaaaggatgcagaaaaatga

SEQ ID NO: 402848 - DNA, 123 bp, Salmonella enterica
atgggattgcagataacattgatgaagttgcaactgccgcaggtgttcttgttgctgttggcgcagcgcgttggttcggagatatggcatcaggagcattttcagcgacatctggattattaa

SEQ ID NO: 402849 - DNA, 246 bp, Salmonella enterica
atgaaaaaacttaaagttgcaattgctcatcttgaggataattgtgatggcattgttcttggcgaaaaagttacctatcagatttttcagagcggaagagtgttagttgaggactcgttatctggtaaagcgagtagtccattttctaaaacatatgatgttaacgccaatgatgcagaaatttatgtgacgtatgatcgccatgatttgaactggttaacgattacagcagagtttgttgaataa

SEQ ID NO: 402850 - DNA, 210 bp, Salmonella enterica
atgttcgttgcagaaggcttaaagcctgatcttgataataaaggatgggttaaaggttggggagttgttcgtaatgccccttggcatttagccggtgtttacgcgaccaaagacgttgctgaaactaaagcagcttcactcggtgcagattataaagttcactatggctctcaccgactcggtagtgatgattttgtctacggtacgtaa

SEQ ID NO: 402851 - DNA, 1338 bp, Salmonella enterica
atgggtgaggtacagaccaaagcctcgctggacagtccggcactgaccggcacgccaacggcaccaacgccggaaaccacagctgcaggtattgaaattgccacggcagcgtttgtggctgcgaaagtggcgcagttggttggttctgcgccggaagcgctggacaccctgcaggaactggctgacgcgttgggaaacgatccgaactttgccaccacggtactgaataaactggcgggcaagcagccgctggacgaaaccctgacggcgctgtcaggaaaaagcgctgatggtcttatcgaatatgttggtttacgggaaacgataaatcacgccgccgatgcgttacaaaaatcacagaatggtggcgatattccggaaaagccgctgtttgtacaaaatatcggagcgctccctgcatcaggtacggctgttgcagcgaacagactggcatcacgcggcgcgcttccggcactgactggtacgacaagaggcagtgatagcggcctgataatgggcgaggtttacaataacggttatccaacgcaatacgggaatattttgtgtctgaccggaatcggtgatggagaaatattaatcggatggcgtggggttaatggtgctcctgcgtctgtatatattcgcagccatcgagataccgccgacgctgagtggtcagaatgggcgatgttctacacctcactaaatccgccaccggattcgtatccagtaggtgtggcgatagcatggacgtctgatgctactccggcaggttacgctctgatgcaggggcaattgtttgataaatctgcttacccgttactggctatagcgtatccgtccggcattatccctgacatgcgaggctggacaatcaaaggtaaacccaccagtgggcgagctgtactttctcaggagatggacggcaacaaatcgcactcgcacaccgcgcgggcgcaggataccgacttagggacaaaaactacctcatcctttgattgtggcacgaaattgaccaatacaatgggcaaccatactcaccagttcggaggctatatcaactcataccggggggattcaaatcacacttcatttcagcctggaggtggtgcgtggacacaggccgctggcgaccatgcgcatacagtttatatcggaggacacgagcacaccatgtatatcggtccacacggacacgtcgttattgtggacgcagacggtaatgcggaaaccacagttaaaaacattgcatttaactataatgggggccggatgtggtcaggtccccccggacagcgtcgcccggcaaatgaagctggcgtgggaaagtttcagtaa

SEQ ID NO: 402852 - DNA, 1428 bp, Salmonella enterica
atgaacaatacaaaagaaataattaaaaatagtggcatttcttttggcacaagtggtgctcgtggattagttaaagattttaaacctaacgtatgcgcagcatttacatacgcttttgttgatgtaatgagtacatgttattcttttgatgaggttgcgcttgctatagataatagaccaagcagctatgcaatggcgcaagcatgtgcagccgcattgttagattgtggtattataccaagatattatggagtaattcccacccctgcgttagcgaatcaatcaattgctgatagaatgcctgcgattatggtcacaggcagccatatccctttcgatcgaaatgggctgaagttttatcgtccggatggtgaaatctcaaaagaaaatgaaataagtatgctggaggttgcaaaagaattctctgacataagcaagttaccagacttgaattgttctaaacgtgctgctgagaattatataaaaagaaatacttcctttctctgtggaatgttcaaaggaaaacggattggtatttatgagcattctagtgctgggcgagatttatattcagaaatatttacccagttaggcgccactgtcgtaactattggaagaagtgacgaattcatcccaattgatacagaggctgtttcgaaagaagatgaagcaaaagctttaaaatgggtttctgaatacaatctggatatgcttttttctactgatggtgatggtgacagaccgttagtagcagatgaaaacggtttttggctaagaggtgatatattaggtctcttatgttccaaagcattaggtattgaagcagtcgctgtccctgtaagttgcaatacaattattcaaacgtgtgggtggtttaaaaatgtagctttgacaaagattggctcgccatatgtgatcgcggcttttgataatcttaataagaattataaaaatgtagctggttttgaagctaacggtggataccttgtaggtagtgatatatcatataatgattatgtaataaaatcacttccaactcgagatgctgttctgcccgctttgatggtccttgctttagcaattaatcgtggcgtttctatatctggtctcctgaagaatcttagcggacgtgttacttattcgaatagaattcaaaactttgcaacagaaagaagtaagcatatccttcaaatagccttggatgacttacaacaatttataaagcaacttggctttggcagtttgtacattctttcctataacactatagatggattaagagtcacgctgagtgatgattcgataattcatttgagaccctcaggaaatgctcctgaattacgttgttatgccgaagctgataatcttgttaaggcagaagaaatagttgacagagtattacatgaaattgtattactgggacagtaa

SEQ ID NO: 402853 - DNA, 378 bp, Salmonella enterica
atgaaagaaactatagcaatacaattctgtaagcagaataacaaagtcccagctaaatcattgcgaacccattgtgtcagtgttcgttttaatcaagatgagctaaagcttctcaacaaaaaacgtggtagtaaaagcaagggagagtggcttcgcttagcttccctggataagcttcctttgtctgttcctgccatcaacatacaagcctggaaatcattagccgaaatatctcagaatctgaataacctaatatgccatcttaatactaaaagcagcggaggtgagcttaccaaaacagaaatcttcgctataaagcgtcagatatcagagcttcgctcatgcctcacagcttctgatttgccaagtggtaaatag

SEQ ID NO: 402854 - DNA, 264 bp, Salmonella enterica
atgtttacctgcggtatacgttacatccccggcgcatgccgccagcattccctccagaatactgaccttgttttcactgagatcgaactcaccgttaatcgtgtaacgcttctcaacggtattaccgccagtaatcacatcctcatcacagatgttcgccgcttcctgaaactggtcccagagaatatcggtgtctggcactttcaggtaattacggtaatagtccaggataaccagcgcagcattattgctgtaacccgttaa

SEQ ID NO: 402855 - DNA, 690 bp, Salmonella enterica
gtggtacctgaaaacacgcagaaaccatacagcgatattgcattcgccacgaaaatcaccccggtgaccaccatcgcgcatatgttcaaagcatccaagcagattctggatgatttcgcacagttacagtccactgttgatgccgaaatgcgttacggcctgaaatatgttgaagagcaggaaatcctttttggtgacggtaccggcgttcatctgcacggtatcgttccgcaggcttcggccttcagtgcagaattcaaggttgaacagcaaaacggcattgatgacctgcgcctggcaatgctgcaggcgcaactggcgcgcttcccggcgtcagggcatgttctgcactttatcgactgggcaaaaatcgaactcactaaagacacgcttgggcgttatatccttgccaatccatcaggtctgactggcccgacattgtgggggcttccggtggtggcgaccgaagctgcggcatttaagggcaagttcctgacaggcgcatttaacgctggtgcgcagatttttgatcgtgaggatgccaatgtggttatttccactgaaaacgccgacgattttgagaaaaacatgatctcaattcgttgtgaagagcgtctggcactggcagtcaaacgtccggaagcattcatctatggttccttcactgtcccggcacctgctggcgcataa

SEQ ID NO: 402856 - DNA, 240 bp, Salmonella enterica
atgagcggatacaatgtttctgaggaatttgctcgaatcgatgatgttttgcgcaaaaactacgcattaactgaattactagcgcaaacatttagcgctttcgttgttggatcaaataataaagaagttatcgctaattttataaaatctacgtctgtaagtgacccaagtatgaaagatgctcatgtccacgcgcggacagcgctgctgaaaattttagattcggtaaaaacgtcgtaa

SEQ ID NO: 402857 - DNA, 153 bp, Salmonella enterica
atgactttagaacagcaagtaggggtagtgacaaaagataatgtcgtgtctaaatcgagtgaaaatcaaagcaaattttttaaggttgaagcgggagcgatttttatagctcccgcaaaagttatgccattacgacgtttttaccgaatctaa

SEQ ID NO: 402858 - DNA, 552 bp, Salmonella enterica
atgcaacaaccgttcaattttcaaaaagcatttaaaacactcaaactattcatatatacactactattgttagtaatgtcttatattattttattcttactttctcttactcttaatttcgaaatagcaaaaaccctatccttaaattggatactacaaactctttttatatctttcatcataatcatattagctggtgtaggtttcgctgatatgcacctacggataagagatacgagaaacagggttcaatattatttattgttcgcagtgcctgttattttctatatcgctactgttttttcaagtggcatctcagaaaaaattgtcaatttaacaggactcggatatcaatatagatgttattatgatacagatcttaatcaatactatattcctgatgaattcattcaagaaaaataccataataaaacaaaactttttatagttgcagatgtagatagtaaaatgtatatatctccaaaagacaaacacattgctggattttatttcactgcaaaagaattggctcaagttgattgtagaaaatag

SEQ ID NO: 402859 - DNA, 555 bp, Salmonella enterica
ttgtcgacttatgttcagtcccaaattggccctgacgggagtctcacctcagcagttaatcagaagatgacagctgaggtaaatagcgatgggactgcaaaagcctcttacacactcaatatggggattgtcaggaacggtgtgaaatacaataccggtttcggcatgtccattgagccagacggcagcggtggttacaaatcaacgtcggtgtttgctgctgaccagtttggcatttattctggaagtgatcctggaaactataccgctgcgttctttgtctataacggacaggtatttatcagtgatgcgttaatacaggatggcagcattagcaatgccaaaattggtaattacatccagtcgaataacttcgtttcgggttcaactggatggcgcattgataaaaatggaaatgctgaattgcatggcaaactttacgctgacagtggccagtttgcctttaacggtgaaaacaacacggttgttataaatggcaatggcgtcacggtaaatctaccggggggcgggcgcgttgtcgtcgggaggtggtga

SEQ ID NO: 402860 - DNA, 165 bp, Salmonella enterica
atggtagtagtgataacaaatgttgtttttaaatctcccaaaaggcaaagaacactctttgccttttttaattcatccgtctgtcatgaaatttatttaattttttttatttctgtcttccatccatttgagcaagaaaccatctccctgcttttatatatttga

SEQ ID NO: 402861 - DNA, 459 bp, Salmonella enterica
atggatacagttgaagagcttaatagcacttatttttatgccggacgttcaaatctgactgctagtcagttgctgtttatgattttctgcgaaaacactgccaatcagttgggtgttcaggattttggggcgatagtgtctattgtggctggattgaatgttttgcctacgcggacaaaaccgcgtggtgctattgagggtacatcgttagcttcccgtggttctcgtaaagtatttggtattgctaaatttccttggggaatacagttgccatctgtgataggtggatacccgccatcaacgttaaaaataaaaatggttgcgaaaattagcgcgtttaccggtcgtgctatacctgttgtcggatggattattctggcctctgacgtgtcgcagattgcatatcgtacagtcagggattacaaccgtattgccagaggaagcgataaaatatggtaa

SEQ ID NO: 402862 - DNA, 216 bp, Salmonella enterica
atgaaaagcaaactcagaaagatggttaataagaccaaaactcaggctgtcgtgagtcgtaaagccaacctgaaaacaaaacaactatcccatgtctgcgaagcagaatataaggaggctgacaatggccattatccagagcgcagcatgaagcaaacaaagctaatggtgcgtatcacattgaccgtcatgggaatcgtgttgctcctgcattag

SEQ ID NO: 402863 - DNA, 813 bp, Salmonella enterica
atgaaactttctaaatggaagttaatggctttgattattcctgctgcatggacttcaatttcttacgcttatgactggaatgatgatgtcacccaaagagttcagactcttataggaaatgccgctgataagtatgtgcagggtgattacgatagctacaattcagatactgaaacggctattaatttgctattaacaatagagcctcaacctcagtcgccagagcagatagatgcaagaaagatacaggcagcacaacttgttgatgaaacggtaaagaaagaaatcatttctttagagcaatctcttgaggcaaatcaagctaaagctgacgctgaataccagaagatgcaaagcatgagcaaggaagaaaaagaacaggccgcagcgaaagcagcagcagagaaagctttagcagcgaaagcaaaggcagcgcgagaaaaagccgaggccacctcagatgtagatgaaatgcttggtgagcttggctcaggtaagagtgcacctaaaacacacaccagtaccagttctggcggcgcctctatggcagaaatatccgcatataccgcccaggtgtcaggtatgattcgcagtaaacttccggcatgggatacctataaaggtaagcggtgttctgtagttattcacatgaaacccgatggaaaattaacagggactgattcatacaatggcgataatgatttctgtaattaccttaaggaaggtctaaattcaatagacgaatttccaaaagtgcctaaccaatccgtgtacagtattattaaagacgcgtctattaattttaaaccttaa

SEQ ID NO: 402864 - DNA, 174 bp, Salmonella enterica
atgatagtcaagtcagatgcaccaaagtaccctttgcgcatcccattagaggttaagttagcaatcgagaagtcagcgaaagaaaatggccgctcaataaataccgagatggtaatgcggttggtggatagtttaaggcgggatagttctaaaggtaatctatcaaaaagttga

SEQ ID NO: 402865 - DNA, 237 bp, Salmonella enterica
atgtcacgcgaagagccgcaaataaatatcaggatttccaaagagttaaaggcaaaggttaaagccagggcgcaacataacaagcgttccatgaatgctgaaataatacagattatcgaagatgctgtttgtggtagatcgcttaatagcaatgaatttgctcagaaagaggctgacaaattcagggatgcgctgcttgaaacactgaaaaccatgtatggtaaggatgcaaaatga

SEQ ID NO: 402866 - DNA, 210 bp, Salmonella enterica
atgaataaaaaacagtttattaagtcaaaaacgtcaagcaaggaagagctagagaaagagctaaactccctgaaatatgctctgtgtctggtttactcaagactgccaatggaagataaaaacgctatttacaatgaaatgattagcagccttgattttaacgatagagaccttgcatcccacatcaacagcttccgcgtccctgagtaa

SEQ ID NO: 402867 - DNA, 183 bp, Salmonella enterica
atgaaaaatatattaattggtttcgtttttggtgcagcctgcgccgccagcattagcgtcatcgccgctcagattgttggtggtaactcatatctaatgggctatgacgtcatgataaatggagaggttgtttgctcagacccttatgtatggacgtcgacaaaagaaatagaatgtgactaa

SEQ ID NO: 402868 - DNA, 483 bp, Salmonella enterica
atggcaacagtactgacaaagggtgagatcgtcctttttgcgcttcgtaagtttgctattgcttctaatgcatcgctgactgatgttgagccgcaatcaattgaagatggtgtaaatgatctggaagatatgatgtccgagtggatgattaaccccggcgacattggttacgctttcgcaactggagatgagcagccattaccagatgatgagtcaggtcttccaagaaaatacaaacacgcagtaggctatcagttattgctgagaatgctatctgattacagccttgaaccaactcagcaagttctcagtaacgcccaacgctcatatgatgccttgatgaccgacactctggttgttccttcaatacgacgacgtggagattttcctgtaggacagggtaataaatatgacgtgttcacatctgaccgatattatccaggcgatctccctctgattgatggcgatatcccaaacgcatag

SEQ ID NO: 402869 - DNA, 186 bp, Salmonella enterica; identical to SEQ ID NO: 16088

SEQ ID NO: 402870 - DNA, 1272 bp, Salmonella enterica
atgcctaacaatctcgacagtaacgtcagtcaaatcgttctgaaaaaattccttccgggttttatgtcagatttagttctggcgaaaaccgtagaccgtcagttgctggcaggtgaaatcaactccagcactggcgatagcgttagctttaaacgtccgcatcaattctcatccctccgtactcccactggtgatatttcagggcaaaataaaaacaacctgatctcaggtaaagctactgggcgtgtaggtaactacatcactgttgctgttgaatatcagcaactggaggaagcgatcaagcttaaccaactggaagaaattctcgcgccggttcgccagcgaatcgttaccgaccttgaaacagagcttgctcacttcatgatgaataacggtgcgttgtcacttggtagccccaatactccaatcaccaaatggtctgatgttgcgcagacggcatctttcctgaaagacctcggcgttaatgaaggtgaaaactatgctgtaatggatccatggtctgcacagcgacttgctgatgcgcagactggtttgcatgcttcagatcaattggttcgtactgcatgggagaatgcgcagattccaaccaattttggcggcattcgcgcactgatgtctaatgggcttgcctctcgtacgcagggggcatttggcggaacactgacagtcaaaacacagccaactgttacctataacgcagttaaagactcataccagttcactgtaacattgactggggcgacaaccagcgttacaggtttcctgaaagctggcgatcaggttaaattcaccaatacctactggctgcaacagcagaccaaacaggcgttgtataacggagccacaccaattagcttcactgcaacggttactgctgatgctgattcagacagcagtggcgatgtgacggttacgctttctggtgttccgatttatgacactacaaacccgcagtacaactctgtaagtcgtcaggtagcggcaggagatgccgtatctgtagtaggcactgctagccagacaatgaagccaaacctgttctataacaagttcttctgtggacttggctctatcccactgccgaaactgcacagtattgattctgctgttgcaacatatgaaggtttctccatccgcgtacataaatacgcagatggcgatgccaacgtgcaaaaaatgcgctttgacttactgcctgcatatgtgtgctttaaccctcacatgggcggtcagttcttcggtaatccgtaa

SEQ ID NO: 402871 - DNA, 885 bp, Salmonella enterica
atggaaaacgaactgatcatcgacggtcaggttattgacctgtctgaaacacaggaaaatgcagaagaaaccatcatccaaacagagtcacagcctgagaatgaaagccaggatgacaacggaaaagagatggcaactgatcctgaaaaaaccgaagagacaccagaagattacgccttgcgtattggtgatgaagaaattcagcttaacgctgacgatgatgatcacattgacgggcaacctgcaccgcaatgggtgaaagatcttcgcaaaggcttcaaagaaacacagaaagaaaaccgtgagttgcgccgccagcttgaggaagcattagccaagcctgcggaacatcagcaaccacaaccagacgctattccaccaaaaccgactcttgagtcgtgtgattatgacgaacaggcgtttgaacaggcattgactgattggcatgagaaaaaaggccgtgtcgaacagcagcagcaacaaaaactacgtcagcaacaggaataccaacagcgtttccagcaaagggtagaagcgcataaacaacgggcagccaagcttcctgtgaaagattatcaggaaatggaggccattgttcttagtgagctaccaccaattcagcaggaaataatcattcactgtgcagacgaaggctctgaactactcgcctatggcttaggtaagagccagcaattacgccagcgtgtagccgctgagacagatccaattcgcgcagcattcctcttggggcagattagcaaacaggtaagccttgctccaaaaccaaagaaagccatcaagccagagccggaagtacgtggtggcggtgctgatgcgaaacaagacgaattcaacaaattatgccccggcgcaaaaatcgaataa

SEQ ID NO: 402872 - DNA, 486 bp, Salmonella enterica
atgaataactttgttgaaattacctcaagaattggtcgcatgtaccaagattttcttataagtggaaaggggtctggcgacatcatagaggaaattgacaagctaagtgcagagctgagaaggaatgggtgtgttaattctatcttttttgaaactttgctaaagcaaggcttcatgtttgacatgattaattacaacaaagtcgcacccagtgcttcgcaaaaatcatatgtgtacgttctgcatgctgaagatagtgggctaacaaaaatagggtttagtcgcagggttaataaacgaatttcagagatatctcgcatgagtggtgggaagctaaatctaattgcaaagattccggccgatagagagcttgaaaccaaattgcaccaaaaatattacaactataggtcgcacggggagtggtttagcctcaatcgttgtcatttgaaagagctaaaagaaatgcctggtaacgaactgaaataa

SEQ ID NO: 402873 - DNA, 345 bp, Salmonella enterica
atgaagacaatttcgcatccgggaaagaggattaatgatttaatcgaatcaaattaccagctaaggcgtgaactggtcgtaacaaagaaacacctttcctcacttcaacatcgttacgacatggctttgaaagagctatctatcaataattacggcatctcatcaataccaccaattccgatgacaaagcaggttctcgaatggataaccgaatacggtgttccatgggagacattgtactgccctgaatgcagggaatggtttacggagttggatagttcatttccatatcacatggaatgttgcacatgtaaatgcgacgaaaaggaaaatgaaaatggctag

SEQ ID NO: 402874 - DNA, 207 bp, Salmonella enterica
gtggttgagttgattttctctgcattgaggattctcggtgccatgtggatggtggcgacgttcattgttgttgccagcagttttgtccggttggtaggcgaaggtaaagacccggtgggtgtgcttttcggtagcattttcctgtgggtgattatcggtgttatgcctgttgtcgtagcaaaagtggcgtggcgttttgtgagttga

SEQ ID NO: 402875 - DNA, 300 bp, Salmonella enterica
atgaaagaactaagattttacggcgcaagtgatgacttgctcgaatgcgaaggtgcaatcagagaggaagttggctgttacagagagccgggtatttatcacctgaaatcaggcgatggcgagatgctggttgttggcttttacatggattctggtctgtggagcattggcataagccaggttattgagaattgcccgttaccttcctggcctgtttcatacagtgtttatgaaaacggttatagcccaatgctcgctatccaggcacctgacgatattgaactggtaattccagaataa

SEQ ID NO: 402876 - DNA, 273 bp, Salmonella enterica
atgactacagaagaattaatcgaacgtatcgacgactggggcgaggcgtacaggctgttagatgagaaattaccgaatattgagcgccgatttaatcggctgacgaaggcgttggcggcgctattggacgaggttaaacaggagttcccggacgcgaattattacacagcgtcgggtgggtttaacttgctgctgggtgattctgaagcgggtagtttgatggtcgccctatcagctagccactacttatctataggcgacggggatttttaa

SEQ ID NO: 402877 - DNA, 351 bp, Salmonella enterica
atgaccaatagcaaactaacagacgaagaaatcaatgagctggctttgaaattattctacggttccactttttattttcaaagtggccgacgtgcaggcgcaaaaactatggctgaattgctaaataaagcggcctgcgctgtcacagagctacaggaacgccgcaaatcatttcggtggatttcaattgatgaggaattgccagaggatgaatcaacagtaatcgttaaaaatattgatggtgtgcaatgggttgctgattttagcgatgattgtttttatcccgacgagtttcctgtttacaaaatgggaggcgatgaggttacgcactggatgaggttcccggaatga

SEQ ID NO: 402878 - DNA, 678 bp, Salmonella enterica
atgaataacaaactaacagacgagaagatcaaagcgcgaattaacgcgattgaggaccgacgttctgccagccgtgatttttgggacggtgattgggattatcctgaggatatcgagctgttggcgctgcgcgagctacaggaacgccgcaaggctgataaccaagagccagccggctaccacgtcgtcagagagtgcggaaaagttggctgtagtgttgcaacgctagaggaagccaagaaaacgcgagatttctggaataaaaagtggactatcagtccgtatttttacaccgcccagccagcgccggtagcgcctgatgcgatggatctgcagacctgtcatttagatggcgtcaatgagacgtatgcggagggctggaacgactgccgagacgcaatgctcaattcagcaaaacttaacgagactgtaagtgaaactaacaagttgaactctccggcaactccggattgttggattcctgtaagcgatcaactaccggagaaaggacagcgacttattgcgtttgtcgaatttaatagcaatgtggttacgccacttatcaaagatgctgagtataccggcagcacatttcgaatcgggccgaatacggtaaatacagcaggtgagccaagagtaactcactggataccacttccaaatccgccgcagcaataa

SEQ ID NO: 402879 - DNA, 240 bp, Salmonella enterica
atggctgcaccttctcatgaattactaaatggactggctgtaaaaacagtactcagctacgtaatcgcaacgctcaacgaagatcaaaagcaagctcttatgaggcttgcgggaactcgctcaatgaattttgatgaacttgaaagcgactcaacatcaaaggaagagcttcgtgcagcagccgataccgttaacgacatcattgaagaaatagtcaaaacgggagttggccaagagtga

SEQ ID NO: 402880 - DNA, 3249 bp, Salmonella enterica
atggccgagaacgtcggtgatattgagtatgtgatcaaggccgataccgctcaactgttgcgtgctgacaagcaggtggttaatatcaccaacagcatggagtcaggattcaaaaaggccgataaatctgctgatgcccttaatacggggttaacaaaacttgcatctacactcaagctggttattgctgctggcactctccgggaaatggcgcggatggtgcagagttatcaggaaatgtcagagcgggtacaaatggctacctccagccaggaagagtttcagagtgtacagaaacgacttctcaataccgctaacgacacctatcgttcactatctgaagctcaggaactgtatatcacaactgctgatagcctccgcagtatggggtattcaacccaacaggcgcttgatgttcaggactcaatgtcttttgcatttgttaagaacgcaacaagtgcagatcgggctaataatgctattagtgcgttttctaaatccatcaacaagggcaaggttgaggcagattcgtgggaaaccataatcgccgccatcccgtccgttattggtgatattgctaccgccagcggtaaaactacggcggaaatcagggcgcttggatctgctggcaagctgacggcatcgcaacttacggaagggttgaaggcatcgcttgattccaatgcgtcagcggctaaaggcatgtccaacaacctgacggatgcaggcgtaaggattaagacggccatcactgaaatactggtatcgtttgaggggcaaaccagcgtcctccagacgttcaccaacggtctgattagtgccgctgacgtcatccttgagtttgggcgcgactcagaaagcatggctggcctaattgacaccgccaccattgctgccaaggcgtttgctctggtaatggctggccggtatgcgggagcgttaaacacagctattgctggcaaagttcaatcagtatccgcaacgcggcagatggttacagcagaaagccaggcggcgcaggcggctttgattgcagcgaatgcaacaagaagaaaggcggtggctgacaaagaggccgctctttctgccgtcgcgctggcgcaggctgaatataatgtggcaaaaggcagtaatgccgaaatgacggctcttacagctttaacggcagaaaaatcaagagcgcgtgcagcctctctagctctggctcaggccgaatcagcgcaggcagcagctacagcaaaagcagcgtctgctgcaagagcggcatccataggcatggggttgttacgcggggcgatgtctcttcttggtggaccggcgggaatcgtgatgattgctgcatctgcgctgatttactggtggcaaagcgcgaagcaggctaaagaagaggcgattaattacgcagattcactcgatggcgttattgccaaaatgaaagagatgaatcaggtgcaacttactggcactcttgctgatgtagcaaaatctgtcgcggcgcaaaaggatcatatagacgacctgaatgattcggtaagggatgctcagactgaatatgacaaatacagtggcctggcaaaacaattcggggtggaacaggataaaaacaacggttatgtaaaaaaagccaacgaatggctgcaaacattaaaccaaagaaaaagggatgtcagcgatgccactgataaactaaaccgcaccaccgaacagcaatcacttattcaggagcagttaaatcaaaaggcgagagagtccgaagaggcattcaacattcttgctaataacttgcgcaacaaaataccaggagcgagtgaagctgctatatctgcgatggcatctactattcaggtgctggacacgctcaacaaaaaagctgcaagcgttgggaaagatcagccagcggaacctgaagagtcaccggaagccaaaaagttaatccagaacgctgaacgccgccttgcactctcaaagttggaaggtgaggcgagggcgagattacaggctcaatatgatgcagaggatgccggaatcgccaagggcgataagctcgttggggtgctgcaaaatgtgtatgctgaaacagagcgtgttaccgctgcaaggaaggacgccaataaggaaacaaaatcatctgatgaagccgcccaatcccttacccgccaacaagccgcactcgatcggctgaacactggttatgccgatggctctctcgagttagcgaaatacgacgctgtagttgctcttggaaacaaagcatcaggagagcagattgccaaagctgaacagcaagcggaatccatatggaaaatccagcaggcaacaaaagcagccgcagaagaagaaaggaagcgcacacaggcgggtcaaaactttaccgggttacagggtcaggtttctccagtcgctgcagtggataacacctacgcgcagcagatggcccagcttgatgaatatgttgcgctttacccgcaaaaaattgcagaggctgaagctgtccgcgcaggaattgaagaccagtatcaccagaagcgtatggctgccatgtgggaagaatggcagcagcagagcgagatcaacaacatgcttggctctgcaatcgactccttgcaggggggcgcaaccaacgcgattactggtcttatcaacggcacccaaagcctgcaagaatcctttgccaacatcggcacgacaatcctcaacagtgttgtcggtagtctggtgcaaatggggatcgagtgggtcaagagccagttaatggggcaggccgctgcggcggcatcgctggcatcgacaatggctcaggctaccgccgctgcatctgcatgggcgccagcagcgatgagcgcttctatagcaacatacggtagtgctgctgccgtgggacaggctgcatacgcagaatcgctattagcggcgaagggaatggctcttgctggcggtcgtcgctacggcggcacggtatctgctggcaacgcctatcgagtcaacgaggatggtcgttctgaaatcttccagactgctggtggtcagcagatgttcattccgaaccagtcagggaaggtgatatcagctgataaggtgggtggtggcgcttcattcaaccccgtaatgaacctgacgataaataccactggaggaattggcagtgaagatatcgcaaggctgcgtaaagtgtggaacaacgacatgctgaaaatgatggtagaccagagcacgcggccgaacggtttactgcaagggcggagaaaataa

SEQ ID NO: 402881 - DNA, 384 bp, Salmonella enterica
atgaagtggtcttttgctctggtttcatgtctgcttgtgttgacaggctgtaagcctagtgcggataaagctatagaattggcaaaaaatgaaatagcctcgaatatgaaggatcctgacagcgcaaaatttcgttatatgagatttatagaggcaggtaaaaataatgacactattggcggatttgtatgcggaaatgtaaatgctaaaaacagttatggcgcgtacgctgggttttcgcctttctatgtagctatacgcatgaagtcgaaaggtattttttcgaaaggggtcagctataccattgacgacaagaaaatatactcagagccaaatcagcaagaaatgaagtcatacattaatgtttgtggcgaagactcgtag

SEQ ID NO: 402882 - DNA, 609 bp, Salmonella enterica
atgaggaaggtaaggcggcgttgtaagaacgaagagtgcatggaatggttcttcccgcaatttcagaaccaacagtggtgttgtgttgattgtggtacgaagttagcactcgaacgacgaaacaaagaacgcgaaaaagcggaaaaagcagcagagaagaaacgacgacgagaggagcagaaacagaaagataaactgaagattcgaaaactcgcactacaacccctcagctacttccacaaacttacccagcaagcctttaacgaatacatccgcacccgagatgtgggagatccctgcataagctgcggcaggcttaccggcgcaaaaataaacgcaggtcatttccgtactgtcggcgcatcaccagaaaccagatacgacgaaaccaactgccacgctcaatgtgagcattgtaattcgtatctgtcggggaacatcggcgcataccgaccaaggttaatcgaaaaaatcggacaggaagcctacgacaggttaatgggtccacacgagcggaagaaatggacgcgagaagagttacaggaactggcgaagtattacaggcagaaaacgaaagagctgcgcaacagcagaagtgaggccgcatga

SEQ ID NO: 402883 - DNA, 360 bp, Salmonella enterica
atgagaaggttttctattatttttatttttgttacaggttcctctttggctaatactttcgtttttacgaaaaataataatgttctgtcattatctccgggagttgagattgccgagtttagtattaatggatctcatagtaatacttctagtttatgtagtataggaggtatggctgaatctgttagggctggagaaggacagagaaatcgctggatctacagtgattcttcgagtgcatgtgtggcggtgatcagtgaattgaaagatggcacagttaatgttatgactcgtagctgtgaaaaccattgcggtgtctctgctgttggttcattggatgggaaatatgttctaaaatag

SEQ ID NO: 402884 - DNA, 840 bp, Salmonella enterica
atgattaataacattaagtctatatgcttagatagtcaggcttcttattcagatgtatcgtcctatttgttatcctcactgtctaaaagattaatagcacttatccatcacttttcttttgagaaaaataaagatgaagaatttaaaaaaatcaaagatgtaatatttacactatctgatttaatgttattcttttttagcgttaatccaacagtatcatcctcgtacaaattatctaaatcaatgatcattattaatgattatttgaaagggatttcaagtgattatagtaatatttttatgacatcattggtaaatactgctgaaaatatcaattttggtgataatgacaatggattatttatagatgattttatatccattgaaaaggtcaatttaattttggcagcaacgttttttggggataaccacctggtaagtgaatctttttttgatgggattttgcaccaaaagaaattagattactttacaatcatatccttattattctatttcaggaatagaaattcatttcaggcacttaagagtatagttgaaagaaaaattatagaattactatgtccagatatggatttgttacagtcttcggagaaggcacatttatttttggatgtaatgtcttgtccatttgtatcaataaaaacaagaagatttatatatataagatatctaaagtcttttgagccaaaaaatctaagaacccactctgagattgagaatgatttgcaatcaatgctccaatgctactggtttgtcaagtgggatgagttagatcttttaaagatgatagagaaaaaagaattgaaggaaacttattga

SEQ ID NO: 402885 - DNA, 468 bp, Salmonella enterica
atgaaccgcataactactggcgtaatagtctcgttgctgattgtcgctgctgcgctggcgtggacaacggaccactaccacggtaacgccgtgaagtacaaagaccagcgcgacacagttactcataagctggcgctggcgaacgcgacaattaccgacatgcagacgcgccagcgtgacgttgccgccctcgatgcaaaatacacaaaggaactcgccgatgcgaaagctgagaatgatgctttgcagcgccgccttgctgctggtggccgggtgcgcgtcaaaggacactgtacagtgcccgccagtaccacatccgccagcgccagccgcatgggcaatgctgccaccgtcgaactctctgacgttactggacgaaacgttctcagtatccgatccggaattatcagcgaccaggcaaaactgaagtacctgcaagagtacgtcaggacacaatgtttgaagtga

SEQ ID NO: 402886 - DNA, 219 bp, Salmonella enterica
atgaaaaaaatcgacctgacaaagcaggcccgcgatcgcatgtgtactgtacgaattccggggatctgtaatttcaatcctgaaaccagtgtgctggcccattatcgcatgagtgatacctgtggaacgggcattaaaccacatgacatgcaaggtgccattgcatgcaactcttgtcatgacgtaatcgatggtcgtgtgaaaaccgatattgattaa

SEQ ID NO: 402887 - DNA, 369 bp, Salmonella enterica
atgatctctaaatgtgaatggctcgattatgcgggatacttacagtgcaacctggcaccatttttcagtacactgcaacgtttctggtatgggcttaacttccggctgcccaaaaacagccccgtcctgtttccgggtattatcatttccgtcagtcggcatcatgttttgtattgggcatcgtcaaaagacgactggctgaccagtcgcatatctcgatgcctcaattcagtcatcatccatcatcatgtgggtttaagtcaggaacgtatcaaaaccattccaaacgggttaatcatcattcagaaaatcaatttgtgggcgattattccatttatcttcaataaaagacagaaagcgttgaaataa

SEQ ID NO: 402888 - DNA, 495 bp, Salmonella enterica
atgaaaagcataaaaaaattgattatcgcaagtgcgttgagcatgatggctgctagttgttatgctgatggatttttgccggacacagagcaacagaaatcagtggatattagctttgtcgctcccgaatattttaccgtatcgcttgatcaagtgccgggcttagtggctgggagggggcatgatggtatggatattgcgaagcttacagttagttctggttctattaaagaattcggggccagggggatttctagctcgatactgggcagcactggtagtgaatggaaaataactggtagaaatagtggcaagtcaatcattgtgggcttttcaactaatgtagccacagctaggggcccgaaaatgtggaatggggaaacttggagcacctttgataccaataccccagttaatattgttataacaggggatcaggatatcccacctgatacgtacccactgactgtagatgtagtgggatatcggtcttaa

SEQ ID NO: 402889 - DNA, 3819 bp, Salmonella enterica
gtgaacgagcatctctctcatatggatgtacataccttgtttgaagaaatggacgagcaggctgatggaataacgtttaaatactcatttgatgacatagcaaagagcaacgcattggttgtcactgagtttgtcaattttgagcgtgacagcacggtagctttactcgccagccttcttactctcccggcacaccaatctcagtgtttgcgctttgagcttctgacgagccttgcactaattcactgcaaaggtcagcagatagcaaatatcgatgacgtgaaacgctggtatgtcactattggggagtcgagtagtatcgttggagaagatcctgctgaggacgtcttcgtcgcccttgttgataataaaaaaggtgattaccgtgtgctagagggggtttgggaggcggcaggtttttatacacaattaatggtcgaaattgtatccgacatgccggatacgcaccgctatcgctcgctgaaacttgctatacaggcaattctccgtctctcagatgtcatttgtgctcgctctggcctttatcgttttcaggaaggcgcagacgaattccctgactctcttgacaccgctggtcttgatgagaaaacgctctgttcaagggtaacgttgtccgagcgttctcttcgagctgaggggatcaaacttgctgacttagcacctttcattcttgaaccttctcatataagtatgcttggaaatcaggtccctggggagggaatgcttgaacaacggccattgctccgcacacgcgatggtattgtggttgtacttcctaccgccatgaccattgcacttcgccaggcagtgataacatttgcaaagcgcacagaagaattgagcgagctagacaaagcgttagctaacgtctacagccttactttctccgagatgccggtcttcggtaatggaggaaggttaagaagactgacatgggagaagtacaaaatgagccgaacaacgatggtaacctccatcgtggatgctggtcatttgatggtacttcagttcgttttgccttccatacagcaatatgccgataccggtttcaacaacttgctacagctagatgaagagaccacgcaatttctagataactctgttgaacaaattacagttgacctcgccaaacaacccggctttcagcgtggcatcgtcgtgcgcattgcatgtgggtggggggcgggttttatgggggtccctccccaactgccagatggttggggatttgaatggatgtctggtgcggactttgtccggttcggggcattacccgatatgtcaccaattgccttctggcgtgtgcaagacgcagtcgaaacgatcaggcaagctggtgttcgattaatcaatatgagcggaactctcaatcttcttgggtggatacgtgccaatgatggccatatggttcctcatgaccagttaccagatgaccgtatcacaccggaacacccgctaatgttaatgattcccacgaatttactccgtggtatacgaatagcggcagacacaggatatgaccggcatcgcattagtgacaacaatggtaaatggcatcgagtgatgaggccttcggcagaagatttctttcccaccgagcgtcagagcaagtgctacgcatcaattgatgatcttgaagcgcaacggctgacctgtgtatatgaggggcagggtaatctttgggtaacgctcgaagctccagaaatggaagattggatgctcctcgttgagcttgccaaaatggttcgaacatggattgggcggattggcgaggcactggaggtcttgagtgagcaaccaataaaaaaatcattaaaggtgtatctgcattttgatggtaacgacaatatcggcagatttgatggtgagaatttttctgatgatatgaatacattttggcgacttgaacgaatccatgagcatggggcgattcgtgtggttcttcaagatgggtatcttgcaggttttcgtctaccggataaccgtgcagaacgagctctggtgcgcgcactcggtacggcgtttgccacacttcttcggatgaaagagccagtagacaaaggggtcactgttgagcagatagcggtgcccaatgacagagcgcgcagcttccacataatgcaggcttatgacttcaaccaatatttaggccgttcactaactaaacgtcttttagctattgaagatatcgactcagccgcagcccgaattgagctagcatggcgtgctgtttcgacagatgcaccatcacgatatcagggtaaaaaggaagttggaaagctccttaatgatgtggttgatgtgctgatccaagacttactaagcgaactttcaagatttgaccgtaaacagacagtaatgcgattacttgaaaacgttgtaaaggcacgttgtgaagaggcgcactggcgtagtactgcagcagcggtccttggcttgcatgcaggagaagagggtgtcgaagagacgatagctcaagaaatgagccgttatgcgggcgcagcgttaacttcccggctaatcattgaacttgccatctgtgtgtgcccgacaagcggtggaattgaaccttctgatatggcactcagtaaacttcttgcacgggcatcactgctttttcgcataggtggtatgtcagatgccgtacgtttcggtgctttgcctgctgatattcgcatctcccccttaggtgatctcctctttcgcgatgaactcggcaaaatggtgcttgaaccaatgctttcaaaagttactaacgaacggtttgaggaacaagcggcacaattcgagcaacactatgtgaaaactgccggaggggatgatgagaatagcaaacaagatagtgttgcggctgaaaccaccgaggaccaaaccgatattttccttgcattctggaaagcagaaatgggcttcactctcgaggatggaatgcgatttatccagttccttgagtccatcggaatagagcaagaatcagcaatcttcgagatgcgaagaagccaattagcggatgctgctaaatcggctgggctcgcagatgaaactattgatgcgttcctcaaccagtttatccttagcgcgcgtccgaaatgggatgtagtgcccgatggatttgacctttctgatatatatccctggaggtttggccgacgcctttcagttgctgtacgtcccttgttacagattgaagagagtcacgatccactaattgttatcgcaccaggactcttgaatctgtcccttaaatacgttttcgatggcgcatacactgggcaatttaagcgtgacttctttcgcacagagggtatgagagacacttggttaggtggagcgcgggaaggacacacattcgaaaaaactttggagagagaacttcgtgaaataggctggacagttcgacgtggcataggctttcctgaaattcttcgcaggaatctaccaggtgatccgggggatattgatcttcttgcctggcgctcagaccgcaatcaagttctcgttatcgaatgtaaggacctctcacttgctcgtaattactcagaagttgcctcgcaactatctgaatatcaaggtgatgacataaagggcaaaccagataaactcaagaaacaccttaaacgcgtattactagccaaagaaaacatcgataattttgccaagttcacttcgatagcgaatcccgagattgtatcgtggctcgttttcagtggagcatctcccattgcctatgctcaatccaagattgaggctttggcaggaactaatgttggccgcccaagtgatcttctgaacttttga

SEQ ID NO: 402890 - DNA, 198 bp, Salmonella enterica
atgctcaaaatgatttttttttgcaccgagaggaaaacagacaaaattgctgacatcacggcggtcagcgcgttcaaaaacatatatcccgttttagatttcaaggggtataaaaatcatggcacaaattactcattacggaaggaaaactccgggaggtataaacactttccgaggcacagtgtgccctcaccttag

SEQ ID NO: 402891 - DNA, 1344 bp, Salmonella enterica
atgactacttatgcttcttatttgccagaatcacaaattatcactttgcgcaaggattttccagcgtttactgatcctgaaaaattagatggattcattaatccagaacagtttggcgtgttttttcatgagtggattcattttcttcataatatttccacaattaatggattttctattttttgcacgcaaaacatcctgtggtctaattttcgctgggcaatggacaatcaggatgtatgtcttggttcaaatgacatggatccagcacatatcgaatcaaacaaaaattttctcagttacattcgttccaataggagtctgcatgaatgtaaattaccttattatgcaaaagtaaacgacttgtattttgaggatgcaataatccatgacatggaggttgctgacggtagtgttatatgtacatcattaataaagtgtacaatttctcattctgaaaacaaatacgatctagatttaggcgtgcttgaaatacttgaatccgcagcttttatgcttgaatgtaggtgtattaatgcgatgaatggctcccctcaagaggcacccttttatccgtatcatactatcaaaggcttagcggcgaaaattgctccgtcattaaatgatgaagatattatttgttgtatgttagcttctttgcaatctaataatcctccccaagtattattcaacctaatacataaatgtgaattattacattctgattgtaggtatgaacatctagtggcggaggtgaaaaaacaattaagcgaacaagatcgaacaataagcgagtcacttaatcaaataattcaaatgattcctgttgatgaaccgatgggaaactttatcaagcttactcttaacagaataagtaacaatttgaactatagaaagcaaaaaccgttttttgagttagacataataaaaaaaataacagaaaaaactgagtttatgaatgaagtaatacagaaattcggtggttgcactatcatccaggtaagacatggagatgataatgaaccacagcgtgatattatgtatgacttttgcttacctgaaaataatgattcaattttatttggttcgaaaatgctacgcgcttgttttcactttatatttattcactttaaattttctggtgaaatcataaagacagaagaattaaatatttcaccgcgtaataaatgcccattttatactgtttgctgtgcatcaattcgagctaataatagtaatatctgcgctgaatccccttggaaatcaatgtctattaataacaacgaaggttgttattatgcagcagcgattaaagctactaatccaccagttttgccggattag

SEQ ID NO: 402892 - DNA, 291 bp, Salmonella enterica
atggaactcacaaatcacagcaaaaagatacgcgaagtggaaacagagcttcgcgcccgactcgtatcaatggggcagacaaatttcgcaaagatggcgggatggtctgattcaaaagttagccgcctgaacattcaggatatggcggtgacgttcgtgcttctggagaaggtatgggagacgagcttaatcagggaagtagcaaggcaggcagtggaagctgtgatgccgggaaataaaaaacgcccggcggatattttcgctgagaatcagttaaccatgaatttttaa

SEQ ID NO: 402893 - DNA, 1047 bp, Salmonella enterica
atgtcagcgattgatcaacctgcgcaatatgttatcaagtcagaagacgattttgtatcttttgtaacagaaatgcttggaaggaaggatatcgactcaagcgacttcacattccctagcgtagttttcagtggatggccgaagatcaatattaatgtaaaaggcgatccaaatagatataattcttcattgactgcgtcaatgctttttggtatggcagagcttacgcatgaaatacaaaaagcatttacggtagtcagtcacagcactcataatcggcagaagctaaaagatgcagagaaaggtttgctggatattgtctaccgaataagcgaaggctcaagccaagcggatggtgactcagatccgattgtaaacggagtggtgacagtgttaactcaagcgataggcaaaatgacaggaaggcaagcactatgcgccgtcgccgctatcgtcttagctgccagcacggtaggctataagtggatcaatgagtactacgaaacacagcgacatgaccaagattctcaggtgcaattggtggaaaaaagcaccaaggcggtaaacgaagcacaagacaatgtgctcaagttgttggttagcggtcaaacaaacattagcagagaggttctggctcacggcgaggatggtaaaagcaagttgcttaaaaagcttgctcaagactcgtcagttgagaaggtaacaattggtcagagagtggtaaatagagaacagttgaataccttaaaccaaaggcaatcaattgatcgaaaaaaggaaactagaagagataacttttatgtcacgggcgttcgtcgctcaggagaaacaaatcaggacataaatattgacgtcataagggtttcaaatggtgaatctttcaccataaaaacctcagccgacataacatctactgatgagcttcttgagtttttaaatgctgtagcaaaagaatcaactgttgaaatttcatacctagaggttgtagaaaatgggcacatttcaacagggcaattgataaatatattccccagcgaaccagagtga

SEQ ID NO: 402894 - DNA, 681 bp, Salmonella enterica
atgggaactgcgacactaatcctcggtgagtctggcaccggaaaatctaccagtctgagaaatatcaatccggcagaagcaatcctgattaagccaataggaaaacctctaccattcaaaagtaaagactggaaagcatgggataaaaataaaaaacaaggtagcgtattcacatctgataaatgggatgcacttgtagctgttattaaacgcgcccacgaacatggaaagcgaatagtaatcatagatgacttccagtatgtaatgagcaatgagtttatgcgccgttcagaagagaaatcatttgataagttcactgaaataggccgtcatgcatgggaggttattaaagcggctcaggacgcaccggatgaccttagagtctactttcttgcgcataccgaagaaacgccgatgggtcgtatcaaaatgaaaacgattggaaaaatgcttgatgaaaaaattaccgtcgagggcatgtttactatcgttattcgcacactgactcgcgatgaccagttctttttcactaccaagaataacggttcggacacggtaaaaactcctatggggatgttcgaaacaaacgaaattgataatgaccttgcctttgtggatgcaaaaatttgcgactactacggcattaataacattcatccaattaaggaaaacgccgcatga

SEQ ID NO: 402895 - DNA, 585 bp, Salmonella enterica
atgagtaacgtaattttcacctataacgaagaatctgcactttcagccggacaaggtggatttattaatgagtccggggcttatgtcattacgatttccgaagctgaactgaaacaaaacacagataatcaggcaaggttcattgagttttcaggagaggcggaagacgggcgcaaggttcagtatttaagtatttgttcggttaaaaaagacggtacaccaaataacttcggtgtaaacatgattaatgccatgatggggtgtatcggagttaactcacttacacaacatatggtatcagccagtaagtttatagctcctgaatttaccgggaaacgtattggtctggtgctgcaaaaagttctccgaagcaagaaggacggcagcgacacctacggaatggaaatacgtataccctttattgctgatacccgtcagaccttacaggaacgtaaggacggcttaaagcctgaaacagtggataaaatactatccacgctgaaagaccgcgacaaccgcaataagaatacaggaagccagcacccacctgtatatgatgaacataacgacgatatagatttttaa

SEQ ID NO: 402896 - DNA, 294 bp, Salmonella enterica
atgtcaacacctcttaatagtgcggatgacccgcgccgctgttctggccgcaccaaagaagaggttctggctaagtttgcacggtattacgaagtaaaagaccatttaccaccagagaccagggaggagaaattaacccgatatgcacaagacctttataatctggagatgaaacaacgtatttaccagacctcaatacgaccattccgcaaagcaacatacaccaaattcattgaaatagacccgcgcctgcgcaattaccgctcacgttatgggatgattagcaataactga

SEQ ID NO: 402897 - DNA, 288 bp, Salmonella enterica
atgaaattaaatatcgacctcggtaaatacgtaattaccggaaccaaacacgatcttattctcagcgagaagaagaaagtaactgacgaaaaaagcaaaaattacggtaatgaagtccttgtgcgttgcggttactacagcaagtttgagcatctggttaaagagttatgcaaccgtgaaatcctgttatctcaggcgcagacgctacaggatattcagcagcatatcgaaactttaggtatgtcacttagcatggctattgaccagttcgtggagagtaaatcatga

SEQ ID NO: 402898 - DNA, 165 bp, Salmonella enterica
atgagaggacttgcatacaatcccggcattcttccggcagaaatgattattcgccaacgcgtaaagccaatgccatcgagagaggaattgcttaagagaaattcttttccatcagtgaatcaaaacaaatatctgaatgcgatgttgcggagtgggaagaaatga

SEQ ID NO: 402899 - DNA, 570 bp, Salmonella enterica
atgagcaatattgactatcaggcactgcgtgaaaaggcagagaaagcaacgtggggagactgggactcatataaaccacaccgtggcgcacgtggttatgaggtccgactaagtagtcaggccattgcgcaacacgttctgaaaaacaacgctgaatttattgctgcctttaatccaaagattgctttggcactactggatgaacgggaaaggaaccagcaatacatcaaatcccgcgaccaggagaacgaggaaattgcgctaacggtagggaagctgcgcgttgagctggaagccgcagaagcgctgaataaacacttggagttagcaatccgaaaagctgatggttgtagcgaggcgttaaggagaaaaacagaagccgcagagaagcgcatcgctgaactggaggcgcgggaggttgtgcttccgcaatgctatagcatgttgcatcgcgtcgattttgacgagccttaccacactgaaatggtttacaggcagcatcaggttcttgaggcactgcacaacgctggaataaacgtcaccgaagcatgtaaaggagaggcatcatga

SEQ ID NO: 402900 - DNA, 441 bp, Salmonella enterica
ttgaaaaaacaaaattacccaacactaacaaactatctttctaaaacaaaaaagaacactgatctctacaggttatacaatccacaattttccgttttcgggaaaactgaaaatgaagaacagaatttttacttttgttacttctcccggcatatgatcaccgaaagaaatatcttaaccctcttttcaattcatacctttctctcttacaacgtaagcaagaaagaaacaatcaaatcattcacgcacttcctccggaatgccaacaaagataccttcaacaatgcattccagtttcgcgggtgcaatatcatttatcataacaagaagagagaaattaaagaaatttcatggttttccttttcacggatctatgacgacatagtaaaaataaaagaatatagaacaaacaataatacttacaacaaaattgcagcctaa

SEQ ID NO: 402901 - DNA, 948 bp, Salmonella enterica
atgagtatccataaagaacacggttttttatactgcaagactaaaaaagatgtccaggaatgcattaccgcaggcttcgatattaactctctcatatatgcgggtcgaaatgcactgttcaataaccgtcacactagtgcggttaaagccatgattgaagaaggaatgcgtttagaccatacagatcattacggaaacaatgcgctatttaccaatgactcccctaaaatactcaacctcttaatagattccggaatcaatattcaccatacaaataacaatggggagaattgtcttttcagtcataactttgacaggaaaaacgcagaaacccttattaaggcgggcgttgacattcatcacacagataataatggacaaacgcttctttataagaccttcagtaaggtttactttgattactgggtgaataaaggttgtgatcttaatcacagggataagtatggcaacacggttctggatttgtctggccgtaaaggtcacatatatgattttatcgcaatggcccttactcgtcatcttgataaaattgatactccccctacactttttaaacacttatcgattgagtccttacccttgttggcgttactgcataaaaaaggcattcatttcacggtagatcaacactgtacattttcactttacgtgagagaaatgaaagcattttttgtcgaattaaaatcctatacagatattggtcatgttcaattttacaatatggacaataagcacattggcagctacacggggatcgagacagtaaaatggtttattcgcaacggtatcagaatagacgacgaaatactcatagaacgttctgatgcagataagatctttggttatatcgcggggagagataaaaaagaattattcaaggtgataaaatcagaaattattcaatcacctaaacgaaagaggatttaa

SEQ ID NO: 402902 - DNA, 225 bp, Salmonella enterica
atggcgtccctgcataaactcccgtcagtactacctgaaataaaccgcgaagcctggattgaactcggcaggcttgcgcaagatttaaatcacctgttaacgcatctcgaccataaaagtcctgatagtgaactgacccgtactgaactgtttgccatcaggcgacagataaaagcccttcgtgaacatcttatcccttccactttctggagtgacaataaatga

SEQ ID NO: 402903 - DNA, 1272 bp, Salmonella enterica
atgaaaggcatgcagaaaataaaaagaggtaaacagtttgcaggtgttgttctctacagcctgaaatcaggctctcaccacaaaattgagccttatgtcattggcggtaacatgacgggcagcaacgccaccgaactaatcagtgagtttgatagcgttaaaaaaatgcgccccgatgtcgccaaatctgtctggcacaattcacttcgccttccagaaggagaatcactgacagtcaggcaatggacagcatttgcggatgagtatatggcccggatgggttttaccgacacacatttgcgttgctatatcctccacgacgatttttgtgaccagcacatccacataatagctaatcgcattaacatggccggtggaaagttgtacctggggaaaaatgaaaatctcatcagtacccgtattatcagcgagctggaaatagtgcacggactcacccgaaccacaccagcaaccggcgttcgtcgtcagagtaaaaggaaaccttcccgcaatgaactaatgatggcggaacggacagcagctccctgccctaagtcacagttgcagaccctgatcgataatgcattaacctgccgtcccgatttactcacctttgttcgtttactggaacaggaaggtgtggcctgcaaacctaacattgcgtcgacagggaaaatgaacggtttttcattcctgtatcagggaatagcttttaaagcttctcagcttggaaaacagtatggctggtcaactctgcagaagttgattgagaactccccggagcaattaatgttgctaaagaaaacacgggctcctgcttcagtgccagtgccagtgccagtgccagtgccagtgccagtgccagtgccagtgccagtgccagtgccagtgccagtgccagcaaaacaacttgaagcatcagcagggtacaaggaaactcttcaggaaaaaatccgccagcttgaagtgaaaatacaggaagaaaggcaaactgatacagttccagtcattcaactgaaagcccgactgcacatcaccagtcgccagataacacaagagcgccagaatcgggtaatagcatggcttccttttatccccccatttttggctctgctccaccgttggggccaatccctgctacacgccgttacatgcagcttcagacatttcactcgatttcatctgcttacaccaccctctcatccttccaataaaaatcattataaacaacctgttagtaacaccccttctcacaccccacaaatcaactag

SEQ ID NO: 402904 - DNA, 273 bp, Salmonella enterica
atggataatcaaacgataagttgccccttctgctttacacaaagccctcacggtgtgcggatttgcaaaggctgtcatgcaaaggtcgcttacggtgaaagtccgctcagtgtggcattcctgtttcaattcgtggcattaggtctcgcctggttagtattttcattgaccgaaagcacgctcatctccgtcattacttttttcgtaagctgtattgttcttatctataaaattaaaaaaatgtatgcagacagagttatttttatacgctga

SEQ ID NO: 402905 - DNA, 387 bp, Salmonella enterica
atgaacaggtttataatatttttgtttttaactattaccttcctgctttccggatgttcttccacaggaaaccagagtctcagaaacgaaacatcgcaaagtctgcagtcgaaaatagttaaaaacaaaaccacaaaatcagaaataacttccgcgcttggcgaaccggataccagaaccacgcttgatagtggcaatgaatcctggcgatattttatggtcaacaatcagattaacgcctcttcattcattccgatcgtcggattatttactggtggttcacagtcacaggccagaacgctggatattgattttaaaggggacattgtaagccagtggtcattctccgagaacaacagtaccacccaatcaggccctgtccattaa

SEQ ID NO: 402906 - DNA, 321 bp, Salmonella enterica
atgaaaatttatgccgctatcacactcgttactgctgtctttttcctgagcggctgcaacagcgaaccttcagagcaggatctttataatgccatgaataaagtcgtagagcagacaaatgccatcgttaaatcactggcaggtaaagatgtcccgaaagatgcactgcgggaattaaaatcagtcaaaaaacacgactgtgcaaaaatctcggataaaagctacaaatgcaacgtgacagttgttgtcaatagcgacaaacgcactgcagcgatcacagtggtcaaaacggatgatggctggcagaccattgaaaaatag

SEQ ID NO: 402907 - DNA, 564 bp, Salmonella enterica
atgtcaaataccaatatcatgttaagcagacaacaaaaatccgttatagcaaaagcccttgacgtcagccctgaagaattagaagaaataagtatcaaaaccagcatacacaaaaaaacgtcatttcgtgacgacttctcactggtattcaaaggtaacattgccactctcgcgagaatgaaactgacacccacgtcatttaaaatcgttatctatctgttttcgatcctggattacggtaacattcttattaatttttcacagtccaaaattgcaaaagaactcggactatgtaaatccaatgtttcacgtgcattcagagaattatttgagaagaaaatactgcttcgtgacaccgaacatgaccatgtttacctgaactcaaatctctgtgtaaaaggcattccgcgccgcttcaatgaagagcagatggataagtttaaaaagtctaggatagataccgaggattttgacgatgccttcaatctttaccattcgggcaggaaagtaaagccaaacagaaagcccgtaaccctgtttcctgcggacgacataccattttaa

SEQ ID NO: 402908 - DNA, 231 bp, Salmonella enterica
atggaacaaaaacgcccttcataccttcttacagataaacacgcatcagcgaaaagaaagcagaacgaagaaacagctaaagcattttaccttctcacacacattgccgcgaaaaaaacctgtcaaccgcattatacatctgagttttcagcgtgcaaaaatagtggcgctgaaggaaggcgtacatatcacacccgcccggttctatcgggctatcaatgcattgattga

SEQ ID NO: 402909 - DNA, 309 bp, Salmonella enterica
atgaacataagtgattttgagcagtacgaaggctattgggaaattattgatgataacctttttgacgaaattttttatattgatcgtattgaaaaactggagccaactgaaaaggtcatggaggccattgagttgctgagtcgtttatttactgacgacagaatggaaatgctggaagaagtccgtcaaatgaatatgcttgctcaggctgatatatttgatttgtggtttgatataataaaatcacgggattacgtagaaggagtagcgaaagcagtgatctattatagtattggtatgcctgtgtga

SEQ ID NO: 402910 - DNA, 210 bp, Salmonella enterica
atgaaaaacaatcaaccaacccgccttatccgtcttcctgaagtcctgcagcgtacgggctatggaaaggcctggatttatcgtctgattagcgaaggacggtttcctgcaccagtaaagattggcgcccgcgcagtggcttttgtcgagagtgagatagacgagtggattgatgcggtcattaacagttcaagatctcatgtagcgtaa

SEQ ID NO: 402911 - DNA, 852 bp, Salmonella enterica
atgaaaaactggtcgcgagagcacaatcaggagatcagaacctggtttgatatcgataactaccgggcactggaaaattgtactctttatgctctttactacgaactttgggcgagggttctgctttacaagcctgggccgagtgatgaggagaagaaggggctgtggcagtatatggtcaaaattttcgatggaaggcctctccttttcgatgaaacgtcactggatttcgaggcggattatgactgcctctacaaccctcctcatgtgttcttgacggatatcaccagactggcgcagctcggcgtttctgcactgtcagcagagctctttacatgggatggcggagatgtttacggcgttaacttaccgcaccatcaggcctatgtgtctgaggtgatggcgccgttatgtgaaaataccgtaatgctagaaattgatctcgcgagtggcacagatgatgagataaccgcctccataaaatcggtactccctcaatggcgaaagattaagaatgtcacgatagatcaatccggtgtggttaggtttgggtatgggacaatcaaaaaaatcatcagctatcgcttggtggcaatgctggatatcttactttgggcaaaaagacacgaagtgagaatttcagatgatcgtctttcccgccttttgtataccgacgacgatgatgaatctgtcgttcgtcagcagaaccatataaaagactccgatcgaccccttgcgatgaaagcagccacaatcgactttatcaagcagttcaatctgttcattaaccgtaacgctcacattaaaaatatgagagtttcggacgtgatgaaactcgcggattctggctga

SEQ ID NO: 402912 - DNA, 1275 bp, Salmonella enterica
atgaaccggcagccatttacttcatcagcacttaaacgtaatttaagcgaaagtgagaaagcctattattttagcaaaggaaatagcgaaaaattagaatcattaattaacgatgcagtattaattgccaatgaaaattttcgttctggagtcagtgtcaaaaaattaaacatcaaggggcgttgtgtttattccgcatcgaatttaaaagaaaaattaatactgaggcattgcaattccaatctgaagtgtctggaatcacttttgcctaaacaaagaaataaaataattgatgaattgaagctttatcttagagaaggcacacagtttagggtttatcggctagatataaagtctttttttgagtccatccagttgccccagctttttaaatatatgcatgatgagtcgagactatccaggcatactaaaaacctgctagaatggtatcttaaagcttgtgagcgtattcatgccacacaaggcttacctagagggcttgaaattagtccaatgctatctgaattatatttgtcagagtttgatcgcaatatcaatcgacatccagaagtattttattactccaggtttgtagatgacatggtgattatttcaagtgggaatgaagaccaaaagacctttatgaaacaggtagtggatttccttcctaacggtttgaaactaaataaaaacaagctaaacatatcccctttaattcctaaaagaagtaaaggggataataataatgataaattactccataaatttgatttccttggttattcttttgcagttatagatacaccattagcaaagaatacagtaaacatcatatatagaaagataattattgacctatcaagcggtcgattgaaaaaaataaaaacaagaatatcaagagccttttatgcatttaagaataatggtgattataagctattactagacaggatttcttttctaactagcaatagagatttaaacagaaaaattaaatcactgagttcaactgagaagaccaaaattagcaccggaatatattatagcaacgctcggcttgacgaaaactccaagacactaaagcaactggataactttttaatttattgtgtaatgtcaaatagagggcgtttgaatagtgttgccaagcattctttaagtataaaccaaagaaaggaattattgcgaaataattttacgaaaggtttttctgcaagaatttataggaaatataattttcaacgttatacagagattactaaaatatggctctaa

SEQ ID NO: 402913 - DNA, 360 bp, Salmonella enterica
atggtgatcgtcatccttgattccgagaaatgctttcgcttcctgcatcgcctgatgcaggttaattccacgacatgccatccacaaatcaagcatgtcaccgccgtctccctcagcgaaatcagcccattttttcttgccgctaaggttgaccttaaggctgtttcccttgtcaccgttgacgttaccggcaacccactcatgcccctctttcttgccgtttggcaacaggtgcggagccaccctgtcaacctgcgcccaaagcaggtcgctgagttcacttggcgtcatgattccctcagattgagatttttaaaccagaaatcgacaaacgaaatacttaaccagccgtggttataa

SEQ ID NO: 402914 - DNA, 411 bp, Salmonella enterica
atgccatttgctcgttatttctgcattttcataaacgttggtttgggagaagcggcaaaacggaatgtaggaacaggggaaaatcagataccggacatgacctcttttgccagtggtgatggatggatgaaattacccaacgggaaaatcctgcaatatggtcgtggtgcgattacgccgacattatcgacgcaaacaatgagaattacattcagcatcccttttcctaaaaaagtggactgcgccatgcttacccattctggtgatggtggtgcgcctttaggcgctggacggggattcgtgatgactgcagaaggtccaacactaaccggttttaattccgcttacagaactgcatcaaccagctcaacagtatcgatgaattacagttggtgggctgttggtgagtaa

SEQ ID NO: 402915 - DNA, 216 bp, Salmonella enterica
atgaccagcaaacgccgtctcagacgcaagcagtgcggatgtaaaaaaagacataagactgctgacggtgcgcagatagaactctggattattcgtaaacgttacggacatcaggggcagatgggcgtttaccgctgcccgttctgcaataactatcacgtcgggcatacgccagggcgtaacggcatcggttcaggttatggaaggtggagatga

SEQ ID NO: 402916 - DNA, 591 bp, Salmonella enterica
atgagcaaaaaaattgagaaccctgtcgtgcttatctataagcgcgagaacagtgactcctacgccgtggcgatcaccagtggcagccaggactatcgcgatgctgttctgatggcggcgatggaaccggacatgaccggcgataacgtcgatacctggagcaaaaccggctattacatggcggcagagattgagcatctacgcgaaaaaatgaaaatggcggaagaaaaacatcttcactttctgggtgttgttgacgattacgactggcaacgtcagcgtctccacgcagccgctgagaaggtcatcaaatggtgccggcaagaagctgaacatcgtaccggtgatcctgataatgcagaaaactacgcgtgcgttaaagaactacgcgacgcattaactttttgcgaaaactccggagttatcgagaggaaaagactgaccatcatcatgccagatatcagctcaaaagcgttctggagcggcacaggcaaaaacgaggtattccacccggaaacctataaacgccaggtgaaagaagcgatcgagcggagttgtgttatcgccgggatcggcgtggaggtgaagtaa

SEQ ID NO: 402917 - DNA, 189 bp, Salmonella enterica
atggcaactcattcagaaaaagcaaatttataccctacgcataaatgctcattttgcggaaagacgaatgttgaagttgctggcgttcttgtcgtcgggcctggtgtttctatctgccagaaatgggtctttcagtgcgtcgatattgtctttaaatacgcagaaaagacgaacgctccaacgcattaa

SEQ ID NO: 402918 - DNA, 450 bp, Salmonella enterica
atgagaatcagtgaaaagggtgtttccctgattaaagagtttgaaggctgtagcctgactgcttatccggacccgggaacggggggagatccctggacgattggttatggctggacccactctgttgacggtaagccagttaagcccggaatgatgattgacgaggctactgccgagcgcttgcttaaaactggtttagtcggttacgaaagtgatgtgtccagactggttaaggtcaggctgacgcagggccagttcgatgcgctggtatcgttcgcgtacaaccttggcgcccggacattatccacatcaactctgctgcggaagctaaacgctggtgattacgctggcgccgctggtgagttcctgcgctggaataaggctggtggcaaagtcctgaacgggcttactcgtcggcgtgaggcggagcgtgctctgttcctgtcatga

SEQ ID NO: 402919 - DNA, 318 bp, Salmonella enterica
atggatataattcttccgggaaacaaaagccaggcacgagtctgggcagaaaccatgattaatctggaggcccgcaaactcgtcgataccgctaatattgttggcgcccgacatctgggggatggattgacgcgtctcaaattcatcgatgaaattaaatctatcattaatggcgaatttgagcgtgcccggcgggcaaagtctgacgaagagtgcatgacctgcctgcgtaacctgcagggcgaaaacaccagtctgcttgagcagagccgtcagatccagaccggttatgcgaaactatatgcccagatcaaatag

SEQ ID NO: 402920 - DNA, 279 bp, Salmonella enterica; identical to SEQ ID NO: 134484

SEQ ID NO: 402921 - DNA, 486 bp, Salmonella enterica; identical to SEQ ID NO: 119601

SEQ ID NO: 402922 - DNA, 519 bp, Salmonella enterica
atgcttgtgaccatgtcagataaagaactcagccggatcaacgtcattcagtcagttgttgataaacgcatgcgccgtcgtgatgctgctcatcagcttgctctgaccgaacgtcagacacagcggttaatgaaccgttttcgtgagtctggtgccgcaggtctggcaaaccttcggcgtggacaccccggtaatcacaggcttcctgagtcactgaagctgcgtgtactttctttacttcacgataactacagcgactttggaccaacgcttgccgcaggaaaattgcgcgaacgccataacatcacggtgtctgttgaaacgctcagaaaatggatgacggctgaggactctgggtcccatactcacgtcgcaggccacgtgttcatcaacccagataccggcgtgactgcctcggagaacttgttcagatcgatggttccccgcatgactggtttgaaggacgtgcccccaaatgctgcctgctcgtctttattgatgacgcgactggtcgcctga

SEQ ID NO: 402923 - DNA, 441 bp, Salmonella enterica
atgcaccttcgctttggtgagactgaatcagcctttgattacatgatggccacccgcgagtatctcgagcaacacggcaagccccttgcgttctacagcgacaagcacggcattttcagggtcaataatggtggttcaaccacaaccggtgttacccagtttggccgcgtgctttctgaactggggatcgaactgatttgtgccaacagtccgcaggctaaaggccgcgtagagcgagcaaatcagacacttcaggatcggcttatcaaggatatgtgtctcgagggaatcagcagtattgaagcagccaacgcctggctggataccttcattgccgacttcaatcgtcgcttcgcaagaccagcaaaataccccaaagatctgcaccgaaccgtggctgaaagcaacgaagagctggatgatatctttgcctggcagtaa

SEQ ID NO: 402924 - DNA, 357 bp, Salmonella enterica
atgatatatctggttgaacctagtgaagaaaatactcgcatcgctggcgaaaaaataacagtcttcgactatccggacggcacgctggcattcaaatacggttaccgttcactcaaatatcaggtgttcgacaaactggaatgtgtcgaccaggggcaaatcgttgataacaagcgtcttggggctgttctgaaactcgctcaggacaagatggacgaactggagcgggacgggaaacgggaccgtagcaagaagatgcctaaaaggcgggcacaggcccgggtgcaggaacaagtaagagctatcaatccggtgctggcaaacccagcggaattcagggccagcctgaaacgttag

SEQ ID NO: 402925 - DNA, 264 bp, Salmonella enterica; identical to SEQ ID NO: 101375

SEQ ID NO: 402926 - DNA, 570 bp, Salmonella enterica; identical to SEQ ID NO: 121264

SEQ ID NO: 402927 - DNA, 2850 bp, Salmonella enterica
atggccagaaaacaatgccaggtctgcggccaacccgccaccgtgcgggtagaagccaatctcaacggtcgtaacagcaccatgctgttgtgcgacgaccattaccggcaattagtgcgccagcaaaagcgcaccgtttcgccgctggaagccttgttcggctcgcgcagcggcctgttcgaggacttcctcggcagtgacttcttccgcatcggcgaagacgcgacgccagttgccgccgataccgatgacgtggtcgatgcctcgtttggcgagcccgccaccgcaggttcgggtgcgccgcgccgtcgcggcagtgggttggccagccgcatcagcgaacagtcggaagccttgctgcaggaggccgccaaacacgctgccgaatttggccgctccgaggtggataccgaacatctgctgctggcgctggccgacagcgacgtggtcaagaccatcctgggtcagttcaagatcaaggtcgatgacctcaagcggcagatcgagtctgaggccaagcgcggggacaagcccttcgagggcgagatcggcgtgtcgccgcgcgtgaaggatgcgctcagccgcgccttcgtggcctccaatgaactcggccattcttatgtcggtccagagcatttcctgatcggtctggccgaggaaggcgaagggctggccgccaacctgctgcgccgctacggcctgacgccgcaggcgctgcgccaacaggtcagcaaggtggtcggcaagggcgccgaggatggccgcgctgagacgccgaccaacacgccagaactcgacaagtactcgcgcgacctgaccaagatggcgcgcgacggcaagctcgacccggtgatcggccgcgcgcaggagatcgaaaccaccatcgaggtgctggcccggcgcaagaagaacaacccggtgctgatcggcgagccgggtgtgggcaagaccgccatcgtcgaagggctggcgcagcgcatggtggcgggtgaagtgcccgagaccttgcgcgacaagcgcctggtggaactcaacatcaacgccatggtggccggcgccaaatatcgcggcgagttcgaggagcgcgtgcagaaggtgctgaaggaggtgaccgagcaccagggcgagctgattttgttcatcgacgaggtgcacaccatcgtcggtgccggccagggcggtggcgaaggcgggctggacgtggccaacgtgttcaaaccgatgatggcgcgcggtgaactcaacctgatcggcgccacgacgctgaacgagtaccagaaatacatcgagaaggatgccgcactggagcggcgcttccagccggtgacggtgcccgagccgacggtggcccagaccatcatgattctgcgcggcctgcgcgacaccttcgaggcgcaccacaaggtcagcatctccgaggacgcgatcatcgcggcggccgagttgtccgaccgctacatcacggcgcgcttcctgccggacaaggcgatcgacctgctcgaccaggcggccgcgcgcgtgaagctgtcggccacggcccggccggtggccgtgcaggagctggagtccgaactgcaccagctacggcgtgaacaggattacgtggccgcgcgcaagcagtacgaccaggccgccgagctcggcaagcgcatcgaagccaaggaggccgagctcaagaagctcgtcgaggactgggagcgggagcgggcctccggcagtgccgaggtcaaggcggaacacgtggcgcaggttgtctcgcgcctgaccggcatcccggtcaacgagttgacggtggaagagcgcgaaaagctgctgcacttggaacaacggctgcacgagcgcctggtgggacaagacgaggcggtccgtgccgtggccgatgccgtgcggctatcccgcgccggcctgcgcgaaggcagtaaaccggtggctaccttcctgtttctgggcccgaccggggtgggcaagaccgagctcgccaaggcattggccgaatcgatctacggcgatgagcacgccctgttgcgcatcgacatgtcggaatatggcgaacgccataccgtggcgcggctggtgggcgcgcctccgggctatgtcggttacgacgaaggcggtcagctcaccgagaaggtgcggcgcaagccctacagcgtgctgctgctcgacgagatcgagaaggcacaccctgacgtctacaacatcctgctgcaagtgttcgacgacggtcgcctcaccgacggcaagggccgggtggtggatttcaccaacaccatcatcatcgccacgtccaacctgggttcggacatcatccagcgacggctgaaggcgcgtgaggcggctggcgaggagtacgaaaagaccaaggccgaggtcatggacgtgctgcgcggccacttccggcccgagttcctcaaccgcatcgacgagatcatcgtcttccatgcgctgggccaggaggagatccgccacatcgtcggcctgcagctcgatcgcgtggcgcgcagcgccgccagccagggcgtgacgctcactttcgatcagacgctgatcgaccatttcgcggaagaaggctacaagcccgagttcggtgcgcgtgaactcaagcgcctgatccgcagcgagctggaaactgcgctggcgcgcgagatgctcggtggcggcatcggcaagggcgatcacgccagcgcacgctgggacgacaaggccgaacgcgtggtgttcgaacgcaaagagccaccgcagaccccggccgagccggagcagccggatgtcgcgaaggcgaccgagacgccgcacggcgacgctggcaaagactcgagcaagaagaagtcggcgagcgacgcatcttga

SEQ ID NO: 402928 - DNA, 171 bp, Salmonella enterica; identical to SEQ ID NO: 185740

SEQ ID NO: 402929 - DNA, 594 bp, Salmonella enterica
gtgacggtgcggcccgtctgttcacctgatcctctggcaactcgactttcgaggaacacggtccatggaaaaaagaatcaatggaataccggctactggatcgttgccctcctgctgttgctgagtttgcagagctactggcagacggcgaaaaccgtcgagccggtgccctacagcgagttcgagaaggcgctggacgaggggcgcgtggccgaagtgctggtgtcggatcgtacggtgaccgggcgcctgaagtcgccggacagccggggcaagacgacgatcgtggcaacgagggtcgaacccgatcttgccgatcgcctgtcgaagtacgacgtaccctatgcccgcgtgttggagagcacctggctgagcgatgtgctgtcgtggatcctgccagcggtatccttctttggcgtctggttcttcctgttccgccgcttcgccgagaagcagggcatgggcgggtttctcaacatcggtaagagccgcgccaaggtgttcgtggaaaagaacaccggtgtgacgttcgccgatgtggcggggggggggatgaggccatggcggagctggtcgcgatcgtcgatttcctga

SEQ ID NO: 402930 - DNA, 192 bp, Salmonella enterica
atggcggagctggtcgcgatcgtcgatttcctgaagaatccgcaggactatggccgtctcggggcgcgcattcccaagggcgtgttgctggtcggcccaccgggcaccggcaagacattgctggccaaggctgttgccgggtggccgaatcgacccaggcgcgcatcgatcaggctatccgcgacatcgtga

SEQ ID NO: 402931 - DNA, 192 bp, Salmonella enterica; identical to SEQ ID NO: 121260

SEQ ID NO: 402932 - DNA, 1377 bp, Salmonella enterica
atgtctgcattgactccgtgggaccccttccgggaactggatgaattgcaaaaccgcctggcgacgatgttcggacgaataccccagcgacagggcgcccgtaccggcaacgaagccaagaccacggcggactgggctctaatggcggacatcagcgaggatgagaacgcattcctcctcaagctggatctgccggaggtccccagggatgccgtgcgcgtcagcgcggaaaacggtgtgctcaccatcagcggcgagcgcaaacaagagtttcatgaaccttggcagagagctttgggaaatgtgatcgagcacgccctcaagccattgctcgacaaacacactaaagattcagcgcgacttcaaatcgtccttgatcgcgacaagatcaagcggcaatttctggccagtggctatatgcacctgcccggcaaaaagattgtcagcgttactgcatcacatgacgagctgacgcccctcgcgcagatgctcgcacagtcgttgttccgtcaggccaagaagcattttgaccgactgcatgctcaggatcaaatcaagcgcaaagcacgacgcgagcgcttgcgcgagctcaaggtgcggattgccgcaaaacccgcatcagccgcccatgaggccgaggtgacccgaatgcctctactgtcgaaacttgaggctgtcgcaaggcgtgagctggcttatctgcgggccgtcggcgatttaccgcgcgattatccgacgctgcgcgacgtggtggatgaagcgattgtccgagctaaggtggaatggcaatccgtgccgggggaaaaagaggcttacaccggtcttttgaagcatctgttcgccgtcctggataacgaagtggcaagcagccggcaatttggcgaattcgtttctctggacgcgccggtcgaaccggatgcccaagacgtggccgaggccatggtggaagaggaaatcttcgaattttatcagcacgatgacacactcaagctggccgatattttcgctggcagtcagcatcccgatgtcgcaacgatcgcggaacaggaggagctgattgatcggtcgagcgagttcgcttttgcatttgacctgctgaaggacatgccgcgtttgtggcggcgcatttttctgcttatccgtgtggacgggctgaatgccagcagcgtctctgaaatcctgctgattcctagtaaggaagatgctgtccgaaggtggctcatgcaggccgaagcattcatcgctgctcatctggaagaggccggagtaagcaaaaacgggaacgattggctccaaggcgttgattggtcggcattgtctgtgacccgaagcgaggcagcctcactgtggtccaaggaggcgaaccatgaagaatga

SEQ ID NO: 402933 - DNA, 441 bp, Salmonella enterica
atgaagaatgatcttcacctcgtctgcccacattgccagtccatcaaccgcgtaccgactgcgaagctatcggaacatcccaactgtggccgctgccagcagcccttgtttacgggcgagcccatcgagttgaccacggcgacgttctcgcgccacgtggagcgcagcgatctgccgctgctggtcgatttctgggcgccatggtgcgggccgtgcaagatgatggcgccacagttccagcaagcggcgcaccagctcgaaccgaggatccggctggcgaaggtgaataccgaggctgagccccacctggccgcgcagttcggtatccgcagcatcccgacgctcgccctgttccagggtgggcgggagatcgcccgtcaggccggcgcgatgggcgcgcaggacatcgtgcgctggacgtcgacgcaagtggggcgctga

SEQ ID NO: 402934 - DNA, 1710 bp, Salmonella enterica
atgcagggcttgctcggcactacgctaatcctgctggcggcttgcagcctggcggcgatggccacggcggcgttcagagtgcccgccttgctggggtatctctctgtcggcgttgtactgggcccctcagtcatcggcgtgatcgcgccgggggagacgctgagctttctgtccgagctgggcgtggcgctgctgttgttcatggtcggactggaattctccctcggagacttctggctcgcccgcaggacggtgctgatggcgggcgctctgcagatgatcgccgtggccccgccgctgatcctgctattgatgtggctggggcagcccggccagagcgccgcgctgctcggcactgcggcggccatgtcgtccacggcgctggtcagccgacaactggccgaccaaggcgagctcaccacccgccacggacgcagtgccatcgccgtgctggtctttcaggacctggccagcgtgcccctgctggccttgctggcgatctgggcgcgcggcgagtcgccgaagatcgagcatgtgctgctcgaagtattcggtgtgctgctgctgttcgcggcagcggccctcgtctcgcgccgtctgttgcatggcctgctgggctgggtggcgcggcggggccacgaggaatcgttcgtgctcgtctccttgtgcgtggtggtggctgccgccgctgctgcgcacgcggtcggcgtatccgccgccctgggggccttcctcgccgggatggtgctgggcgagagcgacttccggcaccacatggaaagccacctcaggccgtttcgcgatgtgttgtcgggcgtgttcttcgtgaccatcggcctgcaactggacgcagcacagattctttcggcaccgctggcggtgctggcgtggctggtggtgctggtaccggtcaagatcctgctcaatacgctggccttgcgggcgacgcgcctgtccgccctcgatgcctggcgcacgggcatagcgttggggcacggcggcgagttcgccctgctgttgttgggcacggtcttgcagcagcatctgatccccgcgaccgtcgtccaacccatgctggtcgcgctggtgctcagcatggccctggcaccgctactgatccgccatcacgatgtacttgcccggttcttgagccgcaccggcggcgtcattcagccaccccaggctgaagaagtcgagatcgccgcgcagacgacgcgatatcgagaccatgtcatcgtttgcggcgcgggcgagcttggcctgacagtcagcgagattcttcgccacgccggcgtggcgcatctgctgctggaggcggacgcgcagaaggtagaggccgcgcgtgccgccggcgcgccggtgttccatggcgatgccagtcggcccgataccttgctggctgccggcttgacgcatgcgcacttggtggtgctaacgttcgcccatgcccagcaagcgttgcgcatcgcccaggcgattgccgagcgccgtccggcgctaaccttgtgggtgtcatgcagaagtacgaccgcggccgatgcatttcgcgccatgcctaacgtgcgcgtgtatcagcaatcctttgccgcagctattgggctggcggaacaggtgatgtcgacgcttggcatgtcgaccgagttgattgaaggacacatcagcgcaatgcgccgccgtctcgacagcagccgttttccagggagttcatag

SEQ ID NO: 402935 - DNA, 498 bp, Salmonella enterica
atgaaatcaaaacgccttaacccatttcaggtcttgcgtgaccaattggccatcatgagtttttacgagcgcttcgagcaggtcgtcgcgctcgtgctgtcggcggtgatcgccgtcatcatcatggtgtcgctgttccagctcatctccatcgtcttcacgctgctggttctcgatgccttcaatcccctggaccacaaggtattccagagcgtgttcggcatgatcatgacgctcttgatcgcgatggagttcaagcattccatcgtgcgcgtggcgctgcgtcgggacagcatcatccaggttaagacggtggtcctgatcgcggtgatcgcactctcccgcaagttcgtcatcctcgactccgacgcgagccccgcaaagatagccgcgctggcaggcgccacgctggctctgggtgcgacctactggctgctgcgcaagcgcggcgaccgcgccgccgagacctctgagcatgacccgtcatcatccgagtga

SEQ ID NO: 402936 - DNA, 966 bp, Salmonella enterica
atgacccgtcatcatccgagtgatccgcgcactgcgctcttgcaacaccgctggctcaaccgcctgcagaccgggctgttggtcctgaccctggtcgggatcgcagccgcagcagggagactgccatttggggaaggctgcctgtggctcgcgctgtttgccgttgcaggtgcgttgctgctggaaccggtagccgcgtcggcgctgagcttgcgcctgtaccgcgtacgggccttgcacccgcaacaagcccacgagatgtgggccctgttgcgcgagctgcccgcccgtgccggtttgcccgccacgccggtgccgcactatgtgcccagtgccgtcgtcaacgccttcgccaccggatcgaagcaggaggcatcgatcgccctcaccgatggcctgctgcgcagcctgagcccacgcgagctggcgggtgtgttcgcgcacgaggtcgcgcacatcgctaatgaggatctgcgtgtcatggggctggcggattccgtcagtcgcctcacgtgcctactggcccttatgggacagatcgcgatcctgctcagcctgcccgcgctgctggttggcgcggcggaggtctattggcctggtctattgttattggccgcatcgccccaactggccctgctcgcacagctcggcttgtctcgcgtgcgtgagttcgacgctgaccgccttgcggcggaactgactggcgacccgcaggggctggcgtccgcgctggcgaaaatcgagcgggtcagccgctcctggcgtgcctggctatggccgggatggggcaatcccgagccctcctgcttgcgcacgcgtccggcaacgcaagagcgcatcgcacacctgctgacgttggcgcctgggccagcatcagcgttgccactccgcgcgccccattttttgccggaatccgctttggcgacgcgcccaccgcgctggcgcccgagcgggctgtggcgctga

SEQ ID NO: 402937 - DNA, 1152 bp, Salmonella enterica
atggcctatctcgacccgtaccaacgccccgcgccggaccgcttcgtccggcgctggctcttcatcaccgcctgtattgccgcgctcatgctgctgtggcagtttctgcccgccatcgaggcctggttcagtccgcgcgaggcagcagaacgcaccgtgatggcgcgtggcgatctggcggcggacgagaaaaccaccatcgaactgttcgaaaaatcgcgcgcctcggtggtctatatcaccatcgcgcaattagtacgcgatgtctggacgcgcaacgtgttctccgtgccgcgcggcactggctcgggcttcatctgggacgacgccggccacgtcgtcaccaacttccacgtcatccagggcgcgtccgaagccaccgtcaaactggccgacggccgcgactaccaggccgcgctggtggggacgagccccgcgcacgacatcgccgtgctcaagatcggcgtcggtttcaagcgcccgccggccgtgccggtcggcaccagtgccgacctcaaggtgggtcagaaggtgtttgctatcggcaaccccttcggcctggactggacgctcaccactggtatcgtctccgcgctcgaccgctcgttgccgggagaagcgggcggcccggccatcgatcacctgatccagaccgacgccgccatcaaccccggcaattccggtggcccgctgctcgattcggctgggcggctgatcggcatcaataccgccatctacagtccgtctggcgcctcggccggcataggctttgcggtgccggtcgataccgtcatgcgcgtggtgccgcaactcataaagaccggcaagtacatccgtccggcgctgggcatcgaggtggatgagcagctcaacacgcgtctgcaggcgctgaccggcagtaagggcgtattcgtattgcgcgtgacgccgggctcggcggcgcacagggccgggctcgtcggcgtcgaggtcaccgcaggcggcatcgtgcccggcgatcgcgttatcagcatcgacggtatcgccgttgacgacgtcaccacattacaggcccggctagacgacaagaacgttggagatgttgtggtcttgttagtggagcgggccggcaagactcgcgagatgcttgtggaactacaaccgggagtttga

SEQ ID NO: 402938 - DNA, 390 bp, Salmonella enterica
gtggcggatgtcacccaggtcgacaaactgctgcacggcgacgagaacgtcgtctgcgccgatgacggctacacaggcgtcgaaaagcgctccgagcatgccgaccgagaagtgatctggcaggtcgcagcacgccgcagcacctacaagatgctcgataaacgcagcgccctgtacaaagccaagcgcaagatcgagaaggccaaggagcaagtgcgagcgaaggtagagcccccgtttcgcgtgatcaagcggcagttcggctacaccaaggtacgtttccgagggctggtgaagaacactgcacaactggtgacgctgtttgccctgtcgaacctatggatggcccgccgacatttgctggcaagcgcaggagaggtgcgcctgtaa

SEQ ID NO: 402939 - DNA, 996 bp, Salmonella enterica
atgtttccagtcggcattgacgtaagtaaaaacaccctggatctttgcatgctttatgacggtatcaaaggacgcataaaaacccgtaacatccagaataacagacattcagttgaaaatattcttcgctggctcaggcttcagcactgcggtccggaagatgttcatgtggtaatggaagctaccggtgtttatcacgaacagctggccactgagttacatgatgccggtttccgggtttctctggccaaccctcaccgtagtcgggagtttgcgcgtggcatgggaatcatgacaaaaacggataaggtggatgcgtatatgctggcctgttacgcattccttaagaagccacaccgctgggagccgccggcacccgaaatcagatatctcggtgcactcctgcgacggcgggatgttctgctgggtgatgccctgcgtgaggagaacaggctggaaaaatacctgtcgacagacacacctgcagatattatcagttcctgcaggcgtatggcgcagcttctgcgcgaggaggtaagtaatatcgagcggcagataaaagcacatatcaaagccagccctgcactgaggcgtgattatacactgctgagctcaattaaatcggttggtccccagcaggggatgcatatgctggtcgtgcttcgcagccataactttgtatcggctgagcaggctgccgcctttctgggcgtggtgccgatcgagaaacgctcaggcacatcggtccggcgccgaccgcggatgtcgaaaatcggcccccctcagttgagagcgaagctttacatgtccgccctgtgcggaaaaatctacaataagcgaatgcgtaatatttacgatgagatgtgcctgcggggtaaacctaaaatggtggccattggcgcgctgatgcggaaactggtgcactggtgttatggcgtcctgaagaccggaaccgtttttaatgacgaaagcctgaaaccggtactgtcaacctga

SEQ ID NO: 402940 - DNA, 324 bp, Salmonella enterica
atggcgcttaagaaagttaacagctttagcaaaaaaactgaaaatcataccaaacaaaagattcaaatattaattactgtcataacgttaaaaagtagcggatgcattcctccgctacttaacttacactcaaggagcgattatattgaatattttcaaagcctgtgggggcatcaatgtccgctcttcgctcataacggactgcgctcacttattgcagtgagcgttaccttgtgtttaatgccagcctggtatagtcaggttgacagtaccggtttcaggctttcgtcattaaaaacggttccggtcttcaggacgccataa

SEQ ID NO: 402941 - DNA, 1995 bp, Salmonella enterica
ttgtctacgggcgtggggtcagtccaattcgctagagcaactggccaaaagattattggcgaagctaaagcacacagcaaaagcatgagtggacaaacagttgctgcgttcgttggaaagcttttgccgctaggtcttctggaaaagaaggtgcatggattgtttctgtcattatcaccattaacaccggaggcggaagattattttcgaactgtcgaaaatatggggttaacgacaaaggtaggaaaggaactttataaccaaataactgcgactttgcatttgccgactgaagaatttctatacagggaaattaaaggttatgaccttgtggccccaaatattctcaagactgatacagggttgtataagttatttattttaaaagaggtgaattcaggaacgccatcaaattttgtggtattcaataaaagtggcagccaaattgatgatgaaagatttttggaagatttaaaaataggggtttcagaacttgctggtttggatttcattatgcctagcaagaaaaaaatagttgacgaaacgcctcaggtaaagcgtgaaatagttcgaggattaactgttgggactgaatgggctgactataggctacctgcagggccaactgtgttcgttggcaggaatgaattcataggtgaacttctttctcacatcaaacataatgagctaccacatgttcttcagataaaaagtcgctctggagtaggaaaaagctcccttgtatcctttttagaaaacaagctctcaatggatggagttattactgaattacatgactcaagagatgtaaaaacaatatatgatgttttttatcttgttcagaggtttacccaaagcagcattattgcgactaattttatagagcttgatgaacaactgaaaaacttgcagctttcactaaatggccaaaaggcagttttctttgttgaccaatttgaatctacattttcgaatcctgacatattcgattgctatgaatacattgcgaactcaataacaaagcttcgtggtggcgtatacatagtgtttgcgcgtaaaaatgatcagctaacaacctatgacaacagtaaagtttctcttaatagaattaatcagctatcgaaaagctttactcttccggattttgaaaacaaagaatcaatacttcttttagaaaaaataaatgaaaataactccaatattctcagcaaagaaatactaccctatattattgaatttgcgcagggttttccttggcttttaaaaagaacgatagctcatgttttaaaactcactcgaaaaggtgactctcagagggacttaatcagtgcgggcttaaaactgaacgacctttttgaagaagagcttgaaggtttggatgaaattgaaaaagattatctagttaagattgcagccaagctaccagcaggtttcaatgaacttcaataccaatttgacgaagacccaatgcttgtaaaagtcctcgataagttaacagcttacagattggtacgcttgagtggttctacttatgatacttataacgatgttttcaaagaatatcttgtataccaaaagcttcccgagtttagactgctagttatttatagaatgtatccaagttctgttatatctcagtttcataaactgataacaatgagaaagctgacaattacaaaaataacagaaaacctaaatgtaagggaaggttacgcatttaatctcgtgaaggaattgcggaatttagacttgcttgatgcagttaaaagtggtgaatggataattccaacaaatgtaagagatatatattctcaaggtactcttgctggttatctacgccgaaagattttagacaatcaactcgtcgagactttacttaaaaaaatctttctggagaaaaaattttcgagagcgatatacccacgtatttttccgaatcttatccttttattgaggcatcagagaaaacatggggattatactctacgattttaa

SEQ ID NO: 402942 - DNA, 294 bp, Salmonella enterica; identical to SEQ ID NO: 155983

SEQ ID NO: 402943 - DNA, 990 bp, Salmonella enterica
atgacacagatgcctgatgatgatcctgacctgtccatgtcgccggcggtcataccacctgatggggatttcctgccggcgctgacaggcggcgagggtccggtcagtcccgcccgggcgtacctgctttccctgaattccccccgcagccggcagaccatggcctcgttccttagcatcgtcgcggacatgctcggttcagcttccatggatgcctgcagctggggcagcctgcggcgtcatcacgtgatggctgtgaccgagctgctgcgcgatagcgggcgggccacggccaccgtcaacacctacctttcggcactcaagggcgtggcgaaggaagcctggatgctcaggctgatggacgtggaaagcttccagcacatccgggcggtgcgcaacctgcgcggcagccgtctcccccgcggccgggccctactgccggaggagatcctagcgctgttcagtacctgcgaggatgatggctccagtatcggcctccgggatgcggcgatgctgggtgtcattcttggctgcggcctgcgccggtcggaggccgtggggctggatttgagtgacgttgtcaccactgagcgagcactcagggtgctgggtaaggggaacaaggaacggctggcctatatgccggcgggcacctggcagcggctaaagctgtggatcgatgaagtgcgcggagaaaaagacgggccgctgtttacccgtatccgtcgctttgacaccctgacgaatgaccgtctcaccgaccaggcagtgtaccatgtcctgcaggtgcgccagcgccaggcaggaatagcgaaatgcgccccgcacgatttaaggcgtacttttgccacggccatgctggataatggggaagacctgattacggtgaaggatgcgatgggtcatgccagcgtcaccaccacccagcagtacgatcgccgcggcgaggcgcgcctgcgaacggcgcgcgaccgtctggatctgatatga

SEQ ID NO: 402944 - DNA, 417 bp, Salmonella enterica
atggcgttaacagctgagtacagtcatgtcacgtgggatacttttttccagcccacgtttgccgtttaccctgagctggagagccagttacaagcagagttcattacgtataaatcaactggcgcaccgtcaaatcttcttggaagggacgccccttttgattacccgccattcgctgtcgatgctaacgtccagcatattcacgttaatctgcatttccagctcacctggagtgccagacaagagaattacaaccgtacctcagatcactatctcatttacacagaacacatgtgggatagcggccgctttctgctgatggggctgataacaccggctcatgaacgtatgcccgcgagagatacacggttactcagctacttttctgaagttgcagaagattttcacgcttcataa

SEQ ID NO: 402945 - DNA, 546 bp, Salmonella enterica
atgattatggagcccgtcgtgaaatttaaaatccagcacttgcaggccgcagtggcactggttcttgccagtttccagccgcaacccaaagcggttgcgtgtcagcctacgattgttgaacgggtttacgaaatgggctccagagtcaacaaaaccgatatcagcgagctcactgttgctctcaatgacgtagctgaagaattacgctcaagtcgcatcgagctggcacggtatgcagacagcgatttcgccggcgctatcaaagtcgccagcgacatcagaaatcatactatccatgtcgcaggtatcgcagagtcctttgttctgatgctgccggaaaaaaaaatcgttcagtcgtatgacaggaattctgttgagtttgcattctttaaggccattaaaatggtcagtcttgcgactaaaaactacctcagtcttattgatcaaatcacacgaacgacagaagtgcgtgactctggaatcaacctctcggccatgaatcacctgctggattcaggcaacagggcagcggctaaatggcgttaa

SEQ ID NO: 402946 - DNA, 786 bp, Salmonella enterica
atgaaagtacacaaattagcagcattaatagttacaacatacattggctttattgcaacagcacacgcttcggcccctcagccgatattcagcccggagcaggaggcccgtatcggggaaatcgcagcagactacctggtatcccacccggagatactggtgacggtcagtcataagctgcaggaacagcaggaggcacgtaagcagaagatgtttgcactcagcgtgatggagaatcaggcgaaccttctgcatgatccggataccccggcttacgggcctgataatacaaaggtcgcggtgattgaattctttgattaccagtgcgtgttctgcagccgctttgcgccggagctggagaaggtcatgaaagcgcagccggacgtccgctacctctttaaggagtggccaatatttggtggccgctgggaagcctcacttcaggcagcgcagcaggggctgacggtctggcaaaagaaagggccgcaggcctatgtcacctatcacaatgccatctacgccaccgggcataatgaaggcaaactgacggtggaggatattcgcgttgcagcgtcaaaggcggggctggccacctcagctcctggcgaccataccgcgtctcttgagaaaaacagcaatctgtcggaggcgctgggactcaccggaacgccggggatcatcgtcatgcccgttagcggggcgactcccgacaccatcacggttttcccggaagccgtaaccgctgacaggcttcaggtagcaatccggaaagccacggccagatag

SEQ ID NO: 402947 - DNA, 1080 bp, Salmonella enterica
atggccgcagtggtggaaaaggaactgggcaaccagcgtaagcgcaaaatccgtgagcagaacagctacggtctggaccaggtgcgtgacggcgtatctctcggtaaagacgaggtcaataacccgattgtcgactacgagcagatcatgcgtctgccaaacctcaacttttatgtgcgcctcccgggcgagtatccggtcgtccgtctgaaactgaaatatcgcgcgccgaagaagcggcaggcaggccttctcgagcgcaatatccgcgatgcgctcagtccggagctggagaaggttattcaggagaacgagcgcgcagcggctgccgcaggtctgacgttcccgaccggcgatgaagtgctggagaaggggagcgagacatcatctgcagctgacaatcctgctccggtttcttctgcaggggcatccggctcaccggtaactccggccaccgaaaaagtggctcgtacccgaatggaagaaccgaaaccttcgcgcagcgctgctcctgaacagaagccggtacctgccagggagcacgtcacatcgcggacagagccagtggtcccggaagtagtaactgaaaatcacagcacggtgacagaccctgtcaccgaagacaaaaaagacaacgtcgtttcacttcggtcttctcctccttcagtaactcgtcaaaaagagactgcgccccttaaaccggaaatacctgcagcactgcaaaaaatccgcagcagaacccagctggatacttcctccgagcctgctgcagccggcgcgctggggatgctgaaacggcggctcaataccggagccacctcaggcggagaagaaggtcaggccagcgagaatgcgggcgaatcaatgaacctggatatgaaggtgacggcactgcctgacggcggcctgagtctgacgacggcagggaagtcagtgacaccgcagacccaggatgaagcccacagcacccaccgtcagctggcgcaggaagaagagaacattttacttcaccgtcacgcggacgacccgggttacgacgaaaacgaccatcactataacgacagagagcatgacctatga

SEQ ID NO: 402948 - DNA, 966 bp, Salmonella enterica
atgaaacgtgcaccagtcattccaaaacataccgtaaaagatatccgccccgaaactgaaccttcagcggcacccgctgcaccgatggttgattcattaattgcacgggttggagccatggcccgcgggaataccattctgcttccggtttgtggccgggaagtgaaatttattctggaagcgatcccgggcgagagtgttgagacggcatcaagagtctggtcaggtaatgaacgtgaccaggaactactgaccgaagacgcgcttgatgatctgattccctcttttatgctgagtggtcaacagacgcctgcgttcggacgaagggtagaaggtgtcattgaaattgctgatggtagtcgccgtcgtaaagccgccatactgacatcatcagattatcgtgttctcgtcggggatctcgatgacgaacagatgatggctttatcacggctgggtaatgattatcgtcctgtcagcgcttatgaacggggcaaccgttatgcacagcggttggaaaatgattttaacggcaatatctctgctctggctgaagctgagaatatttcccgtaaaatcatcacgcgttgcatcaacacggcccatttgccaaaatcagtggttgccctgtttactcatcctggtgaactttccgcccgctcaggggagacgctgtacaaagcattttcgggaaaagaagctttattgttgcaacggacacaacagcttcatgagcaaaagaaagcgggagttatctttgaatccgaggaagttattggtttactgacggatgttctgaaagagccatcaggtaaaaaagtaaaccttaatacccgtcatcaatttgtacctggtgcgacagccctatacaaaggcgataaggtgatttttaatctcgataaatctcgtttgcctgccgagtgtatcgagaagatagaaaccatactgcgcgacttacaaaaagtttag

SEQ ID NO: 402949 - DNA, 1011 bp, Salmonella enterica
atggctatggaaaataatgagttacccctgaatcttcaggaggtcaataagacaacgggtgaagttgttaagctggatgtcaacagcgccagtactgttcagcctgttgcgctcatgaggcttggtctgttcgttcctaccctcaaatcgacctctaggagtaagacgaaccgcaaaaacgtcacggatgcgactgaggagctcgtacagctgtccattgcccggagtgaagggtataccgatgtcaggatcaccggatcgcgcctcgatatggatacggacttcaaagtctggcttggaatcatccgttcaatgtatgattttggcgttaaggatgacacgctcaagctgtcttttgttgagtttgttaaaatgtgtggctttgactcccggcgctctaacaagaaaatgcgtgacaggataagcaactccctgttcaagctggcatccgtaaccctcaagtttcagagtgaaacgaaagggtggactacgcacctggttcagtctgcctattacgacatcactgccgatgtcgtggagatcagggcagagcccaagctctttgagctttatcagatggacaggcgggtcctgttgcgtctgaaagccattgatgccctgcagcgcaaggagtccgcacaggcactctatacctacattgaaagtctgccacagaatccggcccccatctccatgaagcgtatgcgagacagactcaacctgacgtctaacctctacacgcagaaccacacggtgcgcaaagccatggcgcagctgaaggatatcggctatctggattacaccgaattcaaacgcggccgggccacctacttcagcgtgcattaccgtaatccgaaactcatcagtagcaaggtcgttgttccccgtgagccggaagaggaagtacctgagcagaactatgacgaagttattaaagccctgaaggctgcaggtattgatcctcagaaactagcaaaagtgctcgccagcgtgaaaccgggaaatgactga

SEQ ID NO: 402950 - DNA, 531 bp, Salmonella enterica; identical to SEQ ID NO: 119520

SEQ ID NO: 402951 - DNA, 291 bp, Salmonella enterica; identical to SEQ ID NO: 129756

SEQ ID NO: 402952 - DNA, 2211 bp, Salmonella enterica
atggctcaactcaggatccggggcgtcagaagctacgcgcctgacagggatatctgctttgatctcagcagtaaggtgacactcatctatggccagaacggctcaggaaaatccacggtatcaggctatttctatgaccggcaggcggataaataccggcactgcacctttgagagcccgcacgtcagccactttcaggtctttaatcaggaatacattgacagtaagttcacccgttctgactatcagcccgggatcttcaccctcagcgaggccaatcaggaaagccaggacaaaataaacagtaataataaagaaagcgcaaaactgagtgcccggacagataagctgaatgaggagattgccgagaaggaaggtatgaaggaaacggtcactgacagctgtgccaaagatattttcaaccggacagtcaatgacaggaaaatcctcagcgatttcctggatggcgctaaaattaaacgatcgttttacgaacgtatggtggcaacaccgctgtcggaggttagcaccacggctgaggcgctggcggataaatggcggatgttaagtcagagcgaaggaacgcttgtcgccgaaattcatattcccccgacaactgttttaacggaagacaccctgacactgatgcaggaacccgtgatgcctgcaagcagtacgcaattctctgctctcattcagaagatcggtaatgctgactgggtgcgccagggacagcagtatatacacgacgatatctgcccattctgccagcagtccctggatgtcacggccttttcgcgcgaactcattcagatgtttgatgagtcataccagacgtctctcggggcgctgagccaggccgcagaacgacttgctcaggactgtgatgccctggccgaattagaacgccgtgttacgacccatgctttcgttgatgaggacagtcagattttaagcctggtgaaaacggtcaataaaggcttccggatcctgttacagcagctccttactaaaattaaagagccttcccggcaggtacaacccgagaacgttcaggatcccctggtgcagctccggaaggaagtggacgttttaaatatccgggtacgggaaaacaaccgtcttgctgaaaacttcagtcaggaaaaacagaacctgtatacggaagttatggcgcacctcaggggaatttgtgaggagttctttgccgggcgtgaccggcagcttggcgaactgcagaacgaaatcgacaccagattgcgtgaagtcggcgccctggctgccagtaagaaaacactggatgatgagacgaacaggctgaccggacagctctccgacatccagccaaccattaacagtatcaatgcgaatctcaggctgctggggatcaccggctttgaaatcatctgccatgatgcagagatgaaactgtaccgtcttcgccggggaagcgagccagaaaaggcggaagtcttcaaatccctcagtgagggtgagaaaacaatggttgcttttctctatttcatcgaatcgtgttcgggcagtcttaccccggaaaccatccatccggaaaataaactcattgtgattgatgacccgatttccagcctgtcacataactatatctatgaagttgcagcactcattaagcggaagataattaaggccgctgcagcgagacatgtggtgatactgacgcataatatgtttttcttccaggagatgctgctgaacagcggccgcctgcaggatggcaggaaagcgccagcaaactggtcgctgtttcgcatcatcaagtcggattacagttcctgcgaaacgctttccatgcacgaaatgctcaatgaatatcaggcgttatggcagacactgaaagacgtcagggatgcgaaaacccagcccgtggtgctgttcaatacgatgaggaatattctggagtattatttcagcttttcctgcaagaatgaaaagcttaaagaagccctggagtctctggcaacggaacacagcgatgccggagaatatgattcattttaccgggccatcaaccgccactcgcattcggacggtagaaatcttttctcaaccggcgtcatcgataaggaacgctatctgaacatgttcaggaaagtgtttattcacactgatgaccatgaacactatcttgccatgatgggtgaatccgaagaacggccggaaacagaggcgtaa

SEQ ID NO: 402953 - DNA, 636 bp, Salmonella enterica
atgtcagatcaaagcaaatattacgattactacatggtggaaggcgatgatgttaaggctcttatcaagtcatacgacaccattaacgatcaacgaaattcaatcctgtcaacagccgctgaaaaggttggcgcaatcgcatgggttgcaacccgtagttggggtggagaaggcggacttctacaaagcttcgtttgggaaaaaggatatgaattcccatgccagataacaatcaagcgcgaggatttttgggacgggaagcgagttgtgatagcacgcggaaagggaaacacaaaggaaggccgcgcatacaacaaagagcttaatgcaattattcatgacgcgaacaccaggttaaaggatttgcctgagtggaatgactacatagccaaccactacggaattatgcgcacaggaattggtggtcaatctggacgtggttttggttttgctatgttatccacttatggcggcaagcacccacagcgtgatgattgccttatttttgcaatccctaataacaaagaagagcaacatggtgaggtgagcattccagagggctttcagaaaataacctacggtcagttctacgacatcgcaaacactaagaaatttgaggaagaacaaacggactaa

SEQ ID NO: 402954 - DNA, 1578 bp, Salmonella enterica; identical to SEQ ID NO: 204720

SEQ ID NO: 402955 - DNA, 213 bp, Salmonella enterica
atgcccggcgaagggatgtcggaactgcgcgttgaccagctcggccagtgccgccccgtaggtttcgtcgcggatgtgccaggcttgcagccaggccagcttggcgtaggtcgtgccggggcacgattccgccatcttggtcaggcccaggttgatcgcgtcggcgaggatcgtggtcagcaacaggtttttgtccttggccaggtcgcctga

SEQ ID NO: 402956 - DNA, 600 bp, Salmonella enterica; identical to SEQ ID NO: 361629

SEQ ID NO: 402957 - DNA, 888 bp, Salmonella enterica
atggagaaccagaaaactggttacattccgttgtaccggagcattctgaaacagtcatgggcgaaagatgtttatcttcgcaccctgtgggaaaaccttctcctgaatgctgccagaaagccatacaaagcgaatttcaaaggtcatgaatggcatctgcaacccggtcaactggttgtgacagcagctgatttaggtcttcagttatgcgacaggcatggcaagccagcaagccgcgatcaggttgagcggatgcttcaggtttttgtgaaagaggggatgatcaccattgatggagagaagcaaaaaggtcgtgtgataaccatcacaaattaccatgaatatgctcaaaaaatggacaattcacccgcacatgaagccgcacaaacaaccgcacatgatgccgcacatgatgaagccagtaatggcgcggctttcagcgtacatgccgcacatgaaagcgcacatgaagccgcacaaacaaccgcacatcatgaacaagaaggtattaacaagaatataaataatacccccctaccccccaatgggggaggcgatgggcaggttaaacctgaacgtcgcaaggcagaacgcatcgactacgaatccttcctgaacgcctacaacaccgaagtcggtgacagactgccacacgctgttgcggtcaacgagaaacgcaaacgccgcctgaagaaaatcatcccgcaactgaaaacgccaaacgtggacggtttcagggcgtatgtcagggcgtttgtgcatcaggccaagccgttttacttcggagacaacgacacgggctggacggctgattttgattacctgctgagggaagattcgttaacgggagttcgggaagggaagtttgcagacagggggattgtatga

SEQ ID NO: 402958 - DNA, 126 bp, Salmonella enterica; identical to SEQ ID NO: 375539

SEQ ID NO: 402959 - DNA, 459 bp, Salmonella enterica; identical to SEQ ID NO: 402861

SEQ ID NO: 402960 - DNA, 474 bp, Salmonella enterica
atgatgttcaactggaaaacgatgtttgttggcctgttgctcgtctcgctaattgttgccggtcggctggcaaatcactaccgcaataacgctatcacttacaagtaccagcgtgatactgctactcacaatctgaagctggcgaacgagacaattaccgacatgacgaagcgccagcgtgacgttgccgccctcgatgccagatatacgaaggaattagccgatgcgaaagctgagaatgatgctttgcgcggtgacgttgccgctggccgtcgtcgcctgctcgtcaacgccacctgtcccgcaatgccgacaggtaaatctacctccgccgcccgcgtggataatgcagccaccgctagacttactgacgccgctgaacaggattatttcactctcagaacgcgaatcgaaaccgtcaccaaacaactaacggggctacaggcgtatgtgcgtaatcaatgtttgaattga

SEQ ID NO: 402961 - DNA, 219 bp, Salmonella enterica; identical to SEQ ID NO: 376342

SEQ ID NO: 402962 - DNA, 303 bp, Salmonella enterica; identical to SEQ ID NO: 376343

SEQ ID NO: 402963 - DNA, 312 bp, Salmonella enterica
atggacgaatcaagaaagcagtttgagtacgaagcgggtaagtcattaaacctgccaacatccatgattgagttagccagaaaaggtgatggctacgaccacgcatttgacagcatgcatattatgcagccgcttaatggatggtgggtatggtggaagaagagtcgcgacgctattgaaattgagctgcaaaagccaaagaaaggctcacttcccggtgattatcacattggctatgactcaggtacagaatcacaatacgaaagagatgtagaggccatccgcgctgctggagtcaaagtgaaggagtga

SEQ ID NO: 402964 - DNA, 147 bp, Salmonella enterica
atgacaaaaccgccctgtcctgaccaggaaaaattacacaaaaacattattcgtgatcgctatctgtccggtttcagccagcctggtcgatttcgggctgagtgggaaagggtcaaacaatcatacagaggtaagcatcatggataa

SEQ ID NO: 402965 - DNA, 303 bp, Salmonella enterica
atggaaatcaacacaacgacacgaaacaaaacccaggcacgaaaaatcgagtcctggttactgaatcagatcgccatgcgcggggctaccaacattgctagggcgatgggaatggacaagtcaggcattacccgctggaaagaaacgatgctaccgaaggtggcgatgctgcttgcggtgctggagtggggagtagttgacgacgatatggcgagactggcgcaggaagtagcagcgctactgacaaagaaaaaatccccggcggcaaccgaggactcttcacaaatcacgattgaattttag

SEQ ID NO: 402966 - DNA, 234 bp, Salmonella enterica
atgaacaacgaattactccgctggcgaaaggatgcgacttccgctgagtgggtgcggttggcagaactagccaacacaacggttggctatttagaccagattgcttacggataccgcagggcttctccagagaaggcactggcgatcgaagtggcaagcaaggttttcaaaaagcacatgccagtactgaaagaaagcctggtctttgcgaccacccgtaacagcgcagcatga

SEQ ID NO: 402967 - DNA, 753 bp, Salmonella enterica
atgctaaatactaagcaagcatcatttagcaatttgcacatttatcgcattgctaaagaatgcgagactcagggaatggaaaacaaagaaatcagaaaagccaacctagaggctttgtacgaagagcggaaacgttcgactggaatgactaaggcacagttcgctgaactcatagacaccagtcctgccgccctgagtcagcttctaggagaaaacccgaatcgcaacatcggggataagctggctagaaaaattgaaaatgctttgggtctgtcattcggttggctggatgttttgcactccaaagaaaacacgggtaacgttgcatttcgagggatgaacgacacgaaaggaagttatcctgtaatcagttggataagcgcggggcaatggatggaagctgtagaaccttatcatcgcagatcaatagatcgctggtatgacaccactgtggtgtgctcagaggattcattctggctggatgttaagggggactctatgacatcccctgttggcctgagtattccagagggtgcggcaattcttgttgatccggaagtcgagccacggaacggaaagcttgttgtcgctaagcttgacggagacaatgaggccactttcaagaagcttgtcatagacgctggccgccgattccttaaaccgcttaacccgcagtatcccatgcaagaaataaatggtaattgccggatcattggcgttgtagtagacgcgaagattctcaacttgccgtaa

SEQ ID NO: 402968 - DNA, 417 bp, Salmonella enterica
atgttaagtgattgcatagagcataaccaaaaacaaaattacggtaccacttcaactcgaatcaacggtaagacagtggcgataaggcttcacaggaaagcctactgcgaatcagtcggtgtctctattgagagcattaaaggacgtgtagtgctgcatatgtgtgataacccgcgatgcatcaacccagagcatttggtgcttggtactcagttggaaaacgtaagggatatggaaattaaagggagaggaaatcacgtctctggagagagaaacggttccgcgaaacttaccgcagaagatgttcttgaaatacgaagctccacgctgagtaacaggaaaatagcagccatctatggactgtctgattcgtacattagttcaattaggcttcgcaagaagtggaaacacatatag

SEQ ID NO: 402969 - DNA, 528 bp, Salmonella enterica; identical to SEQ ID NO: 14423

SEQ ID NO: 402970 - DNA, 540 bp, Salmonella enterica
atggccgggggtagacatataaatagtttgctttatgttcttgtggctatattagaacgtaaagtgaatgactttaaattgtcttcgtcagaacttcctgagatattggctgctttacgagaggcaagggaatgccttgtatcgcgcagcatcaatgaagatcctcagttatattcggcattatttttatatgaaaaaaatgaagggttgctaagtctttcatttgagagagaatactctatttttattaactccaatttagagtgcatattgaggaaagtttctgatataaaagataaaaagcagggtaaactgcaaaaaataatgaatgaatttgtgaggtttaaatattcaagcggcgattcttgtgcggatcttttgtttttgagtggtaaacttgaacagatacgtaaaatatatgaagtctttgatagggatagaaatagacttgaatttcttaactatatgatgaagaaagaacgtgttatttttgaaagagagtttgaacggcttttaggtgaaaaaaatggggatttttag

SEQ ID NO: 402971 - DNA, 804 bp, Salmonella enterica; identical to SEQ ID NO: 14425

SEQ ID NO: 402972 - DNA, 375 bp, Salmonella enterica
atggattattcacagttaagtgattttgaaattaacttaaaagtcgcgcatatcgtgctagggaaaaacaattacgactgggatccagaaaagaaagaagtttacttggctggaattgatggtggtgagtttttgccttgcggatatttcgacccatgtaatatggccgctgacgcatatccgatcatcactgaaaacaaaattagcaccatgtggatgacagcggaaaaagaatggtgcgcatggtcaggaggtgatttagaggaaggttgttgggaatgggaaaatattcctgactactgcttctgcggtgaatcacctctccgcgccgccatgattgtctttctcatgatgcaggacgccaataatgcttag

SEQ ID NO: 402973 - DNA, 441 bp, Salmonella enterica
atgggtcatcagcaggttcagcgccacgtttactccagaaacttttgccgcttccgggttgccgccaatagcaaaaatgtttttaccaaaacgggtcttattccacagcacccagacaaacgctaccgcaatcagggcgtaaaaagtgatgtaggagagccggaaactgcccatcgccacaaagccctgcgcaaaggtggaaaagccgctgtcaaagccggaaatgggcgaagcgccaacaaagtcatagtaaagggagttgatcccataaacgataatcatcgtgccaagcgtggtaataaacggtgtcacgttcaggtaagcaataatgatgccgttcaccaggccaatcaccgcgccaatcgcgcagacaatcaggatgaccagcgcaatcggcatggtcgccatttccggaaacactttgttggcgttttccattga

SEQ ID NO: 402974 - DNA, 384 bp, Salmonella enterica
atgaaccagccgcaggtttccattttcccggcagaaatgaccaccgcgctgtaccggcgggcgattgcttcggcgtggcggcagaaaacgctgaacgaaaccggcagcgatcagtatggtccgcacagcctgacggttgagcgtattgaaatggccattgccctgcatatcgagtgtgtactgattaacgagtacggtgaagcacagggagccgctgccgcgctggcattgctgactgacatgctggagccgtcactgctgaccgcgccgccggtactgaccgcgcgcggctatgaagtgatggcggagctgtaccgcacgcttccggcggcctttgatgatttctgcagcactggtgtggcgctgtatcagggggaagtatga

SEQ ID NO: 402975 - DNA, 417 bp, Salmonella enterica
atgcgtcaggaccgggcgctgctgacggcgtgctgcactgacatgtctgcgggggcgttttctgcgcaggttcaggccttccggacaataaatccggtgggttttcttgtggttaacaggccatccctcccggcgcaactgaatatgaatacgcgggcaaccgtagcgtatccgggtttccgctatttcccggatacgcagagttatcgcccgatcgtcacgccggctctgccagtggtaaacggttctgctctgcatcagcaacccgcatcgtcgccggacgctgatacggtaagcctcccgcaaaaatgtcaccgcctggcgcttctgagccggcctcagaacttttgcttcagtatctcctgcagcatctccttgtccagactcagctcagcggccagcttcttcagccgctga

SEQ ID NO: 402976 - DNA, 249 bp, Salmonella enterica
atggtgggctggcgcagggtggagaaaggcagtaccgcgcaggggacggaagccgtcaccacgttctacgtcatgccatccggctggaaagaaatctgcaggggatttgacccgcgcaaggtggcacgtctgtgcgcggatcgtggatatctgctgccctccaccgatggcaagctgcagacaaacattcgcccgccagagatgaatccccgcaggctctatgtcttcaacagcgaggtgccgggttaa

SEQ ID NO: 402977 - DNA, 285 bp, Salmonella enterica
atgaatatttctaacgggcacaacggtgctcagggccacactttgcctgaaaaatacaataccggtgcttttgcctatgggttgtcagaggacggtttcggaaagctgacccgcgcaagaaatgcctgcgacatgctccagcttctcttttctgaatacccgtctcaggtcggagcgctggatgcaggctgtgcgccgggtgtcgccgcgctgatggaatacctgcgggctgatttgacggatattgcgcacagctgcgcactgattgaaggaggtgccagatga

SEQ ID NO: 402978 - DNA, 477 bp, Salmonella enterica; identical to SEQ ID NO: 374214

SEQ ID NO: 402979 - DNA, 384 bp, Salmonella enterica; identical to SEQ ID NO: 230987

SEQ ID NO: 402980 - DNA, 900 bp, Salmonella enterica
atgacctttttgaaagaatatgtaattgtcagtggggcttccggctttattggtaagcatttactcgaagcgctaaaaaaatcggggatttcagttgtcgcaatcactcgagatgtaataaaaaataatagtaatgcattagctaatgttagatggtgcagttgggataatatcgaattattagtcgaggagttatcaattgattctgcattaattggtatcattcatttggcaacagaatatgggcataaaacatcatctctcataaatattgaagatgcaaatgttataaaaccattaaagcttcttgatttggcaataaaatatcgggcggatatctttttaaatacagatagtttttttgccaagaaagattttaattatcaacatatgcggccttatataattactaaaagacactttgatgaaattgggcattattatgctaatatgcatgacatttcatttgtaaacatgcgattagagcatgtatatgggcctggggatggtgaaaataaatttattccatacattatcgactgcttaaataaaaaacagagttgcgtgaaatgtacaacaggcgaacagataagagactttatttttgtagatgatgtggtaaatgcttatttaactatattagaaaatagaaaagaagtaccttcatatactgagtatcaagttggaactggtgctggggtaagtttgaaagattttctggtttatttgcaaaatactatgatgccaggttcatcgagtatatttgaatttggtgcgatagagcaaagagataatgaaataatgttctctgtagcaaataataaaaatttaaaagcaatgggctggaaaccaaatttcgattataaaaaaggaattgaagaactactgaaacggttatga

SEQ ID NO: 402981 - DNA, 261 bp, Salmonella enterica; identical to SEQ ID NO: 84335

SEQ ID NO: 402982 - DNA, 993 bp, Salmonella enterica
atgaatgataaaaaagagagatacatatcttccgagctgtcagataaaactcaactttctgttttgcgcagtatagttggatggggctatgaaaaaataagacattctctgggacgaccagggcaacttgaaagagcgattgcatccggggagttaatcccgtgtcctttaaaaactcctgtcgatacactatggacgcgatcggtgatttactggcaggactggatatccccatcatggataccatctgattctcgccaatgtacgatagatttttataagccaggctactatcgtggtttagaacgatgtcatctggttgttcccgaagttcagaatctgattagcaaagaagatattcctcatttttcgtgtgatatcaccgatattcagggtatctccgcatcgaaatctgagatgtatgatattggtgacatttatgaatttcctctactgagatgccctgggctggttaccccggtaaatgaagaacatctcagagaaaatatgcagtactgggagttaaggctccatcgaatgcgctttgctgaatatccgtggactgagcgtaaactgtattggctgaatgaaggtggctcacatcattttgcagctgcccgttatcaggcatgccgtctgggaatttctgttccgcttacgggcagattgagtcgcttccatgtaaacatgcagatggtttcagctttatgtcagcaatggcacctgtttgctattcctgcagatgaacggttagcctgctttttcagggcgatgattgcctttgaatgcccatttggtaattcagaattacctcggaatatgcacaatactataaagtcaggagtcaaactcaaactcgtttggcttgaacgtggccataccaaagcagacattgttgcagatgtacttgccacagcaggtttccctgattttggggatcaattgaagctgctggctaccagcagcctgcaaaaaacacataagctggcctga

SEQ ID NO: 402983 - DNA, 261 bp, Salmonella enterica; identical to SEQ ID NO: 235995

SEQ ID NO: 402984 - DNA, 207 bp, Salmonella enterica
atgacgattgcagaacgtcttatacagaaaggtttcgacgaaggtttcgacgaaggttttaaagaaggttttaagaaaggtgcgcttgaagtggcgcgggaagcagcctgccggctgcgggatatgggctggacgccggaacggattcaggaggcaaccggactttccggtgaagaactgaaaaagctgtttcctgatgagcagtag

SEQ ID NO: 402985 - DNA, 156 bp, Salmonella enterica
atgaatcacttagagcagtatttgaatcgtattttttcttacagcaataagccattaacgccagcgcaattaaaagaaacagtagaggtagcagcaaggaaagataatctaacagcagagggtgtgcagagaagtattaaaaacaacattaagtaa

SEQ ID NO: 402986 - DNA, 327 bp, Salmonella enterica
atgaatagcaaaggtgattttatgaatatcgttactaaaacaactcagaattacgctaaagctcgccagttaattttagactctgatttttgcgatgaaaataaacaaccatttatttgggtatgcgttgatgatgacagtagcgaaccaatgtttagcctgtttgctaatgacgatggatctttttcttatagaggcaacatctggctcagtgatgcaacccgtgaggaaatccccgcctttatccgtgatgaaaaacatcttcgctcagttctggcgttcgtggctcaggacatgaaaccgcagatagctgaatgtttcagctaa

SEQ ID NO: 402987 - DNA, 981 bp, Salmonella enterica
atggctactaccaatattgatagcttgagcaaattacgcagcgttgctgaaaaaggcgttatcaagcgcgcagatagttacaaagtgctttattccgaacttaacattaagcctggtcataacgtgcgcggcatttatctttcacaggatgaatactggaacagcgaggaagttaaggattacatcaaggggcttgcttacagctatgcgcacaacatcaaagtaccagctctctcagtaatcgtggaggacggaaaaatttgggtaaataacggtgaacaccgttaccgtgctatcgccctggctaaagagctttttggtgtggatattgagtatgttgatgttgttgaagatgatgatcagcttacctctaactccgcgcgtaaccataccccgattgaaatggccgtgctgtacgaacgctataacaccgataaagggctgtccgttcaggagatcgcggaacgtgctggtaaatctgtaccgcatgtttataagtacctcacagcagtaagaaaatggccttcggatctgcttgctaaagtacaaagtggtgagttgtctttcacggcagcacaaaccctttatgaagaaacgcgccgcaagaaacccgatgcgcctgaaaatgtatcaggtacagatttaccaaatgatgataatggtgaatcaggtacagttttaccaaaggaaaacgaccaaaattcacccgataacaacgttcaggacgttacgaatgctgctccagcggctagcagtggtggtgaatcaggtacagatttaccaaaaggcggcactgataaaggggctaccaagtcaaagaaaagcatcacaaaatcaatctctgacagccttgtgaatctcatttttgggttcgaggccgttgaaactgatagtggttatcagcttaacctcaccaaagatcagtacgaggcaatcattgccctgcaaaaagagatagaagcggaaattaaaggtaagtaa

SEQ ID NO: 402988 - DNA, 699 bp, Salmonella enterica
atgaataacaatgattatcttaaaaggttcaggggcatgattgacgttcagaacaggaagaacacaatcaccggcgctctcgttcttgttggtatcatggcggtgttgatgcctggtgctatcttttggtttgtaaaaagtgactatgtaacttatccgttactttcttacttagggctttttgccgttggcgcagccgccgtaaagagatacagcaaatcacggttaagccggatgcacctggatagccgcgatctcagccttattattgatgccgatcacccgattgctcaagatgtaatcatgcgtaccagagaaacgggcaattttacctacgcagacctaaatcaaatactggtaggatatgaacgcctttctgcggcctcagagtatgccataacgggcgtaaacaaaaagctaagggttgataccgctagtaatggaaaatggcttagaatcgctgctaggccgctaaagcacatatcattaaatatactggtattcgttatcatactggctcagttgggtgttgcggctggcattttgccgacactgcatgaagtttttacaggccaaccgttaccaaagctttctttaaatttgagtgtcagagaaatagtgacgcagatagctatacccagagggatcactatcggcgctttgtactttgtgcggctattaataactaagcgttactaa

SEQ ID NO: 402989 - DNA, 276 bp, Salmonella enterica
atgaaaggtgcaacggttttattattaatgatattaacggcgttagcattgaaactcataaatcatgtcttaagtaaaaggcagtgcaggaaaatatacaaaaaggcagtaaaagaaggtgtaggtgaagaattccttagcatagttagaaactatgataatagagctaatggtattcgttctaccgaaatggatgtgatatatcgcattgcgctaagtgatgctttatcttcaaagatgaaacaggcaaatagtgagtataaaaaagccccgtaa

SEQ ID NO: 402990 - DNA, 354 bp, Salmonella enterica
atgagcaaacttactgataatttagacctggctgattttgggaatactccgcaacgtgccgctaaaacgctggaagcagctactgagatcggcgctaagaacgagttaactgcacaagaaatagatattcttattgaagccgactattacaataaaaatggtgaatttaaatcatctagtgaaatcatccaaaacagattggatgaaatattttctgtaatgggattcgttgctgaatcttctttgcgctggaaatcaatcatggaagatgaaaccgcaaaacaggattttattaacacttacagaaagggcgttgcagggttaatacaacgagagtggtttgggaagaagtga

SEQ ID NO: 402991 - DNA, 558 bp, Salmonella enterica
atgagtgaagatggaaaaaggttaacaagtgttgagattcctgatggacttctcaaacaatcaaatcgcactgaaaaagatcaggagttgataactaagctcaagcatatgtacattgaaaaagggataaaaattactgatgatgatccccttatcgctatattactcggtcaggatgttttactaagcatctatgacactcagttatcagaacgtattaacaatcgttttaacactcttgaaacggctttaaactcgtttcctgttcgtgtaagtgatcagcttaatgaacgtgcggaaaactttcttaacctggtcgataaggtagataatcaggttgagcaacatctcaaaagcgaacttaaaggttttcaggaaaatgtccgtgattatgctcaatcgactgaaaaccgcttaaaatcaatcaaggttgatggaagcgccagtaaaagtgaaagtatcagttacgccaaagtttttggtgtaagctttatcgcctctgcgttcgctgtagcggtcgtactggcagccttttactatggattccttgttaggtaa

SEQ ID NO: 402992 - DNA, 807 bp, Salmonella enterica
atggctaaagaagttgcaaaagaaaatgatgctaaactgcatccagtagcagcatttatcacaaacagcattaacgtagttatgacgggtaagggtggtgttggtaaatcttacgttgctcaaacgctgagtcagtatttccttcattataagcgcatcgctacaagtacaagcgattcagatccggttaatgcctctactttccgtattaaagcgctcaatcctgagttcatcaaaatcatggaaaataatactattctccaatctaattttgaccaggtaattgagagcttcgtagcaaatgaggaaataactttcgtcctcgatacgggagcctccacctacgttcctttgatgcaatatttttatgataacgatctggttgatttcttctcgtcgcttggtcgtcctgtattccttcatacaatcattatggcaggtcaagaactgcctgatacgctcaatggttttaaatccctttgtgaaatggttaagggtacaaacgttaaagttgtcgcatggattaatgagttaaaaggcactccgattgtagatgttaaaggtgttagcacaccattaatcgaaacgcctttctttgaaaacttcactgatagtcttggtggtgttgttgtcattgaagatcgcaagagcgatgcttttaccgcagatattaaagcgcttacttctaaaaacttgacacttgaagaagcaaaacaaagcagcgaatttaatattatgcaaaaaacgcgcctcaacaaagtatataaggccgtttatgatcagttagatgaaatctatacagcttaa

SEQ ID NO: 402993 - DNA, 429 bp, Salmonella enterica
atggacagcgaaaagcggatcacgttcaatagctatgaatccacatcttacaagcgtaagagtattgcgattctgcgatcaatatttgctgagatagagtcatatctaaattcaggttgtacaagagacgatgtttatgaagcattaacatcaccgccctataatctggaaatgacaaagggcagttttattaatgccctccatagaattagaagtgatttaaagaaaacccctcaaaaccagcttagcagtaatgggggggtatatcagaatcagcgtccagttgtagccgcaccgcaaaatgcaggcggcgcagaattacccaaaggcgcaaaaattttcaaaaagatgaatagtgatgctccgaagtttgagcagaatccaaatcctagtttagatgaattattgaaggggaataacaatggctaa

SEQ ID NO: 402994 - DNA, 390 bp, Salmonella enterica
atgcaagagaacgaaaccaaaaaaaacaaaagtaccgtagtattgagcctcagagttcctgaatctgaagctgctatgtatgatgcaatgtgtaaagatgcgaacctaagccgctctgaacttcttcgcgccattatcaaaacaaaaacaaatggcggcggcgttgttattaacgccccgcaaaagaaagtaaaaaatcctgattacagtaaactcattttttattataacaaagccagcaataatattaaccagatagctaaaaaaattaattccgcttttgcggctaagataatcagtgaagaagctatgttatcggggatcaaagttttacaaggtattgaaaagttattagaaatggggcttgaaaatggcaatcgtaagggttag

SEQ ID NO: 402995 - DNA, 3606 bp, Salmonella enterica
atggcaatcgtaagggttagaggtggtaatgctggaatagctgaatatctgcgtgaagggcagaagcaaggccgtgcctttaatcgtgacgaactggatatgagagtatgtcttgaggggaatttggcacttacagagaatattatcaacgccattcctgataagaaccaggacagatatttacatatcactattagctttcgtgaaaatgaagtagctgtagaaactcttgagcaggttgtaaaagagtataaatcaatgttcctcgcggcgtataaagatgatgaagtaaacttttatgccgaagcccatctacctaaaatcaagagtattaccgacagggctacaggcgaggaaaaagagcgcaagcctcacgtacatattgttattcctaaacaaaaccttcttactggcggcgcgttagatccggttgggctttataaacatcatgaacggtatcatgatgccattcaggaaaaattgaaccagaaatttaaccttgaaagcccaaaagattttgtacgtgtaactgatgataatcaggctcagattttatctagggtaaaagctgatacctttaaaggattcaggactgacgttaaaaaagatgtttttgcaataattaatgacaaagaaatcaagagttatgatacgttcattaaggagttgcaaaataaatatagcgaagtgaggattcgcaataaaggaacgcctaatgaatatttggctatcaagaccagtacagaatcaaattatattaacttaaaatctccgctctttcagcggcagtatattgaggaacgacggttagagaaacctaagctttcattgaaacaggttgataaactgattgatgaatggcaaaaccgtgtcagtaaagaaattaagtatatcaataaagcatcaaagaaagtccaacatgcttaccgcgccgccagtgccgaagaaaagcgtgaaattatattaaatagagaaagggggttgtatgagcatactgaaagttctggacgacgagccaatagagaaaaaagcaataaagagccaggtaatcaaaaccgtggacataagcatattgccaacactacctttggcttgccagaagtgttaccacgcgaactggttcctgacctcgacggatatgaacactcaggacgagagcgggagtataacagcagccaagccaaacaaagccgtgtgcttttgcgagaagttcagatcagtagtgtggcagacgggcggcagcaagaacatgaacataacggattgcgatggagcgcacgagatccccgtagagtagaaagcgtaacaggttcaattgctacagcgcatattgaaaagaaaacagttgctactgaaagcgaactggcagagttcaaaaatattcgccagttactttctggtcagcacttgcttaatcgcctgtcaaatactcacggtattgatgtaaatcagtataccgttaaaaaagcaaaagatggttcggacaggattagcgcaggtaaattaaatctgaatgtttcagattttcttactaaggaaatgaaatttacatggaatgatgcgaaatcttatcttcgtcagtcgtatgacgagcagcttaataatgaaatggctaaggccaagataaaacttcctaaagaagcatggcaagagtttaatcagaattatcgtcctgaatatttcggaaaaattaaagagttaagaaaggaattaaactataattgtaaggttatgcgttatgaaaccaagcaatcatactttaaggaacgtgctgaaatattcagtagaaaaatgagttatgcagaaagaaaagcggctctttcagtcgctgtctttaacaaattgaagcatgataaggaggttaggcagtatcagtatgtacaaagaaatctactttctcgtttcgaaaaagtagaaaccgagtttttaatctcaaattacattcagaatagagaagggggtaattatatgggacgtttatcagacgtcattggcggcgctgctgaaaaaaatgctttcagcccgtttgaacctgaatatggaatcaatcttaaacgccattataacgagatcaatcaaaatgaagaatttaatgagcggcagaaaaaacgcctcgcattaaatgatttaacaccatctaaacaggataatggtgatgttaaatataaaacttcactgttaggcactgcgtttatagataagggagataaaattgagttcccgacgctgattagcgataaagataaaattgcgttaggtcttgaacttgccgcagaaaagtataaagggaaaattcagcttacaggtatgccaggctttaaggaaaaggctattgaaatagcagccgagcgcgggcttgaggttgagttcagacctaaaaaatatcaggagcgttttgaagaactcaaacagcagttcgcccaggaacgagcagaacgtagcggcgcaactcaggaacaggccaacagcagcggcgcaaattccagcaagccgcagcaggaacgagaggcgcagtcagagcttacgttaaccggctttaaggcaagggatctaccttacaatgagctttcaagagatagcgtaagagagcttgctgttacgctttcagaaagaaatatctcttttaaggagcttgcggagaatgccaaaacatcccccgataaaagtgttggtgagcttatcgagcagatcgcaactaaacctgaattttcgcgttcggctactggtcttgagcttcatgtaacaaccatgtttgaccaggaaagcaacaggactaaaattcttgttaatgaccttcctatggatatttacattcaaacggcctcagaaatcgcccagaccgatcctgacgttattagaatgccattgcttgctaatgaggaacttagccagttcacaccgcagcagcttgaacaaggttatgcagaaggagaggttagtattccggctgtaaccattaacgaaaatgggcgtagcgtcaataaggatattcgtgttgagtttgaagcgatggaaaatgactcaaccgcctatcgcgtaatagtcaatggacaaccaatgaaagagatccacaaaccggagcagggcggcaacatcgagcagtatgaaaaagaaatgtcggttgtatctagtataaaaaaagcactggaggaaaaaggcatatctaccatgagctatttcagcgatgctcacaactcgccaactgctcaggttgaccgcgatattcgtaaagctgaaatggaactttctaaggaattgatacgccatgatcagtacgtgaaatcaggtaactcagagacagccagagagcataaggccgaagtgctggactatcttaaagataaaatcgcaacggctaaagaagcgcgtgaaaatgtgcttgaggcgttcgctaagaacggcagcagtagtgaacaggcaaaagctaaagaaatggttatcgtggcttccaagctgcctaaagacttccttttaggcggggatggtaaagcgtataacgatgcgtttatgcctaaacctttccaggcatcaaccccgcaacgggaaaagcatacgcaagaccaagccaaaccatcacaacagcccaaaatatcctttgatcgttaa

SEQ ID NO: 402996 - DNA, 213 bp, Salmonella enterica
atgccgcatgggaaggttattttcaacaaaaaagggcgttgggattggctagatagagcgtgtaatgtaagcaaggaagaactaaaccaggaagaatggtttattgctgatatgtattatccgcctgatgaaaattacgatccatcgatgcacgaacaacaaattcaaggtttcctgtcaaaacctgatgaactggtgcgatacgatagatag

SEQ ID NO: 402997 - DNA, 213 bp, Salmonella enterica
atgaatattaaggctgaacagttcgtgacaaaaaaaggtaggcgcgttctgacagatgaaggtttgcaaggtatgggagccgatttaggcgtaggctcatcaactgagaaacagcaaggacaagtagcagcgtcgatttttgcaaattgctctgaactggataatcagcagcttgatgaaatcatcgactgggttcggctatataaaaattaa

SEQ ID NO: 402998 - DNA, 138 bp, Salmonella enterica
atgaaaactaaatcattttttgatcgtgatgtaatagctattaaatcagaagataaaaaacgctgccgccagaacgtaaagaaagcgagaatggctaaaaccgttaacaagcgagggggttggttatcggaatactga

SEQ ID NO: 402999 - DNA, 162 bp, Salmonella enterica
atgcaagctaaatctcaacgtaaaattatccaggaaaccagccagcgatttaatagcttagtccaggcaggtgcgaaaaacgacattgcttataacttttatcttgcttctctgcgtcttgatttaaaagccgctaatcgtcaacctaatcagaaggtgtga

SEQ ID NO: 403000 - DNA, 228 bp, Salmonella enterica
atgaaaaacaatatcactatcaaaagtttaagatgggattgtgctaaattcctttttggattcttcacttttctatttatattacctagtatgaataataacgctcatataagtgaagtcctttactttggtagagggataggcatgatattattaatccttgcaaacactttaaacggttctgtttttttgggaaacttacttacttatctggcacaaaagaaataa

SEQ ID NO: 403001 - DNA, 252 bp, Salmonella enterica
atgtccgacaacattaaagaacagaaagatattgttgagattgaagatgttaagagcgctgctttttatttctttgcgttattatgtattttctcagcatcattaactaaatttacatcatccagtgactctatagccataatgatactgagggtcatttcatattgcgtgcttatatttttagtagcggggtatggtgcaagatttattgaaaaggcgctactttatattaaaaacaaagaacaaaggtaa

SEQ ID NO: 403002 - DNA, 204 bp, Salmonella enterica
atggataaattggaatatctacttaaatttcgacgttccaataacgatgaaacgcttgaaaaagtagttgaacacatggaaccaaaaataagtaaagaagattataacgcttttcaggcagccgcagaccatagacgcgctgagttagcttgtcataagatttttgataaagtccctaaatcagcttggaaatttgtaaaataa

SEQ ID NO: 403003 - DNA, 396 bp, Salmonella enterica
atgaacaggaatccagtagagaattatttaaatatattgataggctacctgcatgatcctttggggatagcttgcgcttctggtttggtcgttttgatagtctggatgtgttatagaggtctttgggattgggtgttaggtacagcgcttgtagctgtttttgcttttgccattttatattcatctgctgattcagagattaaaaaagaagaatggaaaaagtgggcaggtgagcattgcaatgttatagctaaaaaggacggcaattcttctattgaaactggtgttggagtaacaacaaacggacaagcggcaacgggcgtttttacaaattcaacatcagatcagacggcttataaatgtgatgatggtattacttactggaaaaatgattaa

SEQ ID NO: 403004 - DNA, 444 bp, Salmonella enterica
atgaaaaccggaataaaaatagatctcccatcgattaaattgcagcgtatggagatctttaaacgggggattgagcaatcaattttagctttgcaatcgaatgctgcggctgcgccctaccctaaagcaaaagccgttgattattccaccctggatgaacggtattttttgacggtagaacaaggctggattgcaccgcctcattcgctcgttaacgcatggtttgagcaatttaaatctaccttccctgagtatgggtctgatagtagccttgccgttttgttagggattcattcaaacggtgcaagccgacgtatcagagaatacaggaacggtgagaaacctattccttatggaatctggcgtaagttccttgtgattactggtcgggttcctcaagaaatttatcctgtctttggggtatttgatacaaaggaggattaa

SEQ ID NO: 403005 - DNA, 414 bp, Salmonella enterica
atgccgcttgttgaaagtaaacgatttttgacaaaaaaccttattgtctttgccgttttgcaattctttgtatatatggctttcttttacgcttgttacaaaacgagcgagtatttgcctgctaattggtggcgtatactcctgtttatggctgtgttaggtgctatcttcacttccctttgccccgctattgcaagggataatcgtaaagcgatcagggaaggtagagagcgtaactatgcttattattgtgtagtaataccaatagctgtttactttgttggctatttgtttatgtcttattacaactggtcaatagagttatctaaaatacacttacattatttgagtctgacatatatttttggtgctccgcttagcggcttcgccttagctaagttcgttgaggactaa

SEQ ID NO: 403006 - DNA, 288 bp, Salmonella enterica
atgaaactttctgatgttgcaaccattaagacgaatttccctgatgctgatttttggatagttcgtcgaggctctttaaaaaccgttggcgaaccctcctacactttcaaccctgaaagtataggagttaaggtaacaaggcaggatctggttctttcacgttacctttattactgcttccttcacttgcatcaatcaaaggtatgggaaccagtagcaacgggatcgcttagcctggttaacatcaaggtttctgacgttaaaaacatcgtcctggaaccgcgctaa

SEQ ID NO: 403007 - DNA, 309 bp, Salmonella enterica
atggaaaacctaagtattaatcaggagcggtttagacagcttgtaagcaagtaccctaccctgtacggcctttggaattgggaaagtcgggagatacgcttagaggcgtttaaacacgcgctgacagtgttgagtagcggagaatacatcatggctgttttctttgcgcgtgtatggttagggaaagatgaagaaaatagttacaacatacttaatgcttcttttgatttcgtacatgcggctaaggtgcttgataataaaagtttgctgcttatttccgacttttttaaagatccattttggccttaa

SEQ ID NO: 403008 - DNA, 501 bp, Salmonella enterica
atgaaacggaagttagcttattgggtcattgttgtatgtttcctcccttccctctcgctggctgcaactgtgacacgcatcctcgatggcgatacgttagaggttacagaggataataaaactctacgtgttcgtctgatcgatattgatgcacctgagaaaaagcagccatacggccagaaagcaaaacagttcctaaccgactttgtgaaggatgccgacgcggtagcagtcagaagcatgggaacagatcgttatggcagaacgctggcgcaagtgtacgttaagaagtgtgatcgagaatgcttgtcttacctggtcaatgcggaaatggttaaaaatggttatgcgtgggcgtatcgttaccataacgaaccatccagtaaggcgatggagcgcgaggaaaacgaagcgcgtaagaaccggctcggcctgtggcacgacaatgaagcaatcgagccgtggaaatggcgaaaattacataatcagcataaggagtaa

SEQ ID NO: 403009 - DNA, 216 bp, Salmonella enterica
atggcggctaatacaggtatgcttacaattgattttaagagctttgcagaatccattaaaataactgaaggtgagttagcttatcttcttgaacatgagcaggtctataaaggcattcccttacctaaaccaatttctgtaggctggaacaagaaacgaaaatttcatttcaaagatgtttctgcatttcttgagcaacttaataaggcgaaataa

SEQ ID NO: 403010 - DNA, 342 bp, Salmonella enterica
atgaagcttaataaaaccagcctggtatctttaatgcttttcacttatgcgactcatgccgccccgctgccgctaaattattacttcaaagatagcgattcagctaacatttcgctggatgaaccagctacaggttgcgttatgacggggattcttgtccatcctgtaaataaaccagaaacaaaggttatttggtttaatcaaaaaacatgccgtaataaacagtatgaagtaagctttatcagtaatgaaattaaagcccctgataacatcattcataaaggtgaaacagtacacgttacccctgcgaacgtacaaatagtaaatctacactcactttaa

SEQ ID NO: 403011 - DNA, 204 bp, Salmonella enterica
atgagcattcaagatctaaagggtgatgagagaaccattattgttgtagctttgcaagcattgcaccgtgagcggttaaattcatacaatgccgcctgtcttgcctgtgagctttctggtaaagaatggccgtcaatagagatcttcggccttgaagaagtagataaggcgctgcggctgattggtgcagccccagccagatag

SEQ ID NO: 403012 - DNA, 570 bp, Salmonella enterica
atgaaaaataaattaaaatataaattgctgcatattagattattggattttttattaagttgcactgtgatactcgcaagctgctattactcaattgcttctttgtttggtgtttttaatcctattatgtggctttcgtcctttcttattgattcgctgataggaaagaaaggctctttccctcaatcaattcatgagtatagttcgtggtgggataggttagagttttcgtttcctgaaataatgcagttttttatggctggtttgttcttatgtgtaattgtatacgctacattccatgcaacggttattgtagctggttatattgctgaactcttagagcgcaattatattaaatacatttttggcgctcgttttttacgcttgtatgagaaaatgcaaaagcggaaaggtaaaattatagctcgccagaataaaaaaacatgcgaaaaggatgatctaaatgatgcaacttttgagcattatacaaagtggaaaatcttctataaaagtgacctgagctttgatgagtggaaaaacaaagtcctgaatatcaattcaaagagttga

SEQ ID NO: 403013 - DNA, 786 bp, Salmonella enterica
atgaagccagcaatcaaagcctacagcgaactccagcaagcatacgattttttcaatacaacgctttttaatggtgatctgccggatatgcttctgactctacagcgggggcgtaacaccttcggctattttgctccgtcacgttttgcgggggagtcggtgttgtccgaactggcgatgaatccagattattttggtggtcgctcgctcgctgatacgctctctacgctttgtcatgaaatggttcacgtatggcagcattacacgccaggcgtaaagcagtgcaggggcgggtatcatgatcgggtttggggcaagaagatggaagaagtaggtttgatgccgtctaatacgggaatgcctggcggaaaaaagacggggcagcaaatgacgcattacattattcgcggtgggcgctttcagaccgcagtttatgacctgcttaaaaatggcttttcgatctcctggtatgataagtggtctgagggggctgtaatcccttcaaaggccaatctcgatattcttgatgattggctcaaggtaacagacaaaaacgataaggagcttatcagcaagcttactgagacagtaagcaaaggcaaggctgcgattattgatggtaatgatgatgctgatgcagggataatgattaaaccccctgtaaagggcgctacaggccgtgcgacgttctgctgccctgagtgtggtttgaaagcgtgggcgaaacctagcgctaacctgatgtgcggtgattgtaaagttgatttgattgttgaggggaattga

SEQ ID NO: 403014 - DNA, 294 bp, Salmonella enterica
atgattacattaaataacgcaatgcaagcgcccatgaaatttatgctcgtagcgctgcgctatgccgcttggttcttgcatcctgtaacctggcttatcagtcctgctgtatacgctgccgctttgattggcatgtgtagtttttggggggtaggtgagatctcgatgaacgtcgaaacggtgagcgctgccgaattgcaatcactcgcgatcttcctgaaaaatacatgggcactggtctttatgctgttctgcgcgataaagtttatgtttcgcccttataaatcaaaatag

SEQ ID NO: 403015 - DNA, 339 bp, Salmonella enterica
gtgagtcagagaaaagataaatttgttactgactggttttatgtgccttgcgcatcacaaaaaaaactacagcgaacagggtttttaggcctgggtgatcccaaaatcgttaaagactatgttaacaatgttcctgatttagatgattatgccgcaaagcttgctgagagctataacaagcttgatagcgcagggtatgacgttatcaacatcgtgcctattaatattggctcaagtgatcagtgctttcaggataataaaaattatgtgggtgatgttggttacagcattacgcgcggggcggtagttgtcggaaagctacgagaggtagaaggatga

SEQ ID NO: 403016 - DNA, 426 bp, Salmonella enterica
atgagtgaatctgataacgtccgtaaagttctttctaacattcgttcactgagagcgtttgcgcgtgaagttgattttgagttacttaaggatatggctcaaaagttcaacgctgtagttgaagaactccgtgaagatgcggaacgtgaagctaaagaacgtgaacagcgtgatgcacgtaaacgcgaactgcttgagatgatcgccagtgagggattttcagttgaggaactaacaggcgcttctgatactggtagcacccgaaaaaaacgggtagtacagcaggttcccgctaaatatcagtttgaagttaacggtgaaatgcaatactggacgggcagagggcgtaaacctaaagcaattgaggaagctatagcagcaggaaagaaactggacgattttttgattcctgatgatgaaaaataa

SEQ ID NO: 403017 - DNA, 2181 bp, Salmonella enterica
atgattttaactattgcagagaaacctgagttagctgaaattattgctaaagcgttcggcggtgaagttaagaaaagtggttattgggaatgcgcaaataacaacgttgttacttggtgttatggtcatatgctggtacttacacctcctgataaagttaacccttcttacaaaacatgggttatgtcagatttgccgatggatctaaccgaagtttcccatgaagttaaaactacggaaaacggttatgtagagcggcaatacaaaatcattactgatttgctacgaaaatcatcatcggttattaatgctggcgatcccgatgatgaaggtgagttgttggttagggagatcctttggaaagagaattataacaagcctgttcagcggttattgctgaatgacctgaacgttaatgcagccaaaaaagctctttcaaaattgcaggacggtaattctgaaaaatttatgcgccttgcactaaaggctttagccagggctaaaggcgatcagatttatggtcttaacatgacgcgctattatacgcttctaaatcgtcagcatggcggcaatggtaagcttacgtgtggtagagtacaaacgcctatgctcggcttgatagttaagcgctatgaagattttaaaaaccatgttaaatctaattactatgatgtttattccagtcatgacattttgaaatctgtttatttaaaacttattgctgatgataagtttgctacagatggaaaaatattatctccagaagtggcggaaaacattaaatcagcatgtgttatgaagccctcaactgtggttgttgcgaaagtggaggataagcatacgccaccaccgctaccttttgacctgttagggcttcaagcctatatgttaaaagataacattgatccaactgaaacaatggaaattactcaaaagctacgctctaaagagatagctgctatttcctataaccgctcggattgtcgttatcttacaagcgatcaatttgatgaagcacccgcaaccttagaggctttaaagaaatatattagcggcgggatacttgaatccgttattaataacaacggattcgatattaaacgtaaaggtattgcgtttaacgatgataatgtaagcgcacatactggtatcattccttcggcagaaccgcgaaatcttgataagcttacttcaaaagagaaaaaggtttatgaagctatagtattacgctatctgcttcaattcctcgatgataaaaaataccaatcagcaaaagttattatcgagtgtgagggttatcgctttggtgggagcgcaacaaaactcgttagccctggctggactgcccttgaagctgaggattccgatgatgatagtgcagaggaaaacaccgattcggcttttgatgctatcagcgctatgaaagtagatgatgtaggggtttgtaatgatgtacgtgtagataagaaagaaaccaaaccgctacctgtctacactatgaaaaccttccttgaagatttgaaacgtgttagccgttacgttaccgatcctcacattaaacagcttttgttaagcaaagacaaaggtaagaaaggggaacgtggtggtatcggtacgccagctacgcgagcaacgattatcagcaatctcgaaagtacgggctatttcaccgtacagaacgggaaacttattccgactgagaaaggtataggctttattaaaaacctccctgtggcggtttcagcgcctgatatgacagcattatggcatgagcaacaaatgatgataatggaaggtgatcttgagttaggcgatttcattattaatattaacaataccgttaaagagcttatgaatcctgagctttcacaaggtatcgtttctgctgctcaaaatttcgctgataataaacctgtcggtaaatgcttctgttgttcttctgaaatgaagctaacacctaaagtctatgcttgtcagaatgaaggttgtggtttcaaaatctggcgtaaaatttctgaaaaagaactgacagacaatcaaatgcaattactcatgaacgctggcaggacgaaagtgattaaaggctttaaatccaaagctggaaaatcatttgaggcagcgcttgtaattgacaaagaacaaaaacgggtaacttttgagtttgccgcccgtaaagcataa

SEQ ID NO: 403018 - DNA, 402 bp, Salmonella enterica
atggacaatttcgcatctgctttaccctggttctttttactctttgttgtcgtttgtatcattctctttgctaagaattcttctaaagcaaaaagaaagccaaccacgcgcaacaaggtaaatgggaactcatttagtacaggggcgggtattattcttaagtatgaattaaatccttccaacctaacggccttaatgcttcctgacagcgcgcagattttgactgtgaaaggcggtcaggatcatgtttatctgtgggcggttgtaccagaaggaaaagagaacgtgaagcgttcttttatggttgtaccaacaggagaaggagttattgataatagtatatacattggcacggcctatgtagaaaaaatggtgtttcatgtttttgaaataatcaaataa

SEQ ID NO: 403019 - DNA, 366 bp, Salmonella enterica
atgaaaacaattttcactgctttgattctttcagcaacgcttgttacttcatctggtgcgctggctgctaacgcgcttgcaccatttgaaggggtttcctctgatcctagcgaggaaagccccgacagcggtgatccgtgcgttgctgtgacgtgcttatacggtcaaatgacaggaaacagccagaacgagtgtaatgctgcggttaaggctttcaaatcgattaaggccactaaaaagcacggtatttttgatcctgtaaaaacgcttaaaaagcgtacaaaatttataaacggttgtccttcggcagatcctgatattgtaaagcagattttgaagaagtttggaaagctgaaaagtttttga

SEQ ID NO: 403020 - DNA, 2022 bp, Salmonella enterica
atgcaattaaggcagaatcttaaaaagtccgatattatatcaactataatattcgctatcttaatgttaggcattggcggcgcaatcggggcgtatggaggcggttatgtttttctgcttatatcgaaagtagatactaatcttctatcatacgataccttaatgaatgcgtggcctttatgggagtataaaaagttacatgccgcaatatcattaggtacaattgtatttgcagcggcaattatcgttcctctggctgctatcattattggtgctttctttgagtttcctgaaccggatgtacatggaaatgcaaaattaataactgatgaggaaatcaaagaaagtggtttgcttgatgctgatgaagaatatcctgagattctgattggtaaagttgcaaaaggtagacacaagggtaaataccttaagtttgcaggacaacagtttttagggttaggcgctccaacccgaagcggtaaaggggtaggttttgttatccctaatctgctcaattatcgtgattctgtttgtgttctcgatattaaagctgagaactatatatttacggcggggtatcgtaaaaaaatggggcaggaagtttttgtttttgcccctgatgggtatcgtttttccgaagaagaatttgaggaatttaaatttagtgattactacctgaatctgtcaccagaagaacagcaagcttttaatgaaaagttccgcaatactgagcatgttttatcacaccgctggaacccgcttgactacataagccgttcaaaatcgcgtcgggttggagaaataaaagatttggcaacaattctttttccagatgatgggggtgataatgctatctggaacagtatggcagaagcagtatttgaatcttatattctgtacatgctggatatggaagaaacgataaataagatcaacgcagagattgaagaaaacaggaaaaacggtactgatgatgacagggagcttatgaagccctatccggtttctatggcgcaactgtattcccttactggcgtaccagatatggctgagtggatgaatgatgaaatcctttactggaaagataaagggtatccacttagtaaaggttgtgttgaaggtttcaacagatttatatccgtagatccaaaaacgcgcggtaatatcatgcagaacttcaataaacctcttaagatatttgaggctgagtcttgccgactcgctacttctgcttctgactttgactttaatgatttacggcgtaaaagaatgtcagtatatattgtgctttctccaacaggcatggaaaagtataagcagttaattaatttgttctttagtcagttggtgagagttaacacgcaaactctgccagagcatgataaaacattaaaatatcaatgcctcctagtgctggatgaatttacgtctatggggcgtgtgggtattatagagaaatctatagcgttcacggcaggttataatattcgttatatgattatctatcagaatgatgaacagttagaatctgatgatgcttacggcaaatcaggggctttcacgctgagaaagaaccttgctgtagaagttgtttatcctcctaaagatgttgattctaccgctgagcgtattagtaaaacattcggcaagaaaaccgttaaagttaaaactaactccagaacaagtaacggcggtaaaatcagtaacggcacgaacgagcaatacgtaggccgtgacctttatatgccgcaagagattgtagagctagggtcacaaaaatatgtgatgcaaaagattaataaggggaaaagaacgaaagtcgccgttaatgaagtcataatcatggaacaggttaagccgtttgttgctcataagattgtgtactttgatgaaccggtattcatggaaaggcgtaaggttgctactgacaacgttccagatgtacctatcctgaatgatattgaacattatgaaattccacgcgataagcggcgtgatattccgtctatcgccagtgcttaa

SEQ ID NO: 403021 - DNA, 1062 bp, Salmonella enterica
atgaatgaatcctatggaaatttcaatgtaatccgtaatcagttatccaaaacaggaataaccgagattttgggttatgacggtttaacagaagttgctataaaccagcctggaagaatctggtttgaacgtggcaacggttgggagtcgcaagttaatgaagattgtaattattccaatcttgaaatgcttgctcaatcattatccgtcaaaagtcatactggcggtattgatcaggattacaatgcttcgaaacctattcactctgtaaccttacctgacggggagagggggcaaataatcttacctcctgcggctgaggacggtacaatttcctttactattcgcaaaccgtcaaaaagcaggtttgatttaaacagctatattaacagtggtcgcctttctgattttgaaatttgtggtagagcttacgtaaaagaaaaggctttgacaggcgaacaactcgaacttcttggctttctcaaagataaagatatggatcgcttctttaaaaaaagcgtccagatgcgtttaaatcacgttatggttggtgctacggggtctggtaaaactaccttcatgaaagctatagcagacctttttccagcaaacaggcgctatataacgattgaagatacacatgaacttgatttgcctaaccatcctaatcatgttcatttgttttttaagcgtgaggggatcggcgctacggcaaaagatttaattgaagctggtatgcgtatgaagccagatcacatcttcctcactgaattaaggggcgatgaagcctggaactatttaggcatgttgaatactggtcataatggtagcctgacttctactcacgctgacgataaccctgctgctgtatatagccgactttcatcacttatcaaagaatctaaggtaggtacaacgcttgattatggtttgattacaaatactgtagccagcacaatagatataatctccttctggaaaggttcttatatgacgaaaatctattacaatccagaagaaaaaaatgaagctgttatgcgtcttttaggcatggtggcttaa

SEQ ID NO: 403022 - DNA, 1227 bp, Salmonella enterica
atgaatgataatcagaaagatgaaatcggtgctatcccttctattgatgatgatcgcgcaacggtagacttacaaggccagcgcggtaagaaagcctcaaaaggttatctgaaagacattctcatatttgggggggctattgttctaatcctcgcggtggcaggtgcctttgtctggagagctttccataaagttgatacagaagaagcgggtaagccggttgatccgacacttgaaaaaagtgtaggtagcgatactgggaataggggcgtggataagctgatgaataccattgctgagcgtaaagcggcagaagaaaaagccgcagaagaagaacgtaaagcagcagaagcaaaacgcctagcagaagaaaaagctaaacaagatgcgctaatggctcaattacaagcccagggtaaattaggtaacggcagcgcaaacaacaacacttcacgagctggcgggaacggtggtaataacgatgccccgccaacgccgcaggaacgaaagctacagggtaaaggcttggtttacgcaggtagcgagggcaaagatactgctaatggtggtgcggcctcacaaagcgcgggaggaggcttaaataaggcgctggaaggtggtacttacgccaatggtcaggcttccattctgaaagaccgtagtttgctgttaggcatgggtacagtcttaccctgtgtgctgaaaacaaagatcgttaccacttatcaggggttgccaatctgccagttaaccaaaaacatctactcaaacgatggaaatacattattgcttgaggcgggtactaaattctttggtgagcagcagaacgcccttgttcaaggtcaggcgcgagtattcgtaaactggacaacagccgaaacacctaaaggtattcgcgttcgtattgatgctcttggtgttgatggtcttggggcggcgggtattccggcatgggttgatttgcacttctggcagcgttttggtaatgcaattatgcttagcttcattgatgatgcgctggcaacggcagcaaacaaaatcagtgataataacaataataacagcattaaagttgataataccgaagatgccgccagtaacatggcaagtatcgcgcttgaaaactcaattaatattccacctacggcatatattaatcaaggtgaattgatttcaatcatcgtaccgcgtgatacttatttcaataatgtttacgaactccattga

SEQ ID NO: 403023 - DNA, 789 bp, Salmonella enterica
atgaaaaagattctgttagctgggtgcatagcggcaactttaccaggcgttgcgaacgccttgaatgtgccgcagccgacgagctatgacgctcgcattcaggaagctacttataatcctgatgatgctgttctcgttagggttaaagccggaacatcaacactcattaagttacaggatggtgaatttataactgatgatcaggcagggatggggtttggtgatcctgatgcttgggatgtttctgtacgagggaataatatttttatcaggccaatcgctgaacaacctgatacgaatgttacgttagtatcaaataagcgaacttatgttttctttttacagtctgtaaagggtaatccttcatggatggttagatttaaatatcctaaaaaatacagtgcagcaaacgcgacagtatttaaaaggccgccttgtcagtctaatggcgcttacaatgcgaactggaattatcagttgcagggtaaagagtctttcgcaccgtatgaagtatgggatgatgggcgctttacatgctttaaatttaatccttcaagcgatcttccaatgatttaccgtgttgctggcgatggtgaagaaatgctagtgaatggaaatcctgatagcgagaataataatattattgttgtacaggaaactaaccctgagtttgtaattcgtctcggtaagaaagttgtagcggttcggtcagatacgattaaggcaatgccgtctaatcgtagtggtactaccaatggcatgactagggagattaaatctgatgaatga

SEQ ID NO: 403024 - DNA, 792 bp, Salmonella enterica
atgtttaaacgcaatccaaaaaagctcaacgaacaagaacgcgccgaaatttacgataaaaataaaaaaatggccgaactaaccgctccagaaagaaagcaactagacgctgataaaagcgtacatttaagcgctattgcagggtttcagcgcgatagagtttcagaacagcgacgtatgatgtggattggttttggctttggtggaatcggtgtcgttgcggcgggtgcaatggctgttgctcttgcttttctaacacctttgaaagaggttaaaccatatatcgcagaagtagatcaggttacaggtcaggtaaatatcgtttcagcagtaggcgacgataaaatcaaacttacttatcaaagcctgattgatgcttcaaacctcgctaactttgttgtagagcgtgagtcttatgactggaactcaattcaaaacagtcttgaccaggttaaactacgttctacacctagcgtttatgagtcaatgaggcgcttcatagttgaaagccctaactcaccgcttgttttgttggctaaagataaagtaatgaaagtcggtattacttctaagccgattgtagacagcaacaaaggcgttggaaccgtgcgattttataaagcggttactgatggggctggtaagccgattcctggctatccgattacgcactggcaagccacgattacttttgactatgagcataaattaagaaccgatgatgattatattaataatccacttggttttaatgtgactagttatcgtgtcgatcaagaatcacaaaaataa

SEQ ID NO: 403025 - DNA, 681 bp, Salmonella enterica
atgaggatgctgaataaaaaatcctttatgctgttaagtgccttaacagtgaatagcatactggtttcaccgccaacatttgctacgggtattcctgtatttgatgcggcaagtgcaactaatatgcttcaacaattacaggcagcgaaacagcagtatgatcagcttgtcgagcagtataagcaagctaaaagcttgcatgaccagacgatagcggaaggtaagcgcctatatgaaggggtgactaactttgatgtaaacgacttattggacgacccaacattaagtagctatcttccaaataaacgaacggctgattctttattagatgctgcggataatattggtgagttgagggagaagtacaaactcacttcttctgattccgaagttcagaaagcatatgatagtatgttgactgaattaaataatatgcaaactgcgtataatacggctgttaaacgcagtgatcatatttccaatctttccaaaaagcttgagcaagccgctactccgcaagaaaaagcggattatcaaaacgcaattaacactgagtcaaataatcttctcaatgagaaaactaagcttgacttagcgaaagctaactttgatgcaaactttaaaattgctcaagcatcacgccgcgctgagtttaaagaagaatttagcgttgataaataa

SEQ ID NO: 403026 - DNA, 2538 bp, Salmonella enterica
atggggggaatgatgtctacgaacaaatcaaacgcgcgaagcattaacaagaaagctcttgaaggaaaaattccccactatcgttatcctgtgactgactcaatctcaatgattggggataacaagctaatggctacggttaaaatagcgggttatccatatgagctggctgatgattctgaactttatagtaactataatttgtttagaacatacctggtcagtattggtaaagatatggctggtcagcttggtttatggacttacatagacaagcgtgaaatccttgttaatgatgtttataaatcgaacaatgtttttattcagaagtttgttgataaatacatggagcggtttaatacaggtggcaggtactatgaatctgtatactacatcacgctgatttataattacggtcaatcttcaattgacgatggcataaaaaaacttgattccgtcattaaaatgtcggaaaaaatttgtggcccatttgggttatcggtactgcaaaacgatgggtatatgaatgagtctgcgaatttcctttcatggctcattaaccatcatgattttaaagtgccacttgtagaagatcctatctacaaagtagttgggaatagtgagcgcatttttggttacgatataagccttatccgtaatgcaaatgatgctcaagataaatattgtgtttcttatacccttcgttcattccctgcaaagattaagcctggtgcgcttgattttattctatcaattccttgcgaattaacatttgcccaatcttatatttatactcgtcagttaacagctatatcgatcattgacgggcaagcgaataaaatcaattccacaaatgccgcaattgatgaagaaggtacagcgctcaactcaattaaaaaccttgttcaaaacggtgaagtgtttcttggtgattatcatggtgttgtttcggtttatggtaaaaccgctaaagaggcttatgataatgcaattcttgttgaatcaggctttagcgctgcgggatatgtgctgcttcgtgccacggatgaacaagaagatgtttttataagttcacttcctgatgctaagaaaagaccgctcaataccgttcgttctacttctaccctggctgaccagttctctctacataatttctcggtaggtaagcgtactggcaaccctatgggggatggaacggcaatgatgcctgtagaaacgttacagggcgggattcattacctttcaacgactgatagtgatcctgctaaagatgtagtaggtgagccagaatcagggcacggtatctttttaggtcaaacaggtacaggtaaaacaacattgcaggcgtctttaacatccttcgttgagcgctttaatccgatgttattcggcattgactttaagcagtcgatgcgattacccatgatgatgttgggtgcgcaatacttcgttctgagggaaggtgagtttactggcctgaaccctttccagttagatgaaataaaaatggcaacggatgataacggtgtagttgatcaagcctttgccgaacaaattaaggagcgtatacgccagttctgctactcctgggtagaacgtataggcgcaaatagtgagggagggcttgatgatggtgacagcgctaaaatcgtcagggctgtagatgcggtaatggagttgccacgagaaggacggcggtttagtaacgtgcttgaaatgattgctgcatcgcctttacgtaatcgccttatggagttttccgcctacgcgaacggcgggaggatggggcgttatgcctgggcggttgatagtcctgaaaataagtttgatccattgctgtttgatagagtggcgttcgacagtaccgtaatcctgaaaaaacagcctaatggtaaacctcaccctgcggctgaaattcttttagcggttttattcttttataaagatttaatgaagataaacccgcgcaagaaaggccgctggacaatattttcttgtgaagaattctggatgccagctaacttcccgcttactcaagagcagttaaaacaatcgctcaaagcggggcgtatggattatgaaatgtgctggcttatctctcaacagccagtagatgctattaactgcgctatattcaatgagatcaatgagcaaacgacaattcgcgtactgttacctaaccctaatgcgaaatggcagcattacaaggaaatcgggataacacgaaaggaattcagaaagcttaaatctcttgcgaaaacaagccgtaccttcctaattaagaaatccaatacgagcgtttttggtactatggatttacatggatttgatgaattcctgcctgttttatctggcgataaatatggcgtacaagctgctgaggaaatcatcaagcggattggttccaacgatcctaatgactggataccaatctttattcaagaaaatgcacgtaaccataagttacgtaaggctgagcatgatgatgaagaagaaggtattgaatatgaggatactgagtatgaggatgctgaataa

SEQ ID NO: 403027 - DNA, 399 bp, Salmonella enterica
atggccgaagatgatgatgtagaacttgaagaagaagaaacgattaatacccaacatctaacgcttaatgtattgaatatgattcctaatatggggggcgttcctcttgtatggggtgtttctttacttggttcatcaatgctgcttgctgtaataggttttattgcaacaaacagtcttttgggcgtgttgtttgcgcttccaacgattttagctttcttcatcattaagtttatttgtatcaatagcctcgatgctttaagagtttttcagcttaaagtagctgggaagttccgtaggattcttaatggcggtggactttataagttatccccgtcactaggtgatgaaaatggggggaatgatgtctacgaacaaatcaaacgcgcgaagcattaa

SEQ ID NO: 403028 - DNA, 318 bp, Salmonella enterica
atgcaaaaaactaaaaactttctgttaaaggtaaaggttctggctttttctttcttcgctagtgtcatggcatctacacctatgagcgcgtttgctgcgggtggtattagtggtgcggaaggtgggatctcaaccgcgcagaccgccatttactctctgcttggtgcaggtgcggcggtatatcttttgattaaaggctttatgcttaaaatcaataaaattggctggaacgatttgtttatggcaatggttacttgtgctgtcgttgcgggtctgccagcgcttgctgtttggttctgggatctcggcggcaactaa

SEQ ID NO: 403029 - DNA, 678 bp, Salmonella enterica
atggttcttgctgctcctgtattagcaagtctgctaatgcaatgcggtgggaatgttgatccgactacactacaaacaattatttcagtggagtcagacggcaatccttacgttgtggctaatgtcactaaaaacacttcgcactactttaaatccaaaaatgaagcagtccattttgttaatgagcttgctaaagtaggtgataaatactctgtcggtcttggacagatttatgtaggtaactttaaaagttatgggttgactaatgaaacggcctttgacttttgtaagaacgttacggtggcctcaaaaatatttgaggaatgttattaccgtgcgattgatagcggggaatatcctgatgaacagcaagcattgagggctgcggcatcgtgctactattcaaataattttacgagggggttcaaaaaggagaagaacgggaaaagctatattgatctggctaataacgctgtgaataaaatctattctgttccggctatgaaaccagtgggggcaggggatagcctaacgccagttaacaataatctacggcgcggcattgtttaccagcaacccgaaggggatcagcctgaaatggttgaaagtgcagttaatgtagaagggaacaaaccagcgcgggctgcttgggatgttttcaatgatttcgctaaataa

SEQ ID NO: 403030 - DNA, 411 bp, Salmonella enterica
atgttgcatttttatgaggacactaaaggggggaagtcttacaagtctgtagcagtacgcctcgatctggatggtaagttgaaccgaatcctaagcgctttaagtgaaggggtgaatgttggaaagaagaacataatcgaagcgatatttaatatatccattggtaatgatgaatttttttccacgtttgatcctcacaaagactggaaacctcaagtagtttatgatggttattgttcggttggtgtatcaattcagttagatgcttacctcaactttaagataacaaccttaagccgcaaggcggggataaataaaaagaaacttttgattctggtcttagatcagttcattgagagcttaccagtgttagcactggtaaagaaaaaactagctctcaaagttaagtga

SEQ ID NO: 403031 - DNA, 504 bp, Salmonella enterica
ttgtatacgattaacccgctttctaagaaaaatttattgctgcatatccataaaatcagcaatatttttcctgagctaaccagtactgaactggtaacgcttatgttgcattcatcagggttaaaacctcctagaatgggggagttaatgtcaatatcaaaaaaaacaataaactctcacattgaaaacatacgggttaagttccagttagacaactatgaagaagttaaacaggtatttgaacttcgaattacgcttaactcgaaccctgaacgttataaatctcttttccctgagataagcgatgaactttaccagtgcatgatcttggtatgtatgggctttacaatagaagaaattgttaacagggaaaaagaaaaaaccgctgaactggtacgtaggcagatagaggacttgaaaagtacgtatgcggttgattttttgtcagatctaagggtattcttcatgattcgattaaagcttgaccaggctaagcatggctga

SEQ ID NO: 403032 - DNA, 1065 bp, Salmonella enterica
gtgaaacaaaaacaagatattcatgctgggcttgtcagcggtggcgctacagtagccgacaataaagtgataacacaaggcaatcagcttattgaaggtagttacgatattaacctggctgaaatcaggttgctctggctggccttgtccaaaatcgatagtaagaacccgcagccggagggcgcggaaattgtgttaactgcgcctgaatacagcgctatgtatgatctagaactagcaaatagtgcgcatcaactacaatctgtatcattaacattaggctcaaaacctatttatacttatgaatggaacgagcgcaaaaaaagagtcgatgcagttgctagatattggttttccgctattacttatggagcgaataaaggcgcggatataacgctttctttctctccaaagattgcaccttttctgtacgatcttaaaaatgaatttacgcaaatgaatgttttcgcaatggcgaaacttgatactccatttgcatttaggctttactcctggctaagccgatatagaaaacttgataaatataaaaatccaaaaacgggcgttatcagcactgaaaaaattagcattgattggatgaaagatcgttctggtcttacggggaaatatgcagactttaaaaatttcagggttagagttctcaatcctgctgttgacgctatcaaccgaacgactgacctgacagttcgctatgaaactgttactacaggtagaaaggttacgcacctgattttcaactacatcgtggaaggtgataaagcttacatcagggttaagccagagccacctaagctaccgcgtaggccgagagttaaaaagggcagccacggtgagggagaatgggctaaagcgtgcattgaattggtacgtgagtatgaaagaaaactaaaagaatacgataaaaacgaagcgttgccagttgcttatctgcgtaaagaaattctttattatgggatcattggcaatactgaggcggttagttatatagaacggcttatttcagaacgcaaatcaaaacgagccgcaaaaaaagaggaaaagtga

SEQ ID NO: 403033 - DNA, 249 bp, Salmonella enterica
atgattgaaaagtcgaagcttttacaaacctatcctacggcggctgaggtgaaggctgctcgtgagagtaccggcctttcaacggatgaaatcgctaatctctttggcctttcagacggtagcgcatggaggaaaaaagaaatccaaaaacagggaagtaaaaatacaaggctacttaagcctatggaatttgaaatgcttctgcttatcgcaggaacgcatccaaatctaaaaattacagataaataa

SEQ ID NO: 403034 - DNA, 1053 bp, Salmonella enterica
atggaattaaaaaattatattaaatatatttttcctttaggattgctgatacccagcgttgccaatgcagccgctgattttgaattgcctgttaatatgctcactgatatgtataaggagttaacgcaatttatatcaagtaatctaagctcatatatcggtgatattaatgaaatattccttccactaatgggggctgtttttggcctttattttgtctggaaatggggattagttcattataagggtgatcctaatgcgattcaggatatgcttatcaacggtttaaagttaatcgttatcatgtctggccttgtcggtagtgcatggtatataggtaaggttgttccgttcgttatggatgcaggtgatgaaatagcatccaggctgatcggctcaacgggtactttctcagcgcttgaaactgtcattcaacaaattaacgcgaacggtaagcgtattcttgaagcaacaaatgaattaagtctatgggattctgatatttcaacaatcctcgctgcgactatggcattaattctcttttacgcagggggtacagcatttgttatctatgccgccgcaacaatgcttattgctaaattcatggtaggtctacttcttattgtcgggccactttatttaatgatggctatgtatgaacaaactgttactttcacgaaacaatggataggccaagcgtttaactatatcctgctcaatgtttttgtaacgctgactattcatattcttattgaatttatgagtaaccagttccctgtaggtgctgaaataggtttaggcggcgctctttatgccttaatcgcatttttaatgggcgtttttatcattggtcagataccgtcgttcgtgagtaccatcactggcggtaatggtatcagtgggattactggcgctactaacgccgcagggggcatgatgtttaatacagcgtcaggtgttgggggtatggctggacggtctttaggtaaaggcgttggcaaactcgcacaggcaggaatgggtaaattgcgtggcggtgtgaaagctggctga

SEQ ID NO: 403035 - DNA, 582 bp, Salmonella enterica
atggctgattcaacgtatgatgcagataaagaagcctacacttataatcattttgatataaagattcagttagcaaaagttgttagagttgttcaggatgttagagatacaggtgcggcattatttgaccgcgccttagactggtattcagaagaagatcaagtaaaggtattagatactgtcacgtcaaataccaaagctctaacaaaggttgatggtttatgtaattacctttgccaacatttagaaaatgaatcactgtatgctcatgatccaaaaatggacagattcaacaacatgagtaccaatgagattatcgactattataaaaaagttacgaacgatttagagaaacaagtgaaaactcttgagggtatgacgataatcacccatccatcacttgaaaaagaaaagcctttaatggcgttcgttatggatgatgtaaagctttactcgtctgcaatttataattctcttgatgatatagaacgggcgcgtgacttaaaccatgttcgaacagccatagcgagaggtgaggaagtacagccacggcatataggggctgttatcccgcgaaagtag

SEQ ID NO: 403036 - DNA, 258 bp, Salmonella enterica
atgaataaggttactttagttactctactggtatcagcgtttatgctttctggttgtgatgataaacaagaaaaaattgatttctatatgaaagctgaaaatgcaggtgcttatcataaaggcttagcgctttgtaaaacgggttccagcgaagcaaaagattgtgacgcaatctatgaggttcagggtatgaaggaaaaagataaggctgctgataaaaaagagaacttcaaaaaagaattcagctttgatcattga

SEQ ID NO: 403037 - DNA, 426 bp, Salmonella enterica
atgcaatatgcgaaacctgtcactctgaacgttgaagagtgcgaccgtctctcctttctaccgtatctgtttggcaacgattttctgtatgccgaggcgtatgtgtacgcgctggcgcaaaaaatgatgccggaatatcagggaggcttctggcacttcatccgcctgccggacggtggcggttacatgatgccggatggcgaccgtttccacatggtgaacggtgcaaactggtttgaccgtaccgtgagtgctgatgccgcaggcatcattctgacttcccttgtgattaaccgccagttgtggctgtaccacgacagcggggatgcaggactgacccagctttaccggatgcgcgatgcgcagttgtggcgtcacatcgaatttcaccctgaatgcaacgcgatttacgcagcactggactga

SEQ ID NO: 403038 - DNA, 423 bp, Salmonella enterica
atgtactgtactgttaaagaaatcatccgcgatgtactggatacagacgtgccgcacagtgaatgcgtttttgccgtggtgctgacccgtggggatgtgcgccacatagcccaggactggagtctgacagacgatgagctggaaaccgtcatgcagcgactggacgatgcctttgagcatggtgcggatgtcagcattgttcacgacgttgttcgtgagctgatggaagaaaagcgcgccagccgtcaggtgacagttccggcggtgatgctggaaaaagtgatggcgctggcaggcagtgaaatgaagcgcctgtatgccgtcggaagcgagaacgggggcgacggtgacgcattcgtcagagaagaacgcgaagcaatggacgttgtgttacaggcgctggacggggagcacatgtcatga

SEQ ID NO: 403039 - DNA, 192 bp, Salmonella enterica; identical to SEQ ID NO: 40798

SEQ ID NO: 403040 - DNA, 528 bp, Salmonella enterica
atgagtgcacgtggtatcaacaaggtcatcctcgtcgggcgtctgggcaatgatccggaagtccgttacatccccaacgggggcgcagtggcaaacctgcaggtggctacgtcagaaagctggcgcgacaaacagacgggggagatgcgggagcagacggaatggcaccgcgtggtgctgttcggcaagctcgcggaagtggctggtgaatatctgcgcaagggcgcgcaggtctacatcgaggggcaactccgtacccgtagctgggaagataacggtatcacccgttacgtcactgaaattcttgttaagaccacgggcaccatgcagatgctggggagtgcaccacagcagaacgctcaggcgcaaccgaagcctcagcagaatgggcagccacagagtgctgacgcgacgaaaaaaggtggcgtgaaaacgaaaggccgtggacgtaaggccgcgcagcccgagcctcagccgcaaccgccggagggggaggattacgggttttcagacgatatcccgttctga

SEQ ID NO: 403041 - DNA, 1959 bp, Salmonella enterica
atgcctgtaacgaagtgtgaaccagaaaccacccgcaaagcaagccgtaaatctgcaaaagcgcaggaaacagtcctgtctgccctgctggcgcagacggaggaagtgagcgtgccgctggcctcgctgattaagtcaccgctgaatgtgcgcacggtgccgtattctgcggagtccgtcagcgaactggcagagtccattaagggcgtcggcctgctgcagaatctggttgttcatgccctgccaggtgaccgttacggtgtcgccgcaggcggtcgccgactggcagcactcaacatgctggcagagcgcaacatccttccggctgactggcctgtccgcgtgaaggttattccgcaggaactggcgactgcagcatcaatgactgaaaacggtcatcgtcgggatatgcaccctgccgaacagattgccggattccgcgcaatggcgcaggaaggcaaaacacctgcacaaatcggtgatttgctgggctattcaccccgccacgttcagcgaatgctgaaactggctgaccttgcgcctgtcatcctcgatgcgctggcagaagaccgcatcaccaccgagcactgtcaggcgctggcgctggagaacgacaccgcgcgtcaggtgcaggtgtttgaagctgcctgtcagtcgggatggggcggaaaaccggaagtacagaccattcgtcgtctggtgaccgaaagtgaagtggcggtggcggggaacactaaattccgcttcgtgggggctgatgccttctcgccagatgaactgcgcaccgatttgttcagcgacgacgagggtggctatgtggactgtgttgcgctcgatgccgccctgctggaaaaactccaggctgtcgcagagttccttcgggaagccgaaggctggggatggtgcgccggacgcatggagcctgtcggtgagtgccgtgaggatgccggaacataccgctgtctgccggagccggaagcggtgctgacggaggcggaagaagaacgtctgaacgaactgatggctcgttacgacgcgctggaaaaccagtgtgaggaatctgaccagctggaagcagaaatgaagctgatgcgctgcatggcgaaggtcagagcgtggacgccggagatgcgtgccggaggtggagtggtggtgtcctggcgttatggaaacgtatgtgtccagcgtggtgtgcagttacgcagtgaggatgatgcggctgacgacgctgaccgcacggaacaggtgcaggaaaaagtgtcagtggaggaaatcagtctgccactgctgacgaaaatgtcttccgaacgcacgctggcagtccaggcggcactcatgcagcaaccggacaaatctctggcactgctggcatggacgctctgcctgaatgtgtttggcagcggggcgtacagtagtcccgccagaatttacctggaatgtgggcattactcactgaccagcgctgcgccgtcagggaaggaaggtaccgcattcatggcgctgatggcagagcactttcgccttgctgccctgctgccggatgaatgggaacgggacatgacgacgttcctgtcactcagccaggaggtgctgttatccctgctcagtttctgcactgcatgcagcatccacggcgttcagacccgtgagtgtggtcacacgtcacgcagtccgctggactcgctggaaaccgccatcggctttcacatgcgcgactggtggcagccgacaaaagcaaacttcttcggacacctgaaaaagccgcagattatcgcagccctgaatgaggcaggactgtccggtgccgcacgggacgcggagaagatgaagaaaggtgatgcggctgaacatgcagagcaccatatgaaagacaaccgctgggttccaggctggatgtgtgcaccacatccacagacagatgccactgaacgcaccgataacctggctgatgccgcctga

SEQ ID NO: 403042 - DNA, 435 bp, Salmonella enterica
atgaaaactgaactgaccctgaatgccctgcagtccatgaacgcacaggaatatgaagatatccgtgttgcgggaagcgatatgcgccgtaatctcactcacgaggtgatgcgtgaagtggacgcaccggctaactggatgatgaatggcgagtatggcagtgagttcgggggctttttccccgtccaggttcgtttcacgccagcccacgaacgtttccacctggcattatgttcgccgggagacgtctctcagctctggatgctggttctggtgaattgtggtggacagcctttcgccgtcgttcaggtgcaacatatcttcacgcctgtcgctatcagtcacacgctggcgcttgccgcgacacttgatgcgcaggggtacagtgttaacgacatcatccatatcctgatggcagaaggaggtcaggcatga

SEQ ID NO: 403043 - DNA, 597 bp, Salmonella enterica; identical to SEQ ID NO: 79077

SEQ ID NO: 403044 - DNA, 459 bp, Salmonella enterica; identical to SEQ ID NO: 402861

SEQ ID NO: 403045 - DNA, 336 bp, Salmonella enterica
atgaaactcaatgctcgccagatagagaccgcaaagccgaaagagaaagcctataaaatggctgatggaggcggcttgtatcttgaagtctccccaaaaggttccaagtattggcgcatgaaatatcgccgcccatctgacaaaaaggaagatcggctcgcttttggtgtatacccgacgatcactttggctgaggctcggggtaagcgtgatgcagcaaagaaattgttgtctcagggcattgaccccaaagctgagcaaaagggggcacaagctgaaattgaggggcatatttatttgaaactatcgcaaggcaatggcacgcaagtaacctaa

SEQ ID NO: 403046 - DNA, 300 bp, Salmonella enterica
atgcaccgccgcgtgaaattcgtacggaggtggttaagccggtgtttactaacgtgtgcctgtctgacgactttgtccgcatgtacaacgacgccgccgccagtaccgaacgtgcgttatcaggaaaacctgaaaactaaatgcgtcacgcagctgccgcgcctgaatggcacgcagggaaaagatgcggcggaattactgacactttatctggagttatacgggaagtgtgctgcacgtcataacacgctggttgatgaaattaatttaagagagaatattatttatggaaaaaattaa

SEQ ID NO: 403047 - DNA, 162 bp, Salmonella enterica; identical to SEQ ID NO: 379332

SEQ ID NO: 403048 - DNA, 1536 bp, Salmonella enterica
atgacaaattccctgatgctggcgtcaagccacatccttctcgctggtagcatttcaaatgcgacagaaaatgcgcttatcgaccgggcgcacgaatttgtcgatgctttcgttgaagaggtacttaaggctggtggtggctttgttatttatgtggcagcagaacctgttaactcagataacaaacctctgttgttcgattggaccgttgcccgggccattgacaaattactgccagatgacagccaacaggttcgcctaaagattgtagcctcgcaggagcgtctccaatccaaagccaaccctgagcaacgcaggttactcttaggaatgattgctcgaggtgttgccgaactagttcctctcgaagaggaggtgttgactggtggtaatgtcggtgatgaacagattgaacatgcaacggcaatggtggcacttggtggcgggaaaggcgttctggaccgtgcgcgtaagatgtccaaaaggcagttacctgtactgccactcgatttgcaactgggtgcaaatagcgaagacggcaaaggtgcaattgggatcttaaagagtttccaaaccactcctctaacatacatgcctaatagcggtaataaggttatcaagactctggccgcgctatcccttcaagatcccgttatgagcatatccgatataagtaagcgcatcgtcaaaattttctacgaggaagaactcgctagggtccaagctttgccccccgatgttctagtactgacagctttggatgtggagttggctgctgccaaacaagcattcggtatcgcagaagatgctgagcatacaactacggagaacggtctccatatatggaaaactcctgtgtcaaaacgtagtggcaagacggctagctgtgtgttggcctgttttgctggtgcgggtaacgtagatgctgcttcggtgacttctatgctcttaggggaacttagaccagcgaacgtaatgatgttgggaatcgctgcgggtctacgggataagtgcgctctgggtgaagtcgtcatcgctgagcgagttgtcgcttatgaaggtgcggcttttcttgaagagggcagagtcgaaaatcgtccggaaattagcagattaagtatgcgagttcgccaagatgttagttcatacctttccaacagggcgacactcgaatttcgccttacagaaagttatagaacactgggtattgaattccccgaccaagtggaggcgggtcccgtcattcaaggagtcatgccgaagacagccactgttgctagtggtgaaaagcttcttcgagatcccgataaattcttgggcatgcgtgagcttcacggtaagactgaagttgcagaaatggaaggcgcaggacttttcgctgcatgcgccaactttggcaaaccagtgctgatgattcggggtattagcgattttggtgattcgaaaaaggacaaccgatttcatctcttggcagcgaaagctgctgcggcagttactgtcgactatatagcacacggcatgacgttacaggattaa

SEQ ID NO: 403049 - DNA, 948 bp, Salmonella enterica
atgtctctatcaaatacggctcttgaatattttgaccataacgtgctgcgcctccctggagagaaacgcaaggaatatcacgcacaggtcgacaacctcgtaagcgagctaaaaaaacgcattaccgataagtcaaaactcaaagtcaagaaggtagtgaaagcgggttcattcgctaaatacactattctgcgcaaaattgacgactatccaacggatgttgatgttgttttttacatcaccggtgttgaagaaaacagcaagtcctacgaagttctgtgcaacaggatctacgatttgttgatagagatctacccaaccaaaaaagttgaggacttcgaaatccagcgtcgtgcagcaaaggtaacattcgtcaagagtggtcttgaagtagatgttgtccctgttctgcaacacagcactctggcagaccacggttggcaatacgatatccaaagcggagccaggaaccttacctgcgcaccgtgccacatccaatttatccgtacaagaaaggataaggataagcactttcgcacgttagtgcgtttggcaaaacgctggaagcatttccacgatatcccgggtctgaagtccttccacatcgaactgattctggcccatttagttgatacggatggcgcagcagaaaatatcgagaaacgtttccgggaattcttagtttatattgcccgtaccaaactgggcgaacgtatcgacttcccagaaaacgaaggcaagacatctgttagcttcagtgaccctgttgtgatcattgacccggctagtccagaaaacaatgtggcatctcgtataacgaaagacgaacaagaacaaatagctaaagctgctgaagctgcctgggaagcagcaacatatgcatctactaaaaacgatgatgatctctggaaagaaattttcggtggccgtttcaagaccaaggattaa

SEQ ID NO: 403050 - DNA, 489 bp, Salmonella enterica
atgagcacttattcaagcactagcacctacacggttgccgatgttgaagaggtcatgtgcagtgtcaaggctgatttgattatgattgctggctcgaccaaggcgatgactgagtccgatgcagcaaactatgcccacgatatcgaagtcttggccaagaaaaactatcttaaattcgctgatgtgacgcttatgaacggttccactgaagtccgcgcagtcaaatatgagtttcagactgaaggtgcaacgggaacaggaaggcccggcggtgtattgtggccgctgacaccaaaagataaaggcgggtgggttcgtatccatttgcgctataccgattcttcatcggcggaagaacgcgcgaagcttcctctgaagatatcttgggtgccagcctcaaccgatgtcggtcacaaaggactagcctcttctgctggtcgtaactatagcagtaatggttttggcacaaacagagaggatttttcgtga

SEQ ID NO: 403051 - DNA, 897 bp, Salmonella enterica
gtgagtaactcatcagtattcgaagtaaaaactaaccttccaacagcccaacttgatgttcaagcacagaaattattgggttttgaggggcgctatacgcgagttaaaaaacgccttcagctcattttacaggctaatgaactggaccgatggagccagacatatcacaaaagaaaactggcagtaattggactgctggatgaccagtaccctttggctattttccatggggatgtaggcacaggcaaaacagctaacgccgaagcaatagctaaccgtttagcccgtgatgcaaaactcgaagatgccattctttttaagctgagtaacaaagtgcgcggaacaggcaaagtaggcgaaatgggaactttgattactcaagctttcgaagaaattaccagatctatcgggccgggcaaggggcgcgcttttctaatcattgatgaaggtgattctttgggagcatcccgtagccaggatcatagccatcacgaagataaagtaggtgtcaacactcttattcaatctattgatggtatgcgtaaacatagtggacgtatttttgtcatactttgtacaaatcggctgagagcccttgacgctgcagttattcgccgcgcttcaattgtggaagagttcactcgaccttccgatacagaacgccatgaattgttcacaaaagatctaggtgatatgggattttccccagtcgatgtactaaaactggttaaagcgactgcagcgacagatactaaaccagcttggacgtactctgatatcagaacgcgtctttatccagctgctgtatctttagcatttcctaattcgccactaacaattgaacatttttaccaagcggttgcggagttaggcccatcgccggtaatggcgggataa

SEQ ID NO: 403052 - DNA, 555 bp, Salmonella enterica
atgagcaaaaaaaatgaagtttttatctcggtcgacatcgaaacttcaggtcctattgtcggtgaacacagcatgttgacgttaggggcgtgcttggcatatcagcccgaagtatccttttcggtaatgttgaaaccgattagcaacgaatcggttgctgatgccttagaagtcacagggttgacaatggcagaagcagaaaaaaaagggttgccgccagttgaggccatgtcacagtttgctgcatggatctccaataacttacctaaagatagcacagcagtgtttgtaggattaaatgcgccgttcgactgggggtttgtgaactactattttctgaaatatctagaaaataacccatttggtttcactgcgttggatatcaaggcccttttcatgggagtcatgggatgttcatggtatgaaaccagatccagtgcgattgataaaattgtgagtccaagccaaaagggagatcacgatgctcttcacgacgcaaaatatcaagctgaactattcaggttagtttacgaattaagcaaaaaaaatagttaa

SEQ ID NO: 403053 - DNA, 453 bp, Salmonella enterica
atgaatgataaattctcaatttctttcgagcatgcctggaaatactttgaaatccatactcaacagagaatgactgtgtttaatttttatattgccatcatagggttacttgctgcaggtagtggtgtttgtttgcagcaaggcggtaaatacagttatctggcatcggcactgggattatttatagtttttatttcatttattttttataaattagatgagcgagtttctttgctgataaaaaaatctgaagtagctctaaaaatattagaggaagaatttaatgaaccaacagcaatgatctttaaaaatgaaagcatcgataattctctgaataaatctatactttcgacatggacttatggaaggtgcttccgagtgtcatttggtgtagtcgcaggtaccgggtttattcttttaatagcccccattgttccattactcctcaagtaa

SEQ ID NO: 403054 - DNA, 1305 bp, Salmonella enterica
atgacagacagtaccctgacgccgccagcggcggacatgatgtcctttttgtccaccacgccggagcataaggacagtgaatatgaaacgccggtacacaccagccagcgcacggaactcaatgtcatcgttgaagacggtccggacagcaaactccggctggctgaaatcagcgcggcggctaacccgttgctcgccgctgcccggcctttattgtgcgctctcgcagccatgcccgctaaactggatgcggccctggtagagccttaccgtaatctgttggtacgcgagatgcatctgtaccagacattatgcgatcaggcgaacctgcggcgcgagcacgtactggcggtacgttactgcctgtgtacggcgcttgatgaagccgccaataacacaacctggggacggcgcggcgtctgggccggaaaaagcctgctggtaacatttcatggtgaaagcgaaggcgggataaaacttttccagatcatcgggcgtctggcagccagcttccaggagcatggcaacgtactggaggttatctaccacctgctggggttgggatttgaaggccgctacagcgtgcagccagacgggcgtaagcaactggacaatattcgccagcaactgctgacacagctttcacagcgtcgcgatccggttatgcccgcgctctcgcctgactttcagggggcgataagcggacgactgcggcggatgcgccgggtgccggtctggctgagcgccgggatagccctgttggcgatgctgacgctgtttggcctttacagccaccggatggatgtgcagaccgtcaccgtacaacagcatattgatgcgattggtataatactgccgccgccgcccgtgccggttcataagctgcggctgaaaatcctgctggcaaacgaaatcgcccgtggcctgctgaccgtggacgaagatgaccagcacagtagggtggtcttccgtggcgacgccatgtttgtaccgggacaaaaaacggtgagtgacgcaatccggccagtgattaacaaagcggcgcgggaaatcgcccgcgtgggcggcgcagtcactgtaacgggtcacactgacagccagcccattcattcggctgaattcccatccaacctggtgctgtcggaaaaacgggcggcggaagttgcggcgttgctgacctccggcggcgtacctgccggacgggtacatatcgtcggcaagggcgatacggtgccggtggcggataacggcagtaaagccgggcgggcgaaaaaccgtcgggtggaaattctggtagtggagtga

SEQ ID NO: 403055 - DNA, 606 bp, Salmonella enterica
atgccatcaaacagcatcccccattacctctataagcgtaaccacacctggtggttcaggaagcgtttcgtatctgagggcaatgccatcgaatacagactgagcctgcaaacagcaagctttcagcgtgctcgtcttcttgccctgcgtttacaggcactttgccaacagatggttgcttctttgggggcccccaagaaactgaagaatggcgtgatggaaaaatcaacacaagagcaaatcaaagcaaaacttcgagcaaaaattgccgaatggaccgccgaggaaacagaacattggttctgtggctctgcacgtaatgaaggtgatcttaacgattatcttgagacattagatatggttgtctctgatttgaaagaacgcatcgcttacgatgataaaccatctctgcaccgggccgaagcaagtacagttctggacgaactgccacacctcaaagctactttcagtgaacactattaccaggtcattgctcgcatggtggcacaagccaaggtcaaatccttgcaggtgaagtggtcaactaaaactggccacggctttagagtttttccagtatcggttttccgattcgtttgggggtaa

SEQ ID NO: 403056 - DNA, 2598 bp, Salmonella enterica
atgcaatttaaagaactggaatccgggcttcgtcagaagtttactgacaaccgtatcgtcttctggcatgacccggaacaacgcttcactgattcactcaatgagctggatctcgacaatgtcacgctgctggatatgcgcggcgtttctgtgctcgcaacaaaaaaacgactcgaaatcgatgagcctgagcaaaaatttttactctatttcaccagtgaggttcccgctcgcgagcaggactggttgctggatattcgcctctatagcaccgaattccacgctgattatgcggcgatcactctgaattcgctgggtatcccgcagttggggttacgcgaacatattcagatccgcaaagccttctttaccgtcaagcgaactcagatcctgaagggatgggttaccgagcgcgaaacggaaaactctctcgataagaaaatgctggcagtggtggttgggggcagtacctttgaaaccaaagagattctgtttgctttgattcggcaatttgtcgcggcacggcagcaggatgacagcgcactggagaacaccttcgccgtactgaagaaacttggcctggatgaggtactctgggagattcttcgcattgagctcgggtaccaatctgaatctccttccctagataacctgattctgaaactgttctgtaccgatctctgggctcagggtgatgaagcgcatcgtgactggttgagtaaaaatgtgctggttaccgctgctggacgggcgtcttcactggcctttatgggggcgtggcgcaacgatcgtcgctataaagcagaatacgattattgtgctgaggatttgcagcagactctccagccaaaagagcactacaaccacagctcaccatacgtactggcaaaatgcgaaacgttcgaggccattgaacaaattattatccgtggtctggttacacaactgcaggaagaaagcaccactctggacagagatgcgtttaaagcactggtatctgagcgcagtgctaaatactggagccagacacgtccagagtatctttctatttggaatgctattcgtcaggcggaacgtttgctgaatttgcgtaaccgctacactgacggatttaatttccccgatacaggcgcgttctggaaggcctactgcgacgaaatttatcgcttcgatcagacctatcgtttgtttaatgaatatgccgcaccggtgcacagcaaaggggcgatgatcctgcatgaactggataaattcattgaagagttgtacagcaattggtacctggccgagctgagtcgcggctggaacaaattgctggaagcggaaaaccgtatgcagacatggcagtttagtggcatacccctgcagcgcaatttctataaagagaatgttaaacgtcagtttgacacctcgcaggtgaaacgcgtttttgtcgtgatctcggatgcactgcgctatgaagtggcggaagaactgggcaggcatattaaccatgagaagcacttcagcgcagagctgcgctcccagaccggagtactcccaagctatacccaactgggcatggccgcactgttgcctcatgagtcgttgagctaccttcctgataattctggcgtagtctacgccgatgggatgtctacccacgggttcgataaacgagccgctattctggcgaaggtaaatggagtggtactgaaagcaaaggatttgcagaacgccaataaccaggaagtgaatgaacaaatccgcaacgcttccgtagtttatatctggcacgacactatagatgccatgggtgataaggctgcaacggaagataaaacgtttgaggcctgccgaagtgcaatcactgagctaaaagatctggtttcacgcctgcgtagccgatttaatgccagccgaatttttgttaccgccgatcatgggttcttgttccaacaacaagcgctggtggagcaggataaaacgaagctggaaagtaaagccaaagacacgattgaagcgaataagcgctttattgtgggtcatcagctgcctgaaaatgaattttgctggcacggcaaacttgctgatactgcaggcgcaagcgatgagagtgaattcctgttacccaaaggagtacagcgtttccacttcgtagggggcgctcgtttcgttcatggcggagccatgctgcaggaagtgtgtgttcccgtgttgaagattcgcgcgcttgaaaagaaagcggctgagaagcaaccccagcgacaacccgtgtccattgtagcacgggatcaggtgatcaaactggttaacagcattgataaagttggttttattcagactacggcagtgaatgagttaaatgagccgcgcacgttgaatatctttatcgtggatgaaaacaaccaggtcgtctccggtacggaaacagtatgctttgacagtgataacgaagatatgggtaaacgcacccgcgatgtaaccatgaaactcatggggacggcattcaatcgtaaaaacaagtatgttctgatcctggagaatgcggacagcgcaacagagtatggtcgctacccaatcacgatcgacctggcatttcaggatgacttcttttaa

SEQ ID NO: 403057 - DNA, 570 bp, Salmonella enterica
atggtaaaagtagggtttatcgttgaaggtgatactgagttaatcatagtgaactcaccagcgttcattgcatttttgcacgcaaatgattttgaattggtaactcctgtcattgatgccaaaggtggtggtaacctgttgccgaagtatgtcgataacttcgttgcaaggctcaaaaatgtcggcgctgaacggatctgtattctgaccgatctggaagatgcggcatctgttgctgatgtgcaggcccgaattgcccatcaagatgtcgacatctcgtttatcgcggtcaaagctgttgaggcctggtttcttgccgattcagaggcaatgaaaaaatggcttaaggtagacgcatttaatgaagagttacctgaagctacaactgaaatgccatgggatcgtttaaaagaaatttcacgtgagctaagaaagcagggaccggggagttctaaaaccgcatttgccaaaagaatggtaacgcatcacggttttgatattcagagttctgccagacaccctgcttgccctagcgctcatgaactggtcgactggtttgagaatcaataa

SEQ ID NO: 403058 - DNA, 1122 bp, Salmonella enterica
atggatcaacatcccctgattattaaaggctacaagagtatcgcggagctttcccttgtggaaagcccgccgtttattacttttgccggggcgaacggcgctggcaaaagtaacattaccgatgcattggctttttttggtgccgtagtgaaaaccggtgcgacacaagcaatccgtgattttggcggttttaagcagattcattgctacaagctgcgtaaagaaaagcggactacggcgtctattcatcttgatattgagttgacaggtaaacggtttatctatgatctgacgatcaaaaatatggataaaaaaccagtgataactgagagcttggttattgatggagatattcatattgatcgtaagcacccagatactcttatgattcgcctgagcgatgatgatgaaaccccagcgaccttaatccctaactactcgtcggatatgacggcactaatgttactggggaaaagtgaactgtacgcttttttgaccaatattgtcgtttttcgcatcgatccgttacgagctaaagagcccgatagcgccaaaaccgactcaacatttctggacagtcatggccgaaacattgcttctgtgcttgctgctctcgaatcgaatagcgaatttaaagagcaaatactggagtggatggagctcatagttccggggatggaaaatgtatcgaccgaaaaacaaaaattagatggttcgacggtactaaccttcaaagaagagggaacccatgcccgttttcctgcccacctaatatctgacggcaccatctttaccctatgcattatgacggccatattgagtcgggcacagcaaacgggaatgaccattattgaagagcctgaacgaggcatccacccaaaagccattggggaacttgtgcaattgatgcgtgaaaatgcctctttgaatcatccgattgttattactacccatagtgaatctgttgttcgcaatctggaacctgatgaactgtggtttgtaagtaagaaagatgggaaaactcagttgaagcacgcttctgatgcaggtattgataagaaggaaatcccactggataccgcgtggctgatgaatatgtttgatggtggtttgccatggtaa

SEQ ID NO: 403059 - DNA, 3657 bp, Salmonella enterica
atgaatacgtcaaacatcaaaaaatacgccccggtggcacgtaaacagttccgtgatgcggtcatgcaaaaactgactacgctgggtattgaggccgataaaaaaggtaatttacagattacgcaggcaaccgatcttggcgacagcgtgcgttatggtcagttttcgctggataagtcactggcgtcacgccgtgagcgtctggtcaagcgtgcagaaaagcagggctacgacgtgctggtggagcacattgcttacacctggtttaaccgcttctgcgctattcgctatatggagctacatggctatctggagcacggtttccgtatgctgtctcacccgacgctggcagggggttttgaggtgctggatcatgtgccggaagtggctgatgctcttgggctggacaaagtgcgcctggtggagatgaagctggcgggcgatcgtgacgaagagctgtaccgggaactgttgcttgcccagtgtcatgcgttgcacggtgcaatgcctttcctgttcgaagcagttaatgatgaaattgagctagtgctgccggataatctgacccgcaccgactccattctacgtgggctggtagacaccattcctgcagaagactgggaacaggtcgaagtgatcggctggctgtatcagttttacatctcagagaagaaagatgacgtgatcggcaaggtggtaaagagcgaagatattcccgcagccactcagctgtttaccccgaactggattgtgcagtatctggtgcagaactcggtgggtcgccagtggctgcaaacctaccctgattccagcttgaaaggcaaaatgccgtactacatcgagccagcggagcaaacgccagaggtgcaggcacagctggctgagatcactccatccagcattgagcctgaaagcattaaggtactggacccagcctgcggttccgggcatatcctgacagaagcctataacgtgctgaaggccatttacgaagagcgcggttaccgtacccgtgacattccgcagctgattctggaaaacaatattttcggcctggacatcgacgaccgtgccgcacagctctccggttttgcgatgctgatgttggcacgtcaggacgatcgtcgtattctgggccgtggcgttcgcctgaatatcgtttccctgcaggaaagtaaactggatattgcagaactgtggaccaagctgaacttccaccagcaggtgcagcgtggcagcatgggagatatgtttgcagaaggggcggcactgaccaataccgacagcgcggaatataagctgctgatgcgaacgctggcattgtttaccagcgcaaaaacgttgggatcgctgattcaggtttcacatgaagatgaagcggcgctgaaagcgttcctggatgggttgtatcgtctggctgttgaaggggatattcagcagaaagaagcagcggcggagctgatcccgtatatccagcaggcgtggattctggcgcagcgttatgatgcggtggtggcaaacccgccgtatatgggcgggaaaggaatgaatggcgaactgaaagagtttgcaaaaaaacaattcccggacagcaagtcagatttgtttgcgatgtttatgcagcatgcattttctttgctcaaagagaacggctttaatgcgcaagtgaatatgcagtcatggatgttcctgtctagctatgaagcgcttcgtggctggttattagcgaataagaccttgatcactatggcacatttaggggcgcgggcttttgggcaaatttctggtgaagttgtgcagactacggcttgggtgattagtaataatcataccgaacgttatcagccagtatttttccgcctgattgaaggtaatgaagaacaaaaacaaaactctttgcttaagcgggacaaccaatttaatagcacggcgcagaatgacttcaaaaaaatcccaggcacgccaattgcctattgggctgggaataaattaattaatgcttttcatgaagtaaaactgaaagaaatggctgatgcaaaacaaggaatggccacgtcagacaatgagagatttttaagatattggactgaagtaagtcataaaaatatcaaattcggttgtagaacacataatgaatcacaagtcagtcatcaaaaatggtatccatataacaaggggggaaccttccgacgttggtatggaaatcatgaatatgtggtcaattggaaaaatgatggggaagaacttaaagatttcgttgaagaattaaacaaacttcgtcctggaggacgtctaaaaaaccaagagtattattttttagagtgcattaactactcatctctgagttctggatttttttcagcacgctatactaatactggcttcttgtttgatacaaaagggtcagggatttttcctaaagatggaaatgtgaaagcatttttgtcattattaaatagcaatgtcatccaggacttcctggatatattatgcccaaccttagactatagctctattggcataaattctcttcctgtcaaactattatccattcctcagattgataccttgctatctatatcaaaagaggattgggataattatgaagatagctgggattactcaagaaatctgctggttaaaaagaaaaaaaacaacatcgccaatagttactttgagttaatagactcccataaaaaaacaattagcgagcttctcaacttggaagtagagaataataaaaaaattatttctatatatggattatctcagaatgtaagccctaatgtggatattaaaaatatcactcttacatgcaatccagactaccgctatagcggggaagaaagtaacggtttccatggacgtttccaatcagatacatttgttgagttcatatcttacgcaattggctgccaaatgggccgctactccctcgatcgtgaaggcttggtctacgcccatgaaggcaacaaaggttttgtcgaattagtcgccgaaggcgcctataaaaccttccccgccgatgaagacggtatcctaccgctgatggattccgattggttcgacgacgatgttaccgcccgcgttaaagagttcgttcgcacagtctggggcgaagaacatctgcagaaaaacctcgatttcatcgccgaaagcctctgtttgtacgcagtcaagccgaaaaaaggcgaatcttcgctagatactatccgccgctatctttccacgcagttctggaaagatcatatgaagatgtacaaaaaacgcccgatttactggctgttcagctccggtaaagagaaagcgtttgagtgcctggtgtacctgcaccgttataatgaaggcactctgtcgcgtatgcgaaccgaatacgtggttccactgcttgcgcgctatcagggaaatatcgatctggtaaacgatcagcttaagaatgctgaatcaggtgcggccaccacacgcctgaaaaaagaactggatgggttgaccaaaaaattcaacgagctacgcaattttgacgatcgcttgcgtcactatgctgatagacgtatcactattgatctggatgacggcgttaagattaactacggcaaatttggcgatctgctggcggatgtgaaggcgatcaccggcagtgctccacaggaggcataa

SEQ ID NO: 403060 - DNA, 3615 bp, Salmonella enterica
atgaatattgaacaaatttttgagaaaccgctaaaacgtaatattaacggcgtggttaaagccgagcagactgacgacgaaagcgcctggatagaactggatgagtacgtcattactcgggagctcgatggtcacctgcgtcagttctttgaagtctatgccccagctactggaccaggcagattacagcttgccgacaaaatgggcgtctgggtttcaggcttctttgggtccggtaaatcacacttcattaagattctttcctatctgctggcgaaccgcgaagttagccacaatggagtcacgcgtaatgcgctctccttctttgaagagaaaattgatgatgccctgctattggccgatattcggaaatcggttcagcatccgactgatgtcgttctattcaatattgactcacgtgcgaatgttgaagatggcgtggatgccatcctcaaagtctttctgaaagtttttaacgaactggctggttattgtggggacttcccgcatattgcacacctggaacgtgagctcgataagcgtggacagtttgatacctttaaagccgcctttgcggatattactggctctcgttgggaagatgaacgtgatgtttatctgatgataaacgatcagatggctcaggcgctgagtgttgctacaggccagagtgaagagtcttctcgccagtggatcgagcaacttgataagaacttccctctggatatcaaaaatttctgtacgtgggttaaagagtggctggatagtcaaggcaaccgcaacatcctgtttatggtcgatgaagttgggcagttcattggtaaagatgcccagatgatgctgaagctgcaaaccatcaccgaaaacttgggcgttatttgcggtggacgcgcatgggtgattgtgacctcccaggccgacatcaatgccgccattggcggtatgagcagtcgcgacggtcaggatttctccaagattcaggggcgtttctcaacgcgcttacaactctccagctcgaatacctcagaagttattcagaaacgtttgctggtgaaaaccgatgcggcaataccggagctggaaactatctggcaggaaaaaggcgatattctgcgtaaccagttggcgtttgacacgacaacgacagctacgctgcgagcctatacaaacagccgcgagttcgtggataactatccgtttgtaccgtggcattaccaaatcctgcaaaaggtctttgaatcaatccgaaccaaaggggccgcaggtaaacagttagcaatgggggagcgctctctgctggatgccttccagtcggcagctgtgcaaatctccgcagatggtctggatagtctggtcccgttctggcgcttttactccgcgatcgaaagcttcctggaacctgcggttagccgcactatcattcaggcctgccagtctccgtcgctgacggaatttgacggcaaactactaaagacgctgttcctgatccgttacgtcgatgtgctgaaaagtactctcgacaatctcgttacgctctctatcgagcgtattgatactgataaagtggaactccgtcgacagattgaagccagtcttaatcgtctgcaggctgagatgctgatctcgcgtattgatgacaaatttgtttttctcactaacgaagaaaaagagattgaaaacgaaatccgcaatattgacgtggaattcaccaccatcaataagcaactctcaaccatcattttcgaagagatcctgaagaataaaagatatcgctatccagtcaataagcaggattttgatatcagtcgcttctgtaacgggcacccactggatggtgtgaatcttaacgatctggtggttaaagtgctcacgccactggactcgaactacgagagctataagggtgcgcattctaatagtctgctgatgacggacagcaaagactgcatcttaatttgtctgcctgatgaggctcgtacctggcaagacctgaccatgtacgcgcagaccaaagccttccttagcaagcaaagcggacagcgtccggaacaggcaacgctgttggcagaaaaaggccgtgaaaatggcatgcgcgaaaaaacactgaaggcgcagatcgaaggcttgttgactcaggctgatgtctgggcgctgggcgaacggctggataagaaatcctcttcgccgttagctatcgtagatgcagcctgcagttacgttatcgagaacagtttctccaaactaaaattgctgcgtctgagtaccggagacgtaaatcgtgaaactcacgcgctgttgacagtagaaaatgatacccagctcgacctcggggaaatggaagagtccaatcctgaggcaatgcgtgaagtggataactggatcagtatgagtattgagactcataagccagtttacctgcgggatatcctcaccacttttggccgtcgcccatttggctggccggaagatgaggtcaaattgctggttgctcggctggcgcgcagcggaaaatacagcttcactctgcaaggcagtgaaatcgcactgaagcaggcgtgggacgcgtttaataattcacgtcgttacagcgatttgcgtttgcataaagtacgtcgccatgacgaagcgcagctgactaaagccgcgcaactgatggctgatattgctggagaaccgtttaacgagcgtgaagagcagccgctggtctctcatattcgcgaactctttggccgctggaagagcgaactgactgtttttaaaactcgtgcagagagtggacaaaaccctggccgtaaagagatagaagaaggcctggtattgctgaacgggatccttaacgagaaagaggaatacgcggtcattgaaaaaatcaccacagcggccgacgatcttaaagatttctcggaagactgggacgatttggtcagcttctacaaaaaccaatacgccacctggcagcgcttgagtgcggcattaaatggcagttttaaagctaaccgtaatgcgctggataaagacgaaacggctcaaaaggcgttgcaggatttggagggcatctacagtaaggcacgaccttacggagagctgcaccggattatcccgctgattgaaaccgttgaaaccatcaaccagcgtctggtggaagaataccgaaaccatgcgctgcagcagatcgatgtccatatcaatgaactgaagcaaagcatgctagagatgctcgtccctgctgacttgcagcactcgcttttgcacccgatgcaacaatcgcgtaagaaagtagagcagaacggtctgatcccgcaaatcatggaagaacaggctgaggttcgggcgctacaatttaaagcaaacgaacgactgaacggttgggttgaagaacagcgtaagaaagtgccagaacccaaacccgcccctcagccaggggttatcgacccagtagttaagcctgaacccaagctgaaaaagaccatctacgtgaacacgcgtaaaacgatggaacgagctgcgggtgtgacaacgctggataacgccgaacaggtagacaaagcgctggaacagctgcgtaaaacgctcatggatgccattaacgcaggcgaacgcgtacagcttcagtaa

SEQ ID NO: 403061 - DNA, 603 bp, Salmonella enterica
atgaatgacccgatccttgaatatcgattaaaacagttagaagaacgtatcggcgacgaccgttttttgaaaaaccaaggttccggtaatgagattggcttctggatttttgattatccggcaaagcaagagcttcaggtccgcgaataccttcactttttattcaaaaaactggataaaaagtacacctataaaacgttaaatatcttccaggtcatcatcgatatgctggaagaacgtaagctctttgaccgtatctgccagcgagagcctgaacttggcctggaaacactgaaaaagcatctggcagccccactgagccagaaaaaaatcgcggaatatattgcgcgcactgtcgatcttccggcgcagcaatttgtcattctgacgggcctcggtaacgcctggccgttggttcgtggtcatgagctaatgagcacgcttcaggacgtgatggggtttacaccactgctgatgttctatccaggcacctacagcggatatgctctttcaccactcgatggcattcactcccgtaactattaccgcgccttcagactggtacccgaaaccggaccggcggcgactttgactcctcgttaa

SEQ ID NO: 403062 - DNA, 618 bp, Salmonella enterica
atgacaaacaccatgataaaaaatgacaaacgctggattggcgatctgctgggcggttcgttgatggtccgagagagccgaaccattgctgaactgttgctttctgaacctgatgaaacgacctggcagcagcaaataatcaatgaaaatattcttcaggcttcctccacaagcactgcaaatcgttatgcccgaaccttaaggctgcgattaatgaccttggatcgggggtgctggaaactgattgctgatggcagtgaaagcgaacgtctacaaatgctattggttgcattgatgatccagtctccaattgttgcggagtttattgctgaggttgtaaatccggctcgtcaacagtttaaagaaaaacttggtatgaactgctggagtgaatttgtggatgagaatctgcgattgcacccggagctggctgctttctctgattcatctatccaaaaaatgggtaacaatctgattaaggcactggcagaagctggttacctggatagcccacgccgccgcaatttacaaaacgttttccttctaccagatgttgcagcggccttgcatcgtttaaataaagccgaactgctccctattctggagggtaacgtatga

SEQ ID NO: 403063 - DNA, 402 bp, Salmonella enterica
gtgtcgaaagccaataatccgggatttgtcttatcaccttactcccagaaaaaaatccttaaagcattaggaactcaccaacaaaagaccgactcttctgctaaacgacatgggaaaccgactcgctttaatattgcgaccagcgattacgataatctcgttagcggcgagcacggtccgctgatactaaaagtccggaggggaaaaatcgtcaccgaaaaacattactgtgctgaatgtcacagttacattagcccaatccgggcatatgccgacagtaactatggaaaagtgcatctttgtacaccctgccaccttgctgcattcaatcgcagttttggtcatgccgatgcgatgcccctgaagttggaccatgcgcatgcacataagggaaagtggtaa

SEQ ID NO: 403064 - DNA, 150 bp, Salmonella enterica
atgcttcatacgacgaatcccgtcagcaagctaagcaaaagccagcaatatcaggctacttacaatctccccgtgctctttaagatgccgcgcctcataaattccgcttgcgctcatgatgactcatctggcgctctacgcgtcgcttga

SEQ ID NO: 403065 - DNA, 1773 bp, Salmonella enterica
atggcggtggaaaaactgattgtcgaccatatcgacacctggaccacggcgcagcaaacccgctccacggcggggcgcggcagctcgggtaagattgacctgtacggcattaagaagctgcgcgagctaattctggagctggcggtgcgcggcaagctggtgccgcaggatccgaacgacgaaccggcgtcggtacttctggagcgtattgcggcggaaaaggccaagctgatgaagcaagggaaaattaaaaagcaaaagccgctgccggagattagcgaggaagagaagccgtttgagctgccggcggggtgggagtgggttgcattacaagaaatatgttcattagaaaatggtgacagaagtaaaaactatccgaataagtcaacactagtagagacaggaataccatttgtcaacgcaggtcatcttgaaaatggaaatatacgacaagaagacatgacattcattacaccagaacattttagcattctccgctcaggaaaattcctcggtggtgatattttattttgtcttagaggttctctaggtaaatcagcaattgtacaaaacctatcaggagcaattgcttcatcactagtaatcgttcgtgtttttaagcctacatttaataaatatattcatttatatttcgatgcgccattatcttatgattttataaataaatatgataatgggacagcccaacctaatctggcagctacagatttagctcgttttttagttccattaccaccactagatgagcaatctcgcattgttaataaaattacggagctaatgacactctgcgaccaactggaacagcactccctgaccagtctggacgctcaccaacaactggttgaaaccctgctaaacgcgctagccgacagccagaacgccgatgaactggccgaaaactgggcgcgtatcagcgagcatttcgacacgctgtttaccaccgaagccagcattgacgccttaaaacagaccattctgcaactggcggtgatgggcaaactggtgccgcaggatccgaacgacgaaccggcctctgaactacttaaacgtattgcgcaggaaaaagcgcaactggtgaaagacgggaaaatgaaaaagcaaaaaccgttgccaccgattagcgatgaggaaaaaccgtttgagctgccggaggggtgggaatggtgctgtattaatgacttaacgtttgtttccggcggaatacaaaaacaacccaaaagacggcctgttaagaaccattttccttatttacgggttgctaatgtccaaagaggtaatattaatattgatgagcttgagagattcgaactagaatctcatgagttaactttttggtcgttgaaaaaaaatgacattctaattgttgaaggtaatggtagtgctgatgaaattggtcgttgtgctatttggttggctccaatagaaaaatgtgtttatcaaaatcatttgataagagttcgaggaataatggaaggatatcaagaatttattgcattatatcttaactctccatctggtattaaagaaatgcagcggctcgctgttaccaccagcggtctatataatctcagtgtaggtaagatcagaggtataaaaattccattaccacctcttaatcaacaaaatttgattttgtcaaaaataagagaatatatttttatctgtgataacctaaaaatatctatccaatccgcccaacaaacccagctccacctggccgacgccctcaccgacgccgccatcaattaa

SEQ ID NO: 403066 - DNA, 1488 bp, Salmonella enterica
atgatttccttcaataaatctaaaattttaacatgtggtttatttgcaattatatctgcaatttcactttacttttttttagtttcacatccaacagtgatcatatcaggagatgattggggaaacctgacatctactagagcattatatcctcaatgggggatcgctaacccaattaaggtaatgccagagctaggctaccctttatttgcaaagttatccactgcgcttataatgccgcttggttttggatttcttgaatcattttcaatcataacagccattttcatcactatacttttgtctttgttcttacatcaactattccagctatttaatgttaatctctcagctggatttttacgatcatctatttttgttgtttttttctacgcttcaatttttttcattttcttgaaagagggcaatcatgagaacttatacatgctatgggaggtaaacataacatgtttttatcattatatagcacctgctttaattaactctgcgctatcaatatttgtaataagaaattatagaaatttcgatgttaacatcttaaagagaaatggtgtttggtattcttcgtcgatattttttgcttcatatattgcagtgttttccagcatgttcgctaatattatattagcgataacttgcggagtgacactactgttctcgctcattaataataaactatcaataacgcagacaataaaggaaagcaccttacaaatattcacactaaccgcttgggttgttgctgtgatttatgaggccaacggtggaagggctgccagccttggttctggctcacttgatatatatggcacattaagcgtattaaattacctaatagaacaagtccaaccagcttttaaatattcagcaaccgcactcgtttcaattggaataatatcatcattgtattcattaataagaaataaaaatagagaccaaagcattgttttctttattgtgtttatttcaggagtgctgtcattaatagcgcttgttcttttgtgcgccagagcaggaagttattatgctgctcgacctgttgtgatgtgggggggattcctgtatgtaagcatggcgtctttcatcacaattgacattctggccaaggacagaacaaaactgataaatgcattgctggctttttgtacaattattttagtctataaagggctgacttctaactctactcttaagcagtcaataaatcttaacttaagctatagccaagctaaagcggtaagccagaatataatagatcaggttatatcaaccgacaggaataatggcacaaacatgattctttatgtccctaaaggtgatgatcacgataactggccattccctatttatgaaggaccattcatagggaaggcattaaagaattatggcataatacaaaatgatatatatattgaggttaagcctgatatttatttgaaccagaagatgtctgtcccgattagttaa

SEQ ID NO: 403067 - DNA, 471 bp, Salmonella enterica
atgaatcatatttttaaattagcatttatttttattatcaatattatatttttaataaatgcttcagcaacaacgatggacaaagataaatttgtggaagcgaatggtatcaaaattcattacgttgaagagggcgaggggcctccgctgctgttgattcacggtggtggtctgacggcgaaaagttggcagggattagcgaaagaggcatctcgatattttcgcgtcatcatgccggacagtcgtggacatggattaaccaataacccgcaaggaacgtttagctatgatctgatgacggaagatatggcggcttttgttaaagcgctgaagctggaaaaaccgctggtgatgggttacagcgatggcggcatggtcgttctgaagttaaccagccgatacccggatctagcgcgcgctgctatcgtcggcggcgcaacgcatcgctttgctacgacccattacatgtag

SEQ ID NO: 403068 - DNA, 183 bp, Salmonella enterica
atgattcacaaaagcgtgattttgattagaaaaatcggccacgaattggcataccacccatacaacccgcaatcattaaaccccatgaaaaacaatatcttattgaataacaccccgctgcaagcgtatatgtcacgcatgattggttcaacaacctcccgaaatacagcaaaccaaacctga

SEQ ID NO: 403069 - DNA, 489 bp, Salmonella enterica
atggctaccaacccaagagagcacgcccggcgagtgctggacacgttctggtgcgggcgcggtttccctgttgatccagctaagattgcgaacgacatgggacttgatgtctttataactgaaatgcctggcaaggtttctggtgccttgataaagcagaaagatcaggatccagcgatcttcctgaacagcgatgataataaggtccgtcaacgtttctcatgtggtcatgaacttggtcattacattgcacgacaagccgaccaagaggatgtttatgagtatgttgatcttcgaggagagaccgccagtaacggtacgcacccggatgaaatttttgccaaccaatttgccgccgaattgcttatgccaaaagatgaagttgaaaaacttcacaaaaaaaagcaaccgagttatataatggcgcactactttggtgtttctgatgacgccatgagtttccgcctaaagaacttggggttgaggtaa

SEQ ID NO: 403070 - DNA, 480 bp, Salmonella enterica
atgtctgatgagcacgatttcaatcagcaaatgaatgagttgaggaagtcggtccttaaccaattaaagagtaccctcaaccagcaaagacaaattcctcagattgaagtaaaagagcctccatcaccggaggctctgcgtgctgatgaggaacctgatgaggttgattccagtaatatcggcggttcgattttatcattttctcagccagccttgcaggtatcatcattggatcctgaaaggcagcgcctaaataatgaagattttcaagctgaaatcgaccttaaaaaaacatacgggaaaagttttctgtgcatacttgctgttcagcttttgattatgaacatggtattcgttgctgatggtttccagtgggtgttcatagatgacacaactttgcgaatttatatggcaggaacgctgacagaagtcttcggactggttctcgttgttactaaatatcttttcaaacgacgataa

SEQ ID NO: 403071 - DNA, 468 bp, Salmonella enterica
atggaagtttcatatctgtgcgccgtccgtcagggggatgttctggagatggtctggggagatgtgatggacgctggtttatttattgagcagaacaaaactggcaaaaaacagatcaaggaatggtctcctcgcttgagatatgcgctggaaatggcgagacgtgagcttaattctaacaatgcttctggtgttgtaatacccgggccgagcggtggcaggatgaacaaaaagacattcaacaactggtggaacgacgccaagcagcaggcttctctgaaattaggccgaccaatacccggcacattccacgatattaaggcgaaagctatatccaattatgagggtagcagtcgcgacaaacagttgttctccggccacaaaaccgaaaatcaggtgaatacgtatgacaggaaggtgaaggtgacacctactttgaatgcgccacagataataatgaagaaataa

SEQ ID NO: 403072 - DNA, 243 bp, Salmonella enterica
atgactaatgcagctctgctattaggtgaaggcttcaccctgatgttcctcggcatggggttcgtgctggcgtttctgttcctgctgattttcgccattcgcggcatgtctgccgtgattactcgcttcttcccggaacccgtcgccgcgcccgcaccgcgcgccgttcccgccgtggacgacttcacccgcttaaagccggtgattgccgccgccattcaccatcaccgccaccacgtttaa

SEQ ID NO: 403073 - DNA, 963 bp, Salmonella enterica
atgatttggcttattgtatacgggatatcaattttttcaattgcactaatttattatttcatgggttggtataaattaacttataattctctaacatctcaagggttgttttggggagctattttcgttccatttttatcatttctatattttggcttttttgcgtggaaaggtcattcggttgatatgtcatcggaagggttaaatacttttattatgataagcaaacttcctttggggttactgtcattatcaataccattcgttgccattataacgagtttacatagatcaattcaaacagccacacaaatatcatctaccaatactcaaattgaattaataaaaaagaaaaactccttagatgaattattttcaagagagaaaaattttgtcgataaatgtgtctatattgaaaaacaggttggagatatcgacattaaactcaaagatactgttagtacttttaagtttagcatttctgcgccacatgttttatttcataagatatacaatacaactcctaataatggtgatattagatatgagttaactggtttcgtcaatggtagctttcttgtagagttttcaactatagaagaaaatctaagactccattatgaatgcattgaaaaaaaagatggtatgggtattgatgatgaactatctcgtttgtttgtaatagtcaaagcattatgtagaacattagatttattatcagtccctacctgtcaagttccttatttttatataaaaggtaaagataacaactttcagatttgcataagcacagaagaagagttaaaaatgtggctgagaaaatatataatcctctcagaatctttattcagcgcggtcaatctttcaggaaaatattctttatttaatatgaaaaaatacacatttcaagggtttaaactattcccttcatttagtcaaggaaatattacaaacaattattga

SEQ ID NO: 403074 - DNA, 486 bp, Salmonella enterica
gtgaccagtcccattcgtcagaatctatttgaacgggaatgcgatatgccgctgctggaagcgcggcatctagcccttctgcttctcggcctcgatgcttcccaacctgcaaacgccctgccggaagaacatcaggaaaattaccgtatcctgcacgacgccatcagccgcaccatcaaagccactggcatggtcagtgccccggcgaataaacgcatgttctatgccgatgagatgttcgccctagcctggcggcttattgatgacgaacttacaccgccagaaattaagacccgcagcctgaaggcggtgatgaaactgtcgcgtaacagccgtggccgcaagtggctgaagacgctcggtgacgacgcgctgccggatctcactgcttccacacaaccttcccagcgtgggatgcataaacgagacaaggctcgggagaatactgccccgactctgctggctactggttcagcttctggttga

SEQ ID NO: 403075 - DNA, 804 bp, Salmonella enterica
gtgcgcgaggacctcggctttatcccgctggtcaccccgacctcacagattgtcggcacccaggcggtgctcaacgtcctgaccggcgagcgctacaaaaccatcgccaaagaaacggccggcattctgaaaggcgaatacggccacaccccggtgccggtgaacgcggcactgcaggcccgcgtgctggaaggggcagccccggtgacctgccgtccggcggatttactcaaaccggaactggctgaactggaagcggacgtcaggcgccaggcgcaggagaagggcatccagcttgcgggaaacgccattgacgacgtcctcaccgtggcgctgttcccgcagattggtctcaaattccttgagaaccgccacaacccggcggcgtttgagccactgccgcaggcggaagccgcgcagccggtggcaaaagcagagaagcctgccgcctccggtatctacaccgtggaagtggaaggcaaagcctttgtggtgaaggtcagcgacggcggcgatatcagccagctcactgctgccaccccgtcttccgcaccggttcaggcggcatccccggttgctccggcaggcgccggcaccccggtcaccgcgccgctggcgggcaacatctggaaggtgattgccaccgagggccagagcgtggccgaaggcgatgtgctgctgattctggaagccatgaagatggaaaccgaaatccgcgccgcacaggccggtacggtacgcggtatcgcggtgaagtccggggacgcggtttccgtgggcgacaccctgatgacgctggcgtaa

SEQ ID NO: 403076 - DNA, 306 bp, Salmonella enterica
gtggtgaaggtcagcgacggcggcgatatcagccagctcactgcggctgcacctgctgcctcttctgctcctgccaccgccccggcaggcgccggcacaccggtcaccgcgccgctggcgggcaacatctggaaggtgattgccaccgaaggccagacggtggccgaaggcgacgtgctgctgattctggaagccatgaagatggaaaccgaaatccgcgccgcgcaggccgggacggtacgcggcatcgcggtgaagtccggggacgcggtctccgtgggcgacaccctgatgacgctggcgtaa

SEQ ID NO: 403077 - DNA, 201 bp, Salmonella enterica
atgatttcagccttcttctgccgtctgttggggcacaagttgctgatcctgatgatgtatcaaataaagctgatgatgttaaagatgactgggatttgtttgatagtgctgttgataaccagcatggcgtacaacaggcagcagcaaatcttaaacatcgtctgcaggaattccgcaatatcaatgcagatgctcaggtag

SEQ ID NO: 403078 - DNA, 948 bp, Salmonella enterica
atgatggaactgatcaataatcgtggtatgcgagactggatgatatttattaaagtggcggaagtagggaatctttcccgggctgcgcgggaattagatattagcatttctgctgtcagtaaatcgcttagtcgccttgagaattctattgaggttactttacttcggcgcgattcacatcacttagaactgactggagctggtcagacagcctatgcaagcatgaaaaggataacatcttcctttcagtccttgctggatgaattgcgaaatccggataaaattatcagagggagtataaaattttcggctccggctattgtctgtgagtttcttgccaataagtggatatgggaatttacagctagctatccggatacaaaaatctacctggattcacgagagcgtagcgatttttttagtaaatccctggagtttgatgagctggtttttaaaagtggcataatcgaaagtgaggatctcgtgtatcgaaagataagccctttaaagttggttctttgtgcgagtccgaaatatatcagaaaatatggcaggatctcacaccctggcgatttggaaaatcacattattgtgggtcttcacaaccatggtctttccggacctcttactcttttccgtcaggatgaatcatacactattagtggcgctgttaatgttcatttatcttccaataatcttttgagtgttcttaatttggttttagaaggaaagggtatcaacctcatgactccggcctggcttgccaccaaatacttaaaaaataatgaacttgaaattatacttcctgaatggagggttccagatctccccatttatcttgtatggcgtcatcgtcagtattattctcctttatttcaacgctttctgtcttttattgaagataaatggaataatcgcccacaaattgattttctgaatgatgattaa

SEQ ID NO: 403079 - DNA, 888 bp, Salmonella enterica
atgagtggaactaatcctgtatttttagtccgcaaagcaaagaaatcatcaggccagaaagacgctgtactctggtgcagtgatgattttgaagcggcaaatgcaacactggattatcttctgattaaatccggtgcgaagctgaaagattatttcaaagctgtcgctactaatttccctgtcgttaacgagctgccgccggaaggcgaactgagcctcactttctgcgattactatcaactcgctaaagacaatatgacctggacgcaaatccccggcgtcaccctgccatcatctgaagccgccgccgcggcgcgccagcatatcgtcgatggtgttgataccgaaacaggcgaagtgctggaagaccacaccgaaaattttggtaacgaaagcaacagccctgcccaggcaacagccccagcccccgagctgactgttgtcgcaactatgcctctccgtcaccgcgttcttgctcagtacataggtgaaggtgagtatctttatcacgtcgacgcctcccagaaaaaagaaattctgcgtctcgaaatggacaccgataattcatatgtccagaacctgctgcttgccgccgagaatgttgaagcgttcaagaaagccattgaacatgacattcacaaaatagtgaatgccgttaaaaagtattccctgtcgatggaaaaactcctgaactggcgactgttatccagttccttaaaacatggttcgagacggagcatatcgatcgcggtttgctcgttaaggagtgggcgaaaggcaaccgtgtatcggctattcaacgcactgaaagcggcgccaacgctggcggtggcaataagactgaccgtaaccctgattacgaacacactctcgatactctggacgtag

SEQ ID NO: 403080 - DNA, 318 bp, Salmonella enterica; identical to SEQ ID NO: 376386

SEQ ID NO: 403081 - DNA, 2457 bp, Salmonella enterica
atgcgtaaaactctaattggctgcatggttgcaactgcccttgctactgtatcttcggcacatgctcaggtatttagctactcatttacagataccaataaggctgttcggaatatcaaacctgcaacacaaacatatcttaatcccgctggtgttttgactctgaacttgatatcgggtcttgatcggtacgagcgagtgacggtcacacgagacagcgataaaaaggttatgtattcctccgtctcgaccaaaacgagcgttgcagatcgtatcgttgctgccgatggaacagaatactatggaaaggatatggttctaccggcgctcggagaagggacctttattgtagtcaatgaaactctggatattcgccagactgtagtgagcacatctacttatcatttcatcgttgatacaactcctccacgctataagagtatttatccgagtcaaaacgcaggttacgacatggtactttctgggccactttgggagttgggccgaggcggtagtggccagttttctatatttgcagacggtattgaggatgctagtggaattgacaagatccgtcttgtcattaaacgaagtaatggttctgtggtctccgacaataacctgagttatgacacagccaataaacgtgcgttctatccgtggattaaagatatgaacacccaggctggcatgccctcaagtgatcttgatgaagaattcaccttcaatttcatcgttacggacctggcaggaaatacgcttaacattcctccccagcggtttttatatgacgatcaaatgggagaatttacgccatttgcagttcatgactcacgtgtaagcaccagtgttgtacccggcatttcttcgggatacgtcccgtttaaacgaggccttacagtgctggaaaacccctacaagttggttatacgtatcccaagaactaactggaagccatatcgaaatggtggcatgagcattaccaataactatggcggagtacaggtcctttccgaagatgccacctatgtctacgtggaagttaagctgccacagggtgccttagatggaaactactatagacctgtgaatacatatcaatggtctggaggagatcttggtcagtatgccagctggctcaactgggatcctgcctctgtaaagagtccggcttggggaagttcacccatagaacgacaaaaggctgatggaacatggttcaacagcgtaaactggaacctgttcaaggcatctgatatgcctataaaacttactaatatccgattcaatgtacaggccaggccatatgatcaaaaaatcactggcggagcaacatgcagtattccagctggctcaacaacctgtaccgtctctttgccccaggatattataaatggcactaccggttatcttcatagtggctatgaagtaaggtcaaccaccgaagcaaccttctttgcccctatatgggagaatatagcctggcatacactgggtccctccgtcactggatttgattacaatgaaaccaccaacattctccaggtttacgtgaatcaacctggagatggttcatatttcgaccatgtttatgtaaatcgagtttggttgtcagataaaaaccgtaacaacgcagaaataagcgtaaccggcaaacaaacaggtagaaatatggcgtctgggaactacacgtatgagttcaacatgaaagaggtaccagaaggcagttataacgtggtgattaatgcccaagatacattcaacaataccggtaacctcccttatcaaacagttgtcgttgataatacagcaccatctgtaagtattagctacgaaggaaaaccgatcagcaaaaacgtaacagtatatgggctggagaacgtccgtatacagctcaccgatgctctaactaaaccatccttaagccgtatgactcttcgcggtggccctgtttctgatgcggtggaattgtcttgggtgaatctgggaaacaacctgtatgcacctaattatcccaagatctttccgtctcttaatgaaggcgaaacatacactctcacagttcaggccaaagatgagatgaacaacgttaaagaaagctcagtcgaatttaactaccttccaaacaatctcgtcaggctagagaatctgaaaaccttagctgtcaatgcttctctcaaaacatctgacaatactgctctggctgttctgtatgccagccagctgcgtaaaaaggatggttcaatcgctacagggcttcaggacgcagtgcttactgtccgtaaggacgctgcattcggcgtgactgtaaatggcgtttctgcgatgccaggtgaaagcaaagagcttcaactggatttggggctcggggacagccgtagctttcctattttccctgctgtatccggccttactggcagatctgagttcatgattaacattgaagaattaaaataa

SEQ ID NO: 403082 - DNA, 294 bp, Salmonella enterica
atgcgcctacttatcagcctttgggacgttgggacggtatttttcactatatacccccaagtttttagacatgaaaaaagctcgatatattataaatatatcgagcctttaagttactgtttttcaatatcgttcaaaatcttgataattacagtatacggttttatgaagtggtatatttgcaaatgcttattttgcaaggtctatttgcttgatttatcctacaatcgtaatgcaaaacccatgaccggaagcaacgaacttaggttcaatctcactcaaatccgaggatag

SEQ ID NO: 403083 - DNA, 255 bp, Salmonella enterica; identical to SEQ ID NO: 157158

SEQ ID NO: 403084 - DNA, 324 bp, Salmonella enterica
atgactattatctttaacagcgataaacaaactgatagcgagtcagctttcgagaaatggttgcttcaccatcctgatggctttgttgttaatttgaggaaagctgctaatggtttgtcgggtaaaagtgataaacataaaacttttattcacagtgctagttgtcattgtctctcttctacgaaaggtggatttactaatggagaatatcagaaaatatgctcatcttcttttgagaaagcagaggcgttagctaaatatatgactgggctagatgagataaaacgttgcagcttctgctttggtaaagataaagagtgctaa

SEQ ID NO: 403085 - DNA, 216 bp, Salmonella enterica
atgaccgttcacaggattttttacggtgatgttcggcgcgggggcgttccggtcgctccagtcaatcgcagctcctacacggtcaacgtcaaaaaccagccagaactgcgcatgaggctggttctgctggatgtaccgcgcaagaagcgcacgccctttgccggagatgcgaagaccaaaagcgagatcatccgtgtgatagggacggtggggtaa

SEQ ID NO: 403086 - DNA, 954 bp, Salmonella enterica
gtggcaacctatcacctcaatgtaaaatttggcggcaagggacaggccggaaaccatgccgattacatcgaacgcaaaggcgagtacgagaaacgaaaagatctggaatactcagagcacgggaatatgccaggctgggcgcgagataatccctcccatttctggcaagcggctgatcagtttgaacgtgcgaatggttcgacttatcgggagatcgaaatcgccttgccgcgtgaactgacaccggatcagcgcattgaactggtgcaggattttgtgcgtcaggtagctggagaacggcacgcctatagctttgccattcacaatccaaaagcgagcattgacggaggggaacagcctcatgcgcatatcatgatgagccagcgtattaacgatggtatggaacgttcgccggaacagtatttccggcgttataacgccaagaatcccgaacggggaggcgcaaaaaaagattcaggcaatctgacaccgactcagcaaaaagagcaattgcggacgttacgggcgagctggtcagcgttacagaacgagcatttagcgcgtcatggtcacagggtgcgcgttgaccatcgctcactggaagaacgcggaattaaacgcacgccagaacggcatttcggatttgccgcctcatcacggcttgatcatgcgcagcgccgcgaaatcctgcaaaaccgagcgcagccgctcgaacattttctagagaaagcgcattcggttcgccatcaatttgatgcacaagttcagcaaaaagagttagttaaaacgcttttacaggacgtcgcacgggagcgagggcacgcgcttacggcaagaataaataaaacaggtgaagttgaatttgaacgtgcgccaacgcggacgcggagtaacacgcgagggcacggcatgggcattcgtgacaactcacgcgggtacgactacgaacgttaa

SEQ ID NO: 403087 - DNA, 237 bp, Salmonella enterica
atgaatatattaggtttaatagcaaaagcaaaacctgcggtagacgatggcggcggtagtctcattcctgctgcgatgggtttttttatttgtgcttttttagttgctatcattgcctctgttgtttctagtgcttttcgttctgctaaaaattcagcagacgtgagtataaacaatgcaaaaaaatatcacatagcactaataaaagagcagtatagaaagaaaggcgggggctga

SEQ ID NO: 403088 - DNA, 465 bp, Salmonella enterica
atgttttatttaatatgtatggtttttatggtcatattttttattgcttgtatgttgtcggttatatatgcgtctgaaatatatcagtggcagcattataacagctataagtttaagcaatggttaaaaagtgggagtataaaaaaagatgcgcatgaagaaaaaataaaaaaggaagtgaaaaaaatgactatagattatatattaaaacttcttaaaaaatacaatatagattttgatgctaacgagtttgtaaaagcaagttttaatattaagatgaaatactacaagttaatattaaatgaaaaggagaggctgaaagaaaataaaatattagatgaagcagttaaacaaaaaataaaaatagaaactgacacatttgacgctgaaaaatttcaaaaagaagctgatgaacgttataagttattcatggaacgccgcaatctctccaatagagaaaaataa

SEQ ID NO: 403089 - DNA, 1740 bp, Salmonella enterica
atggtaaaagatgaacttgaggagttcagtaaacttgcggatcaatacatcattacatgtgatcacgcttctttagctgcgttagtcgaaagttatacaaaacaggatttcaccttttctcaccccttgtacgaagcccattatctctactgtctaggaaattgttattccaaactctatgaaacacgtaaaacagagtggtattcagatgatttgatgaaatcggtcatcttctacagaaaagccatacatactctccctaaagcaaactggcaggaacacgtaaataacattcatgcatatgatagtcttagatctatgattgagacaaatttagctaaccgtctttcatcacagggaagagcactatgctgtatccctcactatgacaaagctatttctatagataacaatcccgtagcaattatatcaaaagccaataatgaattatttcttggcaattcactatacgatgaaggacattctgaatatcattatttcattgcttacaatctattaaaaaagggactcgataatttcaaaaaacaatatccagaacaaaaagaatcacttgaggatggggggcgattacacaatttccaaaaatggtttgaggataattttgagatatcatctttcgattatttcatgaaatacactgaaaaactcacatcaataaaacagaaaaagtattttgaatggtgtgcaaaaaacaagcttttccttaatgatttaaatgatgtttgcgattaccagattacttaccaagatattttttcattaccatcatttatccaatctcttaatggtgcgcttacaatgcatgaagaattatcataccatggtaattatgatgaattaaaaaatgattactgctatgcgcggtatttaatatactcctcaaaggatataccggacgatgcgcctcatatattcaactcaacttttcaacacgttgaagatatgacttactcaattaacaatttaaaggttgcccaatacaaatcagcattcagaataatatattcactttttgacaaaatagcatacctaattagccatttttttgatttaaatgacttaaagcatgacagaaaaataagcatcgacaatttatttcgcgacttcacaggcaagaataatgaatggaagccccataaaaaacttaaggatagtgataatccttttatccatgctttattctatatattaaaagatattcgcaaagttggtagctctgattcagtatcaaaatggttagatccaaatgctgtagcatttgctgaaatcagaaatgctatggaacatcgttcattgaaaattgttgatgattttggctatgaactcgcaacatcacataatacttacaatgatgaagaatttacaaaattgcaaagagaggtcaatacgataccagatgaaattagagaaattgaattaaagataaaaaaaacaaatgaagaccatgaccctcatttatctaaacagcttaaagaaaagattaacaaactaaatactaagcattcagacttaaaagcaaaaatccatgaaaaagaaaaactatcatcacattgtcttttagtgccaataagccaattcgaatcaagaattatgcaactcattggcttagctcgtaactcaataatgtatctatcattagctatccattttgaagagcgaaaacgcccaaacgacggtatttacatgcaaagagaagtaccactcaagcataatttatga

SEQ ID NO: 403090 - DNA, 462 bp, Salmonella enterica
atggtcatgaaacatgagggaaggggtgaggggttctgttgccgttatgcttctgcggggaggctgatcgggtggtttatgtatggcgaagataagcagaatgttatctttgtggagacctccgatagtggtgattttgtccaagcgataaataaagcaaccgctgatctgcaagagcgcttaagtgctgaaaggcagtttctgaataatgctcttaacgcgatgtgtgatgcgggaaaagacaaaacaccgcgcatctttgcaggttcactttctgatgaagaactaatttctttacttgaggaagtaattgtcaaacttacgtcccgtagaaatctaacaggaaagccagagtctctacgggaacaagctgaacaagccgagggaaaactaaaatctaccaacgactttattaattcaatcgtgtatcggcaggttcgaaatcccaatcagaatccttga

SEQ ID NO: 403091 - DNA, 456 bp, Salmonella enterica
atggaacttaacatcactacttgttatagaatctttgagaagcactacaaccgtatctccgagtctcttggtgtaaatccatcaaccagacacgaattagaaaacttcgttgcttaccgcgccctcatccttttcaaactggatctactgttaattgatcacagaaattcaattgatcaagaccgctttatcctgttcggtaaaaacgcccttcatcattatttgttcaccaaaaaaggtgttccatatacagaagccaaatcattgagccttcaagactcgttaattattctcgcagaagacatttcaaaatatatgctacccgctgatattttgaacttcataaagaatgagtttaacttttcatcaaataacattaagagcgttatagatgaaatgcgtgtattcaaggattctgattgggatttcgaacctgccgatacacgattgaattaa

SEQ ID NO: 403092 - DNA, 204 bp, Salmonella enterica
atgagccagaaaacagccaatcacgaaaaccgggtgcgtgaatgtaacgacattctggacacccatttaaaagatatgcaaacgggcttcatgattcgcaccaatagcggcgagtttatgatcagggataaaaagctgattaagaaaataaccaaagacgtggcctgccatgttgatggtgaattgcttaaattgggaatgtga

SEQ ID NO: 403093 - DNA, 231 bp, Salmonella enterica
atgcacgatgaaggcccatcactggcgagcctgcttaagcacgggtgccaggttacacacttcaaaaactcacgcggctggctggaaacaccagacgggcaattctttaaacctgagcctagcaaggttcaatttattaagggaatgagtaagccctttgtttatacgaagaagataaacaaaggattgctttttaaccttgttaattctttgagaaatttaatcggctaa

SEQ ID NO: 403094 - DNA, 183 bp, Salmonella enterica; identical to SEQ ID NO: 14989

SEQ ID NO: 403095 - DNA, 213 bp, Salmonella enterica; identical to SEQ ID NO: 14990

SEQ ID NO: 403096 - DNA, 198 bp, Salmonella enterica
atggtcatttacgcaatgctgtgtcggctgcatagagacgaagatgaaggttttccgcgcctgaatatgcttttcgcaacaatggatgaacttgaaatcggttggttttcatctgctgaaaaaatagggcttaaaggcctgtgggtgccttggcaccagatggctttcttagggtttgatgatggggtgccgttctaa

SEQ ID NO: 403097 - DNA, 888 bp, Salmonella enterica
atgaccttaaaggattcacgcaatgccacttctttgccgggatcggcgtctggtcttacgccctgcgccgcgcaggatggcccgatgatcgccccgtctggacaggttcatgcccctgccagccgttcagtgcctgcggaaagcggcagggaaaagacgatgagcgccatctctttccaacatggtttcgtcttatatcggagtgccgccctaacgttatctttggcgaacaagttgcgagcaaagacggcctcggctggctcgacgatgtacgcgatcacctggaaagagcggaatacgccttcgctggtttcgatctctgcgctgcgggcttcggtgcgccgcacatccggcaacgcctcttctgggtggccgacgccgaacgcgagcaatgtcaaaaacgcctatcaggatccccggaaagtcatagccaggatgttggcggggcggcaatcgaacctacaggattttgcctgtctggcgggctggaacactcctacagcaacggacgggaagggcggatatgtgggcgggaggattcgaaacgggaagatttcaacggatcgattggatgtgacggcacaacttgcgggctggcagacgccgacaacaagcaacgatcgcaagccgaatcagcaaaatgcgctaacgagttatcgggaggacggaacaaaaattcagaaacggttgcaggatttggctgcaatagcggggccaatgcggttaatggtttctggggatctgctgactggctcttttgccatgatggaaagtggaggccagttaaacccggacttaagccgctggttaatgggcttgccggacgcgtgggccagttgcgcgcctacggaaacgccatcgttgcaccggtcgcggaagcgttcataa

SEQ ID NO: 403098 - DNA, 1083 bp, Salmonella enterica
atggtaaatgtgcgggaggatgaacttttcaaactcatcgagcaaggtatcaaaggcaacgcaaatgcatttacactcctatgcagaaagatgattaacaacatccgtaaaaatgatgagaccttagcttctaagttggcttcgttagttgctgagggaacggtattgcgtggggcatctagtaatgctcctatgcctgtggatggagactccagacgaaaccttttgcaggaaacatctgtcaacgcaattgttgaagaacctgtatggaatacggatatctcaaagaagctggagtcaattgttaacgaaagagagaatgcagtttctttgttcaaagccggtcttgaacctgtaaagacggttttactttccggcccgccaggcgtaggcaaaacaatgtccgcacattggcttgctgcaaagttaaatttacctcttttaacattggatctctcatctgtaatgagttctcttttgggaaaaacgggcaataatattaaatccgttatggattatgccaaagagaaaccatgtgtccttttgcttgatgaatttgatgctgttgcaaaaagacgtgatgatgacagagacgttggagaattaaaacgtttagttactgtactcctacagaccatagatgaatggccagcgacctcgcttcttgttgctgcgactaatcaccctgatatcttagatccggctgtttggcgtcgatttgagcatattcttaaatttaatatgccatcagtagaactgatagatagatatttagtcaatcatgatattgagcctgaactagctaaaaaacttgcaccattattagatggcatgtcctttgccatcattaaccgtattttgaatttctccaaaaaaaatgaagtgcttagaaatattccatttgaaagttcattaatagaagccgtagttacggagagggtttcattggatgattttagcgataatgatctcaatataattaaatatcattttgacggtatttcaaataggaagatagctgaattagttggtgtttcacatccaacaatcgcgaataaattacaaaagtggggggttaaatga

SEQ ID NO: 403099 - DNA, 2205 bp, Salmonella enterica
atgatggaaaggaacttacttttaggtaacggtcatgttctgacaaaaaaggaacctttgcctaaaggaagggatggtaagcgctatccctatactcttgaagaagtaagggagcatttaaaccccgagattgatactttactctcacgctttcgcagtttggatgatgcggctaagccaagaggtgagagtgtattcaatttaactttacacccagcgtttttaggtaaaagctactttcctgaagggttgcttagagcgacaggtttacgggatgtcggtagccgtcaagtaatcattcgcccacggaaagcggcacgtcagtgtgatcagaataaggacttagtaacggcgcaactgtttgtcagcggtgatgatgatgccgttataagatttaaggaaattttaaattcccctacagctccgaagggcgtacaaaaggatttgatcgaaattgaaagtgttagcttttttgaaggaaaagagagagcacgcaattttgagcatgcgaaaagtgatttgataaaatttgaagtggttcttcatgctggggttgaagacgatgatatcgttaaagcctatattaactatgcggcacaatatggcgtctctgttgattacaaaagtaaaatccaagttggtgggctgactttcatcgttgcacacgcacgacctgaagatatgaaaaaaaccctcgatttttcattaatccgcgttgtgcggccgatgccgtctctaaggtgtactcagccgaacattgtcagaaagttatctaatatagttacaccggagttccctaattctaaagctgttcttgaatccgaacgtattgcaatttttgatggtggcttggggacagctgacttgagtaattgggttacggaatacgtgtatccagacaccaaagagacaagcggattattattgcagcacggtaatgaagtaacatcaactttcttattcggacgtgtcgaggaaaatgcaccttcttttgaaagaccgtttatgaatgtagatcattatagagttctttcaccaacatcaggtgacaatggcgattgggatttgtttgatgtccttaagaaaatacagtccgttcttgatagtggtgactataagttcgctaatctaagtattggtcctcatcttccaattggcgatgatgaggttcatgcatggactgctgttttagaccaaatctgtgctaagcatgggatattacttactgttgctgttgggaatgatggtcatgaggacggtgatgcagcgagaatacaacctccttccgatatggtaaacgcgctagcgattggtgctgctgatcgtagcggtgaaaaatgggggcgggcaccatatagctgtattggccctggcagaagccccggattcgttaaacctgatggcgttatttttggtggaagcgacgacgagcctttttacacttacaacccgctgcttggttctatagttggagttcaaggaaccagttatgcctctccattagcattgagaacggccgctggagttgcggctctatcaggaaccccattgaacaccattgcattgaaagcgttgcttgttcatcatgctgaaacatcaagaaaatattcgcgtgaacatatcggttggggacggtttagtgaggatcctaacgttttaatcgattgtgcgaatgatactgctacagtaatttactatggttcattagcaaaaaataaatatttaagggcaccgatcccattccccgatgttccctttgacgaagcatttgagcttaccgctactttatgcattcaaaccccagttgatcctgaacattcagtaaactatacaagggccggtatgcaggtaactttccgtccaagattcggccttgacgatgccgatactgatgatttctttggtcaaaaaagccagtataagaccgaaagggagtgtaggagtgaaggtcataagtgggaaacttgcttgcacagaagcaaaaaattcagtgctgatacattattaagcgatccagtttttgatatacggtatcacgcccgagattcttcgcggcatgttaagggggtttcagcccctgatatgcaatatgcgatggtaataagcgtaagggtgaaagactttgatttatataatgttattcgccagcgatatacaattctaaatcctattcaactgcgcacacagatttctctcgacacgtaa

SEQ ID NO: 403100 - DNA, 198 bp, Salmonella enterica
atgcacaaaaaacgaagcaaatgtcgcgcgcaggtgacgggggaacagcccacgcaacaggggctggaaggcaaccccggcggaatgtggctaaatcgtcgcgtgagcgcctttgtgtgcgacgaactggcacgcgctggcgtgattcgattgctcagacgtgcgcccgtctgcatggcgctgaggcgttatttttaa

SEQ ID NO: 403101 - DNA, 861 bp, Salmonella enterica; identical to SEQ ID NO: 398479

SEQ ID NO: 403102 - DNA, 711 bp, Salmonella enterica
atgaggttaaaaaaccgtccgggccaacgacattgggatattgaatggattgggattgatcgtcgtagcatggtttaccgcgcttataaacgtcaggacatgcaggatggtgaggatttttctgactatttaaaccgggaacgcgttctgaccgatgaatttgagattgaaagtggctgtgaggcttctggcttcattaaaggtgataaagaacgctggagcatcagtggtgatgttcacgagataaagaatctgcctgtaatcctctatagcaaacagacattgatgacttcatcgaaagacggtttgctgaagaaaaacgtatcgggtgtgaagagttccaagcacagttgcttcgtttatggcgatacctcgttttctttcagtgaggttatggaagccatcttcattagcgggctgttcttctatgcgccaagagacgccgccagtagtcttgatgaactgaaagcgagtttggccggactggaagaagaactgaccgaggtatcaaaaacggagctggtagccaatgaaacagataaagaacctactatagtcgtagctgaaggtgcttttgattcggccactgctcacatggaaacagaagctgaggagtggcaatccattaagaagctgtgccagcgagaaggtgagctacctatacgtattggtggtatcaaaatagcggagcctccagagcaatattcataa

SEQ ID NO: 403103 - DNA, 354 bp, Salmonella enterica
atggataaacactatatccctgttttagaggatttaagaaaagcgatatatagcgacagaatgttatcaaggcttgcagatagtggcaatattgtaatccatagttcacttggatatccggttgctaaatataaaaacacggggattagcataggtatagaaccattaaatccgatgataagacaggatctaactcttggacatatcgtggtagtcagaaacggaaaaacatctcaggaaattaatggattacttaacaagccattgccaaaagcgataagcatctttaaggaacatatcaatgaatatgaaccagtaaaaagtaaaatgcgacaagtggcagtgttctggtaa

SEQ ID NO: 403104 - DNA, 291 bp, Salmonella enterica
atggcggttggctctgtgccaggaggacgacagaccaatccctccgtaaaaacagcatttaccgccttaaccgcagccaccgtgccagctatagtgtgtccgctgcccgccaagcgctggctgcagccgtctagcaacctcggatgccatctcccaggaaattcatcgttgtatcaggaaatacaggccatgccgtttgactggaaagatattatcacacccattgtgaccgtcacggaggtcttaggggacataatcatgtatgatctttctttgggtcttgtgctttag

SEQ ID NO: 403105 - DNA, 357 bp, Salmonella enterica
ttgaactggaacggctggcccaaattgccgccgcgcaccagcgccatcgctgcccgccaagcgctggctcagcttaaaggacgcggcgtcggcagcaccgtcagctactacgtcaacgaccatatcggtataccgcaggagctgctggacgaggacggcaacgtagtgtggagtgccatttatcgcgcctacggccatacagaaatgcaggcgggtatctgccagccactgcgtttgcaggggcagtatgccgatgaagaatcagggctgcattataaccgctaccggtactataatccgttagcggggaggtatatcagtcaggatccgatttcgattcggtttgaatacctatag

SEQ ID NO: 403106 - DNA, 543 bp, Salmonella enterica
atgaaactatatgaattatgtcatcaggttgataatagagactcatatgttgaatttgagagaaaatacatacctgatatttttaaatttttcattatggatgttgatagcgccgtaataaaagaagagctaacggcttccgcacagagtggactaacggaaaatctactgtctaatcttgatgcagttaatgcaacaataaatattcctgttttctcagaaaattttaagataaaagttggaaaagctttgtctgaggatgttattttttacccttgcttaattaatggcaagcataaatattatgcgtgtaaaataaagactaaatgtcaactgatagattatgataagtctgagtatctaaagctatcagatcctagcgataaacctattttatcttctcctgtttatttaagtaacacaccagagagtttttatatcgctagagatattatggaaagcaccaagtttttagtaagcgagttattcaaggagctcgttgtaaaaaacaatcttaatataaaactaaaggaaattaactga

SEQ ID NO: 403107 - DNA, 654 bp, Salmonella enterica
atgccttccatcgaaacgtttatggctttccttctcgcgctgatgcttctggagatttctccggggccagacatgatgctgactatcgccagaggagttggtcagggaagacgtattgcagtgcttacggtactgggcaatgtatttgtagcaggttttgtgcaagtttcttttcttgtcctggggctggtaaccgttgttcatgcctggccggttgcgctggatctgctaaggtgggctggtgcggcttatctgatgtggctgggcataaaaatgattgcgacttcaggcactgatacgcggctgcgaaaaactgcaaaaatttctgactggaatgccgttaaggaaggcgccctgaacagcctgactaacccaaaatccctgctgttcatgtttgcttttcttcctcagtttgtcgatcccgccgcgggtcctgtctggatgcaattgcttgttctggggagtatccaaaagctggcaggaattgtttccctggggtcagtcgcgatggcatcagggacatttgggaactggctgggtaaacacccagactttatcaaatggcaggaacgatttacaggcgttgtcatgattggcctgggtatccgcatgttgtttagcgggtctggtgtagtatcgaaatctgcccggtaa

SEQ ID NO: 403108 - DNA, 900 bp, Salmonella enterica
atgtttgagttaagccaactgagatttttcctcgccgttgctaccgaactgaatttttcgcgcgcagcaaaacggttaaatatgacgcagccgcctctcagcaggcagatccagctgctggaacatcaactgggtgttgagctgtttgatcgcactactcgatcagtagtgctcacggccgctggcaggcgattttttatcgaggcgcaggatttattgcagcgcgcgcatgtggcgatgctgaacgcgcagaagatgtcacagggcaatattggctcggtaaatatcagctttgtggcgagcgcagtatatgcatttttgccgatggtagtcgccaggggtaaagagcgttatccgcacattgatatctcgctcaaggagatgaccaccggtgagcaattcgaagctctacgcctgcggcaaagcgatattggcctggtgcgtgccccttcggctttgaccggggtgagcagtgaaattctggtgagcgagccgtttgtgctggcggtgccacgtcagcatgagctggcgacgttgtcggatattacaattgcccatctcgataaacagccgtttattatgtacgcgttatccgcctggcagccattttatgaactgctgaccgggatgttccgctcaaataatatacaaccggattatgtgcaatatattggctcaacgctgacaattctctcactggtaaacgccggtatgggtatggcgttcgtcccggaaagtgctgcgcgtattttgtttgataatatcgtctatcgccatattaccttgcccgcagggattgaaagcctgctgtatctggcctggcgcgatgacaatgataatcctgcctttaaagtgatgcttgaattaataaaattctcaatggttctaaagaagaagtga

SEQ ID NO: 403109 - DNA, 1161 bp, Salmonella enterica
atgtccacacagagtactcttgcccaggctggcgcttttgaccatatcagttggataaaactctcttccgttaatgtgccgctgaacacggcagtgagcgatgcgaaagtcctgaccggccgccagaacgcgctgaaagatgtggcgctgctggtagcggaaatcgaaaccgaacagggttttcgcgggcttggttttacctacacattacgtaacggcggcccggcgcaattcagccacgccaaagagatggcaccgctgctgattggcgaagatccgaacgacattccccgcttgtggagcaaactggtttgggcgggcgcatccgtcggccgtagcggtctggcgacacaagccattgccgcgtttgataccgcactgtgggacctgaaagctaaacgcgccaacctgtcgctggcaaaattattgggtgcgcagcgtaacgaagtacgttgctacaacacctccggcggttatctgcaggcatcagtggacgaaatcatcgacaaatcaaaagcctctctggcacgcggtattggtggcatcaaaatgaaagtcggccacccggatcgccgtcaggatctgcagcgcgttgacgccattcgtaaagcactgggcgatgatacaccgctgatggtcgacgtgaaccagcagtgggaccgcaccaccgcactgcggatgggcatggctatggaacagtacaacctgcaatggattgaagagccgctggatgcctacgatgtggacggccaccgcatgctttcgtccaacctcgttacgccggtcggtaccggtgagatgctcaccagcgcgggtgaagtggccgaatatatccgtcagggtgcggtagatttagtgatgcacgacgccccgcgcattgggggtatcactccgttcctgaaagttcagcagatggcagaagaccacggtttgatgatggcaccgcatttcgttatggaaattcacttacatctggctgccgcatacgcccatgaaacctgggttgagcatttcgagtggctggagccggtctttaacgagcgtctggaaattcgcgacggccagatgattgtgccgacgcgcccgggtcttggcctgtcgctgcacgagcaaaccaccgcctggaccgtggcaagctttgaaaccggaaaacgtcattaa

SEQ ID NO: 403110 - DNA, 1329 bp, Salmonella enterica
atgaccagccatacaacacaattgagaaagcaaaatagccatattcgttatcttatattagtggtcgtctttttaattaccagcgtcaactatgccgaccgcgccacattatccattgccgggagttccgtcgccaaagaattaggtcttgatcctggcgacatggggcttattttctccgccttcggctgggcctatctggtgatgcaaatcccaggcggctggctgctcgataaatacggctcgaaaaaggtttatacctggagcctctttttctggtctatctttaccttcctgcaaggcttcgtggaattgatgccgctcgcctggacggttatcagcctgttcttcctgcgctttatgctgggtttttccgaagcgccctctttcccggcgaacgcccgcattgttgctgcctggttcccgaccaatgaacgcgccaccgccacggcctgttttaacgccgggcagtatttcgcactggcgctcttttccccgttgctcggctggctaacctttgcctggggctggcagcatgtcttcacggtgatggggattatcggctttattctgacctttatctgggttcgctacgttcataatccgagcgagcacccgatgatttcccggcaggagctgaaatacatcaccgacggcggtgccattatcgatatggacaccaaatcggcggcgaagaaatcctccggtggctggacctccgtaaaacaaatgctgaccaaccgcatgttaatgggtgtgttcctgggacagtattttattaactccatcacctggttcttcctgacctggttcccgatttatctggttcagcaacgcgggatgtcgattctgaacgtcggctttatcgcctctattccggctatttgtggcttcgcaggcggtattctgggcggtgtatgttcagactggctgctgaaaaaagggatgagtattaccgccgcgcgcaaaatccctatcgttttcgggatgttgctggcaacgtcattaatcctgtgtaactacattgaaagccacgtggtggtagtgtcgctgatggcgctggcttttttcggcaagggcttcggcgcgctgggctggacggtggtctccgatgtggctccgaaagaagcggccggcatgtgcggcggtctctttaacgcgttcggcaacgtggcctccatcgtgacgccgctggtgattggttatctggttaaagagatgcattcgttcaatagcgccctgattttcgttggcgcgtcagcgattgctgccatgctctgttatctactggtggtgggcaaaatcagccgaatggaattgaagatgtaa

SEQ ID NO: 403111 - DNA, 1092 bp, Salmonella enterica
atgataagattagatgctagaagaataaatgcgtcaactgtcggggattattcttggtactctgaccttgtatatttcgatggcccactcatttgtttgtttagagggagtgggtataaagatgctctttatgtatggcttgataattctgagcgggctaatcgttggtgcttaatcccggtatcaagatctactttggactcttatcttaatcaaagaatgagcttaagggagattatacagtcaagcgaatatacttatatttgtaatcattatgcggaaactggaaggaaaaactatagcattctgcatgttgatagttttcctgatgaatacatgcctgatgaagattcatatttgtatgaagagatatgtactgatgatgcattgctgttgaagcaagaacgtacttccagttatatgcttggcttagataatcagttgtttataaatgatttatccgtaatacctaaagtttttgaacagctttattctttccattacggactggcccatttaggacggttatcgattagaaataccatgttgcgcttgatggggaattggactggtggtatatcagcagttaatatattttcagggttgaaaagtgttattcccgttttgcatcgaccagagattagttctcttcaatataattcgccgggacatattgagttaaatttacttccagatttggcccaaagtgttcaagacgcatctgtccgtgtggagaatgagctaatttatgaccgcttggagaaaatgtataaaaatacatatacatacttcagagaacatgggctatcaggttttgatgaagatggtggcattgaaattagaaatatcgataatgacaccacagaaaatctgcgtaagcgtgtgagaatattttttagatgtttgggatggtcaagttatcaagctcagtttgatttgatcggtgcccatcctctacaacaattacgtgctgtaatggcctactacaggcggcttaaaatattgcgtgagtacatcatttcagagaagctttttgttggccagtctcgggtattgcagcagccacaaattgctcttcctcctgaggtatag

SEQ ID NO: 403112 - DNA, 516 bp, Salmonella enterica
atgcctggttttgaaaatgcacagcaaaatcaagttgatgaaattgttcaagcaatgcaaatcgaattggttgaagaagatatagaacagcacgtagccgccgaatacctatacagccagcacataagtgcgctcgtaccacaatgccctccagctgaagcgacagagtgtgataaagaatgctggcgttttacactgaatcctataactgacaattgtttttggcctccgaaaagaagatcaccgcagagaattgcttccgacgacgctcaggagtgttctatgtgggcgttgtctatgtatgaatcagaggtccaggccacaagagcctatactatgttagctaagaatatgaaaaatataaaaaaagctattggtgatcacctagcaaggggtttagtaacctgtagtgatggtaaatgtatgcctgctaacagaaaaggtcactttgattttcatccttatgtggatgcggatttcgccaacggattccaagtaatacgagcattgccatga

SEQ ID NO: 403113 - DNA, 1071 bp, Salmonella enterica
atggaaaaagaaataattagtctcatatacttatcatcactattttttttaggttttatttttataaaaaaacggtattaccggatcaatcataaaagcctcttagaacaacctgcattttggttttctattggtttacctttggctacctgcctatttttaggggctttaatttggatagataaatggcattcttttagcctgacaagccatggctatagccgatttttagaaatttcaaaattaccgctactagtactagcatcagcagttccctttgcttctatagtaaacaacctccaccgcacaatccaaaccgaaaaacaaatcactgaatctgaaaagaaaaacaaaactgatggatattatgctcatgttaaatttcaaactgattaccttaaatctttaccagaaacacagctaaaagcaaaaattatccaaagtaatgggaaaatggctgaggattcaaaaacattcaaaatcacctatcccctatcactgtacaaaaaactgtatccgaattgcagtcctcttagcggggcagaatatgaggcagataaaactcatactgcattgattctaaagtcttgggttaagataaacagtatccttaatgaactacaaaaaaatagaaatgctattgcgcatggaaaatcagaagacctgagtgttttgctaaaatcttggtatcagttagaaatggaaataataaaaacctgcaaccaccttgaaataatatatcctacttatcaaaaatcattttcaatagtatataacaattcaaagctaacaacgtccatatcttcttttgatgaaatgtataagatccttgcagcactagaggacatatctattggaatcgttgacgcagcaaaccaatttacgatggttgggacacatgtatttaccaaaactaaaaagttgttctctgtctggggaagacctaccgaacttgatgagatgaatgctggttttcgcaaaacacaaacagatgatcccgatgctcctttgcttattttaaatggtaagcgctatatggattttggcgacattttggcggcagcgcaataa

SEQ ID NO: 403114 - DNA, 195 bp, Salmonella enterica
ttgactactaaccaactgaaaaaaaagaatctgtacttctatctctacatggcgatcccgctactgttcccggctacttactttctcaccatgaatgataaggctgctcttgctgttttttatgtaaccgccatcgcctgtatgattttcgaccaaaaggagatggttaaggctggctacgaatccgaaccataa

SEQ ID NO: 403115 - DNA, 150 bp, Salmonella enterica
atgcagcgtattagccgtcttaaatttaccctcgacgcagagaatgtttgctgccctttaccattagaatacttcccgcgattcttggcaagatatgaaatccgtttggttgggctgactccatcttggacgattttacaagagaaatga

SEQ ID NO: 403116 - DNA, 1275 bp, Salmonella enterica
atgaaactgaatgcccgtcaggttgagaccgcaaaaccaaaagagaaaacctacaagatggccgatggcggtggcttgtatcttgaggtgtccccgcgaggatctaaatattggcgcatgaagtaccgccgtccctcggacaaaaaagaagacaggctggcgtttggggtttatccagtgattagcctggctgatgcgcgggctaaacgtgatgatgctaaaaaacttcttgcacagggtatagaccctaaagccgagcagaggggggcacaatcggaagcggagggggcatttacctttgagacgatcgcccgccagtggcacgccagtgttttgacctggagtgatggccaccgccagcgagtattaaccgctctggagcactatatctttccgcatatcggcgctctcgatgccagaacgctgagaactagccagttattggcccctgttaaagcggttgatgctaccggcaagcacgatactgcgcagcggctgcagcagcgaattaccgcaatcatgcgctacggtgtacaaaacgacattatcagcgtgaacccggctaatgatatggccggggctttgtccacgtataaaaccactcactaccctgctttaccccctgcccgtatacctgagtttatgcaccgcttgaatgcctacaaaggccggaaaatgacacgtcttgcggtagagctgacgctgctaaccttcgttcgctccagtgaaatgcggtttgcacgctggagcgaagttgatctggaaaagggggtatgggttatcccgggcacgcgtgaaccgatcccgggtgttaagcattcagagcgcggcatgaagatgaaaacggaacatgacgttcatctgtgccggcaggcagtagatattttccggcagctgtacgaactgagcggaaaaggggacatcgttttccctggggaccatgataacagtaaggtaatgagcgaaaacactgtgaacaatgcgctgcgtactatgggctatgacaccaaaacagaggtgtgcgggcacgggtttaggacgatggctcgtggcgcgttgggtgaatcgaagctgtggaacgacgacgctatagaacgccagctaagccacgtagagcgtaaaaaggtaaaggggtcgtatttgcatacttctgaataccgggaggaacgtagcctgatgttgcaatggtgggctgattaccttgacgccaacaaggaagggagcatatcgccgtttgactttgcacaaactcgcgggatgtggaaagagaaataa

SEQ ID NO: 403117 - DNA, 552 bp, Salmonella enterica
atgaaagatattacaaacatcgccgtgactggcgaagatggcgtggtgacgtatgccgatggcagcaaagaagagttcgagtgcagtggaaccgttgcaaacatcattgcaagtcttgcaacgacgcttgagaaagaacgcacaatgcgcatcgctaccggcgaccgcctgcgccgcatgtacacccgcgacagcgatatggtttcccgcggtctgaatggcgcgacttctctctccacggctcccaccgcaatgaccgccgagtttatgcgcttggtgcgcgccgtagcaccgaaatacgattcagccctgcccgacgctgacccgcgcctcgtcgcgctcgatgtgctgcgctacgcccctgctgaggctttcagcgccgtacaccctaccccgatgtcagaaattcagctggatcaggctatcgacgtgctggagcaggtaggcgactacatgaaggccaacaacgtcgaaccgaaggttttcaacactggcgacgctatccgcagcattaacgctgacaacgccagtttctggggcaaaaagcactaa

SEQ ID NO: 403118 - DNA, 189 bp, Salmonella enterica
atgcctatctatgacccgaaattagcagcaggcaacccacagatcggccgccgcccgatgctgacccgccaggaccttgaggcggcaaaggcgcgtaataactttgatcgcgaaagccgcagcctgcaaaaactcaatgaatccaacgcacaattctggagtgaacaggatgagaaagccaaacgttaa

SEQ ID NO: 403119 - DNA, 168 bp, Salmonella enterica
atgagaaagccaaacgttaagccggtcctgttgtccgctgagcagatgcaggccatacgcaatattcaggagcgcgaacgccagcgctccgatctcggcgtcgctcccaccattcaccagattgcccgtggcctcatggctaaggcgctggcatcaattcaggaataa

SEQ ID NO: 403120 - DNA, 264 bp, Salmonella enterica
atgacgctatcagatgctgaaggtcttgtacgcattaacggcgaattagttacgagccaaaaggttaaatatcttggagcccaaggtgacgaatcaaaggctgtttggaatatgggcctgatgccagcgcgtgacgggaacaattacggttttgagttcgttaagcgtaacggtaaatcgttcctgaacgtccagctgctgcagaacagcatggatgcgccgaaaattatcggctctttcccatgtaaaaaagtgcaagattaa

SEQ ID NO: 403121 - DNA, 201 bp, Salmonella enterica
atgtataaagacttaccaacggatctgataaccatcaaagaagtagagaaaaccacgggctttaagaaatcggcgatttatcttcgcatcgggcagggggctttccccagacaggtgaagttagggagccgaacagcaagatgggtgcgaggtgaggttgaggcctggaagcaggaaattattaagcagagagataagtag

SEQ ID NO: 403122 - DNA, 210 bp, Salmonella enterica
atgacaaaacccggtgaaacagatgatgaactgctcactccagacgaggtatgcgggattctacggataacccaaaagacactttgtgaatggaacaatacgcaccggtaccgccagctgctggcaccgatccgattttctgcgaaggtggtacgctatgagcggcgcaatctgaaagcatttatcgataaatgccgtagccaatactga

SEQ ID NO: 403123 - DNA, 1113 bp, Salmonella enterica
atgtttaattcagagcgtttacgtatagcaagagaacggagaggcctgacacaaagagcgttagctgaagctacagagttgaccagtaagacgatttcgaactacgagaaagcagggatctttgactccatcgccagcgatactatggaacggatttctgccgtattgggctatccgattgagtttttccgcgatagagatgtaccaactctgtcgcctgaggccgtaagttttcgcgcaatgacgaaattaaccgcgcagaaaagagattcagctcttggtgccggcaaacttgcacaagagctatcagcttggattgatgggcagtttaagctcccgaagcctaatgtgcctgagtgtagtttcgatggttattcggagcctgagcgagctgctcgagcggtcagagagagctgggggatcggcgaattatctatctccaatttggtccatcttcttgaggcaaacggggttagagtgttttcccttgctgaaaattgcgttgaagtagatgctttttcgttctggatggacgagaagccctttgtgctcctgaatacaatgaaaacgccagagcgtagccgattcgacgcagctcacgaactggggcacttagttcttcataaacattcaactaacaacggtcgtcaagctgagctggatgcagaccgttttgcatcagcatttttgatgcctgagcgtagtattttggcatcagtgccaagaatgccatcactcgatttgctcatatctctaaaaaagaactggaaggtttcgttagccgctttggttcgccgtacgttcgatgttggtttatcaactgaatggcattatcgccagttatcaatagagctggcgcgccgggggttccgcaccggcgaacctcagggaatggaagaaagagaaaaatcattagtactggataaggtgttttcagccctacgcagcaaaggcgttaaaaggggagaaattctcgagcagttgaggttaccagcggacgaagcgagtgcactaaccttcagtaacagcttctttatggaagctatcaatggtggaaaactgtgcacccaagaatcggggatacgcccgccacatttacggttagttaaatag

SEQ ID NO: 403124 - DNA, 720 bp, Salmonella enterica
atgtactcacacaatcttgcaaaaaccattgtcttggccgatccggatgatgttgaatcctacctgcagcccttaaatctgagtcaaagtgatctcggacgtattcttgaacgtggcttgtctggccgttattcgacgactcagaaccatcccaagacctcacgtggacaatatttttatggtgagggggtgagtgctgctcgtgagattctggcaccgaaaggctacaaacgtctgtccctgagaaatgttgagttgacggtaagcgataaagttgccctttatctctgccgaggttgtgagcagacaggacttatccatgggcgccctgaatcccgaatgaagaaaggcgatttcacttgtgagcttatggggttaatccataataataccccgggtcagggtgaacttatcctggacgacaaccagttgaagctcgatttagacctgccggaaggggatgttattcctcttttgccgaataaaatcggactggacttatggtttttgctttacgatttttatgaactggatggggatgaacgcgttgggattcgtgctgagctttcacgcccaatttcatacaatagcaagaatgtagttaatgacttctcaacccgtttaatccttgatgttcataaacctgacccgattgttcagaacggtgatgtaccgcagtttacaccggatatcgatctcgacattttaaaaacaggctaa

SEQ ID NO: 403125 - DNA, 717 bp, Salmonella enterica
atgaatattacacccgaggaaaaatcacttttcccccactctcaattgctacttcatcgagcagcagaggcattaacactacgcctgcagcagcaggatccccatcatctgggggttacccctcgcgagctgatcgacatgtttgctgcggggtcgatatccatctgttacgactggggtcatatggggcttattgttcccgatatttatgatgcccgtatgctcgatgcaaagcagttggatcacattaatcataccgatattccaaccatttacgcccgaaaatatggcagttctgaagcgccggcgacaatgaaaattccccacggttccccagatagcccgcatgacttcgatttgaacgacttcggctgggagaatatggtcgtaccacaggttgaaatggtgaaggcttaccgtttactggccccgacgcattcgcggcctctggaagagaataaacccgttcatggaattgcggaacatcatgcatcaaacagagagcagctctataaaatagccattggtgtgctagctgattaccccgaagagtgtcgggggacacgtaaagaattcagcccagcgaaatggagagacgccatactcaaacatgcaaaagagtatccgccactcatgatcatgggggtagataccattgaagaccatcttgctgcggcggttaacatcaaaacacgcgccaaccgacaaaaggggtga

SEQ ID NO: 403126 - DNA, 213 bp, Salmonella enterica
atgaaacagtctcttatccgcttacccgaagtttgccgcagaactggcaacggtaaatcctggacttacaagcaaatcaaagaaggccgcttccccaaaccagttaaaaccgggttccggtctgtggcatgggtagaaagcgaggttgatgcgtggatcgagcaacgcatcgcagaacgcaatactgactatgcgggtggcgcaaatgcttaa

SEQ ID NO: 403127 - DNA, 216 bp, Salmonella enterica
atgacctatagtaccacaccccaaaccggggcggcccaaactcaccctaaatatcagtatcgttttatggcgctcgatcgcgctaaccgccaggtgaaaccctgcaaaatcattgtcgaggccaccagcgagcatgaagcgcgcaaggtgcttgcccctcactacatcctgtcactgtctgccgttctgccagtccaggaggtgcgtcatgtttaa

SEQ ID NO: 403128 - DNA, 195 bp, Salmonella enterica
atgtttaacgtcattgtcacggtcacctatcacttttcgggagcagcacgccgatttgcacttccggagcgcttcactaatcgtgagcgcgcagaaaaagcggcgcagcaggtaaaccacaccagctacatggacgatggtgtgaccagaattgtgacccacgcggcggaagtagtggaggtgcgccatgtatga

SEQ ID NO: 403129 - DNA, 189 bp, Salmonella enterica
atgtatgacgcctacctgaacccaaaagacgcactccgtccgatagccgttgcactcgaggccgcacagtttatcgcgctcgatccggagaataccgatttagcccatgagctgatcgcctgggcacttgaaacagccgcacgcgcctcagctgcacaacgtaacactccggaggtggacaatgcttaa

SEQ ID NO: 403130 - DNA, 309 bp, Salmonella enterica
atgcttaatctcaatacctggaatcttttcacgctgccgctgaacggtggcgcagctgagacagcgccggacgatctgcgtctgctggccgctgtgggtgacgaggcgcgcaacgactatctgcgcggtgtaagcgctattggcaatctggtcttctgggcgtgcgataaccccaactacaccgaccataaagccgacctgccagcgctgggcgcgttcctgaaacataccgctgatatggcacgcgccgccgagttcatggcggggcatctggacgcactggccgacgacaaagaggggaacgaataa

SEQ ID NO: 403131 - DNA, 222 bp, Salmonella enterica
atgccacgcaaacatcgttcatcaggcaacctgatcaagctaatggagtgccagaagggtgtagggcgcgatgatatccagaccgcaagcagccgcccaacattaacgccgcatgagccggacggcacctacgccacgaaccggcatactcgccgtatgctgcgcaagctccacggtatagaagcaaaaagaatgtgtgacctgaaaggaggtcagaagtga

SEQ ID NO: 403132 - DNA, 2748 bp, Salmonella enterica
gtgagcggattcgatcacctgatggagcaggggcagaaacgcacccctgctcgttttactgcaaacagcttttctgacctatgcaacgctattctatcgcatcgtgtacaaatttccatcacatcggaaatgacggatgaagaacggcgcaaagaaaagcagaaattgtactggttctctgcaccaacgcagaaagccgggcagcgtcgtattgtggcgaatatggcggcatgtgccttcggctctctggacattgacgagagcactcccggcgcaataaaagctctcacaccagttttaacacgtcgttctgtgatggtttacacgacggcgagccataccgccgaagcgccgcgcctgcgtatcgtctgcgaactatccagaccgatagaaccggcagaacggggagccatcctcaccgccgtagaaacgatgctgatgcagagcgcaggttttacgttcgtgaacctggagggccaaaaatcacgttgggagaaaggcagcgattacgtggcattagatcgcagtgtgtacggccagcaaagttacctttattgccctcataaaggtgcaaaagtacagacctacgccggtgaagttattgacgttgatgcgctctccctgccagcaggggcgacaaagaccaagaagtccaccagtaaggatactgcagaaaaacagcctcagcaggatgcagaggtcgatgatatgtccactgccccggatgcctttgttattggtgatctgcgtagcgcccttagcttccctaaatggcagaatccgagcgacgactacgagacatggatcggtaatggtattcgcctggcatcgctgaaaggtacagaatacgaggatgaagcaaagacgttgtggttcgagtacagcgcacgttcaccagcgaacaatcccgaatttacagaggaaaaatgggagacattcaacgccgagcgttccagctatcggggaatttttgccgattcgcagaatatggggtgggtcaacgaggcgacgaaacgcgcggcaacccgaatgcagccgagagttgaagccagaaccgatggtctgtatcacgttacgccgcgggttaataagcagaccggtgaagttgaagaaccctccgtttggttatgctcgccggttgaagttattggtcgcggtaccgatggcggcgaagaatatctcgttctgtcctggctgtgtaacggtcaaaaggtaacggaagcgctacctctctgtgatattggagaacgagagggctggcgacgtatgaaagctggggggatgaatgtcacgtcaaaatccagtttacgggcagtgttgggcgaccacctgcagctgtgtggtgaacagacccgctggaacgtagcaaaaacgactggctggcagcatggtgcgtatattatgccggacggtgagatcattggtacagcttctaagccggtgatcttttgcggtcattccgctacagcgcagggctataccgtcaaaggctcgccggagagctggcgcgataacgtggcacgactggcggccggaaacccttcaatggtgaccgccattgccgcggcgttcgccgcgcctatgttatcgctggtgggcgctgacggtttcggcatccacttttatgagcaatccagcgccggcaagacgactacggccaacaccgctgccagtatctacggttcgccggataagactaaactgacctggtacggcaccgcgctgggtatggtgaacgaagccgcggctcataacgacgggtttatgtcgctggatgaaattagccagaacacccggcggcgcgatgtggccgagtcggcttatgcgttgtttaacggtgtagggaaattgcagggacgccgggagggtgggaaccgcgaaatcctgcggtataccaccgttgcactaagtaccggcgaaaccgatctggagagcttcattcgtgaagatggcggcaatgttaacgccgggcagctggtgcgcctgctgaatatcccgctgacccgagccaccagcttccacacactgcccgatggtaaggcacacgccgacgccctcaaatcggcctaccagagccactatggcgcggttgggcgtaagtgggtgtctatgctggcagataatccgaaagcggcacaggatgccgtagccgtagcaaaaacgcgctggaaatcattactgtctacgcaacatggagagcaggctggacgcgtggcagattgtttcgccattcttgaagcggcactggtgctttcacagtcacttacggggtgggatattgctgaatgccgggcggcggttgagcataatttcaggacgtgggttgcactgtacggggcaggtaaccgcgagtttgtccaggtcgtggaaatggtggaaaacttcctgctggtgaacgaaagccgttttgatgttattgcgggttcagaatcggaagagtttcccacactttcgactgacaaaatacgtcgtgcggggtggctggcacttaacggtgctcctgatggccgaaatgtctattacgtgctgccgggcgtattcaaagcagagactataccgggtaaagaacacgtgcaagctgccaagatcctgcatgaagaaggtgttttatggaagaaaaccaaggacagatacacctcactcacaccacgaattaacggtcaacagtactggacgtacgctttaatgctcgttccggtggtagagggtgaagaatccgaagcagcacccgagactgatttgatttaa

SEQ ID NO: 403133 - DNA, 1110 bp, Salmonella enterica
ttgtaccaacagggaggggataaacatggcgttaacagatatcaaggtcagaacagccaagccaacgataagcaatacaaactgaccgatggcagcggtatgcaccttcttgtccatccaaatggttctaagtactggcgtttgcagtaccgttatgacggcaagcaaaagatgttggcacttggggtttaccctgaaatcacactggcggatgccagagcacgtcgtgacgaagcgcgtaagctactagcgaatggcgtcgatccgggagacaaaaagaaaaatgataaggttgaacagagtaaagcacggaccttcaaagaggtggcgatcgagtggcatggcaccaaccaaaagtggtctgaagatcacgcccatcgtgtgctaaaaagcctggaagataatctctttgcagcgcttggtgaacgtaatatcgctgagttaaaaacttgcgatttattagcgcccattaaagccgtagagatgtctggacgtcttgaggttgctgcccgtcatcaacagcgcactacggccattatgcgttatgcggtacaaagcgggttaattgattatgacccggcacaagagatggcaggagcggttgcttctggcaatcgacagcaccgtccggcgctggcgttaaaacgcatccctgaattgctccagaaaatagacagctataccggcaggccgctaacccgctgggcaacggaactcactctgcttatctttattcgatccagtgagctgcgttttgctcgctggtcagagattgattttgacacgtcgatgtggacgattccaccagagagagaacctatccctgacgttaagcattctcaccggggatcaaagatgcatacaccgcatttggtgccgctttctaagcaagcactggcgatcctgaagcagataaaacaattctgtggcaagcatgaactgatttttattggcgatcacgatccgcgtaagccgatgagtgaaaacacggtgaacagtgcgctacgggtgatggggtatgacaccaaggttgaggtttgtggtcacggcttccgcacgatggcctgtagctcattgattgagtcaaggttatgtcaaaggatgcggtag

SEQ ID NO: 403134 - DNA, 195 bp, Salmonella enterica
atgtcaaaggatgcggtagaacgacagatgagccatatggaacgtaactcagtgcgggcagcgtatatccataaggcggagtttatcgacgaacgcaaactgatgctgcaatggtgggcggatttcctggatgcgaacctcttttatatgtctcggaaagaaaggtcggtattccgaaaaaagaaagaggcttaa

SEQ ID NO: 403135 - DNA, 855 bp, Salmonella enterica
atgggaagtggatggcatgaatggccgctggtcctgtttacggtgctgggtcaatgtgtggccggggcgctgatcgtgagtggatatggctggttaaccaccaaagacgatgtggcaaaacaacgcatcgtgcgcagcatgttttttctgtggctggtgatgggcatcgcctttctcgcctcagtaatgcatttaggttcaccgctacgggcgtttaactcactgaacagaatcggcgcatcggcgctcagtaacgaaatcgccgcaggatcggtgttctttgccgtaggcggcatctggtggctggtggcgtttctcggcaaaatgccggctacgttaggtaaaatctggctgctgctcagcatgttgtctggtctgttttttgttctggcgatgactaacgtctaccagatagacaccgttccgacctggtataatggctatactactctggcgtttttcatgacgatgttgctgagtggcccgatgtttgccgccctgctgctacgcgctgcgagcgtgtcgtttaacgccgccagattcgccggcatcagcatactcgccctgctggtgacggtggccgttatcgttttgcagggcgtatcactcagcgaaattcacagctcggtacaaaacgccagcgctctggttcccgactacgcaagcttacaggtctggcgcatcataatgctggctgtggggctgggttgttggatatgcccgctaatccgtcgcaaagaaccggctgtcggcggattggcgctgggtttaattttcgtgcttgccggtgaagttattggccgcggtttgttttatggcttacatatgacagtcggaatggctgtcgcaggttaa

SEQ ID NO: 403136 - DNA, 615 bp, Salmonella enterica
atgacccatttttcacaacgtgacaatttctctactgcagcgcgtgtgctgggcgcgctgttctactatgcaccggacagtgcggaagcttctgcgctagtcagtgcgctaaaaactgatggctggcaggcgcaatggccgcttgacccaacgacgctttctgcgctggcggtacaactgcagaccgaggctgatgagccgctcccgcaagcctggcagcgactgtttatcggcccttatgcgctaccttctccaccctggggctccgtctggctggatcgtgaaaatgtcttgtttggcgattccacgctggcattacgtcagtggatgcgggacaacgggattcagtttgccatgcagcaaaatgaaccggaagatcactttggcgcactgctgttactgacggcctggcttgctgagaacggacgccacaccgagtgcgaacagttgttagcctggcatctgctaccgtggtcaacgcgtttccttgatgtgtttattgataatgcggatcacccgttttatcaggcgctgggtgagctgacgcgtctaaccctggtccagtgggctaaacaattactcattccagtggcagaaaaaccactttttcgataa

SEQ ID NO: 403137 - DNA, 918 bp, Salmonella enterica
atgcgcgcacttaatagactgaaatggcttcatgcattcgaagctgcggcccgctatggtagttttgcgggtgcggcaaaagaacttggcgtaacaccagccgccgtcggacaactggtaaaatcactggaaaattgggtcggacatccattatttctacgcagtcgttcgggtaatgaacgattaacactgattaatgaagctgaggaggcattacactatattactcacggactggataatttagagacggggttaaacaagttacgacatcaatgtgaacatccggttatagcattaacagcatctcaggtattattaatgcactggttaatggagcgaattaatgtattttcagacattcatcctaatatagaatttcgcctaaatgttaccgagagattaatgaatgttgcccacggcgaggctgatttagggattcgctgcggtcctggcgactggccgggcgtgcaaaaagactggttaatggatgaagaagccgttctggtatgcagcccttatattatgccacaagatgaaaaagttagtggtgaatggttggcattacaaaaactcatccacgatgatactcctcatccgggcgccagttttccaacatgggatgaggtactgctgtctacattcggcgatgcctatgcgactaagcggacactgcatatcaattcgacgtcagccgttatcctcgcggctctaaatggacagggtattgctatcgtacggaaagtattagtgcagcgtttaataacgactcgacaactagtacaactttacccagagaagcgctggccgctggaatgggcttattatattgttgcgccagaaaataacgcaatgcgtcctgaagtaaaattattccatgactggataattaatcagacaaacaaaataaacaattaa

SEQ ID NO: 403138 - DNA, 2430 bp, Salmonella enterica
atggattgtactaaatatgaacgcctaaaccaattacctgtcacgcgtcgaaaattacttcagactggcggtttaatggcagcggtgagcagtatctcgctgccctttagcttcaatagcattgccggagagaaactgccttccccagaagaaaagctcgtctggagcgcctgtacggttaactgcggcagtcgttgtccgttgcatatgcatgttgttgatggagaaattaaatacgttgaaaccgataatacggggaatgatgattacgacgagctgcatcaggtgcgcgcctgtttgcgtggtcgttccatgcgacggcgggtctataatccggatcgtctgaaatatcctatgaaacgcgttggcaagcgcggcgaaggcaaatttgagcgaatcagttgggaagaagcgtacagtacaatcgccagcaatttgcaacggttaatcaaagagtatggcaacgattcaatttatcttaactacggcaccggaaccggcggcgggactatcaccgccccgtggccctcaggtcgcagtttcgtcggcagactcatgaacctgtgcggcggtttccttgacttctacggtgactattccaccgcccaaatcaccgcaggattaaattacacctatggtggatggggcagcggaaacagcccttcggatattgaaaacagtaaactggtggtactatttggcaataaccccggtgaaacccgcatgagcggcggcggcgtaacctatattcttgaacaagccagagcgaaatcagataccaaattaatcatcatcgatccgcgttataccgataccggaagtggccgcgaagatgaatggattcccattcgtccgggtaccgatgctgctctcgtctcagcgctggcatgggtgatgattatcgaagatctggttgaccatcaatttcttgatagctgctgcattggctttgatgaaaaaacacttcccgccagtgcccccgccaacggacattataaagcatatattctgggcaacgggcaggatggcatcgctaaaacccccgactgggcagcgcaaattaccggtattccagccgatcgtattatcaaactggcacgagaaatcgctagcgtaaaaccagcgtttatctgccagggctgggggccacagcgacgatctaatggtgaaataaccagtcgagcgattgctatgctggcgatccttaccggcaacgtggggatacatggcggtaactctggcgctcgggagggttactacaacatgccatttggttatattcccatgctggaaaacccggtcaaagccagtatttctatgtttacctgggttgatgctatagagcgcggagccgaaatgaccgctctgcgagatggcgtacgcgggcaggataaactcaatacaccgatcaaaatggtctggaactacgccagtaactgccttattaatcagcattcggatatcaaccgtactcacacggtgctacaggatgaaaaaaaatgcgagctgattgtggtgattgattgccatatgacttcttctgccaaatatgccgatatcatcctgcccgactgtacgacgagcgaacagatggatttcacacaggacggttcctgcggcaacatgggatatattattttcgccgatcaagtcattaagccacgctttgaatgtaaaacgctctatgaaatgatgaccggtctggcaaaacatatgggggtggaaaaggcatttactgaagggcgtagccagcttgactggatgcattatttatatgataacgctcgtaaaaaaattcctggtctccccgactttgacaccatgcgccgccagggcatctacaaacaacgtgatcccgagggacatcaggttgcatataaagctttccgtgaagatccgcaggccaacccgctcaacacaccatcgggcaaaattgaaatctactcatcggcgttagccgaaatagccgcaacctgggaactggcagaaggcgatgttatcgatccgttacctatctacacgcccggaattgaacactttactgacccattaattaaacaatacccattgcagcttaccggcttccactataagtctcgtgctcattccacttatggcaatgtcgacgtcctgaaagccgcttgccgtcaggaggtctggatcaatccgcttgacgcacaagagcgcggtatagccaatggcgataaagtccgtattttcaatggacgcggcgaagtccatattgaagcaaaggtaaccccgcgcattatgccaggcgttacagcactgggggaaggcgcatggtatgacccggacggaaaacgtattgatcaaggcggctgtattaacgttctgaccagtcaacgcccatcaccgctggcaaaaggcaacccatcgcacaccaatctcgtacagattgaaaaagtttaa

SEQ ID NO: 403139 - DNA, 618 bp, Salmonella enterica
atgacaacccagtatggattttttattgattccagtcgttgcaccggttgcaaaacctgcgaactggcctgcaaggactacaaagatctcactcccgacgtcagtttccggcggatatatgaatacgcgggcggcgactggcaggaagataacggcgtctggcaccagaacgtctttgcctactatctctccatctcctgtaaccactgcgaagacccggcctgtaccaaagtctgcccgagcggcgcgatgcacaagcgcgatgacggttttgtagtggtggatgaagaggtctgtatcggctgccgctactgccacatggcctgcccgtacggcgcgccgcagtacaacgcggccaaaggtcatatgaccaagtgcgacggctgtcacgatcgcgtcgccgacggcaagaaaccgatttgcgtggaatcctgcccgctgcgggcgctggattttggcccgatagacgaactgcgtaaaaaacacggtgagctggctgccgtcgcgccgttgccgcgcgcgcatttcacgaagccgaatattgtgattaaacccaacgccaacagccgcccgaccggggacactaccggttatctggccaatccgaaggaggtataa

SEQ ID NO: 403140 - DNA, 201 bp, Salmonella enterica
atgttcctcggcatggggttcgtgctggcgtttctgttcctgctgattttcgccatccgcggcatgtccgccgtgattactcgcttcttcccggagcccgtcgccgcgcccgcaccgcgcgccgttcccgtcgtggacgactttgcccgcctcaagccggtgattgccgccgctatccaccatcaccgccttaacgcttaa

SEQ ID NO: 403141 - DNA, 555 bp, Salmonella enterica
atgcttgtctatattttaagattaaaactaaatcttatcatatcattattgagtaaagttaggcggaaattaaaagcgaagtttcttgttctgcttagcggatatgattttaaaatggttgggaagaattttaaattgaatgtcaaaccttactctgcaaaaaataacacctcttccaaatggggtagtatgcgggttggtgataactgctggattgaagctgtatataattatggtgatgaaaaatttgaaccttatttgtacataggtgatcgtatatgtttaagtgataatgttcatataggcgatcatagccatggcagttataaagtatgcagtccgaaaatagaaccgccagcaaataagccattaggtgatattgctcctattaaaataggtaattgctgctggattggagataatgcagtaattctggctggtagtgaaatttgtgatggctgtgtaatcgcagccaattcagtcgtcaaggatttaaaagtcgataagccatgtttaattggtggggttcctgctaaagtaataaaggtattttaa

SEQ ID NO: 403142 - DNA, 219 bp, Salmonella enterica
atggcgtttcccgccagagtgatgcccttctcctgcgcctggcgcctgacgtccgcttccagttcagccagttccggtttgagtaaatccgccggacggcaggtcaccggggcgcccccttccagcacgcgggcctgtagcgcggcgttgaccggcaccggagtgtggccgtattcgcccttcagtatcccggcggtttccttcgcgatggttttgtag

SEQ ID NO: 403143 - DNA, 219 bp, Salmonella enterica; identical to SEQ ID NO: 403142

SEQ ID NO: 403144 - DNA, 171 bp, Salmonella enterica
atgcagcagcgcatcatcccgtttacgttgcgtgtaatgcaggtaacgcagtgcaccatgctgataggggcgcagggcatctttcaggttttcctgaatatagtccggcgtctgatagttatcgtggaacagtcctggttcatcgaactgcttcagcctgttaaacagtag

SEQ ID NO: 403145 - DNA, 1851 bp, Salmonella enterica
gtgaccccgcctgacgatagcggcgatgacgatgtaaccccgcccgacgatagcggcgatgacgatgtgaccccgcccgatgatagcggcgatgacgatgtaaccccgcccgatgatagcggcgatgacgacgacacgcccccagatgactctgttattaccttcagcaacggcgtcaccatcgataaaggcaaagacaccctgaccttcgacagcttcaaactggataacggcagcgttcttgagggtgccgtgtggaattattcagaacaggacaaccagtggcagctcaccaccgcggacggtaaaacgctgaacgtcaccggctgggacgtgaccgacgccaatgccgccgtgattgaaggcacccaggaaaacggtctctactggaagtacgacagccggggctatctgattattgccgacgataacaccaccgttatcagcggcgatgaccaggcgcataattccgatcgcggcatggatatcagcggccaggatcgcaccggcgtgattatttccggcgatagaaccgtcaacacgctcaccggggactccagtgtgaccgacggtgccaccggcatggttatctccggtgacggcaccaccaacaccatttcgggccactccacggtggacaacgccaccggcgcgctgatttccggcaacggcaccaccaccaatttcgccggtgacattgccgtgagcggcggcggcaccgccatcatcatcgacggcgacaacgccacgattaagaataccggtacctctgacatcagcggcgcaggctccaccggcaccgtcattgacggcaataacgcccgcgtcaacaatgacggtgatatgaccatcaccgacggcggcaccggcggccacattaccggcgacaacgtggttatcgataacgccgggagcactaccgtcagcggcgcagacgccacggcgctgtatatcgaaggcgacaacgcgctcgttatcaacgaaggtaatcaaactatctctggcggcgccgtcggtacgcgcattgacggcgacgacgcccataccaccaataccggtgatatcgcggtggatggcgcgggctctgccgccgtgattatcaacggcgacaacggcagcctgacccaggcgggcgatctgctggtcaccgacggcgcgatgggcatcatcacctatggcaccggaaatgaagcaaaaaataccggcaacgccaccgtacgtgatgcggactcggtgggttttgtggttgcaggcgaaaaaaacaccttcaaaaacaaaggggatattgacgtcagccttaacggcaccggcgcgctggtgagcggcgatatgtcgcaggttacgctggatggcaatattaacgttgtctcagtccaggacagcgaaggcgtgtttagctcagcgacaggggtgagcgtgagcggcgacagcaacgccgttgatatcaccggcaacgtaaatatcagcgccgactacgggcaggatgatctggctgccggggctcccccgttaaccggcgttgtcgtcggcggtaacggcaataccgttacccttaatggcgcgctgaatattgatgacaacgatctgtccgccaccggcggacaatacctggacgttgttggcctgagcgtaacaggtgatgataacgacgttgagattgacggcggtattaatatcacccacagcgaggatccacttgatggaacctctgcagacattaccggcatcagcgtcagcggtaacagtaccgttacgctaaacggtcattctaccattgataccaacacggtagtggggggggcacgttgtactggcgcgggtcaacaacggcggctccctgattctgggtga

SEQ ID NO: 403146 - DNA, 3342 bp, Salmonella enterica
atggctgatggcgaaggcacatcaattgaaaataaaggcgatattacaagccatggcgtgtattccgtcattcgcgcagataacggctcggaagtcagcaacagcggagatattctggtctacgcgaccagtagcaacagtagtgaggatcgtgcagccatcacaagggctagtggcgagggatcggctgttcataacaaagccggcggcgatatcaccctcatttctgatcagacgccgcagggcagtggcggtattgaagtatacccattgaaatggtacacccacaccttttacgccatgatggcttcggattatggcgatgtcgttaacgatgagggcgccacgatccatttgcagggggcaggtgtatatggcgttaccgccagccgaggtaaagcactaaacgaaggcaatatctatctggatggccttgtcccgacgctggacgatgaaaataacatcaccagcaccagctactggcagccatcatcgctctatctcaccagctcaggaatggtggcgggttccaccgatgccgatggcgacgccaccgccatcaacaccggcaacattaccgtcaacaacgccgggttcggcatgatggcgcttaatggcggcaccgccattaaccagggcgtgatcaccctgaccgccgatgacggcgtgaccggtcaggcagacgagctggtcgggatggcggcgctcaacggcggcgtcgtcatcaacgacaccagcggcgtgattaacatcgacgccgattacggccaggcgtttctgagcgacagttccagctacatcatcaataacggctctatcaaccttaacggcagcccgatggatgatactgattcacacatgggcggcacgccaacggacaaaatctggattcagtctctgcccggcagcggcgacagcgacaccaggacctccgacacaggtttcttcaccgccggtacgctggccaactacggtactgaaaccctgaacggcgatgtggacgttaacgggggctggctgtacaacgaagcgggcgcctcgctcaccgtcaacggcaccgtgacgattaacggcggggctaacgcgctggctaactacgggacgctggacgcggacgctatttccacctggcacagcctctttaatgaagcggacggcagcatcaccaccgatctgttaacccttaatggcgacgtcactttttacaataacggcgatttcaccggctccatagcgggcaccagctaccagcaggaaatcgtcaatactggcgatatgacggtggcggaagatggcaaatcgctggtcagcggcagcttctatttctataacgaagaggacgctacgcttaccaacagcggcagcgcggtggaaggcggcgagaacaccatcatcaatctgacgcgcgccaacgattcgctgacccaggtgaacagcggcaccatcaccgccactaacggttacagcgccatcaccacggtcaacggcagcaatgaccccaaatggatctggaacaccgcaaccggcgtgattaacggtattaacccggatgcgccgctaatcaatttgggccgcggctataacttcggcaaccagggcactatcaacgtgcagggcgataacgccgtggcgattagcggcggcaccagcagttatgtcattaacctggtcaatagcggcaccatcaacgtcggtaccgagcagggcaaggaggacggcaccaacggcaccgggcttatcggcatcaagggcaacggtaatgccaccaccataaacaacaccgcagacggcgtgatcaacgtttacgcggatgactcgtatgcgtttggcggcaagaccaaagccatcatcaacaacggcgaaatcaacctgctgtgcgacagcggctgcgacatctacgcgccgggtactacgggcacgcagaacgaccataacgggacagcggacatcgtcatcccggatgcgactaccgccccgaccgagggcagcatcccgacgccgccagcggatcccaacgcgccgcagcagctctccaactatattgttggcaccaacgccgacggtagctccggtacgctgaaagccaataacctggtgattggcgacaacgtgaaggtggataccggctttaccagcggtacggcggataccaccgtggtggtggataacgccttcaccggcagcaatatccagggcgcggacaacatcacttccaccagcgtggtgtggaacgcccagggtagccaggatgccgacggcaacgttgacgtcaccatgaccaaaaacgcctatgccgatgtggcgaccgacagctcggtaagcgacgtggcgcaggcgctggacgccggttacaccaacaacgagctgtacaccagccttaatgtggggactaccgccgagctgaacagcgcactcaagcaggtgagcggtgctcaagccaccacggtattccgtgaagcgcgtgtactcagcaaccgctttaccatgctggccgacgccgcgccgcaaattaaagatggtctggcgttcaacgtggtggcgaaaggcgacccacgtgcggagctgggcaacgacacccagtacgacatgctggcattacgccagacgttggatctcaccgccagccagaatctgacgctggagtacggtattgcgcgtctggatggcgacggttcgaaaactgcgggcgataacggcctgacaggcggctacagccagttctttggcctgaagcacagcatggcgtttgatgaaggtctggcgtggaacaacagcctacgctatgacgtgcataacctcgacagcagccgttctgttgcctatggcgatgtcaacaaaattgccgattccgacatgcgtcagcagtaccttgagtttcgcagtgaaggggcgaaaactttcaccatgatgggcgatgcgctgaaagtcacgccgtatgccggggtgaaattccgtcacaccatggaagatggctacaaagagcgcagcgccggagattttaacctgtcgatgaactctggcaacgaaacggcggtagactctattgtcggcctgaagctggattacgccgggaaagacggctggagcgccaccgctaccctggaaggtggcccgaacctgagctacagcaagagccagcgtacagcgtcattacagggtgcggcgggtcaatcgttcggcgtggatgacggtcaaaaaggcggcggcgttaatggtctggcaaccatcggcgtgaaatacagcagcaatgataccgcgctacatctggatgcctaccagtggaaggaagacggtatcagcgataaaggctttatgcttaacgttaagaaaacatttcgttaa

SEQ ID NO: 403147 - DNA, 144 bp, Salmonella enterica
atgctcgagtaccgcaaagcgatgcgtgcaatagcgaacggtttcgatactggcgaatggcctgcaccgattaccgaagactacaccgaagaactcaatgattttgatgtgcgtcgccttgaagcgctgcgcgtacaggcataa

SEQ ID NO: 403148 - DNA, 144 bp, Salmonella enterica
atgctggaataccgcaaaacaatgcgagagatagcaaacggcttcgacactggtgaatggtcagcgcctatcacagaagactacaccgacgaactgaacgattttgatgtgcgccgccttgaagcgttgcgcgtacaggcataa

SEQ ID NO: 403149 - DNA, 861 bp, Salmonella enterica; identical to SEQ ID NO: 25304

SEQ ID NO: 403150 - DNA, 144 bp, Salmonella enterica
atgattttattgaatttatttgttcgcgacaccgttgtgcctgaaaaagcagctgacgagctatttcataaaaatagccatttagaagtctggatgtctgaattagagcagaaaaatctaatccgcaataaaattaaggattaa

SEQ ID NO: 403151 - DNA, 318 bp, Salmonella enterica
  misc_feature (290)..(299): n is a, c, g, or t
atgaaccacactgagatccgcgtcgttaccggcccggcgaattatttttcccatgcaggaagcctcgaaagactgaccgactttttcacgccggaacagctttcccacgccgtttgggtgtacggcgaacgcgcgattgccgccgcccggccttacctgccggaagcgtttgaacgtgctggcgcaaagcatctgccgtttaccggccattgtagcgaacgccatgttgcccaactggcgcacgcctgcaacgacgatcgtcaggtggtgataggcgtcggcggcggcgnnnnnnnnnnaaacgcttccggcaggtaa

SEQ ID NO: 403152 - DNA, 975 bp, Salmonella enterica
atggctaacctttacgaccttaaaaaatttgatcttaacctgttggttatatttgaatgtatctatcaacatttaagcattagcaaagcagcagaaacactctatattacaccttctgccgtaagccagtcattgcaacgcctgcgcacgcaattcaacgaccctctatttattcgttcaggcaaaggaattacgcctaccgtaacaggcattaatttacattatcatttagaaaataatcttaacagcctggaacaaactattaatataatgaatcagtccagcctgaagaaaaaatttattatctacagcccacagctgttgatcacccaatatgtgatgaaattagttaaatatatccgcaaagatccacaggttgaaattgaacatcacgacattttgaccactgacgaactgcctgaagatctgcttgcctaccgcaaagcagatattgtggtttcaatggccccactgaataatcgttctattgtttgtactcactttaataggctagaatgcatcctggtttgcagtgaaaaccatccccgactaggcgacaccgccactatcgacgaaattctacaagagtcatttacgcaactcgtctcccgggcaaccggtatgaaagaatatcattcacttatggatgatgtgctgggggaaagaataattggtttcagaagcaaatcgctgatgaccatcgccaactctatcagctccacggagcttattggttttttaccacaaacattttttgactattactcttcctctatcaaacttaaaaaagtcaccataccttttaccattgctcccatacaattctatcttatgtataatagggcttcgctgaataatagcggatttgctgagctcattgagcacatcacaaaaaaactttacaaatataataaagcattgcaagttcatctaatctgcttatcctttatgttaattatttcgaatatactgtag

SEQ ID NO: 403153 - DNA, 978 bp, Salmonella enterica
atgacacgctggaacaataaacaactgccggtaataaactcgatatcatatgacgagactaacaagcagctggatgtactggcgtcacttgaaggcgatggtaactggttcgactcggtctcattgagggaattttatctttccgataagaacaccggtacccggatgtcaccaacaggcgtaatcaaatctcgtatctcaggtaactacacgattgcttatgatttatcccgtcagtctgaaggaaaatacaacgttgaggtcaacatcagggacttcttccagaaccagaccaataaaactttcggagaaattgctctggataacactcctccgacagtggccataacattcgacggaaagccggtaaaagacgatacggtagtgtacggcctggagaacctcaggatcgctctggcagataatctgacaaccccgaggataacccgtcttcagctcgtaggtggccccacagctgataacgttgagcttacgtggtcaccggcaggcaaagatacatacatgcctgagtatccgaggctgttcccaaatttcgaaccatctgaaaattattcaattagcgtaacagttgccgatagtcagtcgaataccaaaacctatactcagaagttcagttatctaccgaataaccttgtgcagttacataatctacgcacattgtcggtcagttcacctctcaaaacgacagatggcgtaccacttgcgtacctgtccactaacgttctgcgtaagacaaatggagaaattgctaaaggggtccagaacgcaacgctgactgtgcggaaggatgcagccttcggtattaaatttaatggggcacaggcggctccaggcgagtcagttgaggtgcaaatagatatgggccagggggataatcttctgttacccgtttatccttccgaaaatgggaaagttggcacctcagaattcatgattcagatcgacgagttgaagtaa

SEQ ID NO: 403154 - DNA, 204 bp, Salmonella enterica
atgttcattcgcgccggtaaacgccccctgccgatgaccaaacagatgcgaggagagcagttccgggttatgggcgtattccgcgcagttaaagtagaccagcggcgggatagcgccgctcgcctgttcacaggcgaaacggtgcatcagttccgcaaaaaaggttttaccgacgccggacggcccggtaagcagaacgtgtaa

SEQ ID NO: 403155 - DNA, 231 bp, Salmonella enterica; identical to SEQ ID NO: 376365

SEQ ID NO: 403156 - DNA, 615 bp, Salmonella enterica
atgattagccggagccgctgcgctcgccttgtcatacgccgcctttaccgcgctcggcgtcgccgcctccgtcgtactggtgctgtcggtggcgttattaagcttcacgatccctttttgcgtcagcgtaccgtccggggcgccggtgatctgcccccaagcgtgtgtatgcctagccggagccgccgcactcgccttatccatcgccgccttgaccgcactgggcgttgccgcttcggtggtgctggtgctatcggtggcgttattaagcttcacaatccctttttgcgccagcgtgccgtccgggacgccggtaacctggttccagacgtgagtatggttcgccggagctgccgcattcgccttatccatcgccgcctttaccgcgctcggcgttgccgcttccgttgtgctggtgctgtccgtcgcactgttaagcttaacaatccccttttgcgtcagcgtaccgtccggaacgccggtaatctggttccaggtatgcgtgtgattacgcgcttccgccatcgccgcttttaccgcctttggcgtagccgctttggtttcgtcatcgctgtcggtggcgttactgagctgcgtaaagcctttctgcgttaa

SEQ ID NO: 403157 - DNA, 774 bp, Salmonella enterica; identical to SEQ ID NO: 376092

SEQ ID NO: 403158 - DNA, 714 bp, Salmonella enterica; identical to SEQ ID NO: 376076

SEQ ID NO: 403159 - DNA, 951 bp, Salmonella enterica
atggcaaactggccaaacccgtttattgaacaacgtgccgatccgtttattttacgcgacggcagcgattactactttattgcctccgtaccggaatatgacaggctggaaatccgccgggctaattcgctggaagggttgcgcgccgccgaccccgttgtcgtctggcgtaaaccggaaagcggcccgatgagccagctcatctgggcaccggaaatgcaccgcatcaacggcaagtggtacatctattttgccgctacccatactcaagcgcttgataagctgggaatgttccagcatcgcatgtttgccctggagtgcgccgatgccgacccactcaccggcaagtggacggagaaaggtcaaattaaaacaccgtttgataccttcgccctcgatgccaccactttttatcatcagggaaagcagtggtatctgtgggcgcaaaaagcgccggatattgccggtaactcaaatatttatctggctgaactggaaaatccgtggacgattaaaggcgagccggtaagactcagtaagccagagtacgactgggagtgtcggggtttttgggttaacgaaggtccggccgtcgtggtgcatggcgacaagctgtttatcagctattcggccagcgccaccgatgaaaactactgtatgggattactgtggattaacgtaaacgacgatccgcgcgatccggccaactggcataaatcaccgcgcccggtctttaccaccagctatgagaatcgccagtatggaccgggacacaacagctttacgcaaacgccggaaggtgaaaatgtactggtgtaccacgcgagaaattacaccgaaattgaaggcgatccgttgtacgatcccaaccgccatacgcgtctgaaacgggtgcgctgggacgaaaacgggatgcctgattttggcgtgccgccagccgatacgatctaa

SEQ ID NO: 403160 - DNA, 1407 bp, Salmonella enterica
atggataagggcagactttcggtaagagagaaaatcgggtatggcatgggtgacgccggatgtaacattatttttggcgctatcatgctgtttgttaattacttttatacggatatttttggtcttgccccggcgttagtcggtgttttactcctttcagtacgcgttatcgatgccgttaccgatccggtgatgggcgcgcttgccgatcgtacccaaagtaaatatggtcgtttccgcccctggctactgtggattgcatttccctacgcgctgttcagcgttctgatgttcacgacgccggactggggctataacagcaaagttgtctatgctttcgtcacctattttctgctttccgtgacctacaccgccatcaatattccctattgctcactgggcggcgtgatcactaacgatccaaaagagcgcgtggcctgtcaggcttatcgcttcgtattagtcggcatcgcgacgctgttgctatcgttaacgctattgccgatggtggactggtttggcggcggcgacaaagccaaaggctatcagttggcgatgaccgtgctggcgattatcggcatgggtatgtttctgttctgctttgccagcgtccgcgaacgcgtccgccctgccgttccgacgcacgatgatatgaagaatgatttcaaagatgtgtggaaaaacgatcaatgggtacgcattctgctattgaccttatgtaacgtctgcccggggtttatccgtatggcggcgaccatgtattacgtcacctgggtgatgggacaaagcacccatttcgctacgctttttattagtcttggcgtggtcggtatgatgatcggcagtatgctggcaaaagtcttaaccgatcgctggtgtaaattgaaggtatttttctggaccaatattgcgctggcgattttctcctgcgcgttctatttctttgatccgaaagccaccgtgatgatagtggcgctctacttcctgctcaatattctgcatcagatcccttccccgctgcactggtcgctgatggcggacgtcgatgattacggcgaatggaaaaccggcaaacgcattaccggtatcagcttctccggtaacctgttcttcctgaaactgggcctggcgattgccggggcgatggtcggctttttgctctcctggtacggttatgacgccagcgccaaagcgcaaagcgcctcggcgatgaacggtattatgctgttgtttaccgttatccccggcgttggctatctgattaccgcaggcgtggtacgtctgctgaaagttgaccgtgaactgatgaaaaaaatccaggacgatttggaaaaacgtcgcactaattaccgcgaattgagtgagttgcaggagctcaacgccgctgaaagcgtaaggaaagcctga

SEQ ID NO: 403161 - DNA, 1371 bp, Salmonella enterica
atggacagtcagcagcacggcgagcagctcaagcgcggcctgaaaaaccgccatattcagcttatcgcattgggcggcgcgatagggacaggcttgttcctgggaagcgcctccgttattcagtcggcggggccaggaattatcctgggctatgcgattgcaggctttattgcctttctgattatgcgccagctgggggagatggtggttgaagaaccggtcgccggctcttttagccacttcgcctataaatactggggcggctttgccggattcgcttccggctggaactactgggtgctgtacgtattagttgccatggcggaactgaccgcagtgggtaaatatatccagttctggtatccggagatccccacctgggcttctgcggcagccttctttgtgattatcaacgccatcaacctgaccaacgttaaagtgttcggtgagatggagttttggttcgccattattaaagtgatcgccgtcatcgctatgattctgttcggcgcgtggttactcttcagcgataccgctggtccgcaggccaccgtgcgcaacctgtgggaacagggcggctttctgccgcatggctggaccgggctggtgatgatgatggccattattatgttttcgttcggcggactggagctggtagggatcaccgccgctgaagccgataacccggaacagagcatccccaaagccactaatcaggttatctatcgcatcctgattttttatatcggctcgctggcggttctgctttcgctgctgccatggactcgcgtcaccgccgataccagcccatttgtccttatcttccatgagctgggcgatacgtttgtcgccaatgcgctgaatatcgtggttctcaccgccgcgctatcggtttataacagctgcgtttactgcaacagccgtatgctgttcggtctggcccagcagggaaatgcgccgaaagcgctgctgaacgtcgacaaacgcggcgtgccggtgagctccattttggtttccgccgtcgtgactgcgttgtgcgtgctgctcaactacctggccccagagtccgcattcggactgctgatggcgctggtggtctccgcgctggtcattaactgggcgatgattagccttgcccatatgatgttccgtcgcgcgaaacagcagcagggcgtgaaaacccgcttcccggccctgttttatccgttcggcaatgttctctgcctgctgtttatggcggcggtattgatcattatgctgatgacgccaggtatggcgatctccgtgtggctgattccggtatggctgctcatcctgggcgtcggctacctgtgtaaagaaaaaacggcaaaaacggtgaaagcccactga

SEQ ID NO: 403162 - DNA, 765 bp, Salmonella enterica
atggcctacagcaaaatccgccaaccaaaactctccgatgtgatcgagcagcagctggagtttttaatccttgagggaacattgcgtcccggagaaaaactcccaccggaacgtgaactggcaaaacagttcgacgtctcccgtccctccttgcgcgaggcgattcaacgtctcgaagcgaagggattgttgcttcgtcgtcagggcggcggaaccttcgtgcagagcagcctgtggcagagctttagcgacccgctggtggaactgctctccgatcaccctgaatcccagtttgacctgctcgaaacgcgccatgcgctggaaggcattgcggcttattacgcggcgctgcgcagcaccgacgaagataaagaccgtattcgcgagctgcaccatgctattgagctggcgcaagagtccggcgatctggatgccgagtccgaagccgtgctccagtatcaaatcgccgtcaccgaagcggcgcacaacgtggtattgcttcatctgctaaggtgtatggagccgatgctggcgcaaaacgtgcggcagaacttcgaattgctgtatgcgcgtcgggagatgctgccgctggtgagtacgcatcgcacccgtatatttgaagccattatggccggaaaaccagaagaagcgcgtgaagcgtcacaccgacatctggcgtttatcgaagagattatgctggacagaagccgtgaggagagccgtcgtgaacgcgctttacgccgcctggaacagcgcaagaattag

SEQ ID NO: 403163 - DNA, 2664 bp, Salmonella enterica
atgtcagaacgtttccaaaatgacgtggatccgatcgaaactcgcgactggctacaggcgatcgaatcggtcatccgtgaagaaggtgttgagcgcgctcagtatctgattgaccaactgctttctgaagctcgtaaaggcggcgtgaaagtcgcggcaggcgcaggggccagtaattacatcaacactattgccgttgaagacgaaccggaatacccgggtaatctggagctggaacgtcgcattcgttctgcgatccgctggaacgccatcatgaccgtgctgcgcgcgtctaaaaaagaccttgagttgggcggccacatggcgtccttccagtcttccgccacgatctatgatgtctgttttaaccatttcttccgtgcgcgcaacgaacaggatggcggcgacctggtgtacttccagggccacatctctccgggcatctacgctcgcgcgttcctggaaggtcgtctgacccaggaacagatggataacttccgtcaggaagttcacggcaatggcctctcttcctatccgcacccgaaactgatgccggaattctggcagttcccgaccgtctctatgggtctgggcccaatcggtgctatctaccaggcgaaattcctgaaatatctggaacaccgcggcctgaaagatacctctaaacaaaccgtttacgccttcctcggcgacggcgagatggatgagccggaatccaaaggcgcgatcaccatcgccacccgtgaaaaactggacaacctggtctttgttatcaactgtaacctgcagcgtcttgacggcccggtcaccggtaacggcaagattgttaacgaactggaaggcatctttgcaggtgctggctggaacgttatcaaagtcatgtggggcggtcgttgggatgaactgctgcgtaaagacaccagcggtaagcttatccagctgatgaacgaaaccgttgacggcgactaccagaccttcaaatccaaagacggcgcttacgtgcgtgagcacttcttcggtaaatacccggaaaccgcagccctggtggccgactggaccgatgagcagatttgggcgctgaaccgcggtggtcacgatccgaagaaagtctatgctgcactgaaaaaagcgcaggaaaccaaaggcaaagcgaccgtaatcctggcccataccattaaaggttacggcatgggcgacaccgcggaaggcaaaaacatcgctcaccaggtgaagaaaatgaacatggacggcgtgcgttacgtccgcgatcgtttcaacgtgccggttgccgatgctgatctcgaaaaactgccatacattaccttcccggaaggttctgaagaacacaaatacctgcatgaacgccgtcaggcgctgcatggctacctgccaagccgtcagccgaacttcaccgagaagttagagctgcctcaactttcagatttcggcgcgctgctggaagagcaaagtaaagagatttccactacgatcgctttcgtgcgtgccctgaacgtgatgctgaagaacaagtcgatcaaagatcgtctggttccgatcatcgccgacgaagcgcgtactttcggtatggaaggtctgttccgtcagattggtatctacagcccgaacggccagcagtacaccccgcaggaccgtgagcaggttgcttactacaaagaagacgagaaaggccagattctgcaggaaggtatcaacgagctgggcgcaggcgcatcctggctggctgcggcgacctcttacagcaccaacgatctgccgatgatcccgttctacatctactactctatgttcgggttccagcgtatcggcgacctgtgctggcaggctggcgaccagcaggctcgcggcttcctgatcggcgggacttccggtcgtactacgctgaacggcgaaggtctgcagcacgaagatggtcacagccacattcagtcgctgactatcccgaactgtatctcttacgacccggcttacgcttacgaagtggctgtcatcatgcatgatggtctggagcgtatgtacggtgagaaacaagagaacgtttactactacatcaccacgctgaacgaaaactaccacatgccggccatgccagcaggtgccgaggaaggtatccgtaaaggtatctacaaactcgaaaccctcgaaggtagcaaaggtaaagttcagctgctgggctccggttctatcctgcgtcacgtgcgtgaagcagcacagatcctggcgaaagattacggcgtaggttctgacgtatatagcgtgacctccttcaccgaactggcgcgtgatggtcaggattgtgaacgctggaacatgctgcacccgctggaaaccccgcgcgttccgtacatcgctcaggtgatgaacgacgctccggctgtagcatctactgactatatgaaactgttcgccgagcaggttcgtacttacgtaccggctgacgactatcgcgtactgggtacggatggcttcggccgttccgacagccgtgagaacctgcgtcaccacttcgaagttgatgcttcttatgtggttgttgcagcgctgggcgaactggctaaacgtggcgaaatcgacaagaaagtggtagcggatgcgattaccaaattcaacatcgatgcagataaagttaacccgcgtctggcgtaa

SEQ ID NO: 403164 - DNA, 333 bp, Salmonella enterica; identical to SEQ ID NO: 95392

SEQ ID NO: 403165 - DNA, 162 bp, Salmonella enterica; identical to SEQ ID NO: 375974

SEQ ID NO: 403166 - DNA, 1242 bp, Salmonella enterica
  misc_feature (1172)..(1181): n is a, c, g, or t
atggaagctatcaataattacaatagcggtttaaatcgccatcaattaggtgggtttatccctgtttacgatcaattagcagggactcactattttttgattgatggcaacagattagggtttatgtttatctgtaatccatcacctggagtttttgataatcagcaagatgttcttgctgaaatgttcaaaatggattttcctacagatactgtctgtcaaatatctctgactgcattgcgagacttgactttacagcttagtgcttggtcagctgtgcgaggtgggcgtatgactgggaacgataagcttaaagcagatctgcttaatggttatcagttggactactacgacagaagtatgcataagcctttaaaacctgatcatgataaccttatgttgagggattttcaggtatggatctcgctatcgattcctttacagtctgcccttcctaccgagctggaacattcgcgtatcgattcactttactctgaacttgtaagtaagttaattacgattggactgcatccgtttaaggtcgatgcagaaaactggctctattgtatagataaggtcgtaaaccccggaaagaactctcggtgggctgaaggttttatagacgttaacactatgaaaaggcttaatgaacaagttaacgttcccggccgtaagtatacagtcacagaaaatcatttctcatcagtcacacaaagtgacgacgaatctgagcatcgttacttcaaacaactttccgttgtaaagtttcctgaatacgtcaatttcggttgtatgtatgagttagtagttaactggatgcatggacgtaagacaattttcagcccatttatgatcactcagactgttcagtttgccgatccgctcaagttgtcaaaagaaaacgtccgctacaaagcaatcactaataaacaggcaagtataccttcagttgtcacattctgccctcgcctgcgggatatggataatgactacatggccgtaactcgcgagcttgaggatggcgcaaagcttttaagagggtatcttactttcactgttatgggtagtaatgccaattctgtgcagacagcagctaacgatctcaaatccttttacctcgaaagccgggtcaaagtagcagatgattcctttatcgttttcccgtcatttannnnnnnnnnttttatctataccgatgtttgggtctctatgggcgaacccaaagacaattttcgaccttga

SEQ ID NO: 403167 - DNA, 1671 bp, Salmonella enterica
ttggtggatactctgtttgagggtaaagcgcggctaaatatagacgcgcgcacgctgcccgcattgaagacgtcgctggcgaccggggcggaaattgaagagagcgacctcttttacagcttcctgacgcgcgagtatgttaatttgcgcaacagtaacgtccccccggcggagacgctggcgatcctgaaaaataaactcagctcgatttttgaatacggtctctacagccgtgacagcgtggcgcatccgccgcgctatggcgaccagattgaagagcgcgtgacgctgctgattggctgcgtagagcaggtgttgggcttttcgctgccggaaaatctggttaacccactgcgtaaacacttcctggcgctgataggctacgtgcagcgcggcctgatcccgcagctttactcttccagtttgatcctggatcgctgcaaagacgaatatgacaacgccacgctgctgtgtcggaaaatcaacgaactgctgcatattcagtgtccggcgacggaagtggtctggctatgcctgttcctgaaagagtgccgccattatcgtcagcgtatcgatgccagccccgactgcggggttattttaatcgcccacggcgcgaccaccgccaccagtcaggcgcaatatgtcaaccgcgtgctggagcgcgagctgttcagcgccatcgacatgccgtttgaacagtcggtgcatgacacgctggaaacgctgacccaaatgattcaaacccgccaatatcggcggcttatcctgttggtggacatcggctcattgatccatttcggcagtacgatcagtaagttattccagatagatgttttgctcatgccgaacatcacgctgaccagtctgctggaagtcgggctggatttaagctatgaaaccagcgacttaccacagttgacggcgctcctgcagagtaaaaatatcccctgccagctttgtacgccgcagcaggagaacggcggcaaagtgctggtcatctcctgtattactggcatgggaacggcggaaaaaatcaaaaaggtgctggaggagagctttggcgaactgatgtcgcaggacaccaggatggtgatccttgattataacgaggtacgaagtctggagcgcgttcagcaggcattgaatgccagcgagcggctggcggggattgtcggcactttccagccggggctgccggatattccgtttatttcgctggaagagcttttctccgaacaagggccggaactggtgttgagcctgttaacgcccgatctgtccaacgctgaacgccgtctggagatggagcgcagcgccatgcgctttatcagcgcgctaacgatggagagtatcatcaaccatatttccgtgcttaacccgcagcgtattctgaaagagatggagggcgtttttaaccatctgacgtcttcgctttccctgaaaccaagccgccaggtgacactgcgcttcctgatccactgctgctgtatggtagagcgtattgtgattaaccgaaaaccgttacagatggcgttggaaagtcagccgaatctggacgcgcgcgcgtttagtgtcatcaaatccgcttttctgccgatcgaagacgcctacgccatccgtttatcggatgcggaatatttttatatctacgaactgctctatagttaa

SEQ ID NO: 403168 - DNA, 519 bp, Salmonella enterica; identical to SEQ ID NO: 375946

SEQ ID NO: 403169 - DNA, 1011 bp, Salmonella enterica; identical to SEQ ID NO: 372344

SEQ ID NO: 403170 - DNA, 366 bp, Salmonella enterica
atgaattatgcctacgaccaggaattgcatgatgtagaacaacgctggttgctgggagccggagaaaactttggtactaccgtaactgatgaagacctggagagttcagaaggcagaaaagtgattgccctcaacctggatgatacagacgatgattcaataccagagtgttatgaaagtaatgatggcccacaaccatttgatacaacacgctcatttattcatgaagtagtacacgcgttgactcaccttcaggacaaagaagataacaatccaagaggcccggtagtcgagtataccaatatcattttaaaagagatgggtcacacatcaccaccaagaatcgcctacgaatctagtaattga

SEQ ID NO: 403171 - DNA, 474 bp, Salmonella enterica
atgggaaataatttcctgatgctgattaatggtgagctcaaaccgggtttacgtaccgatgtgatttaccgcgccatgtgggataacgataagctaacatggttgaagaacagccagttaccgccatcgcctggagaacaacagcaggaagggttggccggagcattttcgggctatagtcacggtgtcctgcttgtcggtggtggcgcgaattttccgggagcaaaacaaaattatactaatggaaagttttattcccacgaagggataaataaaaaatggcgagatgaagtctatggtttgattaatggtcattggcaatatatgggtaaaatgaaacaacctctcggctatggtgtatcagtaagttatggtgatgaagttttccttattggtggtgaaaatgctaaagggaaacctgtttcgtctgtaacctcctttaccatgcgtgatggtaatttattaataaaataa

SEQ ID NO: 403172 - DNA, 366 bp, Salmonella enterica
atgaattatgcctacgaccaggaattgcatgatgtagaacaacgctggttgctgggagccggagaaaactttggtactaccgtaactgatgaagacctggagagttcagaaggcagaaaagtgattgccctcaacctggatgatacagacgatgattcaataccagagtactatgaaagtaatgatggcccacaacaatttgatacaacacgctcatttattcatgaagttgtacacgcgttgactcaccttcaggacaaagaagataacaatccaagaggcccggtagtcgagtataccaatatcattttaaaagagatgggtcacacatcaccaccaagaatcgcctacgaatttagtaattga

SEQ ID NO: 403173 - DNA, 309 bp, Salmonella enterica
atgaaacaagaaaaagaaagcattgaagcaatgaaggctaataaatatttttctacttcagatgcagaatatgaacgaatgaaaaatattcgtacagtcaaaaaggtgttttcagagatgttagtcaggttcgaaaacttccaagagatctgtcggttatacgtagaccggaaaatggagctttgttttactacggatagtgctgacaggagtaaattatgggaaattcaaagccgcgagaattgtagctatggcgaggcaatagaaattctctatgctcaagaagtagcagcgggtttggccgcgtag

SEQ ID NO: 403174 - DNA, 366 bp, Salmonella enterica
atgaattatgcctacgaccaggaattgcatgatgtagaacaacgctggttgctgggagccggagaaaactttggtactaccgtaactgatgaggacctggagagttcagaaggcagaaaagtgattgccctcaacctggatgatacagacgatgattcaataccagagtactatgaaagtaatgatggcccacaaccatttgatacaacacgctcatttattcatgaagttgtacacgcgttgactcaccttcaggacaaagaagataacaatccaagaggcccggtagtcgagtataccaatatcattttaaaagagatgggtcacacatcaccaccaagaatcgcctacgaatctagtaattga

SEQ ID NO: 403175 - DNA, 366 bp, Salmonella enterica
atgaattatgcctacgaccaggaattgcatgatgtagaacaacgctggttgctgggagccggagaaaactttggtactaccgtaactgatgaagacctggagagttcagaaggcagaaaagtgattgccctcaacctggatgatacagacgatgattcaataccagagtgttatgaaagtaatgatggcccacaaccatttgatacaacacgctcatttattcatgaagtagtacacgcgttgactcaccttcaggacaaagaagataacaatccaagaggcccggtagtcgagtataccaatatcattttaaaagagatgggtcacacatcaccaccaagaatcgcctacgaatttagtaattga

SEQ ID NO: 403176 - DNA, 237 bp, Salmonella enterica
atgaaaataagctccaaacttaaatacgacatggcaccgaccaccctacgcgttgcgttgagcggtattaaggatggagactatcctggtgttacttattcccgagaatggatttacgacaaagagaatctggtaatcactaaagatgaaggtgacaccaaagaatttacaattgaaaatcctggcaaatatacattgatggttgttttcaaagataaccgcaacaatgaactctaa

SEQ ID NO: 403177 - DNA, 429 bp, Salmonella enterica; identical to SEQ ID NO: 379569

SEQ ID NO: 403178 - DNA, 456 bp, Salmonella enterica; identical to SEQ ID NO: 26451

SEQ ID NO: 403179 - DNA, 939 bp, Salmonella enterica
atgacaagccagcatcctttactgaaaattgcacttaatggcgatggacttctttcgtggccaaattcacccggacagactatgcgctgcccaacgtgtatgcgagatgttattacgggtccggatggtgatttaatacatcaaatggaagagggcgctaacccctgcacgccatctgttgatgttgtcatttcaaaggcgatcattgaactactcagcacgggtgagcgcctctatgtcaacccagttaagaacgcgaatagaacactggccccatcgtttatctttctgcataaagacaagcaacttcgaccattcataaatacggaatatcaaccagcaggtgccacctggagaagtgataaagggaacaggcttggttttttctatatggatgagcgagcgtctaaaattaataaggaccagttcgattttattgctgtaatagacccatctacttttcaagcagaatttaagaccttatggtccatgtgtgaattcgataacccccttgccgcgttacagcacttattggcttcagagaatatgtcttcagtctgggtgaaatggcctgttaaaagcctacaaccgaggaaagaagtagtgaaggccgattactggtatgactattattcacctcactacccagcgcagcaggcagcttgcacagcaacagtgattggactggaaggaaatgtatccggggaaactatttacatgctccagatcgctgtagaccggtcgatagttgagtaccagcttgtaaaatcgctaggggttatattgttattggataatacgggaaatttggtatcggagacgcaccctcactttgatataatcatcaaagcttgcatctcgggtgtcagagactttgtacgtcaaaatcctcgaatgcgaagtgtggagcatcagattaccagtgcaatgcctggttag

SEQ ID NO: 403180 - DNA, 291 bp, Salmonella enterica
atggaaattagtatttcattggatgttttatttgaggctctcatgatccttggccatggcagagtctggatgcaagagatggagttcgagcatttaactggatacagctgctaccgcgaattacgcacctgggataatcgtattgtcgcctggtggagtgatgctgatgacacatggtatttatgcgtagaagttgatgtgataactgctgttccctcacatatcccaaataaaaaaggagagctttccgaggaagtgtgcttccagttaatggcgcttggtcgatactga

SEQ ID NO: 403181 - DNA, 474 bp, Salmonella enterica
atgggaagcattaaagaactgctgtttgatatacaggaagaatggcgtcatgaatggatctctattaactatcctgaagcggaagaagagacactagagtgggatgcggcagctcaggaatacagctggtttcgggactggatggaagaagctgctgagcagcaacatttcgaggcttccctgaattgtatccccgaacgccttcaggaggccttggatgagttacatgagctacaaggacttcttgacaccgaacagctcatcgtctcaccgaatcttctatctgagctgaaaaatctatccattcaggaaggatacatgctaaaaatagaaaatgtactgccgccaaattttagagtattcctggtccgcgaaggtttcattttcccgggcgaatcatgggtgtgtggttccgggtactggttgcctgaaagtgaagtactcaaaaacggaatcaactcattgcttgtttaa

SEQ ID NO: 403182 - DNA, 699 bp, Salmonella enterica
gtgaagacacatggaatgctttttaatgatgaaatggtccgggcaattctggcagatcagaaaacacagacgcggcggattataaagcctcaatatagttcggatgaatggtctataaggcctgcgcaaacaccgcgacatcgcgggcacacgcatgactggtggcttccaacagggacccagccatactcggcgcttcggccttgtccgtacggcgtagttggcgaccgcattacggtccgtgaggcgttttcattgctcgggaatgaagatgcgtgcgcggtggactggaatgacaacatcgtgatggacaggactgaagcagcccgcatttaccgggcgagctgcgaacagcggtcgggggattatgggctgtggtcgatccctgatgaggccgactggaagcctcgtaccgaaaatatgaagttcgaaggtgcgtggacaccttcaatccatatgcctcgctgggccagccgtattgcactggaaattaccgatttgcgggtagagcggttaaataccatcagcgaggaagatgccaaagctgaaggcgcaccaacagaatgttgtgttcttggcgataagcactttcttggcttccgcagcctctggaaaaacacgtacggcgaggacagttggcaggccaacccgtgggtctgggtcgtcaactttaagcgtattaccggggaggtcgtatga

SEQ ID NO: 403183 - DNA, 312 bp, Salmonella enterica; identical to SEQ ID NO: 26329

SEQ ID NO: 403184 - DNA, 525 bp, Salmonella enterica
gtgaaagttctaaataacaaaggcgcagtaatcgaattacccaatttttcagaactcctcccgaaggttgaatctgatgatgggcgattttcaaaaccaaaaaataaaatatccaaagagcaacgagccgaactgcgtttgaaatttggcggtcggtgtgcctactgcggctgtcctttgccgaaaaaaggctggcatgccgatcatgttgaaccggtgaggcgggattttgaaatggtcagagcccccgctggaagtcgagtgacacaccgggctcgaagtaccggtaaggtcatgcaccctgaactgcatgcaatcgaaaatctttttccggcttgcgccccctgcaatctctttaaaggtgcattaagtgttgaaggcatgaggaaagaaataagccgccaggtagaacgcgccagggcatacagcgtcaacttcagaaccgcagagcgatttgggttaattgaagtcacggaaaagccggttgtcttctggttcgaaatacatcaggcgacggcacaataa

SEQ ID NO: 403185 - DNA, 288 bp, Salmonella enterica; identical to SEQ ID NO: 26332

SEQ ID NO: 403186 - DNA, 333 bp, Salmonella enterica; identical to SEQ ID NO: 13702

SEQ ID NO: 403187 - DNA, 768 bp, Salmonella enterica; identical to SEQ ID NO: 13701

SEQ ID NO: 403188 - DNA, 507 bp, Salmonella enterica; identical to SEQ ID NO: 13700

SEQ ID NO: 403189 - DNA, 1068 bp, Salmonella enterica; identical to SEQ ID NO: 13699

SEQ ID NO: 403190 - DNA, 204 bp, Salmonella enterica; identical to SEQ ID NO: 13698

SEQ ID NO: 403191 - DNA, 1026 bp, Salmonella enterica; identical to SEQ ID NO: 13729

SEQ ID NO: 403192 - DNA, 1206 bp, Salmonella enterica; identical to SEQ ID NO: 26441

SEQ ID NO: 403193 - DNA, 492 bp, Salmonella enterica; identical to SEQ ID NO: 26442

SEQ ID NO: 403194 - DNA, 1263 bp, Salmonella enterica
atgattaataaaattgatttcacagctaagaatctaacatcaaatgcaggtctttttcttctccttgagaacgcaaaaagtaatgagatttttgatctagttgaagatgacctcgtatttgataatgactccacaaataaaatcaagatgaatcatataaagacgatgatctgtggtcactttattggtatagacaagctagaacgtctaaagctccttcaaaatgatccactcgttaatgaatttgatatttccgtaaaagaacctgaaacagtgtcacgatttttaggaaacttcacctttaagacaacacaaatgtttagagacattaattttaaagtctttaaaaaactgctcactaaaagtaaattgacatccattacgattgatattgatagtagtgtaatcaacgtagaaggtcatcaagaaggtgcatcaaaaggatataatcccaagaaactaggaaaccgatgctacaatatccagtttgcattttgcgacgaattaaaagcctacgtcaccggatttgtaagaagtggcaatacttacacagctaacggtgcatctgaaatgatcaaagaaatagtagccaacatcaaaacagatgatttagagattttatttcgaatggatagtggctactttgatgaaaaaattattgaaacgatagaatctcttggttgcaaatatttaattaaagccaaaagttattctacgcttgcatcccaagcaacgaattcatcggttgtattcgttaaaggtgaagaaggcagagaaactacagaactgtttacaaaattagataactgggagaaagacagaaggtttgttgtgtctcgcgtactgaaaccagaaaaagaaagagcacaaatatcacttttagaaggctctgagtacgaatactttttctttgtgacaaacactacattgctttctgaaaaagtagttatatcctatgaaaaacgtggcaatgctgagaactatattaaagaagccaaatacgacatggcggtgggtcatcttttacttaaatcattttgggcaaatgaagcggtgtttcaaatgatgatgctttcatataacctgtttttgttgttcaagattgattccttagagccttcagaatacagacagcaaataaagacctttcgtttgaagtatgtatttcttgcagccaaaatcattaaaaccgcaagaactgtaattatgaatttgtcagaaaactatccgtacaaggaagtgtatgaaaaatgtctggtataa

SEQ ID NO: 403195 - DNA, 342 bp, Salmonella enterica
atgcaaagcctttcccctacatcgcgttatctccaggcactcaacgaaggcacccatcagcctgacgacgtacagaaagaggcggtcgaccgtctggaaaccctttatcaagcgctcaccgcgaaaaaatcgtcggctacgccacccggcggactgatagcgcgactggggaaattattaggcaaaaacgaaccggacgcgcaaataccggttcgcgggctgtatatgtgggggggcgtggggcgcggcaaaacatggctcatggatctcttctaccacagcctgccgggcgagcgaaaactacgccctgagagatcccctcataatttccccaaaacgtaa

SEQ ID NO: 403196 - DNA, 1287 bp, Salmonella enterica; identical to SEQ ID NO: 82525

SEQ ID NO: 403197 - DNA, 486 bp, Salmonella enterica
atgtcttatgatatttttctgaaaattgacggcatcgacggtgagtcgatggatgacaaacacaaaaatgaaattgaagtactgagctggcgctggaatatccatcaggaatccaccatgcacgccggtagcggcctcggctccggtaaggtctccgtcactaatctggaattcgagcattatatcgatcgcgccagcccgaacctgttcaaatactgcgcctccggcaagcacattccgcaggccattctggttatgcgtaaggctggcggcaacccgctggagtacctcaagtacacctttaccgatctgatcgttgcggtcgtttcacctagcggtaacagagaaggcgaaatcgcgtctcgcgagcgaattgagctctccttcagcaccgtgaaacaggaatacgtggtgcagaaccagcagggcggcagcggcggcaccatcaccgcaggctacgacttcaaggccaacaaagaaatttaa

SEQ ID NO: 403198 - DNA, 372 bp, Salmonella enterica; identical to SEQ ID NO: 381855

SEQ ID NO: 403199 - DNA, 486 bp, Salmonella enterica; identical to SEQ ID NO: 381856

SEQ ID NO: 403200 - DNA, 309 bp, Salmonella enterica
atgaagcaggaaaaggaaagtattgaagccatgaaggtgaacaactacttctccacaactgatgcggaatatgagcgtatgaaaaatattcgaacggtaaagcgtgcattttccgagatgctcgtacgattcgaaaatttccaggagatatgtcgcctctatgtagatagaaaaatggagctttgctttacgactgacagcaccgatcgtggaaaactatgggaaatccaaagccgacttgattgctcttacggcgaagcaattgagattctgtacgaacaggaagttgcgagcaaatcagctgcctga

SEQ ID NO: 403201 - DNA, 138 bp, Salmonella enterica
atgtttgatgttcacgttgttttagataatcaaataggacaattagcattactaggaaaaacattaggtaataaaggtattggattggaagcaagctggactgttagtacttgcgatccggacaccattaattcgtaa

SEQ ID NO: 403202 - DNA, 570 bp, Salmonella enterica; identical to SEQ ID NO: 13730

SEQ ID NO: 403203 - DNA, 849 bp, Salmonella enterica
atgtcaaataaagttgatgtttttttgagtcgagttagccatgtatcacagtttgtattggtggcatttgctatttttggatatttttatacagtaagaccaatttaccaaaaggaacttttatcagaagacattgcaaaaaaagaagttgaattaaataaattaaaaactgcaatggaaaactcccaaaaatttatagagaataataaaatcttacgaaaagaattggagggaagcattgccaaacttgatttacaatacaaagaatcagaagaaaaattaaattcaataaattctgaactaagaaaaactttagatgaactaaataaacaaaagaccattgccaaaagagcggtcaatgcaaacaacaagaatcttgaatctgttttctgggagaatttttcggggctagttggagtagtttatatttctaagagcacagattttgtgaacaatacactgggtgacgccaaaacagcctataatactcctagtaatttatatatatatccttatgatgcaattaatgaagcattaaaaaatggcaatcataattttatctcaagttcagaaaatgtccctgaaaatatccgcaaaaaaattctagcaaagatccgtcgcgctattgaaaaaaataagagttcattaacaaaaaaacctatcggttttgatgaaaaaattaatagcctgataaaaaccatagagtcaactaagttacgcaaaaatgaaaacgaaataatgaaaaattacactgcagaaagagaactatcatcttatattttcctgataaatggtcaatcaagaatccgcgctatggatttcttaaaagacattcaacatttagactaa

SEQ ID NO: 403204 - DNA, 927 bp, Salmonella enterica
atggtcgctaagttacaacttcccgaatatgactctattacggtacttcgaaccatcatttcagaacgagagagatataaagatttttatgaaagtttaacagatgattgggtggcacatgtagaaaactatttggaacatcatggtgatccacggcttattgcacctctcgacctctcactgtatatttcagaagaatcagtacaaaaagaagaagaaaaaacaactgatgccaatagtcatatatcagcacaagaaagactgaagcagaaaagaaaacaaaccctaattaatttatactctcctgctgagggaaaaacaccctacgatattcttgatactttaagacgagagcatggcttgttattttgtccatgttgtggggaaccgggaaaaccgacaacgttagaccattatttacctaaagctatatatcctgaattagctataattattgctaacttaacgccgatgtgtaatgaatgtcagcagaataaaagttctgattactttgataaggatggtaacaagatttacatacatccttattttgatcctattgaacaagttaatttaatcattgatatagaagaaccctatgctactccaacattcaggctatccattgttgagaatggagatgatagtgagctttatgaattgttaaggcgacatataaatggtgttaaatttttagagcgattcgatgaattttgtcgaaatgaatatatggcattattgcgcacattgtcattagaacgtcaagatgctcaaccggatagagcgtcaagaataatttgccgattcaagcgccaatatgaggggcagtctccaaatagatgggaggctattttttacagaggaattttaaataatacagaattacttgattatttggataatggtcatttacctaattatacttaa

SEQ ID NO: 403205 - DNA, 1008 bp, Salmonella enterica
atgggagacttttctgttttaaacgaaaacaaacatactccttttgatgaaagaccaaatattagtaagttagtccttgtgtcctatagtccgtttgaggattttaaccttgatatggaaaataataatctacaagataaacaagcttatcaatattttggatttcgacaaaaaagagacgatggtagtattggtatcagtcgtaacttaccagcattgaattcaagtaactcattgattgatatggtatctgatgacgagaagtataaatttatagaaggaaggataaataaattaaatacaatcaatgatgtattaaaatcggctattgattatgaacaatgcgcactaaaactaaagccatcagaacatccaacatttttcagccaccaagctatctctataaatggtgaacagtttttctcagctgaagatatatcaacctggatacctaatatatatttgcttcgtgaagcatgtagtcttaatgatggtgttatttttataaaaaataatcagatcgttccattgagttcggggcaacgattatttgcttacatcgtaattaatgttgttgcatcaataaaagataatagcttgattgttattgatgaacctgaacttttcttacacccaacattagagatagaatttgttggacttttgaaaaagatacttaaaccatttcgctctaaagctattcttgccactcattctttatcgattactcgagaagttccttctaagtgtgtacatatatttcatgatgaaggcgaaggcttagaaatactgcctcccccatttgaaacattcggtggtaatgttcaacgcatttcatcctatgttttcggtgataaatcgatttctaaaccttttgatgaatggcttgagatgcagttgcaagatattggagatcctgaaaaattaattgaaatgctaaatgaagaaattaacgaggaaatgatcatgaaaataatgagcttagggaaaaaacatcatggtcgctaa

SEQ ID NO: 403206 - DNA, 207 bp, Salmonella enterica
atggaaggcccttcagggtggaatctcataagctcaacttttctaagcgttaatttatgcttggattctactattcatagccatgtgatgaacactgatagtgaaacaaccttggtcattcaagtgattcatctcaaagtaaacgatttgaattgccactgttttggtagtcatccttctaggtggcttaagtcaggaggcatttaa

SEQ ID NO: 403207 - DNA, 1185 bp, Salmonella enterica
gtgaactggccgatggtgaagcttaaggattgctgccaagttgtgggaggggctacacccaaacgtaatatcgcatcttactgggatggtgatattccttggataacgccaaaagacgtgtcaaatcttgatgagccatatatttacgaagcaccagaatatatatcttccgcagggtataaggctgctgcaacatatatgttgccagcgggaacagtgctactcacatcacgagcaccaataggaaatgtagctattgctggtattgagctttgtacaaaccaaggttttaaaagtttaattcctgggcaaaatgttcacagtaaatatttatatcattgtattaagaaatttgtgccacaattagaattattaggtaatggtgcaactttcaaagaagtgtctaaaagagttgtagaagattttgaaatcccgttacctcctttggaagaacagaaacgtatcgcggctattctcgataaagctgatggtgtacgtcaaaaacgcgagcaagccatcaaactggctgatgattttttgcgtgctacatttttggagatgtttggtgatcctgtgggaaaccctaaaggatggaaaaaaaataaaataaaaaaaggtgtattagacattacttcaggttggagtgccattggcgggaatattccctgtaaatcgaatgaatttggcgtattgaaaataagctcggttacttctggaatattcaagccggaagaaaataaagtagtagactgtgaaactatttctgcttcgaaaaaacttatactccctaagaagggagatttgctatttagtcgcgcaaacaccagagagttagttgctgcgatatgcatggttcatcaggattatgacaaccttttccttcctgataaactatggtcgattaagttaaatcatgagctattgctaccagaattctttctcatcttaatacaaaatgaaaaagtccgcgagttactaacaaaacaagcgaccggaacaagtgggtcgatgctaaatatatctaaaagtaaatttgaagaaactgagattatcttccctgagatcaatgtccaaaaagatttttgcaatgctttcagaaaaacaatagctttgaaagcaaagttaataaaaagtaatgaattagccaatgagtcatttaattcattatctcaaaaggtattttag

SEQ ID NO: 403208 - DNA, 966 bp, Salmonella enterica
atggtggggatgactgattggccgatgcacaggatttggcatctttttggtggtaagaataagaaaagtattaaaaagatacttgctatcgcggggttagatgcgagtgagcatatttcagatatacatcatgttggctttcctgacgaggaatatattcctgtttcaggagaggaacataaggttcactggcttataaataaattatttccatatattttattaaaaaatactcagcacagggaagtttacgctgattactttaaaacggcctgtgaaggttataaaaatatagcacttatcgatgtagggtggatgggtaatattcaatcagtatttgctcgttctttaggtgcgcaatgggcagaaaaacaaatacatgggttttatttggcaacttttgttggcgccaatgataaccgatctatttataataagatgtttggttggctaactaactatggccatccccacgataagtgtgatcttttcttatcaggaggggtggaaataatggagtttgctatggctgacaataccgggtcaacaattggttataaaaaaacggataatggaataattcctgtacgtgaggatagcagtggttctgaaattgagtatttaaaaaaagcggcaagattgcaatcagggattatttctttttttgagtacgtcaaaccgctcatacaaaaagaaaattatgcagcacttagtagtgttgtattgtcagaacctttttttgaattgatagccagaccctcaagcgctcaactggacgccttatcttccctcacacattcagagtccgcgggatctaacgcagaaagaatcgtgctagccaaaaaactgcctttaaaggataaactttttcccggagaaaagtatatcaaagagttgaatgccagttattggaaagaaggctttaaaaggatcaacagaaaaaaattttgggcaaaatataactaa

SEQ ID NO: 403209 - DNA, 177 bp, Salmonella enterica
atgaatgagcctcgttgcattgctcagttattgcgtaacgagagcccgagggcgatggatttcactatcacccacggcagagggcgcaagggcatcatcatccgcaccaaaaaaccgagcgctattagcgccgtttatgcttttctgaaatccaggaggttctggaaatgcctgtaa

SEQ ID NO: 403210 - DNA, 324 bp, Salmonella enterica
atgacaaaggtacatgacttaaaaattcatcctaaatattttgcgccggtagctgcaggtaaaaaacgtgctgaagtgcgtataaatgaccgcgattataatgctggtgatactctgatattgcgggagtatgaccctcaaaagggctacacagggcaaaaagtggtggcactaattactgatgctacgtgtttgagggcgtttgttgacaacggtgctccttatattttattgagtatacagctcgtagagcaaccagcaatcaacgggtgtaagttgatgcgatggaatgatggttgtgcaagggctggtatttcgtattaa

SEQ ID NO: 403211 - DNA, 237 bp, Salmonella enterica
atgcacgtaattcgggacgagattccgcagcaccagaccaaaaatattaagttaatggctatcgtccatcggctgcagcaaattatggtcaatgagaatctgacacctgccgagctggtcgggtgtgccgaaatagtcagagataattacgggcggtttaatgatatcagtaatccgaaaactgaggcgtttacactggcgagaggcccgataattccgccaccatgccgaccatag

SEQ ID NO: 403212 - DNA, 1128 bp, Salmonella enterica
atggaaactggaattgttacgttctttgacatcaaagcttgtggtttctacaggctgaagaaaaatgcagacgaattagagcataaatttggaacgcttgatgatatctttgatgcgttgcaggcatggctcgacgacaaaagcgttgaagagtcaataccatgggatacagagactcatccgctaagagccagaacctactcgcgaggagtggctgtagaccccgacacaaaagatcgagtgatagtaatgtatcgcgcattaggttccgcaaaaggacgtttgcacgctgttaaaaaaacagcacccgttggtgctgcggaaaatgacactgtaaaaactgaaacgaatggcaatgactatatttgggttgaaccatgttattactggataattcctgagtataataaaattgcgtccataatatttcctcattcaggtgcagatacaccaaggttaagcaattacattttcaattttgtagtgaatcacggtgattttggtagagaaaagaatactacatcctttaaaaaagcgcgctcatcatgttcggaggatgatattcttgtttcgaagacagtgtttaagcatgtagacgacaatggtcgcaagtgtaattgcgtttttaaatttaagacagaggtaacgaaagttaataagcctggagcgaacattcttgaagtacgtgatgaaatagttcagacaattattcgtgatactacagtcgcgaaagttgaagatacccgccaacctctattacgtctaatgagtaatgtgctatcggattttttaggaacagaacaaaccaagtttaccaagcctaaaaaaatagaagttcgcgtagatggtgccccttcggaagaagaaatcaaacaactattggatagaaatgtagacgatgtcgactgggttgatgttggttttgttctcaaagattcctcccgcccattatggctgaaaaaatatatggcaagaactgcattgttcgttagtgattctactggggatgagcatttctctccagagaaactattacaggaaataaaggctgttcgtgatgatttgcttcaaacaatcatttataatgaagaggtggaagaaaaatctttaaaaacggcggaggcataa

SEQ ID NO: 403213 - DNA, 540 bp, Salmonella enterica
atgtcacctcaaacaagtaaggatttaaaggcattgacagtgcaatggaagtggaatctattaattctatttctgattgctttggcttcctattggttaaaggataacgttaattataatgacataaaggatatattgagtgttttgcaaaatatatccgcttcaattttcaccatagttggcttgtggattggttttttatacccaaacgcaatcgccagtattgtcaatgatgatgttgattacataaaaaatacgaaagatgctcctaggatcgaaaaattaatatacgttgtaattacctcagcagtggttatgctatcaatcttatttgtttatctttttaaatcaatagggtcaggtctatcaaattcaatagtgcatactgatttcgttaaaatgacaggtatcacttttgtttattttatgtgttggttacaagtaaagtgcgtttttagcgttattttgagcaatgtatcgtttgctaacaaccttcattcaagaatagtaagcgctaaattctcacatcatgacgattga

SEQ ID NO: 403214 - DNA, 870 bp, Salmonella enterica
atgaaatcatttattaaatcggcgctacattactgcattccttcctccaagaccaaacaagcaatgcagaaaatgaaaaatgtgatcatgatatttttaatatatacaagcattactgcaacaataacttatcttacaaataattataatcattccttttggggtaattttttaattaatgcaaactcatccattttagacttcttagttttaggtgtgattttatattactttgaataccaacgacaaaataaagaaagtattaatgagcttcttgaagacttaggaaatctggcaaaacactcgccaatagacttaaaaatacaaaaaattaaaatcattcggcaacttaataataaaggggtttataaaatagacgtccccagaattgatcttggagatatgataacaataaaatatctgactttcgtaaactctgaactatcagggctggacatgagcaaatcaaatataagggattgtagctttaccgattgtacaattcaggctttaaatattagtcactctaaaatctcaaacgtaaagtttctacgatgcagaataaaaaacattaaagcaacaaaatcaaaaatagatggtatagtgtttgaagattgttatcttgaaggtggtgacttttcatcttcagaaatgaaaagttgtgtattaaaactgtgcgacttaaaaaatgtaaaatatgaaaacgccacaatgagaaatgcgaatattatttcagcaagaaatgttaacattcaaagaattattgaggcgaaagatcttgactatttaaactgtgacgaggaagtaaaatttaaactaaccgaagtcaaaccaactataaagttttcagcgattggaaatcgaggctag

SEQ ID NO: 403215 - DNA, 564 bp, Salmonella enterica; identical to SEQ ID NO: 399950

SEQ ID NO: 403216 - DNA, 156 bp, Salmonella enterica
atggcgcatgaaaacgcattagtctcatgcgccatttttgacgcgaaagcccttgtgtggtggcttctgagactatttacggggtgcatgaaaaccagtctgttaagcgaagcgggcaggcgggcggggctgcgcgcgctgagatacaaaagataa

SEQ ID NO: 403217 - DNA, 585 bp, Salmonella enterica; identical to SEQ ID NO: 399993

SEQ ID NO: 403218 - DNA, 981 bp, Salmonella enterica
atgaacattcgcgctcttggtggtgagtattatcgtgtcctgtctggcgttgatacaggctggaacccgtttcgactggaggcgaacaagcggaaccgtcgttttgttaagcagttgatgaaaatcctggtaacaggccgtggggaaaaattaacagcacgtcaggaacgggatctctttcgtgccactgatgatgtgatggatttacccctggagttaagaaccttcggtatcagtcgtttgcttgaaaacttgccggaagatacaactgttgaagcacaggaaaatggtcttcgcttgcggctcagtcagtggaaaaaagggggggatttcggatggatatttgataatgaagaagatacgttcgatatttcaaatgtagataatttcggtattgatggtacagaattccttgatgacccggatacctgcggtcctatcactttctatcttctgtatcgggtaacgtcacttctggatggtcgtcggctcgctattttcttcgatgagttctggaagtggttaggaacagaagcatttgcagattttgtctataacctgcttaaggttatccgaaaactaaatggtatcgtgggtatggggactcagtctcttgatgaagctcttaaaaataaagttgctaaggccattattgaactgactgcgacagatttttatctggctaatcccaatgctgattataaagactatgttgaaggagctaaggtttcccctgaacacttcgaaataatcaagaacattgaccctgaatcacgacaattacttgtcgttaaaaatccggtcagaaagggcgatgttaagaagtttgcctctctgatttctctggatttgtcaggtcttggcgattatacgaaggttatgagtggcagcgaggataatctggaaatattcgattcgatatataagcccggtatgaagccgcaagactggctcaataaatatctttctcaggctctttaa

SEQ ID NO: 403219 - DNA, 702 bp, Salmonella enterica
atgaagatatctaagttgtttatttctgctgtgtttatttttcctatgattactcatgcgggtattcccgttatggttgatgctgatcccttacgccaggccgagtgggttaaagaagcccaacgttgggtagatacggcaaagcactatcagagtcagttgcaggcttacaaagagcagttagcaacagctactggcctcagagatatccaggggcttgttgcacagggtaagagcctgaagaacgacataacgaaccttcaaaagcagggtataagccttgatgatcttctgacatcgggtaatgcgccaacgggtgcacttgattcgctctataaccggttcaaggacttcgatgtgtgtgatgcgcgtcaggccgcctcttacattaacctttgtaaacaggagacggtgaataaggcgtgggcgctggagcaaaccacggaagtgcaggaaaaaatcaatgatgctctgaaagatatctcaaatctcactgaccgaatggggaatgctaaggatattaaagaaagccaggacctcgctaacgcagttcaggcaaagagtatccagcttaatgttctctctcaacagtgggaaatgaacatgcgagcatccgaacagcgtgataagctactaaaggaaaagaggaaacaagcaaagcaacaaagccagatagaggctccagttgctgatttaaactaa

SEQ ID NO: 403220 - DNA, 225 bp, Salmonella enterica
atgaaactaatcattgcctcagcgacgttaatatctgctttatttctggcgggttgtgatgaacaaccaaagagtaagcaatggtatatggataatcccgaagatgcaaaagttcaggtagataaatgtaaagctagcggtgatgattcggttaattgtcgaaatgctaaaagcgcattgttccagattaaacaggagaatgcgccagtagcagatttaaattaa

SEQ ID NO: 403221 - DNA, 1059 bp, Salmonella enterica
atggccggaggcgtttttcaagggcttgaacaagcccttaattctagccttgatagtatggcttcaggtcagatagctcaatattcttcaatgataagtgtaattgttacgagttcagttacactttatttaattgtctgtggttacatgcaaatggcgggcaaattaaaaacagaagattttggctataatatcgtgaaaatgtctatcatattaacttttgtaaataactctggaggatatttagattcagcaattgatgctataaatggactgaaagagggaatatctggaagtgaaagcgtttgggctatactggatagtttatggtataagacacagactcttgctgatacaatttacaagcttggagacgaagattgggtaaatataaggggtgctgtcggtctgtgttttgtatgggcaggagccgtcataacaatgatatgttctgcttttactttcctcagtgctgaaatcactataaaactcatgacatgggtttcacctatattcattttttgcttgatgtatggttttttacgaccaatgtttaataattggttgatgaccataatatcctcagtgctaacattaatgtttgcttcgttagttctaaaaattggaactaattaccttgatagaacgattcaaaaggcaacgtcagttgttgaatccgcaaacataataaccttagccgtacaggtctttataatatatatagcagccgcatttttagtttggctatctgcaaagattgctactcaattagcgggggttggcgttgatggtgctatacaaggtgctgcggcaatgggggtcattggcggagggtttgctgctgccagagccgcttcaggtgctggaggcatagccaagaatatgggggttggtgcatatgagggggcaaaaggaaaaagttggcaggataaaagtgcagacggtgtcagcggcgcagttgcatatggcagtggattagttggacgagcagcaatacagaaagtaatttctaaaaatatttcatcttcggataatattcctacggcaaaagtcagctaa

SEQ ID NO: 403222 - DNA, 690 bp, Salmonella enterica
atgtcggataaagtcaaaaaagaaattgaagcggcaagatcctttgaagaacataatttaaaacgcgatgaacgagataaaaaagtaggcttttttatcggtggtacagggctgttaattgctatattgagcattgtcgcgttgattgttatgttgccgcttaaacaaaccattgttgatctgtatgtgctggataaaacggcaggtattatttataaagtaaatcaattcacagaagaggctatttcaacagaacaggcgactgacaaggtgcttgttgcctcttatcttgaattacgcgaacgttataattatttctcacttcaggatgattataccagagttcaggcgtataactccgatgatgttaaccgtgaatatcttgctttctggaacagtaaacaggctccagacgttgtctggcgaaaagctgaaaatacggtgcgaataaagattcttactcagtttattaccgatgctacagacccggacaaactttcaactattcgctaccaacgcattattcgtaatgtgaagacaggcaatgaaagaactgaaatatggaatgcacgaatcacattccgttatgttccaacagaaacactggataaagaccagcgcgagattaatggcatgggattgatcatcaccagttttgaaaaggcagaagaaagcggagatgtgaaatga

SEQ ID NO: 403223 - DNA, 909 bp, Salmonella enterica
atgaataaattagtttttataggcggcttacttctgttttctgctcaggtaaatagtgccgttatcccacaagggagccgctatgacagcagaatgcaaacagtttcttacaatgcagcgaataccaccgtcattaccgctggcgtgggttatgtgtccactcttctgtttgatgatgaggaaacggtactcgatgccaggccgggcatggaaaagggatgggatgttcagaaggatgctaacagggtttatattcgcgccgttccggtcactcagcctgtgatggatgatgaaggtaaacaggtcagtcaggtttttgagcctaatgctaaggactggcctacaaacctgtttgttgtcaccacaaagcgctattacagcattgatttacgtgtagtggatgtgtcagcgccacaggataaggtttcgtatgttgtcagctatcgctatccacaggatgagagagaaaaatcctccaggatggaacttgcccgtcagcaggaacttaaacagcagcaggagaacaagcgtattgccaaagcgcttgatgatgcccaggcaccccgtaactggcttttctcgatgagcgtaggtaaagacagcaacatgattaaacctgatttcgcttatgacgatggtcgctttacctatatcggtttttcgccgatcaaaaaaattcctgcggtaatgctgtactccaatggtaaggagattgcgacatcaccgggcgttaaacagattggtaattttaaaactcttgtcgtggataaaacaaacccggcatttgttctgcgatatggtaatgcagttataggtcttgttaatcagggatatgggaaagtcacggtaaaagacggctccactatttcccctgatgtagaacgcgttgaggttaaagatggaaaataa

SEQ ID NO: 403224 - DNA, 1287 bp, Salmonella enterica
atggaaaataaaactcctgatgaaatcgaaaaagaaatgatggagcatgagcaatcacatgataatgaaataacagaagagaaagaatcaaagaagaaagttaaaactgttgctgagatagaacaggaaattcgtgagaaagaagccgctaaacttgcagcagaatctcacgatgttaccgaggcgcatcagcctgaagttacaaagttaaaaaaatcagcaaaagataacttcctgaaaaaaattctctttgtcgccgtcgctgtcattatcgttgctatagctggcctgaaaatttaccagaaatataaggctccccctaaagaagaaacagacaagacaatcaaaaccaaagaagccacggtgaacaagcgcaacaatctgggacaggaggtagatccgtttcgtacagaagaaccggaacaacctactgtggaagataggggcaatgataacccgtttgcatcgtctggttctggaacagcgccacagacggctcctgtggcgttctcacgcgctcttgcggtgacggctgaaggtggacaagccggaagtaataacaggaccaggaaggaagagaaagcgtttggcgctgtcagttctgagtcatcaccggcgctgaaaaaagatgaagcgggaaatggtagtgagtcagaggtgacggcagttaaacgcattccctataaccctgatctgtacataccagaaaatacgccaatatcctgtgcatttacccggcgttttgtctcagacgtggcaggtaaactccagtgtgtgttgactgatgatgtatacagcgccagtaagaaaacccgcttactggataaagggagtacagcttcactggtctataaaacgggtatgttaaatcacggacaggctcgcgtgtttgtgatggccacaaagattcgtacacagcagccgcctttcatggacattcccctggttgacactgatgcagccggagaactgggggaggccggggttgacggatggattgatactcactttaaagaccgctttttaggtgcggcaatgcttgggatgatccccgatatcgcaaatgcggcgacggacaatgtagcaagtacagacagaaataccgactacacccaaaacagccgggaagcattcgcagaactggcgaaaacagcctttgaaaacagtgtaaatattccgccaactatccacaaaaatcagggtgagattattactttgattacaggcagggatatagatttttcaaaagtctatacgcttaaatacaggggaagtaatgacagataa

SEQ ID NO: 403225 - DNA, 1035 bp, Salmonella enterica
atgacagataacaacgttagccttaactttattcgggatgcttactttggctcgtttttaaatactgagggattaactgaagtagctgtaaatcgtccagatgaagtattcacgaaagtttatggaaaatggcaacgtcatgaagttgattttcctcttgatgttgcgcaaaaattcgcgagacaattagcgacttaccataaagataatatcagtgatgtaaaacctatcttatccgctacattgcctacaggggaacgcggtcaggtagttttctctcctgcctgtgaaaataacacagtatcaattacgttgcgtaaaccttcttatgtacagataccacatcaaacgtatattgataacggcttttatgatcgcatcgcgggtaaagagaaaggggatagcagaaatgatgagttattaaaattatacagagataaacgttttgccgaatttatggaaaagtgcattgaatacggaaaaacaatggtttttgtcggtgagacaggttcaggaaaaacaacctaccttaaaacgctgattgattatatccctcttcatttaagaatagtgaccatagaggataacccggaggttaagttttatcgtcatcagaattacgttcatttattttatccaagtgaggctggaaacagtgataaagcgataatcacacccgcatcactcatcagagcaaactaccgtatgaacccggacagaatattgataacagaagtcagggggggtgaggcatgggattttctgaagattgtctcgtccgggcatgagggggctgtaacgagtcttcatgctggttcgccttatgaagctatcatggggctggtagaacgttgttatcagaacaccgagtgttcgcggctgccttacagcgttttactcagcaaggtactcagcagcattgatgtaatcgcaagcattaaacttgaaggtgatgtgcgtcggattggtgaaatttattataaggatgctgatttagaagcgtacagaaagaggttccgcgatgaaaacttttaa

SEQ ID NO: 403226 - DNA, 1833 bp, Salmonella enterica
atgaaaacttttaatgcaggtcagttgattttcttactcatcgtgataatccccctgtcatggatgattgctaccgtagtagtttatccgatgaatggacttggccttaaagcgacctggaaaacgtatcagtttggtatgctgtggcaggttttgtttgcagataatatccgtagtgatatcaggctcagtggcgttaaagctattggcgcaggtttttgtggtgcacttatggttttagtgatgatgtttctcgccgcaaaacaaagcaaaacgtcaatttacggtgatgcgaaatttgccagcgatgccgatatacgaaaatctaaacaagtaacgtggggagataaaagtaaaggcggcattattattggcagttataaaggtaagttattacgttacacgcagccggactttatctctatgggggcggggactcgtgcgggtaaaggtgccggaattgttatcccaaatcttcttgattatgacggttctatgatggtacttgatccaaaacaggagtgttacacgataacaagtaagtacaggcagaagattttggggaatgaggtctttctctttgatcccttttcccgaaaaacacatggttttaacgcactgacctatgttgatttgagcacagaacagggagtgacagacctcttaagtcttggggagacgatctataccacggatggtaaaagtggaccagaaaagcattttaacggcgaatctcagcttatgtttgtcggatgtgcggaattactctggtttcttatgacttatcgtgcagcagatttgagaagttttggtattaagcattgtttttcgattggaacaattcttgagctttttaaccgaataccgatggaggacgttcttgcaaacagagaagtatatcttgaaacaactgatgatcctcatgtccttttcattattaaagatgcacttgataaattcagacattatgttgaacttggcgacgagcctaaatcatctgtcagtggaacgttcacggaaaaactgaaactctttactttaccccttttcagggctgcaaccgatcggaatgattttgatatccgcgatatgcgacgtaaaaaaatgtcggtatatcttggcataatggctacagaggttgacatagcaaataatcttcttaacctgttttttaactttgcgatcaaagtcagtatgcgggaaaaccccgattttgttcgtgacctgaaatatgacgttctcttcttgcttgatgaatttccggctattggttacatgccttatatcaaaaaagcagcaggttttattgctggctacaaacttaaattgttaacgatttatcagaatatctcgcagttaaatgaaatttatgggcttcagggcgcgctatcattactcgctaaccatccatgtaaaatcatctatgcaaccagtgaaaaagaagatgctgataagttttctgcacaattagggtacacaactattaaagcgaagggcaaaagcaggaataccagtaaaggcggtacatccaggggggaatcagaaagcgatacacagcgtgcgcttgttttaccacaggagctttcaacgctgaagtttgatgaggagtttattctgcttaaaggtgaaaatccgattaaatgtaaaaaggctttttattttaatgatcactactttatggacaagttggtttctgtttcaccaaaacttgaggccgcagttaaagagcttaataaaggagtggctacaggtaagcctggtctcaagtatccaaaaaaggaaatcatgttgtcttatggcgaacttgaagcagatttaaagctggcagcataa

SEQ ID NO: 403227 - DNA, 537 bp, Salmonella enterica
atgaagaaaaaaattttagctgatgccatttcagaggccaccggacgaggaaagggatttgaatggtacgatgcattcactaatcagccattgaagaatgaaagtaaaaaggttcctgctgaacggtcattctctttaggctggctggcagggggcattgttatactggcaatgattatattcctttcaggatgttcatccccgccccctcctacaccgattgaatgggataaaacacagtctctgaatgcgagtattcctgaatggcgtgaaaacaaccttgtcattccatccgatactgtttctggtcgctggatgaagatactgaataactttaaaggtgatgaaggaaattatgatatttcggtctattacgcgatagcccattcccctgttattgtggttcatacgtctggcagttatttttttaaggctaaatcctggctcaggaagcatggcgcaaaaggcgtaatccagtatcaacctgtcactgattgtatgctttgcacgaatacaagtatttatttttcacgataa

SEQ ID NO: 403228 - DNA, 249 bp, Salmonella enterica
atgtcgaaacccccgtcacctaagattaatgtcaggaatctgaatccagatatttactcagttcttaaaaaagaggccgaaaaaaactgtcgttcacttgagggcgaagtcaggtttgctcttagcctttatgcagagtgtctccgagaaaataaaaatcaggatgacagatattcaaaaatattatctgagctttctgatatcaagagtgcaatgggtatatctaaaattattaaggagaagatatga

SEQ ID NO: 403229 - DNA, 306 bp, Salmonella enterica
atgaaaaagttttcaggcgcgtgtctgttatcactgtttatggtgttttccttcagccctgctgcttcagcggctgatgcatgtaaaaccgtactatgcctttatggtaaagccgttggcagtggtggtggtggtgaatgcaaaagcgctgagaaagattttttcaatatattaaaaaagaagaaaggttccataagatggagtaagacagttgatgcccgtaaggcttttttaaatcaatgttcatcggctgatcctgctgccattgccaaaatcatgagtaagtttggaagagtcagagggtaa

SEQ ID NO: 403230 - DNA, 1656 bp, Salmonella enterica
atgaaagtgactaagctcattctagctaatctgttattaacatgtactttattttttactcataatgtttatgcaatacaatgtactgccggggctgataattatttttgtcgtgatgaagctcaggcagtgatcaatacagctaaccaggcactaaatactgctaacgctgccaactcaacagctaatgcggcaaacaccacggcaaataatgctaatgccacagcacagaacgcacagacgactgcaaatgctgctaacacagcggcacagaatgcacagacgagcgcgaacaaggcgcagaacaccgcagactcagccaacacagcggcgaacaacgcacagactacagcagacgctgccaactctgcggcacagaaggcgcagaccagcgcgaacaacgcacagactacagcagacgctgccaactctgcggcacagaacgcacaaaccagcgcgaacaacgcgcagactacagcagactctgccaactctgcggcacagaaggcgcagaccagcgcgaacaacgcgcaagccaccgcagatcaggcgcttaaagacgccactgataaagcgaatgcagcggaaaaaaatgcaaatatttatacagacagtaaaatcactgatgccaaaaacgaactgaacactaatattaacaactcaaaaaatgaggcgattaccacgtccaataattatacggacagtaaaatcacggaaactaaaaatgaactgaatactaacattaccaattcaaaaaacgaggcgattaccacatccaataactatactgacagtaaaataacggacaccaaaaacgagcttaacactaacatcactaactcaaaaaacgaggccattaccacatccaataactatactgacagtaaaataacggacaccaaaaacgagcttaacaccaatatcactaactcaaaaaatgaggcgatcaccacatccaataactatactgacagtaaaataacggatgccaaaaacgaactgagcactaatattaataactcaaaaaacgaggccatcaccacatccaataactacacggacactaaaatcactgatactaaaaacgagctaaacactaacattactaattcgaaaaatgaggcgataaatacatctaataactatacggattcaaaaatcaatcaaaataacaaagttattaatcaaagtatcaatgccgctaaaaatgaatcaatcaaagtatccaatacgtatacggatagtaaatatcaggaaggtgttaactatacaaatacaatgtatgatcagagtattcattatgcacaaaatgctgctgataatgccgagcagaatgcgaataattatactgataacaggattaatcagatagggcagcaatctaatcaacggtttgaacaactgaatgataaaattgaacgcacagcaaaacggcttaatgcagctattgccggagttactgctatttcttcaatcccctatgtagcagagaatagcttttcttatggtattggtattggcaactatcagaatggaaatgccctggcagcaggcatccagtataaaacctccccaaatactaacgttcgtttaaatgtttcctgggattcttctaacaataccgttcttggcgcagggttagcgggaggctggtaa

SEQ ID NO: 403231 - DNA, 456 bp, Salmonella enterica
atgaatggtaaagcaattaaagaaataagctatttttcttattctgtttatcgtgcagtgttctttagtctggttacggctcctgcaatcgcattgtttgttgggtttgtttttctatctttcaacaactcgattgccggtacatttttaagtgaagccagaaattatgtcgcggatacccctgcggataaggttcgggtttgccttttcaaaaagcaagtacagcaagtgggggtgatggaatcaccggaattaccgcctccatcggtatataaagaaaaatgcatgacgacactgattgatgtcagtgactggcaacaatcggctgacagcaccattcgccagttttactggaatatcgtttttctgggctttttaatctggtgcattctgaatgtgaatttttcagtggttatgggaaaaattaagactgcaaaaaacaggaaagaattatga

SEQ ID NO: 403232 - DNA, 426 bp, Salmonella enterica
atgaaactcaccagaaatcagcgtgaaattatttttatgaagtttggcggtaaatgtgcatattgtgggtgcgaccttcctctgcgaggatggcatgttgaccatgttgaacctgtgtacagaaaatcagtgcaggatatggcggcggcaaagaaaaacatttttaagctaaaagctactggtgaggtattcaatcaggaagctgattgtctggaaaatctctacccgtcctgtgcgccctgtaatctgtttaaatctgtttattcgctggatatgttcagaaagcagatagaactacagaccgaaagagcacgaaaaagtagtgtcaactttcgtaccgctgaacgtttcggtcttattgaactagtcaataaacccgtagtgttctggtttgaaaaatacagggagttgcatgatgtttcataa

SEQ ID NO: 403233 - DNA, 501 bp, Salmonella enterica
atgtttcataaatgcatattacctttgttcgttgttattttttcctgttctgtgtatgcaactgggataccaattggcttaattccttatcagtgtttctttaaaggcaaagtaattcgcgtccttgatggcgataccattgaagtattacaggaagacaagcccgtcagggttcgcctggcaaacattgatgccccggaaaaaaaacaggcttacggatactggtcaacgaaacagcttaaaggtctggttgcagcacagcctgttactgtgacatacacgcagactgatcgctatggtcgcattatcgggcgcgtattcacgacaaacggcatcgaggcaaatcgatttatggtgcaatccggcgctgcgtgggtatatgaacgttacaacgctgataatgcattacccgctttacaacgtgaagcacagaaaatgaagcgtggcctgtgggctgacagccaaccagttccgccgtgggaatggcggcatagcaaataa

SEQ ID NO: 403234 - DNA, 399 bp, Salmonella enterica
atggctttattaccggaagaaaagaaagatctacagcaatgcttcgaaaaacaattacaacctgatcttgatttgtcgtttgaagaaaatggcaaagtatataaatttaatttcaataaaagtgagtcgggtgattatatcgatagttttacacaaggagtatgggaaggttttcaggatgccgaggaatgggaaaaatatggtaaacatcagaaaataaaattacctgaatgccctgaaccagtcgagggttggtgtgattgtggtaaatgtaagactatgatgttacataaagagagaaatatttatgtttgtcttgtttgccataaacaaaccgaaccgtttcttccaattgatttgaactcaaacgattggctacctgataaatccgaatgctga

SEQ ID NO: 403235 - DNA, 375 bp, Salmonella enterica
atgcgcttcaattttgctggcgttaaaggctttgtgcttttgttccttattcatttcagcggtcgcagtcgccagttccggcaacgttgcgctgatagcactggcaatgtcacccgcctgataataatgttcatcggacaaataacggttatcggtacgcgggtaagtcagcagtttatgcgtttcatacagcccctgcatgatatcgagggtctctttggccttatagccgtagcgtttagcacagatttgttgcagggtggaaagattgagcggcagcggtggtttagtattttccggtttcgtcgtggctatcgtcacaaccgcgtctttacctgtgatccgctcggctatatgtttagcctgtgcttctga

SEQ ID NO: 403236 - DNA, 516 bp, Salmonella enterica
atgcactggtatcttatgtctttctctgccaccagattcaatcatgtacttaaatttcttaccgataaaaacattaactactgttgtcctatggttgtttgtcactatcagcggcctgataaagtaaacacagtcagaaagcgtctgtgtcccgtctttcctggctatgtatttgttgaactcgatcttgcagataataaactactgaccttttcgcaatgcagatacatacagaggcttatcgcttttggaggtgagcctgtaaccgttcaccagaaagttatcgatgaactcagcaatcgtacttttgaagagtgcaaatgtgagagtgaactgccgccagttacaggtttcataaacaccgatgatgcctggaatgacattcttgcaactcgtgatccagatgcccggattagtaaactactaaaatatcttgaacaaaggagggattatggcgggaaaagccgtcggtacgacaaaaggtacaacaatcagtgtacgaagaaagctgtatga

SEQ ID NO: 403237 - DNA, 1155 bp, Salmonella enterica
atggcaaaaaataatgataaagactatcgagtcaggagagcaaaaggtcagaacgacagaacagccaaactcccccttgcgcataagttgcgcaatggtggaaaagattacgctaaaaaagttcaggccaggattaatgcccgaggcgcaagccgtgaggtaatggttaaaattactggaagctcaaaaacgaagcgtggtatcaaaaactctatcaattatattacccgtgagggggaaattaccttacgtgataatgatggtaaagagtaccagttaaatagtgacagtgagcgctccgatgcttatcagtatctgtcagatccagaggacagattgatgtacaaagatgagaaagcacctaaccttgtacataacattgtgttttcatcgcctaagattgcaggagttagtgagaaagatgcacttgattctgtggaaaaacttctgaaagagaagtacccggataacaggtttgtccttgcgtatcatacagacaaggaacatcatccacacgtccatgcattactccgtattcctgataataatggaaaaaggattaatatacgtaaaaatgatctgcgagatatgcgtgatggcttttgcaagaatctacagctaaaaggctatgatgtgaaagctacacatcgctatcaacaaggactcaaacagcagcttagaaaagaacctgacaggttacgtaacctgtatgaagtggtcgagtttggcaggactaactatcaatttgatcctgtaaaaaaacagcagaatttcttaagagtgaaaactctgaaaaacaaaactgaaatggttgtctggggcgctaatcttgcagatgaaatctcaagagaaggagttaagcctggtagtattatcagacttaagaaagaaggtcagacgatggtcaaagtacctaaactggatcgtgacggtaaagctgtaggctggatggagactcatcgcaacaactggcgtgttgaaaatcagggtatgttaggcatcaagaagacgccacttgataaagagattgtgaaagactcagtcgaacagattaagttgaatcagaaagggtttagtgttttccgtgaaaatcgtaactctatgcagtcagataaaaatgcgaagtccattaaactaggaattttcagattctaa

SEQ ID NO: 403238 - DNA, 540 bp, Salmonella enterica
atgaagtatataagttttagaataactgatgataattatgaaaaattgtctatggtagtcaaaaatattactgataagactcctgctaaattttttgcagatttagctagtaaaattatatcagaaaataaaaactttgataatcatagttgtgatgatggaactgatttaaatcatgtaaaacaagttcgtttgtcaacatcaatgatgagttttattaaggagcaggctaaaagaaatggatggtctgaatctaaagagattcgatttcgattgaatcagacaatttcaaatgaacctgttttacgtgatcatgaaatagccgaactgcgaggtgcaagaaacgcagttgacagaataggacaaaatatattttacatcattgcaaagcgccaacaacttgaaatcaacgatccggcattttgggatgatattaaaaaattaaataagtctattgatgatgttaaaaagttagtgaacaagattactctttcacgacaaaatgttatcagtgttaaatctgccaggaagcaggtatag

SEQ ID NO: 403239 - DNA, 222 bp, Salmonella enterica
atgaataaacaggaatttatcaggaaagttaacgcagaaaagcaatcaggtggcgtcaggtttaacgtggttcaggtaaaaaatgaggtgctcatgtgttggactaccggattgggagaacggcagtacgaaccactttttatgttaaagaaaaatcagagaaatgaggtcataaggcagaaaataaaaacatatcgtcgctggttaaagtcagagacttga

SEQ ID NO: 403240 - DNA, 216 bp, Salmonella enterica
atgaagagtaagccaacaccagagcaggttaaagcagctcgcattgctgctggtctttctttaaaagaagccgctgatacatttggttatcagctaaattcatggcaaatgaaagaaagtgcaggtaaagcaagccgttctttatctattggagaatacaattatttactgttattagcagatcaacatccagaatataaaataataaaaaaatag

SEQ ID NO: 403241 - DNA, 243 bp, Salmonella enterica
atgactgacaacattataaaagtaaacaagggtaactattcatatacgataacggtaattaacaatgaactgttacaagtggttaagtacgttaagacaaggagtaaacatacaactggaaaaacgaaacgagaagttgtatttgatgaaaacctaaccagagaacaggcgtttgcactcgatggagaggttttgaaagcacgtttactggattttctaaaaggtgtaaataatgaagagtaa

SEQ ID NO: 403242 - DNA, 300 bp, Salmonella enterica
atggcgaacaaacttgttaatgcagagttagtattagatgtttttaaaaaacatggcgcatatataactctttgtgacgttaacgaaacggttaaatattgcaataaaaatggcggagaaatgcaatgtggtttagatcctgaaggttgggcgtatcgcttagcgaaggaagaagcttatcaacaggaatgtgaggctcaggaagctacttgtgactatgttcattttgatcataggaaccaggaacgtacagcagagatttacctggttcctgagtcgggagagggagagaatgaataa

SEQ ID NO: 403243 - DNA, 306 bp, Salmonella enterica
atgagtaaagaaatcgctgtagaaatcttgaatcaattaggtggaaataaatttattgcaatgacaggtgccaaaaattttgtttggcttgaaaagggtggactcatttttaaactaccatcaaatttcgcttgtaatggcattaaccttgttaaaattgagctagatccatcagatacctacaatgtagaattttttaaatccagaggtgcatcattgaaaagcattgcatcatatacgatgatttattgtgaccaacttcaggatatcttcaccgaaacaaccggactatatacacacctttga

SEQ ID NO: 403244 - DNA, 336 bp, Salmonella enterica
atgccttacacggcgaaacgataccagacagaaaacggtgaggttccatacaccgactggatgaaaaaattaagacgtaaagaccagaccgcagcgttaaaagtggattccagaattgcccgcgctatgggcgggaatttcggggatcataaattcgaaagggacggtgtctgggaattaagagttgattatggtcctggttacagggtttattattccatcgaagatggcgaaataattctcctgctcattggcgggaacaaaaaaactcagacagcagatttagataaagccgttagttatctgcaagattttaaaaagaggtcaaaaaaatga

SEQ ID NO: 403245 - DNA, 300 bp, Salmonella enterica
atgaaatcaggcttcgaaccagcacaaaccacaggcattaatcgttttaactggtatggtgaaaacgtagtgattgtccatccgggaggctaccttccacagattgtttcaggtgagtgtgtcatgttcagtaacggctctggaactgtctggtgtggcagaacttggcctggattttacgaatttgaactcgaaaggcctgttgatgttcgccaggccttggattatctgtcatcgaaacacagaatgctccaggttaatcaggatgatttttctggtcaggaagaattgcctttctga

SEQ ID NO: 403246 - DNA, 828 bp, Salmonella enterica
atgaatctcagcctcaatcgtgtttcgaagaaaacaaaaatcaggcatagaaatgaaattaataatacattttcatctttgccgttggctgccagacgtatcctttttatggcaatggcacaacttgattcaaaggatagtttaactgaaggtcaagtttttagagtgtctgcttctgaatattctaatatagctgatgtagatgtctctgttgcatataagcagatgaaggaaggagtcagtgaactccaatcaagtgtaatcaagataaaacaaagtcaacttatcaaggatattccaaatctaaatcttaaaaaagatagtttgttatctttgaatcttaccgattattgtgtttatactgaaagtgagggatatattgatattgttttctccagaagtatcgaaccttatataacaagacttaaggactcatatacatcacaagtcttaatttcatctgttcgtttgactgactccaatgctagtactttctatcaatatttgaggaaaaaaataagtgagggaaagttaaaaggtttcgatgttggagtaacagaactaaaagatgaattagggctatatggattttctgatgatgatgtaaatcagaggttgtattattacccacaattcaaagactttaacaaggactttctttctaagaatattgcaaagatctcaaatttaactgagattaaaaatctaaaattttctattattgaaaaacaaggacgcaaagcatcaaaattaagattttcatataaaatagacaaagagagcgaaggtgatgattaccgaattccaaaaggattcaggggggcataa

SEQ ID NO: 403247 - DNA, 453 bp, Salmonella enterica
atgaaggacaacatttatcagtttcccgtaggcgagcaaaagaacgcatttaaaaatgctgttagcgccaaaaaacggaaagagcaacgcaaccaggccatttctaaaacaggggcggtattacggcgttttctggattggtcatttttcctggttcgcttaggcctggctaccggattgcacattgtggcctgtctgccgttcgcggcgttgattgctctcaggaagccaattttctggattggtggcttgatttgtgtgatcacatactatcatcttgaccatcaattttattctgacaaaaactacacgatccctttcctcgtttcagcctggatactgagttttgttagcttgccagtgctcgcatttctgaataccagaatgcccttccatcacctgctggggctggagtctgcggaagaaaagagccataatgagactgagtgctaa

SEQ ID NO: 403248 - DNA, 540 bp, Salmonella enterica
atgaagtatataagttttagaataactgatgataattatgaaaaattgtctatggtagtcaaaaatattactgataagactcctgctaaattttttgcagatttagctagtaaaattatatcagaaaataaaaactttgataatcatagttgtgatgatggaactgatttaaatcatgtaaaacaagttcgtttgtcaacatcaatgatgagttttattaaggagcaggctaaaagaaatggatggtctgaatctaaagagattcgatttcgattgaatcagacaatttcaaatgaacctgttttacttgatcatgaaatagccgaactgcgaggtgcaagaaacgcagttgacagaataggacaaaatatattttacatcattgcaaagcgccaacaacttgaaatcaacgatccggcattttgggatgatattaaaaaattaaataagtctattgatgatgttaaaaagttagtgaacaagattactctttcacgacaaaatgttatcagtgttaaatctgccaggaagcaggtatag

SEQ ID NO: 403249 - DNA, 1155 bp, Salmonella enterica; identical to SEQ ID NO: 403237

SEQ ID NO: 403250 - DNA, 516 bp, Salmonella enterica; identical to SEQ ID NO: 403236

SEQ ID NO: 403251 - DNA, 141 bp, Salmonella enterica
atgaaaccagaactgatcgagatactccgcatgcgctggcagcgcctccgcatttaccgccgtccggggtcggtgttggttggctaccgcatcctgcgcaattttgttcgtatttatcagttcacaggatttactcaatga

SEQ ID NO: 403252 - DNA, 2847 bp, Salmonella enterica
atgcctttaccattcccctttgactttaaaaatcctgattatgttcaggtttttgaatggcgaatggagcgtctgcaacgtatcaggaagactcccgaaactctccctgctctcaggcagttttaccgtacaaacccggcgcagttcatcatcgactggggcatgactactgacccgcgcaatctcgattatggtcttccggtcaccattccttttttgctgtttccacggcaggaggaatggatcgactggattatggaacgctcgcgtaaccatgagaatggtctgactgaaaaaagccgcgaaatggggttgagctggacatctgtcggtctggccagtgcgttatgtctgtttaaccgtgaaatggttatagggtttggttcccgtaaagaggagtatgtcgatagcacggttgatccaaaagcgctgttctggaaagtacgcaaatttatagcaactcttcctgccgagtttcggggaggctgggacgagagaaagcattcacgttttatgagcgtggagtttcctgacactggcgcggtaattaaaggcgaagctggcgataatatcgggcgcggtgaccgtactacgctttattttgtggatgaggccgcctttctccagcggccattacttattgatgccgcgctttcccagacaactcgttgccgtatcgatctctcatcggttaacggcatgaataacccctttgcgcagaagcggcacagcggaaaaatctctgtgtttacgtttcactggcgtagcgacccgcgtaaggatgatgagtggtaccgcaaggagtgcgagaaaattgataacccgatcatcgttgctcaggagctggatcttaattaccaggcatcggcagagggtatcctgatcccatcagaatgggtacaggctgcggttgacgcacatatcaaactggggattcagcccagcggtcaacggctcggtgcaatggatgtcgccgacgaggggcgggataaaaacgcctgttcccttcgttacggcttcctgttgagtgatgtccaggaatggtcgggtaaccgggcggctgcggtactggggtatgcggcgtgccttgattttgtccgaccagaggggcgcgtgccgttcaagttccgcgagtatgaaggtctggccgctgatgttaccagtggcagcgattacgatgcactgatagccgcaggttacaacttctatgggaaatatgcggaaaacagtgtggtggaagattactgggcggatggcactattaccggcgattttaaatggctggacagcttctgcgggcaaatctggctgaatgccaatttgcagggagctgtgatctcgttattcaagtcaaaccagactatcccctacaacaatgaagggcgggcgctggttgcggcatcaatgagtgacgttatccagcagtacaaacgctggggcggtaccggggataaaaataatatcccggacaaggcgacgcagcagaccaaagagagcggtaacgcggcgtatgattcgggttttcctccggtgaccatgaccccgatttcagcgggaggtataccgccacacggcaaggattttaacggtctgatgcacgatattaccgcagcaatacggtacgtccaggctggcggtttgtacacgtataatgccgatttcgccggggccattggtggatatgcaaaagatgccattctcgccggagtctcaacaacagcggtctggctgaataccattgacgataacctgaccgatccggaaggtgccgacagcgcaggctgggtaaacctgctggcagatcccctgaagctgtttctgtggcaaaaaaacaatctgtcagaccttcagaataaaggaacggcacgggataatcttcaggtctacagccaggagcagacggatcttaaatacctcgccaaagaccagaacggtggcgatattccggaaaagccgctgtttgtacaaaatatcggagcgcttcctgccaacggtacggctgttgcagcgaacagactggcatcacgcggtgcgcttccggcattgactggtgcgacaagaggcagcgatagcggcctgataatgggcgaggtttacaacaatggctatccaacacaatacgggaatattttacgtctgaccggaaccggtgacggggagatattgatcggatggagcggggttaatggtgctcctgcgcctgcatatattcgcagccacagagataacgccgaggctgagtggtccgaatgggcaatgctctacaccacactaaacccacctccggattcgcatccagtaggggcggcgattgcatggccgtctgatgctactccggcaggttacgctctgatgcaggggcagtccttcgataaatctgcttacccgttactggctatagcgtatccgtccggcattatccctgacatgcgaggctggacaataaagggtaagcccatcagtggacgtgctgtactgtcgcaagaaatggacggcaacaaatcgcactcgcacaccgcgcgggcgcaggatactgacttaggggcaaaatctacctcatcctttgattacggcacgaaatcgaccaataccacgggcaatcatactcaccagttcggcggttatatcaattcatactggggagattccaatcacacctcatttcagcctggaggtggtgcatggacacaggccgctggcgaccatgcacatacagtttatatcggaggacatgagcacaccatgtatatcggtccacacggacacgtcgttattgtggacgcagacggtaatgcggaaaccacggttaaaaatattgcatttaactacatagtgaggctggcataa

SEQ ID NO: 403253 - DNA, 663 bp, Salmonella enterica
atgggtaaaattttgcttgtagcatcagacaaaggcggggtagggaagagtacctacgtggctaacacggcctcaatgttggtaaacaaaaaaaggtcggtgatcattcttaaaacagacaaaaaccaggaaattctaagctggaacaaaaaacgcaatgcgaacggtctgttatctataccggtacacgaggcttacggaaatctcgtcaatgaaataaagcgtcttagcaagctgtgtgaagtgctgatcattgactgcccaggccatgacagccaggagttccgtagcgctctgactgtcgcggatatcctgataaccctggttaaaccctcttctgactttgaaagcgaaacattgaccacagttactgaaaaagtacggacagcgcaacaaattaatccaaaactccagccctgggtgttgctgacaagaattaatacatcaaagcctcgccacagaacgcgagctattgaactggataagttactacgtgaagacagtgtatggatacaaccactgaaaagccgcatcgcagaactggatgtattcgaaaatgcctgtaatgagggggcaggggtgcatgatgtcagtcgggcaacaagtctgacagccgcaaaagcacagattgaactggtcgcacaagaaatcggtattttgtaa

SEQ ID NO: 403254 - DNA, 603 bp, Salmonella enterica
atgttaagcaccgcggcttttttatcacttgctgtgcagtgtgcggtatcagtacatcccgataccgtatcagccatagcacaaacagaatcaggattgagacctttagcaataggtgtggttggtcaaccaaagggtatctatcctgcgaatatcaatgatgctttagcgcatgtggcacgattaaaagcggaggggaaaaactattcaataggactgatgcaaataaataaaagtaatttttccaggtttaatgtcactgaagaacaactctttaatccttgtgaaaatcttaaagttttcgaaaagattttcactaactgttttttaggtggagggactcttaaaagagcattaagttgctattattccggggattatgaaaggggtgataaaaaggagcgtgagtttgataataccagttatacagaacgtataggttatcgctcagaagttaaatatcttgttccgagcattaaggaggatatatcgaaagttaattcagtggataatatcaatcgtaaccaaaaaattgtaatcatttatccatctcgccttattcggggcgatttacaagataacttaatacaggaatcccaatga

SEQ ID NO: 403255 - DNA, 537 bp, Salmonella enterica; identical to SEQ ID NO: 400311

SEQ ID NO: 403256 - DNA, 123 bp, Salmonella enterica
atgcgaattcagaaaaaagcatttctgaagaacttcttagtgagtataaaaaattttcacttgctgagtgtattgaaaaaaattatgaaaaaatgggcgttgtttttactaagctacctttaa

SEQ ID NO: 403257 - DNA, 621 bp, Salmonella enterica
atggatgataactctacgtcagtgaccagcaaagaacatgtgcaggatatttctttaaaaaactggctaaagaataaaaaaactattgtattacttatctttactgcattaacaaatgttggcaacgtcctgtcaacattcgatgcgatctcagaaaaggttagttcactttacacatggctaggagaatcatcaaaatttgaaggggagtggagtaataatcaggaaggatatattgacggtccacctgtatttctggataaaaatgagagcactgacgttatcagctttgacctcagaattaaagatggagaagtgcgcggagaactgcgtacagatgctcgcttaaaaatatgcgagacaatagacaaaaaactgaaaagtttttgtacattaatagcttcacaccctttcatgatagaaggtaagaaatcaccattctctaatcaatttgatgcttatatcactgaatggagagaaggtgaaaagcgactgatagcaatattaaatatgaaaatagaaaacgatggggaaatggttgtcaccaatacaatgaggacattagaatctagaaccttccctcccaagatttatatgattaaaatcatagattcagattaa

SEQ ID NO: 403258 - DNA, 237 bp, Salmonella enterica
ttgaatatttctgatatgagcgtagtgcctgtaagcactcaatcttatgtaaagtcctctgcagaaccgagtcaggagcatattaatttttttgaacaattgctgaaagatgatgcatccaccagtaacgccagtgctttattaccgcaggttatgttgaccagtcaaatggattatcttgccagaatatcaggcgcagcatcgcaagcgcttaataagctggatagcatgacatga

SEQ ID NO: 403259 - DNA, 402 bp, Salmonella enterica
atggaaaactgcctgagtgaaatgattaaaagcgttgtattgtcacataacagatatgtagaaaatgccataaaaaatgttaaagagcttaaagaaaaaaaagtccctctatcagaactaatcaataaagaatctactgctaataaatatgtccaggagcatctggcaaatattctttatcacagaatcgaacaagttctcgaagtatataaagcaattctacaaccaaaacaatatcaacgttttccactcaaagatatcaataacttgatgaagttaaggcatgacatagttcaccgtgacgggaaaactaaaatttcagatgaggagaagcatacattcaacacaaccactctcaatgctgcatttaaggttgtagaagagtttctcattgaaaaatga

SEQ ID NO: 403260 - DNA, 222 bp, Salmonella enterica
atgaaaacccataccctcttcaccaataagattttcttcgggaatttccaggttgtcaaaaaagagctcgttggtttcatgattgaccatattgggaataggtcgtactgtcattccatttttcatagcttctttaatatcaaccatgaaaatagacatcccttcggatttacgttttacatttgcaagcggagtagtctgtacctgctgtgggttctgtga

SEQ ID NO: 403261 - DNA, 144 bp, Salmonella enterica
atggtgtataagcgggacatgaaaattcgcgaagaaaacagtatgatattctctggcatacttttccatgatttttttagcatatcgtgttctttgaatcgttttaaatgtcgaaaattttgctacctgcgggacgatgtctga

SEQ ID NO: 403262 - DNA, 405 bp, Salmonella enterica
atgtggctgattaacccgttcaacggtgaaacgcttgatgaacatactctggaagtctggttaaaaggcaatattagtccggtcgccgagttgtttaatgaagatttggacgaagcggataacgccgaagtgattcgtaagctactggatacgctgaaatcctcgctgatggaggaacggcaaatggagctggcgctgcgcgttagcgaagcattgttgcaatttaacccggaagatccttacgaaatccgtgaccgcgggttaatctacgcgcagcttgagtgtgaacacgttgcgctgactgatttaagctacttcgttgaacagtgtccggaagacccgatcagcgaaatgattcgtgcgcagatcaacaccattgcgcacaagcaaattgttctacattaa

SEQ ID NO: 403263 - DNA, 147 bp, Salmonella enterica; identical to SEQ ID NO: 379945

SEQ ID NO: 403264 - DNA, 351 bp, Salmonella enterica; identical to SEQ ID NO: 373858

SEQ ID NO: 403265 - DNA, 387 bp, Salmonella enterica; identical to SEQ ID NO: 382213

SEQ ID NO: 403266 - DNA, 378 bp, Salmonella enterica; identical to SEQ ID NO: 382232

SEQ ID NO: 403267 - DNA, 210 bp, Salmonella enterica; identical to SEQ ID NO: 373825

SEQ ID NO: 403268 - DNA, 234 bp, Salmonella enterica; identical to SEQ ID NO: 381217

SEQ ID NO: 403269 - DNA, 378 bp, Salmonella enterica; identical to SEQ ID NO: 382232

SEQ ID NO: 403270 - DNA, 234 bp, Salmonella enterica; identical to SEQ ID NO: 381217

SEQ ID NO: 403271 - DNA, 147 bp, Salmonella enterica
atggtcaaaaaatataactttatcaagaccacctttagtaagcgttcccattatagaagcggtagcgaaacgaagcttccacagaagcaacttcgttctcattgtgtgagtgtcaggcttaataatgaagagctaacgcttctataa

SEQ ID NO: 403272 - DNA, 414 bp, Salmonella enterica; identical to SEQ ID NO: 380623

SEQ ID NO: 403273 - DNA, 1518 bp, Salmonella enterica; identical to SEQ ID NO: 382234

SEQ ID NO: 403274 - DNA, 336 bp, Salmonella enterica
atgatgcatgaaaccaatgtctctccgctgttaatggcgtggtctatcgcggcggtgctgcgtatcgcgctgggctccgcgactgtcgcggcgattaccgcaggcggcattgcggcgccgctgatcgccactaccggcgttagccctgaactgatggttatcgcagtcggttccgggagcgtgattttctctcacgtcaacgacccgggcttctggctgttcaaagagtatttcaatttgactatcggcgagaccattaaatcctggtcgatgctggaaacgatcatctccgtctgcggcctgatcggctgtctgctgttgggtatggtggtttaa

SEQ ID NO: 403275 - DNA, 1020 bp, Salmonella enterica
atgacgttcagcttttacacccattatttcaccctatttacacttattgcccactggatcgcagtaacaatattatcctgccaaagccataaaacggcctgctaccttaaacttcctggctggtggtttgctaacctggcgattgctgtcgcttatctcccctggttgcccgtattgtttaatttactgactcatctggcgcagttgagagccggtaatgatatcggttggattccccccgtaacatggcgtgacctgcctgcgatgtattggcatttttttaccggaaacaacggacagggttttccgtcgttcattctgtggctggctgtgggaggttttatcggtactgtggggcgaatatctttatgcaacggagaatatgaaagatatcagctgatattattttgtaatctggtcatccctgtaatgctggtcttcatcatttcctggtggatgccgttatttatcgatcgttatttcttcttctcatcgctgagcattcctcccctgctcgcggtattacttacccgcgcaaaaaaagcggtttgtggcttctggtttatcttattcaccttattattcggctatggttcatatcataataaccctgagcacatagacgagtttaaaccactggtaaactatattaatacccgtcaccagcctaatgatgccgtggtagtcagtaaaatgttcgattatttaagttatgtgtattataataagcgagattatcgtacttttctttatacaccgcctaacgctcatggaacatcaggcagaccgaatgcctatggctttggttcactgttttatgcgcaagccgatcagacatatattgatactctgacaacgctttcaaaaagttaccatcgtgtctggttggtaagcggcggtaactttagtcaggattatcccttgccgtcagaatggcaaaatatcgcaaacttcagaagtggtagatttcaggtacagttatttgtaataccgactcaacaggcgcgtcaaatgcaatga

SEQ ID NO: 403276 - DNA, 567 bp, Salmonella enterica; identical to SEQ ID NO: 380624

SEQ ID NO: 403277 - DNA, 327 bp, Salmonella enterica
atgcctgccgtctcgccggcaatggtcgcgattgcggcagccatccttgtgacctttatcggcggtctgtacttcattactcaccataagaaagaagagtccgaaacgctacaaaaccagaaagtcaccggcaatgggcttccgccaaaaccggaagagcgctggcgttacatcaaagagctggaaagtcgccagccgggcgtgcgtacgccaacggaaccgtccgccggcggcgaagtcatgaaatccgaatcagctcaccagcgagcagcgtcaactcctggaacagatgcaggcggatatgcgtcagcagccgacgcaacttaa

SEQ ID NO: 403278 - DNA, 1713 bp, Salmonella enterica
atggaaactcctgtttcacgcagtgcgttgtatggaaaactggccggcccactattccggtcgctggaatcggcaacggcattttgcaaactacgctctaatccctgggttgagctgactcactggctgcaccagttaacacagcagcccgataacgatattctccacgttcttcggcattaccagatccctctttctgatgtggagaaagcgttactccggcaactggatatgctgcccgccggggccagcgccattagtgatttttctcaccatatcgatctcagcgttgaaaaggcctggatgctggcgagcgtccgttacggcgataacaaaattcgcagcggctggttgctgctggccttgttgaccacgccagaactgcgtcgggtactgagcagtatctgcgcgccgctggccacgcttccggttgatgaactgacggaaatactgccctcgttgatcgaaacatcgccggaagcgcaggagcgcccttacgacggctccggcctggcatcagccattcccggtgaaagcagccaggcgattcccaacggcgggcaggacggtaaatccgcgctggcgaaatactgtcaggacatgacggcacaggcgcgcgacggcaaaatcgacccggtgacggggcgtgagcatgaaatccgcaccatgacggatattctgctgcgccgtcgccagaataatccactactgactggtgaggcgggcgtcggaaagacggcggtcgtcgaaggttttgccctcgcgattgcgcagggggaagtgccgcccgcgctgcgggaagtacggctgctggcgctggacgttggcgctctgttggccggagccagcatgaaaggcgagtttgaatcgcgtctgaaagggttactggaagaggccgggcgctcgccgcagccggttattctgtttgtcgatgaagttcacactctggtgggcgcgggcggcgcatccggcacgggcgatgccgctaacctgctgaaaccggcgctggcgcgcggcaccctgcggactatcggcgccaccacctggagcgaatacaagcgccatattgagaaagatccggcgctgacccggcgttttcaggtgttgcagattgccgaaccggaagagatccccgcaatggaaatggtgcgtggtctggtggatacgctggaaaaacaccataacgtactgattctggatgaggcggtacgtgcggcggtacagctttctcaccgctacattcccgcccggcagttgccggataaggccatcagcctgctggataccgccgcggcccgcgtggcgctgacgctgcacacgccgcctgccagcgtacagttcctgcgccagcagctaaaagcggcggaaatggaacggtcgctgttgcagaagcaggaaaaaatggggattcagtcagatgagcggcgcgatgcgctgacggcgcgaattttctcgctcaacaatgaactgactgcatccgaatctcgctggcagcgggagctggaactggtacatacgttgcaggaactgcgtgtcgcagagtctgatgctgatgacaaaaccacgctgcaacaggccgaaacggcgctaagggagtggcagggcgacgcgccggtggtgttcccggaagtcagcgtggcggttgtcgcggcgattgtcgccgactggaccggtattcctgccgggcgcatggtgaaagatgaggccagctag

SEQ ID NO: 403279 - DNA, 180 bp, Salmonella enterica
atgcagcagattatggccgtgaaacacgttccaggcgagcggcagcagcccctgccctggctccagcccttcgtgcgccaccgggtgttgaagattcacattcagttcgccgtcaaagtgaccgggttcaccggccagtgtggcgacggcgctggtatgcagcagctcaaacaggtgtga

SEQ ID NO: 403280 - DNA, 177 bp, Salmonella enterica
atgatgaaaaaagtactgtatggcatttttgccatgacgtcggtatcggcgggaagctcctccgctaccagcgttagcaccgtaagttcggcggtgggcgtcgcgttagcggcaaccggcggcggcgatggttccaataccgggaccacgaccaccacgaccaccagtacccagtag

SEQ ID NO: 403281 - DNA, 840 bp, Salmonella enterica
atgtgtataagagacagtgtcggcggcgtattcggtcagcatcacgaagttcagattaaccactttcttacgcgcaaagccgtcgaaatcagcgttaacgaaagcgcgggtaatttcgcgcgcgcggtcagcgcggaagttcatgaaaatcagcgtgtcgccgtcttccatcgccgcatcagcctggccctcggcgcggataacggtcgctttgacaaactcatcgttttcatcacgagcgtaagcggcctgcaggccagccacagcggtatccgcctggaattcgccctgggccagggtcatcagatcatacgctttttccacgcgatcccaacggttgtcgcggtccatagcgtagtaacgaccgacgatagacgccacgcggcctttgccctgcgcggcgaatttgtcttcgaattttttcagcgaggcttcagcgctgcgcggcggcgtgtcgcgaccgtcgaggaaggcgtgcagatagattttttctgcgccgcgctctgcggccagttccaccatcgccataatgtgatcttcgtggctgtggacgccgcccgcggacagcagacccataatatgaaccgctttaccggcgtttttcgcctggtctaccgcattggtcaggactgggttagcaaagaaagtacgttctttaatttcaacgtccagacgcgtcaggtcctgataaacgatgcgacctgcgcccaggttaacgtggcccacttcggagttgcccatctggcggtcaggcaggcccacttccagaccggatgcgtcgatcagggtatgcggacgttttgcccacagagcatccatcactggggttttggcgtttaa

SEQ ID NO: 403282 - DNA, 291 bp, Salmonella enterica; identical to SEQ ID NO: 371779

SEQ ID NO: 403283 - DNA, 525 bp, Salmonella enterica
atgaaattcggcgtctccggctgtacccgtgaatgtgcggaagcgcagggcaaagatgtgggtatcatcgccacggagaaaggctggaacctgtacgtctgcggtaacggcgggatgaaaccgcgtcatgcggatctgctggcagccgatctcgatcgcgacacgctgatcaagtacctcgaccgctttatgatgttctacatccgtactgccgacaaactgacccgtaccgcgccgtggctggataatctggaaggcggcatcgagtacctgaaatcggtcatcatcgacgataagctgggcctgaacgaacatctggaagaagagatggcgcgcctgcgcgcagcggtggtctgcgagtggacagaaaccgttaacaccccatccgcacaggttcgctttaagcactttatcaacagcgacaaacgcgacccgaacgtccaggttgtgcctgaacgtgaacagcatcgtccggccacgccgtatgaacgtatcccggtcactctggtggaggaaaacgcatga

SEQ ID NO: 403284 - DNA, 552 bp, Salmonella enterica
ttgcgccagcagatcgcctgcgttgacctgctgaccttcctgaaagtgcagggcgatgagttgaccatccacgcggctacgcaccgtaacggtattcgcggcggtcacggtgcccagcccgctcagatagcgcggtacggcctgcgtggtcgcggtcgcggcctgtaccggcgccagagggccgtcgcgcataccgcggcgacctgcggcggcggtatgcggcgcttgcgcggcgacgcccggcgcggcggtcgggctttcgctacggctatgccagaaccagaatgcggcggcggccactacaaccccaatcgctattgcccagcggaaagtattactgcctttcatcggtataagtttctcatcctgaaacgttttgcggaatgttgcttcctctattgtagtcagcagggaagggagaaaaatggaggaattatggaacagggtcgggattattctgaatggcgacccgctttgcgaggcgctacgcaactctcatcggtgaaaatcgttagcgcgccggagtgcggtaaagtggcggcacggcaatga

SEQ ID NO: 403285 - DNA, 438 bp, Salmonella enterica
atggccctcattgcccatttgcaccgccgcggcaggcaccacaacggcattttgttcggtatcgaccagcatccgggcgttcacaaattgattggggaacagcgtatcgtcctgattggtaaagcgcgctttaattttgatcgttcccgttgtgggatcaatctggttgtccagactgagcaacacaccttcgctcaatttgtgcgagttagtccgatcccaggcttctacgaccagcgttttccccgctttctgcgcctgaaccacggtcgcgatatcgctttccggcagagtaaaaatgagatcaatcgggtgcgtttgcgtaatgacgacaatacctgcggtatcgctgctggaaatctggttgccgacatccacctgtttcagacccacgcgtcccgagaccggggccgtgatacgactccagtcgagctgtaa

SEQ ID NO: 403286 - DNA, 705 bp, Salmonella enterica
atgctgacatctcattttccccttccctttgccggacacaggctgcatatcgtcgactttgatgcgagcagctttcacgaacacgacctgctatggcttcctcatcacgatcggctccggtctgccggacgcaagcgtaaagctgaacatctggcaggccgcatcgccgccgttcatgcgctacgcgagatgggcgtcaggacagtgcccggtattggcgacaagcgacagccgctatggccggacggcctatttggcagcatcagccactgtgcgacaacggcgctggccgtcatatcccgacagcgtatcggcattgatatagaaaaaatcatgagtcagcacacggcgacagagctggcgccgtccattattgatagcgatgagcgccaaattctccaggcgagcttgctcccttttccgcttgccctgacgctggctttctccgccaaagagagcgtttataaagccttttcagaccgcgtcacgctcccgggattcaatagcgcaaaagttacctcgcttaccgccacgcacatctcgttacatctgctgccagcctttgccgccacgatggctgaacgtaccgtccgtacagaatggtttcaacgtgacaatagcgttattactcttgtttctgcaataacgcgcgttccccacgacaggagcgctcccgcttctatacttagcgcaataccccgataa

SEQ ID NO: 403287 - DNA, 378 bp, Salmonella enterica
  misc_feature (338)..(347): n is a, c, g, or t
atgggtaccggctcggaaacgggcgatggaacagtgatcgcaacagctcttgccaaagcttacaataatccccatgccaaagcagttattatcgaggcagagtcaggtggtggtggtccctctgacgccatcattatttaccgccagataaacgcgcttaaaaaccaccagccacagattgaacgcgtatcagatgccggttgctctctttcatctgtagccgctgacaagagtaacaaaaccgggagcacagaacgtggcgatgaagcacggtcgaagcaaaactccctcgaagtactctccagcggtaccggtcgttttttctctgatatcgcagnnnnnnnnnngactcatataaaccaatcatcgttagtgtga

SEQ ID NO: 403288 - DNA, 1281 bp, Salmonella enterica
atgcagaacaatagcatcaccattcgtcagacgcgtctgcagggacacgaaggattatggcagcttacgattgaaaacgggcgctttagccggattgagcctcaggaagccgcatcgttaccgcagggcgaagtgcttgatgccgaaggcggcctggctattccaccgtttgttgagccacatatccacctggataccacgcaaacggcgggtgaaccgagctggaaccagtccggcacactgtttgaagggattgagcgctgggcagaacgtaaagcaatgctcacgcatgaagatgtgaaagcgcgcgcgatgcagaccctgaaatggcagatggctaacggcatccagtacgttcgtactcacgttgacgtttcagatcctacgctcaccgcgctgaaagccatgctggaagtgaagcaagaggttgcgccgtgggtagacctgcaaattgtcgcctttccgcaagaaggtattctgtcttatcccaacggtgaagcgctgttagaggaagccgtgcgtttgggcgctgacgttattggcgccattccgcactttgagttcactcgggaatatggcgttgaatcgctgcacaaaatcttcgccctggcgcagaaatacgatcgcttgatcgatgtgcactgcgacgaaattgatgacgagcagtctcgctttgtcgaaacggtcgcggcgctggcgcatcgtgatggcatgggggcgcgcgtgaccgccagccacaccacggctatgcactcgtacaacggcgcgtatgcgtcacgcctgttccgcctgttgaaaatgtcggggattaacttcgtcgccaacccgctggtgaatattcatctgcaagggcggtttgacacttacccgaaacgtcgtggcgtcacgcgagtgaaagagatgctggaagcggggatcaacgtctgctttggccatgatgacgtcttcgacccgtggtatccattaggcacagcaaatatgctgcaggtgttgcatatggggttacacgtttgccagttgatggggtatgggcaaatcaacgacgggttaaatctgatcactacccacagcgcaaaaaccctgcatttacaggactacggtctgagcgtcggcaatgccgcgaatctggttatcttacccgctgagaatggattcgatgcggtacgtcgccagacgcctgcccgttactcgattcgccacgggcgggttattgccgagacggtgccgagccagacgacgctgcacctgacccagccggaagccgtgacgtttaagcgttaa

SEQ ID NO: 403289 - DNA, 486 bp, Salmonella enterica; identical to SEQ ID NO: 373501

SEQ ID NO: 403290 - DNA, 1251 bp, Salmonella enterica
atgatgttgaatgatgaatgttctattttgctgattgatgatgacgttgatgtacttgacgcctacacccaaatgcttgagcaggcaggctaccgcgtgcgtggctttacccatcctttcgaggccaaagagtgggtagaagcggattgggaggggatcgttttgagcgatgtgtgtatgccggggtgttccggtatcgatcttatgacgctgtttcatcaggatgacgatcaactgccaatcttattgattaccggacatggcgatgtaccgatggcggttgatgcggtgaaaaagggcgcctgggattttctgcaaaaacccgtcgatccgggcaagctgttgatattaattgaagacgcgctacgccagcgccggtcggtcattgcacggcggcaatattgccagcagacgttacaggttgaattgattgggcgcagcgagtggatgaatcagttccgacaacggttacaacaactggcggaaacggacattgccgtatggttttacggtgagcatggcacaggacgtatgactggcgcccgttatctccatcaactggggcgtaacgcgaaagggccgtttgtacgctatgaacttacgccggaaaatgccgggcagttggagacattcatcgaccaggcgcaaggaggtacgctggtgttgagccatcccgaatatctgacacgcgaacagcagcaccatctggcgcgtttacaaagcctggagcatcggccttttcgtttggtgggcgttggtagcgcttcgctggtggagcaggcggcagctaaccagattgcggccgagctttactactgtttcgccatgacccaaatcgcctgccagtctctttctcagcgaccggatgatatcgagccgttatttcgccattatcttcgaaaagcctgcctgcggctcaatcatccagtgccggaaatagcgggggaattactgaaaggaataatgcgacgcgcctggccaagcaatgtgcgcgaactggctaatgcggcggagcttttcgctgttggcgtgctgccgctagcggaaacggtcaacccgcagttgcttctgcaggagccgaccccgcttgaccggcgcgttgaagagtatgagcgacaaattattaccgaagcattaaacattcatcagggacgaattaatgaagtggcggagtacctgcaaattccccgtaaaaaactttatctgcgcatgaaaaaatatggtctaagtaaagagcattataaattctga

SEQ ID NO: 403291 - DNA, 255 bp, Salmonella enterica
gtgacgtggcagacgcagggagaggcgctggaggtttatattgcagataacggccctggctggcctgtggcgctgttgccctctttactcaagccgtttactaccagtaaagctgtcgggttgggtattgggctgtcgattagcgtgtcgctgatggcgcaaatgaagggcgacctgcgtctggcgtcgacgctgacgcgtaacgcttgcgtggtgctgcaattctctgtaacggatgtcgatgatgttgaatga

SEQ ID NO: 403292 - DNA, 1314 bp, Salmonella enterica
atgatggataaaggcttccacgccctctttcatcgaaatagagttgacgatgcctttaccctgaatgcacttcagccctttttcgataacctcccatttggaggagtcaatcatgattggtacacgggcaatgtccggctcaccggcaatcaggctgaggaaacgcaccatcgccgcttcggcgtcgagcatcccctcatccatattgatatcaataatctgcgcgccgccttctacctgctgacgagcgacatccagcgcttcgctgtatttctcttctttgatcaagcgcttaaatttggccgagccggtgacgttagtacgttcgccgacgttgacaaacaggctatcgtcgccgatattcagcggctccaggccggaaaggcggcaggccaccgggatatccggcagctggcgcggcggcaaaccggcaacggcgcggctcatcgccgcaatatgctccggcgtggtgccgcagcagccgccaacaatattcaggaagcccgcttccgcccattcgcgaatctgtttcgccatggtgtcggcgtcgaggtcgtactcgccgaaagcgttcggcaggccggcgttcgggtgcgcggtgacgtagcattcggcaatccgcgacagttcctggacgtactggcgcagctcatcaggccccagcgcgcagttaaggccaaaagtgagcgcctcggcgtggcgcagcgagttataaaaggcttcggtcgtctggccggaaagcgtacggccagaggcgtcggtgatggtgccggaaatcatgatcggcagatcaacgcccagcgcttcaaactcttctttcaccgcaaacaccgccgctttggcgttgagggtgtcgaagacggtttcaatcaggatcaggtccgccccgccttccaccagcgctttggtggattcacggtaggccgccaccagctgatcgaaggtgatattacgaaacgccgggtcgttgacgtccggcgaaatggaggccgtgcggttggttgggccgagcacacccgcgacgtagcgcggtttgttcggcgtacgcaccgtccattcatcggcgcaggcgcgcgccagtttggccgccgcatagttaatttccgccgacagggattccatccggtaatccgccatcgcaatggttgtcgagttaaaggtgttggtttcgatgatatccgcgcccgcctcaaagtaggcgttgtggatagcggcgatcacctccggcttgctgaggaccagcaggtcattgttgcctttcaggtcgcagggccagtcggcaaagcgctccccgcggaaatcttcttcatgtag

SEQ ID NO: 403293 - DNA, 249 bp, Salmonella enterica
atgcggcagctcgcgtttgatgtcctcacaggcgccgataaagtcctgcgcgtagttgttgtgctcttcaataccggtggcgacggcaaagatattcgggtcgaaaatgatgtcttccggcgggaagcccacctcttcggtgagaattttgtaggctcggcggcaaatttcgattttacgctcgcgggtatcggcctgcccctgctcatcaaaagccatcaccaccactgcggcgccatagcgacgtag

SEQ ID NO: 403294 - DNA, 1518 bp, Salmonella enterica; identical to SEQ ID NO: 382234

SEQ ID NO: 403295 - DNA, 273 bp, Salmonella enterica
  misc_feature (128)..(137): n is a, c, g, or t
atgaatgtaaaaaaattattcgccctaaaagccccatgtaaaaactgcccattcctgaaagaaaatggcatcgagttagtcgaagggcggcttgatagcatcaaagaggacttgatcaataatgatgnnnnnnnnnngtcttactgtatgggtgcaatggcatacctctatgcaaagaaccgcctgaatgttccaacccgaatcggccttgttatgggaatgtgtgacattgaagacatcaaaaacaccatccctttcatcaaaatagagtaa

SEQ ID NO: 403296 - DNA, 231 bp, Salmonella enterica
atgggtctccaccagcatcccgtcattattgccggacttgagctcattcaatctgtcgcgcaggtcatcaacaatctgattttcaattcgcgccagggtatatacctgctgctgctcgttctgcacctcgcgcgaacgttgcaaatactgcgctgcatcgccctgattcgcctcaatttgatcgagcagcgtcccttgctgccaggtaaaatcctgtaccagcgaatttag

SEQ ID NO: 403297 - DNA, 162 bp, Salmonella enterica
atgcgccagcgtggtcatggtctggccgactaccgccagtttcgccgtctgaatcaactcatcctgcatggcgcgcaggtcggcttctatctctttgcgttcggcgacctcttgttcaagctgcctgcgttgcatattgagctggcccagcgtatgacgtag

SEQ ID NO: 403298 - DNA, 1344 bp, Salmonella enterica; identical to SEQ ID NO: 373904

SEQ ID NO: 403299 - DNA, 297 bp, Salmonella enterica
  misc_feature (147)..(156): n is a, c, g, or t
ttgaatatttctgatatgagcgtagtgcctgtaagcactcaatcttatgtaaagtcctctgcagaaccgagccaggagcaaattaatttttttgaacaattgctgaaagatgaagcatccaccagtaactccagtgctttatctgtnnnnnnnnnnagtaactccagtgctttattaccgcaggttatgttgaccagacaaatggattatatgcagttaacggtagacgtcgattatcttgccagaatatcaggcgcagtatcgcaagcgcttaataagctggataacatggcatga

SEQ ID NO: 403300 - DNA, 1374 bp, Salmonella enterica
gtggaccatttgcctatattttgtcaattacgcgaccgcgactgtctgatcgtcggcggtggcgatgtcgcagaacgcaaagcacggttactgctggaagcaggcgcacgtttaacggtcaatgcgctaacctttattccacagttcaccgtatgggcaaatgaaggcatgttgactctggttgagggtccgttcgacgaaacgcttctcgactcgtgttggctggcgatcgcggccaccgacgacgataccgtcaaccagcgtgtcagcgacgcggcggagtcacgccgtatcttctgcaacgtggtggatgcgccgaaagccgccagctttatcatgccctccattattgaccgctcgccgctgatggtcgccgtctcctcgggcggcacctccccggtgctggcgcgtctgctgcgtgagaaactggaatcgctgctgccgcagcatctggggcaggtcgcgcgctatgccggacaactccgcgcccgagtgaaaaagcagtttgccacgatgggcgagcgtcgtcgcttctgggaaaaatttttcgtcaatgaccggctggcgcagtcgctggcgaatgccgatgagaaagcggttaacgcgacaaccgaacgcctgtttagcgaaccgctggatcaccgtggcgaagtcgtgctggtcggcgccgggccgggcgatgccggactgctgacgctgaaagggttacaacaaatccaacaggcggatatcgtggtttacgatcgcctcgtctccgacgacattatgaacctggtacgccgcgatgccgatcgggtctttgtggggaaacgcgcgggttaccactgcgtcccacaggaggaaatcaaccagatcctgctgcgtgaagcgcaaaaaggtaaacgcgtggtacgcctgaaaggcggcgatccctttatctttggtcgcggcggcgaagagctggaaacgctgtgtcatgccggtattcctttctcggtagtgccggggattaccgcggcttccggctgctccgcctactccggtattccgctaacccatcgcgattacgcccagagcgtacgtctggtcaccggtcacctgaaaaccggcggcgagctggactgggaaaacctggcggcagaaaaacagacgctggtgttctacatggggctgaatcaggcagcgactatccaggaaaaactgatcgcattcggtatgcaggccgatatgccggttgcgctggtagaaaacggtacctctgtgaagcaacgcgtcgtccacggtgtgctgacgcagcttggtgaattagcgcaacaggttgaaagcccggcgctgattatcgttggccgggtcgttggcttacgcgataaattaaattggttctctaattattaa

SEQ ID NO: 403301 - DNA, 219 bp, Salmonella enterica; identical to SEQ ID NO: 381709

SEQ ID NO: 403302 - DNA, 471 bp, Salmonella enterica
gtgaggattaactttactcaggtgagtgaggatttgctgatactgactgtcttcatcgtcaccgatgcggtggcattcatcgacaatcaacagcgaaaactcctcctggaaggcgtcaagattacgcgccaccgactgtacgctgccgaacacgactttgccctgactctctttacgtttgagtccggcggcgaaaatatccgcttccagccccagcgcgcaatatttggcgtggttctgcgcgaccagctctttcacatgcgccagcaccagtacccgtccgcgggcgacgcgcgccagttcggcgatcaccaggcttttacctgcgccggtcggcagaacaatcacggcgggcgtacggtggcggcgaaagtggctgagcgtggcgtctacggcttcttgctggtaggggcggagtgtaaaaatcatggtctcactacgttaaacggttccgggaatagtatgccatga

SEQ ID NO: 403303 - DNA, 525 bp, Salmonella enterica
gtgtggggcgtcaaagccggtggtcagcaccgagacgttaaccagatagcgaaaacgctgcgccttgaaattatcaatcagcgcgtcgcgctcgggccctggcgtatcgccggtaatcagcgccgcgtcgtccgccggaagcagaccgacaatctctttcgcatgttcgaccgtggcggcgaaaatcatcacgcctttgcgcgtttgcgcaaattccataatctggctgatgatgtgcggcgtaatccgctgctgctttttcagctcgcggttcaggtcggcttcgctgaacagcccattgctttgggcctgcaggcggctgaaatcgtattggaccactggcatatcaagccgctcaggcggcgtcagatagccgtgtttaatcatatagcgcagcggcagttcataaatacagtcgcgaaacagagcgttgtcgttgccgcgcaccataccgtgataatgaaattgataaatccagccttttccgaggcggaagggcgtggcggtgagcccaagcagacgtaa

SEQ ID NO: 403304 - DNA, 255 bp, Salmonella enterica
atgcctatcattggttggaatgaacttgaaaaaattagccttgaatacattactggtaaggtaaacgccattgtcagcaaattgatccaagagaaccaacttaaagcttatgatgatgatgtgcttaaaaacttactcaatggctggtttatgcatatcgcaatacatgcgaaaaacctaaaagagcttgccgataaaaaaggccaatttattgctatttaccgcggctttttattgagcttgaaagataaataa

SEQ ID NO: 403305 - DNA, 903 bp, Salmonella enterica
  misc_feature (775)..(784): n is a, c, g, or t
atggcaaataccctgtctgagcttttccttttaaagggagagttgatcacgactgatccctttggggaccgtgaaaccagctactggtcggtaccacaaggttcatgccatgaatggattcaatcgctgaccaccagcgaaggtcctgaacgtaaattcgttagtttccgtatttctttcgataacaatgacgaacggtgtgatcttgtaaagaagaatgcccgtatgcttggttgttatcttttgccttatttcgtcgatttgacacgcacggtgggcgcattcattaatttgccaggtagtgtctcttttaaacaagtacagcgcatcaaaccccagattcatccagaaacaacacatagtcatatagttactattgaggactctccctttctttctcggttaaaatttaaaatcattactgccatagatcggcttcctgaccctaatggcctttatacaaacacctttaacagcattattgaccgtgcactgctgactcatctcaaaaccgaacaggaaaaaatagatagtccaagagtctgcaaaaatgtgatttcggcttttgccgactcaactctttctctgccggtgtttaacatcggcctaaacgagcagtacagatactggacgccgtggggcatcaactttatagaattttcccgccaggccgcaaaagcaaggaccgctgtatttgttcctgatgtgggacagatcgagtggaaaagcgcagagcataaagaactggcggagttaagcctcatcgaccaaatcnnnnnnnnnntacctaaacagtaccactggctcctgggtatcccgacgatgtggcgtaacaactattgcaatcacgatcagaggctagctctttttcgtgaatggagggaaagcaatggctgcggataa

SEQ ID NO: 403306 - DNA, 450 bp, Salmonella enterica
  misc_feature (333)..(342): n is a, c, g, or t
atgatggaatttaaaaaaaattatttttggcatgtatctgtaatcattattggccttgtcattggcttagtgcatcacatttatatttatccgaatttttttcacgcagattcagcagcatatcaagttttagcttcagccataagagatgaagggggcttacttccacatgattttttctacggcaaccaacttattatgctaaaaataagcccattcatagccttagccaactacattggtttttcaggatataaggcttatgcaataggcggtgcaatagcgatctgcgtttggttttatatttgcaatctaattatctctaaatattgnnnnnnnnnngtggaaataaatatttttcacttttactatcaacttgcttattcattccgcttggtatggatgatattgattttttacttggtcaggaatcgcatctttcgaatgtag

SEQ ID NO: 403307 - DNA, 156 bp, Salmonella enterica
gtgacttccaacggcaaaagcgccagcgcgaaaagcctgtttaaactgcagactctgggcctgactcaaggcaccgtcgtcaccatctccgcagaaggtgaagatgagcagaaagcggttgaacatctggtcaaactgatggcggaactcgagtaa

SEQ ID NO: 403308 - DNA, 1020 bp, Salmonella enterica; identical to SEQ ID NO: 403275

SEQ ID NO: 403309 - DNA, 1713 bp, Salmonella enterica; identical to SEQ ID NO: 403278

SEQ ID NO: 403310 - DNA, 258 bp, Salmonella enterica
atgggcacaaccctaagcgaggctctggttttcaaattgttccggactgagaccgccacaggcactgtgacgacgccaccgattgtaatcacactcaatataattaaacactgctgtccgcattatttcccggctgacaaagtcctctccgtggatacattccaccttcagcgtatggaagaagctttccgcacaggcattgtcgtaacaacaacctctggcgctcatacttccccgcagattatggcgtttcagtaa

SEQ ID NO: 403311 - DNA, 1710 bp, Salmonella enterica
atgatgagcattgcacaggtccggtcagcggggagtgccgccggttattacagcgacagggataactactacgtgctgggcagtctggaggaacgctgggccggaaaaggcgcggagcagctggggctgcagggcgccgtcgataaggaggtgttcacccgggtactggaaggcagactacccgacggggctgatctgagccggcagcaggacggcggcaacaaacaccgccccggctatgatctgaccttctctgcccccaaaagtgtttccctgatggccatgctggcaggcgataaacgcctgactgaggcacacaaccaggcggtggatatcgctgtccgtcaggtggaagcgctggcctccaccagggtgatgacggacgggcagtcagaaacggtgctcaccggtaatctggtgatggcgctgttcaaccatgacaccagtcgtgaccaggagccgcagctgcatacccatgccgtggtggccaacgtcacgcagcatgacggggaatggaagaccctgagcagcgataaggtgggaaaaacgggatttatcgagaatgtctatgctaaccagatagccttcgggaagatttaccgcgcggtgctgaaagagaaggttgaagcgctgggctatgaaacggaagtggtcggtaagcacggtatgtgggagatgcccggtgtcccggtggaggccttttccagtcgttcgcagactatacgggaagcagtaggtgatgacgcgtcgctgaaatcccgggatgtggcggcgctggatacgcgtaaatccaaacagcatgtcgatccggaagtgaaaatggctgagtggatgcagaccctgaaagataccggttttgatatcagcgcataccgtgaggctgcggacaggagggcggaaatacaggcagcgcagcctgttccgtcacaggagcagccggatattcagcaggcggtgacgcaggccattgccgggttaagcgaccggaaggttcagtttacgtataccgacgtgctggccagaacggtcgggatgctgccgccggaagccggcgtgattgagaaggcccgggccgggattgatgaagccatcaaccgcgaacagcttatccccctcgaccgggagaaaggactgttcacctcaggtattcatgtgctcgatgagctgtctgtccgggcactcagcagcgatatcatgaagcagaaccgggtgaccgtccatccggagaagagcgtgccccgcacgggaagttacagcgacgcggtgagtgtcctggcccgggaccgcccgtcactggccattatcagtggtcagggcggtgctgccggtcagcgggagcgggtggcagaacttacgatgatggcccgggagcagacgctgattgtcacgcatctgaatgaggatcgtcgggtgctgaacagtatgattcaggatgcactgacgaaaccgagtgagcagcaggtcactgtccctgtacttaccaccgcgaatatccgtgacggggagctgcgccgtctgtccacctgggagaatcatcagggcgcgcttgccctggtggataatgtgtatcaccggattgccggtatcagtaaggaggacgggctgataaccctgcaggatgccgacggcaacacgcgcctgatttccccccgggaagcagcggcagagggcgtcacactgtacaatccggaaacagatggccggttttga

SEQ ID NO: 403312 - DNA, 210 bp, Salmonella enterica; identical to SEQ ID NO: 373825

SEQ ID NO: 403313 - DNA, 585 bp, Salmonella enterica
atgattgcgcgcgtaatgcttctgcttgtcgcactggttagcgctggcgcccaggcccaggaaatcaaagaaagctacgctttcgccgtactcggcgaacctaagtatgcttttaactttgatcactttgattatgtgaatcctgctgcgccgaaaggcggtcagatgacgctttccgccattggtacgttcgataatttcaatcgctattcgctgcgcggcaatcccggcgtacgtaccgaagccctttacgatacgctttttaccacttcggatgatgaacccggaagctattacccgctgattgccgcccatgcccgctatgccgccgactattcctgggtggaaatctcgattaacccccgcgctcgttttcacgatggcacgcccattaccgcccgcgatgtggcctttacctttcataagtttatgaccgaaggcgtaccgcagttccgtctggtctataaaggtactaccgtgaaggcgattgcgcctttaaccgtgcgaattgagctggcgaagcctggtaaagaagacatgcttagtcctgatgaatcccctaatgattttggtaaaaatcattaa

SEQ ID NO: 403314 - DNA, 234 bp, Salmonella enterica; identical to SEQ ID NO: 381217

SEQ ID NO: 403315 - DNA, 759 bp, Salmonella enterica
atgcccgatttcagcgcctttcagctggaaggttgtaaagtgctggaatacgcgcgtcacaagcgtaagctgcgtttaggcgcgctgaaaggcaatgcctttacgctggtgttgcgtgaaataagcgatcgccgcgatgtcgaaacacgattgcaggcgattcgcgatggcggcgtgccgaactatttcggcgcacagcgattcggcattggcggcagcaacttgcagggcgcgctgcgctgggcgcaaagtaacgcgccggtgcgcgatcgcaataaacgcagtttttggttgtcggcggcgcgtagcgcgttgtttaatcaaattgttcaccagcggctgaagaaaccagactttaatcaagttgttgacggcgatgcgctacaattagcggggcgtggaagctggttcgtcgcgacatctgaagaactgcctgaattgcagcgccgggtagacgaaaaagagctgatgattacagcgtcgttgccgggcagcggagagtggggaacacagcgtgcggcgctggcgtttgagcaagatgccattgcccaggaaacggtgttgcaatcgctgttgctgcgcgaaaaagtagaggcgtcgcgcagagcgatgctgctttatccgcaacaattaagctggaactggtgggatgacgttaccgtcgagttacgtttctggctgcccgcaggcagttttgccaccagcgtagtaagggaactgatcaacacaatgggtgattatgcgcatattgctgagtaa

SEQ ID NO: 403316 - DNA, 240 bp, Salmonella enterica; identical to SEQ ID NO: 373850

SEQ ID NO: 403317 - DNA, 720 bp, Salmonella enterica
  misc_feature (179)..(188): n is a, c, g, or t
atgactcaaaaccagggttctgagccagtaccggcgagccggacagggcagctcatcagcgcccgggatatggccatgcagaaattcgaagaagggatgcggttaatctcggaagcgtcggaactgtgcggtctctctctcttcaccagcagaattatgcagcccaacgcatttggtcnnnnnnnnnntatggaccggtactggaaccataagcaaaaagaagcctttaacgaatcccttcgtacggatccgcccgtcgcttccctggagattgttaagggaacattacagcatgcactggctaacagacgagacacccttgcagaaggtttcgttgatgttctcaacaagcttgaccgaagtttcaaaagcaatgccaggcaatatacaatgccaaaaaagcttgttcttcgggggatttttcctggtgtgaacgtgctgaggtacaacggtttctcgcaggacaatcacttttgtttacgcgactttgagaatattgtatgcatctgttctgatactccaacacctgcaaccggcggtgggctgagtatggtcgacaggctgacggccatgagaaatacagaattcacaggcgaggtcagtgatgagaatggctggcggtgtcgcctgtttgagaatggaaacgttcatatttgcatcgacagtatctcgcttctgaatgctctgaacgatcttatcagcatatattttgcgggttaa

SEQ ID NO: 403318 - DNA, 2250 bp, Salmonella enterica
atgttgattccgtctaaattaagtcgtccggttcgtctcgaccataccgtggttcgtgagcggctgttggctaaactttccggcgcgaacaatttcaggctcgccctggtaaccagtcctgctggctatgggaaaaccacgcttgtctcacagtgggcggcgggcaaaaatgaattaggctggtactctctcgacgaaggcgataaccagcaagagcgattcgccagttacttaattgccgctatccaacaggccaccggcggacactgctctaccagcgaagcgatggcgcaaaaacgtcagtacgccagcctgacgtccctcttcgcacagctctttattgaactggcgcaatggcatcgcccgctttatctggtgattgacgactaccatttgattaccaatccggtgattcacgacgcgatgcgctttttcttacggcatcagccggaaaatttcaccctggtggtgttatcgcgtaatttgccgcaactgggcatcgctaatctgcgcgtgcgcgatcagctgttggaaatcggcagccagcagttggcttttaaccatcaggaagcaaagcaattttttgaccgtcgtctttcgtcgcccattgaagccgctgagagcagccgcatgtgcgacgatgtggccggttgggccactgcgctacagttgatcgccctctccgcgcgccagaaccatacctctgcgcatcactccgcccgccgtcttgccgggattaatgccagccacctttctgattatctggtggacgaagtactggataacgtggatgtcagcacccgacattttttacttaaaagcgcgatcttacgctcaatgaatgacgcgttgattgtgcgcgtgaccggcgaagaaaacggccagatgcggctggaggagattgagcgccaggggttattcctgcaacgcatggacgacacgggcgaatggttcagctatcacccgtcgtttggtagctttctgcgccagcgttgccagtgggaactggcggcggaactgtcggagatccaccgtgcggccgcggaaagctggatggaacaaggttttcccagcgaagctatacatcatgcgctggcggcgggtgacgcgcaaatgctgcgcgatatcctgcttaaccatgcgtgggggctgtttaatcacagtgaactggcgctgctggaagagtcattaaaagcgctgccgtgggaaagcctgctggaaaatccgcggctggtgttgttacaggcctggctgatgcaaagccaacaccgctacagcgaagtgaatacgctgctggcgcgcgccgagcaagagatcaaaggggtcatggacggcacgctacatgctgaatttaacgcgctgcgcgcccaggtcgctatcaacgacggcaatccggaagaggcagagcggctggcgaaactggcgctggatgagcttcctctcgcctggttttatagccgtattgtcgcgacctccgttcacggcgaagtgctgcactgtaaaggcgatctcagccagtctttatcgctgatgcagcaaaccgaacaaatggcgcgccatcatgacgtctggcattacgcgctgtggagcttaattcaacaaagcgaaattcagttcgcccagggattcctgcaggccgcatgggaaacgcaggagagagccttccagttgatcaaagagcaacatctggaacaactgccgatgcatgagtttctggtacgtatccgcgcgcaattgctgtgggcgtgggcgcgccttgacgaagcggaggcctcggcgcgcagcggtatcgctgtgctgtccaccttccagccgcaacaacagttgcagtgcctgacgttactggtgcagtgctcgctggcgcgcggcgatctggataatgcccgtagtcagcttaaccgactggaaaatttattaggcaatggccgttatcactgcgactggatctctaacgccgataaggtgcgtgtcatttactggcagttaaccggcgacaaaaaatccgccgccaactggttacgtcatactcccaaaccggcgtttgccaataaccattttctgcaagggcaatggcggaatatcgcccgcgcgcagatcctgctgggcgaattcgagcctgcggaaatcgtgctggaagagttaaatgagaatgcccgtagcctgcgcttaatgagcgatttaaaccgcaatctgctgttactcaatcagctttactggcaatccgggcggaaaaacgacgcccagcgctga

SEQ ID NO: 403319 - DNA, 339 bp, Salmonella enterica
atgtttaaatcttttttcccaaagccagggccgtttttcatgtcggcgtttgtttgggcgctgatcgccgtcattttctggcaggcgggaggaggagattgggtggcgcgacttgtgggggcatccgatgaagtgcctatcagcgcagcgcgcttctggtcgctggactatctgattttttatgcttattacctgatttgcgtggggttatttgcaacgttctggttcatctatagcccgcaccgctggcagtactggtcgatacttggcacctcgctcattatttttgtcacctggtttttggtggaggttggcgtcgcggttaacgcctggtactga

SEQ ID NO: 403320 - DNA, 1554 bp, Salmonella enterica
  misc_feature (877)..(886): n is a, c, g, or t
atggcaaataccctgtctgagcttttccttttaaagggagagttgatcacgactgatccctttggggaccgtgaaaccagctactggtcggtaccacaaggttcatgccatgaatggattcaatcgctgaccaccagcgaaggtcctgaacgtaaattcgttagtttccgtatttctttcgataacaatgacgaacggtgtgatcttgtaaagaagaatgcccgtatgcttggttgttatcttttgccttatttcgtcgatttgacacgcacggtgggcgcattcattaatttgccaggtagtgtctcttttaaacaagtacagcgcatcaaaccccagattcatccagaaacaacacatagtcatatagttactattgaggactctccctttctttctcggttaaaatttaaaatcattactgccatagatcggcttcctgaccctaatggcctttatacaaacacctttaacagcattattgaccgtgcactgctgactcatctcaaaaccgaacaggaaaaaatagatagtccaagagtctgcaaaaatgtgatttcggcttttgccgactcaactctttctctgccggtgtttaacatcggcctaaacgagcagtacagatactggacgccgtggggcatcaactttatagaattttcccgccaggccgcaaaagcaaggaccgctgtatttgttcctgatgtgggacagatcgagtggaaaagcgcagagcataaagaactggcggagttaagcctcatcgaccaaatcatacctaaacagtaccactggctcctgggtatcccgacgatgtggcgtaacaactattgcaatcacgatcagaggctagctctttttcgtgaatggagggaannnnnnnnnnaagcaatggctgcggataatacaagcagagcagcagtgctcagaacaatgcttttttttggcatggtcatttattttggttacagcctggctttccagaatactgaggagctcaaatatcagattactcaggaggttaatgcaagccggtccatcatatcaaatgaccgttggaagtctgttattgcaaatagtgaagcgactttaaattggttggtacatgactataagttaattgactatctgaatactattctgatccctgacaccaaaaaaccagccagaggtattaacattgttgctgaaaaatttacctctattaattacactatggccaaaaacatacccctcttactttatcagtccattttccggtggaacttaatcctggggtggctaatcgtttttctgccctatctatttgccatgctagcagatggaatgtaccagtggaaattgaagaggtacgtatttggtaaggttacagttcagttttatcgtatttggtttcgagcattttgggtgatcagtgctttaacgatggtctacctggtcatgccgaatatgtcactatttaacaatatcgctcaacttttcccaccagtcgctttattgatactgggaattgcattgaatcgcttgtggtctaactttcaaaaactcatgtaa

SEQ ID NO: 403321 - DNA, 483 bp, Salmonella enterica
atggttacgctttggggaaattatgaggggatctctcagtacttcgcctggatggtcctgattgttgctgcgctgaacgcatcaggtctttgctcaccggagattaaagccggggcgaaacgtctttctgacttcttctccaaacagctactgtgggtgctgatggtaggtgtgggtgtttgctacaccgatctgcaagagatcatcgatgccctgacgttcgcgaacgtcgttatcgccgcaatcattgtggtcggcgctgtcgttggcgcagctatcgggggctggttgattggcttctacccgattgaatcatccattactgcgggtctttgtatggccaaccgcggcggctccggcgatctggaagtgctctccgcctgtaaccgtatgaacctcatttcatatgcacaaatttcctctcgtctgggcggcggtattgtgctggttatcgctagcatcgtgttcagcatgatggtgtaa

SEQ ID NO: 403322 - DNA, 207 bp, Salmonella enterica
atgcatgacatgtttaacgtcagagcgtttaaggaatggtggattcataacgataacatcaaaagtttcatcgggctggtacccaagaaagtcggtatgcaccagctcggcccctgtgctaaggacactatcgttcttcactgcaaggaatcgctcatcgttcaattcgatcccggtaatcaatgcatccggagccgccagttttaa

SEQ ID NO: 403323 - DNA, 414 bp, Salmonella enterica; identical to SEQ ID NO: 380623

SEQ ID NO: 403324 - DNA, 339 bp, Salmonella enterica
gtgatcgaaaactttggcgcttccgaagggggcaataaagggatcgacattgcaggcagtaagggacaggctatcgtcgcaaccgctgatgggcgcgtcgtatatgccggtaacgcactgcgtggttacggtaatcttattatcatcaaacataacgatgattacctgagtgcctacgcccataatgatacgatgctggtccgggaacaacaggaagttaaggcggggcaaaaaatcgctactatgggtagcaccggcaccagctctacacgcttgcattttgaaattcgttacaaggggaaatccgtaaacccgctgcgttatttaccgcagcgataa

SEQ ID NO: 403325 - DNA, 414 bp, Salmonella enterica; identical to SEQ ID NO: 380623

SEQ ID NO: 403326 - DNA, 1710 bp, Salmonella enterica
atgatgagcattgcacaggtccggtcagcggggagtgccgccggttattacagcgacagggataactactacgtgctgggcagtctggaggaacgctgggccggaaaaggcgcggagcagctggggctgcagggcgccgtcgataaggaggtgttcacccgggtactggaaggcagactacccgacggggctgatctgagccggcagcaggacggcggcaacaaacaccgccccggctatgatctgaccttctctgcccccaaaagtgtttccctgatggccatgctggcaggcgataaacgcctgactgaggcacacaaccaggcggtggatatcgctgtccgtcaggtggaagcgctggcctccaccagggtgatgacggacgggcagtcagaaacggtgctcaccggtaatctggtgatggcgctgttcaaccatgacaccagtcgtgaccaggagccgcagctgcatacccatgccgtggtggccaacgtcacgcagcatgacggggaatggaagaccctgagcagcgataaggtgggaaaaacgggatttatcgagaatgtctatgctaaccagatagccttcgggaagatttaccgcgcggtgctgaaagagaaggttgaagcgctgggctatgaaacggaagtggtcggtaagcacggtatgtgggagatgcccggtgtcccggtggaggccttttccagtcgttcgcagactatacgggaagcagtaggtgatgacgcgtcgctgaaatcccgggatgtggcggcgctggatacgcgtaaatccaaacagcatgtcgatccggaagtgaaaatggctgagtggatgcagaccctgaaagataccggttttgatatcagcgcataccgtgaggctgcggacaggagggcggaaatacaggcagcgcagcctgttccgtcacaggagcagccggatattcagcaggcggtgacgcaggccattgccgggttaagcgaccggaaggttcagtttacgtataccgacgtgctggccagaacggtcgggatgctgccgccggaagccggcgtgattgagaaggcccgggccgggattgatgaagccatcaaccgcgaacagcttatccccctcgaccgggagaaaggactgttcacctcaggtattcatgtgctcgatgagctgtctgtccgggcactcagcagcgatatcatgaagcagaaccgggtgaccgtccatccggagaagagcgtgccccgcacgggaagttacagcgacgcggtgagtgtcctggcccgggaccgcccgtcactggccattatcagtggtcagggcggtgctgccggtcagcgggagcgggtggcagaacttacgatgatggcccgggagcagacgctgattgtcacgcatctgaatgaggatcgtcgggtgctgaacagtatgattcaggatgcactggcgaaaccgagtgagcagcaggtcactgtccctgtacttaccaccgcgaatatccgtgacggggagctgcgccgtctgtccacctgggagaatcatcagggcgcgcttgccctggtggataatgtgtatcaccggattgccggtatcagtaaggaggacgggctgataaccctgcaggatgccgacggcaacacgcgcctgatttccccccgggaagcagcggcagagggcgtcacactgtacaatccggaaacagatggccggttttga

SEQ ID NO: 403327 - DNA, 3006 bp, Salmonella enterica; identical to SEQ ID NO: 10984

SEQ ID NO: 403328 - DNA, 522 bp, Salmonella enterica
atgattaaagttatcacacttttattgtttgcattactgactggttgtcagtcagtagaaagtaaaatcgaagaactcccgacagttggttttgaccctattctatacaataaaagtgaggcctttactgacggaaaagttactttacgtgtcgaaagttcaggaactgatgtttggcttgtcgccaagaatggaaccagaagttttattgagctttcaggcctaacgctaggtggtagtcgttgtgcttacaatgcccgtagtaagcaacttttgcccccaggcagcgtaagcacattcgtagttcctacggttggaatgcttggactttgcttcaacaatgaagatcaacttatgtttattaaccgtgcttttagcagaatctctcccaaagcaaaaggaaaagattctctttctcttttattttctgttagttacgattttcccggaaaagcggacctaatcaataaccacgattttcaagagttatatcttttatttttgaatgaggataatctatga

SEQ ID NO: 403329 - DNA, 234 bp, Salmonella enterica; identical to SEQ ID NO: 5269

SEQ ID NO: 403330 - DNA, 378 bp, Salmonella enterica; identical to SEQ ID NO: 382232

SEQ ID NO: 403331 - DNA, 489 bp, Salmonella enterica
atgcgaactataaaagcgattaacaactttaaagttgatttatttattactttttttcttattgcgctaggattttatcttcgaactatatttgtctctaagatgggcgctgatttaacaggtgtgatgttgttatttacacaactgactgcttatttaaatctcgccgagcttggcataggggtagctgcggcaagccttttatacaagccgctgagtgagggggattatgcaaaaataaaatacttaactttattgctgtctacaatctatagatatatctcgtttttagttttattgataggtatagtaattggctttggtatttactttttcatcgattctgttaatgcagtaagtcacgtttttatttattgggcattttttgtaataaatacatctttaacttattcttatgcaaagcattcaactctattaactgctgtctcttatacacatctgacgctgccgacgatactccttgtgtag

SEQ ID NO: 403332 - DNA, 807 bp, Salmonella enterica; identical to SEQ ID NO: 26387

SEQ ID NO: 403333 - DNA, 1398 bp, Salmonella enterica
atggctatacatgacgccgggatgttcaccgtgaaagaaatcaaccgcctcaaaattcttcaggatgtcgttgaacgtaacctgcgtcctggccaggctgccgagatgctcggcatcacgccacgtcattgcagccgtctgctgaagcgttatcgccagtccgggccgcttggtatgaacaaccagagtcgcggtcgcactggcaaccgcctgttgcccacatcactgactgaccaggcactgagtatcatacgagaacgctaccgcgattttggccccacgctggcccgggaaaaactggaggaagttcacggtctggtcctgggcaaggaaaccatcagacgccttatgataaaagccggactctggatcccccgaagacaacgcgcaccgaaaattcatcagccccgttaccggcggccctgtactggcgagcttatacagattgacggctgtgaccatcactggtttgaaaaccggggtcggccttgtacggcacttgtatatgtcgacgatgccaccagtcgtctgatgcacctgctgtttgttaaatctgagtccacctttagctattttgaagcgacccgtggctatatcgagaaatacggtaagcccatgatcctttacagcgataaagccagcgtattcagagtcaataataagcacgctaccactggtcccggtgaaacccagtttgcccgagccatgcgctgcctcaacattaccccgctatgtgcggagaccagccaggcaaagggccgtgtggaacgcgcccacctgacacttcaggaccggctggttaaggagctcaggcttaaagggatcagtacgatagaagccgcgaatgcatttgctgaggaatacatggcggattataaccggcgcttcgccaaagcccccctgcatgattttaacgcacatcggccgctggcattagacgatgacctggatgcggaatttacctggcgagagccccgtcgtgtatcaaaaagtctgaccgtacaatatgacaaaatgctctatctgattgaagacagcgaatacagtagaagggctatcggcaagtatattgatgtctggcactatcctgacggacataaggaactgcggttgaatggcgtgctactgccctactccacctacgaccgattgtctgaagtcgatcctgtcgcgattgttgataacaaaagactgggccatgtattggatgttgcccgccaggtccagaaaaaaagggacaataatcgctcccagtcgctaccttcaggagatgagccttcccgcagacgacatgctccaggcatcaacaaatcccagcgctcgctgaacgaagatgacctgcttgaagccataataaagcttcaaggaagctctgaggccatctttggtaaaaggtga

SEQ ID NO: 403334 - DNA, 276 bp, Salmonella enterica; identical to SEQ ID NO: 14803

SEQ ID NO: 403335 - DNA, 183 bp, Salmonella enterica
atgtctaaatcgaagctattaaagtcattggagatttcacgtactttattgcgctcacaaatcgatgttcttcgagaagaggctgaagaactgatcaccaattattggatcgagtggaaagaacggaatcacattgagaggaatttacccagggatagcaaaactctaaagaaggagtggtga

SEQ ID NO: 403336 - DNA, 294 bp, Salmonella enterica; identical to SEQ ID NO: 22504

SEQ ID NO: 403337 - DNA, 789 bp, Salmonella enterica; identical to SEQ ID NO: 6025

SEQ ID NO: 403338 - DNA, 318 bp, Salmonella enterica
atgaagcaaaagagaaacagcaagaagaggagcagtcgaaagacccgcatgacgatacagatgaatcatctggctctgagaatgaacctgataccgaaccccatggtgatagccagggtgaaggggatggtgataaagaaggtcaaggcgatgattctggtgatggtaaggcgcctgcggaaggtaatgggttaccggaccaatccggaggggatgaacaaaatgctgagaactctaacggcgaacctgatggtgagtctgaaggtgatgaatcggcgacccccggctcggatgatgctgactcgacaccttccctaa

SEQ ID NO: 403339 - DNA, 1044 bp, Salmonella enterica; identical to SEQ ID NO: 379968

SEQ ID NO: 403340 - DNA, 732 bp, Salmonella enterica
atgaccactcacagcggactctttaatcaggtgattttacactgtatgacaggcgtggactgcactgatggcacccgccagaaagctgcagcgctttatgaacagtatcttgcgcacccggcggtgtctccccacatccataatggactcttcggcaattatgacggcagcccggactggacaacccgcgccgcagataatttcctgctgctttcctcccaggattcagacacggcgatgatgctctccactaacacgctgttaacaatgctaaaccccactcctgacactgcatgggacaacttttacctgctgcgagccggagagaacgtttccaccgcgcaaatctctccggtagagttattccgtcatgactttccggtgtttctcgccgcatttaatcagcaggccacgcagcgacgctttggggagctgattgatatcatcctcagcactgaagagcacggggagctgaaccagcagtttattgccgccacgaaccagaaacattccaccgtgaagttgattgatgatgcctcagtgtcgcgtctgaacaccatttttgaccccttgcttcctgaaggcaaactcagcccggcacactaccagcacatcctcagtgcttatcacctgacggatgccaccccacagaagcaggcggaaaccctgttctgtctcagtaccgcattcgcacgctattcctccagcgctattttcggcactgagcactga

SEQ ID NO: 403341 - DNA, 240 bp, Salmonella enterica; identical to SEQ ID NO: 373608

SEQ ID NO: 403342 - DNA, 249 bp, Salmonella enterica
atgaaaatgacgaagccaaaaccggtaagccggatgaaaagaccgtttattagtgagcttgcagagctgggtttatcgggtgaaattctttcaattcgaactgacggcatgcaggggacgctcatacccgatcttaccgcaggggtgagtgaagcaggccgtgtgaaaaccggcaactgggtaatctctgacaagagaaccttcgaccatgtcgttctgtgtggggtcgtctcagaaaacggaaaataa

SEQ ID NO: 403343 - DNA, 513 bp, Salmonella enterica
atgttttcaaatgccccaaaaactttatttgaagacaaagacgttgaacgatggatttttaatcgtgaaattatattcaggattgctcaatatagagaaattataaagaaacttgatgatttaaaaaattcaagattattcagagtgctacttggtagcattatgattccatttagtaatgttataattaatggtaaaggacgccggtatagaaaaaactgggagattctttcattcacgaaaagtgcattcgatgaagctttcagactaaaggttgaagaagctatttttgatatagttcgatattccaatataaagtctggaacttatgatttcttcaacggggattcccgaagtgtacttagtagcttggattgtaaacaagatttaatagttttctcgccaccctatcctaatagttttgattacactgatatttataatgttgagctttgggcattaggttatctaaatagcgcaagtgataaaaatggatgcatcaccaatgcctga

SEQ ID NO: 403344 - DNA, 195 bp, Salmonella enterica
atggaacgtgtaatattttcagtaatcttttttatgatgctgggcgtacctttttaccttctttataaaattgcccgggacatttttggtaccgccggtgctggtgagcctgcacaattgcctcagggcaagcaaagacgctcaggactgatgaatcccctaatgatttttatcaaaatcattaagttaaggtag

SEQ ID NO: 403345 - DNA, 138 bp, Salmonella enterica
atgaacccattcaaaggccggcattttcagcgtgacatcattctgtgggccgtacgctggtactgcaaatacggcatcagttaccgggcactgttgcaaatagtcggtggtgataaacttatcatccccttttgctga

SEQ ID NO: 403346 - DNA, 651 bp, Salmonella enterica
atgatttccggaaaactccaggctgatatgcctgccgtcacgtttaatcccggcccgggcgattttgttgcattcgtcaacaataatacaattactgcttcaggtactggcaacgcatgcaatgtgacggttgatgatcgtgcgacatcaagcgtagataacttggtctgcttttttgaatggcttccaaatacctctggctttacagcaaacggattcaatttaacagggatacccaatgcggcaggagaactaaaactgccgtataaaatttcttatttttctggatcagaaaggcagaaagtagaagtggttaatggggagtatacagttaatgctcttgtaccggttaaaccgacgataacgggcctgaaatcgtctatgaatggagtggttcaggatggttacactcttaaatcctatcttaaggatgaagcaattaggaatgtcactgtctccgtagagcctcgcaattatgtgcaatatatctctatcgggtctggatcagcttgcgaagtcgcaattggtgggaatggctgcacgatcgatgttggaagcatcaaagtaagtgattcggatttgctgatgggttcacgggaaatcacggtcactgaaacaacattaaatgaaacacgtttaccatcaatataa

SEQ ID NO: 403347 - DNA, 630 bp, Salmonella enterica
gtggattttattcagaatcacgatcaggtcggtaaccgcgcccagggcgacagactgataaccctggcgggtgctgaacgaacaaaagtattgctcgccacgttgctgctttcaccgcatattccgctgctttttatgggcgaagagtatggcgaaagccgtccttttcttttttttaccgatttccatggggatttagcccgcgccgttcgtgaaggtcgcgcaaaagagtttgccgatcatgcaggggagaatgttccggacccgaatgcaccagagacctttcaacgctcaaaacttaactggaagcaacagcacagtgaagagggtaaagcgtggctggcgtttacccgcgaactactgcttttgcgccagaagcatatcgtgccgctgttgtccgctgcccgtgagagctcaggaacggtattgcaaaccgcgcccgggtttattgccgttagctggcgttttccgggaggaacactgtcactggcgctgaatattagcgccacgacggtattgctgcccgatttaccgggtaagactctcttcgcctggccgaatgaatccaccgggtcgctttcccaacattctcttattgtccgcttagcccagggagagtctgcatcatga

SEQ ID NO: 403348 - DNA, 144 bp, Salmonella enterica
atgaccaccgctattttgcaacttgacgaaatgatagtcagggatgataaacttctgtttacctgccgctatttctttagtaatgattttttgtcttacgatttcctgtccggccgtttttttataaccgttaagcatcaatga

SEQ ID NO: 403349 - DNA, 444 bp, Salmonella enterica
atggctgacgctaaattatccggaccagatgagaagttattttaccaaagccgtcgactatatcgaaagtgttgcaacatttattacatccaagtgagcatgatggtgaaaaaattcaaaaagttacttttagagttcattgtagcagttatgctttcgctttctataccgggtatggctatggcagcagatgctggagtccctggggctatgtgtcagtcagctggagtgtggcagggcttgattaagaatatctgttggagctgcatttttcccatgaggataatgggcataggggcagctccagaaggcgctgctccttcacgtccgggttgctactgcacagatcagaacggcgtaccggaaataggttggcaattgagcttctttcagccggtcgatctcctcttcgccctgttcatctttgggagttcccaatcatga

SEQ ID NO: 403350 - DNA, 387 bp, Salmonella enterica; identical to SEQ ID NO: 382213

SEQ ID NO: 403351 - DNA, 600 bp, Salmonella enterica; identical to SEQ ID NO: 31744

SEQ ID NO: 403352 - DNA, 420 bp, Salmonella enterica
gtgagtttgttggagcgcaggagagcctcagaagtaaaaaatgtagcaactaccaatttgaatgtcgtgtctaatatcgataaggctttacaccgtcttgaatttcacccactgaagcagggcgaatcttatcgcctttgtcgaactaactctttccctgttccgattgctcacatttttgcatttaggcctgaagggcaggaacgaaacgggaataaatatgctgagactgattattcagtagtaaaagcatccttgcccattttcgcagcaggcaacatacctcaattaaaaacgctctctgactgggctcctgaaaacagccagggtccgtccaaccaacggaagctgagcctgaaatatacagaactcgtgccgggggctgagctgggcattttcattgtcagccccgaaaattaa

SEQ ID NO: 403353 - DNA, 438 bp, Salmonella enterica; identical to SEQ ID NO: 373518

SEQ ID NO: 403354 - DNA, 231 bp, Salmonella enterica
atgctgagtcaagtcggcgaagcttatcagggtatgccgggtttgactgaacgaatcgactattatgatagctatgctacggaatatgtggatattgattttacccaggcaaaaataagcgacctctgtaaattgccaggatcatcaattgacaactgttccgcgtactatctgtcaatgattcgctcgcagaaactgttggaagagagcgggtatcatagaatcaattag

SEQ ID NO: 403355 - DNA, 765 bp, Salmonella enterica; identical to SEQ ID NO: 373650

SEQ ID NO: 403356 - DNA, 978 bp, Salmonella enterica; identical to SEQ ID NO: 204893

SEQ ID NO: 403357 - DNA, 369 bp, Salmonella enterica
atgtggcttatgaagacattactaacatcggggtgtactaatcaacggggagcaggtcagattcattgcaccatcttctcaccgaccgcgtcagcctctctgcgtatgttaccggaacagcacgccgcagaagcgcgctatcctattcctgttgaggatttccatttcagtattttcactgcggtgaacaatcaaacggtaatgacatccagcgctgaaattgtgttagtgattgaggggaccgcgacattaagccatgccagcggcgagagccttttgcttcacgtcgggctgtcagcatttatcccagcctccatcgggcgatggttgctgactacgactgggaaagtctgtcgagtatcgtgttaa

SEQ ID NO: 403358 - DNA, 2208 bp, Salmonella enterica
atggctttagaacaagttatctacaaccttgaagaggttaaagggctctctgatgaagagctttaccaacgcctttatgatagttggggcttggaaaatcataaaattgatgtctggggtgaactgagtattaacgtggcagggaactgggctggtatccgtaacgcaaaaactcttagtggcaaccaaagcatagaataccctctggctgattcgcatgaattgcaatcaggtgtgtttttaaccccatcagtagcaaaaatagtgttaggcaatgacactaaagggatggttgcttgtgaactgatgttagcatccatcccgcaaagagctaaaaaaaacaacccatttctattagccgtcaatgataagacggttgagcgtttgacctatctgcccgatgcattacctaatttagatcggcaagccctaattcaaaatgaagatgaaacactgctacgcaaagttatttatgacgcagaagttaagcgcgttaaacataaaatcgcctcagaaacagaagcgttagaggcagcgttgcaagaaaaacaacaggatatgactgacaagttggcggagttgtcagacgcattcaaaagtacacaggataaaatcacagcatcaacgacagagcttgaaagctcaatcaagagaaatgaagaactaaataatgataatcatcggctaaatctgaagattcaggaaagcaaagctgagttagacgtcattatcgaaaagagccgaaaagtagaggaaagtatggcaagaaaagtcgagaaactaacagatttcatcaaagagaaagccatcttcctgaagagttttgagtttttggatgaggaagatttcgacttttttgttggaagccccttgtctaataaggagcgtggtgaacatatctctttttcacaagccctttattcaaactacagcgatgcagtttcttacattcaagcgtacctcaaagaacgagacatcctgtaccctcgccatattatcgagaacttcctaacgcttattcgcaccaatgatctcatcattctggcgggggactcaggctcaggcaaaacaaacctggttcagtcgtttgccaaggctattggtggggtatctaagatcattccggttaagcctaactggactagttcagaagatttgctgggctattacaatcccctagagaagaaatatttggcgacaccatttcttgaggcattgatcgaggctaagcaaaacccagatatcccatacttcatctgtttagacgaaatgaaccttgcccgagtggaatattactttgccgactttctttctaagctagaggagcgtaacgagcaaccgaccattcaactttactcggatgatgaagctgcacacgttcttgccgagctaaaaggggttgtttctgtcatttctaacgcgcaagaaaagttcagcaaaaatggcatcgtggacttcgttgcgctcatgcaagatgaagaaattaacgctgaaatgaagcgcgcgtttggctttagcgataaagactcactgattaaataccacggtgatatcagacgtatgttggcaggtgttctcggcacgccttcgtcaatcacgattccagcgaacgtaagaattattggtgctatcaacatcgacgaaacaacccattacctctcaccaaaaatacttgatcgtgcacacgtgatgaagttcaagagtcctttgctgaccgactgggatgctatttttgatgagattgactcttacgggctcgacgacgttactttaccgctagtgtttgatattgaagagcttggtgagcgtaccccttatccgaaatttgaacgtttgaatgaattctgcgagttatttacgactttaaaccgcgatgttttcgacccgcttggcgtggaatttggtatgcgaactattcgacaagggcttaactatgtaagtttatttagcgatgtaaacgataataagtctctggccatcaacaactttatcgttcataaggtgctaccaaaattcacatttgatggcgataagcaagtgggtgattacagtaaagctgagcttgttagccgtgtattcttacctcgccttgagtcgctgctggacaaccaagtagaaatagcggcggagttttcatgcaccaaatcgatagagcgtttagttaaaacggctgaatcgaatgatggcgttgtgaactactgggcgtaa

SEQ ID NO: 403359 - DNA, 150 bp, Salmonella enterica; identical to SEQ ID NO: 204900

SEQ ID NO: 403360 - DNA, 1074 bp, Salmonella enterica; identical to SEQ ID NO: 204899

SEQ ID NO: 403361 - DNA, 387 bp, Salmonella enterica; identical to SEQ ID NO: 382213

SEQ ID NO: 403362 - DNA, 426 bp, Salmonella enterica
atgaagttcattcctgcagtatcagaagccagcatagtaaaaattcctttgttcacagagcgatgccctgcgggttttccgtcaccggcagcaaactatactgagtctgaactggatctgaatgagtactgcattcaccggcgccactccacctattttgtcagagcgattggcaactcaatgactgatattggcctctattccggcgatctgatggtcgtggataaagcagaacagccgcggcacggggatattgttatcgcggaaattgagggtgaatttacggtaaaacgcctgcttctgacgccgcggccagccctgcaggcgatgaacccggacttcccttccctgtacccggatccggaaactctgcaaattttcggcgtggtgacggccttcattcataaaacccggagggcagactga

SEQ ID NO: 403363 - DNA, 465 bp, Salmonella enterica
atgacaacggtgacgaagggcaagaggaagagcaggaatagtttagcctctgccgttgttgccggatgtgatatctcatcgatgttcaggccgccgcgcaggatgaaaatatcggatgcggtcagaaaatatatgcgcgtaccacgcgatgcgggaaattctgtggcatgggaatccaccctgaccccctatgtggtggaagccatgaactgcctgtcatcacgcagctacgatgccgtggtatttgtcgccccggcaagaaccggtaagacgctggggctgattgacggctggatttcctacaatattgtctgcgatccgtctgacatgctggtggttcagatgactcaggacaaggcgcaggagcactcaaagcggcgtctggcaaagatgtttcgccacagtccggcgatagcaagaagactcagccctgagagatcccctcataatttccccaaagcgtaa

SEQ ID NO: 403364 - DNA, 177 bp, Salmonella enterica
atgatcaaacttccagtaattcgttctgtggatattaataattatcaagtttatcaaaatgacactaattctggaatatcccatattattcatggcggagttcatttgatcattggtgttaatggacttggcaaaacaacattgctaaatgcgctgtggatgtttagtggtcaataa

SEQ ID NO: 403365 - DNA, 354 bp, Salmonella enterica
atgcctgattctttaactttgtcatcaacattagaaaaattagatgctaaagttaaactgctttggaataaaaacattccttcaatggtaaataactatttctatgatttaaatgttatcttagaaaactcaatgcgattgctcaataataacggaatggctgttgtcgttattggcgatagcaaatatgtagatgtgaaaattgatactgtaaaaataacatgtgaacttgctaaaaaaatcggatttacagttagagagactcaagaaattaggataatgaaagccagtgctcagcaagggtggtcaaaaagtctgagcgaaacagcaatatacttaggtaaagatatttaa

SEQ ID NO: 403366 - DNA, 684 bp, Salmonella enterica
atggaaattatgctggctggcatttgcccttgtaaagcgcggggaaagcagttaggatttaacgccgcggagatggggatgatcttcagcgcattttttatcggatacgccctgtttaattttattggtggctgggccagcgataaagttgggccaaaaacggtttttctcatcgcagcgttactatggtctgtattttgtggcttaactggtttggtcaccggattgtggacaatgcttatcgtgcgcgttcttttcggtatggctgaaggaccggtcagcgctgccggaaataaaattatcaataactggatttcccgaaaggagtctgccacggcgatcggaatttttagcgccggttccccgctcggcggcgcggtgtccgggccgattgtgggcctgttggcgttatccttaggctggcgccccgcatttggcattattttcttatttggcctggtctgggtattgctgtggtactttatcgttagcgataagccaacaatgagtaaacgcccggcgccggaagaacgcattgattttgaaaatcatgaggacgttattttatctgatgatggccgggctacgccttcactcggctattacatgaaacaaccaatggtatgggcgacaactctggcttttttcagctacaactatattctttttttcttcctgacctag

SEQ ID NO: 403367 - DNA, 228 bp, Salmonella enterica
atgaaacctgcatctgttatcattatggacgaacaccctattgtaagaatgtcgatcgaagttttactcggtaaaaatagcaatattcaggttgtcctgaaaacggatgatagccgaacagcgatagagtatctgcgcacttatcctgttgaccttgtcattctggatattgaattaccgggcaccgacggctttaccttacttaaacgaatcaaatctatccagtaa

SEQ ID NO: 403368 - DNA, 447 bp, Salmonella enterica
gtggtgcttaaaccgctctctttgacgattgaacctggcgaagtgctggcgctgattggcccatcaggatctggaaaaacgacggtgctgcgtgcggttgcgggctttgtgcaacctgcaggcggtcgtattctgattggcgatacggacgtcacccatctgccaccctataaacgcgggttggcgatggtggtgcagaactacgccttgttcccgcatctgaaagtggaagacaacgtcgcttttggcctgcgtgcgcagaagcagccaaaggcgctaattaatgagcgtgtaacgcaggcgctgaaaacggttggcatgagtgattacgccgcccgttatccgcatcaactttccggcggccagcagcaacgcgtggccatcgcccgcgcgattgccgtgcgcccgcgcgattgccgtgcgcccgcgcgtgctgttgctggatga

SEQ ID NO: 403369 - DNA, 360 bp, Salmonella enterica; identical to SEQ ID NO: 376730

SEQ ID NO: 403370 - DNA, 339 bp, Salmonella enterica
ttgcggatcttcgcggaagtctttataggcgacatggtggccttcggggtcgcgctgtttgaagatgccttgcttacggaactcctcaaaggtgggcagattcggaatggatttacgcgactgttcgtacagatgacgcatccactcttcttgcgtccgtccttcggtaaactgttgttccacgccaagacgtttcgccagttcgctggtcatctcataaatcgtcttacactcgaagcgcggtttaatcgcctggtcagtgaagataacgtaagacatgttcccgcaggaggcatccagcgcaaagtccatctgctcagaagcagtgcaatccggtaa

SEQ ID NO: 403371 - DNA, 417 bp, Salmonella enterica
atgcccaaacatcctatttatacccacttcttatctgaagaggcacaggccgtgattggcgaagtccacccgcaaacggcgccagcccgcgcggtgctggaaaaggaaggctttcgctatcgccactatatcgacatcttcgacggtgggccgacgctggagtgtgatattgaccgcgtgcgggctattcgtaaaagccgactggtggaagtcgcggaagggcaacccgcgcctggcgactatccggcatgtctggtcgccaatgaaaactatcaccactttcgggccgcgctggtgcgtgccgatccgcagacttcacgacttgtactgaccgccgcgcagttggatacgctgaaatgtcgcgcgggcgaccacgttcggctggtacgcctttgcgctgaggagaaaaccgtatga

SEQ ID NO: 403372 - DNA, 159 bp, Salmonella enterica
atggatgatgtttttggcatattgccatcatggatgtttaccgccatcgttgcggttatcgtcttactaattatcgggatcattttgctcgcctctatcgccgcgcatctgcggaacaggcatttgtccgtaccgggcttggcgggcaaaaagtggtga

SEQ ID NO: 403373 - DNA, 294 bp, Salmonella enterica; identical to SEQ ID NO: 373768

SEQ ID NO: 403374 - DNA, 141 bp, Salmonella enterica; identical to SEQ ID NO: 375644

SEQ ID NO: 403375 - DNA, 132 bp, Salmonella enterica
atgagaattgagtttgtagcgcgttctgggcaattttttctgctttgctggtactttctgtttaaaacggttctgagtggctcctgttacgttcaggggatggagcaaaaggaacgtatgacgtcacggtag

SEQ ID NO: 403376 - DNA, 531 bp, Salmonella enterica
atggttctcgcgctgatacgaaaatactggaagccattagcagaaatactgctggtggcttttttgttatgtgcgacagcgtactggtgttattcacgcgggtatcaggaggcggactcatcctggaaattgcagtgggcgcaacgtgaccttactgatgcgaccatcacattgcagcgtgaagtaaccgaaagagcagaagagcagcgccgccagctcgccgttgataaggaacgagagaaagccgatgaagaactggcaaaagtacaggctgatgctgacgctgctaagcgtgctcgcggtgggttgcaacagcagctcgccgaaatacaacggcaactcgcaacaagtgaaaccggcagaatttccgcgattgcagcagcaagccaggcaaaagccgagaccggaatattgctcgcccagctgctcggcgaagctgacgatctggcgggaaaattcgcaaaagaggctgatgagcgttatgtcgctggaagcgcctgtgaacgaacctacgacaaagtgacaaagtag

SEQ ID NO: 403377 - DNA, 417 bp, Salmonella enterica
atgacaactaagactccgcgtgggatccgcaacaataaccccggaaatattcgctggggtgacgattggaaaggcctggtcccaaaagatcaacgaacggacaaatcattttgccagttcactactcctgaatatggcatccgggcaatgattatcatcttgcgtaattatcagcgtaagtatggattggacacggtaagcggcattatcaaacgctgggcaccaccgaacgagaatatcacgcaggcctatatcaatagcgtggctcaggcgacgggcgttactcccgaccagcgcattgataccaatgacagtcgcttcatgattaagttgctacaagccatcattaagcacgagaacgggaaccaaccatacagctctgatacatttgatcgcgctgtcgaacaggcaggctaa

SEQ ID NO: 403378 - DNA, 294 bp, Salmonella enterica
atgaagaaaatcgatctcaccaaacaggcgcgcggtcgcatgtgtactgtgcgcattccaggtatctgcaattttgatccagaaaccagcgttcttgcccattatcgcatgagtgacacctgcgggatgggaatcaaaccacatgacatgcaaggcgcaattgcctgcaactgttgtcatgacgtaatcgatggccgtgtaaaaaccgatattgaacaggacactctgaggctatatcacgccgaaggtgttttccgtacccaacaaatctggagagaggaggcgtttatatga

SEQ ID NO: 403379 - DNA, 192 bp, Salmonella enterica
gtgttcaaaaagatggagatagggaagcaactccccgataacggtcgtgttctcataacctgcaagaatggtcaggtgacagcactcagaaaaatctatgatgatgagcatgtcgcatcgcttaagtctttgttagagctggctgaacaagcaggttgtgtcgttgttcaaagaggcaaaactaagatataa

SEQ ID NO: 403380 - DNA, 1224 bp, Salmonella enterica
atgattaaatggtatcgttttaaaaatttccattctttcaaagaagagcagtttgttgaccttactttgaaggcaaattcttcagaatcccctcttgaccagcagtggggtgatgatcgaatagctaaagttttagctgtaatgggtgcaaatggctcaggcaagtctaacatgataaaaccacttgcttttttaagctggttttgtagtgattcctttaaatctatggataactctgattctttacctatttatccacatatttgcaataaaagtgagccttctgagattgagatatgttttgtagagagtagaattaaagaggaggattcagaacactctgaatttaaatatttcttgaaatttaataagaaaagagtgttacatgaagaattgaaatataagacaagcagattattctcatctgttttctatagaaaatttgacgaagccacagagacttataaagttaaaagcggtgctaatgatttctctgcaagtgaactaaaaaatgtccctcaaaatgcctccgctatttcttattttagaagaaaaggtaataatctcattgcagatgccatgcattatattttttacagcattgaaaataatctcaatgtgtttggcaagtcgagctttaattatggtaaagttttagatgctacagaatgttatgaagaagacccagaaatttttgaaaaagcgaagaaatatctaaccagaatggattttggtttaaaagatattaaaataaaaaaagaagagataattgataaaaagacaggtgaaacagaaactcgagttttaccttatggcattcatatacatgacggccaggaatttgaagtaccattcattatggagtccactggtactcaagcgtgttattactttatttacaagttgatatccgcgctgcattatggtggtgtggccgttatagatgaattggacagtgacctccacccttatatgatccgcgaattattagatatgtttgcaaatgatggaataaataaacaatcgtcacaattgatttttagctgtcacacagcagaaatacttaaatcattgaaaaaacataatgtttatttagttgaaaaatcaaacagcattagcgaggcatggcgtcttgatgacattcagggtttaagaagtcaagataatttgtatgctaaatatattactggcgcgttaggcggcgtacctaatattaatatctaa

SEQ ID NO: 403381 - DNA, 531 bp, Salmonella enterica
atggctaaaaagaaagttgtacggcgcaccattaataaaactctgctattagttggggaaggatatgcggaaaaagcttttctttcccatctgaaatccttattttcaaatggaaaatttaaagttacagttattactgctggtggaaaggggcctgagcatataataactcacgcaatttcatgtaagaattgcgatggatatgattttgtcattgttcttctcgatactgatctttgttggcctaaaacatataaagaaagagcgatatccgctggaataaatcttgtcgggtcgcaaccgtgtcttgaaggtttacttttagatgttattggcaaacctaaagaaaatactaatagcgggtgcaaaaaaagacttcacccactactttctggtccatgtactgaacgtgatagttatgcggaattatttaacattgacattttagaaaaaaccacaaataaacagattcagttcataattgaagcacttaaaggtaaagaacatcgttcagtaataacgcacccataa

SEQ ID NO: 403382 - DNA, 681 bp, Salmonella enterica
atgaccgatttaatttatcctaaagtagcgacagctgacgatgcctgtgactggacaaacgtaatcatctggcggatgaacgcaggtgccagggctcgcagccgttcggtttacgtaccttgcccgcgtccggtccctgttccggggttaactgctcgcacggccccaaaaactaaaaagtcaaaacctgttgaaaccaacccatgctgtttcagtaagacgcataccggaactgttatttactcaggaggagagaagaccgtaaaacttcgcgaaacggcaactgtatggacttctggtagcaaagagaattacgacaaaaaaacagggtacagagttgggattaagagtcgttgcagacttttgcttgattccattaaacccattgcgaatcccactgaatccccattaccccaaaaatccagcgagctgccggctgaatacctggtggcgattatgaagggtaaaacgctctcatatcaggggatcatgtcagcgattaaaaaatattacccggacatcaaaataagtctggagcaactacagaaacgcgtctttgcgctttgcatgtcgaactttgttggcattgagcggcatgacgacatgcccgttacacacttcacgcttaaaagcgttgatccccgtttctacgttcactcagagaaaaacatgagggcttaa

SEQ ID NO: 403383 - DNA, 585 bp, Salmonella enterica; identical to SEQ ID NO: 380431

SEQ ID NO: 403384 - DNA, 648 bp, Salmonella enterica
ttgctggacctgattgaagagggcaacctggggcttatccgtgcagtcgagaagtttgacccggaacgcgggttccgcttctcaacatacgcaacctggtggattcgccagacaatcgaacgggcgattatgaaccaaacccgtacgattcgcttgccgattcacattgttaaagagctgaacgtatacctgcgcaccgcacgtgagttgtcgcataaactggaccacgaaccgagtgcggaagaaattgcagagcaactggataaaccggttgatgacgtcagccgtatgcttcgtctcaacgagcgcattacctcggtagacactccgctgggcggtgattccgaaaaagcgttgctggacatcctggccgatgaaaaagagaacggtccggaagacaccacgcaagatgacgatatgaaacagagcatcgtcaaatggttgttcgaactgaacgccaaacagcgtgaagtgctggcgcgccgtttcggtctgctgggatatgaagctgcgacactggaagatgtaggccgtgaaatcggtcttacgcgtgaacgtgttcgtcagattcaggttgaaggcctgcgccgtctgcgcgaaattctgcagacgcaggggctgaatatcgaagcgctgttccgcgagtaa

SEQ ID NO: 403385 - DNA, 219 bp, Salmonella enterica
atgaaaaagtatcttgctttcgtcgttacgctgctgggtatgggtaaagtcatcgcctgtactacccttttggtaggcaatcaggcttcggctgacggctcctttattatcgcgcgcaacgaggatggctcggcaaataacgccaagcataaggttattcatcccgtcgcgtttcatcaacaaggcgagtataaagcacatcgcaacaattttagctga

SEQ ID NO: 403386 - DNA, 480 bp, Salmonella enterica
atgaagggtactgttttcgccgttgcgttaaaccatcgcagccagcttgatgcctggcgagaggctttctctcagcctccctataatgcgccgcctaaaaccgcagtgtggttcatcaagccgcgtaatacggtgattcgtcacggcgaacccattccttatccgcagggagaaaaggtactgagcggcgcgacagtggcgctcattgtggggaaaaccgccagccggatacgccctgaagcggcggcggactatatcgccgggtatgcgctggctaacgaggtcagcctgccggaagagagcttttatcgcccggcgattaaagcgaaatgtcgcgatggcttttgcccgttgggtgaaatggcgccgctgagtgatgtggataacctcaccattatcactgaaatcaacggacgagaagcgaccactggaatactgccgatttacagcgtagcgccgcacaactgcttagcgcgttaa

SEQ ID NO: 403387 - DNA, 246 bp, Salmonella enterica
atgagtgtgtcgagtttcatgggatatctgaagggtaaaagtagtctgatgctttacgagcagtttggggatctaaaattcaaatacaggaacagggagttctggtgcagagggtactatgtcgatacggtgggtaagaacacggcgaagatacaggactacataaagcaccagcttgaagaggataaaatgggtgagcaattatcgatcccgtatccgggcagcccgtttacgggccgtaagtaa

SEQ ID NO: 403388 - DNA, 1434 bp, Salmonella enterica
ttgggccagggcgaggacggtatcgccaaaacgccgcagtgggcatcgcatattaccggcatccccgccgatcggattatcaaactggcgcgcgagataggcagcgtcaagccggcctacatctgtcagggttgggggccgcagcgtcaggcgaacggcgaacaaaccgctcgcgccatcgccatgttaccgattctgaccggcaacgtcggcattcatggcggtaatagcggcgcacgcgaatccacttacaccattaccattgaacgtctgccggtcctggagaatcccgttaaaaccgccatctcctgctttagctggacggacgccattgcgcgcggcccggaaatgaccgccctgcgcgacggcgtacgcggcaaagataagctggatgtcccgatcaaatttctatggaactacgctggcaataccctgattaatcagcattcggatattaataaaacccatgaaattcttcaggatgaagcaaaatgcgaaatgattgtggtcatcgacaactttatgacctcttccgcgaagtacgctgatattttactgccggatctcatgaccgtcgaacaggaagatatcatccccaatgattacgccggcaatatgggatatctgatttttatccaaccggcgacaacgcctaagttcgagcgcaagcccatctactgggtactcagcgaaatagccagacgcctcggtgacgatgtgtatcagcggtttaccgaaggccgtacacaggcgcaatggctgcaatatctgtacgccaaaatgcaggcaagagatccggcattgcccgcgtatgacgagctgaaaaaaatgggcatctataaacgcaaagatcccaacggccattttgtcgcctataaaaaatttcatgaagatccgcaggccaatccgttaaaaacgccgtccggtaaaatcgaaatctattccgagcgtctggcaaccctcgccaacacgtgggagctgaagaaagatgagattatccatcctttacccgcctatacgccaggttttgacggttgggacgatccgcttcgtcagcgctacccgctacagctaaccggcttccactataaagcgcgtacccactccagctacggcaatatcgacgtcctgcaacaggcgtgtccgcaggagatctggatcaacccgattgatgcgcaagcgcgcggcattcagcacggcgacaccgtgcgggtctttaaccagaacggacagatgctcattccggcaaaagtcacgccgcgcatattgcctggcgtcaccgctatcggccagggcgcctggttaaatgccgatatgttcggcgatcagatcgatcgcggcggttcaattaacattctcacgtcgcatcgaccatctccgctcgcgaaggggaacccgtcccacagtaatcttgttcaggttgaaaaggcttaa

SEQ ID NO: 403389 - DNA, 456 bp, Salmonella enterica
atggaaaacaaacgcacactggtcgtcgcgctgggcggcaatgcgctgctcaaacgcggcgaaccgctggaggctgatattcagcgtaaaaatatcgaactggcggccagaaccatcgcccagcttacgcggcaatggcgcgtggtgttagtgcacggcaacggcccacaggtaggactgctggcgctacaaaatagcgcctacgctaacgttacaccctacccgctcgatattctcggtgcggaaagccagggcatgattggctacatgctgcaacaggcgctgaagaatcatctgccggagcgtgaaatcagcgtcctgctcacccaagtcgaagtcgatgccaacggacccggcattcctcaatccaaccaaatatatcggccccatttacgacgaagcgcaagcccgtgcgttacaggcagaaaagggctgggtattcaaagccgacggtaa

SEQ ID NO: 403390 - DNA, 459 bp, Salmonella enterica; identical to SEQ ID NO: 380368

SEQ ID NO: 403391 - DNA, 219 bp, Salmonella enterica
atgaatactcttgttctccctaaaacacagcatttggtggtctttcaggaagtcattagaagtggttctatcagttctgccgcaaaatcgttagggttaacccaacccgccgtcagtaaaatcattagcgatgttgaggcctattttggcgttgagctaattgtacgcaaaaataccggcgttacgttgaccgaagcgggacaggtactgctttcctag

SEQ ID NO: 403392 - DNA, 456 bp, Salmonella enterica
atggccaatatcgaaattcgccaggaatcgccatcggcgttttatataaaagtacatgaaaccgataatgtcgcaattattgttaatgaccacggccttaaagccggaacacgttttccggatggcctggaactgactgaacatattccgcaaggccataaagtcgctctgacggatatccccgctgacggcgaaatcatccgttatggcgaagtcatcggttatgcggtacgcaacatcccgcgcggaagctggatcgacgagtcgctggttgaactgccaaaagcgccgccgctgaatacgctaccgctggcgaccaaagtaccggaaccgctgccgccgctggaaggctacacgtttgagggctatcgtaacgccgatggcagcgtcggaaaaatctgcttggcattaccaccagcgtgcactgtgtggcgggcgtggtcgattatgtggtga

SEQ ID NO: 403393 - DNA, 1203 bp, Salmonella enterica
atggattttaaccagattatcaatcgcaacaatactggttcggtaaagtgggattttattgagcgtcactttggcgatggcgcagggaaactgctgccgatgtgggtttctgatttcgattttgcctgcccgcctgaggttcaggcggcattgcatcagcgaatcgagcacggcgtatttggctatagtgaacgtgatgaggcctattttaacgccctgcttcactggttttcgtcacgccaccagctcacgttaaaacaggaatgggtatgcagcgtggaaggcgtcgtaccagggttggcgctcttagtgcaaatgttgacgcatccaggcgacggcgtagtggtacagggaccatactatggctccttcgccaaaataatcacgcttaatggtagaaaactgctggagaatccccttagcgagtcgccggacgacggctaccagatggatttttgccaactggaaaggctgtttcgccatgagcgccctccgctgatgattttgtgtaatccacataatccaaccgggcgttgctggtcggccaacgagctggagcaactgcttttattatgtgaagcttatgatgtcactctcatctcggatgaaatatgggccgatctattgctgcccggcgaaacctttacctcggtactgcatttaggggagcgctggcataaacgggtcatctccgccactgcggccagcaaaacgtttggcttatcgtcgttgcgaatttctaattttctcattcccgagcctacgcttcgccagcgtttcctgtctcgtctggacgctcatgggttggacgtctttaacgctctctccgttcaggcggcgactaccgcatggaatgaaagcagacagtggctggattcgctactggattacctggcggaaaaccgccgctggtttgttgaacaggcgacagagcaccttccctgggcaagaattgtcccggcgcagggaacctatttattatggatggattgtaaaaaactgggactggatgacgaacagctaaaatgggtaatggcggatgtcgcgggtattgctccttcaatgggcagcggctttggcccggcgggcagcggatttatccgtttaaatctgggatgtccacgtacctaccttgaaatggcaatagacggcctgaagcgaatatcggtgaagacaatcaaaggaataccaacaggcggatga

SEQ ID NO: 403394 - DNA, 165 bp, Salmonella enterica
atggcgggattcataaaaagccagagcctaacactgctcgaaaagctggacgcactcgatgccgacgaacaggccgccatgtgtgagaagctgcacgaactcgcggaagaactccagaacagcatacagacacgctttgaagcggaaaatagcaccggggcataa

SEQ ID NO: 403395 - DNA, 381 bp, Salmonella enterica
atgcagtcactgtatgactggatacagcaacagatgaaaacactgtcgcgtcactcagatacggcaaaagcgttcgcatacctgctgaaacagtgggatgcactgaacgtgtactgcagtaatggctgggtggaaatcgacaacaacatcgcagagaacgccttacggggagtggccgtaggccggaaaaactggatgttcgcgggttccgacagcggtggtgaacatgcggcggtgttgtactcgctgatcggcacatgccgtctgaacaatgtggagccagaaaagtggctgcgttacgtcattgaacatatccaggactggccggcaaaccgggtacgcgatctgttgccctggaaagttgatctgagctctcagtaa

SEQ ID NO: 403396 - DNA, 381 bp, Salmonella enterica; identical to SEQ ID NO: 403395

SEQ ID NO: 403397 - DNA, 378 bp, Salmonella enterica
atgaccaaccactgggtggatattaaaaacgccaacgtcgtgatggtgatgggcggcaatgccgcagaagcgcatccggtgggtttccgctgggcgatggaagcgaaaaataataacgatgcgacgctgattgtcgttgatccacgctttacgcgtacggcgtcggtggcggatatctatgcgccaatacgttccggtacagacattacctttctgtccggcgttttgctgtacctgatcgaaaataacaaaatcaacgctgaatacgttaagcattacaccaacgccagcctgctggtgcgggaagactttacgttcgaagacggtcttttcagcggctatgacgcccaaaagcgtcagtacgataaatcctcctag

SEQ ID NO: 403398 - DNA, 381 bp, Salmonella enterica; identical to SEQ ID NO: 403395

SEQ ID NO: 403399 - DNA, 138 bp, Salmonella enterica; identical to SEQ ID NO: 380365

SEQ ID NO: 403400 - DNA, 207 bp, Salmonella enterica
atgaacatcaaaaaagcaatagagcgcgtacccggcggcatgatggtcgtaccgctcgttattggcgcagtcattaacaccttcgccccgcaggcgcttgagatcggcggttttaccaccgccttatttaaaaacggcgcggcgccgctaattggcgcttttctgctgtgtatgggagccggtatcagtgtgaaagctgcgccctag

SEQ ID NO: 403401 - DNA, 381 bp, Salmonella enterica; identical to SEQ ID NO: 403395

SEQ ID NO: 403402 - DNA, 543 bp, Salmonella enterica
atggcgttgtggtccacattcacagagagcaaaaaatcaaccagtgttgccagtggcaacagagagcaaaaattaggcagtgctgccagtggcagcatagggaaaaaattaatcagtgctgccagtggcagcatagagcaaaaattaggcagtgctggcagtgccagcagagagcaaaaattaatcagtgctggcagtgccagcagagaacaaaaatcaaccagtgttgccagtggcaacagagagcaaaaattagccagtgttgcccggggcaacagagagcaaaaattaaccagtgttggcagtgccaacagagagcaaaaagtaaccgatggtgccagtggcaccaaagtacaaaaattatgctgcgtcagcagcatggaaggcggcggcaccgaatatcctgaaacatctgacggtaaaccgccgaagcccggcgtcagccggaaacatcctgacaggatgcagtgttcccctccagccctgccagaccctgtttgtttctggggaaagccaggattgcataaagggaccggaagataa

SEQ ID NO: 403403 - DNA, 381 bp, Salmonella enterica; identical to SEQ ID NO: 403395

SEQ ID NO: 403404 - DNA, 381 bp, Salmonella enterica; identical to SEQ ID NO: 403395

SEQ ID NO: 403405 - DNA, 747 bp, Salmonella enterica
atggcgttttacctcgaactggagcgcaaaacggctgacgggacttatgtcgatctctatcctgaattgctggcggcctatgacgccggacaggcgccgaagcccaatattcacggcaatgaacgctgccagaacattgtgcgctatgagatgttcaaaaagttgggctacttcgtcaccgagtcatcagagcattttgccgagtacacgccgtggtttattaaaccgggacgcgaggatctgattgcgcgctacaaggtgccgctggatgaatatccgaaacgctgcgtagaacaactggcgaactggcataaagagctggaggagtataaaaccgccgagcgtatcgacatcaaaccgtcccgcgagtacgccagcaccattatgaacgctctgtggaccggcgagccgagcgtgatttacggcaatgtgcgtaatgaggggctgattgataacctgccgcagggaagctgcgtggaagtggcttgtctggtggatgccaacggcattcaaccggcgaaggtggggacgatcccttcccatctggcggcgatgatgcagaccaacatcaacgtgcaaacgctgttgaccgaagccatcctcacggaaaaccgcgatcgcgtgtatcacgcggcgatgatggaccctcataccgcggcggtgctgggtatcgaagaaatctatgcgttggttgacgatctgatcgccgcgcatggcgactggcttccggcctggttacgccgttaa

SEQ ID NO: 403406 - DNA, 591 bp, Salmonella enterica
atgacggcacccaaaattacctttatcggcgcaggttctacgattttcgtcaaaaatatcctcggcgatgtgtttcaccgcgaggcgctaaaatcagcgcatgtcgccctgatggatattgacgaaacccggctggaagagtcgcacattgtggtacggaaactgatggactcagcgggcgcttcaggccggattacctgccatacccaccagaaagcggcgctacaggatgcggatttcgtggtggtcgcctttcagattggcggctatgaaccctgcaccgtgaccgattttgaggtttgtaagcgtcatggcctggaacagacgatcgccgatacgctggggccgggcggcattatgcgcgcgctgcggactatcccgcatctgtggcggatttgcgaagacatgatggaagtctgtccgaaggccaccatgctcaattacgtcaacccgatggcgatgaatacctgggcgatgtatgcccgctatccgcatatcaaacaggtcggcctgtgccattcggtacagggaacggcggaagaactggcgcgcgacctgaatatcgatcccgcctcgctgcgccggcattaa

SEQ ID NO: 403407 - DNA, 531 bp, Salmonella enterica
atgaataacgaggagaccttttatcaagccatgcgtcgtaagggagtgacccgacgcagctttctcaaattctgtagccttgccgccacatcgctgggactgggcgccggaatgacgccaaagatcgcctgggcgctggagaataaaccgcggattccggtggtctggattcatggactggaatgcacctgctgtaccgaatcctttatccgttcctcgcacccgctagccaaagatgtgatcctctcgctgatttccctcgattatgacgacaccctgatggccgccgccggcgcacaggccgaagaagtctttgacgatattaccactcgctacgccgggaaatacattctggcggtggaaggcaatccgccgttaggagagcaaggaatgttctgtatcagcggcggccgcccgtttattgaaagccgccgcgggcgccagcgctattatcgcctggggaaactgcgcctcctggggttgcgtccaggccgcccgccccaatccgacccaggcaacgcctatcgataa

SEQ ID NO: 403408 - DNA, 897 bp, Salmonella enterica
ttggacgattttcgtaaccgcgcgattagcgacaccttcgaacccggttctactgtgaagccattggtcattatgactgcgttacagcagggcatcgtgcagccggacagcgttatcgatacccatccttttactctcgatggacaccgtatccgcgacgtcggttactatccggaactgacattaaccggcattttgcaaaaatccagcgataccggcgtttctcacctttctctggcgatgccggtgcagaaattaatggatacttataaaagctttggtttcggcgtgcctaccggactgggtctcaccggagagagcagcgggttattaccgaaacgccgttactggagtgatttagatcgcgctaccttcgcttttggctatggattaatggtgacgccgctgcaactggcgcatgtttatgccacgattggcagctttggtatctaccgtccgttatcgatcaccaaagttgatccgcccgtgatcggcacgcgggtaatgccggaagaactggtgcacgaggtggaacatatgatggagagcgtcgcgttgcctggcggcggcggaacaaaagccgcagtaagagactaccgtattgcggtcaaaaccgggacggcgaaaaaaattggcgatgatggtaaatacgtcgataagtatgtggcatataccgcaggcgtcgcgccggcaagtaaccccagatttgcgctggtggtggtgattaataatccgcaaaacggggcttattatggcggcgcggtatctgcgcccgtattcagccagatcatgggcgatgtgctgcggctggaaaatgttgagccagacggtatgccagccgattcagatcaccttctggtgatgcatggcagccacgttgcggttccgggctcgtaa

SEQ ID NO: 403409 - DNA, 849 bp, Salmonella enterica
gtgaaaaagaaaagcgacggcgatacccgtaattttacacccatacgttttgcactactttgcactgccattctgctcagtatggcattgttgttagggggggtggcatggctgcaaattgttacgccgtcgaaactggtgaaacaagaagatatgcgctcgcttcgtgaagtgaccacggcctctccacgcggcatgatcaccgacagagaagggcggcccttagcggtgagcgttccggttaatgctgtctgggccgatccgaaaactatcataagcaaaggcggcgttggctacaatgagcgctggcaggcgctggccagcgccttacatctgtctctcagtacgcttgcggaacgggtaaacagtaacccggcaggtcgttttatctacctcgcgcgccaggtttcaccccagcaagccgaatggatagataaactgaatctaccgggtattaacctgcgggaagagtcgcgccgtttttaccctgccggacacgtagcggccaatttgatcggctttaccaatatcgacgggcagggaatagaaggtattgaaaagagctttaacgcgcaactgacgggaaaaccgggctcccgattggtgcgcaaagataaatttggtcacgttattgagaacattacggaagtgaatccggttcctgctcatgaacttcagcttagcattgatgaacgtctgcaaacggttaccgaagatgcgctggataacgccgtcatctggaacaaagcggaatccggcgctgccgtattgattaacatcccaacgggtgaaattctctcgatggcgagctacccggatttcaacccgaacaaccgtgaaggcgcgtag

SEQ ID NO: 403410 - DNA, 381 bp, Salmonella enterica; identical to SEQ ID NO: 403395

SEQ ID NO: 403411 - DNA, 348 bp, Salmonella enterica
atgaaaacactgtcgcgtcactcagatacggcaaaagcgttcgcatacctgctgaaacagtgggaggccctgaacgtgtactgcagtaatggctgggtggaaatcgacaacaacatcgcagagaacgccttacggggagtggccgtaggccggaaaaactggatgttcgcgggttccgacagcggtggtgaacatgcggcggtgttgtactcgctgatcggcacatgccgtctgaacaatgtggagccagaaaagtggctgcgctacgtcattgaacatatccaggactggccggcaaaccgggtacgcgatctgttgccctggaaagttgatctgagctctcagtaa

SEQ ID NO: 403412 - DNA, 459 bp, Salmonella enterica
atgggggacgaaaagagcttagcgcacacccgatggaactgtaaatatcacatagttttcgcgcccaaataccgaagacaagcgttctatggagagaagcgtagggcagtaggcagcatattaagaaaattgtgtgaatggaaaaacgtacgaattctggaagcagaatgttgcgcagatcatattcacatgcttctggagatcccgccgaagatgagtgtgtcgagtttcatgggatatctgaagggtaaaagtagtctgatgctttacgagcagtttggggatctaaaattcaaatacaggaacagggagttctggtgcagagggtactatgtcgatacggtgggtaagaatacggcgaagatacaggactacataaagcaccagcttgaagaggataaaatgggtgagcaattatcgatcccttatccgggcagcccgtttacgggccgtaagtaa

SEQ ID NO: 403413 - DNA, 357 bp, Salmonella enterica
gtgcatctgtgggtatgttatcgcaatcctttcaacatcttactcacgattcttggcggcatttcttatgccacggaggatctgtttgccgcaggcgttatcgccctgatggtcggtatctcaacactgctgaattttgtgcaggaagcgcgctcgacgaaagcggcggacgcgctaaaagcgatggtgagcaataccgctaccgtactgagggttattaatgaaaatggcgaaaacgcctggctggaattacccatcgatcaactggtgcccggcgatattattaaactggcggcgggggatatgatcccggcggatttacggattatccaggcgcgcgatctgtttgtcgcctag

SEQ ID NO: 403414 - DNA, 381 bp, Salmonella enterica; identical to SEQ ID NO: 403395

SEQ ID NO: 403415 - DNA, 381 bp, Salmonella enterica
atgcagtcactgtatgactggatacagactcagatgaaaacactgtcgcgtcactcggatacggcaaaagcgttcgcatacctgctgaaacagtgggaggccctgaacgtgtactgcagtaatggctgggtggaaatcgacaacaacatcgcagagaacgccttacggggagtggccgtaggccggaaaaactggatgttcgcgggttccgacagcggtggtgaacatgcggcggtgttgtactcgctgatcggcacatgccgtctgaacaatgtggagccagaaaagtggctgcgctacgtcattgaacatatccaggactggccggcaaaccgggtacgcgatctgttgccctggaaagttgatctgagctctcagtaa

SEQ ID NO: 403416 - DNA, 222 bp, Salmonella enterica
atgcctgaacatctgtttcagcccctacttctgggctggtcatttttttgtgccttctggtttgtatttctcaattacctccgtctggaagaaccccattaccctctgtgggcatgttacgttatacagaccatcaacgggatcattattgtactgaatgttattgtcatcccggtgctgacagtgacggtcttccgtccgtttctcacatctgtaaactga

SEQ ID NO: 403417 - DNA, 189 bp, Salmonella enterica
atgactgagcttacactgaagatatatgctggcgcacttgccttctggctcctgttttactgcttcatcaaagttgcagaactccgttttccgccctgggcatggaccatcatgcaatgcatcgccgttttttttatcatcacactgcccgttttcctgcgggaactgatacgcagccctgctttctga

SEQ ID NO: 403418 - DNA, 624 bp, Salmonella enterica
atgttaatgattatgaaacaacacaaattcgcttttcttcttagtacactgctgagtaccttctttcttaatctgtttccgctgaacacaaccgggtataacctgaatgcgctgttacagattgcagctggcgtcaatctgctgcaacgccgtcatcaggctgtttcatttattgtgttactggtcatttttgccatcacgcactggctgcacacagccagcgccatggcactgctgtactacgcgagctatctggtctttttcctcatcctgtccgtgattgtattccgacaagtgattttctctgcccggataaacacagagtctgtctgtgctgcactgagtggctttttacttataggctatatgggttttttcatgttttcagcaatagaaagccatatgcctggcgcgttccgggggctgtcgcatgatgagctgcagatgatgaatgaactcttctattattctttcatcagtattctgactgtgggttatggcgatattgtggccgtcagctggccggcccgtaatgccactattctggttattctcacaggctatatttactcgctggtttttattgcccgcatcgtcagtggattttcagtatcagacaaataa

SEQ ID NO: 403419 - DNA, 354 bp, Salmonella enterica
atgaggatgagtgagcgtctgaaaacaggtaacaaaaaacagaaattaaaaaaaatcgtatatacgggtggtgcattgctgattttcatggtgctggcgttgtttatcgcagatgtggccattcgttatccggggggcgtatctgcattcagtgaatggatgcgggctcaccgttctggctggctgctctggcgtctgtgcatttatatcctgctgggctggggtatctggcgtattgtacatgcgccgggattccgggcggaataccgccagccactgatacgtatctgttgcgccagtgtggcgtttattctggtctgtgaatatgcgctgctgaaagcgcagggaggctga

SEQ ID NO: 403420 - DNA, 1554 bp, Salmonella enterica
atgacaacaaacagctatcttgaatattttctgaccctgctgggctggctgattaataacggcctgtgggatgtgctgctggggaccgggctgtttgcactgccgctggtatttaaggttattgggatctggctgcgggtcagggaagaaggggaggatgaggggaataaggggctgctctcgctgccccgtattgaacatgcgctgtacatggggttctttgtgattatcagctgctgtgtgccgctggtcaatgtcagtctggggactattgagtatgacggcaaccgggcgaagcagtgtgggacatggacgccgaaggcgccggataagaccgggtatgcaggcgtgatttccagcatggacggtaaaacagcgcagatcccgctgtggtggctgatggtgcacaaactttcaaaaggggtgactcaggctgcagtggcatccattccctgtacgccggatatgcggcagatgcgttttgaggttcagcatacccggctcaataacaaggcgctgattgaagagttgcaggattttaccaatgactgctactcactggcgctgtacagctggaagcatcaggatcagggaatgacaacggataagaatacgttgcgggatattgagtggattggcagcaggacatttcagtcgcgttattacaatgaactgcagtcgaagatgccgagaagcgcgtttccgtggaatgagagtcgtgacagtgggcgtccgaatacgggacgcggtggttatccgagctgtaatgagtggtggaatgaggcggatatcgggctgaaaagccgggtgatgaaacaggccgaccccggtatgtggttgcgtctgtcagcgacgatgaaaatgatcggaaatacaggtaaggagtatgaagaagcggtgatacgccggttggtcagtccggtgaacatgacagtgtcacatggtggcagggcctatgctggttatggtggtaatgcagattttacgttttttaatgccattaaccggactgtttctactgttggcgccggcgtgggaagcgtagtggcctttccgggactggattcaatgcggcaggcattacccatgatgcaggggatcctgttgatggctatttatgtgatgttgccactgattctggcgtttgcgacgtatgagataaagacggtgattacactgacattcgtgatttttgcgactaatttcctgacgttctggtgggagctgacccggtgggttgattcaaacatgtttactgcgctgtatttttcggatactcacagtatggccaatcttgccggttttcagaacacatcagatgacacaattctgaccatggtggtaggaagcatgttcttactgttaccagctgtctggcttggtgcattatcgtgggcaggggtgaatattgggtcagcaattaatggggctgtatcgggtggaggaaaacaggcttctgatgtgacggatacagggagacaaatggttacgcaaaacaagggtaaaatcttgagtgaggcgggtaatgtaatgaaaatgatcaaaaaatcataa

SEQ ID NO: 403421 - DNA, 402 bp, Salmonella enterica
atgacgagcaacaacaatgctgcttacctcaggggaagacgaattgcaatgcgatggaaacgtatcaaaaccgttctctgtcaaattgatatgttttgtataaatgtagcccgcagacatcacctgcccggctggactggtcgcattcctgttatgttactgttaacgaccatcgcaatctgtggcattttcagcctgtttgcagcgttatgtagtttcttccttatcgccgcccctttctgctttatggcgatgatgaagaatttgccggaagtaaaaattggggaaacaaagtcggatctggctctgcctgatgatttttatagagctgaaggttttactattggcccccaaggacctggttattatataaatggtcacagactcgacgatgaccaataa

SEQ ID NO: 403422 - DNA, 261 bp, Salmonella enterica
atgcagccacccgaaggcgttcctcacagactgccggaacattggtggtcacccgaaggtaacaaagttagcctgtatatttttaaggcacaaaagatgaatgtcaagttattcaacatcgacccaaaaaggaatattatgcgtgcccttaactggttctcccagagggaaaacacaggtacctttcatcagtatttttcttcccgcccgtctgacatcacagtcaaagtctcccaccacgtcaaaataatccgcaattga

SEQ ID NO: 403423 - DNA, 180 bp, Salmonella enterica
atgcctgattttttatccctgtgccagccctcgggctggctttttatcgtttggtctttctggcaaaatattttcaaaggcggtgacaatgattcgctgtctgagccggttgttgaagactgtatcgttctgagtaagtatgtgaacaatgaagcagaccagataactacaggtatataa

SEQ ID NO: 403424 - DNA, 276 bp, Salmonella enterica
atgaagaaattttttcccgggttaagattattgatatcagtatgcggtattctggttttaccggggtgtgtgaataatgctcagaatccccatgttattaaagggacatatatatggggaccagaggtcagggagttcagtgcatgtgatggttctccggtcatctgggcagtatctgccatgcggtatagtggtcgttcatttcacccttatctgccagcacccgtatccgttccgcaggtgagggaagagctcatcgtttcagactggggctaa

SEQ ID NO: 403425 - DNA, 252 bp, Salmonella enterica
atgttggtgactatgacagacagagaactttaccggcttggcatcattcagcgcgtatttgaccgggctttgctcggagcagttttgaggctcgcacagcagaaacagaatgagctggaggcggaaggaaagcgaatgcgcagtaaaaaaatgccccgcaggcgtgcacaggagcgcgtactggaagagctcagggcgattaatccggtgctggcgagtccgcaggattttagccccagtctgaaacgatga

SEQ ID NO: 403426 - DNA, 804 bp, Salmonella enterica
atgaatgagcgaatgtttatgtatcagggaatgatgaatacttataaaagtattgttgagaaaaatcatcaaagttaccttagaaattggccattacttagcagttcaatatctgtacaagtcggtgggtatgcaggtactgatatatttatatttaagcatatcggtagaactcatcaaatatttcatgaaaagggaattggtgatgatattaataaatcggtagtcaaggtggataaaataaccaacgaaaataagcaagaagtaaggtaccttatcgaacaatatcttgatctggatgataaagatggtgtgttgtttttgtccgtggatattccttttcaagaagaatgttatctattaatgaagaagcatgaaaaagttatgggcataaaaccaaataaaatatttttgagtcacaaaagtgctaataaagattttgtcaggaatgtaaatacatcacttaaatcaattggttactcaacgtggttcgatgaagagtcaatgaatgcaggtgcaaatctgaatagagctattatgaaggggttcgccgagtcttgctctgttgtattttttataacacctgaattcaaagatgaaaaatatataggaaatgaaattgaccatgctgttgatgaaaaattaaatcgcccagaagagtttgagataatcactatagttgtgggcgattgcccagttcctaagattttaagtaaatatgtatggaaaaatgtaagtacagaaatagaagccttaacggaaattgtaaaagcattaccaataaaagtcagagaaatatattaa

SEQ ID NO: 403427 - DNA, 555 bp, Salmonella enterica
atgagtgggaattactgtgcattttatgttgctgagccttttcatgagggtgctctgggagctcatgctacgaaagacttcgtttattacaacacactgagaatgtggaaaggagcagactccggattcccttttaccaactcacacgatacaacttataacgttcgtgatggcagtaactgggagcaaactttaatgcctcgcctcagacagcgtctgcggaattctaagaatattattctattcctgagtgatcgaactgtaaattctcgcgctctacgagaagaaattgattacggtattaattccttggggcttcctgtaattgtaatatatcctgactatgacacaaaagaaagtctgctagttaacaacattttaaagcagcaaatacagaatttatggtctaaaatccccgtattcagagattcaatgcatttagttcccacgttgcatatcccaatgaataaagctcttatcagacaatcactggcagatagtaaatttatggtgaaaaccaagactgttccggatgtatatagatataccgcataa

SEQ ID NO: 403428 - DNA, 837 bp, Salmonella enterica
atgtctaaggttagtctctgtgacaagcaggttttcaatgagtttaagggatacgcatcattattgttcggttttatcggtgcagttgtaatttttgttgacattcctgcaaatcaaaaaattgcgactggtttagcttgcattgcagtgcttatcatcgcctatctttggttatggtacagagcaaatagcttgagggagattaatctgaccattgaggaaagtactgtcatcattaaaacaggagatattttcaaacaggagggtttgaaagcgatcgctttcaatgaatactttgatactcaggttgatgaacgtattattgccgaaagtagtctcaatggtaaatttatcaacgaatatttatcttgtactgtaagtgagttagatgattacattagtaactataggttcgatgccgaagagataaaagataaaaatgtgggaaggattgaaggtaaaaagcaaaaatatgaaattggcactatctgtgtttatggcgattacatactcactgcgctatctaaatttgacgagcacaatgtagcacatctcacaatgcctgaatatttaggttttctaataagtttctgggataaggttaatcgaatctatgctcaaaaaagtgtttcagtcccaatctttgggtctgggcttacaagaataaaaggccacaagattatcgatgagcaagatctattaaagataatgctttggacttttaggataagcgagatgcgatttaaacacccagcgaaattaacaatcatgattcatgaagggaagatagataaagtcaatcttttagaattaaagacagcaagaaatggcttatag

SEQ ID NO: 403429 - DNA, 2769 bp, Salmonella enterica
atgccacgtcgcaatcttctgactcctgctgagcgcaacagtctgatggccttcccgactactgatgacaaactcatccagcattacaccttgaccgaacccgacctgtcgttgatccgtcagcgacgcggtagtcgcaatcgcctcggtttcgcggtgcagttgtgctatttgctctatccaggctttgctctgccgactgacgcggagccgcccgcctcattgttgagcattgtcggccgccagttgcgcatcgaaccggacatctggccacagtacgcgcagcggtcagaaacccgccgagagcacctgttagaattacaaacgtggttgaaactgacgccgtttgtagcttccgattatcggcatttcgttcaccaacttactgaactggcccagccgacagaccggggaatcgtacttgcaaaagcaatgatcgaacagttgagacagcagcgcatcatcctgccgactgtcgatgtcatcgagcgtgtgtacagtgaggcgctgacacgtggcacacgcaaggtttacgaagcactcactgcgtctctcaccgattttcaccgtcgcgaactggatggcttgctgactatccgtgaaggtaccaagggcagcgagctgatttggttacgtcaaccgcccggcccgccaaaacccaggcatatgctggcacacctggaacggctaaagaccatccatgacctggcgttacccgacgacctggtacactccattcaccagaaccgattgctgaagcttgcccgcgaaggtggacagatgacggcacaacacctgcgagagctggagcggaaccgtcgccatgcaactttggtcgcagtgctccttgatacccgcgctacgctgatcgatgaaatcatcgacctacacgaccgtttcatgagttcgctgttcagcaaggccaggcgcaaccatgctgagcgcattcaacaatccggcaaggctatcaatgacaaggtcaggttgctctcacgcatcggtcgcgctctgctggaagtcaaacagtcgggcggtgatccgttcgccgcgattgaggcgatcatcccctgggatgcgttcagcgaaagcattaccgaagcagaaacgcttgcccgaccaacagacttcgatttcctgtccctggtcggcgacggcttcccccaactccggcgttacacaccactcctgttgagtacgctgaccatgaaggccgcaccggcagcatgcgaactgctggctggcgtcgaagtgctcaaagggatgaacgaccgtcaggcgcgtaaggtgccgaatgacgcgcctacgtccttcgtgcgtaagcgctgggaaaacctggtgtgcacggaagatgggcttgaccggcgcttctatgagctgtgcgttctgtctgaactgaagaactcgctgcgctccggcgacatctgggtgcagggatcgcgccagttcaaggactttgagggctacctgttgccgccaccacgattcgcagcgcagcgtgaccagcaggaactggggttagctgtcgatactgactgtgaccgtttcctggaagctcgtcttatggtgctgcaagagcaactggcaagagtcgagcgactggccgctgccaacgaactgcccgatgcagtcatcaccagctccgggcgaatcaggattacgccgctggacaatgccgtgccggatgaggccaaagagttaatgcaacaggcgtatagcttgctgccacaccttaagatcacagaactgttgctcgaagtcgatagctggaccggattcagccgccacttcaggcatctcaagagtggcgcggtagccgaagaccagcatctgctgctgacaaccatcctagccgatgccatcaacctgggcctctccaagatggctgagtcctgtcctggtgtgacctacgccaggctgacgtggttgcaggcatggtacatccgcgacgaaacctattcggcggctcttgcggatttagtcaacgcccaattccgccaccccttagcagcctactggggcaacggcaccacatcgtcatcggacggccagaacttcaaggccggcggtcgtggccaggctgccggccaagtgaacctaaagtacggtcaggagccgggtgtgcagttctatacccacatatccgaccagtacgctccttttcacaccaaggtcatcaatgccactgtgcgagacgctacacacgtcttggacgggctgctgtatcacgaatcagacctgcgtatcgaggagcactacaccgacacggcgggcttcaccgatcacttgtttgcactgatgcacctgttgggctttcgcttcgccccgcgaatccgtgacctggccgacaaacgcctgtatgtccacggcgatgccaaacattatccgactctcgccagtctgatcggcggcaacatcaacgtgaagcatattcgcgcccattgggatgaaatcctgcggctggccgcctcgatcaaacagggcacggtgacggcctcgctgatgctcagaaagctcggcagttacccgcgccagaacggcctggcggtggccttgcgcgaactggggcgtatcgagcgcacgctgtttgcgctcgactggatgcaaaatgtcgaactgcgccgccgtgtgcaaattggcctgaacaagggcgaagcgaagaacgcgctggcccgtgccgtgtttctgaaccggctcggtgaaatccgtgaccgtagttttgaaaatcagtaccacataaaagtgacatttgatactgggaaaatcaggtga

SEQ ID NO: 403430 - DNA, 561 bp, Salmonella enterica
ttgcaagggcatcgtatcggttacgtccgcgtcagtagctttgaccagaatccggaacggcaactggaacagaccctggtgagcagggtgttcaccgataaagcgtcgggtaaggacacgcagcgtccgcaacttgaggctctgctcgaatttgtgcgtgaaggcgacactgtggtggtgcacagtatggaccgcctggcgcgtaacctagacgatctgcgccgtctggtgcaggggcttacccaacgtggcgtacatatcgagttcgtcaaggaacatctgacgtttaccggagaggactcgccgatggcgaacctgatgctctcggtgatgggagcattcgctgagttcgagcgagccctaatccgcgagcggcagtgcgagggcatcgccctggccaagcagcgtggagcataccggggtcgtaaaaaggccctgtctgacaagcagaccgctgccctaagaatgcgggttgcggccggtgagcccaaggctcagctcgcccgcgaattaaacatcagccgacagaccctctaccagtacctgaaaacggacgactaa

SEQ ID NO: 403431 - DNA, 180 bp, Salmonella enterica
atggattttatgagcattttggggcgctgtttacttcttcctttccctgtagccatgtttattggcagcctgttttttcaggcggatgatcgcttatccggaatgttgatgagtgtagttgtgggatgtttatcgtggtatgtcaccaggccgaagaaccaacagacaaaggccgcgtaa

SEQ ID NO: 403432 - DNA, 822 bp, Salmonella enterica
atgctgggtacttcgtttcaacagttttcgatagaggcgcttctggcaagtgcttcactacgcagtggactgacagcattgaataaatgtaaatatcatgataaaggcagcttttataatgctttttttcaactatcaattggtctggaacgtttttttaaaattatttatgttgttcagtatatgattgaaaatgatttaaataaaccaacatatagtcatttgagaaaattaggtcatgatataagcactttacatcaaaatgcagtaaatattgcaatcaaatatgagaaaagatacaaagacaaatgggtcttgaatgatgagcaatctgcaatattaataatgttatcggaattcgggaaagaaacccggtattataatttaaatactattattggagataaaaaaataatgaatgaccctcttgagcaatggaattgtattttggagtattgctactggaagtatacttcagcaactaaaagagagagattgagtcaagatgtaatctcatgggctgagagaaatcgattgtatggttttactaatgaatttggcctcgatggtcatattatgacgtatgtagatcagtatctattgaactggaaagtaaccaaaatttcgccttgcattgcatgggaaataattagcatgttgcaaccgtattactttttgctaatgagattacgagatactgtgcagttgaaggaacaagataaaggaattaaagaccctttagtaccatactttcatgaaattttcccatatttccttttagatcgtgcaacagcgaaaagacgtaggaattggcttgattag

SEQ ID NO: 403433 - DNA, 357 bp, Salmonella enterica
atgatattcaaaacaattttttcagtaatactttttctttcattttctgccgcagcacaaccacaaaagttggagtgtgtcagccgaaaggatggtacggtaaaaatagcgcatattttcagcagtccatcaaataaggggttgctggagtttgatagtgccatttttacggaggtggattcaaaaatagaatcaggaaatttgaaaaccttgttttctactcaacaagaagaaaggcaaaaagaaagtcgcgtgctttttttaacacaaagagacagagatgccgaaatatttgtcacaagaaaaactggtaacaatggctatgaagatgggatgatttatgaatgtaatccctga

SEQ ID NO: 403434 - DNA, 525 bp, Salmonella enterica
atggcaactgagtgggtagatgtggctaataatgccgttaaaattgggcttggctctgcactgacaatattgagcggttatctaacgctcaaattatctcagcggcacgagttaaggaaagaagcattaattcgacgacgtaaagattttgaggtgaaaactgagcgttacgtgaattttttatccagttcaagaatgatgttgcagaaatatactatcagcaattttaagccagatggggatgattacatggagcttacaagacggcatgaaacattatcccttacatgcacgaatagtatcattagagagctggcctttgatgcttactatgctgtttctcatgcatgcacaatggggactgcaaatcgcgatgaaaaagccccagcccggaaaaaagctaaagaggctttagataagcttcagggatttgccagcgaagaactacgtcgtgagaaagctgcaattgatgtaatgagcgataagcagacattctggtcctttagacggcgaacagcgcgatga

SEQ ID NO: 403435 - DNA, 192 bp, Salmonella enterica
atgctcagggaaaaagacctctggcagcattctggggagacggaacaacttcatcatcagatgggcagaacttcagaactggtaattctggtcgttatgctgggcagattaacccgaaatatgggcaagagcctggatgccagttttatacacatatatcagatcaatacagtccgttttacacctgcataa

SEQ ID NO: 403436 - DNA, 1113 bp, Salmonella enterica
atgctcagactctatactctatgggaacttgaaagggaactgtctcccgatgaatttcaatacatactgactcccggtgctgcgctggaaaaagccgtattcacttacgagcttgaccaccgtaattacacatcccctccggtcaactgtgtccctgaattgctgaccagcccaaaagataagccttatatctgttctggatacgatcctgtttatgatgcccttgaaatcaatctgatggagggctggattatcggtctggataccgatgaatactgggatgactccgtaaatcctttttacatcaattctgcaggtgagctggtttttgacagtgtggatccgttttgctgggtgatcagtgattttcaacgggcttaccagatcgctatcaattgtcagaatggcaggaaacctacagccacagagaaattccgcccgtcagatgagcctgtgcaacacgcacaggcagcgaaaaccatcaacagcaaagcagcaggacgattgctggctgccgggggaatttacaacggcaacatagagggattcagacggacagccgagcagttggggggcgatgctgttaaggggtatgatagcgttcttaacgagaccacatccggggtgatggtagcagcagcctcattgcttgttatccgcaacccgatggcggcggaggaattgacaaactatctgggcaaatacaaaaaggctcacgtcctgcttgaagatatgaatgtgtcagagttgaactatgctcgtcgtgatcgtgctgaatataacgcactccgtagagagtttaacagctctgttcgtccgaactttctcaagtcgatttccactcacccggatgcgctattgacgtttgattctgacaacctgttgcgcctcgccgacggaaaagttccgcccggatggcaagtccaccataagattccacttgatgacagcggcacaaatgccctggataatttgatactaattcaaaactcgccatatcactccgcgctatcaaagacccaggcgataatcactaaagacattccatacaactccagtactaaggttctgtggccttcgccgaatggcgtaatttacccagtaggaaaatga

SEQ ID NO: 403437 - DNA, 507 bp, Salmonella enterica
atgaacgacacaaatcagaagattggtatccttaatgcgttgatggtttctgatagttaccctgtagccagccccgtagcgccagacgttatggcggaattagtgctaaagcccgcgccagtagaatgggatgaaataaaacgcagtgtttactctgatatgcaaaggctggtgataaatcgcccggattacgctgatatgttcaaagtcatggatggtctggagtacaacgggctcaccctgtatgggatgacacaaacggataatggcgagttggcatggtcaaatatctatattcggaacattgatacacgcgacaacgaaatctatgttgatccaaacctcacagacaaactgctgattggtgaagatggtatgtctgttttcgtatacagcttcaaagataactgtttccagatccgcgataaagcctcaacagattacgttattgatgagtacaaaacttttaacgatctattatcagctcttatcaacacagtgaagtaa

SEQ ID NO: 403438 - DNA, 381 bp, Salmonella enterica; identical to SEQ ID NO: 403395

SEQ ID NO: 403439 - DNA, 366 bp, Salmonella enterica
atgactatccctgcattcggtttaggtacttttcgcctgaaagacgacgtggttatcgcttctgttaaaacggcgcttgaactaggctactgtgctgtcgacactgcgcaaatctatgataatgaagcggctgttggacaggcgattgctgagagcggcgtaccgcgtaatgagctgtacatcaccaccaagatctggattgaaaatcttagcaaagacaagctaatcccaagcctgaaagagagcctgaaaaaactgcgtaccgattatgtcgatctgacgctgatccactggccatctccgggtgatgccgtgcctgtcgaagaatttatgcaggcattgctggaagctaaaaacaagggctga

SEQ ID NO: 403440 - DNA, 219 bp, Salmonella enterica
atgaaaaaaaataaaccacaacttattttatacgatatgtcttcaacaatgttcgatccacttagtgagtgggagcctgcttctcttgaagatacatatgtggctgttgatttatgccttgggatgaatgatggtgaaaaaggaagcaacatatttctatgtgaaagttgccactccagaagccttgagaaagcgatcaaagaattttctcatatctga

SEQ ID NO: 403441 - DNA, 381 bp, Salmonella enterica; identical to SEQ ID NO: 403395

SEQ ID NO: 403442 - DNA, 381 bp, Salmonella enterica; identical to SEQ ID NO: 403395

SEQ ID NO: 403443 - DNA, 462 bp, Salmonella enterica
atgaggaaatatattccactggtattatttatcttttcatggccggtattgtctgcagatattcatggacgggttgttcgtgtactggacggtgataccatcgaggtaatggactcacggaaggcggtgcggatcaggctggtaaatattgatgcaccggaaaagaaacaggattatggccggtggtcaacagacatgatgaaatcactggtcgcaggaaaaacggttaccgtcacatattttcagcgagatcgttatggtcgtattctcgggcaggtttatgcaccagacggaatgaatattaatcagtttatggttcgggccggggctgcctgggtatatgagcagtacaacacagatcccgtgctgcctgtccttcagaacgaagccagacaacaaaaacgtgggctctggtcagatgctgatccggttccaccctggatatggagacaccgtaaataa

SEQ ID NO: 403444 - DNA, 210 bp, Salmonella enterica
atggcaaaaacaaaacaggaatggctgtatcagttacggcgatgttcatcagtcaatacgctggaaaaaattattcataaaaacagagacagtttatcaaacagtgaacgtgaatcatttaattcagcagcagaccaccggttagcggaattaatcaccggaaagttatatgacaggataccaaaagagatatggaaatatgtaaggtaa

SEQ ID NO: 403445 - DNA, 213 bp, Salmonella enterica
atgcagacctcacgagttaatggattaacgagtggggtcttcgcatttctggtacctgcgtcttgcctgaaccagaaaggctcagacacccgccgcgataataccacattcctgtctggttacgacgatctccatgcccccccggtttttattgcagaaacgccgggagcggggaaaacttgctttttcccgtttccggggttggacaactga

SEQ ID NO: 403446 - DNA, 342 bp, Salmonella enterica
gtgacgctgacggcctgcgacgtatacggacagaaattcaccatctcccgcatcttccgtaaagcgccgaacgtctgcttggacgacaggttgcagcccggggtgtcgatccgggagaccgtgctgcgtcgcccgatctacttcgggcagaaagacctttccagcactggcgaagatctggtggaaaagttggtgggtgaaaagctgcgcattctgcgagacaaaatcgaaacccaacgccaacatgtacgtgatgcagcaagtctctggctcaagttcagcaataccgccgaactcaggcgttattacgagtcccagctcaggatgctaacttccggctga

SEQ ID NO: 403447 - DNA, 525 bp, Salmonella enterica
atgaaggtttacgtcattaaaattgctgttcgtagtgtcagtcctatggtctggcgtcggctgaggattgcggccgatacatcactggctgcacttcattttattatccagatcattcagggctggggtgatgaccacctgcatcagtttcatatttacggtaaagattacggtatcacttacgaggagggcattggttttccggataacccgttccaggtcgtgattgatgattttgagtttgatgtcggcgatcgctttacttatgaatacaatttctttgagcactggattcatgatattagcgttgaagccatttatgaaaacaccgagctgaaaacgtcgttttgtataagtggtcatggatgcccggagccacagttgcagatgagtttgataaaaccctggcgtttcttgaagctatcgttaatgcagatgatgaaactacgattggtgagattcgcccttttgctgacgacctggacgctgtccggtttaaccgcaacaaaatcaaccggcggctaa

SEQ ID NO: 403448 - DNA, 300 bp, Salmonella enterica
atgaatgacgattacctgtatctgactaaggggcgagggcgtgcattattaccaggaaaaatgtcagaacatcatttctggttattagctgaaatatctccggttcacagtgaaaaggtcattaacgcgctgagggatttcctggttctgggttatacccgaagggaagcctgcgaacggcatgaggtttcacagggatatttttccggggcgttggggcgttttcagcgggttagtatgacagttagcaggcttgcgcctttttatatatcagaggctggggcttcctgtatggaataa

SEQ ID NO: 403449 - DNA, 543 bp, Salmonella enterica
atgaaaaatttatcgctttcagtacttctgcttctggcagggggcggtttttctcacgccgctgttcagaaaaccgtattcagtgctgacgtggtggcttcggcctgtcatgtggtggtggatgcggacagcaccggtaacagtggccggctgacattcgggacttaccgcaagtccacaggggtgtctgtaccgccgcgtgacttcactgtgcatctgtatgagtccggtgccacggttcagggctgctcagcctttcaggcagggcaggtcgccaccctggattttggtaacccgggacagctggatgcagggggcgtgatcacccgcggtgccggtgatgggattcgcgtggatgtgcgggcggtggatgcgcaggcagattatcgcggacgtctgactcaggacagtcattcggtgaattacccggtggagtttgctgctaagggacagttccgttttcgtgcgcagccggtgtttccggcgaacgtgaaggcgggggaatacacgggtgcactgacctttgtggtcacgtatcagtaa

SEQ ID NO: 403450 - DNA, 2445 bp, Salmonella enterica
gtgtgtgcaggaaagaaggcagtcgcagagccggtttcgtccgtgtttttccgtcgggccgcacttgcgcttgccgtatcagctgctttcgccagtgccacaggtattgcaggtgaaaaactggatatgtcctttatccaggggggggccggggttaatccggaagtctgggcagccctgaacggcagctatgcgccggggcgttatctggttgacctgtccctgaacgggaaggaggccgggaaacagatactggatgtgacaccacaggacactaatgaactgtgtctgacagaggcgtggctgacgaaggccgggatttacgtcagtgcagattactttcgtgagggatatgacgccacacgacagtgctatgtgctgacaaaagccccgtcagtgaacgtggatttcgatgtttccacccagagtctggcgctgtccattccccagaaagggctggtgaagatgccggagaatgtggactgggattacgggaccagtgcatttcgcgtgaactataacgcgaacgccaacaccggccgtaataacacctcggcctttggctcagcggacctgaaagctaatatcgggcgctgggtggtgagttcttctgccacggccagcggcggtgacagcggggataattccaccacgataaacatgtttacggccacccgggccatccgcgcactgagtgcggacctggctgtcgggaaaacatccaccggggacagcatgctgggcagtacgggaacgtacggggtgtcactgagccggaacaacagcatgaagccgggcaatctggggtataccccggtgttcagcggcattgcgaacgggccgtcgagggtgacgctgacacagaacgggcggttgctgtattcggagatggtgccggcgggtccgttctccatcacggatgtgccgctgtacacgagcggtgatgtgaccatgaaaatcaccggtgaagacgggcgcgagcaggtacagaacttcccgttgtcggtgatggccgggcagttaagtccggggcagcacgagttcagtgtggcagccggtttgcctgatgatgacagcgacctgaaaggcggtgtgtttgcggcgtcatacggttacggtctggacgggctgacgctgcgcaccgggggggtgtttaaccaggactggcagggcgtcagcgccggggctgttctggggctgagttacctgggggcggtgtctgctgacggggcttatgccacggcaaaataccgtgacggcagccgcagcggaaataaggtgcagttatcctggagtaaacaactggagatgacgaacaccggactgcgggtgagctggtcacggcagagtgaggaatatgaggacatgtcctcctttgacccgacagagttgtggtcgcagtcaaatcatggtcgccggacgaaggatgaatggaatgccggtgtcagtcagccggtgggtggactgttcagtctgtcggtgtccggctggcagcggagctattaccccgcatccatgaccgggagttaccggtacagcgatgacaacggtaaggacacggggattaccggcaccctgagcacacagattaagggcgtcagtcttaacctgggctggtccggttcacggaacacccggggagaaaacaactggtctgcatcggcgtcagtatcggtaccgttcacactgtttgaccgtcgctacagcagcagtacgtcggtgagcaccagcaaaggcggtggcacaggcctcagcaccggggtgtccggctcgctgaatgaccgtttcagctatggtctgggcggtggtcgtgacagtgatggcggtgccagcagttatctgaacgcgtcgtacagcggtgaccgggcttatctgagtggtgccctgaaccactcgcagtccggcggaaccagtggttctgtctcggtcagcggttcggtactggccgttccggcggcgaaagacattatgttcagtcgcacgaccggggataccgtggccgtggtgaacgtaaaggatacacccggtgtgaaggtgacgtccggtgacggacagactgacagtgatggcaatctggtggtgcccctgaacagctacgactggaacacggtgatgattgatgcgggcacactgccgctgagcacagaactgacgaacaccagtcagaaggtggtgccgacggacaaggcggtggtgtggatgccgtttgatgccctgaaagttaagcgttacctgctgcaggtgaagcagcgtaacggtgagtttgtaccaggcggaacctgggcacgtgacaataagaacacaccgctgggctttgtggccaacaatggtgtgctgatgattaacacggtggatgcgccgggtgatatcaccctggggctgtgccggatacctgcggcgaagctgcaggatactgagaaactacaggagattacgtgtgaataa

SEQ ID NO: 403451 - DNA, 483 bp, Salmonella enterica
atgaagaaaacaatgatggcagtcgccctggccctgagtgcactctcagcactggccgctgaatacagcgagaaaacgcagtatctgggggtggtgaacggtcaggtggtgggtaacagtgtggtgaaggtgacccgtacaccgacagacccggtgctgtaccggagtggagacacgacgcctcttcccgacagcctgaccgtccgcaacgcagagtccagggcggcatccggtggtctggcttatatcacggtgaaacaggctctgccggataacggggaagcccgtatcaccctgaagacagccctgatggtggacggaaagaaagtggcactcagtgccagacagcagggtgaggatgtggtgataaccgtcccggaggcaaagaggcgggttgagttaagaacggatgcgccggccgagctggaagtaccggtcagctaccggggaaatctgcagatagcgctgcaggtggaggactga

SEQ ID NO: 403452 - DNA, 789 bp, Salmonella enterica
atgaaaaagactctggttgcactggctgtggctgcatctgctgcagtatctggttctgctatggcgtggactgcaagcggcctaggtggttctgttgacctgggcggtaccctgaagccggtagacgtgattaccccgtgggaagttaaagtaggcgctgcggtaaataatctgaatgctgaaatccgcaaaggcgatacgaaagtttacatccctgtgaagaacgcaatccccgttctgggtattcgtgttgcagacgctacatggaaagctttctgggggcaaccggggattgctcctaccattgattatcatggtgcaattaatgtaaatgatttttctcgtggtgaagttccgctgactcttgatgtcaaaaatacgcaagatcagaaaattggctctttaactgttaatttatcagcaggtgcggaatatgctcgctataacccaagcactgataaaggtgaaaagtatgtgctctatcagaatagtaaaggagaattattttttggtggcttaggtactcatcgcgatgccgtttccccttattcttggactttagctaacactctagatccagagtttgttgctaactataacgatttcggtgttggtcaattatcgaatccatattatggcgatgtaggaaatacccaacttaattacagtgcattctatgcttccggtgttgttcaaggcaaaactatcaagctcactcttgagcagcctgctgcatcagatgctattgcatggaaagcttctctgccgattactgtttcttaccagtaa

SEQ ID NO: 403453 - DNA, 132 bp, Salmonella enterica
atgtcggagcaggtgttttttctgtcggaatgcgttgtgacgtatgtcggttctgtattgttttcagtgggaacacgttggaatgaactggtttttatttttatgtactccggaacagagcagagtaaataa

SEQ ID NO: 403454 - DNA, 798 bp, Salmonella enterica
atgaaaatagcgcatcattataaatcccttctttcagccattatttcggtggtcctgttttattcggcagcgccacatgccgatattcttgatggcggtgaaattcagtttaatggttttgtcactgacgaagctcctaaatggacctggcagataagttcgccggaccagacctgggcagtggatactgccgatgcgcgtacagataacgggcaactggtttttaatttgcgtgataaaggggctctgctgtttctggagggacatctgcatgaagtggctgagcgaggtggtcccggattcaccccctttattaccttcagcagtaacggacagccttttactgtgacggaaggaaatggtacctcagcacagcacttccgcgcctctgtcccggtgcgtgacccggagacgggaaatgtgtcgggacagctttccttcaccctgaatcaggggatggcagttagtgccggtgcacaggaagagggggcgacagtgccggcagggatgtcgctggtcggcggacagagtgtgactgacgtacagtcaggaacgttgccacagtggcttaaaacccgcctttccacattacttctgatgaaccagggttttggcaatggcatgagtgccgcagacaatggtcaggtcatctctcaggggatactggctgacggtcgggtgatgaatctggctgcggcatatgcctctgcggtgtcggattttgaactgcggttaccggcagagggcacacctgcagcatggcaggcagggctgaatgtgacggttacagtacagtga

SEQ ID NO: 403455 - DNA, 768 bp, Salmonella enterica
atgaaaaaggtgacgttgtttctgtttgctgccagcctcctgccttcctgcgtactggcctggaacacgccgggagaggatttcagcggagagcttaagctggaaggggcagtgaccagcacccgtaatccgtgggtatggaaagtgggggcaggctcccgttatctggactcagccagcccggctgtaccagttggtgagggagaggtgatggtccgggtaccggtgccggcattgcctgtattgctgggaaaaacggcattcacaacgacggccggacgtgaagggttgtcgccacgggttatctatggcaagggtatggaaaatttcagcctgtcatggacggcgccggggacggccgaggtggttctgccggtatccggggatggtaatgcagtatcgggacgttttgttttccgtctgcaggcggcaggtgtgttgcgtcatgctcaggggggacatctggtgtataccggtgtgtatgatgacctgaatgcgaatggtctgccggggcagacgcagatgatgcagacagagcaggtgccgggagcactacaggcgatgtttgcaggagaggggccatcctggcttcaggttatgacggttaccggttcagatggcctgagtcgtttcagtgatgcggccctgcgtcaggtggaaggcgtatatggtgcacagataatggccggttacggtgagttatatctgaaagggcaggttccgtcggtctggcatggttcactgccggtaagtattgagtaccagtag

SEQ ID NO: 403456 - DNA, 759 bp, Salmonella enterica
atgctgaatattattcatcgtctgaagtccggtatgtttccggctctgttttttctgacttcagccagtgtgctggcacaacccctgactattccgccgggccactggcaggagggaatggctgtgggggtaacggaattcagcggtacgctgtatgtccgcgatgtgtcctggcagtggcaaccccgcgctgtgcggatgagtacaccagacgccgtgcaggccggtctgacaacgggtaaaagtggaatggtcagtgaaagccggagagggcaggatttttatattcttggcgggcataccacatcgctgacaactgcccgtccggggctgcagccgtcagtgacattacttcaggtggcgccatcatctccccgtattgcggcccggggacaggtgcgttacggggaaatcacgttcacgatgcgccatcttctggcatggcaggacaatatcactgccggtcagggctggagcgtggtcagcggagaggtgacaccggaggccgaaaagcaggtgaaacgccagttatggcaggtgaacggctatgaatggaccccggactatgccgggttaaccgcgcgtcctgatgcgtttatttcgggcgctgagtcgctgttgtcacaggagaatggcagccagcatattgccggtgcctgggtgacatccctgagtgatgtgcgggtgaatttccccggtgctgaggaaccggtaaaacgctggcagggtaatctgacgccggtggtggtgtatttctga

SEQ ID NO: 403457 - DNA, 597 bp, Salmonella enterica
atgaatgtcgtaagcgtaagacaaaaaattcttctgaccggaacctgctggtatgaactgacagggctgtggcacctgttatcagcacagggatacaacgtttaccgtgtaccactggggtatccctgtgtccgggagggctgggacctggttattgttgcgctgagtgcagagactgttgcgggctgggggcgtcatctgtcctggatacgtgaactgagggcagaaatgtcaggtgaaatgctggttctggtaccggaaaggctggagatgctgaaggtgttgcaaaatatctgcccgatgtacagcggatgcatacctctgtcggaccgggaaagaacggttcgtattacactgaacagaaagacagcccgtaccggtaaattctgcctgacgtccggacaacgactggcactgaagcgtctttctgagagaggaagagatcctcctctgaacctgaaacaaagtgagcgggggctgtactggcattatgcccggctggcagagaatgtgggcgtcagggatttcaggatgctgttgatgaccgggctggaccgtgaggttcataaaatggaagaccgacaggatggacagtga

SEQ ID NO: 403458 - DNA, 789 bp, Salmonella enterica
atggacagtgattttgtatccgcagacagactgatgcgtgcgctcagcaacggggagtttaaaccgtatctccagccggtggtttctgcatccgaccttactgtgtccggtgcagagcttctggttcgctggcacatgcctgcaggcgaaatcattccgccggcatatttcattaaccgggtggaatctgccggtctgttgttatctctgacggaaaaaatcctgaaccgtgcggtggcagggctttcggaggttaaagccatgctgccgcgtggtttccggcttgccgtgaacgtgacgccggccctgctggctaagcgtgagttcactcagatgtgtctggcgctggcagggcatgacagcatacatctggttctggagctgacggagcagcagccgtttaacatggacagacagaccgaagagaaactgagccggctgtgtgatgccggagtggcatttgcgctggatgatttcggaaccggatgttccgtactgtcgtacctgaagcacttcccggtcagttatataaaaatggacaggagcttcacacaggacattctgagtgaaaagatatcccgatatattgtggagagcgttgtcgggctggcaggaaaactgggtattgatacggtggcagaaggtgtggaaacacaggcgcaggtgaattgtctgtgctctatgggggtggattatttacaaggatttttttttggaaaaccgaaagaaatagatgcatttatttgtaaatataatcagtgcggtttctataaccatgaggtgatttag

SEQ ID NO: 403459 - DNA, 318 bp, Salmonella enterica
atgaaggcggtttgctctgttatccttgtaaaggaattgctttgtatttccagagaaatattttataaagatgaggttctgttagttgattctgtttcccgggagaagtttttgccatatctgaattctgtgtcagagaactctgttagtgagaaattgttgacgggctatatggaaaaatatggtgagtttttcagggaagaacagggagggagagtggaaattatgcgagtgtcttctccggatgataaattaataaattcttttttaactatattaataaaaatacgcaacattcaggtgttttttatgagatga

SEQ ID NO: 403460 - DNA, 219 bp, Salmonella enterica
atggccattataaagtttcagctccctacaggcaaagtccggggattaccagtgttggactgcttcaatggaaaaattgtgaactgttctctcagaccacaccccgacgctgaactggtcaacaccatgctggataacgcagttgaaaccttaaatgcaggcgagcgaccaatgatatacgatgacagaggtaggcattatcgctacctggcaggctaa

SEQ ID NO: 403461 - DNA, 249 bp, Salmonella enterica
atgacctgtccggccccagtgagttccacggttagccgcagatcaggcgctcgagcaggggctgaagctagccagcatcctccgggtgacggcaggtgttatcagcgtgtcaagtttggcctgtattaccggaacttactcgcttcgctcctgcttccgttctatgtcccgcgccagcactggccccggctgtttttcatccagggcagcctgcactggccttgcaggaggggggaggagaactactga

SEQ ID NO: 403462 - DNA, 354 bp, Salmonella enterica
atggcagaaagaaagaaaaaaaccattactggtcaagtcttgaactccattaaaattaacaaactaaaatgtataaatggattaaacgagattatttttaaacctcatgcgttaaccgcaatttttccttctaagattataactcgcatacctgttctttttatgtatatctatatctatttttgtgacgagttcaaaccacaatgttcgcactccccatgcggcgttatgaaacatttccgcaacggctatagagtctgtattaactgcttcagtcatgtagtcgctaatacgttcagcggtaattttcgttatttcatcgtaattcattttatctcctacaagattatttaa

SEQ ID NO: 403463 - DNA, 339 bp, Salmonella enterica
atggcagatacagatgtggatttgattcttttcggtataagggctcaactggactactgcgttcagttgaatatacggtgtgagcgtcgcaaaaatgagcttcagcatcgtcagaacctgctttttaaagagattactgatgccctgaagaaatatgaatttataggctttggcattatttttactggtgatcatgagctgtgttgtaggacaccagaaggggactcttttccatttcctctgccagctttttcaatagtacgtgcgaacaaaagaaaaaaagacgccttcattttaaacccagagttaatggtaacggcgcgatctcatacactttag

SEQ ID NO: 403464 - DNA, 216 bp, Salmonella enterica
atgatggaaatcaaggctcaacagtttgtcacatcaacggggcggcaagtccttactgacaacggacaacaaggtatgggcggcgtggcgggtatcggttccacgactgaaaagcatcaggggcgcgtggcggaagcaatttttgcgaactgcgcggaactggataacgaccagcttaacgagatcatcgagtgggttcggctctatcagcgctga

SEQ ID NO: 403465 - DNA, 963 bp, Salmonella enterica
atgaaaaaggttttagctcgagggcgagttctcggcaatagcaattcagagttcgctcgcatgcttgaaggtgacggagagagcaaaacgtttactcttaagtctgggaaacaagcaaaattcattaaaacggttgtattaagcggagatatagaatctaaaacgttcgttgatgcatctgttaatggacgcgatcagactatgctttcgcgtgagtcagttagtgacataactcgcacgattaaacttcagcaattttttccggctattggtcgggaagtagatggacgaattgaagtattagacggtacgcgtcgtcgcgctgcctgtatctataacaacgtaaaattcgaaatactggttacaaaagacagtattgatattgccgacgcgagacaacttgcaaaagatatacagacagccagagagcatagcctccgagaactaggaaaacgccttgaagttacttatggggcaagtatgacaaaagaagagatcgctcaggctgaaagcatctctccggcaaaagtaacacgcgcatttcaggcggcatcagtaccggatgaaatgatctctgtatttccggtaatcaatgatatttcgttgtcggactatcaatttttgttgaaactgtctgaaaaggcaaccaacaaaaaaatgtcagtggaagagtttatggatagagttcgccaaaaactgatggctttacctgactatccaacaattgagaaaagcaaaatcctggcggtcctcaggtctgaaggaaaattgcttacagaccggcctgtaaaaacagttgaaactgagaagttgaaagagttttctgatcgtaaccaatttgccagaaagaagactgaccccagaaagcgtcttgttgtttatgagttctcccgcatatctcatgaggtgcagttagaaatcgatgaggctataaaaaacattctaagaaaactgtctgaatag

SEQ ID NO: 403466 - DNA, 213 bp, Salmonella enterica
atgacacagggcaggcgggaggataaatgcccgtctgcccgcgccgggaaaagaccgcgcgccggtggcgctgaaaggggccgcgctgacgcgccgccccttacattacgcggacattctgctgtgggcttctgtcttttcagatctgtcatttgtctgttactgatgatgttcctgctactgctactgtttttcttttttctgctgctctga

SEQ ID NO: 403467 - DNA, 381 bp, Salmonella enterica; identical to SEQ ID NO: 403395

SEQ ID NO: 403468 - DNA, 381 bp, Salmonella enterica; identical to SEQ ID NO: 403395

SEQ ID NO: 403469 - DNA, 381 bp, Salmonella enterica; identical to SEQ ID NO: 403395

SEQ ID NO: 403470 - DNA, 363 bp, Salmonella enterica
atgaagtcgatatatttaaaatctgttctggcttttatatttgtttgtgttatggctatgttgatatgtggtcttttctacaatgattaccttgagcaacaacctgcaacaccagaacaactgacagagattacacaggataccccctgtgcagcagaagcatttaaggaagctattaagtctgacacatctgattatcagcctgaacctttaagtcttggtaaggcaaaagagcttgcatcagcgtgtagagaaagaaacgaaatggcagaggtgaaacgggtaagagaaaatgagcgaaataagatacgtgaaaaacaacttcaggcattaaatgatgctcattcagcaaaggaacgttaa

SEQ ID NO: 403471 - DNA, 216 bp, Salmonella enterica
atgcatacctttatttttcttgtgctgataaaaaatattaacggtggcggaagctggaatgttacccccatgccaaatacggacgtatgcgtgcaggttcttcggacaatcgaagcacacggaggcaggggctttggaaatacaggggaatgtattgaggttaaaacaaataaacctttgaacaacgtgatggatacactgaatggggggcaatga

SEQ ID NO: 403472 - DNA, 474 bp, Salmonella enterica
atgcataaatcagaaactgaaaaaatagattctattctggatgaacatcaacagatatatcgcagacataaccgaatagataacatcctggcgttttttgcgtgtattgcatggattccctgtattattgctgcgttcggcgttgatggtatatatctgaaaatcctgtttgcggtccttgcctgctgtggtgcggtatgcttttttattttcttcttcaccctcctgccggaatcactcatggtcctcagccgtcagagcctgcttcagcttatgcgtctgactgaagacgtaccggatgcgagacaggaactgcttaaccgtctgctgtccggtaaaaaactgactggtcgggatgaaaaggatatccggcgtctctggcaggagaaagtggatgcaatgcaggagtctgccacccgtcagcgtgaacaggataccatcaggaagtttactgaagagaaaaaatccgaatga

SEQ ID NO: 403473 - DNA, 198 bp, Salmonella enterica
atgaacatgcgtaatattaatgttattactgcctgctctgtaccggataaaagcgtatcagatgattttatgcatgctgttctcagtaactgcgccacaggaatcgtacttcctgcaccggagaaattcggttctgagtcattgccggacaattttactatgactgctgtcggtgtgatgaagaattcagaaatataa

SEQ ID NO: 403474 - DNA, 381 bp, Salmonella enterica; identical to SEQ ID NO: 403395

SEQ ID NO: 403475 - DNA, 381 bp, Salmonella enterica; identical to SEQ ID NO: 403395

SEQ ID NO: 403476 - DNA, 195 bp, Salmonella enterica
atgaaatttaaatatgctttaacttctctcgcattatctgttgcaattttgtcatcagtaccttctactgctttcgccatcggcggcgccagcggcgctaaagtggactatcaggtccagggaaaaattggcgaagttgttatgaacccctatgatatcgcgccgttaaccgccgttaaccgccgttattcgtaa

SEQ ID NO: 403477 - DNA, 381 bp, Salmonella enterica; identical to SEQ ID NO: 403395

SEQ ID NO: 403478 - DNA, 381 bp, Salmonella enterica; identical to SEQ ID NO: 403395

SEQ ID NO: 403479 - DNA, 1140 bp, Salmonella enterica
gtgtcagagcaactggagcttatcagcagcgcctttaaggttatcgaaacacaacgtccgaaacaggcctgttgccggtgcgaccatatcgtgcaggcaccagtaccttcaaaacccattgcacgcagttatgccggagcggggcttctggcccatgttgtcaccgggaaatatgcagaccatctgccgttataccgccagtcagaaatataccgtcgtcagggagtggagctgagccgtgccacactggggcgctggacaggtgctgttgctgaactgctggagccgctgtatgacgtcctgcgccagtatgtgctgatgcccggtaaagtccatgctgatgatatccccgtcccggtccaggagccgggcagcggtaaaacccggacagcccggctgtgggtctacgtccgtgatgaccgtaacgccggttcacagatgcccccggcggtctggttcgcgtacagtccggaccggaaaggtatccatccacaaaatcacctggccggttacagcggtgtgcttcaggccgatgcttacggtggttaccgggcgttatacgaatccggcagaataacggaagccgcgtgtatggctcatgcccggagaaaaatccacgatgtgcatgcaagagcgcccaccgacatcaccacggaagccctgcagcgtatcggtgaactgtatgccatcgaggcagaggtccggggctgttcagcagaacagcgtctggcggcaagaaaagccagagccgcgccactgatgcagtcactgtatgactggatacagactcagatgaaaacactgtcgcgtcactcggatacggcaaaagcgttcgcatacctgctgaaacagtgggatgcactgaacgtgtactgcagtaatggctgggtggaaatcgacaacaacatcgcagagaacgccttacggggagtggccgtaggccggaaaaactggatgttcgcgggttccgacagcggtggtgaacatgcggcggtgttgtactcgctgatcggcacatgccgtctgaacaatgtggagccagaaaagtggctgcgttacgtcattgaacatatccaggactggccggcaaaccgggtacgcgatctgttgccctggaaagttgatctgagctctcagtaa

SEQ ID NO: 403480 - DNA, 1140 bp, Salmonella enterica
gtgtcagagcaactggagcttatcagcagcgcctttaaggttatcgaaacacaacgtccgaaacaggcctgttgccggtgcgaccatatcgtgcaggcaccagtaccttcaaaacccattgcacgcagttatgccggagcggggcttctggcccatgttgtcaccgggaaatatgcagaccatctgccgttataccgccagtcagaaatataccgtcgtcagggagtggagctgagccgtgccacactggggcgctggacaggtgctgttgctgaactgctggagccgctgtatgacgtcctgcgccagtatgtgctgatgcccggtaaagtccatgctgatgatatccccgtcccggtccaggagccgggcagcggtaaaacccggacagcccggctgtgggtctacgtccgtgatgaccgtaacgccggttcacagatgcccccggcggtctggttcgcgtacagtccggaccggaaaggtatccatccacaaaatcacctggccggttacagcggtgtgcttcaggccgatgcttacggtggttaccgggcgttatacgaatccggcagaataacggaagccgcgtgtatggctcatgcccggagaaaaatccacgatgtgcatgcaagagcgcccaccgacatcaccacggaagccctgcagcgtatcggtgaactgtatgccatcgaggcagaggtccggggctgttcagcagaacagcgtctggcggcaagaaaagccagagccgcgccactgatgcagtcactgtatgactggatacagcaacagatgaaaacactgtcgcgtcactcagatacggcaaaagcgttcgcatacctgctgaaacagtgggatgcactgaacgtgtactgcagtaatggctgggtggaaatcgacaacaacatcgcagagaacgccttacggggagtggccgtaggccggaaaaactggatgttcgcgggttccgacagcggtggtgaacatgcggcggtgttgtactcgctgatcggcacatgccgtctgaacaatgtggagccagaaaagtggctgcgctacgtcattgaacatatccaggactggccggcaaaccgggtacgcgatctgttgccctggaaagttgatctgagctctcagtaa

SEQ ID NO: 403481 - DNA, 348 bp, Salmonella enterica
atgaaaacactgtcgcgtcactcggatacggcaaaagcgttcgcatacctgctgaaacagtgggatgcactgaacgtgtactgcagtaatggctgggtggaaatcgacaacaacatcgcagagaacgccttacggggattggccgtaggccggaaaaactggatgttcgcgggttccgacagcggtggtgaacatgcggcggtgttgtactcgctgatcggcacatgccgtctgaacaatgtggagccagaaaagtggctgcgttacgtcattgaacatatccaggactggccggcaaaccgggtacgcgatctgttgccctggaaagttgatctgagctctcagtaa

SEQ ID NO: 403482 - DNA, 150 bp, Salmonella enterica
atgatacagtacctgaacgtctttttttacgacatctacccctatatttgcgccacggtattcttcctcggcagttggctgcgctatgactacggacaatatacctggcgcgcttgtccagccagatgctggacaagcgtgggatggtga

SEQ ID NO: 403483 - DNA, 435 bp, Salmonella enterica
atgtcgtatacacccatgagcgatcttggacagcaaggcttgttcgatatcactcgtaccttattgcagcagcccgatttggcgtcgctcagtgaagcgctttcgcaactggtaaagcgttcagcgctcgccgacagcgccggcattgtgctatggcaggcgcagtcgcaacgcgcacaatattatgcgacgcgagaaaatggccgtcctgttgaatatgaagatgaaaccgtactggcgcacggcccggtacgtcgcatcctttctcgccccgatgcattgcactgtaatttccatgagtttaccgaaacctggccgcagcttgccgcgagcggcctctaccctgaatttggtcattactgtctgcttcctttagccgcggagggccgtattttcggcggctgcgaattcatccgtcaggaagatcgcccctag

SEQ ID NO: 403484 - DNA, 360 bp, Salmonella enterica; identical to SEQ ID NO: 376730

SEQ ID NO: 403485 - DNA, 168 bp, Salmonella enterica
atgatgatgcacctgattcattgcctcttggcaatgatttcactgagacgttgtggtttaaccctccacgttctgatacccgaaatggtgtgtggtggtttgataatgtggcgcatcgtgccgttcctgttgaaacattacgtcgccctccgggacccggtcatctga

SEQ ID NO: 403486 - DNA, 141 bp, Salmonella enterica; identical to SEQ ID NO: 401864

SEQ ID NO: 403487 - DNA, 294 bp, Salmonella enterica; identical to SEQ ID NO: 16571

SEQ ID NO: 403488 - DNA, 573 bp, Salmonella enterica
atgatcatgcttattggctatgtacgcgtgtcaacaaatgaccagaataccgatttgcaacgcaatgcactgaactgcgcgggatgtgagcggatttttgaggacaaaatcagtggcaccaagtccgacagaccggggctgaaaaagctgctcaggacactatcggcaggagacacgctggttgtctggaagctggacagactggggcgcagtatgcggcatcttgttacgctgatagaagagctgcgccagcgtggcgtgaatttccgaagcctgactgacagtattgataccagcaccccaatgggccgtttcttttttcatgtcatgggtgccctggctgaaatggaacgcgaactgatagttgaacgtaccagggcagggctggctgcagctcgtgctaaaggcagagtaggtggacgccgtcctaagttgaccagcgaacagtgggcacagattgggcgtttactcgaggccggagaatcaagacagcgtattgcactgatttttgatgtaggcgtttctaccatttatcgaaaatttccggcaaataagaacaataaatctccctga

SEQ ID NO: 403489 - DNA, 678 bp, Salmonella enterica
atgactaaaaaatctgagaaggaaaacgatcgtattcagattagtgcgttttggttatcggaacgacaatctccgtatgcatataattttttgaaaaaaaatgccctaacacatcgtggcgagcagatttctctaataagatctgcaatcactacggggttagtgctaaataatctcttccccgagttatctagttttattaatggactgaatgagagattaacagctgctgatctaaatcgattttttaatgatgaatttaataaagacaaattaaacaatgaaaatttgaaagaacaaataagctttatgcttgattcgaaattcaatgaattattttcaatgattaatggctgtgatttttctaaggcaactttttcaactactagtcaatctgatgtcagtgaaacattaaaggcagagagggtaagggatcagcggctggaattaatacctaaagaactgactgtaaatcccaaacctgagactttagagattttaacgccgattgagagcgcaaaaaagaatgattcaggtttaaatactagtcatggttctgctgctgttagcgcctcacaaagcgaaaacacggtgctgagtgaacatacgcaaatccaaggtgtgacaaggaagccgaagaaaaaggccaatgcaaacctcgcaaatcttgcgaagtaa

SEQ ID NO: 403490 - DNA, 174 bp, Salmonella enterica
atgggacacgcccagctttcctccatggtctggcgattaagggggttaaatgccacggtacgcaaccagcttccctccatggtctggcgattaagggggctcaatgccacggtaccctaccaactttctaccatggtcagtcgattcaagtggttaaatttcgttattgaataa

SEQ ID NO: 403491 - DNA, 333 bp, Salmonella enterica
atgttacaccgttcagaaagcctgctgacgctgtggcagcatcacagtctgagtattctctggtgcaatacaaaaaccggactttcccgtaacaacagacaatgttacgggaaaagttacagaactgagccacaaaatatctcagtacctgagatgcataaaaacaccgtacatatgtttctcaaaagggggatgatcgttatccagccatttcggtggatcggtatgcagaacaccaatctgcttcatgccggtatgctgcctggattttctcgcgcagtaatcactgtcttcatggggtcgtttgcgggagagggcgaaatcctacgctaa

SEQ ID NO: 403492 - DNA, 720 bp, Salmonella enterica; identical to SEQ ID NO: 8275

SEQ ID NO: 403493 - DNA, 501 bp, Salmonella enterica; identical to SEQ ID NO: 401975

SEQ ID NO: 403494 - DNA, 186 bp, Salmonella enterica; identical to SEQ ID NO: 376959

SEQ ID NO: 403495 - DNA, 210 bp, Salmonella enterica
atgcagtttgactggagcgccatctggcccgccattccgcttttgcttgagggcgctaaaatgaccctgtggatctcggtcctcggtctggctggcggcctggttattggactggcggcaggttttgcccgtacgtttggcggctggttcgctaaccacatcgccctggttttcattgaaattattcgcggcacgcctatcgttgtctag

SEQ ID NO: 403496 - DNA, 459 bp, Salmonella enterica
atgggggacgaaaagagcttagcgcacacccgatggaactgtaaatatcacatagttttcgcgcccaaataccgaagacaagcgttctatggagagaagcgtagggcagtaggcagcatattaagaaaattgtgtgaatggaaaaacgtacgaattctggaagcggaatgttgtgcagatcatattcacatgcttctggagatcccgccgaagatgagtgtgtcgagtttcatgggatatctgaagggtaaaagtagtctgatgctttacgagcagtttggggatctaaaattcaaatacaggaacagggagttctggtgcagagggtactatgtcgatacggtgggtaagaatacggcgaagatacaggactacataaagcaccagcttgaagaggataaaatgggtgagcaattatcgatcccgtatccgggcagcccgtttacgggccgtaagtaa

SEQ ID NO: 403497 - DNA, 459 bp, Salmonella enterica
atgagggacgaaaagagcttagcgcacacccgatggaactgtaaatatcacatagttttcgcgcccaaataccgaagacaagcgttctatggagagaagcgtagggcagtaggcagcatattaagaaaattgtgtgaatggaaaaacgtacgaattctggaagcggaatgttgtgcagatcatattcacatgcttctggagatcccgccgaagatgagtgtgtcgagcttcatgggatatctgaagggtaaaagtagtctgatgctttacgagcagtttggggatctaaaattcaaatacaggaacagggagttctggtgcagagggtactatgtcgatacggtgggtaagaacacggcgaagatacaggactacataaagcaccagcttgaagaggataaaatgggtgagcaattatcgatcccttatccgggcagcccgtttacgggccgtaagtaa

SEQ ID NO: 403498 - DNA, 147 bp, Salmonella enterica
atgaaccgcactgatgattccataacgcaactatctacactttatgaacggctcggagctgtggctcatgactggaatattgtaaaattctgctccctgaacactctgaacaactggatcttgatgccgcagcaacatatgcaatga

SEQ ID NO: 403499 - DNA, 456 bp, Salmonella enterica; identical to SEQ ID NO: 381524

SEQ ID NO: 403500 - DNA, 228 bp, Salmonella enterica
ttgtcacaagaaggcctctatccggaggccttcttttttttgtctatggaaaacccccagctaggctgggggttccggaaagctttcagctttaagccagttattaaaaccccttttgatttgttaaaacatcttgcggtctggcaactgcaaaagttcaacaagaaatcaaaagggggtcccaatgggggacgaaaagagcttagcgcacacccgatggaactgtaa

SEQ ID NO: 403501 - DNA, 579 bp, Salmonella enterica
atgttcacagatcatctcgcgcgccatatgctgatggtcgccgtggtgatgttcttcgcctttagctgtctgtttacgctctccccgcagaacatggcggatgcgaaagcgcagaacattccggtactttcctacctggccaaccatttcgcctctttgtcggggacaaaatccacttttgcaacggtgctggagtatggcgcgtctatcatcgcgctggttgctattttcaaatctttcttcggccactacctggggacgctggaagggctgaacggcctggtgctgaaattcggttataaaggcgataaaaccaaagtctctatgggcaagcttaataccatcagcatgatcttcattatgggatctacctgggtcgtagcttacgcaaacccgaacattctggacctgattgaagcgatgggcgcgccgattatcgcctcactgttatgcctgctgccgatgtacgccattcgtaaagcgccgtcgctggcgaagtaccgtggtcgtctggataacgtgttcgtcaccctgattggtctgctgaccatcctgaatattgtctacaaattgttctaa

SEQ ID NO: 403502 - DNA, 846 bp, Salmonella enterica; identical to SEQ ID NO: 26814

SEQ ID NO: 403503 - DNA, 1431 bp, Salmonella enterica; identical to SEQ ID NO: 26815

SEQ ID NO: 403504 - DNA, 375 bp, Salmonella enterica; identical to SEQ ID NO: 26816

SEQ ID NO: 403505 - DNA, 3888 bp, Salmonella enterica
ttgaaagagaataaagaccgtatcgcaataattgacgctattcagggggcgagcacaaacgaacttaacgctcttgctgagatcaaagacgccattctctctggtagagggtctataactcaacttggtgaaaatcaaggtaaagtaagtcaaagactatcccgtagactcatagcaagcgaaccctatgtctctgatgatgccaagaatacccaagctaacccatatataaaacgccttccgatgaaaaaagggaggacgcaggtcaacaacggagaagaacgtctcattgttgcaaccaacacatcagagcgcgttcattttgcgtcatcacgccagtcagcccaaaagttgaaaggttctgtgccattagccgctaattctgctcctcttgaaccacaatccccccaaagccaaaaaggaccgcttcgggatagtaacggacgctttgtatcccagaaaaacaacgaagatatagccagaaaaaaagaatggcagaaagcacataaggccgacgccaaactacaagaaggcttcctccggaaattaggctccattataggggtagatggcaatcagtcttccagtgaagagtctttaacagatgccgcaggtgttggcgctggtggtccgttgtggatggctgctcgcggcatgtacgacattactaaagagatcacaggtaaagcagaatctcttaaagaatgggtagaaaaggggaaaggtgaggcttcaccttcgaaagcgacatctccagctatcacttatccggcggtggttaatactcaaaaagcaacctctgcaacagcatttaataatgctgttgagacaaaatcagcacaagcagtagaagagcaaacaaaaattcttcagaccaatgacaacaaaataattgatggtctggaaaatgtctccgacgaagtagttaagctacgcaaatcagtatcttctgggaataagttcggcttaagtgatctctggagaaatcgagcaagcagaagaaataaaatcaatattggcgatcaggctggtaaaaataaacggaacaaaccgaaaaggaaaggtcgcaatctggggaaaaaagcccttactgttggtgaaaaagccgctgccggaaccgctgctgctggagctggtgccggagctgcaaagactgttaaaacaaaggttagtaaagccaaagacatcagcaccacaagcgacgcatctaagggtattgctaaagaaacaaaaaacacagcaaaggcagttaagccagcaggtgttgttgccgaagaggccacagttaaaacaggtgaaactgttgcaaagaaaaaaaccgaatccgtagccctcaaaagtgctgcaaaaataggtgttaaatcagctgcttctacagctgcaagagctatccctatcatcggttcgctggctatggcgggatatgacgctatagatggttacactgatacagatgcgcaaaaggcagcctttggattaagtgacgatgatgctgtagccgaacagcaaaaaacggcttacgcaacagctaatgtgctcgatatggggggcttggtgtcgggcgcaacgaacttgatagggaaaggaatttctgcgctaggatttgaaagagcaggtgaaaaacttcagaattttgataccggagatattgctcgtggtgttaacggcgcggtagatatcaccaaatctgtttttggtagccttaaggatacatttttatccactgacgaaaacacgaaacaagtaaaaaaagctgttgaagacggcaccaaaaaaactgtcgatgcgattcattctctaggtgaacaattacaaggtgggcgtaatggcgaggatggagttggtgagcacgggtatacttctccaactgaatttagttcacctgccaacaacaccattgcagcggatctgaatattggcggcagcaacgctaaaaaccgcaattaccgaaataataatctcggcaatcttgtttttgccaaccaggaaggggcgacgctggaatcgccaaatgcaaaaggtgaacaacgttttgcgcgatttaacacacctgaagaagggatcagggcactggcaaaccaggtttccagctattacaacggcaccagtgccgcagcgggatatcagaagttacagacggtatccagcatcatttcaaaatgggcaccgccaaatgagaacaatactaaccaatatattgataacgtcagtaaatatcttggtgtatcgcctaatgaaaaaatagatgtcagcaaaccagaggttatgacgcaattagttcgtgcaattgcgacgaaagaaggcggaaatccggcagttaataatgagttcattaagaacgcacttggagcatttaacacaaacactggtctatgggagggacaattctctgacgaaacattggcgcggattaataaaattcagaaagaaaatggtggtcagctaattgcccgcgattcgcaatatagtgttggtcgcaaggtaaaatatgctaatggaaaatctccagctcaaccagttttgaatgccgttccgacagcaacacaacagccaattgaggttgcacaacatgcccaggcagtcaaaaagccacaaaaaacaggtaaccaaccacaaccgattaatccagagaacactgatgttaataccggctctccatcgagtttgcttgagcggttaatcgcaataaatgaaagcggaatcagtggtgcaagtaatttatttggcggcgcggctaccagccttgctggaacaagtctggacctggtaaaggattttgcgttggctacttcgtttggttctatatcttcgctttccgaaaaagcgaaaggaatggatcaggctcttactgaaaagatatccggcttaaccggtaaatcttttggatttaaaaaagcttctcaagcggctgatatcgcaacagccatacaacaaaaacgcactgttaatcacgatacagaaatcattgatctacttccgggagatcaagtatccccttctactccgaaaactccacagcaggagcaggctctagcaatcagccaggctatggcgggcttttcatctgcagcgccagcaccgaaaactccacagcaggagcaggctctagcaatcagccaggctatggagggcttttcatctgcagcgccagcaccgaaaaccccacagcaggagcaggctctagcaatcagccaggctatggcgggagctgcgccagtagttacctctggaaaacgaactatcacggcaccaagtgatgtgcagatttatgacaacggctacaaggtggttacaggtgaggataagagcttctttggttcgctatttgattccacggtgtcagggcttaaacagacaggaaccgcagtaattcctgccgttggcgataacctttcacgacttgttggggggattgatagtacagggatattgaacgatcttgtaatgcagtctactgggcagaatagtgcgattgcgcgagctattagcccattaacaagaaatgttggagactggctgaatggggggattcaacaaaccgctaatagcattaggggaatagcaactggtgccaataacgccatatttggctctgcttcagctgtgcaagaaccttttcttgctatgccgccacaactccctactgtaaccgatctcgcacgaagcggaataagacaaccattaactactgacactataaataacgatcctgctatgttgaaggcgctggataacatctgctctatcctgaacgatctgctgaatgtgaacaagaacaatacaaaaggcgatccggataatgttgtcaaaacatcgcagccgcagccgcgaccacgtgcgagcacaactattaatgaccagtcgctggatgctctgcttgaggattaa

SEQ ID NO: 403506 - DNA, 735 bp, Salmonella enterica; identical to SEQ ID NO: 26821

SEQ ID NO: 403507 - DNA, 1659 bp, Salmonella enterica; identical to SEQ ID NO: 26822

SEQ ID NO: 403508 - DNA, 279 bp, Salmonella enterica; identical to SEQ ID NO: 26823

SEQ ID NO: 403509 - DNA, 1653 bp, Salmonella enterica
atgaatcgggcggcaagcgtcatggctatgaccgtcgatccgaccaccgatgcagcaggcaacatgattgctgaccaggcagtaatgatggaaaacctggataaagcaatccagaaagtgcctatgtttgaaggcgtaaatccagaggtcgctcgtcagatcactggtgggtgggctatgtctctgcatgagtataaacgtcaacatggtcattacccggcaagtgacatcctggcgaacgcacacatggctcttgaacgcctgatgactgaatgtgccagtgatacccatgaaggcacgggtaaggcaatgtttgagtctgtcgcgcaatcaatgcgtagctctgacggcgtaatgaaagttgctcaatatgctgctctaattctgcctgcttctctgggcgctgctaccagtgatgcctgtacttttgttccttgtgatcgtgacgagtcaaatatttatgaactggtcaacgtagcaggcacaaaattcggcaccttcaaccaaggtgacgaactgaatatgcagtcagctggtgtttattctcaaatgaagcgcctgtatgccctttccactaaaggggatggcagcaccaaaaccttccagttcaacatccaaaaatttgagggacaatcctgcccgcttcgcgctggttataacaaactgctgatcaaccgcaaaccgtccaaagttgacgacggcgatggcaacctttatttcaatgctaaagacagcaaaggtaatactttctcagcgactgccaaagttgcctatgacactggtgtcattgacattacatttacccaggctccgccagtaggtactgaaattgctgttcaggtcgaaattaacatcgagcgcaatccaagcctgattccggtgatcaaccaggctatgcgtaagtacgaagttcgtccgtcccagtacgtacttgcttccgaacacacggtaatgtccgcatccgatttaagccgtgagcacggccttgaattagcggcacttcagttctccgcgatgcgtaactggatctcccatgaaaccgacatcatgcgtctgcgcaccctggtattccataccgtttatggtcgtgaatttgatgtggctctgccggaagctcaaaactatgagtcctgggtcggcctcctgcgtcacgcagtaaacgctctgtctcaagaaatggcaaatcgtaccctgacaacgggtattcgtggcggctttgctggtagtgacgccgcgaacttcctgcgctctctgcctccacagcacttccagatcgcaccaggttacgttcagtcgccgtatgtacagtacatcggcaccctgtttggcacgattcgtatttacgaagtgccgcaacctgtctgtgagcaattcctggcacagggatatgacttcgggctggatgacatcttcttctatgggcgtggcgaaggcatcggtaaagccggtctgattgctggtgatgcagtcccagcaatcccttacgttcacgaaaccaatccgtctctcgttaaccgtaccactctctggggcagtgccatcaacgaagtacatcctcgcaacggtgaaaactacttcacccgcctgcgtctgactcgtgccaaagaaggtgctatcgacatgctgacaggcaaggttaacgaaaaaaagtga

SEQ ID NO: 403510 - DNA, 333 bp, Salmonella enterica
atgaaatcactcgccttgaaaatgcgttacgccgtgctgggattaacgatgtgcgtgtgcctgatgacgttatcaggatgcagcgggaacgggcaaaagccatcaaccagcgtgccagtgaaaattaccgtagaagccaccagcaggccgcaggcaaatctgattgattactccccttgtttagtgccagaagacacgccagtgctgttaaacaagtatccgacatacgctgaacagttattcagcacgatcgacgaatgcaaccaacgaaacgcactgaataaccaaagaaacagggagatttgggaagggaagggggatcaaggctcctga

SEQ ID NO: 403511 - DNA, 804 bp, Salmonella enterica; identical to SEQ ID NO: 26827

SEQ ID NO: 403512 - DNA, 339 bp, Salmonella enterica; identical to SEQ ID NO: 26829

SEQ ID NO: 403513 - DNA, 288 bp, Salmonella enterica
gtgattaaacctcgtaaatcggtaaaagcccccgaagtaaaagaccccgatcttgaacgccgaattgaggattttgcaagtaaggctgatttggtgccgggtgagcaaccagaagacaacaaagtgctcgataaggacgccccacgtgattttaaatctattcgtgttggtttcaatgaatacgagtaccaggtacttgatgcgttaagtaaaaagcataatcgcagcaaattgaatatgatccgccatgctatcctcatgttagcggagtctgaggaagcaaaataa

SEQ ID NO: 403514 - DNA, 1662 bp, Salmonella enterica
atgagtgaggcagaagcccgcccgactaactttattcgtcagatcatcgatgaagatctggcaagtggtaagcacaccacagtacatacccgtttcccgccggaaccgaatggctatctgcatattggtcatgcgaaatctatctgcctgaacttcgggatcgcccaggactataaaggccagtgcaacctgcgtttcgacgacactaacccggtaaaagaagatatcgagtacgtcgagtcgattaaaaacgacgttgaatggttaggttttcactggtctggtaacgtccgttactcctccgattattttgatcagctccacgcctatgctgttgaactgatcaacaaaggcctggcgtatgttgacgaactgacgccggaacagatccgcgaataccgcggcaccctgacgcagccgggtaaaaacagcccgtaccgcgatcgcagcgttgaagagaacctggcgctgttcgaaaaaatgcgtgccggtggttttgaagaaggtaaagcctgcctgcgtgcgaaaatcgacatggcgtcgccgtttatcgtgatgcgcgatccggtgctgtaccgcattaagtttgctgaacaccaccagactggcaacaagtggtgcatctacccgatgtacgacttcacccactgcatcagcgatgcgctggaaggtattacgcactctctgtgtacgcttgagttccaggacaaccgtcgcctgtacgactgggtgctggacaacatcaccattcctgttcacccgcgccagtacgaattctcgcgcctgaatctggaatacactgtgatgtccaagcgtaagctgaacctgctggtgaccgacaagcacgttgaaggctgggatgacccgcgtatgccgaccatttccggtctgcgtcgtcgtggttacactgcggcttctattcgtgagttctgcaaacgcatcggcgtgaccaagcaggacaacaccattgagatggcgtcgctggaatcctgcatccgtgaagatctcaacgaaaatgcgccgcgcgcaatggcggttatcgatccggtgaaactggtcatcgaaaactatcagggcgaaggcgaaatggtcaccatgccgaaccatccaaacaaaccggaaatgggtagccgtcaggtgccgtttagcggtgagatttggatcgaccgcgccgatttccgagaagaagctaacaagcagtacaaacgtctggtgctgggtaaagaagtgcgtctgcgtaatgcttacgtcattaaggctgaacgcgtggagaaagatgccgaaggtaatatcaccaccatcttctgtacttatgacgccgacaccttaagcaaagatccggcagatggtcgtaaagtgaaaggcgttattcactgggtgagcgcggcacatgcgctgccggttgaaatccgcctgtacgatcgtctgttcaacgtgccgaacccaggtgctgcggatgatttcctgtcggtgattaacccggaatcgctggtgatcaaacaaggctttgctgaaccgtcgctgaaagaagcggtagcgggtaaagcattccagtttgagcgtgaaggttatttctgcctcgacagccgccattctacggcggaaaaaccggtatttaaccgcaccgttggactgcgtgatacctgggcgaagttaggttaa

SEQ ID NO: 403515 - DNA, 906 bp, Salmonella enterica; identical to SEQ ID NO: 26776

SEQ ID NO: 403516 - DNA, 654 bp, Salmonella enterica; identical to SEQ ID NO: 26777

SEQ ID NO: 403517 - DNA, 981 bp, Salmonella enterica; identical to SEQ ID NO: 26778

SEQ ID NO: 403518 - DNA, 768 bp, Salmonella enterica; identical to SEQ ID NO: 26779

SEQ ID NO: 403519 - DNA, 303 bp, Salmonella enterica; identical to SEQ ID NO: 26781

SEQ ID NO: 403520 - DNA, 339 bp, Salmonella enterica; identical to SEQ ID NO: 26782

SEQ ID NO: 403521 - DNA, 207 bp, Salmonella enterica
atgaacattaaaactatccgtacagaacaagattatgaggccgcactgcgtgcggtagaaccgatgttcgataacgaaccggaaacgaacaccccggaaggtaatttcttggaggttatgtgtcttctcattgaggagtacgagaaaaaacattacccaattgagccgccatcacctattgaagccattaaatcccgtatggaatag

SEQ ID NO: 403522 - DNA, 741 bp, Salmonella enterica; identical to SEQ ID NO: 26784

SEQ ID NO: 403523 - DNA, 330 bp, Salmonella enterica
atgggctatagcagactcgacgataggtacattgaagacgatatttttcgtgcgctgtttcaccaggaaatgattaagcgggtatcggagtatcactctgataatttccagtacacgataaagattgatgaagtatatcgttcagaccttgcagcctacagggcgtatggcaatgcagatttgcgctgggtattccgggtgctggtgggccatgagtcagaaatggaagaaatgcccgcagggaccacgttaactcttcctgatgtggcatggctgaggaacaagatccgtgattacgcaagcgcggaaccggagatagaaaatgcctga

SEQ ID NO: 403524 - DNA, 135 bp, Salmonella enterica; identical to SEQ ID NO: 26785

SEQ ID NO: 403525 - DNA, 654 bp, Salmonella enterica; identical to SEQ ID NO: 26786

SEQ ID NO: 403526 - DNA, 609 bp, Salmonella enterica; identical to SEQ ID NO: 26787

SEQ ID NO: 403527 - DNA, 393 bp, Salmonella enterica
ttgaaaagattggctattgctttactggcgtctttccctttgatcgcgagcgccggaaatttacaagttaagtgcggtcggtttgatataaaaatctatccagatgccatatttctgaatgggaataaggttgataacgcacaccgaaaaactgaatctgacgtaatgagctatgtgttccaggagtatgcggagatggggggaacttacacgctgtactcgctggatgttccttctcgcggtgatatgacattatcccatcaatggcagaacgccgatggcgaagctctgcgcgaggttaaaacagaaaaatgtggcactttccattcttttaaagggaaagcgccaaatgttaaatctgtgcttgaaaaacagcgcgcaggtgagctttaa

SEQ ID NO: 403528 - DNA, 312 bp, Salmonella enterica
atgaaaaaaatagatttcacttattctgccgccacacttgagcggcgcttcaccctcattagagagttggaactgtcaaaagtctggtatcaaatcctactggatgaagagttttcactgatggttatagcagaaaaattggctatgccgaatgaccggcacaaggtcatagccagcctcgatctggtgacaaacagatactgggaaacagaggaactacatgaggcgggagtaattcgtgacctgatggagaattccgttccccgccgctatcgtgcaggaaacggcatctccgtggttaaaggtgtttaa

SEQ ID NO: 403529 - DNA, 942 bp, Salmonella enterica
atgaatctgtccatctctcaaaaagcgacaatgaccagcattgagatcgcggaactggtaggaagtcgccaagatagtgtgaagagaactatcgaaacactggctaaaaagagtgtgatccaatttccacaatctgtggaaattgaaaataaacaatcagttggccctcgtcgattttccaaggcttacatatttgaaggcgaacaaggaaaacgagacagcatcattgtcgtcgcgcagctctctccggaattcaccgcccggctggtggaccgctggcgcgaactggagaatgcccgggtacagttaaaatcaaaagccgaaatcctggctgaaatggcgcaaatgcatcttgagcatgaacgccggatcaacgccgtaaatgcccaggtagccgaggtatcagcacaagtatcgatggtcgctgaaacactcgagcaaataaagaaaggcaatattccggaaggctacattggctaccgccagctggcggcgaaatgtggcctgactgaagccaaatgtcgcaacctggttaacgctttccggattcccaccgatacgcatgagtttttaactccagatggtttgcttgcgcgacgctccattgtggccctggcccccttccggaaagcctttaagcaggtgatgtcggaggcagaaccacgcaataaacgctggtatcatccaaagatggggatgtttcaggcaatccaccatcctgtgcctgaaagcccaaaggataatctgtcactacataccgtcagagagaagatcaggactggatacgcaacagtgtgtcgtcgttcttcctggcctgaaggtatatgggtgtggcccgaaggtggatcacgaaagcactggcgcaccatccgtgacgggaaaatccatgctattgatttagctccagaggatgttattgctatggactggattgttagttaa

SEQ ID NO: 403530 - DNA, 216 bp, Salmonella enterica
atggctactatccctaccccaactcattctgaatttatctggcgtttctattcctgccaaaaacacctgtatatctgcgtcatggctgcaaccgaagcagaagctcgttcataccttcctgaagaaccctgcatttttgccgcacgcttcactcttgatgcgatggagatcctcaattactggaatctgccaatgaactgcgtggaggtgcactga

SEQ ID NO: 403531 - DNA, 168 bp, Salmonella enterica
atgactgttcgctacctcaactttcaaatcaagaacattactggcggttgctatgactggtttgtcactctcggaaaagaagtgattaccgggaagctggatgaagtgaaagctaaagcaatggcctacgcctgcaagcaagcccggaagaaatccgccaaagcataa

SEQ ID NO: 403532 - DNA, 579 bp, Salmonella enterica; identical to SEQ ID NO: 26788

SEQ ID NO: 403533 - DNA, 153 bp, Salmonella enterica; identical to SEQ ID NO: 26789

SEQ ID NO: 403534 - DNA, 612 bp, Salmonella enterica; identical to SEQ ID NO: 26790

SEQ ID NO: 403535 - DNA, 318 bp, Salmonella enterica
gtgagctggcggggatggggaagggcagaaatcatgatactccgccagtgcgccggaactatgacggtcgagagtattgggaagctgatcggtcgtaccggtgatgccgtcaggactaaagcgcgggagttggggatcagcatgattctgaaaggagactttcatccgtcagtcaaataccggcagagcgatatagaactggcacggcagcttcatcagtgtggtgttccccgccgtgagatcgcggaaaaactcgaaatgcccctgggcatgattaatcagtacgtttatttcgaaaggagagtgtatgaagtctga

SEQ ID NO: 403536 - DNA, 504 bp, Salmonella enterica; identical to SEQ ID NO: 26791

SEQ ID NO: 403537 - DNA, 411 bp, Salmonella enterica; identical to SEQ ID NO: 26792

SEQ ID NO: 403538 - DNA, 753 bp, Salmonella enterica; identical to SEQ ID NO: 30754

SEQ ID NO: 403539 - DNA, 249 bp, Salmonella enterica; identical to SEQ ID NO: 26793

SEQ ID NO: 403540 - DNA, 294 bp, Salmonella enterica
gtgaatatcgacaccacgataacgattgatacggccctaaataccggtctggcacttctcggttggctttacatcatgtccagtacatggcgatggctgggttccattttcctgaaacagtggaaaaaacggcgcaaacaggaattacgccagaaggcattagaagcgttctatgacgcatttgaacttagccgcattgaaccaggcacaacagccaggatagcgacaaaaggcgacctgatgatagtgatgttccgacaggagaaagcaaatggcagcaaagcgaatgactaa

SEQ ID NO: 403541 - DNA, 225 bp, Salmonella enterica; identical to SEQ ID NO: 26794

SEQ ID NO: 403542 - DNA, 312 bp, Salmonella enterica
gtgaacacaattaaagaaatgccggtagaacgtgatgaatatggctgctggacacatccggagtatgaaaagttttgcgcaggtcgtgaatatatatccactgaggaatttgacgcctggatgaaggaaaataatcttcagtggactattcgcagtatggatgaagatgattttggtctggacgcagctggtcccgatattgccgcctgggaaccggagcgaccagagggtgaaggctggtttgttggctctattcatgacactgaagatggtccagtttgtatctggctgcgggagaaggttgccgcatga

SEQ ID NO: 403543 - DNA, 693 bp, Salmonella enterica
atgatccaggctatgcatgaaatgaatttatatagccgtattgatggttctggctacagaaacatatgggttgttggtgatctgcatggttgctacaccagactgatgtccgaactccatcgtgtggattttgacccgacgcaggatttactgatatcggttggcgaccttatcgatcgcggtactgaaaatgtcgaatgtctggaactattgcagatgccctggttcagggcagtaatggggaaccatgagcggttgatgcttgatgcgttaagtcctgatggcaacgtgaataactggctaatgaatggcggacaatggttcttcatgctggacactgatcaggaaatattagccaaggcgctggtggagctggtaaagcgtctgccatatatcattgagttgaacaccgggcatgaaactatcgttatagcccatgccgactatccaggtggagagtaccagttcggtaaggatgtgtcgctttttgatgttgtctggtcgcgcagtcgcgtcggtgattcgatagatggcattggtggagaaatcacaggcgcagatcgctttatctttgggcacacaccggtacgaagaccaaaagcatactggaatcagcactacatagacacgggcgcggttttttgcggaaatctgacgctaatgcaggtgaagggagggcagcttaaagtctga

SEQ ID NO: 403544 - DNA, 447 bp, Salmonella enterica
gtgagcaagattgattatcaaaagcttcgtgaaatcgctgaaaaaacaaaaattgctggtgaagcacctgtaatgcccttcgatcagcgaattaatgcgcttaacgattttatgaagcacttttcgccagatatcgcgctggcactgctggatgaacgggaaagaaaccagcaatacatcaaatcccgcgaccaggaaaacgaggatattgcgctaacggtagggaagttgcgcgttgagcttgaggcagaaaaacagcgggcaaaggatctgtttatggaaaatgctcggcttaagtcaggtatagccggtctgatacacctcggtattcgatatgcagatgttgatgtcatgaaaattgctggagatgcccagctttctaccccatgcactgacagcatcataaacagcattgcaacaggcattcgcatcaacggaggtgagtag

SEQ ID NO: 403545 - DNA, 768 bp, Salmonella enterica; identical to SEQ ID NO: 26797

SEQ ID NO: 403546 - DNA, 441 bp, Salmonella enterica; identical to SEQ ID NO: 26798

SEQ ID NO: 403547 - DNA, 477 bp, Salmonella enterica; identical to SEQ ID NO: 26799

SEQ ID NO: 403548 - DNA, 345 bp, Salmonella enterica; identical to SEQ ID NO: 26800

SEQ ID NO: 403549 - DNA, 1038 bp, Salmonella enterica; identical to SEQ ID NO: 26801

SEQ ID NO: 403550 - DNA, 1365 bp, Salmonella enterica; identical to SEQ ID NO: 26802

SEQ ID NO: 403551 - DNA, 393 bp, Salmonella enterica; identical to SEQ ID NO: 26803

SEQ ID NO: 403552 - DNA, 393 bp, Salmonella enterica; identical to SEQ ID NO: 26804

SEQ ID NO: 403553 - DNA, 576 bp, Salmonella enterica
atgttaacggcgaacgataacgcgtatgcagaagcagatctcatattgagtgacttcatcggtcagcgggaacgctggacacaaaagcgagaggaactttatgcctcgttagttcgcaaaggtgtcaacattgaaaccgctcaaagcggcgatatgacggtagtcagtgttggattacatggtgtgagcgtgtccgcagccaatcatgagccatacgtagcgttatcagagtcgatggcaaggctaattaagtttctgaagcaaacagaagccaataatgttttcatcgccaaaaagaacatcaatttttctgccgccgtgttctggatgatgaaggggcttgacgcccgccgggcatcatggcctaaagggagctatatgtcgatgttccgtggcagtataggcagcaaagaaaagctcgtcgaattcctgccggaagaagcattcgatattgtggaagggtgcgatgtgatggttatgcctcggctggtaatgatgaatggagacttacaggcacagacagactggttcgccactggcgtggatattatcgcgactgactgggaggcattctga

SEQ ID NO: 403554 - DNA, 165 bp, Salmonella enterica; identical to SEQ ID NO: 29636

SEQ ID NO: 403555 - DNA, 1209 bp, Salmonella enterica
atgagtcaacacactgatacttctaatctggaaattatctcgacagcaattgaaacgctgcgcacacaaatcgctcttatacagaaacggaatccgggtgatgacctgtcaaagcgactgcacgagagtgtcattgccactacagataacctggtggcggaaatcaacaagctgcttgatgatggggcagttgattacaataagctggtggatcagtttgaggaataccaacaagccgttaatgatggcttgatccgtttttcacaagtcacaggcgtatcagcgacagttgaaagcctgggtgatgcagttaatcaatttgccgcgaatatgcgtaatgagatcggcaatctggaagcgcgtcttgaacaggcaaatacactgcgtaaatctgccgaagccgatttgaaccgttacaaaaaagactatccgccaagcctgacaaagcggctggatgttgcggagaaggataaccgcacgctgaaaagagagcgccgggaactaaaagagcgtttaaccaagctcaatcagcaatgcattgattatcaaggcgaaggcgtcacactgcgtaaaaagttggctacagcgcagagcattatcgaaacattaaagcgagagtgctcacagcttggtcacgatctgaaccgtgcttgtggcatgggacaaagaccagagacatttccacttatgtatgatggaagggatgccattgcctacatccatgagtatccgcacggcctggttgcggaaactgggcagcgtggcgaagcactgctgacggctaattaccatcaacaaatcagaactaatcgcctgttaacgatggatgtgatcccatcggtatggggaacgccgctttactatcgcctgccgggcttcgaaaaggactggaataccgacatagacgaatgtctcgcagataaaattatggcgtacctggagacggattttccgcgcttatatcgccggattatggactctaaggatgcgccaatcgatgaattaaaaatgcgtccggagacgctggaggcaatcaagcagacggagtttgatactgtattcagtgtggcctgcattccaagctgtttccatgaaagcattccgttcatgcaaggagatcgtcgtcaggaaatcattgacgcttgccgggtatgggcgaacgaatgggataagaagaatgggggtgtagaagatctttacgggaaataa

SEQ ID NO: 403556 - DNA, 300 bp, Salmonella enterica; identical to SEQ ID NO: 26805

SEQ ID NO: 403557 - DNA, 261 bp, Salmonella enterica; identical to SEQ ID NO: 32381

SEQ ID NO: 403558 - DNA, 435 bp, Salmonella enterica
atgacgacattaattgacactgtaaaaccgacggaatcctaccttgaggacattttgccgcaggcgctcaatggcaggagtgaagaggcgtttctggatgcatatctgaatggcatggtggaaaggctgaaacgagatccacagctttatcacctttatgggccgtggtggcctgcgcttaaaacgttattgctggagcgcggcgacatatcatttggacaagttgtagatagtgatgtggcagagatctacaaaatgagtcgcccggcgcttacggttttggctgggcatctgtattcgagcgatcgcctggaaaatgacgcggtatacaatcctgttcatgctctggaagtcgcaccttatgccgatgatacagagccatacgtgtacacaagttacgacgagtctatagagaaatatcgaattatggggtag

SEQ ID NO: 403559 - DNA, 6837 bp, Salmonella enterica
ttggacaaactacttcattcaatcagtgaagcctccagcttaggcgaactgattgaaattgttagtcggttgcataaattacgagctgttgcgacctttggcgtcaggaaagccgatggcgtcagtattcagaaaacacgccgggcagcaaacaatgccgcagtaaatcttcttaattcccttccgcccggcttcgatggggcgaaattaactgacgaacaacgtcagattcttgctgggtataccggtgaaggcggcctgacagatggagagggcagccaatacgaatactacacgccacagtttatggctgaaggtatatgggatctgtttgctgactacggtattgatggcgggcacgtactggaaccatcagcgggcacaggtattttccaggagacaaaacgacagggcatgataatgaccagcgccgaactgtctccgatttccggtcgaataaaccagcttttgcacccggaagacgatgtgaatatcggggcgtttgaggcgctggcggcgaaagatgcaatgtatgaccacgctgttggtaacgtaccgtttggtgaagggcgttccggcgttgccgggcttgatccggcatatgcaaacgagaagaacgttggcaattactttgtgctgcgcacgatcgacaaggttaagcctggtgggcttatcgtattggtggtgccaaatggcatgaccgatggtacgaaatataaaaaattgcgcgataaagtcagccgtaaagcggaatttttgggcgcacatcgtatgccttccggtacgttcagcgaatccggtacagataccgtggtggacgtatgggtattgcgtaaacacccggaaaccttcctggagatgatccccgacacggatgattcaacactcaaatcggcaaacgtcctttgggataccttcctcaaaggaaaatggtttacaaccgaagggaagcgatttgtttacggcgacatggaacgtaccagcttccgcaataccctggtggtgaaaaaagacggtcgtgtatccaatgagtcgatgaaaaccgcgctatctcgtcgctttgatagtcgcatcaattgggatttgctcggcgtaactactcaggcatggcagggcgcgaaagtgggcgataaacgccttgtaggcggtatctggcatgagtttgatggtctgaaatgggttaaggacacgacaaccaaatcctccgcgcttgatgtaagtcgatatggtgtttcgacgtttggcgatctgcagatcgcgtttcagtcaacaaatggcattctggctttgtcatgggaccagatatcggcgatcgcgtctgactatccatcggttgtcagtgatgaagtggcagcaatgattcgctttgctggcaagcagcgagaaaaagacagggagcgcgttatgcgcggtgcactgataggtcagttgatcaacaaggcacttgatttgcgtaacctgggggtgaacgttgatgacaaactggcagatgcatcccgcctggcggcagcagaagttgcgaagtatggaccaccgcacgcgattaagctgaatgggcttgctgaagctggcgctaaaaactggatgacgttcactggcaatgtgaaacaggatggttccacttctgaccttctggcagggcgacttgatgtaacggatggcgctgccggtattgactttacgcgtcctgaacaagtgatagcacatctttttagtgatgtagcccttaatcctataacgctgggcgactttcgtgaggcgtttgctggtgaactgccagaggacgacgacgcggcccttgaatacctggcgaaatttgatgatatcgctattgatgggtatggctgtctgctgccgatggaccgcgccaccagcggcgatgttgcaaccaaaacagcactgctggtgggctggcgtgatgcgtcaacaggtgagcagaaagcgaactttgagcgtcagttggcgaaaatcgaagagaaacgcattttcacgccactaaataaagtcaccgttaatctgaatgcccgctggctggatcgccgcttgataaaagagttcctggcagagcagggctatgacgagtttaagtacactgaacctgatctgaaggtcgtcgatggcattctggtatctccggacgattacgaaggtaaggacggggtatttaccggctatcagctacgaaccgtaaacggcaaaaacgggaatgagttcaagaaggccaacaataaagacggcttcctgaaccagttagaaaactacctgaacggtgttaaaccgcgtgggcagaacgctaacgagtacctggataaaattgctcaactggaagttagctttaacgactggttacgcacccacccgcaggcggatcagatagcccgtgactataacgacgcattcaatggtttcattccgttcacacattctgacgcaccgcttggcctggaagggcttagtggaaagcgcattcctcttacttatcagaatgaagaagttcggcgcttgtcagaagatgggcgcggcatcatgggatttggtaccgggctgggtaaaaccacgaccgcgcttgcgcttgaggcgtataacttcgaaacaggtcgcactaaacgcacgtgtattgttgttccgaaggcggtttatcagaactggtatcacgaggcacagagtttctacagtgctgatgccttcgccaatatgatgtttatcggtttggatgaagttcgtgatgacagcggaaatattctgaccgcgccggtgcttgatgaaaatggcgaaccacgcctcgacagtaacgggcagcctcttaccagaaatgttgtgaaagagtccgccagcgccgttatcgttcagcgtatgaacatgatcccgtcgtcaaattggcgaacggtcatcatgacaaaagaacaattcgcgtctatcccgctacgagaaaaaaccatcgaggagaactcacagcaagctgtctttaatgctgtggaaatggggcgtcttgacctggcgtccggtaaacaccgtgatgcgcagaagaagaacaagattaaggatcaggccgcgaataccggtacaacgaagaagcagaatatcccgtactttgaggatatgaacttcgatagcgtgattgccgacgaggggcataattaccgcaactcctttaatgccgggcgtgaagcgggacaactggcatatttgcctaacccggcagtatccaagatggcccgcgacatggctgtaaaagctgcgtacatgatgaaacgcaacaacgggcgtggtgtagtcatgctgacggcaactccgctggtgaacagtccgattgatgccttcaacatgctgtctactgtcattccgcaggaagagtggatgcgcatgggtattgttacgccggatgatttcgttcgcgtgttcggcaaaacagccacagttcaggttcagaaaatttccggtgaggtggaagagaagcaggggctggtgggcttccagaaccttgatggtctgcgtggtattttccaccgttggaccactctgaagactgccgcagatgtcggagcgacggttaaaattcccgatatcatcgagaacaccttgcagatcccgatgacaggggagcaggaggctgcttatgaagagcttcgtaagcgtgctcaggagttaagtcgcaatgatgagctgacagtcgatgaaaacgggcatatcactaacgacaaaccggatgatttcatcttctccatcatccgcgacatggataaggttgctatagatccggatctgtatgccagtgcgattacattccagttccccgttgagcttgcagacaaggtaaaagctattgctgatgccctgccaaaagtcgcaggcggtaaagtggcagatgatgcagacgaggccgaagaagacggcgctggtggactggtcagtacgcgtaccagcaaggtagtgaagaccacctttagtgaacatccggcgcatgttgaaatacgcgccagcattgaactggaagctgaaatactgaaggccattgctgccgccgggattgatctgcagcaggtatcacaccccatcccaccgaagtatgccgcgctgatcgaaaaccttcgtgaaggtctgaagaacggtaaacaaattgtcttcattgatgaaaaagcccagcaccagaagctgcgccgtattatcgccagtgcactgcaaatgccggagcaggagataggcattatcaatgcgacgaccgttagccaagctggcggcatcaagctgaagaaggtgaataaaccgactgaacctactccgaataaaaacggtgaatacaaagaaggggcatgggaaacctactacagcaaacttgcccaatatgaggattatctctcagctaaaaatgatgctggccttgagggcatggaaggtattgccgccgactataacgaaggtcgcacgcgcatcataatctgtaacaagaaggctgaagtaggtattaacctgcacatcgggacaaccgatatccaccacctgacactaccctggacaccagccagtatcgaccaacgaaatgggcgcggtgcgcgcgtagggtcaccgcaagagaaggtcaatgttcactactattgtggcaaaggcacattcgatgacttccgtctggatacgctgaaacgtaagaaagactggatcaagatggtgatgacctccgacatgtcagagatcgccaatggtgatgcggatgatgctgatgaacgcgccattatgctggcggcaaacccggaagaacgccgcgcaatcatggctcgccaggcgcaagagcgtgaagaacgtctgaaactgaaagcacagcgcgaggccaacaatgctctcgatatctacctgaaagcggcaaacgccgccggaaaagatatcggcatgatggagacagaactgaaaagcgcgatggaacagatagagtattaccagcgaaatcttgacgacctgataaaagcgggtacgaacaggaatgggcaaaaatacgcacttgagcagttgagtagctacagaaaacgtgcgcgggtgctgcggtttgcgatcaccagggcaaaagacgcggataccataatgaaacgctctcgtggtgatgtggagcgcgctattaagtctggtgtgctggatatcagtatcgatgttattcagaacccacaggaatatatgcgcactgacaagaatatcctgttgcataaaggtagttattaccgtgcagtcattgatgatcgcgaaacaacagcgattgtccgggtggaaaaaattgacggtgaaaaagcacaatacctctgccgtatcgcctggctggatagagcaagtcgttacgctcgagcaccggggtcaatcgttacattgccgtttgactctgtgattgaagcggtaacttttgaagagggggtagctgaatcgcgcgcaacggctgcgcgaggtgttcagtgccaccagctatcaacaatacttactcgcgatcagttctatgatgctattcgcaatggggtaatgaatgttattgctggtaaacctggtaatgcatggggcggtgggtcagctattaaatactgggcatatcgcacagatgatggtcagatcgcgctgtcatcggcctatgatggcgtgataggccaaaaaatcgggcgagcatcggatatagcacctgagcgatggatatatcctgatggcaacgacgaggcgctgaagcgtgaagtagcaaaaatacaagccagtgataacccgctgaatatcgtggacggcgagggattcctccaggcattgtatgggtatgattacatccagggaatgcaggcatggggcgcacaggcaacgatggatgatgttgcccaggagttcgaaaactggatggctgggcgtggtctgtcaggtcgttcgcttaataaagtcacttctgaagatattcttagcttgttccgcaaaccgtccggagaaggtctggaatcattctggaggaccgtgctggcataccgtttattccagggcaggatgaaagcctttagcaatatcgatgatattgaacggatgtttaatcaggtcaagatcgcgaaaattaaggcgaagatcgaaaaaacacgttctgcgctggtggcctggcgcgatgcattgtttgagcaatataaatcactcagtgatgcagatggatgggcggcattggaacagctggcgaataatggggtagatggagctaaactcgccattgttcaggctgataaccccctggaatcaccggcagcacagtggattaaggtgggggctgtcatcaatgcatttgatgaaaaacacattagtaaggacgattttgctgatgctgtttctgttaatcgcctggtagaaatggctacccgccgcgcccgtgagttgaaagacggcgactatgtgaatgagttgccggatacgctcaaatcggcaacgtggcaggactatgtatcgctgaaaaacggcggggccactgaatcagagatcgcggaaaggcttgagcaggctgaaagcaaaagagaagagcaggcggcagtggctgaagccagagctgatgaagcggcgaatgatgactatatcattgtggttaatgataagccgattcgcgctaaggcgcgtgttcgcgggcgctggtggagcgtcagcgaggacgttggcgcggtttatctcattgccgaccaaccaggttcctcgacaatacggaacgccaaagacgcgattaagaagattggcgggcgtttctggaattttgaagcaaacccggttgctgatgtgaactttgaccgtcctgcatggatggtatctacgcgttactcggtagatgaactgcgtaaaataatcgccgatgcggcctaa

SEQ ID NO: 403560 - DNA, 198 bp, Salmonella enterica
atggacatcatgcaggcggtaaaaaaaatcagggaaggacaggctgaagtgtgccgccgtaaagcatggagtattgatgtatgggcctggcctgataattactctactaccggatggttttgtattaatggactcaagatccgggaagtttatttatcgacggctgatatagtcggtaatgattggatcgtgacttga

SEQ ID NO: 403561 - DNA, 708 bp, Salmonella enterica
atggaaatctgcattcttgaaaagccatcaatgaccagcattgagatcgcggagctggtgggaagtcgcccggataacgttaaacgcactattgaacgcttgagtaaatcaggtgttattccacttcctccaatggaggtttccgaaaatatcaataacttaggatttaaagttaaaaattcacactacgtcttcgaaggcgagcaaggcaaacgagacagcattattgtcgttgcgcagctctctccggaattcaccgcccggctggtggaccgctggcgcgaactggaagaacaagtacgccagccgttgaccgaaatagagatgatcgccgcaatggctgcaaatgcagttcagcagcaaaagcggcttcatgctgttgagtcaaaggttagccaggtcgctgaaaccgttgagcaaatcaagaaaggcaatatgccagatggctacattggctaccgccagctggctgcgaaatgtggcctgaccgaagccaaatgccgcaaccttgtcaacgcttaccggattcccaccgatacgcatgagtttttaactccagagggggtattgtcgcgtcgttccatcgtggccttatctcccttcatgaatgcttttaaccggatgatgtcggaggctgaacaccgaggaaaacgctggtatcaccccaaaatggggcaattccaggtgatcggttggggaggtgagtga

SEQ ID NO: 403562 - DNA, 225 bp, Salmonella enterica
atggttaatgccaatccttgctcgcgcccggaatttatctggcgtttccactccctgcaaaaacactgcgatcacttcgcaattgccgcaaccgaaaaagaagcccgttctctgatccctgatcagtatggtgttcttactggtcgtttctctacttccccacaaccaaacactaatccctggtatcgcaatattaccaatcccggaattgcggaggcacactga

SEQ ID NO: 403563 - DNA, 963 bp, Salmonella enterica
gtgagtattttaaattcagtttcagtaactttcaacacttctgagtataaaaacaacactgaataccacaaaaaaatcaaaggtcatcagttgagtttttttgctcgtcatagcggtcttctttccccttcacatagcgccattattgccgagttcgccaacctggcagggtctaccgatgaatacatgatccgtcgctcatatgctgatatgtccgagattacaggacgcagtatttctactgtgcgccgggcatttgctgaagcgacgaagtgcggaatgcttgttaagcaacatcaggtagcgaataacaatgcccaggtgtgtaacgtatatcggtttacgacacaatttctccacttcattcatgtagcaatggagatagggggtaagcagggcatcaaatttgccaacgccacaaaactggttaagcagttgatttcaaaggttcgttatttttttgaaactgggacccccctgttcaaattgaacaagtccccccatgttcaaaatgaacagccaatagaaaataagagtcactctatagccaaaagaagaaaaagatcatgcgcggttcagccaaaggcttcaccagcagatagttctcaagcggataatggggtactggataaaaaaccagtaatcagggaagaacataccaaccactgcctggcggcggcaaaagcgagagctgcaaagcgtcgttcagacgaggggcacgcaaaacggcaggctctgtatcgtaccgctgaaaagctggcaaaaaaatttgcatggatacgtagtgcagctaccgcagtgaataagcctaaacaatccagagccctggatttctcaatggattattctggctcccaggggtgtgcaaccattggtgaagcctttgacctgatgaaacagcgtggctatcggtctgaatttgaccgtgaggattggtcaatcccggctggctttaggggatga

SEQ ID NO: 403564 - DNA, 303 bp, Salmonella enterica; identical to SEQ ID NO: 26808

SEQ ID NO: 403565 - DNA, 294 bp, Salmonella enterica; identical to SEQ ID NO: 26809

SEQ ID NO: 403566 - DNA, 375 bp, Salmonella enterica; identical to SEQ ID NO: 26810

SEQ ID NO: 403567 - DNA, 1938 bp, Salmonella enterica; identical to SEQ ID NO: 26811

SEQ ID NO: 403568 - DNA, 621 bp, Salmonella enterica; identical to SEQ ID NO: 26812

SEQ ID NO: 403569 - DNA, 447 bp, Salmonella enterica
atgggtaactttggaaattatttcatttttatcatggcatttgttgccatcattgaccgtttcatttttcgtcgcaagagtgttgagattttgagtattggtgacgctgtagtgaaagaatccgctatagcatttcctgtttcgctacgtgttaagcgaagctgggtcagcaatgctcaaatcgaatattggttgcaagacctgaaaaatccatctgtggttatttcagggaaaacgcgaccagttgacgcctcaaaacgcggtgagagagaagagtatttgctcatcgatacgaaatatcttgagccaacgaagtgggatctgaaagtcacattgactaacggtaactgccgactgaatccgctttatcgcattttccctatcaatgactgcatagagcgccagtttacgatcgaaaagcgtaaaggagactgggatgtcaaataa

SEQ ID NO: 403570 - DNA, 327 bp, Salmonella enterica
atgtttgcagattatgaaaatctggctgtagtagtcataacatccctactaagtggaaccggcgtattccttctcggagttagagacgggcgcatttctgcgtccctgctcaatcttgcgagtgaattgtttactgcggtaacagccgggcttgcggggtatggggtggcggttagccaagaatggcctgaaggtatcattttctgcgttgttctgattgccagtaacaacggtagtgaaattttacagggcttgaagtccagagctagtaacgtcttgaatctcttaagcgtaatagcgaatgggggaaaaggtggagagaaataa

SEQ ID NO: 403571 - DNA, 573 bp, Salmonella enterica
atgctgattggctacatacgtgtgtcaacaaatgaccaaaacacagatttgcaacgcaatgcattaatgtgcgcaggatgtgaacagatttttgaggacaaaatgagcggaaccaagtcggaacgaccaggcctgaaacgcgctttaaagtgccttaaaagaggggatacattggtggtctggaagctggatcggttgggtagaagaatgaaacacctcattgctctcacagaagagctacgcgcaaaaggtgtcaattttcgcagtctgacggattcaatcgataccagcactccgatgggaaggttcttttttcatatgatgggtgcactggcagaaatggagcgtgaactgatagttgagcgcacgctggcaggactggctgctgcgcgatcacaaggaagagttggaggacgtcgcccgaaactgacgaaggagcagcatgagcagatcgcaagattgctccagaaagggtatgacagaaagcggctggcaattatctatgatattggactgtcaacgatctaccgctatcaccctgttgggactgtcataacgcaacctgaaatgtaa

SEQ ID NO: 403572 - DNA, 969 bp, Salmonella enterica
ttgaaggatcagatcacgtatcttcccgacaacgcagaccgttccgtggcaaagcaaaagttcaaaatcaccaactggcccacctacaataaagccctcatcaaccgtggctccataactttctggctggatgatgaagctattcaggcctggtatgagtcagcaacaccttcttcacgaggcagacctcagcgctattctgaccttgccatcacgactgtgctggtcattaaacgcgtattcaggctgaccctgcgcgctgcgcagggctttattgattccattttttctctgatgaacgttccgctacgctgcccggattacagctgtgtcagcaggcgggcaaagtcggttaatgtcagtttcaaaacgcccacccggggtgaaatcgcacacctggtaattgattccaccgggctgaaggtcttcggtgaaggcgagtggaaagtcaaaaagcatggccaggaacgccgccgtatctggcgtaagctgcatctcgccgttgacagtaaaacacatgaaatcatctgcgctgacctgtcgctgaacaatgtgacggactcagaagccttcccgggtcttatccggcagactcacagaaaaatcagggcagcatcggcagacggcgcttacgacacccggctctgtcacgatgaactgcggcgtaagaaaatcagcgcgcttatccctccccgaaaaggtgcgggttactggcccggtgaatatgcagaccgtaaccgtgcagtggctaatcagcgaatgaccgggagtaatgcgcggtggaaatggacaacagattacaaccgtcgctcgatagcggaaacggcgatgtaccgggtaaaacagctgttcggggggtcactgacgctgcgtgactacgatggtcaggttgcggaggctatggccctggtacgagcgctgaacaaaatgacgaaagcaggtatgcctgaaagcgtgcgtattgcctga

SEQ ID NO: 403573 - DNA, 969 bp, Salmonella enterica
ttgaaggatcagatcacgtatcttcccgacaacgcagaccgttccgtggcaaagcaaaagttcaaaatcaccaactggcccacctacaataaagccctcatcaaccgtggctccataactttctggctggatgatgaagctattcaggcctggtatgagtcagcaacaccttcttcacgaggcagacctcagcgctattctgaccttgccatcacgactgtgctggtcattaaacgcgtgttcaggttgaccctgcgggctgcacagggttttattgattccatttttacactgatgaatgttccgttgcgctgcccggattacaccagtgtcagcaagcgcgcaaagtcggttaatgtcagtttcaaaacgttcacccggggtgaaatcgcgcatctggtgattgattccaccgggctgaaggtcttcggtgaaggcgagtggaaagtcaaaaagcatggccaggaacgccgccgtatctggcgtaagctgcatctcgccgttgacagtaaaacacatgaaatcatctgcgctgacctgtcgctgaacaatgtgacggactcagaagccttcccgggtcttatccggcagactcacagaaaaatcagggcagcatcggcagacggcgcttacgacacccggctctgtcacgatgaactgcggcgtaagaaaatcagcgcgcttatcccaccccgaaaaggtgcgggttactggcccggtgaatatgcagaccgtaaccgtgcagtggctaatcagcgaatgaccgggagtaatgcgcggtggaaatggacaacagattacaaccgtcgctcgatagcggaaacggcgatgtaccgggtaaaacagctgttcgggggttcactgacgctgcgtgactacgatggtcaggttgcggaggctatggccctggtacgagcgctgaacaaaatgacgaaagcaggtatgcctgaaagcgtgcgtattacctga

SEQ ID NO: 403574 - DNA, 186 bp, Salmonella enterica; identical to SEQ ID NO: 376959

SEQ ID NO: 403575 - DNA, 210 bp, Salmonella enterica; identical to SEQ ID NO: 403495

SEQ ID NO: 403576 - DNA, 456 bp, Salmonella enterica; identical to SEQ ID NO: 381524

SEQ ID NO: 403577 - DNA, 525 bp, Salmonella enterica; identical to SEQ ID NO: 377192

SEQ ID NO: 403578 - DNA, 138 bp, Salmonella enterica; identical to SEQ ID NO: 35620

SEQ ID NO: 403579 - DNA, 342 bp, Salmonella enterica
atgagtttaagatactacataaaaaatattttgtttggcctatactgcgcacttatatatatataccttataacaaaaaacaacgaagggtattatttcctagcgtcagataagatgctatacgcaatagtgataagcactattctatgcccatattcaaaatatgctattgaacacatattttttaagttcataaagaaagattttttcagaaaaagaaaaaacctaaataatgcccccgtggcaaaattaaacctatttatgctatacaatctactttgtttggtcctagcaatcccatttggattgctaggactgtttatatcaataaagaataattaa

SEQ ID NO: 403580 - DNA, 1383 bp, Salmonella enterica
ttgaagaaaacgcaggcagaacaggctgcccgagcaaaagctgccgcagaagcacaggctaaagcaaaagcaaaccgggatgcgctgactcaacatctgaaggatattgtgaatgaggcgcttcgccataattccactcatccggaggttattgacctggctcatgccaataatgcagcgatgcaggcagaagcagagcggttgcgccttgcaaaagcagaagaaaaagcccgtaaagaagcggaagctgcggaaaaggcttttcaggaagcagaacaacgacgtaaagagatagagaaggagcaggctgaaacagaacgccaattgaaactggctgaggatgaagagaaacgcctggcagcattgagtgaagaggcccgggctgtggaggtggcacaaaaaaatcttgctgctgcacaatctgagctggcgaaagtggatgaagagattaatacgctcaatacccgtttaagctccagtattcatgcccgtgatgcagaaacgaatacgctgtccggaaaacgaaatgagttggatcaggcatctgctaaatataaagaactggatgaaagggttaaacttttatctcctagggcgaatgatccgcttcagagtcgtcctttttttgaggccaccagactacgggcgagagctggtgatgagatggaggaaaaacaaaagcaggtaacagcatcagaaacgcgtcttaaccagattagctctgagataaatggaatccaagaggctatttctcaggctaataataagcgaagtacagcagtttcacgtattcatgatgctgaagataatttgaaaacagcacagactaatctcctgaactcgcagattaaggatgctgtggatgcaacagttagcttttatcaaacgctatctgaaaaatatggtgaaaaatattcaaaaatggcacaggaacttgctgataaatctaaaggtaagaaaatcagcaatgtgaatgaagctctagctgcttttgagaaatacaaggatgtattaaataagaaattcagcaaagcagaccgtgatgcaattttcaatgcactggaggcggttaagtatgaagactgggctaagcatttagatcagtttgccaagtacttgaagattacgggacatgtttcttttggatatgatgtggtatctgatatcctaaaaattaaggatacaggtgactggaagccgctatttcttacattagagaagaaagctgtagatgctggagttagttatgttgttgttttactttttagtgtgcttgctggaactacattaggtatctgggggattgctattgttacaggcattctatgtgcctttattgataagaataaacttaatactataaatgaggtgttgggtatttaa

SEQ ID NO: 403581 - DNA, 213 bp, Salmonella enterica
atggaaacagctgtagcgtactataaagatggtgttccttatgatgataaggggcaggtaatcattactcttttgaatggtaatccagacgggagtggctctggcggtggtggtggaactggagctctggcggtggtggtggaactggaggtagcaaaagtgaaagttctgcagccattcatgccacagctaaatggtctactgctcaattga

SEQ ID NO: 403582 - DNA, 438 bp, Salmonella enterica; identical to SEQ ID NO: 5248

SEQ ID NO: 403583 - DNA, 420 bp, Salmonella enterica; identical to SEQ ID NO: 19219

SEQ ID NO: 403584 - DNA, 867 bp, Salmonella enterica; identical to SEQ ID NO: 7185

SEQ ID NO: 403585 - DNA, 1053 bp, Salmonella enterica; identical to SEQ ID NO: 7184

SEQ ID NO: 403586 - DNA, 234 bp, Salmonella enterica; identical to SEQ ID NO: 7183

SEQ ID NO: 403587 - DNA, 531 bp, Salmonella enterica; identical to SEQ ID NO: 289602

SEQ ID NO: 403588 - DNA, 615 bp, Salmonella enterica
atgagtaacactgcagttctggatgaaaacggtatcgccactgtagcgggcgatatcactgtatatcactatgacgaggaaacccgggaatacacctcatcctctgtggagtatctcgcccttggggtgggtactccggcacattcgtgcgccgatgcaccgccggaggcaatttcgggttacgtggtttgccggactgccacgctgaacgggtgggagcatgtgcctgatcaccgcggcgagacggtatacagcacggagaacggtaaccccgttctgattacccaaccgggtgattacccggcggacaccaccacaaaacagcctgccacaccatgggatacctggaacggtgaagcgtgggtaactgatactgaacggcatagagccgcagagctggagactgccaaactgcaacgccagaaacgggtggatcaggcgatgaagtccatcgacctcatcaacctcaaactgcgggcaggtcgcagtctgaaaccagaagaaacggcaaaactgaacgccgtgctggattatatcgacgagctgaacgcactggatatcagcaaggcacctgaaatcagctggccggaagcgccactggcgcttgccggctga

SEQ ID NO: 403589 - DNA, 300 bp, Salmonella enterica; identical to SEQ ID NO: 21721

SEQ ID NO: 403590 - DNA, 999 bp, Salmonella enterica
atgaaaaatcctgaacttaagaatctgacggattactctccagcagataaaccgtgggatgaacaccgaagcttttccgacgatgtgggcggtatttatctgcgtgctgccggatttgagcactacggcgaacgtgtcggggcttgtagtggtattttgcggtttgggtggtcaacaaacacagagaccggagaaacgcgcctgcggttgcgtgatgcacggttctgtcgcgtccggcactgtccgatctgtcagtggaggcgttccatgatgtggcaagcccgtttctatcagtccctgccaaagattgtgacggaacatcccggcgcgcgctggttgtttctcacactgacagtgcgcaactgttccattgacgcgcttggtgagacgctgaccgcgatgaatgcggggtttaagcggttgaaagagcgtaaggaatttcgccatgtgttgggctgggttcgtaccacggaagtaacgcgcggcaaggatggtagcgcacatccccattttcacactctgctgatggttcccccttcgatgttgtccggccgtgagtatgtgaaacatgcccgttgggtggaactgtggcgtgattgtctgcgggtggcgtatgacccgaatgtggatatcagagtggtgaagtcacggaaaccaaaagacgatgaatctttaccttgtgttgttgcggaacagctgcgcagcgcggtggttgaaactctgaaatattccacaaagcctgctgatatgctggctgatcctgaatggttcctcgaattaacacggcaggtacacaagcgtcgttttgttgctacggggggagcgcttaagaacgttctgcaactggagcgggaaacgaacgaggatttaatcatggcggatggcatggcagagggtacagatgacggttcccgtctggcgttttcgtgggtgccggttgtcaaaaaataccagcgagatcgggcgaaagataaacgtcagctaagtggcgaggattga

SEQ ID NO: 403591 - DNA, 192 bp, Salmonella enterica
atgcactgggagaatattcagaaacgcgctcagaagcgttctaacgtgatttttgcagacaggcaaggttttgttcgttttttcgcgtttgatgcgttcaggggtgttttaagcgcgtttctgtcgcatcccggcgctaataccatccccatggttaacgggagctccagaaacgcgcagatgtctttttaa

SEQ ID NO: 403592 - DNA, 141 bp, Salmonella enterica; identical to SEQ ID NO: 401864

SEQ ID NO: 403593 - DNA, 483 bp, Salmonella enterica
atgacgcagggcatgacgcccgatctccagcgccccggcataatctccggcatcaatgcgccacagcatcacgtacatcagcacgtcatcctgttgagcgcctccggcagccaggacgccctccgcccaggcggcatatttcggcagcagctccacctttatttccgcttttttgaccgtggactgaacgcccttgagacggcggcggtcttccgccagttgcagcagcatcaggtcatagccagatgcgtggcgaacgctgccgccctcgcgggcggcctgttcagcctgaacgcgcaggcgatgctgccgtgcgggactcaggctcataggttacgctccggcttctgctgcagcggcgctgaaatcgccaatctggatgttttccaccagtgcggcgcagcggtagtcctcaaccacataggcttcgttaacggattcaaagttttcaatccggtcacgtttcgggttgtcgataactga

SEQ ID NO: 403594 - DNA, 507 bp, Salmonella enterica
atgatgccagttgcccgttatctctgcattttcataaacgttggtttgggagaaggttcggcattacccgttggtgtgcctgttccgtggccttcagccacaccgcctactggctggctgaaatgcaacggtgcggctttttctgctgaagaatacccggaactggcaaaggtttacccgacaaataaattgcctgatttacgcggtgaatttattcgtggctgggatgacggacgtggagtggatgccgggcgacaattattatcttcacaaggggatgcaataagaaatattgagggattcgcagatggcgggatcggtatgtcttttgatgcaatcagaggggctttttacgatgcaggaacacgatcagcgagaatgccgaataacacaactactatagacaaaaccgatgaccttggattcgacgcctctcgtgtcgtgccaacagctaatgaaaaccgtccacgtaacatcgcctttaattatattgtgagggctgcataa

SEQ ID NO: 403595 - DNA, 369 bp, Salmonella enterica
atgtaccccaaactggcaaaggcttaccccgcgaataaattaccggatttacggggtgagtttattcgtggctgggatgacgagcgcgggattgatcctggtcgccagttgcttgagtggcagaaaggtactttggttggtggtagagatgacaatgatgccgcagttgatatttcatatatgagtaacggaaatagtattgattacggtggcgataaaacattttcaacgaattaccggagtgattatttatggtatgcaattctgggtaacgtcactggtcgtgccaaagctgctttaagtgggtccttttttaatgtaactcgtccacgcaacatcgcctttaactacattgtgagagcaacatag

SEQ ID NO: 403596 - DNA, 834 bp, Salmonella enterica; identical to SEQ ID NO: 377156

SEQ ID NO: 403597 - DNA, 318 bp, Salmonella enterica
atggatatcttccaccagatcacgttgctggtcgtgctgctgctatcgtcaaaaggcgccgcgggcgtgaccggaagcggctttatcgtgctggcggccactatctccgccgtaggtcatttgccggtggcgggactggcgttaatcctcggtatcgaccgctttatgtccgaagcgcgcgcgctgactaacctggtgggtaacggcgtggcgacggtggtggttgccaaatgggtgaaagagttagatcaccaaaagctggacgatgtgcttaataatcgtgcgccggatggcaaaacgcacgaaatttcctcctaa

SEQ ID NO: 403598 - DNA, 1110 bp, Salmonella enterica
atgaatgcacttctggggaaaattgcaggagcggtagcaaccttctttgttgctcttattttgaataaatttttttcaacatttcgtattagacaactttacttagcatacgaacatatattagagcacacaacacaaagcataactggatatacagtcatgttcacagttacgaacaaaggaaaagagaaagaaaaaaacgtaaccattacaataccaaaaagcaagtcaatatctcttatctcagcaaataatgttagcattgaatgtaaagataacaaaataatcattgaccgcatactaccaaaggaaaatattactttgattgttttggttaaaaatggtggcgttctatcgaagtctaatttaccaatattgaaatctgaagatgctaatggaaaatgttatgacagtataaaaaaaataccacctagccttggccctgctttcttcagcttttcattgtttattgcatttttagcattaatgggaggagccatatacaaaggttacgatccctttgaagtaacatatacgcaatatttcaaaatgagattcactcctttctatgatagaggttttgaaaataattcattccaaaacaattcgcttacaaaacaatatgatacgtcaaaatcagacttcccgatcgatctaaaaagtcttaatgtgaaggatgggaaaatcgaatatattttcattgttgataataaaaccaactataaccttagtgcggacatgaaatttatagtccgagatgaaaaccaatattatgatgagttaggaaaagtattgaacattaggaatgactctgatagacgtcaagctttacacgaactgagagataaatatcatgttgctgaagatactacaggtgctacatattcaataagtgaatggattgataagggacaaagaaaagaaataaaaatgactcgccagttgtcgaaaggcatcgattataaggatctcggtgttgatataaggataaggaatgatgcaaatgatgataattattacggcgactatcaatttaaaccggaacgctcagcaatagctagaaataaattggatgcagcaattgctactcaacgtttcccattgaaatag

SEQ ID NO: 403599 - DNA, 336 bp, Salmonella enterica; identical to SEQ ID NO: 376660

SEQ ID NO: 403600 - DNA, 243 bp, Salmonella enterica
atggtggtgtcggcaaatacgctttatcagaatatctccattattcgccgcggattacgtaccgttggcgaaaatgaagatacgctgataatcacggttccgcgtagaggctttcagattgagcctggtgtgagcctcatgaccatccgcaaagacttcgctcagacaatagaaaaaagggtgaggcgccaccgcgtatgtcagggcgttggtttaaacattatgtacctgtactttggatga

SEQ ID NO: 403601 - DNA, 1251 bp, Salmonella enterica
atgtttccgattctgaccggcaacgtcggcattcatggcggtaatggcggcgcacgcgaatccacttacaccattaccattgaacgtctgccggtcctggagaatcccgttaaaaccgccatctcctgctttagctggacggacgccattgcgcgcggcccggaaatgaccgccctgcgcgacggcgtacgcggcaaagataagctggatgtcccgatcaaatttctatggaactacgctggcaacaccctgattaatcagcattcggatattaataaaacccatgaaattcttcaggatgaagcaaaatgcgaaatgattgtggtcatcgacaattttatgacctcttccgcgaagtacgccgatattttactgccggatctcatgaccgtcgaacaggaagatatcatccccaatgattacgccggcaatatgggatatctgatttttatccaaccggcgacgacgcctaagtttgaacgcaagcccatctactgggtactcagcgaaatcgccagacgcctcggtgacgatgtgtatcagcggtttaccgaaggccgtacccaggcgcaatggctgcaatatctgtacgccaaaatgcaggcaagagatccggcattgcccgcgtatgacgagctaaaaaaaatgggcatctataaacgcaaagatcccaacggccactttgtcgcctataaaaaatttcgtgaagatccgcaggccaatccgttaaaaacgccgtccggtaaaatcgaaatctactcaagcaaactcgctcacatcgccagtacctgggagctggcggaaggcgacgtgataagcccactgccgatttatacccctacttttgaaggatgggacgatccgaagcggagcaccttcccgctacagctgtttggctttcactataaatcccgtacccattcaagctacggcaatattgatgttctgcaggccgcctgtcgccaggaggtgtggataaatccgcttgatgcgcaaaaacgtggtatcgcgaatggcgataaggttcgcgtctttaacgatcgtggagaagtgcgtctacccgccaaggtcacgccgcgtattctgccgggcgtcagcgcgatgggtcagggcgcatggcataatgcggatatggctggcgataaaattgaccacggcgcctgcatcaatacgctcacgacgctgcgtccttcccccctggcaaaagggaatcctcaacatacaaatctggtggaaatcgaaaaaatctaa

SEQ ID NO: 403602 - DNA, 525 bp, Salmonella enterica
atgggattgcaaaaaacactggcgctcagcgccgtagcggcagggatcatgttgagcttatccggtgcgcaggccgcgccgctgcttagcagtagtgagccaatgaccattaacgccagcgatctggcggcgaaagagaaagcgctgacggattttccgttaatggaggcagtgaaatcctctatccagacgttggataacagcgcggtcgaacaaatcgaaccggggcgcgccgctaacccggcaaacgtaaaacgcgttgaaagtattctgaaagaggccgaccgggattatctgttcccgatgcgcgcgccggaatacacttactctaacttcctgaaagcgataggtaaattcccggcggtttgtggtacctacaccgatggacgcgatagcgacgctatctgccgtaaaaccctggctactatgtttgcgcattttgcccaggagacgggcggtcacgaaagctggcgtgacattccggaatggcgtcaggcgctggtctatctgcgcgaagtcggctga

SEQ ID NO: 403603 - DNA, 723 bp, Salmonella enterica
ttgaatatagacactcgcgaaattacccttgagcccgcagacaacgcccgtctgttgagcctttgcgggccgtttgatgacaatattaaacagctcgaacgtcgtctcggtattgaaatcaaccgccgtgacaatcactttaaactgaccggtcgtccgatttgcgtgaccgcggcgacagatattttgcgaagtctgtatgtcgataccgcaccgatgcgcggccagactcaggatatcgaaccggaacaaattcatctggcgatcaaagaagcgcgggtgctggaacagagcgcggaaagcgtgcctgactatggcaaagctattaatatcaaaaccaagcgcggcgtgattaaaccgcgtaccccgaaccaggcgcagtacatcgccaatattctcgatcatgatattacctttggcgtcggcccggcgggtaccggtaaaacttatcttgcggtcgccgctgcggtagacgccctggagcgccaggagattcgccgtattctactgacccgtccggcggtggaagcgggcgaaaaactcggctttctgccaggcgatttaagtcagaaggtggacccgtacctgcgtccgctgtatgacgcgctgttcgaaatgctcggctttgaaaaagtcgagaagctgattgagcgcaatgtgattgaagaagcggcgttggcggcggagcgtaagcgtgaagcccaggagcaggaacagaaatga

SEQ ID NO: 403604 - DNA, 276 bp, Salmonella enterica
atggcagaaaaaaagaaaaaaaccattactggtcaagtcttgaactccattaaaattaacaaactaaaatgtataaatggattaaacgagattatttttaaacctcatgcgttaaccgcaattttaggtccaaatggaagcggaaaatcaacaatactccatgctatagcaagcatatacatgcctgaaaaaggtttccccggtgaagaccatcggttaatgcattttttccacgcagtccacatgctgaatggaacggcagtgacttcattgtaa

SEQ ID NO: 403605 - DNA, 816 bp, Salmonella enterica
atgactgattgcacaaatgaagttgctgcacaggcacttcagatattgaaagaaaaactccatgcctggcgtgatggaccagattcggcctggcgctcaacctggcccgtgtttgaaagactgatagaccgtcacgatgaaatgaaacctgtctacaccgaactgcaggaaaagaatgtcaccggatgccagctctggaactttctggaacagagcatttttgcaggggcctttgccacggctgataatcatgcagtcttacgtgcagactacaacgagcttcagtccctgaatgaggacatctcgtgcacggctttgcagctggaagcaatgctccgccgcagaagtgacatacttaaccgaagcggaagtttctccgttgacaggttgctgcgtctgactgatttcctgaatgaggcaggccgcgaaaacggactctaccggagctacattcaacctcgactggatgagctgaatggatttgatctgaaatactggccagatattgccgacctgcttcaggtgctgggaggggaaagtaccgaagtgcagatcctggacgatgcgaccgggacaattttgtctgcgcggcgagcgtctttaacagactttttcacggatttctttaaccggctgcataacctttctgacgactcatggtatgggctcaggaaagggttcagattatcggatagttcgatcgccaccctgagtaatatcctctgtgatcgactccccgatgagatgatagatgaaggatatgtcaaacacgtccggcaacggttaagagggcagggcgtaacggcagtatggtaa

SEQ ID NO: 403606 - DNA, 879 bp, Salmonella enterica
atgaagaaacagagtattattaatagtatagttcctgcgggcacttactcagggacacattcaagaatatttaaatacattgaagttccccttccgtttttttactttatttatacgtcaaatgaaccattttatatatccgtcaggaatgacgttatctgtgtaaaaaaacataatggcatatttattaataagtccattcctttttcgctattattcgacagggaaatatccattcttcaaagaatggatatatgtgttgtacgctttacatcagaggagataagtgagcacaatgttttatttgatcgtgattttgaacgattaaaacaagtttctaatactcagtttatatctcctgattatgtcatgatcgatttttccaggaggggggaagatgaatgtcatgcaatgtcatggttaatatctcagtgtactcaccagtacgcaagtaacaataaaacggagatggatgctatttatagcaaagtcagggggtcttatttactttcatgtattctgcaaagaaataaaaatgttgggcttattcttcatgcaccatcatacatctctgtttctgaaaaagttgccagggttgtgatgacaaattacgctcgaaactggaatattcctgagctggcgagtgcggttttaatgagtgagtcatctttaaaaagaaagatgtatgaagaggttggctcaataagtgtatttattcataaaataaagcttacagaggcgctcagaaaattaagaaggacaaacacacctatttctgtcatagcatcagagttaggttacagttctccatcgtacttttctaaagttttctttaaatatttaaatacatatccacagaatataaggaagaaaaaataa

SEQ ID NO: 403607 - DNA, 168 bp, Salmonella enterica
atgatgctgtataattttatgtatatgcggagtttatcctcctcacagcttaatacatttgtgacctttgtggtaatatttctacctgcaccagtaaattcaagcagcgaaccagcaccgaaccttgcaaaggttaatttattatttataatcgtatataataattaa

SEQ ID NO: 403608 - DNA, 765 bp, Salmonella enterica
gtgaaaaaggtgacgttgtttctgtttgctgccaacctcctgccttcctgtgtactggcctggaacacgccgggagaggatttcagcggagagcttaagctggaaggggcggtgaccagtacccgtaatccgtgggtgtggaaagtcggacagggcaatgaaaatctggaggttaaacagagccgcagtgttcgtgacgatgagcaggcaattccggttgcactgccggcgatgaccgttttactgggaaaaaccaccctgaccacaccgacaggacgtgagggactttctccccgggtcagttatggaaaggggactgagggattttcgcttgaatggacagcaccaggcatggcggaggtgacgctgcctgtcaccggagataataacgtccgggcaggcacatttgttttcagaatgcgggctgcgggggtgttgcgccatgtgaaggacggacaaccggtgtatgccggtgtgtatgacggcctgaatgtgaatggcctgccaggtgaaagcatatccatgaagtcttctgatattccgggtgttctgcagaaaatgttcaatggtgaaggtcccggctggctgcagacaatgacagtcagtggttattcggggataagtcatttcagtgatacctccctgcgtcaggttgaaggtgcgtatggtgcacagacggtggcaggaagtggtgagttacgtctgaacggcacgatgccgaaatgctggcgtgtgtcactaccagtaaacattgaatatcagtaa

SEQ ID NO: 403609 - DNA, 798 bp, Salmonella enterica
atgaaaataacgcatcattataaatcccttctttcagccattatttcggtggccctgctttattcggcagcgccgcatgcagatattcttgatggcggcgaaattcagtttaatggttttgttactgacgaagcccccaaatggacctggcagataagttcgcccgaccagacctggtcagtggatactgccgatgcacgtacagagaacgggcaactggtttttgatttgagcgacaaagggcctctgccttttcttgaggggcatttatatgaagtggccgagcgtggcgggcccggattcacgccctttattactttcagtagtaacggacaacctttcgccgtaaaggaaggcagtggcacttcagcgcaacgttttcgcgcctctgtcccggtgcgtgacccggaaacgggaaatgtgtcgggacagctttctttcaccctgaatcaggggatggcggtcagtacaggtaggcaggaagagggcgcatccacgccttctggtatgtcactggtcagtggacagagtgtgacggatgtacagtcaggtactcttccgcaggggctgaagagccgtctgtctgccttattgctgatgaataaggggttcggtaatggcatgagtgcggtggataacggacaggttatcagtcagggggtactggctgacggtcgggtgatgaatctggctgcggcctatgcctctgcggtgtcggattttgaactgcggttgccggcagagggcacaccggcccgctggcaggcaggactgaatgtgacggtcacagtacagtga

SEQ ID NO: 403610 - DNA, 843 bp, Salmonella enterica
atgaaaaagactctgattgcactggctgtggctgcatctgcggcagtatccggttctgcgatggctggtttgggcaactttagtgccggcaatactgataatactgttaatattggcggtattattaccccgtcgcaggttaaaaacaaatgggtttgggctgttggtcagggatatgataatttcactcatgagacaacagcgttaactgattctggcaagaaattaactattatcgctaaggagaatatgcctctcttggtcggtaaaaccacagaggcttttgagggggcgccgggcctagctcctcaaattgcatttagtgattcaaaggggggtattactcctgtgtgggccaatgataacgctgaaggcaccatgacattaacggtcaatgatgcacagcagaaagaaattggttcaatgaaattgaatgttaatgcgattgctcctgttggttgggctaaaacagatgcaagtacagggatagatctgcgttaccatcctacttctagtggttcatttactggatctacgggtaagtttgcttcttccccgacttttgcaaaagtgaacgcaattcttgatgccttcggtgcgccagtatttggagatattgaaagacagattcaatcttatcctggtcttagtggtattcacgtcgttaccagcggtgttgttagtaccacaagtgataaatatgactcctccgggtgggcatatgctggtgcctacgcattaggcatttctaatgggaaggcgctcgaggttaactttaattcgccagttaacgctgaaactcattggacggcgccgttaaagatgcaagttagttataaataa

SEQ ID NO: 403611 - DNA, 162 bp, Salmonella enterica
atgaaattatgctggttattttaccgttgctggtccctcattcagtggcagccccaggttttttcatgctctcctattcagttcactctgacggacgtttgcttctttctttgttttcagaatacgctcgataccattttatcccacccagtcattttttaa

SEQ ID NO: 403612 - DNA, 405 bp, Salmonella enterica
atgccactggataagctgatcgccacactcatgaaggcaaaacaggaaaaccggctggaaaaacagctacagcagcttggttatgcccgggtactgatactggatgagataggctatctgccgatgacccgcgaggaagccagtctgttcttccggttgctgaaccgtcgatatgaaaaagcgagcatcgtgctgacatcaaataaagggttcgccgactggggagagatgttcggcgataacgtgctggcaacggcaatcctggatcgactgctccaccactcaaccacactgaacatcaaaggagaaagctaccggttaaaggaaaaacgcaaagcgggagtgctggcaaaaaacgccacgccaatcagtgatgatgaaatggcggaaagcggacaacattaa

SEQ ID NO: 403613 - DNA, 336 bp, Salmonella enterica
gtgctggatgcaggctggagactgcagaggcgtgttgagggaggggcgagatgcggttttcttatcgccgggatgctctacgtcaccagttgcaagcataagaaacccctgcgagtactattcatactccaggggcatagccacttgtcgaaatttgatatcatgaccaagatttactatggcacgtttattataacagatgatctcaacagtcacttgctacaggagagttggggggcttcttgggcatccctgatgcttttttcacaaaccaaccctttatcgcctaagggcgcaccagagatgcggccggcttttaactcattattcttgtaa

SEQ ID NO: 403614 - DNA, 507 bp, Salmonella enterica
atgtcacaaaaaacccacttccaaggaatgcctgttactgtcgttaatgtcatcccgcaggcaggcagaaaagcaccaccgtttaaactcgtggcaaaagatttgtctgaagttacgctgagccaatttgtcggaaaacgtaaaattcttaacattttcccaagtattgacaccgacatttgtgctgaatcggtacgtaaatttaaccaactggcaacagaaatcgacaatactgttgtactgtgcatttctgtcgatttacctttcgctcaatctcgtttctgcggtgcagaaggcctaaataacgttatcaccctatctgcgtttcgtaatgctaacttcttacaagactatggcgttggaattactgatggcccactaaaggctcttaccgcgcgagctattgtggttattgatgaaaatgatgatgtaatattcagccagctggtcaatgagataactaaggaaccagattatgatgcggcacttaccgctctaaaggcataa

SEQ ID NO: 403615 - DNA, 843 bp, Salmonella enterica; identical to SEQ ID NO: 7396

SEQ ID NO: 403616 - DNA, 498 bp, Salmonella enterica; identical to SEQ ID NO: 7397

SEQ ID NO: 403617 - DNA, 1113 bp, Salmonella enterica; identical to SEQ ID NO: 15604

SEQ ID NO: 403618 - DNA, 1389 bp, Salmonella enterica
atggaattgatgccatttaattttgacagattgcctaatggacaggtgtttataagcaaccttgcaggttttcatcatttcattggtgagcaagaccttattgatctttctgatgagcgaattagttcggagcaatcaaacgtgctagaaagtaagcttttcataaccagtgaaagctcatctgctataactccctatgctttaagttctgcttttgcaaaacgattgatgaatgaactggctgtcaggccaattttcatgattgtacccacattacgttgtgaccatacatgcaagtattgccaggttagtagagcttctgttaatgcctcaggttacgacctaaatcctgagctcatccccgatattatttcggctattaaaaaactatcaacgccaccttacaaaatagagatacagggtggggagcctctcttgcggtttgatttaattcagagcatctatgatcaatgtgctgaaacgctgggaagaaccaattttgagatggtggtggcatcaagtctgtctgtcttgaatgaggatatgattgaatggtcgagagaccggaacataacgttctctgtgtcgcttgatggtgaggaagttgttcacaacagtaatcgaattcttggtcgtgggcttgcgtacagtagaacagtgtcaggggtagaggctatcaaacactctttaggtgctggccgcgttgcaacggttactacagttactaaagagcttatcagacgtcctgaatcgattgttcaggctcacttgtctcttggtctcaaggacatgtttatccgacctgttagtccctatgggtttgcacaaaaagcttctttcaccttttctatggacgaatacttcagcttctatgcctcgttgatagatgaaatccttaagattaataatgaagggataagggttgtggaacattcggcctccattcatctgaaaaggatcttcaatcccggttttagtggttatgcggatttaaagtctccaagtggagtcgtgcttaacagtattcttttcaattatgacggtcgagtatatggtagcgatgagagccgtatgttgcagaaggtgaatcctgaaatggagttcagtgcgggtgaagttaagacgctatcattttctgatagtccttactataacgcagtattgagttcatcgttcaattttgctctgccaggttgtgatacatgtgcatatcaaccattttgtggttcagatccatgccagaacataagtgtacagggtgagcctgtcggtgataggagtcgttcaacgttttgtcaatatcacaaggggatgttcaggtatctgatgaactgcatctcagagggtggttcgaaggctgagatgctaaaaggatgggcatatgtctga

SEQ ID NO: 403619 - DNA, 141 bp, Salmonella enterica; identical to SEQ ID NO: 401864

SEQ ID NO: 403620 - DNA, 561 bp, Salmonella enterica
atgatcgttaacctatcacgtttaggtaaaagcggtacggggatgtggcaatactcgattaaatttttaacggctctgcgagaaatagctgatgttgacgcaataatctgtagcaaggtacacgctgattattttgaaaagctcggttatgcagtagttactgttccgaatattgttagcaacacatcaaaaacatcgcgacttagaccattagtatggtatgtatatagttactggcttgcgctgagggttttaattaagtttggtaataaaaaattggtgtgtactacgcatcacactattcccttactgagaaaccaaacgataaccatacatgatataagacctttttattatccagatagtcttattcagaaagtgtattttcgctttttattaaaaatgtctgttaagcgatgtaagcatgttttaacggtatcttataccgttaaagatagcattgctaaaacttataatgtagatagtgagaaaatatcagtaatttataacagcgttagtaaatctgattttatacaaaaaaaagaaaaagagatggtctga

SEQ ID NO: 403621 - DNA, 387 bp, Salmonella enterica
atgtctctccaacaaatggtcgttgatctgaaactaacagataaagtgacttttttacatgaagtctcatttaatgaattaaaagttttatattctaaagcctacgcgcttgtttatccatctattgatgagggttttggcatacctcctattgaagcgatggcatcaaatactccagttatagtgtccgatataccagtatttcatgaagtgttaaccaatggtgcattatatgtgaatccggatgatgaaaaaagctggcagagtgcaattgaaaatatagggcagttgcctgatgcaatttccagatttaacaactatgtcgcacggtatgactttgataatatgaagcagatggttggcaattggttggcggaatcaaaataa

SEQ ID NO: 403622 - DNA, 513 bp, Salmonella enterica
atgggcagcaccaccacgggcggtgaaactacaccgggtgcggtgaaagtcgggaaaggtggcgaatatgccaacctagacgccgtagtgatggatgccgtcaatgagcttatcgacgtggtttaccaggacgatgacgatctggtggttatttgcgggcgtgaactgctgtctgacaagtatttcccgctggtcaacaaagagcaggaaaacagtgaaaaactggctgccgatatgatcatcagtcagaaacgcatgggtggcctgcaggccgtgcgtgcgccgttcttcccgccgaatgcgctgctaatcacccgtctggataacctgtccatctactggcaggaaggcacccgccgccgttcagttatcgacaacccgaaacgtgaccggattgaaaactttgaatccgttaacgaagcctatgtggttgaggactaccgctgcgccgcactggtggaaaacatccagattggcgatttcagcgccgctgcagcagaagccggagcgtaa

SEQ ID NO: 403623 - DNA, 516 bp, Salmonella enterica
atgcctcactacaggaacaaattgaaactatcctgcgtaaatgatgttatattagatattgatggaaatatgagggttcagactgatattagctctcttagaaacattacagcctctggaaacatagaatcatcccaaaacgtcaaaggcgctacattagaatccacaggacgcgctacggtgggtgaatttgttcaattgaacggacaggctgaggttggcaaagaatgtcaatctaatggattacaaggaagaacagcagaagggaaaattttatcttgtgttaatggtgtatgggaaactatagatgctaatttaaaaatatcaacatacagtttaaagcctccaaaacatcaacttaatatgggagttcatagtgtatgctctttaagtaatgtaaaattttataaagggaataacactccatatattagctgtgaaataataaaaaatggaaataattggctttttcagacagtttattcaacacaatgtgaggctgtatgcataaactaa

SEQ ID NO: 403624 - DNA, 183 bp, Salmonella enterica
atggaaaacccccagctaggctgggggttccggaaagctttcagctttaagccagttattaaaaccccttttgatttgttaaaacatcttgcggtctggcaactgcaaaagttcaacaagaaatcaaaagggggtcccaatgagggacgaaaagagcttagcgcacacccgatggaactgtaa

SEQ ID NO: 403625 - DNA, 534 bp, Salmonella enterica
atggcatatccttatcagactcagggttttacgctggacaatagcggacggcgaattgtggtcgatccggttactcgcatcgaagagcatatgcgctgcgaagtgaatattgacagtaataatgtcattactaacgccgtgtcgaccggcaccatgtggcgcggcctggaggttatcctgaaaggtcgcgatccgcgagacgcttgggcatttgttgagcgcatttgcggcgtctgcaccggtacacacgcgctgacctcaatccgtgccgtagaaaatgcgctgggaatcgcgattccggacaacgcaaactgtatccgtaatatgatgcaggctacgctacacgttcacgatcacctggtgcatttttatcatctgcatgcgctggactgggtcgatgtagttgccgccctgaaagccgacccgcatcagacctccgccatcgcgcaaagcctttccgcatggccgctatcctcgccgggatatttccgcgatttgcaaaatcgactgaagcggtttatcgagtccggttaa

SEQ ID NO: 403626 - DNA, 183 bp, Salmonella enterica; identical to SEQ ID NO: 375745

SEQ ID NO: 403627 - DNA, 261 bp, Salmonella enterica
atgacgacgttgcggatgacgctgacgagtaatattattgctgtgcgagggccggatatccggccctttttcttgtctatggaaaacccccagctaggctgggggttccggaaagctttcagctttaagccagttattaaaaccccttttgatttgttaaaacatcttgcggtctggcaactgcaaaagttcaacaagaaatcaaaagggggtcccaatgggggacgaaaagagcttagcgcacacccgatggaactgtaa

SEQ ID NO: 403628 - DNA, 426 bp, Salmonella enterica; identical to SEQ ID NO: 377218

SEQ ID NO: 403629 - DNA, 183 bp, Salmonella enterica; identical to SEQ ID NO: 375745

SEQ ID NO: 403630 - DNA, 228 bp, Salmonella enterica
ttgtcacaagaaggcctctatccggaggccttcttttttttgtctatggaaaacccccagctaggctgggggttccggaaagctttcagctttaagccagttattaaaaccccttttgatttgttaaaacatcttgcggtctggcaactgcaaaagttcaacaagaaatcaaaagggggtcccaatgagggacgaaaagagcttagcgcacacccgatggaactgtaa

SEQ ID NO: 403631 - DNA, 204 bp, Salmonella enterica
atgttcgggctttttttgtctatggaaaacccccagctaggctgggggttccggaaagctttcagctttaagccagttattaaaaccccttttgatttgttaaaacatcttgcggtctggcaactgcaaaagttcaacaagaaatcaaaagggggtcccaatgggggacgaaaagagcttagcgcacacccgatggaactgtaa

SEQ ID NO: 403632 - DNA, 183 bp, Salmonella enterica; identical to SEQ ID NO: 403624

SEQ ID NO: 403633 - DNA, 183 bp, Salmonella enterica; identical to SEQ ID NO: 375745

SEQ ID NO: 403634 - DNA, 651 bp, Salmonella enterica; identical to SEQ ID NO: 377161

SEQ ID NO: 403635 - DNA, 1059 bp, Salmonella enterica
atgaagaagaatacccgctttgcttttaacgcttacctgcagcagctggcgcgtctgaacggtgttgcagttgaagaactgtccagcaagttcaccgtcgaaccgtccgtgcagcagacgctggaagaccagatccagcagtccgccgctttcctgacactgattaacgtcacgccagtgactgagcagtccggtcagttgctggggctgggtgttggcagcaccattgccggaaccactgataccaccgcgaaagagcgtgaacctgtcgatccgacgctgatggtcgatgtggaatataaatgcgagcagactaactttgacacggtgctgacctacgcgaagctggacctgtgggcgaagtttcaggatttccaggtgcgtatccgtgacgccatcgtgaaacgtcaggcactggaccgcatcatgatcggctttaacggcgtgaagcgtgcgaaaacctccaaccgtagcgaaaacccgctgctgcaggatgtgaataaaggctggctgcagaaaatccgtgaggatgcaccggatcacgtcatgggcagcaccaccacgggcggtgaaactacaccgggtgcggtgaaagtcgggaaaggtggcgaatatgccaacctagacgccgtagtgatggatgccgtcaatgagcttatcgacgtggtttaccaggacgatgacgatctggtggttatttgcgggcgtgaactgctgtctgacaagtatttccctctggtcaacaaagagcaggaaaacagtgaaaaactggctgccgatatgatcatcagtcagaaacgcatgggtggcctgcaggccgtgcgtgcgccgttcttcccgccgaatgcgctgctaatcacccgtctggataacctgtccatctactggcaggaaggcacccgccgccgttcagttatcgacaacccgaaacgtgaccggattgaaaactttgaatccgttaacgaagcctatgtggttgaggactaccgctgcgccgcactggtggaaaacatccagattggcgatttcagcgccgctgcagcagaagccggagcgtaa

SEQ ID NO: 403636 - DNA, 387 bp, Salmonella enterica; identical to SEQ ID NO: 403621

SEQ ID NO: 403637 - DNA, 369 bp, Salmonella enterica; identical to SEQ ID NO: 403595

SEQ ID NO: 403638 - DNA, 324 bp, Salmonella enterica; identical to SEQ ID NO: 379530

SEQ ID NO: 403639 - DNA, 261 bp, Salmonella enterica; identical to SEQ ID NO: 376467

SEQ ID NO: 403640 - DNA, 351 bp, Salmonella enterica
atggttgatgtaatcaaacgtcgtattgttggtgtatctgatggtagtccgcaggacgggcaggttgagatcgatatggaaaacgtaatgccgttgcgtttctctaccggtctcaatgacactaccgcggtaaccgctggtcaggctatcacactgaccgtggaactcgccgacggcatggaccctaaaaccgttcaatggtataaggataataacgctatcgctggtgcaaccgctttgacttacactaagtccaactccgcagcggcggattccggtacgtataaagttgttgcccatgacgggtatggcaacattatctcggatagcacagtagtaaccgtaagttaa

SEQ ID NO: 403641 - DNA, 189 bp, Salmonella enterica
atggcagataattacgtagtcagggaacaatacaaaggtgtggtcgaggtcaacgggcagttaatcccgatgcgcgaagaagcgaacccgggtgcattaatagagacccaaccggtcgcagaagaaccgcattacaacggtggtggggaacctaagcaacgtcgtcgccgtaaaagtgtagaggaataa

SEQ ID NO: 403642 - DNA, 510 bp, Salmonella enterica
atgccgcttatcgtggaaaccggtcaaggcatcccgaatgctgactcttacgtcggcctggaagacgcgaggtccatggcctctaagtacggtcttgagctgccagaagatgatgctaaggccgaagcggcgctacgcaacggcgcggtatacgtcggcctttttgagtctcagatgtgcggtcgtcgcgtatctgcaaaccaggcgctggcgttccctcgaaccggtgtcactttacacgggttccctcagccatccaatgtaattccatcgttagttattcaagctcaggtaatggccgcggttgagtacggcgcaggtacggacgttcgggggcctacagacgggcgcgaggtgcagacggagcgagtagagggtgcagtaaccgtgtcctactttaagaatggctactcaggtggtaccgtaagcatcacggcagccgatgatgcactacgccctctcttatgcgggagcaataacgcctactcctttaatgttttcaggggctaa

SEQ ID NO: 403643 - DNA, 606 bp, Salmonella enterica
atggctaagactaaatcggaaatattcgccttaattggggcaaacttccccgataaccagtctggactaattacaccagaaaagttgcgcgaagttaccactcagatggcggactctatgacgtacggtgctaaggaagtagaggtcctccgcgcgtcgtctacagatattcaggcaccgaccaccacaggtacagcgttaaccgtagcctttggtggagcacagaaaacaagcgctgacccggtaatgattaacgcgtcgggtgtagttacgtttaatgccgcgggtaactatgctatccgtgttaagttacaggccgggcggactggggcgagcgggacctctatccttctgtcgcgggttctgctagccggcgctcaattcggttcacccgccgtcgctaagctggctagcaccgatgttactgttcctattgaatctcgtgttgttgtgaacgccgcagccgggcagacttttacggtagagattatgcgcgacgccgccggttctaacttcggtggactgtacccacaagcggcaacggttacttcctggggtgtagctccatccgcattgctggtcatcccaagactggagggtgtgtaa

SEQ ID NO: 403644 - DNA, 360 bp, Salmonella enterica
atgggcaccgcttttagtaaacggatgcaaggcgtaggtactcgcctactaccaaaatacggcagcacggtaactttggtgcgcaaaggccagaaaacatgggaccctgttttaggggagtatgtgtgggggcctgacgtcgtactccctcttaaagcggttcctgtacccgttaatgccggtcttgtaaacgggaccgccattcaggccggggacatgatggttaaagcggattacagcgtagtgccaaagatggatgacaaggttcggtttagcggtgaacaatggtctgtagttgctattgagaagaagatggttaacgatgacgttgtggcatactttattcaggtgagaaaatga

SEQ ID NO: 403645 - DNA, 396 bp, Salmonella enterica
atgagttttgcgcttgatgtgtccaagttcgtggaaaaggctaagaagaatcctgagaaggtaatgcgtcaggtttctataaagttgttttctgcgattattaaagcaagtcctgtcgataccgggcgatttcgtatgaactggatggcttcaggaagcacccccgccgatgggactacggacgctaccgataaatcgggcaacgcagcaaccggtaaggttacgagtttcgtgctaaacgctgcggactggcataccttcaccctcactaacaatttgccatatgcacaacgtttggagtacggttggtcccaacaggccccacaaggtatggtcaggactaacgtcagcaggttccagcaactactaaatgaagaagcctctaaggtgaaataa

SEQ ID NO: 403646 - DNA, 420 bp, Salmonella enterica
atggcaacatattttgaggacttaacgaaagcattcgacacggcgctggtgacgttcggcatggacaacgacatcaaggtcgcattggagaacaccgacgcgccgacgtctacagacacaccgtatatcgcgagttatatgctgttgtctgatacagaacaagccgacttgttctggactgaacaacgagcaggtgtttatcaggtggatattaacgttgcgtcggccctgggtagcgctcctatcaaccgattagccgataagctaaacgccgcattcgccgctgggaactgttttagtcgtaacgaaatctgtgctgaggtacaatcagtaagcctcggtcctcctattgttgagaatggatgggcgaagaggcctctctcaattaatttcatagcctttacagcgaggattagataa

SEQ ID NO: 403647 - DNA, 1170 bp, Salmonella enterica
atggcgttacaaccatacaaaggcgcgatgaccgcgcaattttacgttcgtgaggaaacgccgggggtgacgccagcgaacccggtgtggcaaccgctacgcaacaccggcggcatccccgccgtaacccgagacgccctcatctctaacgagcttgacggaagccgcgaaacatcatctatccgtaccggtaaccgtcaggtaactggagagtacaccattgaactaagcgcggaaagtcaggatgaactgttggccggtgcgatgacaagttcgtgggtggcgggctctacttcatctgcaattggtatcaccgtagaccctgtagcgaaaacttacacacgcgctaccggcagctttgtgacagacggtgttgaagtaggcgacctggtgcaattcgatggtttgtcgggtaataacgataaagctttcctcgttaccgcagtaaccgctacagtcgtaaccggtgcggggatccagcatacccttaccgccgaatccgacgtccaggccgatttgcgtatcgcagataaactggaaaccggtaacttgtgtaagacatattcgattcttacgtggttgaaaggtaagtgcggaaacccggattcatatatcgtaacccgtggcgttgagtttaccgggttcactatagaacaggcggttaacgctatggtgacaggttcattcccgttcatcggcttgaatcaggaaatcttacaagcaccgccgagtggttcagatttcacgaccaattttagtgcccgtccgtttgcatcggtcgacgtatctgcttatgacggagccgcgccgcttaaacttatcgacacgttcaccattactaacgacaacggcgcatccgcacagttcgagttgggaaacaacagcgtggcatttgttgagcgcggccgcgcggctaacactttctcactggccggtaaactgtacgacctgacgctgttaaataaattcctggatgaaacagaaatggaggtatcttcggttcttgatggcccagatggcgcaatgagctttacgctaaaacgtgcttccctgacgtcagcaactccggaaatcggcggccctgagtctatcaccctttctcttgaggggcaggcaaccgggaaccagttccagtcttcaattgttatccagcgcattaagtacgcctaa

SEQ ID NO: 403648 - DNA, 231 bp, Salmonella enterica
atgacaaacaaatacaaccgtacaatgacaaacaccgaaggtgacagcattacctgtgatgtgtacgacgttctgagagcctttgatatccgcgaccctgcactacagcacgcattaaagaagctgttgtgtactggtttacgggggcataaagatgctgatactgacctacgcgaggcaatggagagtctggataaataccggctatatctgagtaatcttgaagaatga

SEQ ID NO: 403649 - DNA, 1131 bp, Salmonella enterica
atggtcactcgcaaaataacagatgaacagttacagcaagagctaaatgctggcctaggccccacagaaatagctaaaaagtacaatatgtcccgccgtaatgttcagcttcgttccgcgcgcctggcaaagaaaggagttggccacgggcgcgacgtaagccaccttgtgccggatgggtataaaattaaaggtacgtcgtcactggtagatgaattcggtaacacgaaacttcaatgggtgaaaaccgatactgatgctgaacgtcaggcagaattaatgcgcgcggttattgatggcatgaagtctgatattacgccggtttctgcggttcctcctcctaaaaagcgacagaacgagaagctgctaaatctttacacggtttctgactttcatttaggtatgctggcctgggtggatgagagcggtgatgattgggatatgaagattgcagaagaccttttctctaaatggtttgacgccgcgttccagaaagcacccgatgccggtgtgggtgttattaatctcttgggagactttgctcacttcgacagccttgacgccgttacaccagcaagcggacatgttttagatgcagatacacgttatcagaaactggtgcgctacatgattcgtatggtccggcgtgtggttaacatggcgctggttaagcataaatcagtgcgccttcttatcgtgcaaggaaaccacgacgaatccagcatgatttggttggctgagatgttcaacacactgtacgacaacgaaccgcgtgtatttgtggatacgtctccggatgtgtacaagatggtgcaacacggcaaaacaacgctgttcttccatcacggccacaaggcgagattcgacaccattgaaacggttatgattgccaagttccgcaaagcgttcggggagagtgtttacagttacgcccacgtgggccacctgcaccaccagaagattgtagaaagccgtaatatgattgttgagcaacaccgcaccctggcggctaaagacgcctacgcctcccgtggtggatggatgtcgggccgtagtgcaaacgtaatcacttatagtgccgaatatggtgaggtagcgcgcttaactatttctccggagatgctgggatga

SEQ ID NO: 403650 - DNA, 330 bp, Salmonella enterica
atgaagacattaatcgctctaggtttgctaactgtttctttacagtcattcgcccatccttgtgaaactatttttagcgaaacggtccttaatacgtcaggtgcccttgacggtcacgaccaaaagttagtacacgcgttccgaacttctgcgatagatgaatgtatagccgccgaaaaaataggtaaatccggtctcccggcgcaggttgtcacttattcggttattagttcagtcgaaactggcggaaatgcattctatagtctgttaaccgcgacaaggcttcaaatggtgttggcggggtgggccatggggtcggagagtaaatga

SEQ ID NO: 403651 - DNA, 417 bp, Salmonella enterica
atgaaacttagcgatttttattttgtagaaaagcaccaggaagggaccatgatgcccattcccctgcccaacggcaaagactccggggagtggcttcaagtagttggacctgattgcgatgccgcggttagagcgggacgggcttatacgcgagcggtatacgccctgaaagactcgctgtccgaattggatggccaatgcaaggaaaaaggggactggaccctgtataacaatgaatatacgtgggccgtcgaaaaactaaaccatcagatggcgaaagagatagtaaccggttggtccttcgacgaaccgttcacactagagtccctggaaaatctcctgctccagtaccgggggttaagcgagttaattttggcgcatcacaccaagagcaaggaattattgttggaaaagtag

SEQ ID NO: 403652 - DNA, 264 bp, Salmonella enterica
atggggaaaatagcagccactaaaactgctaaggcggaagataagcgtccgcctcttattttccaggaattaatggataagtaccgaaaattgaagttcatacagcgcgaaacgacatccgagataacgcttatagcccgggaaatgctaaactggcaagacctcgaagcgttcaaatcggcaacgggggaagagataagtatgctggaagccgagcttatcatgggaatagacgctatttttgagggccgagataatggctga

SEQ ID NO: 403653 - DNA, 2310 bp, Salmonella enterica
atggctgatactgcatcactcattacccgagttaagaccgaaggcgcccgtcaggccgcgcaggaactcgacaaattatccacatcggccaacaccgccgagggcgcggtacagaagttaaccccagcagtggataaaactaactcagcgacatcaaaagccgctggcgacggcttatcaaaattccgtaacgcggccgggcaagttggctttcaggtgcaggatatggttgtccagttgcaatccggcacatcggcgttcgtcgcgataggacagcagggttcacagttggccggggcatttgggcctggcggtgcggtactcggtgcgataattgcattagcttctgccgttggtggggttctgtacaaatcactaacatccgcagaagccagcactaaagacctggaagccgctcaggaacaattaaagagtacctttcagcaaacttcgtccggcacatttgagctcaccgatggcctcattcaactgacgcgaataagccgcgaagccgccgaaacacagttagcgctggccaaggctaacgccgatataattgcgcagcaaacagccaaagctatccaagaagacgctaaatcctgggaaacatggaaagcttcgacaaccgcggcaatcagtcagtacgacgcactagtggctaaaggagcagacgtaggtgatactctcgaaaaactcggcggcacctacgaggggaatatcgttggcgtcaatatgctggcgcaaaacataggggaacttagcgataaattcggtgttaaccgtgagcaagcattagaaatgatagcggcgcaaagcgcctttaacaaagaaccaaccgccgaaaatgctcgccgcatatcggacgtgtttactgaatggttagggacgtctaaaaaccttaatcctgaattggttcgacttacaaaaagcgccaatgataacgccaccgcattggaaaatgcggagaagtccactcgtgccgcggcggaagcgcagaagaatcttggaaataatgtaaatgcgactacacaacgtttacgagagcagaatgacgctattgtcaaaaaccaacagatagcgattctcagcgaccgggagcgcgttaaggcgcaagcccaagctgacaaggaagcattcgcgaaacgtgaaggcgttacaaaggagcagatagcggcctataacgcggcccgcgacacagaggcccagcaagatattgcacgtatagacgcaaccgaaaaagcaaaaacagaacgagtaaatgccgccgccgagaaaagagaagcggcgcagataaaaagagaagaaacccaggcacaaaggcagaaaaaagccgcggatgacttcttgaatactatagctagacagaattccgatgaactcgcggctatagatgcacaggaacaacagaaattagccaaattgcaggagttccagcaacagggggctatctcccaagaacagttcgaagcagccaagacacagatagcggtagacgccgacgccaagaggaatgagattttagagcagcagaccgaagagaggatgaaaaaacagttctccgcggacgcgtacgtcgctcagatgcaagcccttgccgaaggagaatttgcggagttagaccggcagtatgaggtcaagctacaaaaacttaatgatttccatgctcagggtttaattgccgaagaaacctaccagcaaacgttaagcgccatggatgaatcttattcccttgaccgagcgaaggcgaccggcgcggctttcggtagcatggcgagcaacatcgggtcggcgctgggggaagcatccaccgcgtacaaggcatttgctattgcgcaggcgacaatcgctacgtacacatcagcggtcgaagcgtataaatcaacggcggccataccggtagttgggccgtatttagcgccggttgcggcggcggcagccgtagccgcaggtctcgccaacgttggtaagatacgctcggcgcgtgagcagggtggtaacctcgccgcggggcagatgtctactattgccgaacgcggtaaaccggaagtaatcatgcccgccagcgcctcccgtgtgcgcacggcggagcagatgcgacagattatgggtgagaatggcggtaaatctggcggggataatgttactattgtgaacaataccactggaagaattgattcggctgcaacagaacgcgatgacgaaggtcgtttacgtattataatcagtgaaaccgtaagttcagcgttgcaggatagtaacagcgccatttctaagtcacgtcgcgccactcgcggccaaccaggatattga

SEQ ID NO: 403654 - DNA, 501 bp, Salmonella enterica
atgagcgattaccatttcccggcctctttgaggccgatagtatcgaaaggctactcaatgacccgcggtaacaacgtgtggcgggtagaccttgccggtggcggagttcgccagggacgcgacacctattttgacgtgtttcctattaacgttaccttggtcgtgtcgccgttgggtaggcaggtgtttctcagtttcatggagaaagtagacggtggcgcatccagtttctggatgaaacacgaccttggccagggtattgacgattaccaggtaacgttaacatccacgtggaacgagtccacagatgacggaaagaattgggtaatcaccttcacggccaccgctgagaagtcaccattccaggaagccagcaacgcttgtcttaaccagaacctaccagatttgtacgggtgctatggtgattgccttggcgaattccttaaaacctacggagtgtatcagactacattcccgagaatatgggaccccatgcaatga

SEQ ID NO: 403655 - DNA, 516 bp, Salmonella enterica
atgagtcaggaatcagtagaagcggcataccggcgtaagctggcgtccaatccagacggtgaaatggattttattactcttgagatataccacccacttctttcgaaacggtggttactcgtgcgcggggctgacgatttaacagctactcttgagaccggggaggtcgtgacgttcgagggtacgccgatggaggctaagaacgccgccaacaataacgatatggaccagaccgcgtccttttcgcttccggatgtgcttaacatactggatgaggaaatggaccgtataccttacgataacaaggaactgcctaaattcatcttccgtcgctatgtgagtacggacctatcctatccatgcgacggcccggtggtttatgaattgcaaacactcacacaagaaaaaggtgtatttacggcggaaactggtacgccgatgcttaaccaacgggctaccggtattttgatgacaccggaggagattcctttacttcgcgggatactgacatcatga

SEQ ID NO: 403656 - DNA, 366 bp, Salmonella enterica
atgaatattaatgattacactggcttgccgtatgactttcgccgtcgtaattgctggcatcacgtccgcaacgtccgcgcggacgcaggactgccgaccccaatgtttgatgtaaccagcccaacggcaatagattctgccttcgacgacggccacgctaatccgaaaggcctaacccgtgcgtttcacccccagaatttcgatgcggtcttgctgggcgtaaaacatagggggcgaatagtgtggcatgctggggtatattacgaaggaatggtaagccactgtgagctggcgtccagacaggttagactggatagtctggaagaccttaaagatacttattcggagattgaattttggcgctag

SEQ ID NO: 403657 - DNA, 2559 bp, Salmonella enterica
ttggcgctagtaatccactatacccgtaacgaagacggcacatttgacgttaaacgttatcgcgataatccaatgaacttcgtcgtgaaccatgttccggacggggttccggtacgtgttttcattgacgaaatcggagaagataacgacgtaacagaagacttcgaagcactgaaagaaaacgcgactttccacattgtggaatctgccggtggtggcgctattaaaggcgtcatgaagatttttagcgttgtccttaaaccgctagcgaaactattatcaccatccgtgaaaggggtgccatctaaccttgcgaactcgcaggctgattccccgaacaacagtctcaccgaccgtaacaacaaggcccgcccatacgagcgtagctacgacatctgcggaacggtgcaaactatcccaaataaccttatgtctacttataaggtgtttaacgccgctggtaaaattgtagagtacggctattacgacgccgggcgtggttacctcgacatacatccggatggcataacggacggggatacccgtgtatcagatataacaggcacgtcggttgccgtctacgcgccgtacacgtcaccgaataacacggcaacgccgcaagtactggttggagacccgatagagcaggggttatatctgactgtcgaatcaaatgaagtagacggcgtggttctgaaagcacaaaacggacttggcatctcgttttcttacatgtccggatacccttcgttatccggttccaccggcactatatacgacccgtcaggggggtctgacttctccggtgttcttgtgccgaatgatacgttttctctcgtatccgcctggacaaatacagatgttgacctttccggtggtggttatcaggtaataagtgtttccgaaggaactgttactttcgtagtccccggtaatcttataagtaaatggcaacaaatacagccgggttcgttttttcgtggagacggcgaagcctcgttgcaaccggataacacatatgaaaaaacgttaactgattgggtgtccataaaccgaactgaggtggaacgtattgtcgctaacatagcggccgcaaacgggatgtataaagacaatggtcgttccaaaacgttggcttcggtaacagcagaaatacaataccaacttcttgacgaaaatagcgtgccctacggcccgatttacgcggcgcaaggaaccgtatccgggcgcacttctgactataacggcgtgactatatacgcagatttacccgtagcgtctcgtgttcgcgtcagggcgaggagagtaacagaccttgatttcaatttcgaaggctcagttgtcgacgaaataacctacgttaacctgtacgggcagactagagacaacaccccacactacggcaaccgaaccactgtgcactcaatgcgtaagcagacgccgcgcgctgccgaagttaagcaacctcagttgcgcatgattgcgaccgagatggtatataaatatcttgggaatggagtgtttgaggatacgatgtcgcctaataaccaggcagtccaatcgttaattcgcctcgcaagggaccctgacgtcggcgggctcgatttaacagtaaggaatatggataagttgcttgctgtacaaaaggaaatagaggattacttcggcgacaagcaagcaggggaattctgttacacctttgatgattataaaacaacgatgcaggatatcgtcaacactattgccgatgctattttttgcacgccataccgtagaggcgccgacattctgcttgactttgagaggcctcgaattgggccggaaatggtgtttacgcaccgcagtaaggcaggaacctcagaaaaatggacaagaaccttcaatgacgcacaggtttttgacagtttaaaattctcttatatagacccgaaaactaacactaaagaggtgataacaatccctgaaactggcggtttgaagactgaaacatacgattcgaaaggtattcgtaactataagcaggcgttctgggccgcaaacagaagacaccagaaaaacattcttaagaagatttccgtctcgtttagtgccacggaagaggggatatttgcgctaccaaacagggctattagtgtagtgaaaggctcccggatggctacctatgacggctatataacagcagtaaacggcctaactgttgagctgtcacagcctgttaaatttacgtcaggagacgaccactctcttgttctcaagcggcgagacggtggcgttcaaagcgtcaaagtcacccccgggtctcacgacaggcaggtgattatggcggaagtacctcaagaggcaatatacaccggcaacagcgctttaaaaactgagttttcattcggcaacgaagcaaggcataatgctcagatgattcttgtttctacggtagaccctggcgatgacagaacagtcaaaataaccgggtttaactatgacaaggatttctataagttcgacaacgtaccgcctttcggtcgtgcgttctctaacggattcgataacggttttaactaa

SEQ ID NO: 403658 - DNA, 2028 bp, Salmonella enterica
atgtccagcggttgcggtgatgtaatgtcacttaatgatttacagatagccaaaaaacaccagattttcgaagccgaagtcatcacgggtaaagctggtggcgttgtcggtggggcggacattgactatgcgacaaaccaagtgacgttacagacgcaaaagacactgcctgcggtcttacgtgacgctggtttctccccggcatcttttaattttacgaccgggggtactctcggcgtaaacgacgcagataaagctgttctttggccgaaagaagatggtggagacggcaactattacgcgtggcgagggtcactgcctaaagtgattcccgcgtcgtctacaccgctcacggcaggaggaatttctgactcagcttgggtcgcctttggcgatatcacatttcgtgcggaagcggataagaaatttaaatactccgttaaactgtctgacttcactactctacagcaactagccgatgccgctgttgacagcgttcttatcgaccgcgattacacattcaccgatggcgagatagtaaattttggtggtaagaccgtaaccattgattgcaaggctaagtttattggtgatggtatccttaactggaataacttgggtcgtggttccaaagttatttccccccacatgcatactaaaaccacgccatacactgtatatcgtttcgatgataacgggaactgggtaacaaacccggctacagtattggcgtccgtagcccaaagattagataaaggatacaagccaaatgttaacgacctagacatttgggcgtctctacctgattacgttaagaatcaggtagccggggctaccttgcgtgttaattctgccaataatattaatgttgttcatccagaagccactatgggagggtatttattcacgctctgtaatcatattttagttgagtcgcctcgcaactttattgcatgggaatctggtattacatttgagaatcaccatactactgcctggggcactggcaataaggtagtgggtggagagattaaatatggttctggttctgctgtgttgtttatcagaaatgatggtggcgatgaccacgacggtggggttagggacttaatctcctatcgcgtaggtgaaagtggtgtaaaaacttatcaaaacgaaataggtggccgctcggcaagaaactaccgcctgatattcgacaacataaccactattcaatgctactacgacggtattgacgttaatgcagatactgggtcgcctactgagcgagttgatgattacactttagctgaatacccgtggtttcaattgccgactagacacataattcgtaatattattacgaaagactgtatgggtattggcgcttggtgggacggccaaaataacactatagataatattgtgacgtatgaggcccacaaagagggggtttttgaccgaggaactaataacgacatcactaacattacggtagtttgtgcaaacaaagacctaaccaaccggaaccagattgtttgtgaaggtgggagtcgtctaagaggtataatggtacatgcatataccgcgcaaggatatgcagtatacgctccggcctcagaaattagcaatgtttcatgtgcgggctccggcactaagaagatactttgtacatatattgccgatgttcaaggcggtaacattaatgttcagcatagcgctaaccaaatgaccctggcaatgcagcccgcaatggggggtactacaaacccatcattacttatgacggcggattgccaggtggctattcctggaggtgaggccagtattgttagactgtctgctattcaggatggggtgagagttggcgagctacagttgaaccgcttgggctttaagcatatgagtatacccgcgtccccttctcagttgcccgagagtgcgttggaatttaattcttctgtaggtttcttctttggaagtgatggcgcattgcgacttcttgctaagaaacccgatgggacatttgtgacctatacactgtaa

SEQ ID NO: 403659 - DNA, 168 bp, Salmonella enterica
atgaacatcatagccccgattccggcactacaaaaacgcatcaaggaactcgaagccgagaacgccagactacggcagcagcgggacgcggcgaacgcgcaattagactggctacttgagcaaccggaagtaagtaatgacttagcagcaaaaatacaaggggactaa

SEQ ID NO: 403660 - DNA, 516 bp, Salmonella enterica
atgatgaatggtgaggagcttctacttaaggcacatcttctgtcgcggggttttgacgccgaccgtttacgtgtagtcttaggcgctggagtagctacgttttacctgtggggttttgacggtaagctacgcgggtatcagcattacaggccacatgctgaaaagaactgcaagaaccctaaagacgcgcggtactttacccgaacaacaaggccgtgtttatggggccttgagtatttgccgagtagcggggtggtatttgttaccgaaagcatatttaaagctgttgctttgatgaattgcgggtttaatgcagttagcgcattggggtcgaacataccagcggacttacggcagcaaatgtcacttttgccgtatgaatgggtgtgcgccggcgacaatgataaagcgggcttaaagttcagcaaaacattcaccagaggatttgtatctaacgacctcgatgagctttgtgaagaagaaataacgtatcttgcgaggaaatttaccagatga

SEQ ID NO: 403661 - DNA, 2466 bp, Salmonella enterica
atgagtaaattcgctagaaggccttatcaaaagctcatgacttcgttcatgctgcaacacccgcgctgtaatatctgggccagtatgggcagcggcaagtgcctgaaacgcggaactgaagttattatgttcgacggcacgaccaagaaagtagaagacgtcatcgtcggtgacatgcttatggggccggattcaactccgagaaatgtactgtctctcggtagaggccgggagatgatgtacgaggttaaaccgcgaaaaggagagtcgtacacggtcaacgaaagccacatattatccctgcgaactactacaggggtagcaaaaggttcatggccagataataccgttttcgacataagcgtccgcgactggcttaagttgccgaaatatgtaaccgggcctaatggatatcttaaggggtggcgagcgtcggttgatttcgcgggaaaagagcaggatgatgttttattacctccgtaccttctggggttgtggctgggtgatggtacttcgtcgtctggggccataacatcaggagagaacgaaaaggaaataagggagtatctcgagtcgtacgcagcacgtaatgggatgcaaatacgaaaagaaggacttacatggagtatatcttacggcaacacaggccataagaagcacgggtttacgcatgcgctgaaatcggcgggtgtcctgaacaataagcatataccgcacaattacaaatgcggcgaccggagacagcgtttagagttgttggcagggcttctggatagtgatggttactgcgatttgtctaaagcaggttttgactggatttcggtaagcgagagacttgctgatgatttttgttatctatgccgttctcttggtttcgccgcttacaagaagaaaactcgtaagcgttgcacaaacactgatgtttggggtgattacttccgtgtgtcggtatccggcgatttttctgaggtacctttcgtgcgcggacgtcaccagaatttaccgaagcgtaatattaataagaacgttcttaccgtcggaatagaatccataaccccggtcggcgtagatgattattttggcttcactattgacggtgacagtcggtttttattgggggacttcactgttacgcacaatacaagctcaacgttgtgggttctcaaccgactgttccgtaatggacaacttaatgacgacgaccgagtgttaattctggctcctttacgtgttgcgtccggtacgtggcctgcggaacaggcacgttggaatttcccgtgccttcgtgtcatcgatgcaaccggttcggagaagcgccgcatagcggcgctggagtcggacactaacgtggtgtgcactaactacgaagttatcgagtggctgattgactactacggcaaagacgactggcctttcaccgttatcgttgccgatgaaagcacgaagcttaaatcattccgcagccgttctggtggtagcaagcgggcaaaggcccttagcaaagtggcgttcggaaaggttaagcgtttcattaacctgactgggacaccatcgccaaacggcctcaaagacttgtggggccagaattggtttatcgacgctggcgagcgcctggggtcttcatacacggcctttaccgatagatggtttaactcggtacagaaagacaaatctgcgatggcgcgggagtaccatgctcgccctggtgcggataacgagattcatcagaaaatgaaggatatcagtctcacgattgacgctgctgaatggttcggatgtgaagcgcctattatcgtgcctgtagaaatcgacctgcctaagaaagcgcgtcaagcctacattgacatggaagagaagttattcgctgaactggaaagcggagaagttgaagcggctaatgccgccgctaaaacgtcaaagtgtttgcagattgcatcaggggctgtgtatgtgtcggggccagatggcgaggcaacgaaagactgggagaaagtgcacgacacgaaactggacgcactggagtcaattgtggaggagttgcagggtgcgccgctgctggtggcctatcagtttaagcacgaacttgagcgcattcttaagcgtttcccacaggcgcaggcgttcgccaaaggtgccaagggcaataagcagatggaagcgtggaaccgcggagagatacctatgctcctgatacacccagcctccgcgggtcacgggctgtcgctacaacacggcgggcaccacatggcctttatgagtaaggggtggaacctggaacattatctgcaggttatcgagcgcataggtccggtaaggcagatgcaatctgggtacaaacggtctgtattcatttataaaataatagcccgagatactcttgatgaagttgtcgccgctcgtacggacgagaaaaggtctgtacaggacgaactacttaattatatgaagcgcagaggtaagaaatga

SEQ ID NO: 403662 - DNA, 192 bp, Salmonella enterica
atgaaacacgaatatgaccgcaagccagcacgtgacatcgtaccgggtgacatgattttcaacgttaagacgcgaagtcctgttgccgtagatacggtgttcgtagagtctaacggtaaacttgttattgaagacgtaaccggtaataccacggcgttcgggcgcaaagagttagttctggtggcaaaatga

SEQ ID NO: 403663 - DNA, 285 bp, Salmonella enterica
gtgactccggaaggccgcgtacagaagtacgcaaaagagcgattcgaggacatcggtggcctcgttcgtaaactgtcttatgaagggcgctccggcgctcctgacctgctggtaattctccccggcggcatcatctggttcgtcgaggtgaagaaagacgaaaacacgaagccagacccacaccagttacgtgaacacgagcggatgcgtaaacgtggcgctaatgtttttgtggttgggtcgaagaaacaggttgataaattaatagaacactattatatttag

SEQ ID NO: 403664 - DNA, 195 bp, Salmonella enterica
atgagtaacaaaccatttagtaagaaactaactgcgttagtagctatgccagagtgggaatttatcacggtaatgggtgatgggttctttaatgatgcatgcgccgggtgtacgcacaaaggtgtttactactcagaacacgacatctatcaagcgtacttcctacgtaacccgggcgcggagcctttgttgtga

SEQ ID NO: 403665 - DNA, 132 bp, Salmonella enterica
atgctaagtaaactgattgttacagcactggcgggattcgccgccggtgtttactgtcacgaaggtcagtacggcatgatggttgccgtattgtgtatgttaatcgcaatttatctgtgggtgctggaatga

SEQ ID NO: 403666 - DNA, 3147 bp, Salmonella enterica
atgaacctgctttatcttgatactgaaacattttcagaagccgatttgaaaaaagtcggttcctatgcctatgccgagcatcccactaccgaaattgttatttgcacctacgctttcgatgaaggccctgtgcaagtatgggacgccacagacggcagcgatatgccgagggatttacgacgggcgatgctgaagctgcaaaaacccgacagcaatattaaactggtagggcaaaacttccttatgttcgacagaccggttattaagcattgctgggggttcgaactcctggtagaaaatatcatcgacactatgatagtcgcgttccgccatgcccttcctgggtcactggccgcgttgtgcgaggttttaaacatcgacgcaagcatggctaaggataaacgcggtaaggcgcttatacagcgattcagtaagcctacgcctaagaactataagattcgacgctacaccgccgatacccacccaaaagagtgggcagaatttattgcatacgcaaaaagcgacattacgtctatgcgtgaagtgtataagaaaatgcctaagtggggcaattctgaatttgaggaccgcgtgctgcacttagaccaggtaattaacgaccgtgggtttaaggttgacgttgccctggccgaggccgcgattgaagccgtagagaagcacaaggcgcagttgcaggaggaagcccagcgcaaatacggcggctcacttaccggtaaagacttcctgccaattctgcgtgaactggccccagcgcatcgcatccataacgcgcagaagtcgacgctcaatgacctgctggcggacgatgatttacctgacgacgcccggacgattatagaaatgcgccttggtgcagcatcaaccgcgtcaacgaaatataacccgctgctgttgggccgctcgtctgacgaccgacgccgcggttgcatccagtacggaggggctaaacgtacgctgcgattcgcgggtaaaggcttccagccgcagaacctggcgcgcgggtactatcacgacgacccgaagaataaaaagaagaaagtacgttacgactggatgtcagaaaaggactggtggagagtaacacacccattgtcctatggaattgacctgttgtttaaagggcgtgctcatcgaagattcgatgtagccaaactaacggcatcgacggtgcgtagctgcatcatcccggaagccgggcacaaatttgttgttgccgattattctaacgttgaggggcgcggtctggcgtggctggcgggagaagaaaccgccctcgataccttccgtgcgggattggatatttactgcgtaacggcgggtaagatgtttggtatggaccctgattacattcttgaaagccgtagcgacttgcgccagattggtaaagcctgccttcaccgccatacccaagttttgaccgatggcggatttaaggatattatggcggtcacatcgacagataaagtatggagtggtgaaaaatgggtgaatacaaaaggcgcgcaccttatggggtggaaaccggtgataaatgtggacggggtgctaatgaccgaagaccacaaaatcttgacgcattcctggaagcaggcaaagcaactcgtttcaaacaaatatatgatggaccgcgccctggagataggtatggacgcctggttatcctgcgcgagttaccaaaacgacaaggccaaagacaactactcgtccaatgtgattgtggagagatgcctgggcgggtctattatgacaatgtcagggcgggtaaaaccactcaatgcaaccgctgcgcccttgaagcaacaaaaaaatatcgtaaacagtatttctgctacgaagacgcaatgccggatgatgcgcacagaacgcgattactcaaccggctgtccgcggcgatcacgcgaacaacaagccccagggataagggttataaaaactatggggcaagaggcatcacggtattcgaccagtggaggactgataaaaggtcttttcttagatatgttcaaaatctggaaggctgggatgacccgaacctcgaaatggatagaatcgacacagacggtaactacgaacctggaaacattcggtttgtcagccgttctgaaaactgccgaaacagacggcaaatacccgagcttcaacgaaagtatgatgcagccgttgcccgcattgctgaacttgaatgggaaattaacctactgcgagccggtgtacgacctgattgatgtggaagacggcaaccgttttcttatagcctcagactccggctttcttgtggcgcataactgcgaactaggcctcggctacgggggtggcgtcggcgctttcgttcagttcgccaagaacctcggcctaaacctcatcgatatggctaaaacaatggacggtactttcccggaccatatctgggctgccaccgcacgaggttacgagtgggcgcgtattcaggaggctaagcgtcctccgcgtccaggtgaaaaggacgaccgaccctcgtatattcttgataagaaagtgtggcgtacctgcgacgctatcaagcgcatgtggcgcgagtcgcaccctgagactgtagctttctggcgagatattgaagacgcagctatggcagcaatccgtaatccagggaaagagttcaccgctggccctcgtggagttaagttttcccgtaatgtagaaaccgataacaacggcaacaaggtagctggttggtggttgcgcatgacgttgccgtcggggcgggtaatgtcataccccggcgccggcttaagcgtatcaaaagagacggacgaagacgggaaagtttctactaacgtgcgtatcaagtatcagggcgaaaaccagttaacccggcagtggggcttccagtacacgtactccggtaaactggtggaaaactgcactcaggcgctgtgccgtgacttgctggctaacgcgctgctgaacgtcgaggcaaacggctacccgattgtacttcacgtacacgatgaaattatctgcgagacgccagattcgcctgaatacaatgtggcggaactcgaacgattgatgtgtgagttgccaggctgggctgaggggttccctcttgtagcggaaggtgcggagatgaagcgttatgctaagtaa

SEQ ID NO: 403667 - DNA, 627 bp, Salmonella enterica
atgggaatcaaacttaatcttcgtaaagtacaaactgcatggttgaacgtattcgaacgcgctaaagaccgtgaaaataatgacggttccattactaaaggtacttataacggtacttttatcctgactccggaacacccgcaaattgaagaacttcgtgataccgtattcgctgtagtgtcggaagcattgggagaggccgccgccgagaaatggatgaagcagaactacggcgaaggtaagcacatggacaagtgcgctgtgcgcgacatcgctgagcgcgataatccgttcgaagacttcccggaaggtttttacttccaggccaagaacaagcaacaaccattaatcctgacttcggttaagggtgaaaagcaggtagaacctgacttcaatattgatggtgagcagattgaaggtgagcaggtatatagcggttgtgtggctaatatctcaatcgaaatctggttctccgagcaatataaagttttaggcgcaaaactaaacggcatcaaatttgccggtgaaggtaaggcatttggtggttctgcggtttctgccagcgtcgacgacctggaagacgatgaagacgaaacgccacgtcgggaacgtcgtcgtaaccgttaa

SEQ ID NO: 403668 - DNA, 177 bp, Salmonella enterica
atgaagaaatttacatggtggttgctagcagtcccgctaataccgatggcttttatatactatttaatgagagcgttagagaaagttggtgaaacgtcggcaattttagcggacaggatgctagactcaaaaatgaggatgaaatatttagcatggcgtaatcgaaaattcggttga

SEQ ID NO: 403669 - DNA, 1431 bp, Salmonella enterica
atgactttaaaagctaaagataggagcgggggtaacgacgtacacgccttattgtcgccatccggtgctaagaaatggttaacatgccctgcgtcactgatatgcgaaaaagatatccctaacacttccggcaaggccgcagtgttaggtacggcaatgcatagcctttctgaatatcatttaaacgcgtatatacgcggcactgcgctgccgttagagcgagatgtaggggcatatgtgctggaagaaggtaaaggcgcggttaaggccctaattaagccgatgaaaggcgcggtgctggttacagatgatatggtcgaacaggtgcgaaagtacaccgactactgtaaagcgattatagatgtagcggcttacgccaagctggaaatgcgcgtcaatcttactgaggtattgcacccgggatacgaaggcgtggagactttcggaaccgcagacattgtagccgttcagggactggcgaacaccgacgaacacatgcttattatcggcgaccttaaaacaggacggcatcgtgtcgaagcgaaagaaaacaagcagcttatgctctatgccctcggtgtttatcgccgactcaagagacgttataacataaccgtagttcgtctggtcatcttccagccatacgctggcggtgcgtcggagtgggacatctcggtcgaaggtctggaactgttcgctaagtttgcgcagaaacgcgcggtagccgcgcttgacgcgtatcgccggggtaagaaaaaccttaaaccatcagacttcaagccgtcggttgatgggtgccagtggtgccggttctcggaacaatgcgccgcgcgtacaaaaaccgttaacgcggtgctgaccgaagaactggaagacaatacagatgtatatcgtacagccgtagaacgtgtagctaagttctgcaacgacgcggactatatgagcgtttgggaggatgttcagccgagcgatattcttaagttgctgcctgatggcccagatttacctaagaagccagtgagagaggacgactttgcactggagcttacgccggagcaactcgtcgctgagtatgagaagttgccgttgttgcgccagcacatcgacaaagtagaaaaagctatggcagccgctttgcattccggtaagaaagttcccggttacaagctggttgaggggcgccctggaaatcgagcatggaaagatgaagacgctgtaaataaattcagggaaaaccatgtaaacggctatctgctggataagactgttccggtatcaccgaccgaagcagaaaaggttattggcaaggaagacccagaactttgggccgagctagctaaactcataacccgtaagccgggggcgccatgtgtcgcaacggatgacgacaaacgaccggaatggcaaaatgttacggaggaggatttgtaa

SEQ ID NO: 403670 - DNA, 372 bp, Salmonella enterica
atgattgaccaggtggggggggggccaggtatgaattggcatgaactgttcaattatgaccccgatacaggtaagttgttttggaaaataagcccttctcaagcggtaaaggctggcgatgaggccggtactctttgcggcaataacgccaaaaatagaagtatgccaataaacaatacttccggggtgcatggtgtttcgtacttctctcgtattgatatgtgggttgcaagaataggggtaaatggtaagtctatatttttaggaagatacaataatttagaagaagcggcgctcgcccgacggcgggcagaagtaacatatgggtttcataaaaatcacggagctaagaagaatgactttaaaagctaa

SEQ ID NO: 403671 - DNA, 522 bp, Salmonella enterica
atgttagagaaaatcttagtattactggaacgtttcgtagttgcacatgaactgattgcagcgaatagtgcgaaacagaccgtgtaccaacttaaaagtgatatcaccgaggtaaataaagagttgatagaaaaagcggtagaaatggcgacaccggatgagtacctggctagttctgcggtgagcaaagagttagaaaaagaacttccggtagaaggtgaagacgtcgttgacactaaaccggcggaagaagagaaaccgaaacgtaaacctcgtaaagcaaaagtagaggggcctgcgccggaagaagaagttgattaccagtctcttcgtgaccagattcaggctatcgacgatgcgattaacgaaggtcctagcgatgccgcgtgcgatgattccgatgaactgctggaagagttcaccggtaagaagatgaagattgccgcgattaaagacgaagacctggccgaatacctggaacgcctgacagcgataaagaacaagtatttcgaagaagaataa

SEQ ID NO: 403672 - DNA, 219 bp, Salmonella enterica
atgcagcaatccgaattaggcgctcgcgtagaacgccgccgtaaagaaatcggcatgggccagactgaactcgccttcaaagctggcgtatcccaaagcctgattactcacctggcaaccggtcgggtatctaaggtagactgttttaaaatctttcatattgccgacgccctaggtgtagaccctagatggttaagttttggtgatacaggggcctga

SEQ ID NO: 403673 - DNA, 237 bp, Salmonella enterica
atgagcgatattgctaaagaagaagttaaggcattcattgagcagattgaatctgatttagctaatgggcggacggcgcaggtattcgagttgaaactggcgcgtacggtgctgacatcgcttaccgctgaaccagtgctggtagtgccggagaaacgcccatctttaaataacggtattgttgggttcgacgaaggttggagcgcctgccgtaacgctatgcttaaccgtaagtaa

SEQ ID NO: 403674 - DNA, 2187 bp, Salmonella enterica
atgtcaacaggcaatttagcatactcatggtcgcgtagcaatcgccgtgaggaacgcgctgacattaacgtttacaccaccacttccggcacctgggatgagttcgttgaacttatgcagccgcttaaacgttcgcgccggaaccccaagacagaccctggctacattaccgccgcgtgcacctccacggtaagctctactggtaaagaagccgccgaaggtatgttctatcgctgcaatgcgtctgttacgtcttcatcactagcctatgccgacgtggacagcgcgacgccggaagagttcgccaccgactgtgagatggtgcgcgaatcacgtttcgcaatgatgctctacaccacggcatcccacaccgaagaagcgccgcgctatcgcgtcgttatgccggtgcgcactccggtaaccggcggcgacatcattcgcatccggtacggcctgttggcacacttccttaaagggcgtgatgtggatagcgccgggttcaccctgtcgcagccgatgtaccgaccgcctgttggaagccaggtcatcgtgtctgaaagcggtcggatgattacggcgagcaagcttatggcgggagttcctgaaattaacattacgggcgcttccgattataaagtgccggagggtgagcaatccgaattaaccgacctgttcgaagaattcgcctttgagttcggcggccgtattaccgaccgcggcctgcaaatgcccgccacgccggagcacgccgcccaatacactaccggagaacctaagcaggatgacttcctgttctgttggccgcgcgacggcttcgaacgccctaatgtcaccctgtaccatgacaccgacctggtagctacgggcgggatgaagcctggcggacgggatatgtgggcttacgcttgcgccgctaccggcctgccgttcgaccgcgtagaggtggcgcttgggtgggcggagggggtcacttgtgacgaagaagacctggccgacgaagaaccaccagcaccacaagctgacttcatcgtcgaagggtatatgccctctaattgcatctgggacatcgtcggtgaatcagggacgtataagtcgttctacacactcggcatgatgtatatcagtgccgcagggtatcggttcgcaggagcggatacccgtaaagcccatcatttctacatcgatggtgagggtggggaattcacgcatacccgtatagcagcgctggccactaaatacggcgacggtggaatgccgtatatgcatgtgcttgatgcaggtgaattcgcggatacgaagaaacttgtgcgtaaaattcgccagatagccggtagcgaacctgtcgggatggtcgcattcgatacccttaaccagaccttcggaaactggatagacaagttcaacgagaactccgccgggcaggatggtatgggccgtgtcgtggcgatgcttaaagaagtgcgcgacggtactaaaggcgctgtaggcgttgtccaccacaccccgaaaggtgggagtaaggcgcgcggaagtggggcgctgtacgccggtgtcgacgtcgaacttacgcttgtccgggccactgagaaacaaataaacgttgcgcacaccaagaacaaaaacggtatgcagcagaaaacaataggcatggtgcttgaaccggtacagtttcgcgaagccccgccgccgaaagagttccaggcggtagaattcgccggaggtgaggggtacggggaaatcattaacctcgacctgccggaaccgcataaagctctcgtacttatgccgtggggcttccagccgttcgaaacggacgaggagaaagagcgcaacgaaggactcgatggtaaaggtaaagattccgtaaaggatactgttaaacggtctaaagatgcctccgcccgtgagtccgttatgtccgctctcgaggatttacagcaagccgatgataccggacggggcttcacacaacggcaaatagtcgcaagagctggagaccacagcatcacaaacctggtacttgagaagatgctacgtgaaggtgaattgatgcttggttgcgatgaaaatggtgaagttgtaacgaatacttacaggttgcccactggcatagatgaccgtaagagaccaaagaaccggtatgaacctaacgacaacataaagacaacagaaggggatttagaatga

SEQ ID NO: 403675 - DNA, 171 bp, Salmonella enterica
atgacacagaatgaagtagctgagcttatcggggttacccgccgcacgctgaacaactggttaagagacggcaagttcccggattgttgtgtccggattatgggccgccgtcagccaggcacatttgaccgggagaaagtggaagcgtggattagggagaatgtaaagtga

SEQ ID NO: 403676 - DNA, 195 bp, Salmonella enterica
atgtttaagaagggtcagctagtccgtggtaaggtaagtgaacggcattacagggtcctgtacgggaacgaggtgcgtttattagtagaagatgtgcgtagttatcatgtgggatggattggggtgccttttgtagagctaataggaaataactacacggcaaaagattctaaagagtctgcgcctgggtcttaa

SEQ ID NO: 403677 - DNA, 210 bp, Salmonella enterica
atgagtaagtggattaaatgtagtgaacagatgccgcccgcaaagattggggttttagtggctacggaatttgggcataaaggtgactggcggatgaagtgggctacttacatcccggggcaccccgaggcctgtaacggttggataataccgggggcgtcgtgggaaccgtcgcactggatgccgttacctgaaccgccggaagcgtga

SEQ ID NO: 403678 - DNA, 186 bp, Salmonella enterica
atgattactaaacaacaggctgtatatctgatgaaacttgtccacgccgtagatgatgcttcggcggctatgtcctataccgccgggggtgaccacgacgcgcatgaagaatcgtcgaaggagtggacatactgttacctgaaacttagggacttcgtcgaatcgataacggagactaacgaatga

SEQ ID NO: 403679 - DNA, 189 bp, Salmonella enterica
atgaaaccgaatgaccttgcaacctggaccgggcgtaacggagaaatcagacacggcaaagtaatatcgctccacggcatctacgcccgtgttgagtggtggcgcgctcattcgaagaagccccgctaccttacggtgcgacaggataaattaatagtggcgcaaccaaacataatagtgtactattag

SEQ ID NO: 403680 - DNA, 453 bp, Salmonella enterica
atgaatagcaaagacgaagtattcgaataccttattgaccagctacggcagcgcgtaggtaagttcgacgttgtagcagaagtgcgcaagatgctcatagaccggtcgataacaggccgctcagggtactcagacgaggagaatgcgattatcgatgcctacataggcctggattctgacagcaaacaaatcatccataacttgcaacagcacctcgccggtaagaacgatgaaatacgcgtgctggaagaccggttacgccgggcggaagataagattaaggaattacgggatactattgaacttatgaacatcgactttgaccaggtgacttcatgtcctgagcaatcctgttgccgtaagggagacgtgcaggaatgcgaccatgactggtacaggaactgtgtagggagttacgaagaggtttgcgtaaagtgcgggttaaagaaatga

SEQ ID NO: 403681 - DNA, 366 bp, Salmonella enterica
atgagcctcgcaaccgatatcctgaaacacgccggtattaaccttgcaccgccttcatcggcggtaacaaagaaggttacccgcgttaaagaaaaggttaagcgtaaacctaagccgcgtgtaaagccggttaacgagacgccggatgtgtacccccgtataccgggtgtacaccagccgaagtattgtgttggcaaaggtctgtggcgcgcgcactcctacgacggcaagaaagtggtaaaccttggcgagttcagtagccaggcgcgggcgcatatggcggttaaactgtacaagctgtggcgcaagcgtgggtattccgaaatcccgcacaagccatctattcgactttatacgttaaggtaa

SEQ ID NO: 403682 - DNA, 435 bp, Salmonella enterica
atgactactatatcttttgacggtacaacgatggcgtgcgacacatgcgtcaccggtaattttaaatattatacacataccaagatttacgagaacgaccgcttcgttataggggcagggggtgacgccggagccggcctgctgttggttgcggacgacgagatactgacgcctaagcactacgactacgacttctccgcgctggtgtgggttaaagagagtaaacggctttttaaggtagagttctttaaggcatgggaggccccgttgagctcggttatacccattgcggaccacactacggccatcggcacaggtgctccgtatgcacttacagccatgtttatgggtgcaacggcaacggaagcagtagatgttgcgaagaggtttgaccctggtaccgatggaagagtggtaacgcatcgactcggataa

SEQ ID NO: 403683 - DNA, 282 bp, Salmonella enterica
gtggacgataaatacctttggcttagtgtggcgggcctcgccgggggtgccgtttctcagattaagaagcgtgaggctatttcgccatggttgcgattgtgccatctcaccgcttcggcctgttgcgcagtgtacgcatccccgataattataagttactatgaactatcacagtctgaggggcagtacctggttccttttggcgtaggtatgttctggcttaaattattcgaagccgccgactcgtccctcagcaactttaagttaccgtggggtaaataa

SEQ ID NO: 403684 - DNA, 291 bp, Salmonella enterica
atgctcaactcaccaatcggcgtcatttgcctggtcgcaatcatcatcacctcgctaattaatatctacgcccactggattgaagacggtcttttcgggcggctgctgtatatggcgtccgtagcgaccgccgcgggcggactagctcatctctctaccggtgacatcccgccgttcataattacgactcttatcgccgtgttcgcgcttaaatcggtgcgtcatatttgcgtgaaaggcgctcgctactacaaatacaggaggatgtatgtcaaaccgaaacatcagtga

SEQ ID NO: 403685 - DNA, 489 bp, Salmonella enterica
atgtcaaaccgaaacatcagtgacaacggattacacttcaccgccgcgttcgagggtttccgtggaaccgcgtacagggcgacgaagaacgagaagtacctgacaattggctacggccactacggcgcagatgtgaaagatggccagaagattaccgaaggccagggtcttttgctactgaacagggacatggctaaggctgtagccgcggtagacgccgttgcgcatccgtcgctcaatcagtcacagttcgatgctgtgtgtgacctggtgtataacgctggtgccggtgttatcgcagcttctaccggtaccggacaggccctgcgtaagggcgacgttgccacactgcggaataagttaactcagttccattatcagaacggcaaatcactcctcggattacgtcgtcgtgccgccggtcgtgttgcgctattcgacggtatgctgtggcaacaggcggaagccatcggccgcgaagcaaagtag

SEQ ID NO: 403686 - DNA, 186 bp, Salmonella enterica
atgaacttacaaagcaataaagttttttaccattgcaaaccggtgcttgacaccgaagcattcgaagacgcgcaactgatggcacgtattgccgttaataatctgagcacacgaattcctgctgacgcgttctggttcgccgcgatgcagacactgaaagcagcttatgtaggggaacaaaaatga

SEQ ID NO: 403687 - DNA, 159 bp, Salmonella enterica
atgaaagtatatatcgtacccggatggcaccactacgaggacacttacgttcttggtgtttatctcagcgaagaaaaggccgaagccgccgccgaactggaacggtctaaacaatattatgatggggtagacgtatgcggatgggaggtgcaggaatga

SEQ ID NO: 403688 - DNA, 159 bp, Salmonella enterica
atgagcgacaacgggcaagtagcagtaacgtttaaggtgggcggtaaggtaggaaatacgccattcccgacacgcgaggaactgttaaaacgcaatagtttcccaggtcctgaccagaacaagtatctcaatcgaatgtggggagagcgtaaagaatga

SEQ ID NO: 403689 - DNA, 192 bp, Salmonella enterica
atgagacgtaagccattgccggaagttggcgatagctggcttacgcctgagtttagaaggcttaaaataactgcagttgtccgcgaaaggcactcaactccgcagttagacgttaaggctgtttggtgtctgcactttaacgatggtacttacgagtacgttgacgaggatgagttttatgaccgaccgtga

SEQ ID NO: 403690 - DNA, 234 bp, Salmonella enterica
atgaccgaccgtgaatatgaaaagatgatggtagaagccgccaacggcaggtttaagattgaagctgtagacgctcaaatcgaggcgcaccaggccgcgttagactaccttaatgagtatcgccgggagcttatcaaccgttatgacctgaataagtgtacgcacgattttgattacaacgataaagataaatgttggcagtgtttcaaatgcggatggagtgcgaataaatga

SEQ ID NO: 403691 - DNA, 225 bp, Salmonella enterica
atgattaccagcatcccaaaactaatcgaggcccacggcacattggcggacacgtgccgggagaccggccttaatgagatgacgttatccaaataccgccatgacacaaaatgcgagcaacatgttatttataacaacagactgatgacacatacaaaaacatcaccggtcatctacacgaaacgcggagtatctcgcaacgaccgcctgaagctggaggagtga

SEQ ID NO: 403692 - DNA, 267 bp, Salmonella enterica
atgaccgactttctgattatcatgggtatcgggtttacaactttgctccttgccgttgttatatacctgatgtggattctgtttctttggccgtttgttgaggcggtaagtcttacgaggatgtcactagcgtatcgccgtttgaatgctcgtaaagctggtgctgctaccgcggtgaagctatttgtcatgtggtatggggggaaacagtatttggccgtagattctatgccatccatagtcgcgggtggcgatgggaagccgtag

SEQ ID NO: 403693 - DNA, 231 bp, Salmonella enterica
atgggcactaaatttgaagtaatagacgaaaacacggttacggtaacggaagaaggtagtcactacatccttattgataaggtaaatggtggctggagagcaaaagcgtactttaacggcggcgctatagttgtctcgaaaggagtacatatgtcttttacttccgcgtacgatagccttaaagacgcggttaagtccgcggccaaccatttatcatctgtagaactgtaa

SEQ ID NO: 403694 - DNA, 507 bp, Salmonella enterica
atgaaactcaaattaaaacagcctgacgtcgaagtggtggccgccgctcacgaagaagcggttagcgccaaccgtcgccgtaaacgcccgcgcggtaaacaaagtctgtatcagtcgtcaagacattccgccgagctgtgggacccggactattgcgacgaattaatccggttcttcgaccgtacctcatgggagcttgtgcctacgtctaagggtgacgaacgcccgcttatccaggataaaccgccatcactggcccgtttcgcactacacataggcgtaaccgttccgattatcaagctgtggctgcgagaggttcccgcattcgccgaagcatacgagacggcacaggccctggaagaggcgtatttcactgagaccggtgcggccgggatatccgctacgtttgccgcggcgaaactggggcttaataaaactgttgcggaagaagtgcgcgacgaaccaattagcgaagtgactattaaggtggtgcccggtgaacgttga

SEQ ID NO: 403695 - DNA, 1272 bp, Salmonella enterica
gtgaacgttgatatcacagcaacggaaccgcaaggcgcgttccttaatctgcattgtaagttcccggccttcgtcgccggcttcggcacaggtaaatcggaggtcatgtgtaattcggccctgctcgacagcatggaaggtggtagcgattcacttatcgccatgtatgaaccgacatacgacctggtgcgccttatcctcgcccctcgtatggaagagaagttgtctgattggggtattcgttacaagtacaataaatctgacaacataatctatacatcgtccgggcaattcggggattttgtccttcgtacattggataaccccgcgcgaatcgtcggctacgaatctttccgtgcaaaaatagacgaattggacacgttaaataaagaccacgccgagcacgcctggaacaaagttatcgcccgtaaccgtcagttgccgcgtacatatcgcccaattacgccgaagcccgctaatacagtttcggtatttacgacgccagaaggcttccgtttcgtgcacgacagatgggctgtaaaaaagaaaccaggctatgaaatgattcaggcctcgacaacatccaatccctttctaccggaagattatgtgcagtcgttgcgggatacgtatccgggccagttaattgacgcctacatcgacggcaaatttgttaacctgacatctggcagtgtttattacgcttatgtccgcaaaaaacacagcagccgggaggctatacaacctggtgaaactttgtatatcggtcaggacttcaacgtcggacatatggcctctacgatatacgttcagcgagattacgtctggcacgcggtagccgagttagtagatatgcgtgataccccggatgtagtcagggagattaccgagcggtggaaacgacacggccaccacatcgtcatgtacccggacgccagcggcaagaaccgtaaatcgactgatgccagtacgtcggatattgcccaattacagaacgctggtttcgagatacgggtgaaatcggttaaccctgctgttaaagaccgtgtagcatcggtgaataaagcgctggagtctggtagattaatggtcaacgagcaggcttgcccggttacagcacgttgcctggagcaacaggcttacgataaaaacggtataccggataagacaagcggcaacgaccaccagaacgacgcgacaggataccctatcgcctacgaaatgccgttggttaaacccgtatcccatatcccggttactttcgcactttaa

SEQ ID NO: 403696 - DNA, 1470 bp, Salmonella enterica
atgttaacagcaaacggccagggttctggcgtaaaaaccaagcaccgtgaatggctgcactacgcgcctaaatggcagaaggtgcgccacgcgcttgcgggtgaattggtaagttacctacgcaacgtaggactgaacgaaccggacaaagcatacggcgaagcgcgtcaggcagaatacgaggcgggcggcatcgtatacaacttcacccggcgcacgctgtcaggaatggtaggtagcgtcatgcacaaagaaccggaaatcaatatcccgaaggagttggaatatctgcttaaaaatgcagatgggtctggtgtaggcctgatacagcatgcgcaggacacgctcatggagattgactcagtaggtcgtggtggtcttcttgtcgacgccccggaaaccggcgcagctacagcggccgaacagaacgcaggtttgcttaaccctacaatcgctttttacacgactgagaacatcgttaactggcgactcacgcgagtaggttctgtaaaccgggtcactatggttgtactgcgcgaaatatgggagtaccacgaaccgggaaacgagttcgaaactaaatacggcgaacagtatcgcgttctggacatcgatagcgacggcaactaccgtcaacgtctttttcgtttcgatgccgaaggtggtgcgcaggaagacgtcgtggagatttacccggacttaggggaatcattacgaggggtaattccgtttacctttattggggcgaccaataacgacgccaccatcgacgacgcgcctttgttgccgctggcggagcttaacataggccattaccgcaatagcgctgataacgaggagtccagcttcgttgttggccagccgaccctgtttatctaccccggtgaaaacttaacaccgcaatcgttcaaggaagcgaaccccaacggcgtaaaatttggcagtcggtgcgggcataacctggggtacggcggaagcgcccagcttattcaggctggcgagaataacctggcccgccagaatatgttggataaagagcagcaggctatccagattggcgcgcagcttatctccccgactcagcaaattacctcagaatcggcacgcatccaacgcggcgcggatacgtccgtcatggcaacaatcgcacgtaacgtaagccaggcgtatacagatgctttacgttgggtggcggtaatgctgggtaaaccggaagatacagaagtcgagttccgccttaacatggatttcttcctgcaacctatgaccgcgcaagacagggccgcctggatggcggatattaatgccggattgctgccagttacggcctactatgccgcattgcgtaaagccggtgtgaccgactggacagatgccgatattaaggatgcggtagccgaccaaccattaccggttgctacagaagttcagggggaaataccacaatctgcgcagcaacaggagcagtaa

SEQ ID NO: 403697 - DNA, 186 bp, Salmonella enterica
atgactgacacatacgaactcaccaccaagaacgtacaggcttatgaagttgtagaaaacggtccggactctactgattacgtggttgctgtagttaaaggcgagaacgcggcatgtcttcgggccctctctatgcaagagaaaaacggctaccttgggtatggctacacaatccgtaaggcctaa

SEQ ID NO: 403698 - DNA, 1044 bp, Salmonella enterica
atgagtcttctagaatcgattattagccatcaaatatggctgcaacgcaacgccagtagtgaagtaaaagacctggcaccgtttgtttcacagatgcgagatgaggttaaacgacaggtgttgctgttcggagacgacagtagaacggcggcgagactcaccaccatgctacgggaacttgagcaagcactgaacgggattacatcaggatggtacgagaagctgctgatggatgctcgcgagctttccgactatgaagttaactggaacgtaaaaaccctgtcgaccaacgttaatgcggatttcgtaacaccggctgctgagcaggtgtgggccgctgctactttcgcgccgcttgaactaagcgaaaaaccggttgattttgtttcgctaatgagtggctggcggcaaaccgaggtaaatcgcctggtgatgggggttaagtctgggttcgtacagggcatgaccacacggcagatagttaaaaacgttgtcggtccgggcgggcttgctgatatctccgagcgtaacgctgcgacggttatccgaaccgcgctggcgcacgtatccaacgaagcacggcaacaggtttacgctcagaacgacgacatcatcacgaaatacgagtgggtatctacccttgacgccagaacctcagccgtttgtcggtcgcgggattcgatgcaatacgaaataggtaaaggtccgctaccgcccgcgcaccctaactgtcggtcaagcacagcaccggtaattagttccgaatttgacttccttgataagggcgcgaaacgggcggccaggggtgcagatggaggtcagcaggtaagcgccgacacgacctactacgaattcctcaagcagcaaccggcgtggtttcaggacgaagccctcggccctgtgcggggtaagatttttcgtaatagtgggataaccccggaagaatttcgtgtaatatcggtagatggattcgggcgtccgttaactcttaaagagatggcggaactcgataagcgtgttgccgattatctgaaagaggaatag

SEQ ID NO: 403699 - DNA, 459 bp, Salmonella enterica
atgggctttttcaaagttaaagatgtgccttcgcgacgtgtagttcagtactcccgtgtgtctggtgtcggtgaaggtgtcgtgtatatcaaagatgaatcggttctcggtgaatcggtggacgaaatgccgtttgcggataagaccggactggccgcaatctcggacggcatcctgtacgaagtaccttatctggatggggccggtgatgtgtacttcgatgtgcaaccggcggatgtgcgactgaaggatggttccgcaaaattaaccgttgtcgtgaaaggtggcaaagcgccttacgatttgcaatggtttaaagatggtaaagaggtaatcaacgttccttacgttgaaggtgaactaaccgttaaagaccccggagaatatttcgtcaaggcagtagatgccgacggtgtgtcggtggttagcaaagcagctaaggtctcagaacctaagtaa

SEQ ID NO: 403700 - DNA, 387 bp, Salmonella enterica
atgaattggaaagtaaccgcagtagccacggcagtcggtatcctatccttgtggtcatacggccagtacaactacaaaagcgggtgggtagaaggccgggagaatcttgtttcgcagcagcagcagaaagcacagactgagctagcgaagaaaacacaacggcagcagcaggacgataccaaggccgccgccgccgaattgaaaggcaaagaaaatgcggaggctatcacccgtgaagttatcaaatacgttacccgccatggtcgtactgtctgtgagtttccttctgagcgggtgtcaatcaaacgacgcgccgccgagaatgctaattccatctctggatatgacactaatgcagccaccgtgcaaaatgacactgccaagtag

SEQ ID NO: 403701 - DNA, 144 bp, Salmonella enterica
atgcagccaccgtgcaaaatgacactgccaagtagtgatgccgacgaagacctggccgtcgatgtacagaacgccgagtgcacacggcaattgcgcctgaaagtattccggttgcaggagtacataaggaatattctggaatag

SEQ ID NO: 403702 - DNA, 705 bp, Salmonella enterica
atgaatcgttttttacgttacccgcttcaagacgaagcaccagatgaccttaaacccgcgggcggcggtgacgcaccaaaaatgtacacggccgaagaagtgcaggcgatgattgagaaagaagtggccgggcttaaggctaaccaggaagcgttacttagcgagaaaaaggaagctgcgcgccgggctaaagaagccgaagaagaacggcagcgcgcccaccaggaggccctgaaggctgctggtaaaatggacgaatttgaaaagacgattcgtagtcagtatgaacccgtactgaaagagaaagaagaacgctacgcttctttagccgcgcgaattcttggtagcgaacgtaaggctgttttgggttctttcgctggtgattttatcaccccagaagcggtagaaatcctcgcaccgttcgtcaagactgagtttgaaggcgaagacgtagtgactaaattcatgggtgcggatggcaatgttgttaccaccgaccctgagcaattccgcaaatacctgcgcgaacataaagctttttcacatttgattaaagcaaatgcagcttccggtggcggggcttccgggaataaaggcggcggggccgcaccagcgtttaaagacatgagtgaaagcgagcgtttagctctatataaatctaaccctgccgaatttgaacggcaacttaaagccctgaggaaataa

SEQ ID NO: 403703 - DNA, 1050 bp, Salmonella enterica
atggcaattaccactattggcaacatcgtaactggcaatatccctgtacttgcgtcgtacatgaccgaagacccggtagagaaaaccgcgtttttcgactccggtatccttaccccaaccccgtacgcggctgagattgctaacggtccgtcaaacatcgctaacctgccgttctggaaagctatcgatacctctatcgaacctaactattcgaacgatgtgtaccaggatatcgctactccgcgcgctattcagaccggtgagatgatggcccgcgtcgcctacctgaacgaaggcttcggccaggctgacctgaccgtcgaattggccagccagaacccgttgcagtcggtagcgtcccgtctggataacttctggcaacgtcaagcacagcgccgtctgattgctaccgccctcggcttgtacaacgacaacgtagccgctaccgacgaataccacgagcagaacgacatggtggtagacgtctccgccacccttggcttcgacgcaggcgcattcatcgacgctactcagactatgggcgatgcgttgatgggtaacggtggcgaggttctcggtgctatcgctatgcacagcttcgtatatgcacaggcccgtaaagctcagcttatcgatttcattcgtgatgctgagaacaataccatgttcgctacctaccagggctatcgcgtcatcgttgatgacagcatgaccgtagtaggccagggtgcacagcgcaagttcatctccatcatctttggacgtggcgctatcggttacggtgaaggttccccggaaactccgttggcatatgagcgtgaagagtcgcgtggtaacggtggtggtgttgaaaccctgtggactcgtaagacttggttgctgcatccgtttggttacagcttcaccagcgcagtaatcaccggcaacggcaccgagactatcgcacgttccgctagctggcaggacctggctaacgcaaccaactggaatcgtgtagtagaccgtaagcacgtaccgattgctttcctggtaactggcgtcggtgcttaa

SEQ ID NO: 403704 - DNA, 543 bp, Salmonella enterica
  misc_feature (492)..(501): n is a, c, g, or t
atgagcctggagaaacgtatgagttatgacgatttgccctattttcgtgaccagattctggaacgcatcgactcgctcaagtgttttctttcgaacacccccccgatgatggcaaacctgatgactgtctccaccgtatctagaacagaagagcgcttgaagcaggttaaacccatcagggttagtattaaagacgatgcttcggttgaggaaattattcaggcacttactgacatctgtgtggatgacatagagtcattaagtcatgattccaccaaagtaaccactaaatacccgggtctaatcattgtccccgaaagagcagatcttctcgaaagcttgatcacttctataaacgaagcaaaaaatgattttgctgcggcaatgaggcgtatcgataataaaaagaatgtccgttttgataaagtgcacaagaagctcccgggccttgtcgctatgcactcaacaagaaatatccttttcatcaagtcnnnnnnnnnngaattcttatggcactggagttttcatcaagtcccagcttaa

SEQ ID NO: 403705 - DNA, 501 bp, Salmonella enterica
atgttcccggaactggcgcgtgaggctgcttataaaggctgcaatgtctatatccgtatttcgggctattccacgcaggtgaacgatcagtggatctggaccaaccggacgaatgcctggcaaaacctgatgtataccgtttcggtgaatctggccggttatgacgatgtcttttattacttcggcgagggtacggtctgcaattatgacggtaacgtcattcagcaggggcaccgcaacccatgggaaattgttaccgcagagctgttcccgcgcctggtggataaagcgcgtgaaaactgggcgttggaaaacaatattttcaaccttggctgccggggctatgtcggcaaaccgggaggcgaacgcgagaattacctgacctgggtgcgcgatcttgccaatggcgaatacaaacttccgtgggatgaaaatgtcaaaattcgcgatggctggaagtattatcctgatggggtgcaattaggcccgctacctaaataa

SEQ ID NO: 403706 - DNA, 888 bp, Salmonella enterica; identical to SEQ ID NO: 208848

SEQ ID NO: 403707 - DNA, 600 bp, Salmonella enterica; identical to SEQ ID NO: 235957

SEQ ID NO: 403708 - DNA, 585 bp, Salmonella enterica; identical to SEQ ID NO: 208846

SEQ ID NO: 403709 - DNA, 3678 bp, Salmonella enterica; identical to SEQ ID NO: 235959

SEQ ID NO: 403710 - DNA, 1764 bp, Salmonella enterica; identical to SEQ ID NO: 235960

SEQ ID NO: 403711 - DNA, 3693 bp, Salmonella enterica; identical to SEQ ID NO: 235961

SEQ ID NO: 403712 - DNA, 2658 bp, Salmonella enterica; identical to SEQ ID NO: 164708

SEQ ID NO: 403713 - DNA, 2076 bp, Salmonella enterica; identical to SEQ ID NO: 235963

SEQ ID NO: 403714 - DNA, 522 bp, Salmonella enterica; identical to SEQ ID NO: 105772

SEQ ID NO: 403715 - DNA, 444 bp, Salmonella enterica; identical to SEQ ID NO: 230015

SEQ ID NO: 403716 - DNA, 129 bp, Salmonella enterica; identical to SEQ ID NO: 140005

SEQ ID NO: 403717 - DNA, 375 bp, Salmonella enterica
atgaagccgaccgcaggcccggttccggcgggtaaatactggattgttaatcgtcctgaaggtggactccgatcgcacgttaatgccggtgttcgggatcgttacaaccaggtcatgaatggtgcgacgttcaggcacaggcgggatgattggggaatcgacgatgacacatggaatgagggggttaaacgcggtaacttccgtttgcatcctggcgcgatatcaaaaggggatatcactctgctacatgcttcagattttgccatgttgcacaatgcgttactaaaaacaccgcaggtggatgttccttgtatgagtaaactcaaggcatacggcacaattgaggtgatcgccaatggcaaaacatgcccttag

SEQ ID NO: 403718 - DNA, 1074 bp, Salmonella enterica
ttgcattggttagttcgtctacgcctggcctggcgccaaatcaccactggatttccttcacgtgcgaggctggcagcgcgcgatgcgcttgctacggcactggcctgcctgctggcatggttactggcggtatggctgttaggacatgagcatcctacgtttgccatcgtcagcgccgtggtatgtcttgctccgggtgtacccagtcacctgaaacaggccagaaatctggttattggctgtacgttcggtatcgtgatgggggagttgatgtggcagctccccgatactcatccactggtgcggatgagcattggtatgttcttcgctattttgttgggcgccgccatcggcccggctccggtggtccccatccaggctggagtatcggtggctctggttcttgccatggggcctgaaagcgcgggcggtacacgtttagtggacgttctgctgggagcctctgtcggattattattcagccaggtgctctttacgtctaatccattcagcgacattgggcgctcaacctccgacttcctgcgtcagattggtaatggactggatcgaatgctacgagcctgtgaggtgcaaagcagtaagggagcagaggccgctttgagtcagctttcagaggctcaggccgctctggccgctcttcgcgccgctgtagctgaagcacaggtcagtaaacgctggtcactacggggtcggctaaacgccgggcggcttgccaccgtcacacagcgttacgaccgccatgcaatccgggtatacgcgacttcccttttattagcggaaagtctcagccgggccatgtcacacacccatactccaccaccaactgtcgtgatgacgtattgccagtggttgtcggatagctgcatggtactagcccgtcaatccgctgttgttgcgcttaaagaaagtgacccacaggcttgtatgggaacaccacctcagtccaccgctgaccagcgccatgaactaccgccagaatggctcacggtagaagataatgcacggcaactggagcatgccttacaggcactgctgggctcacgtgacgcatga

SEQ ID NO: 403719 - DNA, 3249 bp, Salmonella enterica
atgctgaaacgcctcttaagtaaactgacgggaaatcgtcagcagatagagcataatcttaagaatcagtatcaggttgaggaaaacggactcagttttccgctatcgctggttgatgattcgcagctttgggcactggcatcctggcttgagcaactggctgaagaagactatctgatatcactaacagaccggtggttattgagttgggatgccttgtacagtcttctggatgatgacgaacatgccagcagcctgcctcttatcggtgtaccagagatacttcctttacgcgcaagcctgagttcacgtggtgcattaagtgacagtgattttcgcatctggattgcagaatgggccacacttcctgaacgtcaccctatccgtttcagccgtactggtgccatttttacttttgagaatcagcaatatctgttatccagggaaaactgggtactcatacaggcaacagaacgacttagtgcacagcaaagccaggttcccggcgaaaccactaaccaacttggatgggctgctatccgcaaatgtgcgaaacaagcctccgcaaaatttgatgattatttagaaaaaacgcatgtcgtcaaaccgacgtcattgtcattacgtttgcgtaaagcaacggttgctgacactgcggttatcgaaattgaaccccattttgaggagcagcctgctaactggctgggtagttttgacaagaattcacaggttcatgatagctatcgcatcccaggagagaacggcgaacttagccatgtcatcattactcctgaagtgaaagaagtcctgaattccatacactcaatccctggccgtcgagtggcgggaagtgaagcgctttcgtttgttcgtaacccctattcatttttaggtgaagatgctgccgatgttctggcccccgaagaacatgaacaggcgttgtttgatgccaggattttctttcatcatttcaggttgataccccaacagagcgatgagaataagataatcgaagttacgctggtacttgaacctatttcacctgttccccagccagaggtcacttttgtgttctcagctccctgggagcttgaaaaatttatacagcaactcggtattagcgttgcagcgcagatgcctgctggatcctggcaaggttacgagctggagttaagccagttcactgaacaacagtggtacgattgccaggacctatttacacgctggcagcaagaaattgaaggagaagaatttagcgatgtgctggatattgcgaagtatggcgatcgggtgattggtattggtgaatttgaaaaaatttcctcgccctggctgaccaaggcacaaagtgaaaactggcttccagatgacatcgatttctcagtattttcgggcgaagtactgactggttggcaacccgaaaatcttcaccacttaggtgaattgcaggagagaattactcaggcagaagctgctggtgaaacgcatatcgccgcaccatggaatgatagccaattaccgctggatacagccaaaaccttcattaaaaactgggcaaaacagcagagcactgaaaatggatctcaagacaacgttgctgataaagctgtccgggctgtgctcaaaattgagcagaatattgaagaagctgcctacatcaaacagcgccgtgattcactcctcagtgcgcgcaacgcagaacctgaaattcccctgagtcttaaagagaatatccgactcaaagatcatcaacgcgaaggtgtggcctggctacagcaactcttccttcgttcaccagaggaaaccgctggctgtctgcttgctgatgatatgggcttggggaaaacgctgcaaattctgattttcctggtatggtttattgaaaagtttccacaggaaccgccaagtctgattgttgcccctgtctctcttttagataactgggaacgtgagctggataatttcttctacaccgcgggtattcctgtgttgaaattgtacggtgagaccatcaaagtggtgaaataccccaaacaggctatacccgctcatctgcagtctcaggggattaaaaacctgcttaaacctggctggcaaggtgaggcgaaaatcatactgacgacttacgaaacgcttcgcgatcaagaattttctctggcacgccaaccgtggtccattatggtatgcgacgaggctcaaaaaataaaaaatccagctgcgttaatcactcatgctgccaacgcaatacaagcccggtttaaagtggcgtgcaccggtacacctgtcgagaatacacttgtagacctgtggagtttatttgattttgcgcagccagggttgttaggggcgctgaatgaatttggtaaacactatgttcgccctatcgaaaatgaggcaggccgcgatacggaacgactggaacgcttacgagcactgattgagccccagacattacgccgaactaaagaagaggttgcgcgtgatttaccacagaaaattgaagtggaaagttgcaagcagttgatgttgtctggagtgcaaaaacagctctacctttcgtctgttgcaaactggcaacagcaacaggcgctgagcgaaggcatgcagcaggctggaacaggtatgctggggttgctacaccgattgaagcttatttgcgcacaccctgcagttgtcaatccagagccgcgttttcgtgataactcacccaagcttaactggttgctgaaaatactcgcagaaataaaaagcactacgaaagataaagtcattatttttactgagcttcgagacttacagcgtgaacttcagcatgcgatccatcaaaagtttggtatccgccctgtcattattaacggtgataccagcactaaaagtaatagtcagaatagccgccagaggctgatcgatgatttccaggttcatcctggatttggggtgattattctctctacggttgcagtcggtttcggtgttaacgtacagaaagccaatcatgttattcatttcactcgttgctggaacccagccaaagaagatcaagcaacagatcgggcgtaccggattgggcaaattaaagatgtgtatgtttattatccgacggtgagggatcccgaaatcaccacatttgaagaaactctggatgaccttctgctgcggcggcgttcattagcaagagatatgctgtgtgcaactcctgacttgagtggcgctgattttgaggacattttgaaaggggcgttggactga

SEQ ID NO: 403720 - DNA, 1683 bp, Salmonella enterica; identical to SEQ ID NO: 230013

SEQ ID NO: 403721 - DNA, 741 bp, Salmonella enterica; identical to SEQ ID NO: 230012

SEQ ID NO: 403722 - DNA, 2190 bp, Salmonella enterica; identical to SEQ ID NO: 230011

SEQ ID NO: 403723 - DNA, 861 bp, Salmonella enterica; identical to SEQ ID NO: 86704

SEQ ID NO: 403724 - DNA, 342 bp, Salmonella enterica; identical to SEQ ID NO: 86705

SEQ ID NO: 403725 - DNA, 429 bp, Salmonella enterica; identical to SEQ ID NO: 86706

SEQ ID NO: 403726 - DNA, 432 bp, Salmonella enterica; identical to SEQ ID NO: 86707

SEQ ID NO: 403727 - DNA, 798 bp, Salmonella enterica; identical to SEQ ID NO: 86708

SEQ ID NO: 403728 - DNA, 204 bp, Salmonella enterica; identical to SEQ ID NO: 149134

SEQ ID NO: 403729 - DNA, 237 bp, Salmonella enterica; identical to SEQ ID NO: 149133

SEQ ID NO: 403730 - DNA, 354 bp, Salmonella enterica
atgagaacattcaaaggggtaagtgaccaaacccggaagccgataagtaacgttgttccgattcgtccgggtgggggtgtagcttctaatgatgatgatagtggtgttacgaaagctaagtggatcgctggggcggcggcaaaaggcttaggaagcgttttgcgctccctaagctttctcattatgttgtggctacggttgccagttcgcctgttgttgattgccacatctgctatggcttttattggcgtggttctctgtctcgttatttttagcgaccgttccatggttccgggcttcatcataattggccttgcttctacggctcttgcggtaatgactccaacttattga

SEQ ID NO: 403731 - DNA, 1290 bp, Salmonella enterica; identical to SEQ ID NO: 153640

SEQ ID NO: 403732 - DNA, 435 bp, Salmonella enterica; identical to SEQ ID NO: 157055

SEQ ID NO: 403733 - DNA, 297 bp, Salmonella enterica; identical to SEQ ID NO: 151869

SEQ ID NO: 403734 - DNA, 948 bp, Salmonella enterica
atgaactatcagcaactgaccgagccacaacgataccagatttctgcacttttagaactgaacacttctgttcgaaaaattgccgaaatagttaaatgtcaccgagcaacggtttaccgggagcgagcccgtcacagtatcgatgggcgctattgcgccacaagagcccattcgttggctcaggaaaaacgtaagagtgcccgcaagtacagaattactcccgacaggattgacctgatctgctggctgctcagtaatgactggagtccagagcagatctctaatgtgcttacctgttgtaatgaaccggtcagtcacgaatggatttatcagtatgtggcagatgacaagagaaataaaggtaagctatacaaacacttaagacaaggtcgcaaacgttaccgcaaaggaaaacgaaccaaaggtccggcgataaaaaacgcggtttcgattgatgaacgaccagccatagtcgatacccgagaacgatttggggactgggaaatcgatacggttttgggcaaacatggtacgggtgccatcgtgacgattctggagcgaaagagccgactctatctggctatgaaagtcgattcaaaatcggcagaggatgtaaccagagcgacgatagcgctcctgatgccatataaggaacatgttcatacgatcactgcggataacggacgagagtttgccaaccacgaagagatagccaaggtactggatgccaaggtctactttgcgcatccttacagctcctgggagagaggtgccaacgaaaatgcgaatggtctactcaggcaatatgtaccgaaaggcacggatttgagactcgtgagtaacgagctggttgccctggcgttatcgaggataaattaccgtccgaaaaagtgtttaggatttaagcagccagccaaggtttttgaagaaatgaggctagccgcttaa

SEQ ID NO: 403735 - DNA, 651 bp, Salmonella enterica
atgaacaaaacaaaaagcagatatccttcctggtgggcatattaccacttggcccgcaacgcttatttcttattaggaataccgtgtttacttttatactcagccgcttatacatcagatttattagatgataatctaagacattcaataagtctttttattctggcatatggatgttattttcttcttttcattcctccgctctggttatatctgagaaccagagcgaagaaaaagaaagtccagcaggttgttcagcagataaaagaaagcagtccctttgcgccgaccagcgattacgagcaactgtcattctcaaagagttgttatttcgggatcgacattaaaaacggcaccatgctgtatgtgcgcatttatccgaacaatgtgatggatgtgattggtctggatattcacaactttacccgcacggttgctgaggacggcaagctggaaatccacaccacctatgtgagtctgccgatgattcctcttgagatctccggcatctcagcaaggacgctggccaacaccatgcacaccatggctgcacgtggatatgagtacaaggaacgtttcccacagatgatccggtatcgggttaaagagtgggaaaaagttgccggtgttcctgttgcagaagtattttga

SEQ ID NO: 403736 - DNA, 513 bp, Salmonella enterica; identical to SEQ ID NO: 19198

SEQ ID NO: 403737 - DNA, 294 bp, Salmonella enterica
atgtgtattagtagcccggaaacaaactcatggtctgttatttatcgtaaaaattccggagaagatatcaatatcacttccctgacgtttaaaaatagtcttctggcagcccggacactgatggtgcccgaaaactatatgatatgcatactcagaaacggggagagggtcagacgatgggacagagaaatacttgcaggctcaaacagatggtacaagtgttctcccgataatttcgaaatactgggtaagctccccataataaataaagtcacaaaactgataaaatcataa

SEQ ID NO: 403738 - DNA, 396 bp, Salmonella enterica
atgggggtaaagaaaatcgttatgctggctattttagtcagctttgtggcgggatgtgcgccattacatccttcaaattgccataaaactacagccctgggtagttgcagttcaggacgttgggatgatcaggatgaatggggggagcaggcacggggaatcagggatgcaattaatgctaaacttgatgatccgcaaaaatggaaaaggaaaaaatgcaggttgcatatggaattctcccgggatggcacggcgttaaaaatatcaaccagtaatggcgataaagcctattgcgaagcgataaagtcagcagcccataaagctaaattcccggccttcaacaatccggaagtttatagagattttcaaaaatccggctttgacatgcgcggttag

SEQ ID NO: 403739 - DNA, 2712 bp, Salmonella enterica; identical to SEQ ID NO: 8263

SEQ ID NO: 403740 - DNA, 333 bp, Salmonella enterica; identical to SEQ ID NO: 8264

SEQ ID NO: 403741 - DNA, 312 bp, Salmonella enterica
atgccacagcaacatcccggacgactacaggtactggtcgtcgacacgcactgcaaacgcaggctgttttcaacgaaaacaccgacagaccccgatgagcttgcccgacgtttctgcacgccggataactgtctcgtggtggtactacgcgacaaccgatttctgttccgactggaacgtgctcccggcagccactgccgctggcacaagggcagcagctcccgccatcagcatctacaggactggctatcatgggctccgtttgggaaacggaaaatattgtacgttaaggctattttttgtactgactga

SEQ ID NO: 403742 - DNA, 858 bp, Salmonella enterica; identical to SEQ ID NO: 105554

SEQ ID NO: 403743 - DNA, 786 bp, Salmonella enterica; identical to SEQ ID NO: 402225

SEQ ID NO: 403744 - DNA, 861 bp, Salmonella enterica; identical to SEQ ID NO: 164706

SEQ ID NO: 403745 - DNA, 312 bp, Salmonella enterica; identical to SEQ ID NO: 40338

SEQ ID NO: 403746 - DNA, 474 bp, Salmonella enterica; identical to SEQ ID NO: 383193

SEQ ID NO: 403747 - DNA, 372 bp, Salmonella enterica; identical to SEQ ID NO: 376463

SEQ ID NO: 403748 - DNA, 486 bp, Salmonella enterica; identical to SEQ ID NO: 376464

SEQ ID NO: 403749 - DNA, 927 bp, Salmonella enterica
atgccaaactggtgctcgaatcgtatgtatttttctggtgaaccggcacagattgccgagattaaacggctggccagtggtgcaatcacaccgctttatcgccgtgccataaatgaaggtattcagctgtttctggccggaagtgccggacttctgcagatcactgaaaatatccgctctgaacagtgccccggagtgacggctgccggacgtggtgctgtatcgacggaaaatatcgcgttcacccgctggctgacacacctgcagaacggtgtactgctggatgagcaaaactgcctgatgctgcatgaattctggctgcagagcggtactggacagtgtcgctgggaaggattaccggatgatgtcagggaaaccatcactgtgcatttcaccgcaaaaagaggtgactggtgtgatatctggggtaacgaggctgtatcggtgtggtggaaccgtctgtgtgacaacgtcctgccggaaaaaaccatgccgtttgacctgctgacggttctgccgacccgcctggatgttgaagtgaacggctttaacggtggtgttctgaacggtgttccttctgcatatcactggtataccgaacggtatggcgtgaagtggccttgtgggtatgacctgaatatcagcagtcagggagacaacttcattcaggttgatttcgacacgccgtggtgtcagccggaaagcgacgttattgcagaattaagccgccgtttcggctgcacgctggagcactggtatgccgagcagggctgcaatttctgtggctggcagcgatatgagcgtggagagcttgttgatgtcctgtggggggaactggaatggtcttccccgacagatgacgatgagctgccggaagtcaccggacctgcgtggattgtcgacaaggtggcgcattacggtggatga

SEQ ID NO: 403750 - DNA, 348 bp, Salmonella enterica; identical to SEQ ID NO: 289156

SEQ ID NO: 403751 - DNA, 192 bp, Salmonella enterica
atgtcgtcacgcaactttgttcatgattttataatgctgctcccgttactactgttggtcgggtggttagttttggtgataattctcatgtttcgggatgataaatgtgaaaatacttaccgtgaaggttcgtttcccgaattaatgtgtctcaattctgatagtcgtcacgtcgataaaaaggtcgagtag

SEQ ID NO: 403752 - DNA, 435 bp, Salmonella enterica
atgtacggaacatgcgaaacgctctgccgtgagctggcagcaaagtatccgggaaacacgccgctgatgctgcttatctggtccccggaagagattcaggcactggccgacggtatggaaatttctctgaccgatcatgaaatcaggactgtcctggcgtgcctggaggacatcccggaagaccagcggattgagtccggtatttcttccgccgctgcgatggagattatcagcaacgtgagcgaaaaccgccaggtgaccgtccctgctgaactgctggcgtccctgatccagaccgctgaacaggcattgtggaagcgtgaatgggccgcccgtgataacggcctcaccgtcccggaatgcgtcacccgccgtcaggcggtggttaatcaggcccgcagcctgctgaaaaacaacacacacgaaaacgactga

SEQ ID NO: 403753 - DNA, 357 bp, Salmonella enterica
atggaagcgcacctcttcagtgctttccgtggcgatggcctccctgaaagaacggtactcacgcgcctcactgtccatccggaaaccactgtcacgtccgtaataagccgtcacaccgtccaccgggttctgaagcgtatgccctgcgggtttgtcgcaacggggaccgaggcaacggatatcaccgtgttcaaccagggcttcggcctgctgaccggtggcatagtgggtatgcaggatgcgaccgttccaggtcggctcaccgtgcaggtggcagtaaacggtacggaacaccccgtcgcggcaaaaaacggaaatcgtgctgctgactgtcatgaaaacgtctccttctgctga

SEQ ID NO: 403754 - DNA, 363 bp, Salmonella enterica
atgagcgtgatttatcaaaccaccatcacccgtatcggccagagcgcgaaggaagcgctcggcgaacagatgctgattacgtttcgggaaggcgcgccggcggatatcgaagaattttgcttcatccattgtcatggcgaactgaccggcgcgctgcagcctggcgcgcggtgtgaattgggtcaacattgctatccggtcacggcggtcggcagcgtagccgagcaaaacctgcgtgaactggggcatatcactttgcgcttcgatggtctgcgtgaagcggaatttcccggcaccgtacacgttgcggggcctgtaccggacgatatcgcgccgggctgtattttgacgtttgtcgcttaa

SEQ ID NO: 403755 - DNA, 219 bp, Salmonella enterica
atgtttaaagaatctgaccacgtggaatttgttagtgcctttctttatcaaaatttaggccttaatgtttccgctgacgatataaccgttcaattatctgatacttcgttcgacaaagtaacctttgattacgatgtagatatcgataatttaaattgtatgttggatctctacatatctgagctaataaagcacaacgcatcttattggagtatttaa

SEQ ID NO: 403756 - DNA, 465 bp, Salmonella enterica
ttgtgccagcggcagtggctgccgggagcacgttccagtcggaacagaaatcggttgtcgcgtagtaccaccacgagacagttatccggcgtgcagaaacgtcgggcaagctcatcggggtctgtcggtgttttcgttgaaaacagcctgcgtttgcagtgcgtgtcgacgaccagtacctgtagtcgtccgggatgttgctgtggcatcaaagactcctttcggaacgggaaaagaagcagctgtaccgtcgtaactgcacgtaccggttgcgaaaaaacggcacaagcgagtagtgacagaaagaatgtcggaaacggcaggaagggcggtacaggctgcgaagactggaaacggggtatgccggggattacacatcctcagtgtaatgtgatagtcgtctgttcctgtgttgcaccccagacgtcttctggcaagctgggcagcccgataaatagggtgtga

SEQ ID NO: 403757 - DNA, 594 bp, Salmonella enterica
atgattgcgatctatcgtgacacccgaggtcggcctctgactattcatagaacatacgtagacaaaaatggtgataaggcacctgtagaaaatccaaagctgatgatgaagcctcctgccgatatgacaggtggctcaattcagttgtttgaccctcactatgattcaggtagttcgacctggacactgggagtggctgaagggatcgagaacgcgctttctgttgtagaagcgacttcaacaccatgctgggcagccagctccgcatggtgccttgaaaacgttactgttcctgattttttactgcctccgccggatgtaaaatctataaacttttatatctgggcggataaggatattgctaactcacaaggcactcgtgccggtattgaagctgctcagcgacttcaaagccgcatggttgagtttttggctaaacgatatcccgcatcaaagctgacaattgaagtcttcgaaccagcacaagatattcctgatgggaaaaagggtatcgactggaacgatgttctccagttaacagggcaggatggattcccgattcactgggctcctgaatgtcttaatcagctgtaa

SEQ ID NO: 403758 - DNA, 135 bp, Salmonella enterica; identical to SEQ ID NO: 17104

SEQ ID NO: 403759 - DNA, 363 bp, Salmonella enterica
gtgggctatcgccacgaatgtgcctacatcctggcaaaaggccgtccacgtctgccacaaaacccgctgccggacgtgctgggctggaaatattcgggcaatcgccatcacccgacggaaaagcccgttaccagcctgcaaccactgattgagagcttcacacatccgaacgcgattgtgctggacccgtttgcaggcagcggatcaacctgcgtggccgctcttcagtccggacgccggtatatcggtatcgagctgcttgaacagtatcaccgtgccggacagcaacgactgaccgccgtgcaacgggccatgcagcagggggccgcgaatgataactggtttgaaccggaggctgcgtaa

SEQ ID NO: 403760 - DNA, 252 bp, Salmonella enterica
atgaccggctgggaactgcgaatctggcgaaaaagcatgctctggtcacgcgaaaaagcggccagagaatttggcgtgacgcagagaacatggcacacctgggaaaatgcggaacaggtggacgtcaccgtctggaggaccacccaggcactttcagtccgtgacctgctgcctcacatgcaggggatgcgtaaggcagatatcatcaggcgactggaaaatgaactgggggaaacggcagggaatgtgtga

SEQ ID NO: 403761 - DNA, 180 bp, Salmonella enterica
gtgaccgtccctgctgaactgctggcgtccctgatccagaccgctgaacaggcattgtggaagcgtgaatgggccgcccgtgataacggcctcaccgtcccggaatgcgtcacccgccgtcaggcggtggttaatcaggcccgcagcctgctgaaaaacaacacacacgaaaacgactga

SEQ ID NO: 403762 - DNA, 252 bp, Salmonella enterica; identical to SEQ ID NO: 403760

SEQ ID NO: 403763 - DNA, 234 bp, Salmonella enterica; identical to SEQ ID NO: 8563

SEQ ID NO: 403764 - DNA, 234 bp, Salmonella enterica
atgagcgaatatttcagaatacttcagggactgcctgacggtccttttacccgcaaacatgccgaagctgttgccgcacagtaccggaacgtctttatcgaggatgaccacggagaacattttcgcctggttgtccgtaataacggaacaatggtctggcgtacctggaattttgaggacggtgccgggtactggatgaaccatgccatccgtgatttcgggattcttaagtaa

SEQ ID NO: 403765 - DNA, 534 bp, Salmonella enterica
atgaaaaacaccgccagaccgtcagcgggtcgtgccccggggaaaggagaagtgggcacacagaccgggcgcacgtatgtgggcctgcagaatgaatacaacggcatcatcgatgccgcctctcatccgcagctgtcactgattgctgacagtacccctaatgaagccacccgtggggcactgactgaagccctgcagtcaccgtcagctgcggcatattttgaccggaccgcatcatcagaagcccgcacccgtggccacatgagccagcgggagtttgagacctttgaagccggcagacggtatgccaacaccgactggcagcaggatctgcagggcatggaaggcgataaccttctccgtgagctgctgcgcaccaccgccctgctgaactggcagatgaacgatctgaaagagcagattcgtcagggtaacgttatcgccgggcagcaacttgcgctggccgcacggcagtattacggacagcgccttggagaactgtcacaggccatgagccaggggagcgtaagatga

SEQ ID NO: 403766 - DNA, 447 bp, Salmonella enterica
  misc_feature (398)..(407): n is a, c, g, or t
atgaccgacgcaattatcacggacaatgagcgtattaacattgaaccaaaagatgtaatggtaaaaggttcaaataaaaagcaaggcgtaaacgctcaaacttctactcaacgtagaccagagcaccagggtatggccaaagttattattaaccccggcaccccagattttaaccggtttttaactgccagaaatggagcagtcatcagaggttttgatgatgtgagtatcgctatttcctctctctttaaaacggttgatgcagttaaacatcctgaccttgttcaggctattcaggattggttcaacgagctgcatgaagaaaacaataagatgaaagaaaatcttgttgcttatattaagtcaattgagttcgacaagaatgactcattcatgtnnnnnnnnnncattcatgtcatcaactcagtttgtacctttcagttttga

SEQ ID NO: 403767 - DNA, 1446 bp, Salmonella enterica
  misc_feature (1349)..(1358): n is a, c, g, or t
atgaatttcagggcgctgtatttatgtattaaacggattttggggatattctcatctcaggagaatgatgcaacctctgtaatgattgaggatatatcaagcctctctccttttgcgcagattctaggagatcagaagtacactgttcctgatcatccaaatccagaagtcctgaaattcatcgagtatccaactcgtccgacgggcatacagacatttaatgaacagtcaatcctgtctctgtatcgggaaaagctgcactcaatttcaatgatgttagctatcagcgatagcgacatcagggacgatgcatatacatttactaatttagtattaaagcccttggttgaatatgttcgctggatacatcttttgccagcttccgaaaatcatcatcataatggtattggtgggttactttctcacagcctggaagtggccatactctctttaaaaaatgcgcatcactcagaactgagaccaatcggatatcaagatgaagaagtagtccgtagaaaagtatatctctatgctgcgtttatctgtggtttagtccatgatgccggaaaggtttacgatctcgatattgtaagcctgaatttagctagtccgatcatttggacgccaagctcacaaagtcttcttgattgggcacgtgaaaatgacgtggttgaatacgaaatccactggcgaaagcgtattcataatcaacataatatctggtccagcgttttccttgagcgaatcctaaacccggtatgtcttgcatttttggatcgggtaaataaagaacgtgtttattcaaaaatgatcaccgccctaaacgtttatactgatgggaatgactttttgtctaaatgcgtgaggaccgctgatttctattctactggtacagaccttaatgttttacgtgaccctatcatgggtctgcgttctaatgatgcagcagcaagggccattagtaccatcaagcacaactttaccagtatcaatatcaacaattacaatgctaagcctatgcacatcattatcgtaaatggtgaggtataccttaacgagaacgcattccttgattttgttctcaatgatttcgaattacataaatataacttccctcagggagaggctggtaagacggtattggtagaatccctagttcaacgtggttacgtcgagccctatgatgatgagcgtgtcgttcactacttcattccgggtatctattcggaaaacgaaatatcaaacatctttagaaatgggatagggaaactagaattctataaccttcttaagctaaggtggattggtttaatctttgattcctataaaatccctgactcagtgccggnnnnnnnnnngttaatgccaataaagactttatttacattgacgagcaaaaaacagttactgaatacagaagaccagtgcccggtcgggacgctataa

SEQ ID NO: 403768 - DNA, 222 bp, Salmonella enterica
atgataaattcaatcgcgtttagtcttatagcgttatgtataatatatatatcatcactacttaaaaaaagtaacttcagaatattttatataaccgtatctacgtgctctttattattatcatgtgtaccaaacaagtacggtatgattggcatagcagcattggtatttacaaccatgttaggaccatcattaattattttagaggataacagacaataa

SEQ ID NO: 403769 - DNA, 312 bp, Salmonella enterica
atgatcacggaatcggatatgcttactgaagctaaaaaaatggcagtagagatgatgttctggcctgcttgtcctgtagatgatgattattgtttcgacgctataatgtatacatcagttattgacaagaagtttgaagatgaacatggggtatatcttcatcaggtttacaaagaactatgctcaacacctgaattaaaaaaacttctaaaaaagaaagcaataaaattgattgcttttaagtacgatattgatcttgattcagctaacaagattttaatgaaaaatatgctaaggaggattgaaaactga

SEQ ID NO: 403770 - DNA, 375 bp, Salmonella enterica
atgaaaagtgtttatgttgttggtaaaggtttaatcgttgccggtaataaaattaccatcgatggaaaagagcatatctcggtagaaaatagtgaaaacattgttgtcactgatgattgtattaaaattggtaataaaacagtggtttttaaaggcaggagtattaagatagaaatacatggaaatgtaaataaaatagtaaccgaaaatgctgatgtcagtattcatgggaatgctggggatgttgaaaccgtgagtggtgatgttgattgtcgtcaggttaatggcgatataaccactgtaagtggtgatgttacttgtggcgatgtttctggtgacgtaaccactgtcagcggagatataaacagaaaatga

SEQ ID NO: 403771 - DNA, 126 bp, Salmonella enterica
atgattgatgatgtttgttttagcttgcgggtaataatcatcgggggacagatttatggtaaggaaccatcatcgttgctggttttgttgagttatccacagttcctgaatattcgcacgcattaa

SEQ ID NO: 403772 - DNA, 873 bp, Salmonella enterica
atgagaatgacgacaaataagacttccctttctcgcttaacaaaagtgagacatcgaaatgaattgaattcaacgctgtcaacattgcctatggctgctaaaaaagtcttatttttagccatgtgccagataaactctaaaaatgaattcgatgatgatcacatattttatgtgacagttgccgattacattaaatgggttcaggttaagcctgatgcggcttatcttgctttgagggatggctctaatatattagatacgacgcttcttaagctgaaacatgatgaaatattagaactgagtagtgatttgggatttaagttcactaaaagtaatgtacctgattcaatgaatttgagtctgactgttttttctacttattacaggaatgaaggtagagtggggatcaagtttacaaaagaagcgaaaagatttttatgtaaacttattggtgaagaaaaacgttatacaacgcaagttttattatctgttgttcgactgacaagtgttaatgctgcatcactatatcaactcattcgtaaaatatatagtaataattctcgcgcgaatagttttgaaatgacaatagatgaacttaaagatgaattgaatctttatacaataggggcggggggggggaaggattataagtatccagattatcctgcttttaaaagagatgttcttaataaatcagtaaaagaaatcatgaaacatacggaagtaaagaacttaagtttcgtagtttcagaaaaaattgggagaaaagtttataaattaaagttctcttatacaattggttatgagggcgataccagggaagactcagagtttactaatatgtttgataaaatgtacccacctgaaaattga

SEQ ID NO: 403773 - DNA, 399 bp, Salmonella enterica
atgactcgtattgcattagcgccttcaaagatggttttgcttatgtctttggtaattactggtgcccacgccagccctgagcaacccctaataaaagatacgccctttgtatcaggccaggcttataagaagggtttcttctggtatgacgatcctgctaaaaaaagcgaagctgaagaagaaaaggttttgccaccaaccggtgctgctagctcgccttcaaaagaggaaaaggtagatttaaattcaaaatggctaaaagagaatatgcctcgactgttaacgcaggcaatggataaccctaccgcagaaaatctatcacgttattacacggcgcaaaggttaatgctggatatcagtacgcgtttttctgacatcatcgggtttttaagaaaataa

SEQ ID NO: 403774 - DNA, 1356 bp, Salmonella enterica
  misc_feature (1269)..(1278): n is a, c, g, or t
atgcgggtaacacttgatggcacgcagatttttgctcacatagatggtgcatatcgagaaagtgactatccggctccaaagggatcttgggagttaaaaaaatcgtggaaactcgacaaagtatacgatgtaactgaaaaggtcagaaaatcagtttatgaagaacctgatcgtgaagtgacaatggcatccagagtctgggttggtgggggaggtgaagggtactttgaggttgagctgacgtttgaaaatatgaagctcgaagataagcacgtccaggaaccagctggttgttacgatgctgtacaaacaccaaatacattctgccgtttcgatcggtttaaagatatggatgttggcacgaagcggcttccggaaagcgtgctttctatggcaaagccgctgtatgaaggcgataaaggctttcttacctggaagactaaccttgaaggctatttttgtgatccattggctaaagacaagatttgctcttatgacgctagtgggaaaattatgaaagacgctaatggaaaggacctctgttacaactacgaagaaattaagagtatgcctgatgcatgtagttcttataaaaatgatgcagcatgtgtactcgataaacaaacatgtgcagagggttggttcgatgagggcactaacagctgctacatgtatgaacagaaatacacctgtgacagaggtaaggatgtagttcgtgaggttgaatcttctacaaatgcctgtgttggcatgatcccatgttctggaggaacatgcgaaactgggccaaaggaagagaacaacgattttggaaaagttgcggcttattcaaacatggttcagtacatgcagggcgaagccaaatgcgaagaccctaacgatgccaattcctgttctgtctttgaaggaaaacctgaatggtgtggtcgttcagtaggctttgtaaatggcctggcaaagacggactgctgcgaagcaccgcagggaaccgcaggagcacttgaaggtatcatgcttgccggatctatgatcagaaacactaactggaccagagttaatgctcagctaataaaatggaccggcggtgatacaggtacatgggcttctatgtccaatgcggtcggtgagtggactgcatcagctggtaaaacagtagggcaaatgtggaacaatgtcacgagctccttaacgagcgtatatgaaaacgtcgctggtaatctaagcagggcagttgggtcttccgcaacttctggaggggcaggaggtgcnnnnnnnnnnacatgcatcaggcatactcttaatttcttcgtagttggcacaggaaacaatgtccagcttcggtataggtcagcttaa

SEQ ID NO: 403775 - DNA, 477 bp, Salmonella enterica
  misc_feature (93)..(102): n is a, c, g, or t
atgcatccccggctcttcgtcgtaatccacaggaagtatctgaacactttattaaactcgttcatgctcgaattgctgaagtgtctggctggnnnnnnnnnngccccgagccaggttccttgcccgtttactggcgcagggaaatcgaagtttcgtttccgacaaaaagacctttataccggatgtgcgatccataatgactttccggtaaatgagttttgcgacggaattgatgttctggcgaaatattatgaattaagtaaaacgcagacttgcaaaaagattctctcagattttttcgggatggatctgcatgctccgttaactgacgccgacattgaaaatgaacgacgctataaatcagcagttcgtgccacagaaactcttgaccgagaggaagtggcaaagcgaatgcgaaaacttgatgtgatgtatcactataccggtgaaatcaagcctaaatcctttggtaagtga

SEQ ID NO: 403776 - DNA, 531 bp, Salmonella enterica; identical to SEQ ID NO: 31901

SEQ ID NO: 403777 - DNA, 1110 bp, Salmonella enterica
atggaaaacacaaatattgttaccactgagcagcaggcaccaaacaccatttctgccagtaacgcaatttttaacgttcaggcactgggtcagttaacagctttcgctaacctgatggcagactcacaggtgacggtaccggcacaccttgcagggaaaccagccgactgtatggctatcgtcatgcaggctatgcaatggggcatgaacccttacgctgtggctcagaaaacacacctggttaacggtgttcttggttacgaggcacaactggtcaacgcagtaatcgcaagctccagtgccattcatggccgttttcattaccgctatgggggtgactgggagcgctgcaccaggacacaggaaatcacacgcgataaaaacggtaaaaatgggaagtacaccgtcactgagcgcgttcgtggctggacagatgaggacgagatcggcctgttcgttcaggttggtgccattctgcgaggtgaatctgaaatcacctggggagaacctctttacctctccggcgttgttacccgcaattctccgctatgggtttcaaaccctaaacagcaaattgcctatctgggcgttaaatattgggctcgcctgtactgcccggaagtgatcctcggcgtgtacagccctgatgaggttgagcaacgagaagaacgcgagattaaccctgctccagtccagcgcatgagcgtacaggaaatcaccagcgaggttagcaccaggaccagcgcgcaggagtcggcagctaacgttgatgctgttgccgacgatcttcgcgaacgcattgatacagcaagttccgttgatcaggcaaaagcaatccgtgcggatatcgaatcacagaaagcgttgctgggtactgcgctgttcaccgaattaaaaaacaaagcagtgaagcgctattaccaggtcgatgcacagaacaaagtcgaggcagtgatcaactcaattccaaaccctggcgaaccggaagccgcagagatgtttgctaaagctgaaagcacgcttggcgctgctaaacgccatcttggcgacgaactgcacgataagtaccgcgtccccctggacgatatgaaaccggaatacatcggctaa

SEQ ID NO: 403778 - DNA, 324 bp, Salmonella enterica
atgacaaaacgaagtggaagtaatacgcgcaggcgggctatcagtcgccctgttcgtctgacggcagaagaagaccaggaaatcagaaaaagggctgctgaatgcggcaagaccgtttctggttttttacgggcggcagctctcggtaagaaagttaactcactgactgatgaccgggtgctgaaagaagttatgcgactgggggcgttgcagaaaaaactctttatcgacggcaagcgtgtcggggacagagagtatgcggaggtgctgatcgctattacggagtatcaccgtgccctgttatccaggcttatggcagattag

SEQ ID NO: 403779 - DNA, 243 bp, Salmonella enterica; identical to SEQ ID NO: 375752

SEQ ID NO: 403780 - DNA, 492 bp, Salmonella enterica
atgatcgtaaacctatcacgtttaggtaaaagtggtacgggaatgtggcaatactcgattaaatttttaacggcactgcgagaaatagctgatgttgacgcaataatctgtagcaaggtacacgctgattattttgaaaagctcggttatgcagtagttactgttccgaatattgttagcaacacatcaaaaacatcgcgacttagaccattagtatggtatgtatatagttactggcttgcgctgagggttttaattaagtttggtaataaaaaattggtgtgtactacacatcacactatccccttactgagaaaccaaacgataaccgtacatgatataagacctttttattatccagatagttttattcagaaagtgtattttcgctttttattaaaaatgtccgttaagcgatgtaagcatgttttaacggtatcttataccgttaaagatagcattgctaaaatagcgacatgtagacaacggtaa

SEQ ID NO: 403781 - DNA, 654 bp, Salmonella enterica
atgatagaacaactacagagtgattttttattctggatatttatttacttcctgatagtaggtttgcttatcagaaacattcatcttaccagaaaaattaaatccatcgaaaaaaacaaaatgttcccagcggaggaatatgctgtcctggacattgaacagcatatgtccaataaatatattgggcggctagtaacccgttttatgaagagaactaatggtgcacctttgttaattgtgtttccagaatacgataaaggagacaacaatgaagacaaaaattctccaccattccaacttgtaaaactaacatccaacatcaacaatattaaagaaatttattccaatgatgacttaaactgttttctgaataatatttcggcacaaaaaaatttatatacaacgcactctggacctagccaggcatggattgaacatgcatatcctttgcaacaagtaactattctcttacaaggcactcgtcatagtgaaagggaagatataatcagtcaacttaagattattctttccagactaaaaaatggagaaaatacaggttttgagcatgacgatgattttggatattcatttcagtatgatgccgcagcagtaggaaaatcatcatttttcgatgaagcggcaggaagaaaataa

SEQ ID NO: 403782 - DNA, 1677 bp, Salmonella enterica
atgtatgtaattaatcaacagacaagggacaataatattcttacgttgcatgatgtttttaaaatctatcaaaatacaggggggcttcgtcttgtaaaaacagaggagaatgaaaagtatatctccattatcatttgtggcgtttttcgtattagaaaaaacaaaaagaataacaaaatcactttgtggggatacaagctaagagataagcacactggggtatggaccagaagaaattcatttcctggtaagatttttttattctggtctaaaaaatctgcatacgacatggacgactggttaaaatatgcgattagctacatcatcaaatcattgattgaggctggatattcaattgaagacaaactctatttgttccgcgttggagatgaagaggaacacagtgagagtcgttatgtttccacactatatccactcagtgtatataactcgtattcttatggaagatatggcattattcattgccttggtaaaacagcatcattcaactaccccgataacgtacaatatatcagcagacatgatttactcgaagagataaaaaacaaaatttatcacagagcattaaaaattataggggtggataatgagcttaatgcttcaaaagcattgagcaaagccatatggataatggtagataaaaagatatttgcacaatattccagagcttcacattgttcgatagcttacaattcaattcgtcaggcattatttgaggactatctggatttttcaaagcgaatccatattctggatgatatagatttttgcggattgtggcctatggttggtcttctaagacaacaacataaaaagggtcagtttatgctatcaggaaagacaaaagagttatatgaaagactttgttttccctatgagcttagttatggtgagttcagaagtttacgacatgttagtttatcattagtatatgctttaatttataaccatgataatgcatcattcagattaacagtcagattattacgccatccacttatcaagaactatcctgtaagagcaatttactggattatcgattatattagcattcgagcttacccagaaaaagaaaatgatatttatcgtatatgctcaaaatggcttgaatatcatcgtgatttatttaaaaacattggcttttatgatcgtaatactgaatccaggcaaacatcacgctgggaaatggaaacgaatcagttgtgtcatgcaattgactggttgttagcagaagaacggttaattcataaaaaccaggagtggccttctttctggagactatctgatgaatggacgcgacaagtgaagaataacgttattcccgtaatcccaaaatggaaaggaactgggataaactggcagaaagttgataacggtgtaaatgaattaattacatttgatgctctgtgtcaggaaggtcaggagatggaacattgcgttgccagttatgcagactggtgtgcatctggagaatatattgcaatttcagtcctgatggataatgaaagagccactcttggactttcacgaaaagaacatgatttaacctatcagtttgaccagatgagaggtattcgtaatcaggctgtttccagaaacatgctaattaaaggcaggcatattttaaaaataatcaactcatcactaaaaagataa

SEQ ID NO: 403783 - DNA, 207 bp, Salmonella enterica
atggtgaatggtttgttgcttttcgctgttagtgtattagtttttttagtgataatcctgatgttacatttgagaacagccagtcttctttctgaatgctctgaatatcgcacgaaatgtgataatctctatcatctatgccagatgcaagagaaagagttagaacatctacgtgcactcattgatgcgcataacatagattattag

SEQ ID NO: 403784 - DNA, 339 bp, Salmonella enterica; identical to SEQ ID NO: 31579

SEQ ID NO: 403785 - DNA, 207 bp, Salmonella enterica
atgaaaacaaaacaagactggctctttcagttaagacgttgctcaacactcgacacacttgaaaagattattgaaaaaaaccaaaacagcctccctccttctgagcttgagtcgtttaatgccgccgccgatcacaggcttgcagaactcacaatgaataaactctacgataaaatccccccatccgtctggaaatatgtatattag

SEQ ID NO: 403786 - DNA, 432 bp, Salmonella enterica; identical to SEQ ID NO: 221126

SEQ ID NO: 403787 - DNA, 168 bp, Salmonella enterica
atgaagatattcaaattgtttgttctttgtatcccccttctgtttagtctttttttcgctggctacggcattttgtcaaaaaatccatttgaaacactaccgtgtctgtccgccagtgctttttgcctttttctgtttgacatactgaggcgatcatttatgaagtga

SEQ ID NO: 403788 - DNA, 441 bp, Salmonella enterica
atgaaagaatacgaaaaaacggctttaatatattccttaaaggaaagcaatacattagttcttcggattatactcatctctattttagttgtcggggtgatttcaggcgcggtatacttatataacttagcgatctcgttgtttgattcaaacccaacgtctgtgcaattcaccttttgcggagtaggctgttttattgctctattacttcaatggatatctaatgttgatgcaaattacagagaaagaattggggagcaaccaagtacaataaaaaacattgtacaatatttatttgcagccattattaccattagtttcattacaatggcattaacagccatattagtcttaaaagactcgtccaacatatggctcaacattacttttattgcattattactgtccatttttgtagctattatttctgtttggggttga

SEQ ID NO: 403789 - DNA, 4260 bp, Salmonella enterica
atgattgtcagatacggtggtggtaatgatggtatcgttgattatctgataaatggtcgcaaagcagaacgccagtacacgcgtgatgaacttgatcatcgtgtcgttcttgatggtgatttacagactacagataagattattgattctattgaaaacaaaagtcaggaacgttatttgcacattactctgtcttttcatgaaagtcatgtgtcgaatgaagtgttaaaggctgttgttgatgattataaaaaattattgatgaatgcttatcatcctgatgaatactctttttatgcggaagctcatttgcctaaaattcgtcatatccaggataatagcactggtgaacttgttgaaagaaaaccacatattcatattgtaattcctaaagtaaatttgattactgaaaagttcctgaatccagtgggagatgttaccaaagggcatacaattgaacagcttgatgctatacaggaatttattaataataaatataatcttgatagccctaaagactatccgcgtaaagatgcggattacggaaaaattataagtagagttaagggggatctttacaaagagcatcactctgaattgaaaggtgagttgctttcgcgtatagagaacgagaaaattgaaaattactctgtattcaaagatattgttgcagagtatggtgaacttcgtataagaaatgctggtaaaaccaatgagtatctggctgtaaaattgcctggagataaaaaatacacaaacttaaaaagtcctctttttcgtcagaattacattgagacaaggacattaacacttgagaaaccaacacacaaagagatagaaaagagacttaatacctggttaaataaaacaagccatgagattaagcatatttttaaccaggcggagaaaacaagggaactttacaagacattaagcccttcacaacaaattgatttcctgcaagagaggataaaagaatatgactcaagagaaaaacttaacgaaagaaattctcagcaaacgtcaggacgagagggaggttacaagtcgtgtcctaaaaagtttgccagaatccgtcaatctgaagcaacagtcggattgtcacgtatgccccaacgcggtatggtttacggaatcaatggattcacaagacccgactctgtcagtgtattgtcagatatttcgcagcgtgatctggcagagcaattaccgcaaagagaacatcctggtcaggatgtgcgacgggattatgatagacaattcacagagtcaggaataaaaagtcttgaacgctcttcttttttgtgtgaaacgatgtttcagactctgaatgaggcggcagagaaaaacgaaattacaacgatggcagaaattcgcagaaatattgatcctgtcaggtttctgtcttctgccgccgagcgttttaatattattccagcgcagcataaaatcagaacagcaaaggacggttccccccggttttctgtggggaatcgtaatatgaacgcatctgattttctgacaaagcatattaatcttgcctggaaagatgcgaaatcctttctgcttgaagtttattcacagcagttagaaaacacgccatatacgcgctatccaacctacagacgccttacgcatcatgaagctcgtgagcgtcttaactcactgaatttatctgaaaaaacattacgaaatactatcaggtttgagcgaggcaagctgtataatgatctgcgagagatgagacgcgagttgaagttaataccacgtgaacagcgtgatattgccgtgggtgtgattgtttacaaaaaactaaccacacttgagcgtctttctgaactcgacacagatgggcgacacattattcgtcaatatcatgctgactggcataaggataaagatgaaatgaaagcccttgaacgtctcaaaagctatctcaacttcgatgaaatcaacgccatttctgctgacgaacccgaactttcgcttcagaaagcggtggattcccagcgccgcttagaagaggcgaaaaaggttaacaccaaactaaaagatcttgtgatggataagcaggattacaggattgtttatcgcgatcaggaatcggaaaagcctgtctttaccgacaaagggaactttgtcgttgcgggtaaaaatccctcaaaagaagagatcggaataatgcttgagtattccagggaaaagtttggtggtgtactcaaacttaccggctctgaagatttcaaaaaaatgtgcgctgaagttgccgcagagcaggacatgaagattattttacgcccggagcagtatcaacagatgatgctggaattaaaagcagaacttcagggtaataagtttgagcaggtggaaacacaggaaaatagccaggagtccgaatccagaatagagaaaggtgatgcattgaaggaacaggccaccgaacaggcacagaccacagagcaagcacaggccaccgagcaagcacaggccaccgagcaagcacaagtcgcggagcaagcacaggtcgcggagcaagcacaggtcgcggagcaagcacaggtcgcagagcaagcacaggtcgcagagcaagcacaggtcgcagagcaggccacatcttcatatgatcctggtgttattaccagggcaaacaccctggattcacagatgcttagtaaaggcacaaatggtgaatttggctatttgaaatctctggatagcgatgaaaatgagatttgggaagtgctgggacatgtacctggagacagcgatgatatttttgacgttgccagttttgataatgaaaacgacgcaaaagaattttgcaaaattgtgaatgagttaggtattgacagaacacaggctctgattcaggagcagcttactactcaacacgatcaggctactgcgcaggtgcataataaacaggaaatttattgtataaactttagtcgcttccatgatttgaatgaaggtatcgtctttcattctaaagatgcggctattcagtgttatgaggaaagcaaatcttctgcaatagaaaaatatgaaagcaattatttaaatggtgatggttttgatactgttgtgcttatgtctaaaactgtctcaaccgatgaattatcctcttatccagagggggcattagtaacgtttgataggccatttgaaataattgccaattcatatgaagaataccgtactccagtgtatgcggtttctttttcgaaggatgagtttagtgaagatattaagacttttgagtcattgcacgacgcatctgaatataaaaataagatgcttcaggagcacgggcttaaccaggatgatatcttaatcacacctgtaacaagagaagaaatcgcctttaaaggaattaaggacgctgttaatgacgctaatatggcagtgatggaacaggcgggggattcgtccagagaatcaccagaagagatactcgccagtatttcagctaacgagcatatgatctccgggcttgaaaacttcctggttaaagaccgttctcagttcagttcctgcaatggggatatcgttgtggaggcggaaattaccaggggggaaggtggtctttatcgccttgcggtcgctggtaagcatggcttagagcgtggtgatgcagttgccagagtggatgttacggagcagcaatttgccgcgatcactggaaaaacaccttctgaagttttaacgggggaccaaacatcggctcgtgttccggtaattacaggtatccatttcagtacaagggctattgaaaatgtgaataaactggaacaacagaaggattatgtctatttctcaacacatgaaggtctgaatgctgaaataaaagatttcagctctctcaaggatgctattgagtggggccgggttgaatgcgagctacatgatctcaataagcgcgatactgtcatttatcgcgtcgagtctgaacatatttctcaggggattgacgctgtaatgaaaaatgctgaacgcgtggagcgtcatgaaattgagaaagcacagggacgggattgcacgccggaagacggcaagattcttgaggcaattgatcgctttgaggacaagttcagaggggaaggactgaagttcgaaagggagaaggccgaatccgatttgcttaatcacggattcactcgtgaaatggcagaagatactcttggaaaacaatttgtccaggccagagaagatcatcaggaatcgcagcagcagcgtgacgattcacaggacatgcactaa

SEQ ID NO: 403790 - DNA, 342 bp, Salmonella enterica
atgaagaaaaaaaccaacaaaaacgttcatgtaacattcagacttaccgaagaagaatatgctccgttcgatagggctataaaagagcttaatattagtaagtctgaatttttcaggctgcttactattggtaaaataaacacatatgcatctgataaacgtaacataccagaatacaaacgttgtctttctcagttgagttgggcaggaaacaacataaatcaaatagcgcaccgattaaattcagatcatttaaaaggtattatatcagaatcgctttataaaaaggttttaaatggactaatcggtattcgtgatcgccttcaggagatagctaaatga

SEQ ID NO: 403791 - DNA, 402 bp, Salmonella enterica
atgaaaaagatcgagagtttattatctccaatatgcgaggctataaacgaaacaaaatcgaaatcaaaacaagctgtcttcaatatgtatttgcaaaatatacttgaagcaaagaaatattatacatgggagcaaatagctgattacataaacaacaacaccaagacagaactagcccaaaagacttatataaacatgacagagagggctaaaaaaagacaaaaatgctctgaaccaaaagaacaggcaaaaaccatagatgtaattgatcagaatgaagctaaagacgatgaaccgagagggggggtaaaaggttttttttcaaacattagtgagagcaaaaaagaaatagagcacgatccaagtgctacgaatgaaaaattcataaacaaatatctttaa

SEQ ID NO: 403792 - DNA, 753 bp, Salmonella enterica
atgaaaaactcaatcaatttcatccttcagggtaaaggtggtgttggaaaatcatttgcgaccgcaatactggcacaatactttattgatgaaaatcacatggataatatcgtagtcggtgacacagacccggttaatacaactacggtaaaagtaaaaagattaaatgcagatttgatacaaatcactgaaaacagcaaagtaatacaatccaaattcgatccaatgttcgaatcaatgctgaccaatagtcagaatacctttgttattgacaatggcgcatctacatttttaccgttaattcagtatttcaatgataactgtgttatggacatgtttgaagatgtagaacaagacgtttatatccatactgttatcgttggtggacaagctcttgcggataccttgcagggatttgaagaactgaaagaactggttaaaggaagtaaggtaaaacttattgtctggataaatgaatttcagggtattccagcacttgaaaatatcccattaatagaaactaaattcattgaaaaaaacaaggatgtaatcgctggcgttgtggttattcaggacagaaaaagtgatgcctttgcctctgacatcaaagaactaacagaaaaatcactaacactgaaagaagctcttgaatccgaccattttggattaatggctaagtcaagattaaaacgagtcttcaatgacatttacaaacaattagatagcatctatgacgatgaacacggtgaataa

SEQ ID NO: 403793 - DNA, 732 bp, Salmonella enterica
atgacgatgaacacggtgaataatatgagtacagttaatcagccagaattaaaacagcctgaaaaggctgtttccagtgaagatattgataattttattgttgatgtattcaaggagacagggcataaaatatcaaaagatgatccagttatttcattaatttttctgaaccaaaagatacaggaaaaattcagcaatgagttacaagctaacttcacagccctgtctgagggcttcagacaggttgtttcatctgtagaaaatgactatattcaaagattcaagaatatcgttgagacgtgcggcgatctggataatgaaataaaagaaaaagtagaagagggaaaaaacgatctaaaagaaacaagtgttgaggtaaaagaaaaattaacagatgatattattgaactcatatctggaattaaacgcaaccaggaaaaaaacaacaaattatatgaagaaaagttgaagtcattatctaaggctgtaaagcccttcagtacaagaacagccattgcaatttgtgccttgtgcacattatgcctgtctgcggcattttctggcgcaacctggtatgttgcacaacatgaaaaagaggcaagcctgcgcttctatgcaagagcttttcttgatatgaaaaaaataactgaagagagcatgaggaaattaccaaaatcagaccagcaaaatataaaactcaaactagaagaaattgattcaagaaagccataa

SEQ ID NO: 403794 - DNA, 447 bp, Salmonella enterica
atgaccacttttaccgacgaggacaaagaactaattaaagaaatcagagagcgaattggcagcttggacgtgcgagacaatattgagcgccgggcttatgaaattgctctggcatcgctggaagccggggttgttgcatggaggtatcgttacgtgaaaaaagacgttacggactctcagggtaaaacgtgggttggtgactggaaatacgtaccgacaaaagaagactgcaacgacaggccgaactatgaaattcaggaactctacaacttaccacctgcaatagcagcaccaacagtaccaagaggactagtaaacgcagtgcgtttctatgaactggtaaagagtgagaatccgccagccgaaaccggagcatggaaagacgctgttgactgggtgctcaaagaggcttgccaggctgtaaacattggcatcaaaggagagtga

SEQ ID NO: 403795 - DNA, 438 bp, Salmonella enterica
atgttcttttctgttggtgtcgaaacaccgaaagatgatcatacagcatacggtatcaccgttccggtttttgattgctttgattttggatgtgtttctgctgctgattctcaggcagaaatacccgcaatggcgcgtgaagcgatattggcaatcgtggaagagatggtaataagcggtgctcattctgttgatgatattcatgatgaagggtgtttgacttattccgccaacccaaattataaccactgtgatagctggtttgtaattgatgttgatttgtcagaaattgagggcaaacaacaacgtattaatatttcattgcctgatgtattgattcgtcgtattgatggatatgtgagagaaagtggtggcgtatacaaagatcgtagccattttctggctcaggcggcacgtcatgaacttgcatataaataa

SEQ ID NO: 403796 - DNA, 444 bp, Salmonella enterica; identical to SEQ ID NO: 31799

SEQ ID NO: 403797 - DNA, 135 bp, Salmonella enterica; identical to SEQ ID NO: 22628

SEQ ID NO: 403798 - DNA, 279 bp, Salmonella enterica
atgcatttcacaacttttctaaaaaaacatttcgatatagaaaaagtcgttggtacttctgattctggaaatgataccgaatctatttatgtttatgaaaaaggaaatgattgcgaaccgttgtttattctgcatgaatcctggctaaatgcagaaattaaaaagtgtggggtatggactattggcaatatatattccacattggaacacggaaaagaatattctgaacaggaactaataaaaatgattaaggagggtaaagtaatcagcaaatattaa

SEQ ID NO: 403799 - DNA, 252 bp, Salmonella enterica
atgccaaatgaaaacacaccagaaaacattaaacgtctgcggcaaaaaattggcctgacacagaaagaatgtgctgaaatattcagcatgagtccgcgtacctggcgtcgcaaagaagaacctgtcggaactgcaagcggtacagcacttacaccagtagagtttaaatttcttctgcttttagctggagaacaccctgattatgtactttgtaaaaggaataaaaagaattctgattctggaagtaattaa

SEQ ID NO: 403800 - DNA, 261 bp, Salmonella enterica
atgaagataagaaaaggtgacagacaatattatctgaataaagaaggtgatacgtttcatctggtgaagcgagtaaaaactttttctaagtctgcgactttaggaaaaacgaaagcaacggtgaaaactgttgctgatcttgtttttcatgaggaggcattcgacactatcgactttgccagcgacggattaagagagaatgataaagaaattgtttctatgatgattcaggaaatgagtgagggaaaaaatgccaaatga

SEQ ID NO: 403801 - DNA, 225 bp, Salmonella enterica
atgaaacaatctacttttcctgttatcgtctctacaactggtcatgtgttttctgttgtgcgcgtgacgctttgcaccatttgccttaaacatgaaaaaacaggcgaggcttatgtcgtcatttttacagactgccataatatccgtgattataaaaagggcgttgttccggttcttggggaactttatcaggaagatgtcgatttgattaccggaaaaagttaa

SEQ ID NO: 403802 - DNA, 210 bp, Salmonella enterica; identical to SEQ ID NO: 22633

SEQ ID NO: 403803 - DNA, 324 bp, Salmonella enterica; identical to SEQ ID NO: 159377

SEQ ID NO: 403804 - DNA, 666 bp, Salmonella enterica; identical to SEQ ID NO: 221148

SEQ ID NO: 403805 - DNA, 285 bp, Salmonella enterica
atggctcttgacttgaaaactccggtaataccaggacaaaaaacagaacaaaccaatgcagacacagcccgattcatcaatgaagctacccgcaaaaaatcgggagcaactaaagtgaccaatgtccggcttggggacgtttacgaagatattctggaacgggaagcactgcgaacaggccagacaaaaacagcaataatgaaagcggctcttgcagcttacgaacacggcctggacgaaaacggaaaaaatcactggattctacagtcagccaggctgaaatga

SEQ ID NO: 403806 - DNA, 573 bp, Salmonella enterica; identical to SEQ ID NO: 221149

SEQ ID NO: 403807 - DNA, 216 bp, Salmonella enterica
atgcttgaacaacatcaggatagcctcttaccgcgcgttacgcaaggagaagaaggccatgaaacagccgaaaaacgccctgacctggtgtttattaatcgtgtgctgcacattgttaatattcacgtatctgacccggaatcgtttgtgcgaggtccggctgaaagacggaaacagggaggttacggcaagtctggcttacgaatccaacggtaa

SEQ ID NO: 403808 - DNA, 162 bp, Salmonella enterica; identical to SEQ ID NO: 22640

SEQ ID NO: 403809 - DNA, 1029 bp, Salmonella enterica
gtgcagcttgctgtgattagcaaacgtcactggtcggaactatcaccggaagagcaggtccgtttctggcaggactacgaagcgggtattgaaagctcattcctggtcctccaggaaaacaaaggcggaacaacaaaacgtcgccggggtgaacattccactaagccaaagtgtgagaatccagcctggttccgtcccgacaactataaggcgctgggcggacagttgggccacgcttacaatcgtctcgttaaaaaagacccggtcactggtcagaacacactcagaatgcacatgtcgttgcatccattttatgtactgaaacgtcagagtgtcggtcgcaaatataaattccgaccggagaaacagcggctgcttgacgcaatatgggttgtacttgtgagtttttgtgatcgtggattgcacactgtcggcatgtctgtctcccgcctggcagaagaaataagcccaaaagacagtaagggagacgtgattcctgaaaccgcagtcacagtatcgcgcctttcccgtctgctggcagagcaggtttcctttggcacgttgggaacgtcagaaaagacgatatgggatcgtgaatcccgccagcgactgccgaaatacgtctggatcaccgaaactggctggaaaatgctgggagttgatctggtgaaacttcaggaacagcaacgtaagcgccttgcagaaagtgaaatccgtctgcaattgattaaagaaggcgttatccgcgagggcgaagaaatctctgttcactcggctcgtaaacgctggtatgcgcagcgttctctcgatgccatcaagtcccgacgtaagaaagcagcggagcgcaaacgtgctaatcgcctggcaaaactgccgtatgatgaacagcgaaacgaaattgcgcggtttattctgaagcgtatgccgccggacgaagcgtactggtgcactaaagaaagattagagcaactggtagccagagatctacgtcagcttgaactggctctgacagcttcgccaccccactag

SEQ ID NO: 403810 - DNA, 453 bp, Salmonella enterica
atggcgcgtaagttaaaaattaatcctgtcattcctgaatgtgtggcagatttgaaaggatatccactctatatcatcgtggcttattggggattaagaaataataaaacgctcacaacaacggatgttagccgtaatttccttattacacagcaacaatcttatgatgtgcttacctacatttaccaggaagcacagaagcagataacagcaactaaacgaacactatttaacgagcacaaaagaagaattagcgcgttcaggattcttgatattgacaaaggcatattgcgcacacccaaaaaagagattgcatatgccagctacgacaatataccaactgtcacaatgaaaagtacccgttgtgagatccaggatagttttacagaactgcgccgctggatgtgttcaagaaagacaggtgatcgagtggaggtatttttgaatgcctaa

SEQ ID NO: 403811 - DNA, 216 bp, Salmonella enterica
atgcctaagtaccaaataaacgcaaccatcaaaaaaccaggtggtggccccgtgaaatggactcattacagcgacttccctatgaccgctgaagaatgcagaaaaaacttctcaaaagaaaaagaagcaggaaagtgtttttctgttgatgttcatatttcagatttcatttgcaaagagatacctccacaaaatgcaggaaatacatatggctga

SEQ ID NO: 403812 - DNA, 177 bp, Salmonella enterica
atggctgattttggttccactaaacaaaccgtaacatttgaagaatggcacgagctattaatggattacgcagagttacgcggtggaaatgccgccgatgcggaagcatggcgtggtgattatgaagcaggaaaaactccggttgaagcatattgtgatgaatggggagaggattaa

SEQ ID NO: 403813 - DNA, 978 bp, Salmonella enterica
atgattgacgctataattacgccaatagttacatctattccgttactcttattaattttagtcgcgctgatattcgttaaatctgccgtcaaaatcgtgccgcaaggtaatgcctggacagtggaacgctttggtaaatatacccatacgctttcccccggtcttcacttcctgatcccgtttatggaccgcataggtcaacggatcaacatgatggaaaccgtcctggatgttcctaaacaggaagttatttcgaaagacaatgcaaacgtaactatcgatgctgtttgttttatccaggtcattgatgcagcgaaggcagcttatgaagtcgataatcttgcatcagctatttcaaatcttgtcatgaccaatatccgaactgtcgttggtggaatgaatctcgacgatatgctttctcaacgtgacagcatcaattctaagctgttaacggttgtcgattatgcaactgatccgtggggaattaaggtcacacgtattgaaattcgggatgttaaaccaccagaagaactgactaaggcgatgaacgcgcaaatgaaagcggaacgtactaagcgtgcacagattctggaagcggaaggtatacgccagtcacaaattctgaaggcggaaggggaaaaacagtctcaaatactgaaagcagaaggggaacggcaatcagcatttcttcagtctgaagcacgcgaacgtcaggcagaagcggaagctcgcgcaacaaaactggtgtcggatgcaatcgctgaaggtgatgttcagtctgttaattactttattgcgcagaaatacactgaagcactccaggcaattggcactgcatcaaacagtaaactggttatgatgcctcttgattcaagtagcctggtgagttcggttgcaggtatcagtgaactgctaaaaaacgtatcacaggatactcccaaagttgatatgaaacaggctcaacagtatttgtcttaa

SEQ ID NO: 403814 - DNA, 444 bp, Salmonella enterica
atgttctggtttacgctgtttcttctttgtattgcccttgaaattataaccggaacgggatggttactcgtaatcagtcttggtgcattatcaagtgccattgttgactttttccttcctatatcacaagaagcaaatatatgcttctttgcgtcaataagcatactgacgtcgataattaagttcgtctatgacaaaaaacataagaaattagatacacccctggtgaacacaggacatacacgttttaaaggaaaagaatttactctcagtgacgatattgtgaacggcaaggggcaattacttattggtgatacattctggcctgttgagacgttacacgatgaaaactaccctgcgggaacaagagttattgttacagacatgcaaggaataactcttaaagtaatgaccatcgaagacaagagtgaaaacaaggaataa

SEQ ID NO: 403815 - DNA, 171 bp, Salmonella enterica; identical to SEQ ID NO: 22646

SEQ ID NO: 403816 - DNA, 663 bp, Salmonella enterica; identical to SEQ ID NO: 22647

SEQ ID NO: 403817 - DNA, 594 bp, Salmonella enterica
atgcgaaacgcaaatgaaggtgtttctctaacagaggctatattagccattagaggtatagataaatacgcgtcatacaaaaccataaaaacaataaaaaccataataataactatagttcttattatccttgcattagctttttttagccttgcatcaagccttgtatcagcagcaggaagagttgctgtagctatacaggcagtatgctacctgtgcctctgtatggcaattatcatcatggttgtcatcaaaataagttctttcatcgacgaaaggcgagaaaaattagaattaaaacgtgcagagttggataaaattaagataaaagctcgtcaaaaaatctacaaacgcctgcgttacgttgaaaatgaccatatcgtttttgatccggttacaggccgggaagttccggcaaaatgggcgtgtattcataaagtcattgatgaaattatcgccgataaaagcaacaacgtgatcatgttcgacccggttactggccgggaatttctcgccgatggatgcaacaatgtgaagaaggtagcagcccccctgaaggatacgatgaaatgtacagaagaaaacatcacctaa

SEQ ID NO: 403818 - DNA, 258 bp, Salmonella enterica; identical to SEQ ID NO: 22650

SEQ ID NO: 403819 - DNA, 996 bp, Salmonella enterica; identical to SEQ ID NO: 22651

SEQ ID NO: 403820 - DNA, 642 bp, Salmonella enterica
atgaaagataaagtattatcatttctctttgctggaataattaccgtaacatcaccatcaatctttgcatctggtattccagtagtagacgttacagcgatagctaaaacagttgaagaagggctaaatcgtgccgctgaagcggcaagacagcttgatcaactcaagcaacaatatgaacagaccataagatacgctgaagaacagaagaaaagactcgaaggcttcactgatttcagtaacggctttgatagcgcatccagctatatgaaggattctctatcaacaataacaaatagtgcaaaatcagatcttagctctttgcgatcgcaatatgacttatcaagtaacgttgcagaaacgcaaaaaaaatatgatgcaatcctggctaagatcaaattctatgaaaacttcaacaatgaaatgcaggaaagggctaagagattaaccacgttacagaaggagttcgcgtcagcagatactccgcaaaaaaaagcagacttatctaaccaattgaatacagaaaaattgacaatggagctacaattgaagcaatatgatattgcggagagacagcttgaagctgagcaaaaagcccaacatcaagctatagtaaatcaattgatggataggttaacttaa

SEQ ID NO: 403821 - DNA, 255 bp, Salmonella enterica; identical to SEQ ID NO: 22653

SEQ ID NO: 403822 - DNA, 810 bp, Salmonella enterica
atgaatgagccattaaaggcggaattgcactctttgtttagttttgatatctatcctggtgcatcatcagaacagaatactggagttaagttggctatggcgcggttttatttaaatgttccgtttgaagaaaaggatttagctaaacaaaaaggggcgcaatgggaccaagaacaacggaaatggtttgttccacaggggaaaaatccaatttatttaattcggtggataaaagaattaaatgaacatgattacaatgttttttcgcaacgtttttatattgcggaaagttaccagtcttgttggcgttgtaagaaaacaactcctgtgtttggtatttttttacctcgttggtataagtatagagacgttatttggggagttgatcctgccgaatgggaagattgtatattagatgaatggtatgaaacatcctcccctaagggtatggagtattttgattcaaagaaaaatatgatttatcggtggttaaccagtagagtatggtggactgatttaacgaaaattgaaataatttcaacctctgctctctcaaggattaatgagtattcaaaattatattatccatcccatagcaaaacagcaaaaatgaactattacgcgaatcattgttgtcattgtaacgcaatgcaaggtgattttatgatgtttaatgagccagggggcgtgttcttccctgtaacatatgaacaggcggagaaaataagattccatgaagtcaatgaaacaatatttgccaaagcaagttatagtttaatacccgaagccggaggtttcatagatctttaa

SEQ ID NO: 403823 - DNA, 636 bp, Salmonella enterica; identical to SEQ ID NO: 22655

SEQ ID NO: 403824 - DNA, 393 bp, Salmonella enterica
atgaaatccaccattttattgatggttgccgccaccgcagcattacgaccaggctgcgcagatagtagaacacaccccgtgcctgagacaccgttaagcaaaatcatgttatcgatgattgccgcaagtgcgatcgcactctctgcccccgtatatgcgtctgatccgtgtgcttccgttctttgtctgtacggtaaagctatcggtagcggcggcgggagcgaatgcaaaagcgccgaaaaggagttctttaatatcatcaaaaagaaaaagggatctattcgctggagcaaaacctttgatgcccgaaaagcgtttcttaatcaatgcacgaccgcagaccctgcggcgatctcaaaaatcatgagtaagttcggacgttcctggggttaa

SEQ ID NO: 403825 - DNA, 1236 bp, Salmonella enterica
atgaaaaagctcattattattcccaccacattattgctgaatgcgtgttcccatgcccctgaacccgcacaggcaaaaggaggttggtatgaactgaataccacaattgagcaggtaagagcagacacatactataacggggtgatccttcagcagcccgtgtcacagccaaacagcactgttcaatacagcaatgataattatctcaaaaaggaagccataaacgtaactcccgcgcctcgtattgcagaaaccgtaaaaccacgttctgagcaatcagcgacagcgccaaaaaaccaggacagcaataatagttttctgaagccaacaacaaacagcataacttcatctggtgagataaaaacagcagccaaaggagcaactgaacagcattctgaacaaccagcactccctcccgcaaagccaatcagtagcaacaaccatcaggcacaaacggcacaaaatactgatcagcagacaaaaccgcgtcctgaacaaccaccgctaatgtcaaaaagcggttttctgaaaaaaaacgctaacaacgctgttccggccaccacgcttacaggcccatcaacacctgaaaagcaaatttactttgttcgccatgatggtaaaggctcgctgcaaaaagcagtaaaagaaattgtcccatcggactggacggctgaaatatccccggaggtaacgaaaactttccgtcgcacgatatcctggcagggcaacgatcaatggccttatgtcctggataaaatgcttcgcaactacggtctgacggtaattaagaacaccgaaaaaagacatcttctgattgattttcaacaacagaaagggaaaacatcacaaaaagcacctgaatctcctgacaaaacccctgcatctcctgtcaggacaccagtttcctctgacaagtttcctcaaaaaccgctaacgcctgtcaccgttccgcaaaaacagacagaaaaactcacctggaatcttaaaaaaggttcgacgctgcgggatggcctcacagaatgggcgtcaagttcgccgtgtggtaattcaacctggaatcttgtatgggatactcctgtgaactacagaatagatgctcctcttattttccggggaaactttgaatctgcattaaaagatacgctgatgctttatctttcagcagataaaccgttatacgcattcaggaatattgcacaatgcgtaatcacaattaaagacacacaacaggagtaa

SEQ ID NO: 403826 - DNA, 438 bp, Salmonella enterica
atgggttggttcttcagcttgctcctgatattcctgtcaataggcagttactatctgacagataacaataatcaaaccatacagcgaatgaagttgcttcctgcaaaacaggaagcaattgaatttgtccatttcgcaaatgttatcaatgactatctttataaatatccagacaaacgtaattcaggaggaacgttaacatctgagcaaatcggtataacacccgtttatgatattcatcatattatttacggtaagcgagtttatatctggtctgccgatacagaaggtctgatgtctgctttgcagcagcaaacaaaacattcagcaatgttaggaagagtaaaaaataagaagattgtcgataatcaggggaatgatatgggcgttcccgttccttcctccattccagaagaggctattgtactcattaactaa

SEQ ID NO: 403827 - DNA, 399 bp, Salmonella enterica
atgcaggataatgatgatgtcagcgagcttgatattgccactcgtgaagtccttatcttacgatgcaatcttattcagcttgcttctgaatatataaaaataaatccccttaaaaacacccgaatctatacagatttaattcatcgttcagcagatgttatcaaaaatatcgaacaaggtaacatccagaataaacataattatctgtcacaggatgtaaaacatacgcttgttttatacgacctgtacaaatcagactttgaacaatgtccgggggcaaaatcccttatacctgtcagggaaaaaattgtctcgctgaaagaacttctttccggcgctaatgagctggacagtatcgttcgtcgcccccgcaggaaaaaacgttcttcacgaatttaa

SEQ ID NO: 403828 - DNA, 585 bp, Salmonella enterica; identical to SEQ ID NO: 22660

SEQ ID NO: 403829 - DNA, 291 bp, Salmonella enterica; identical to SEQ ID NO: 22661

SEQ ID NO: 403830 - DNA, 285 bp, Salmonella enterica
atgacttataacggttttaaccgtccggcgttagtttctggtatccccttaatgttgttattgttcacggcttttttcgctgttctgacaggcttccctgctattttcctttggggtatgaaagggctgattattcctgccatatgtgcgctgtttctttttatagtaaaactggcctgtgaaaatgacccaaacgccctaagagtcatccgtttaaaccttatggggcttctgttaaaaatccgtcacagagatttaattattggttattcatctgtcaggtaa

SEQ ID NO: 403831 - DNA, 2358 bp, Salmonella enterica
atgcacaaaatcaaattaaaaaacagtgacaacaaggatgttgctcgtgaatatcccgattatcgcttccatgtaacagacagtattatctttacttctgacaggaaaatgctagcctcacttgttgtcgcaggcattccatttgagacagagaatgataatgttcttataaatttatttaacagcgttaaaaacttcctgattgggttaggaaaggaaggcgacctgtatttatggactcatcttatcaaaaaaagaataaccattgatggagaatggaattttgacaatgcttttttaagcaggttttcaaaaaaataccttgctctgttcacatccagcgcattctacaaatcaacatggtatttaacatttgggattccctacgatgatgttgataccggaatcgagcgcatgaatgaaatgacacaacaggcgcaaaaagcacttcagccatttaacgcttctgttttatcagttcacaatacttatattagtgaggtggcagactatttatcactattgctaaatacagaacataacatgattcctttatcatccactcccttatcatccagtatttgtgattctgaatggtattttggtgctgatgttcttgaactgcgtaacaacgaatcggatagtaaaaagtttgcaacgaattatattttgaaggatttccctatagaaacgacccccggacaatgggattttcttctcaagcaaccctatgaatttattcttactcaatcgtttatttttgaatcacccacaaaaaccctgaagaacattgattcgcaattaaacaaactgcaatcagctaatgatgcagccaaaacacaacaggaagaactcgaagctggtaaagaagcggtcgcagccggaattacgttgtttggttcactacactgcgcattaacggtattcggtgatacaccagatcaggccagaagcaatggtataaagctctctgctgagtttattacttcgggtaagggattccgcttcagtcgcgcctcactcgcatcaccttttgtttttttcagtcatatgccgctgaataagaggcgtccactggatacccgaagaacaataaccaacctggcctgtctgatgtcttttcacaattattcctccgggaaaaaatcaggcaatcctattggtgatgggtccgccataatgccgttgaaaacggtgtctgacagcatttactggttcaatacgcattacagcccaccggaaaaaagtgttaccggacaaaaaattgccgggcatggaatgattcttggcgcaacaggcacagggaaaacaacatttgaagcagcagccagcggttttcttcaacgctttgaccctttaatgtttgttgtggatttcaaccgttctactgagctttttgtccgtgcatacggaggaagctatttcacgttgcaggaaggcatttataccggctgcaatccgtggcaactggcagaaggcccggaatctcctgtctggcacagacttctcgcatttctgaaacgctggacacaggttctggcacgagacaaccagggcaacccctgttctgatgaacatggcattgaattaaacgctgccgtggaaagcattatgcgaatgcctgtcgaagaacgccggacagcccttcttctcgatatagtcagtcctgaacttcagacgcgtctcgccaaatggtgcgacaacggcgaatatgcctgggcggtggattccccccggaataccttcaatccactgcatcataaaaaagtgggatttgatacaaccgttgtcctggacacaaaaaacggtattcatcctgcctgtgaacctttactcgcggtcctgtttttctacaaagaaatcatgcaacgcggcggcaatctgatgctctccattattgaagagttctggatgccagcaaactttcccatgacacaaagcatgattaaaagcgcactgaaagcggggcgcatgaaaggtgaaatgatgtggttaacatcacagtccccggaagacgccataaactgcgcaatttttgcggcgctggtacaacaaaccgcaacgaaaattctcctgcccaatcccgatgcaaaatgggaaggatataaagaaattgggcttactgaaaaagagtttgaaaaactcaaagagctgacgaaggagtcaaggaccatgctcatcaagcaatctggctcttctgttttcgccaaaatggatttgtttggattcgatgagtttatccccgtgctttctggctctgaaactggcctgtctatttttgatgagattattgctgaaaaaggagatgtagctcctgatatctggataccagaactcctgaaacgcctgaacggttaa

SEQ ID NO: 403832 - DNA, 135 bp, Salmonella enterica; identical to SEQ ID NO: 22664

SEQ ID NO: 403833 - DNA, 735 bp, Salmonella enterica
atggaaaacacaaactattatgaacattcaaaaaaagaagccaccaaaaagaaatttgaagaaaaaaacgaaaaaaaggattatttcaaggccatacgtgactttgagcgcagtgaaattgaaatcataaagaaaaaggcaaaaacatttaccattctcgccattggtgaatttgttgtaatttgcattcttggtttcgcaatagcctcccttgctccattaaaaaccgctgtaccgttccttgtgcgagtggataacagcactggatatactgatattgcccctcaattatctgatgctaaggaaagttatcaggatgttgagactaaatatttcctgtcaaaatatctcattaactatgaagcatacgactggcagaccatccaggaacaggccgatacagtaaaaacaatgtcttcccaaaaggtgttttcagcttatgacaccatgattcgtgctgattcctcaccactgaacattctgaaaaacaactacaaaattaaggtccagattaattcagtaatccttctaaggaaggatatggcgcaggtgcgtttcaaaaaaatggtactggatttatctggtaaacccgcccccggatacagagcaacagagtggatttcgacgatttcttttgactgggataaagatatcaaaacagaaaaagagcgccttgtgaatccgctgggactgcaagttctgagctaccaacctgatccagaggttataaaatga

SEQ ID NO: 403834 - DNA, 771 bp, Salmonella enterica
atgatgcttaaacgcactactgcgatagttcttttgtcgatgctacaagtacctggtgctttagcagctatgtacggcacaccatcggaacgagacgggcgtattcagaccgtagattataacgagcaggatgtatttaatgtgcgcgtaaaagcaggcgcacaaacaacaattaagttcggacaagacgaaacaataaaagatgtcggaattggtgatccagaagcctggtcagtatcggtcagggacaacactctgtttctgcgtccaaaagcagaagaaccggatacaaacgttaccgttcagaccaataagcatatatatcctctttacctgatatcaaccacgaaacaacccacgtatattctgcgttttaattatccgaaaccaccgtcagctaccgtaatgactgaaaagccatttccatgcactgatggtggaataattaatggtcattatcaactcaagggggacaaatcaattttcccttatcaggtatgggataatggcgaatttacatgcatgagatggactaataaacaggaaattccggtcctttatcgtgttgatgccgatggaaatgaacatctggttaacggagacagaaataaaaacacaatggtttactatgacgtggctgaaaatctccgtttgcgcctgggtgatcaggttgcagatatcagaacatcatcaatcgttaatcgtccgtggaataaaaaaggtacgtcaaacggaaaaacacgagtagagaagttcagctatgaaaaataa

SEQ ID NO: 403835 - DNA, 1140 bp, Salmonella enterica
atgaaaaataaagatgatgaaaaaaataatgacgcgggaaatcgcggaattatcgaagtaaaaggtaaagcagcaccaaaaaaaatattaatcctcatcatattactgattgccgcgttatttgtgatcattatcttgtttaaagttctgtcacgagaacaggtcgttcagcaaacacctcttgagaagtctgacgagacactggtcacaaataccaacaatggcgtttcactgacaacaatgatgaaaaacatcgaagaaaaggaaaaactcgatgccgctaaccgcaggaaagcacaggaggagcaagaacagaaacaggcagacaatgccccgtcagcgccagcatcacaaaaggccgatcaaacagccgtcaatgtgatagccaacggcactccccaaaccgccagtggagatccaaaccaaccacaaccattgccaaaatccgtccgacaactgatgggcgacacaatggtgaagatcgacaatcaggaaccaggcgaaaaaaaccaggaaagagatgatttacagggcagtcagtacgcagacggaaaggtatcccctgtgctgaaccgccgatatctgttatctgcgggaacagcattatcctgtgtgctcaaaacgaaaatcgtaacctcttatcccggtatcacaatgtgtcagttaacacgagacgtctggtcggataacggcgaagtgcttcttgcccgtaaaggagcattactgatcggggagcagaataaagtcatgacacagggagtagcccgtgtgttcgttaactggacaacgctcaaagatgaaaatgtcaatgtgcgcattggcgcacttggcactgacagtctgggcgcttccggccttcctgcatgggtcgataatcattttggtcagcgttttggtggtgcattgctgctgtcattacttggtgatggtttagatattctgaaaaacagcacgcaacaaacaggctcaaacagcaatatcacctacgaaaacacatctgacgcaacaaaagaaatggcaaaaacaacgctggacaatacgataaatattccccccacggcatatattaatcaggggacggtattgtctgttattgttccgcgaaatatcgacttttcatccgtatatgaacttcagtaa

SEQ ID NO: 403836 - DNA, 1056 bp, Salmonella enterica
atgaataacatcagagataccagtaatacatcacaaccacgagataacagtaaaaccgcaagacgatatctggatatgacgggtatccagtctgttcttaatattgaacatgtcacagaaatatctgtgaataaaccaggaacaatatggtttgaagggaaaaatggctgggaatctaaagatgcgccagacgcgacttttgataatttaatgacacttgccaaaactctgacgaacttatcaaagataaaaataccacttagccatgataatcccattgcatcggtagttcttcccggtggggaacgtggacaaatcatcattccacctgcaacagaaaataacagcgttgtgatatctatccgtaagccatcattaacgcgctttactatagatgattatgtccgaacagggcgttttgataatgtcaggattgcgacgaaacacgaagccatcctgactgaacggcaacgctacctgtatgaattatcccgacgtccagatggtcaatctaaagctcaatttttaagagaggcagttaaagaccgtcttaattttttaatcgtaggtgggactggctccggtaagacaactatagcaaaggcaattgcagatatctttccacctgaacggcgttatataaccgttgaagatgtaccggaaatgtctctgccgctgcatccaaaccacatccggcttttttacaaaaaaaataccgttgaagcgaaggaaatcattgaagcgtgtatgcgattaaagccagatcacatctttcttgctgaacttaggggtaacgaagcatggagttatctggaggcgcttaatacagggcatgaaggctcaatcagtaccattcatgctaataatacttatgcctcattttcacgactggcaagtattgtaaaacaatctgatgttggtatgactgttgatatggacctcatcatgcgcacgataaaaacatcaattgatgtcattctttttttcaaccataccagaatgactgaactgtattacgaacccgaagaaaaaaatcgctttttgagcacaatgtaa

SEQ ID NO: 403837 - DNA, 1959 bp, Salmonella enterica
atggatgcaaaaaagacgggggggttaattctcttcctgttactgcttcttgtgggtgtgcttatagcctcaaactatctcggtggatacacagcattaagatattcatccgttgatatgtctttgctcaagtgggatacattccattctgtaatctcaacattttctggcaacccacaatataaaaaactcgtttttatggcatggtttggattcagcgttccattaatattctttgccatattcatgttgattgtcgtgattgggattatgcctaaaaaagtcatctacggtgacgcccggctcgcaactgatatggacctgagtaaatcaggttttttcccggataaaaaatcaccttacaaacatccaccaatactcatcggtaaaatgttcaaggggagatacaaaaaacaatttatttatttcgccggacaacaatttttaattctttatgccccgacacgttctggtaaaggggtggggattgttatccccaactgcgtaaactatccaggaagtatggtcatactggatatcaaacttgaaaactggtttttatcagccggattcaggcaaaaagaattagggcaagaatgctttctctttgcgccagccggatacgcggaaactatcgaccaggccattaaaggacagatacgctctcaccgctggaatcctcttgattgcgtcagtcgcagtgatttacttcgtgaaacggacctggcaaaaattgctgcaatccttatcccggcaagtgatgatcctatatggtctgattctgcacgaaacctttttgtcgggttaggactttacctgctggacaaggagcgttttcacctggaacagaaagccaaaggtcataatgtaccggacgttcttgtttccatcagcgccatactgaaaacgtcggttcccgatggcggcaaggatctcgccgcatggatgggacaggaaattgaaaaccgtagctggattagcgataaaacaaaatcattcttctttaagttcatgtcagcaccagatcgcacaaggggaagtatagaaacaaacttttcatcaccgctgagcatcttcagcaaccctattactgctgaggcgacgaatttcagtgattttgatatccgggatattcgtaaaaagcccatgtcaatttatcttggtctgacaccggatgctttaatcactcatgagaaaattgtaaaccttttcttctcattactggttaatgaaaactgtcgtgaactaccggaacacaacccggacctgaaataccagtgtcttattctcctggatgaatttacatcaatgggtaaatcggaggtcattgaacgcgctgttggttttacagcaggttataaccttcgctttatgttcattcttcagaatgaaggacaagggcaaaaaagcgatatgtacggtcaggaaggatggaccacattcactgaaaacagtgctgttgtgctttactatccgccgaaatcaaaaaatgctctggctaaaaagatttcagaagagattggggtgcgtgatatgaaaatatccaaacgctcaatatccagtggtggtggtaagggaggaagttcacgtacacggaatgatgatgtaatagagcgcccggttcttcttcctgaagaaattgtgtctctccgggataagaagaataaagccagaaatattgcaatccgtgaaattataaccagtgaatttagccgaccatttattgccaacaaaataatctggtttgaagaaccagagtttaaacgccgcgtggatatcgcccgtaacaatcatgttgacattccaaacctgtttacacaagaagtcatggatgaaatagcaaaaattgcagaaatttatctccctaaagctggaggaaaaaaagtcatggttgccggaggcaatgtgattactaatccagaccttgataatcacgataaaacagacgtatctgaataa

SEQ ID NO: 403838 - DNA, 531 bp, Salmonella enterica
atgagaataaaacactcgaatatgataaatatgaatatgaatatgaatatgatgaaagaagccattgatgttttgataaactctgaaaaacatattctgattataggcgaaactggaactggaaaatcaacacttttagcagaattgctaatcaatgacactgacgttaaatattttgatttctgtgatatttataaacgccatgaacaccttccccttctaaaacaccattatctttgcgatgaaaattttgattattttgactttttatctgcacctgaaaaaacgttggttcttaatagtgtagccatcggtaacaacttacgggaatcaaaagttgttcagtttattgttcgatttattaaaacagccaggaaacgtggcaaacgtcttattgttgtcacgactccttcagatggcggcgtgcagatacaaaatcttttcgacacagttatatcgttaacccgctctcacgatgaaataggatgcacagttatcattccagtaccggagttaattaaatatgaataa

SEQ ID NO: 403839 - DNA, 1644 bp, Salmonella enterica
atgaataaaaaattgctttgtttattaatatcctcttttttattatcaggctgtgcaaacttcaaaaaaatcaatgctaatgaacttgcagccgaaagagacgcacaaaaagcgactgaatacgcgaaaaaaattcgtaataacccggttatccaggactcaacaaaacaatggattaatacaacgccaattattgaaaagcaggtaaagcaatcagcgccgccctgcccgattgtgattaatactcgttcagatattgagctacgccagatcgcacaacgcatcacacaaacctgtcatatcccggtacgaatcagcgccgatgtctggacctatctgaacggtacaggcactggctcaacacaacaaatgacaggatcaattccagcaccggatgcaaatggaatggttcctctggcgtcagtaggcagtcagccagtaaaagtctcttctggcggtacatcactcccggaactgaatatctccgggcttcctgccctactgcaaaccgtatcttcacggctgggaatatcctggaaatacgataaaggtcgtatcacattcttctatctggaaacgcgctcattcccgatcacatatatggacagcaatgtggcatacaactcaaaagttgtgagcggcacaatgtcttccagtggcagtaccggctctaccagttctggcggtatgactggcgacgcatcaaatacgcaaactacaaccgtggaaatgaaatcatcgctgtacaacgacctgaaaagcgaagtttcctcaatgctgacaccaggtacagggcgcatgtatctgtccacaggttcactgacagtaacagataccccggatgtactggacagcgttcaggagattgtgaacaagcgcaataatgaaatgagtcgtcaggttgtgctgaacgttgaaatcctgagtatcaagaaatcaagccaggaacaggcgggaatcgactggaacgcagtatttaatgatggtcatcttggtctgagtcttggtggctcatttggtgatgccgccgagaatgttattaccagtggtgtatccatcgtggacggtaagctggctggctcaaaagcatttctgaaagccctgtcgtcacaaggcagcgtcagtgtcgtaacgcaaaactccgctgtgactaaaaacctgacgcctgtccctatgcaaattgccaatcagcagggcttcattgaaagtgtcacaaccgattctaccgccaatgtgggatcatccacgtcactgaatgcggcaacaataacaaccggattcaatatgactctgcttccatacattcagccggattcacaaaacctgcaattgctgttctcaatgagtctgtctgacaaacctacttttgaggtgttcgaaagtggcggcagtaaagcacaaacaccgaatgtggatttgaaaacaattaatcagactattgacctgaaatcaggccagacagttattctgagtggattccagcaatcaaaccggaaaaccagtaagcaaggtgtaataaccccctccttctttggacttgggggtggcattaacagcgaagacggcgacacgattctggtcgttttgattacaccaaatgtgcttaattccggctccagtgcagtaataaaaaatgtgaactaa

SEQ ID NO: 403840 - DNA, 1323 bp, Salmonella enterica
ttggaggtcactttgtctgagaataatcagaataaccggaatttcacttcggttattaaaaacaagcgtgcttttttctccggtctggactggaaaacgcttccttcagaagaaaagaatgcgcgtacattcgcaagaaaaaacgacgctgaatattttctctcctgtcagtatcaggattcagaaaatgaaaccaaaacgatggtggcatttatcagaaaagaggatcttcccacaggggcgtcctcattctggtcactggcactgatgataaaacccctcatcgaacctgacggatacgctatctgcgaactcggtgatctttatggctttgtttcctgcgtcaataacgttctcgtcaacgatgttgtaggtaacaaaagtcagatcatgagtgctctgacaacatttcttgagtttaatgaaacaccagaacccggctggaaactataccagcctgaatcatgggatatcagccaggcactcccctcactcactctgtctgcgttgattgacgtaaaaaaaccgccgaaagaggcggcgtttactcgcgtatcccgaaaacgtcagttcatgatttatggcggaagtgccattctggccatactgctctggaacgggatcaccatgtaccaggaataccgggaaaaagaagctgcggcagaagctgcacgtcttcgtctggcaaaagaaatggcagacaaacaggcaatacagattgccccaccgtggcaacatttacctgaaataaaaccatttattgataaatgcattgataaatgggatgcactgcccttatcgatcgccggatggcgttttgaccttgctgaatgcagcacatccggtaatgacgggctgttacgcacatcatataaggaactgagcggcgttacggtcgaggacttcagcacacggatacgagaaatattccaggggacaaccacagcaacttttgtattgccagaaggcagcgccgggggattttctcttcctgtcagttttgacgtttcgcctgatccaattaccccggacacattgccacaggcaacagatattcaggaacgcctgacaacatttgcacaaaaaatgaggttaaaactcacctggcaggaaattgaaaacacaaaaacagatgaagaaggccgtccaataattctcccgtggaacgagtatgaattaatgattcagaccagcaccccgccttcaatacttttcgctaactttcatgaacctgccgttcgcttccagtatgcaggaataaaactggaagaaggaagactgaattatgagattaaaggtgcattctatgttaaaaataattaa

SEQ ID NO: 403841 - DNA, 516 bp, Salmonella enterica
atgagattaaaggtgcattctatgttaaaaataattaaaccaacgattatttctgtctgttttttcagttcacttgcttacgcaacagaatctgaaagcacgccaaaagacgaaataaaatattcatctccgaccattttacaggtagagcagattcaggctgaaacggtaatttacgaagcaaagctggcgcgtcagaaggctgtcagtgaattgcgtaatcttgatttgaatggtgtagcgtccgcaacgccagcaataacgccctcttccgggtattcttctcttgcagataccgatataccagcgcaacgtgtagccgctaaatcacttcgtgttattgaaatatttggtacaccacaacaaatgtcagcacgaatttctctccaggacgggtcagtaactgatgtcaaggtcgggcaaagtattcctggtacttcttataaggtggcatcaatcactggtaatggcgtctggattcagaatggtacagagaaacgccagcttattctttaa

SEQ ID NO: 403842 - DNA, 1554 bp, Salmonella enterica
atgtttttttctgacgcagattatcccggaaaagatatttctgatgttgtatacgtcagtatatctgaaaaagacgataaacctgttcaggtttatatcgctgataacagtaaaggacagcgtgctgttcaggcttatattggcactctgaatgttaaatatcccggacaggtaaatataacctcgaccactcttgatgttatcgcatcccgctaccaggacagcgaaaaaaggtctggcgaaaaaaggtctgattcaaactcatcacaacacttaaacagcaaccaggaaaaggtcattagctacctggcgaaagcaaacaaactgggaagttccgatttgcacatcacacctggtcgggacggctccgagttcacttatgtcgaagcacgcgtgcatggggaactggaaattctggatgtcatcccgcgtaaagaagggctggaattgctgggtgctgcctattctggaatgagtgatgttatcaaaggtacgcagtttgaccctgcaataccacaggatgcacgtatcgcagagaattttctgaagcctgtaaatctttttggggcgcgctattcgcattatccgtgcgtgggtggtgtgtacgcggtcttccgcctgattaaagatgacagcgaggatattcccactttcgaagaacttggctacatgccgcaacaaatccagacaatcaggcgaatgttacaacgcccggaaggaattatcgttttatccggccctacagggtccggtaagtcaacgactctgagaacggcttcagaagcctatctgagcacgtttggtttcaaccataacgataatatgcgtctcccccgaaaacgccttttcaccattgaatcaccgccggagggccgtattcccggcgcaatacagacggcagtcagggattccgtcgatggctgggttgacgcgattaaatccgctatgcgacttgatccagacgcgatactgaacggcgaaattcgtgatcacgcatcggcattagcagcaatcaaagcctcgatgacaggccaccttctgttgacgaccttacacgccaacgatgccctgaatattattgagcgccttgaaatggagaatattcaggccaggctgattgcagatcctcttctgtttatcggtctgctgagtcaacggctggtacaaaaactctgtccttactgtaagcgcacttatgctgaaatggcagacaaactgagtacagaagaacggaaacttattgaggaaaattgcctgccggaacaggtccggttgcgcaatcttgacggttgcgagcactgttataaaggcgtaacgggaaggacggttatagcagaagtcgtctcacccgacgcacgtttttttcagttatatcgtcagtccgggcgtctggaagcaaaatcatactggcactatgaacttggaggaattacccgtaatcagcacttattacacctgattaatcatggcctggtagatccgctgtccgcacacttcatatcccccattgacgaagataaatactcaatgctcccggaggggacatggcgataa

SEQ ID NO: 403843 - DNA, 1110 bp, Salmonella enterica
atggcgataaaagatatatttgagaaactcaattcgatagaaattgatttctctgggatatcccactggctggcaaaatacacattcaggtattccagaataagtttatatgaagatttatctggaatgttaaatgatggcataaatgtaaagcgtgctcttacacacctgattgatgtagaaacagactacgggaagaaaacggggtcttctgcaacctactatatttgttgtgagtgccttaatgcactgaataacacaggggcaatatcttcagcattaaaaaaatatataaaggaggatgaatatcaattaatatccagcggtgaaattcgcggcgaccttgccgggggattagttcaggccataaaaattgtcagaagtcgttctgaaatgacaatgactcttgttatgtcgatgatttatccatccgtactggtttttggttgtctggcaaacatgtatatggtccacgataccataacacctgttttcctttctctcgcaccgaaagaacgctggacaagttctatgcgattactgacagatacgtctggtttcctgatagaaaacggaacgtatattctctgcttctgcatcgtactgtttttcctgatcagatattcgcttgcacgttatacaggaccgggccgtcagtatcttgattacattcccccctggtcactttataaaacatttaatggtgtaagttttctcttcaacatggcctccatgttaagtattgatattcccgttgcaaaagcactggaaaggctggagaaaaacagcactcaaaacagatggctactcgaacgaataaaagaaatcaggagatatgttttacttggacagtcacttgcaatggcaatgaaaagttgcggttatgacttcccatcgaaattatgcattaacaaactattacttcattctgaaaatgctgacaatgcattgatgatgtctaactatgctgataaatggctggaggaagcaaaaggaaaagtcaaatcaacaggagtctggataactgtagtatccgcattaattgttttcgcatttattgtaatgatgattactgctctctacgatgtcagtaacgtcctgcaacactaa

SEQ ID NO: 403844 - DNA, 558 bp, Salmonella enterica
atgtcttctattaatattttaaatatgcgttctgttttttcttctctttctgcacgccgtaaaaaagaacaggacaaaggggcaacactgatggaagtgttattggttgttggtgttattgttgtacttgcagcaagtgcatataaactctattcaatggtgcaatccaacattcaatcatccaatgaacaaaacaatgtcctgacagtaattgccaacatgaaatcactgaaattccaggggcgttatactgacagtaactatattaagactctctacgcgcaaggattactgccatccgatatgatcgcagatacaactggcgcaaacgcgaaaaacccgtggggcggctccgttacaatcacaacctcttcggataaatactccttcaatgttgttgaggccagcgtaccgaagaaaaactgcatggcaatggtaaacgccctgcgttcttccagcgcaatctccaagattaacaacacttccacatcaactgtcgatgcggcaactgtttgctcatctgacagcaatacgctgaccttcagcactgattcctga

SEQ ID NO: 403845 - DNA, 483 bp, Salmonella enterica
gtgcgttctgttctttatatcctgctatcatgtatttcatcattaatcttttcattgcaacccgcatattcagcgacaacgacccgatttgatgcctgctttgcacaagccgggcaacgttatctgattgatcccctgcttctgaaaagcattgccactgtagaaagttcactcataccagaccggataaatcacaacaaagaaaaaggaaaaatattaagcaccgattacggactgatgcaaattaattcatcacacatccccaacctgaaaaaacttggcgtaataaaagacaaatcagagcttattgataacccctgtctcaatatacaaattggcgcgtggattctggcaacacattttcagaaatgtggcataaactggagttgtcttggcagttataacgctggtttcaaagaaagtaacgaacagaaaagaatcaaatacgcacgctatgtctacaataaatacatggtaaggtaa

SEQ ID NO: 403846 - DNA, 636 bp, Salmonella enterica
atgctaaacagcatatttaatacggcgatactttgctgtgcaaatatcgtctgtcaatgctacgcctacaatgaagtaaaattccgtttaaataaacttaatgtatcttataaaaccggcacagagaaatattactgtctgatactgacaacgcttgccgttctgtatctttcattaaaccagctatcactgattcaatctataatagtgattgttttctatgctttccttacattaatggcttgtatagaccttctttcatttctactaccacgcctttataccgtgacatttatcttctctggcctgttatatcagacatggaataacaatatattgtctggtttgttttgtgcaatgctgatgttcttcattatgctgtttgtaagactttactttgcatataaaaacggaacggaaagtttcggcatgggagatgtgctacttattgcaggaactggcgtatggtttccaacgcctgagattgcctgttcaattgtatttattgccgttatcggcggaattattttcttcactcttggcggattaaacaagcaaaaaaaatatattccatttggtccgttcctttgtggcggaatgtttgtttactcactcgtaccgggaatattattctga

SEQ ID NO: 403847 - DNA, 315 bp, Salmonella enterica; identical to SEQ ID NO: 33595

SEQ ID NO: 403848 - DNA, 315 bp, Salmonella enterica; identical to SEQ ID NO: 33595

SEQ ID NO: 403849 - DNA, 315 bp, Salmonella enterica; identical to SEQ ID NO: 33595

SEQ ID NO: 403850 - DNA, 315 bp, Salmonella enterica; identical to SEQ ID NO: 33595

SEQ ID NO: 403851 - DNA, 330 bp, Salmonella enterica; identical to SEQ ID NO: 26017

SEQ ID NO: 403852 - DNA, 315 bp, Salmonella enterica; identical to SEQ ID NO: 33595

SEQ ID NO: 403853 - DNA, 432 bp, Salmonella enterica
ttggccgaggacgataaagatgctatccctttggagctcattcatcactggcataatgaaggactaattaactggctgggacgctcttcgaatgtatatgagcttattcagaaatcgaatatcgttgcattaccatctatttatccggaaggagtaccacggcttttattagaggcatcatctgtaggacgtgcatgtattgcttatgataccggcggatgtgatagcttaattattcataactataatgggttgatcgtgaaaagtaattcagctcaggagttagcggtagaattagagtatttgttaaaaaatccacagattcgcttagagatgggggcgaatggaagaaaacgtgtaaaggaattgttttccagcatattagtcattaataagacattgcaaatttataaagacactattggttgctaa

SEQ ID NO: 403854 - DNA, 468 bp, Salmonella enterica
atgtatcccccaaaccaaggggggatgagaaccaccgaccggggttcgacaactggcgcagccagttggacagaccgggcgcgcagcgaacgggctgccccgaaggggcgagcaaagcgagtcaatccccccctcaccgccatattcaagttgagagcctgtacagaagtacgggctttttgcttatatatatcccccaaactaaggggggatgagaaccaccgaccggggttcgacacaaaaacgccgggagcgtttttgaacagagcttgctctggccccgaaggggcgaggcccagggatgggctgagtagcggcgcagccagttggacagaccgggcgcacagcgaacgggctgccccgaaggggcgagcaaagcgagtcaatccccccctcaccgccatattcaagaaagagctcgtacgaaagtacgggcttttgtatctaaacttcttgtttttactgtga

SEQ ID NO: 403855 - DNA, 255 bp, Salmonella enterica; identical to SEQ ID NO: 79134

SEQ ID NO: 403856 - DNA, 720 bp, Salmonella enterica; identical to SEQ ID NO: 8275

SEQ ID NO: 403857 - DNA, 234 bp, Salmonella enterica; identical to SEQ ID NO: 8563

SEQ ID NO: 403858 - DNA, 426 bp, Salmonella enterica; identical to SEQ ID NO: 30249

SEQ ID NO: 403859 - DNA, 363 bp, Salmonella enterica; identical to SEQ ID NO: 80769

SEQ ID NO: 403860 - DNA, 822 bp, Salmonella enterica
gtgctggcggaaatcccccgcgtgcgcgaggacctcggcttcatcccgctggtgacccccacctcgcagattgtcggcacccaggcggtgctcaacgtcctgaccggcgaacgctacaaaaccattgccaaagaaacggccgggatactgaagggcgaatacggccacaccccggtgccggttaacgccgcgctacaggcccgcgtgctggaagggggcgctccggtgacctgccgtccggcggatttactcaaaccggaactggctgaactggaggcggacgtcaggcgccaggcgcaggagaagggcatcacgcttgcggaaaacgccatcgacgatgtgctgaccgtggcgctgttcccgcagcctggcctcaaattccttgagaaccgtaacaacccggcggcgtttgagccggtgccgcaggcggaagaagccagacctgctgctgccccggcaaaagccgccgcctccggcgtctacaccgtggaagtggaaggtaaggcctttgtggtgaaggtcagcgacggcggcgatatcagccagctcactgcggctgttccggcggcctcttccgcaccggttcaggctgccgccccggcaggcgccggcaccccggtcaccgccccgctggcgggcaacatctggaaggtgattgccactgagggccagacggtggcggaaggcgatgtgctgctgattctggaagccatgaagatggaaaccgaaatccgcgccgcgcaggccgggacggtacgcggtatcgcggtgaagtccggcgacgcggtctccgtcggcgacaccctgatgacgctggcgtaa

SEQ ID NO: 403861 - DNA, 1092 bp, Salmonella enterica
atgagcgccacctacggccacccggccaccgaagcgctggttgccacgcttgccggcacaaaatatgacaccgggctggatatcctgaagctggaaaatatcgccgcgtacttccgcgaggtgcgcaaaaagtaccacgcctttgaaggccagctgaagggctacgacagccgtattctggtggcccaggtaccgggcggaatgctgaccaacctcgaaagccagctgaagcagcagaacgcggcggacaaactcgaccaggtgctggcggaaatcccccgcgtgcgcgaggacctcggttttattcctttagtgacgccgacctcgcagattgtcggcacccaggcggtgctcaacgtcctgaccggcgaacgctacaaaaccattgccaaagaaacggccggcattctgaagggcgagtacggtcgcgcgccagcgccggtcaacgcggcgttacaggccagagtgctggacggcgaagaggccgtcacctgccgcccggcggatttactgaaaccggaactggcgcaactggaagcggacattaaacgccaggcggcagaaaaaggcatccggcttgcagagaacgccattgatgacgtcctcaccgtggcactgttcccgcaggtcgggctgaaattcctcgaaaaccgccataacccggcggcgtttgagccactgccgcaggcggaagccgcgaaacctgccgtgaaagaggaaaaagccgcaaaacccgccgcttccggtatctacaccgtcgaagtggaaggcaaagcctttgtggtgaaagtcagcgacggcggcgatatcagccagctggccacggccagttctgcgccggttcagaccgcggcgcctgccgccgccccggcgggcgcgggcaccccggtcagcgcgccgctggcgggcaatatctggaaagtggtggcgacggaaggccagacggtggccgaaggcgatgtgctgctgattctggaagccatgaaaatggaaaccgaaatccgcgccgcgcaggccgggacggtacgcggcatcgcggtgaaagccggggatgcggtggcggtgggcgacaccctgatgcagcttgcgtaa

SEQ ID NO: 403862 - DNA, 1668 bp, Salmonella enterica
atgaatgctcctatacgtatggtaatagactggaacgcgaagccagacgatggatggattttttatgatgaagatggcaatcgtgttgggcctttgcatagatttttaactgatgaccgtattcgaatggtaatagattgggacgcgaagccttccaatacagaagtaagtcttgatgaaaatggagaggtaatagaatggacagatgaaaatggcattaggtatgatgcattcggtaatgctatccccaccaagatattatgcgcaattgaaaaagaagaaataaaacttcaatctgaaaagcggttacgccctataattgagaatttatttaatcgaaaacaagtgggattcctttatggtgaatcaaatacaggtaaatcatttgcggcactatccttattaaaccgtgttgcacaaggtaggccgtggtcaggcttgcgcgttgctaaagaatgccacgccttttattttgacggtgaaacaggcgtggaagttaaagacaggaataccgcatggagtaaaaaatttaacggcggaattaaaaatgaaaggatgcatattctatcaccgcaaataaatctttttgatgtgggtgttcaaaacataattattagcgacataaatagcatcaccaataacaaaggaggcatcatttgctttgatacactttcttcttttctggcgtattacagcaaacaatgtattgatgggaaaaccactttagacatggataatccagatgaaaacgatgctattgcaatgcgcaaactggtttcaatattaaaaaggattgcggttgaaactaattcctttgtgcttatggttcaccacggcggcaaagatgcagctaaaggcatgaaaggcgcaattacattaaaaaatgactgcgatacggtaattaaattagcagttcatgacgatatgcaaattcaaaatagtgatcttgcattctcggtatcattaaccgtggaaaaaaaccgcagcgccgcaaagcttccagtaatgaaatttgatttatgcttagaagataacggtattacacaacaggaattacatgaaattgataatgaattatgtgattatcctgatgaaaatgaaaaaggctatcggataagcaaaaacacgaaaacattagtgtttattgataagccagaagcgattaatgatactggaaaaatcactcgaaaaaatagtgaattgaaagaagaagattatgtgtatatgcaacccagcgaacctaaaaatagttatcaggctgcacataattaccagcatcaaccaatgacacaacaacagcaacaggacaaaattgaaattaatcagagtgatggtgaagcgcgggtggttgctagtggcttcacaggagaagcgagagttaaaaataatgatagttatattatgtacacgaatacgcttaaaaaattaaaggatgcaccattacaaaaagagttatacgaaaagatttatggtgaaattagtgataacaagtatatcagtgctatcaatttagatatctttattaacaaggaagaaaaaacaataggcaaaaggaaagatgtgataaaaaaagcattaatcgaaatagtgaaaaaaaacgcaatcgtgattgataacaaaacaatatcactaccaaaaccgccaacaccaataatgacagatatttaa

SEQ ID NO: 403863 - DNA, 252 bp, Salmonella enterica
atgggccagaagttttttggcatgcacgaatccagccgccttaacatgtcttttaaatgttttggtgaatttaacataatatacattatgcgcactataatagcgaaaggcgaaaggcgaaaagcagcccccaagcgtgaatcagtcatacaaccagcgaccagccctggcagacgcaatgagcatacctatcgtgaactccggcacctgaggaatatcgtttttgcgaaacagattaagcaaatgctttag

SEQ ID NO: 403864 - DNA, 732 bp, Salmonella enterica
gtgaccgataccgcccatagcgaccagtttttctgctttttctaccgcttcttcgaaatctttcgcacggtacatcgccagagtcggagacagtttttcgtgtgcgaacggttcgctttcgtcaacgaccgtaacttcaccgatcagaatcttggtggtttctggtacggagaagcctgccagttcagcaattttgtaggctggctgaccgacgatagcggcgttcagagcgccatttttcaggataacgttttgaaccgctttcagctcctggccctgcagcatgtagccgccgtggctggcgaaacgttcgcgaacggcatcatagacggaatcaacaacgacaacagactgttcagaagcacagattacgccgttatcgaaggttttagacatcagaacagacgccacagcgcgtttgatatccgcggtttcatcaatgacaaccggggtgttgcctgcgcctacgccgatagcaggtttaccggagctgtatgctgctttaaccatgcctggaccacctgtcgcaaggatcaggttaatatccgggtggtgcatcagcgcattagacagttctacggaaggttgatcgatccagccaatcagatctttcggcgcgccggcagcgatagccgcttgcagaacgatgtctgccgctttgttggttgcttctttagcgcgcggatgcggagaaaagatgatggcgttacgggtcttcaggctaatcagtga

SEQ ID NO: 403865 - DNA, 492 bp, Salmonella enterica
atgctaactctgtctggttccaccacctgtgaaattagcatttccagtggtgaacattattcatcattcactggaagctgccttatggctactaccctcaccactgactacaatttgctttctgatccttgtaatactgacgccactcttaagatccccgttgatcacaacaagcatcagccagaaaattccggtccgataaaatccgttaaaaaagcgagatcgatacgaactcctgatactgttccaggctttagccactgcgaattttactcacgcgttgagggtcgctcggttcgtttgtgcggtgaatggatgccgcaggccgagtttattaacgggatgcccgttaaaattcgggtgatgaaagactgcatcgtgatcacaccgcaaaatacccgtgagctgtggggctgtattgaaggtatgagcgtcgcctacattaataaacagaaagttaaagcatggctgaaaacctttctggggcgctga

SEQ ID NO: 403866 - DNA, 450 bp, Salmonella enterica
atgtcttattttatacatgtgttactagataatggtgttgaaccagatctgaatataaatactcttaaggaaaaattaaatatgcagtacttaagagaatggaaaggtgataaaccttctatagtttttcgacgtgaaattctggggcctcgtaaaaattatgaccatttagagttaaaatggtcagattcatggcacctccggttgtattttgagacaacagaaatgaacgagagtgttgaaattgatgcctgctatatttcaggtcttgagaaagataaaaataaatcgaaattgattaaggaaatgaagcgtagagtggttatcttatccaaagatgaccctgataatgaacattctgattacatagtcgaacttatggctttttttgaaaatataccaggttccgttttttttgatccaaacaacaaaagaatactaaatagctag

SEQ ID NO: 403867 - DNA, 423 bp, Salmonella enterica
atgaaatatatctttcaggaaggcgaactggaattaacgggacgctggcaggataaaagtatgaatgtactcatgcccgttatgagtgaggttgcaggagctaatttagttatcacccgagatagcctaccagaagaagcagagttcagtgattatcttgccgtccagaagaaaaagtttcggcgcgaacttaccgacgttactttcacggaagagcgtttctgtcagcttgaaggtcgtccggcggaatattgggaatttagctggaaaatgaagggtacctccgtggcgcaaatcatgctggttgttcgcaatggtcgtcagatactgagccttgcatatactgctccagggggaatgccggaagataatcgacaggcaatgagaaatattctgttgaattttcgatttagtccaacataa

SEQ ID NO: 403868 - DNA, 1107 bp, Salmonella enterica
atgtatgcaagtctattatcttacaaaaacttaaagtttgcacatcaaggaagtgacttacggtctattactgagttttctctctattccgatagtcaaccaattggggcggttgatgatgattcagtttactgttttctgaatatgctacccaggataaccaaacaatccactgttgcatcttcaattacagtgcgcataaagtggtatagtaacttaaacaatatgattctttctagttctcaaagtcatacaaaggattatcatggtgggtggtataatgatgaaatagctgcgctttcaagtttattacttggtgtccgttttcatgctgggtcaattacgcgtctctatgattactacacaggtgatttcggaaggattcaagcggagagttcttttcctcctgttttagagtttaaacataacaaacccatagtacctaatgctatcaaagaaattgatataactaaccttaaagtacttaacaatttacatctcttaagtgaaaagaatttcaaccatttaattagagcagccagaagctatcaaaatgcattatggatctgcgagtcatctccaaatatgagttggctattgatggtgtcagccctagaatgtgcggccagtcaatgggcaaaatccaatgcgtctaaagaagaaagatttaaacattccaagcccgaattatatgaaaaattggataccaatgaatttagacatttaatccctattattgccaatgagtttaaagattcatttggagcgacaaagaagtttgtggatttttgcctctatttccttccagatgaacctcatgtgaggccaaaagcaggaagaattgattgggaaaaagaatcgttatcagcaatttttaaaaaaatatatagctaccgttctaaggcattacatggaggacaaccatttcctgagccgatgtgctcccatcctgaagtatgggatgggtatactgctgagcgagcgagagcatgttcaaccttaggtggaacatggttgaatgaagatgtgccaattaatttaaacacattcaactttatgacccattccattttgaataagtggtggcaatctttattaccaagttaa

SEQ ID NO: 403869 - DNA, 600 bp, Salmonella enterica
atgagtaaagactggcaaatattaaagaaatccctttcctatccattcgatgcgataagaaaaaacaaaagagagttttttatttggatcgtttttacagttgtttgtgggcaaatggggattattgcaaatataatcataagatattattcacattcaataccactagatcaatctatttacatagaaggttcatcagggagtttttacacattttccattgcattaatagcctctgcccttgggcctatgtttgtaactttttttagttcaaaacttgaatttaaaacaataaaaatcatatcaataatattattgataattttattacaattatcaggaataatatacgctgccacgcaatcaaaggatttaatcctaccaaattctaatgatttaacattcggtctaactcaacctataatttatgttatttctatagtcttagtaggctatacatttggcgtattaaaacttaacgctactgcacatacagatatagatgatgaaagttatatagaaaaagaagatgcaacagttatagatcagacaatggcaaccaatgaagtaactgatgatggtaaaggagttatgatatga

SEQ ID NO: 403870 - DNA, 1050 bp, Salmonella enterica
atgaagttgaaatatattgaagttaatcaaccaatcggtactttctatttaacatcaataagagccattgccttgctcgatatagttagagttgatcgtcgcagagatttcgagtttggtgtgcaaagggatatttcatcatcaagagtttcagaaatcgcaaagtacactagtgagccagatgcgacttttccaacgccgatcataatttccgtcgatgattcatccaatttaaaaatggatgatacctatttttactttgagtctgaagtggttataggtgatgttatcgatggtcagcacagattatggggaattaaaaattcctctaatgctaaactttttgatctacctgttgttttaatgtttggtcttactgatgaagaaaaagcctatgttttctcaattattaatagtaaacaaactcgtgtaaacccatcaattgtatatgatttattttcgcttgcagaacgcaggagtccccagaaaacatgccacgaaatcgcgagaggaataaacagtaatcctgattcccctttttataaaaagctaaaaatgcttggaaaaaaggaaataaaccaagataatgcatcattatcacaaagcactttcattaaatatcttatccaacatatttcaaaaaaacctgatgatgatgcaagaatgttaaaaatggatctgccattaacaccaaatgatcagtgtatattccgcgattattttatcgaagagaatgacgctgtaattcaaaaaataatattgaattattttaatgctattagcgatgtctatccagttgagtggaatacaccaagggaatattatttaagtaaactcacagggtatgcagcattaatgaaagccttccctgtaatatattcaaagggcattaaagaaaaaacattgaattatgactttatgctgagtgaagtaagtaaaataaaaagaaatcttgcagcgcgaggtattaattttaaagcgggtgaatttggcactaatgaatctgaaataaataagcttgcgaaaaatatcattgattcatgtagttaa

SEQ ID NO: 403871 - DNA, 552 bp, Salmonella enterica
gtggctactgcattaatagttattgatatgcaaaattttgtgacagacagaataaatcagggtgtggaaatgttccctgataatgcgataagcaatatgtatgcgattcttgaaatattcaggaactgcgcgagtccggtgatacatatacggcatcattcaaccgatgaaggatcattattgcactgtagctcccctctttctcagcctgtagccggatttgaagaaaaatacggcgagcctgtttttgtaaaaaacacctcatcagcattcagctcaaccgggttgttcacgtatttaaaaaaaaaccagatctcggcgtgtattgttatcggcgccgttgccggattttgcatcacctccacggtcagagccgggtctgatgcaggtcttaacatgacggtgattcaggatgctgttattagttttgcacttgacggtggtgagcctggtgcaaagaacattctggatgtcacgcttgcgcttctggctgctgattttgcttccgtgataacaacaaaagagttaagtgaacggctattaagcaaataa

SEQ ID NO: 403872 - DNA, 336 bp, Salmonella enterica
atgaaactcaatgctcgccagatagagaccgcaaagccgaaagagaaagcctataaaatggctgatggaggcggcttgtatcttgaagtctccccaaaaggttccaagtattggcgcatgaaatatcgccgcccatctgacaaaaaggaagatcggctcgcttttggtgtatacccgacgatcactttggctgaggctcggggtaagcgcgatgcagcaaagaaattgttgtctcagggcattgaccccaaagctgagcaaaagggggcacaagctgaaattgaggggcatatttatttgaaactatcgcaaggcaatgtcacgcaagtaacctaa

SEQ ID NO: 403873 - DNA, 1671 bp, Salmonella enterica
atggacaatggttacgatgaggattacatatctggtctgactgatcgtgttttcttaatcaagagacaacttgaagctggtaaaatgcatatcgctagccatcttgtggatggatttaaagaaagtttcgataaaattaggttaaggcctgatggaaaagttgacccaactaccgttgatggtcgcatcagagcgatgggtgcagcagtaaatcatttttttgaacgtaatgaaattaagaaaaagttcaatatagttgactttcaagaagcgtattttaagattctattcagcaatttctatcaattttatgatgactttattaaaagtaaggctcaaccgtatcaagtagctcatttcatttctgaacaaagtgatttcgtagatcatctagatcagatttttccagagttgctttctgatgttaaggagttttgggagacagttcatgaaattggtgaaattcatctccaagatggtgaacagttaaaagcaaattttgcgggtgatcttttccctgcatatacagaaaatgcagtatcttgcactggtctctatattgatacaataatattaccgtgtcctatattgagagtagggaaaatacatggatttactaataaaaaacacttttgtttcttattaatgaaacacgttttaacatgcatgacttacagaaatttagcattggaggatattgaacctgctatagtactagttcttcctgataaacgtgattttagtagtgatgataacgagggactgcatgagcgcgcaacgccttttgttcttgcccatgctcaatatctatatggcagaagttttgagagtaaggatgaattgtttgattttagttcatcattaactgatgttgataaagtttttagagaattaaaacgccctgaaagattaatttttgataccgagtggggacctggcggacgagcgcaactagaacggcatttagccgatcctgagaaaatgaaatcaccagttcataatggtaatccaggaattgaggtgatgttcacatgcactggtcgcatgccacaggcacttgcagcaagaataaatgctcaagattttagaagtacgccatatattaatgcagaaacctcttggctttattacacttggttgatggaatatgaagctcttgactttaatattgataatgaaaatttaaaagagttacatatggtcaatgctttatccaaagggatgcaaggcggtttttcttggttaggagatatccctttgaataacatcctagaaataaggcgtaacggattaatgccggaaatacgaaatattttatcaatcggtatttctgagataattagtgcatctcctcgtgattataatgcttcttcacaaagggtaattgataatgtggatagggcatttattcaacatcaacgtttccttgaaaaaattagaaaggaaaaactaagaattttaggggtggaagttgcaccatttatagttaatggtgctttcggtattgcttcagcattaatcaacaaacctgaattagccttggctagttttacacttgggacattgggtttgccaactctaaaagatattagaactagttttaaaaatagagaggaaaaactagccaattataaaagaacagctacaggcttgatgtttagaaaaaaataa

SEQ ID NO: 403874 - DNA, 1026 bp, Salmonella enterica
atggataatcaggacaaaatttctgaccgtgaggttactgcaacggcagagccgcagtcctctgcagaatgtttcacctttggcgatcccattccagtactggaccggcgcgaactgctggactatgtggaatgcgtgcaaatggatcgctggtatgagccgccggtgagttttgcagggttggcacgtacctaccgcgcagccgtacatcacagttcaccaattgccgttaagcgcgacattctcagcagtacctatatcccgcatcgcctgctcagccagcagtctttcaaccgtttcgttcaggattatctggtgtttggtaatgcctatctggaaaagcgcactaaccggctgggtggtatcctctcactggagccagcactggcaaagtatacccggcgcggtgttaacctagaatcctactggtttgtgaactacagcctgacgacgcagccttatgagttcaccagaggcaatatttttcacctgatggagccggatattaaccaggagatttacgggctgcccggttatctctctgccattccgtcaaccttgctcaacgagtccgcaacgctgttccgccggaagtattacatcaacggtagtcatgcgggtttcatcatgtacatgacagacgcggcgcagaatcaggaggacgtgaacaacatccgcaaggcaatgaaaagtgccaaagggccgggaaactttcgcaatctttttatgtactcgcccaatggtaaaaaggacggcatccagatcatcccgctgtcagaggtggcggcaaaagatgagtttatgaatatcaagaatgtgagtcgtgatgacatgatggcagcgcaccgcgtgccaccgcagatgatgggtatcatacctaacaacactggtggttttggcgatgtggaaaaagcaagtcgtgtgtttgttcgtaatgaattactccccctccaaaaacgttgtgaagagttgaatgaatggctaaatgaagaggtaataaaatttaggccatacttattagattaa

SEQ ID NO: 403875 - DNA, 645 bp, Salmonella enterica
atgcggatatggctgacgcgcaaaaagcaaaacaccacaccatccactggcgaaccagatgccacggagggatggctgcatcctgaatccgtacaaacattactggcagtcccgtcgcgccagcagcttatccagtttattcgccagagcaccgcgcttcccgcctcactgtttgaacgcttctggctgataccaatccaccgcttcgcagaactggcgcagttgttcccggcctcggaaaaccatcaccacgcccacgcaggcggtttactcgatcacagcctcgaagctgcctgttatgccgcacggctgcggcagagttatcttttcccccctgatacagcgccggaagatcaggctgctcagtccgaacgctggacaacagtcatcatctacgccgcgctgttgcacgatctgggtaaactcatcaccgacatcgaagtggaagatattagtgggcaacgctggtttccatggcatggcccgctgacccagccttatcggttccgctatctgccgcaacgtgattacctgcgccatccggctgcgtcagttcttctgcttacccaacttctccccccggaaagcctcgactggctcgccgccgacggccgctgcgttatccaccctgctgcactgccttaa

SEQ ID NO: 403876 - DNA, 933 bp, Salmonella enterica
atgatctccggtgaaaatgtaaccacatcatcagtattacaaaaatataaagaatcatatttccctgaaaaaacctcgccgatcgatatatcaaataaagtaaaattcatgagaatatgtgtagaaagactacagtatatatctgaaggggaatggccatacgatgaatcacatgtaacaacaaattggcataaaggaaagcttgatctattaattagaaaactaaaacatacacatgctatgccagtattattatccgcaagctttactcatgaaaaagaatttcaaaacctcgttaacgaaacatgcaagttttttatccgttataaagcaataagcgctttgcatgcttctattttttcatccctttatccagcacttgcacaagaaatacatcaattaaaagacagatttacaattaaattagtatatccaaaattcaatgaaatattgtgttctaaagaccctgacaataattacttcattactggcataagaaatctcagatatcaaagaaaaggcgataacaaactattgaaatgcttattggttactattgaagagaattggcaatggctaaactcaggtagtacatcttgtgaaagtaggttaaaactagaagataaaactcgagttttcgactttaataataccacattggaacacctatatccttacagtgtcggagaaaatgaacgcgaagaaaacgttgaaaaaataaaaaatacaattggtaatatagttattcttgatatgaccaggaatacaaaaaatgacgataaatccttctctcaaaaaaaggataacttcataaacacaggaataggtatccatcaatacattttagaaaaaacggagtggaatgagcaagacatcaatgaattaactgaacggtatatcggatatgcttgcaaagttttttcattcaaataa

SEQ ID NO: 403877 - DNA, 165 bp, Salmonella enterica; identical to SEQ ID NO: 376393

SEQ ID NO: 403878 - DNA, 372 bp, Salmonella enterica
atgaacaaaatagagtttataacattaatgtcttttccaatggagtggttagaccttgatatgtatcctgatttattgtttttaaaacaacttaatggatatgaggttggtcatgaggatagttcggaacatgatcggaatggcgcgtttcattggtggttaaagaggaaaccatctaaagatgaattgatgaaattagttaggttggcacttattgatcccgaccaatttttatcggaagatatcattcgatatataaaaagtcatcacactttgatcgtgatgtcgatgctcttatcgaaaacttacgtgatgaaaaaacgcagcaaacgaggagagctagtagaggcttgcatcgtgaccagtaggtaa

SEQ ID NO: 403879 - DNA, 321 bp, Salmonella enterica
atgaaacctcgttatccatttttcatacttgccatagtattgtgccctatgacaggtgtttttgccgcccccctcaccgagcgcgaagagctagccctgtccctcagccagcttagccaaatcgaagcctcgctccaccgtgcccaacaaaacgccagaaccagcatcaacgagcgctactacttcgattatccgcgcatccacggcgatatcaccactctgcgtagcgggattgaacattacctcacgcccgctcgcgcacagccgcgagatacagcgacgttggtcgggcaataccgtgaggagaaaaccacgccatga

SEQ ID NO: 403880 - DNA, 459 bp, Salmonella enterica
gtggaaaagtataattcgtgcattaatcataaccctgactcccatatcttccttacggtcatttcaggcgtactcatttttgttatcggtcaaataatactcaaatggtttatggaacctttgctgtccatgaaagaacaactagggaaaacatctgcactattcctccgagaacaatcggttataaccaactgctctgataaagatgatgttgttaatcaacttaaagaatgtgcctccagtttattagcgaagaagagtgctataacattgtattgcctattttcatgcattagacttgtaccatcagcaaaaaatgtccagaacgcaacccaatcaataaaccttattgcaggattaattcaacaaaatgataagaaaggaaatgcagcaatggatattcatgctgaaatggagaaaatagccaagtatttaaaaatagttgtaaaatatggttaa

SEQ ID NO: 403881 - DNA, 1116 bp, Salmonella enterica
atggatgtatatgtttatgcagatgagtctggacattccgggaaaaacatctttgacgaaagatctcctacatattttcaaggttccattatctcattaggtgatgtagatccaattattggagaggttgttcaacaccattgtcaaaaattaaatgtaccacgactccattcaaatgaacaccaagagcatgttgtagctgaaatttgcaacgatttattagatgctcttgacagcattaaatggcaattctttgtctgtgtaatacataaaccatatttatcaccaacaaaatttgtcgacctttttttcgatagctttgataaccctggaatcccacacctttggtataacacacaactatttagacatgctatgtgtttaggtgtagcggaactcatgtctgaaaatgattcaatattattctgggatggtttcttaagtgatgatatgccaaaaatgttgaatgtcgcatccaacatactttcagatatagagaaaatcaaagataaaagaatgaaggatgtcatgaccgagggcctacagtatgcaatcagccatccggatgaatttactttaatttgtaccgaagggaaaagtgcctacaaaggacaaacgcctaatatggttgccttctctagtctcatgtcaggaacacatgaattttgtaaaaaaaatgaggcatcagtcaaacaattaattcatgatagaagcgacgaatttcgaggaacaatgcgtgaatatcatcggatttttcataaaattgattacattgaggataatcttggtgggccaattctttttgaagaagcccaatatgagcttggtaaattcgatctaagaagctcagaggatcacccagctttacaagctgttgatgtgtttctctggatgattcagcgagatctcaagactgaagttgcacaaaatactttggaaagattacaagaaaacatgtgcgatttcgttatatctccagccatgtcagaatttatagttgaagctcgagcctttcaagtcaactccatgccaatttcagcagagcagctagaagctgggaaagaatttttcgctgagcaagaaaaaaaacgacaacaacgactgtctgataaatag

SEQ ID NO: 403882 - DNA, 684 bp, Salmonella enterica
atgtccgaacatgcgccaccgccgcctgcacgccgccccggactaattggctggctcgcattgttacccggcgtgctggttggcttttgcctcggcgcatggatgctggcaatagcgctggagtggctgggtgaggcgtttttctggcggaacacctgcgccagccacagtgaacaggtattgcaggccacatggcagtggtggcgaggttccgctggcgcaccagtgtggttagtagaagatctggcgcttgtcagcgatatgttgctgaaagggagcgcagtgctgattgcttcgctcaacgggcaacgtgggttgttctggacagagacggtcactacggtgatccactgcgcgttactgtctgcgggtaacgtcaccctaacctttttgctgcgactggcgattttgttgcaggctctgccgctgtttgcgctcaccattaccattggccttatcgacgggctggtaagacgcgacttacggcggttcggcgcaggccatgagtccgggtttgtttatcatcatgcaaggcgtatgatcggctctagtctggcggcaacggggctggtgtggctgacggtaccgatttttttggagccagagcatgtgttggtattcggagcactgatagttagtctgacagtatggtttactgctggaacatttaaaaagtatctatga

SEQ ID NO: 403883 - DNA, 123 bp, Salmonella enterica
atggctttcgaatggaaagaaattatcacacctgttgcgacgctgactgccgtttggctaggggtgagatttacactgcgtaatgaattgcgaaaaaaaaatggaatgaccatatcccggtag

SEQ ID NO: 403884 - DNA, 900 bp, Salmonella enterica
atgacctttttgaaagaatatgtaattgtcagtggggcttccggctttattggtaagcatttactcgaagctctaaaaaaatcggggatttcagttgtcgcaatcactcgagatgtaataaaaaataatagtaatgcattagctaatgttagatggtgcagttgggataatatcgaattattagtcgaggagttatcaattgattctgcattaattggtatcattcatttggcaacagaatatgggcataaaacatcatctctcataaatattgaagatgcaaatgttataaaaccattaaagcttcttgatttggcaataaaatatcgggcggatatctttttaaatacagatagtttttttgccaagaaagattttaattatcaacatatgcgtccttatataattactaaaagacactttgatgaaattgggcattattatgctaatatgcatgacatttcatttgtaaacatgcgattagagcatgtatatgggcctggggatggtgaaaataaatttattccatacattatcgactgcttaaataaaaaacagagttgcgtgaaatgtacaacaggcgaacagataagagactttatttttgtagatgatgtggtaaatgcttatttaactatattagaaaatagaaaagaagtaccttcatatactgagtatcaagttggaactggtgctggggtaagtttgaaagattttctggtttatttgcaaaatactatgatgccaggttcatcgagtatatttgaatttggtgcgatagagcaaagagataatgaaataatgttctctgtagcaaataataaaaatttaaaagcaatgggctggaaaccaaatttcgattataaaaaaggaattgaagaactactgaaacggttatga

SEQ ID NO: 403885 - DNA, 495 bp, Salmonella enterica
atggcaggtacggtatggaatgatgttaatacagggcgtgaagttttctcgatgacacacctgcaccctcagctgcataaggttgaggtttctggggtactggttgagattgagattagcttcgggtttcatgtatttactgaccaaaaacaggtcggaaaggtaatgagtttcagaggggaaactagacatttctgccaagaaagatacgaaggaagtaagactatcgtgcagaggatactgtcagcgatagaaaatggagagtacataacggcctttatttccaagggacaagggcagcgatattaccaccttaaccatcatgatgacttcattctaatggagataagaaagcctcaaggtaaagataattgtcttcgaatacacgttgttacagcgtatacgatggatgaatggggggtggttaacaaaggacgcaatttgaagttcaggtatgttctggagcagaggttgcaggggaagaaaatcgtataa

SEQ ID NO: 403886 - DNA, 519 bp, Salmonella enterica; identical to SEQ ID NO: 232002

SEQ ID NO: 403887 - DNA, 438 bp, Salmonella enterica
atggaaaacgaaatagaaaacgaactgagaacactttattcagaaaagtattatagtacagattcaccatatgtatttggtgcatatgttgctgcagttaaaaagagattaaaagccgatcttatgattgctgttttatataaaatagcacaagaagaaaaaatagatctaacttaccatacatcattgaaactttgtaagctgtttatgtctcgcggaattctatctgataggttatttttacattttgctaatgttgaaaacaatgggaatggattaacaaaaagagaagaaaaaaggacggcgaaagataagatctctattgattatatttgcataaaaaataaatatcaaaaagatgttgaaagtaaactttcaagatttgatttattgtttgactatcataataaggcaataaaaaaatcttaccgaaaataa

SEQ ID NO: 403888 - DNA, 1173 bp, Salmonella enterica
atgaaagtaaacttaaccagacaccaaaaaggaatagctgatgcaaggttattgatggcacaagagcaagcaatgcaagctggttcgtttttgagtgtttatgtagataaaatgattaaagatgtaataaatcaagtaaaaatagatgcatctgaagagtcaaaagaacaatacaaaacattatacaaatcaatgatttctagtaacagggggaaaagcgaacagcaaatacttttgtcgtgcaacactcgtgcaagttttgacaaaacaagaacggcttttcgattttgtatggttgaacaaataaagcagctacgacgtgaagctgagaaatattctaaaaataaagactatcaaaaatcacaagagctaacagttgaagcatttaaactatctataaagtttgaagatgagtttttaagcgataagcgagttttattttctgacgtaaaatcaaagattggttatgataaaaaatcattaagtaaaagaaaaacggcaaaaaatgctccttcctctggtgatgttttaggtaatatgaaaccggctttttttaagcgtcattctgtttgtttttcaataataaataggttcggcataagaccttctgagatgcaaaaaggggtcaaactacaatttgaaaatggccgcatttttgctgttgttagaggtgctaaagttgctaaagacagggggcaacaggtaagagctataggatatgaacctgatttaaataatgcagctgataagcttttattggaggctatagaaaatagccccaataaggtttttgaatgcgttcaaacaaaaaaagattacaacgcattaaggaagcattttaataaataccataaaggcttttctttatattcttatcgtcatgcttttgccagcgatttaaaaaaatcaggtgctacacgtaggcaaatagctgaagctatggggcatagaaatactgtatcccaagagttctacggctattctaaacagggtaaaggtgatcgagagtttgtagctaaagcgagtaatgatattaaagtaaagccggatattaaagaatatataaagtctaaaagtgatgctggttctataggtagcaagatctcgcagtctaaaaaatcgactggtgcaaatttgcagagtgctcccagaacgtcaatcaaaccaagataa

SEQ ID NO: 403889 - DNA, 159 bp, Salmonella enterica
atgttgttcgtgtttatcattatacgagtaaagatggatataacggaattatggggtcaggcacaattcaaacaaaagatcccggcgctagaggaaaaggatcaattcagggaaaacctcaaggtgtatacgtcactacattatctcctgaggaattaa

SEQ ID NO: 403890 - DNA, 183 bp, Salmonella enterica
atgggattgactaaagaaaagagcacccattttatttcattcgaaattgatagttctaaggttaagagagtagatagacagaatggatatctaaggctctatatagaagaagacatagtgctcagagatgtgaataacaagctccgaggtgatgttaaacatggtgcttctggatgcaaatag

SEQ ID NO: 403891 - DNA, 651 bp, Salmonella enterica
gtggccgtattcgcctttcagaatgccggccgtttctttggcaatggtcttgtagcgttcgcccgtcagcacgttgagcaccgcctgggtgccgacaatctgcgaggtgggggtcaccagcgggataaagccgaggtcctcgcgcacgcgggggatttccgccagcacctggtcgagtttgtccgccgcgttctgctgcttcagctggctttcgaggttggtgagcatcccgcccggtacctgcgccaccagaatgcggctgtcgtagcccttcagctggccttcaaaggcgtgatactttttgcgcacctcgcggaagtaggcggcgatattttccagcttcaggatatccagcccggtgtcgtgctcagtacctgccaacgtcgccaccagcgcttcggtggccgggtggccgtaggtggcgctcatggaggaaatcgccgtgtccacgccgtcgacgcccgcttcaatggctttcagcagcgtcatctccgccatgccggtggtggcatgacagtgcaggtgcaggcgtacctcaaaacgttttttgatttcgctgaccagctcatacgccgccatcggtgtaagaatgccggacatatccttgatggcaatcgagtcaacgccggtttccagcagttgctccgttaa

SEQ ID NO: 403892 - DNA, 243 bp, Salmonella enterica; identical to SEQ ID NO: 375752

SEQ ID NO: 403893 - DNA, 1233 bp, Salmonella enterica
atgtactgcaatgaattaaaagaatttgcgcaagagcaggaacaaaaacttatcagtgcgcttgctgataccagagagcacccgtcccccgatggtgaaacaagaagccgggataattatcaacgggattacgcgcgtattctgtattcatcatcatttcgcaggctgcagggaaagatgcaactttttgaaattgatcctgaaaaattcaacagaaacagattaacgcacagtcttgaggttgctcagatcgcccgaagtatcgcgtcagacctcaaactgattaacccggtggtggttgaactggcagcgctggcgcatgacatcggaaatcctcctttcggtcattccggtgaaaaactgcttaatgaactgtctgaagaaatcggcggctatgaaggtaatgcacaggcgctacgtatcctgagaaaactggagaagaaattttcatactgcaacggattaaatctgactcaccgtagtttactttcggttgttaagtatcccatcccccgcgctgcagctactgccggcaagttcatttatgatgatgattactatttttacattaacctgcttgctgaaaatcagctcgatctgaatcccggagagaaaacgattgatgcgcagataatggatctcgcggatgagattgcctacgccgcgcatgacctggaagatgcccttagcaggaacatggtcacgattgaagatattgaatatgagtttcagatttctgacgaattccggggagcgagggaacagttcagggaaatcgttactcagtcgagaaacaccgcttttcaggctaacttactgaaaacctcagaagaatttgccatcatattccgcaaggagttaacttcaaatattgtcaatcgcctcgttgcagatatttctgtagtaacgaacctgaatggttttcaggaactggggttcgggaaactgaatgcgttatccgaaggactcaaaaaacttctctttaaagtcatcatgcgaaaacgtaatatcctcacctatgagttcaggggaaataaaataatcagggatttatatgacttttacaatgaaggagagaattataaatttctgcctcctgaacttaaattcaccttaccccaaccagattcctgtatatttgaaatcagcaaaaaacgagcagtggttgactatatttcaggtatgatggatacatttgcagtcaaggaatgggaaactcactgtctgaagtaa

SEQ ID NO: 403894 - DNA, 867 bp, Salmonella enterica; identical to SEQ ID NO: 11541

SEQ ID NO: 403895 - DNA, 981 bp, Salmonella enterica; identical to SEQ ID NO: 19871

SEQ ID NO: 403896 - DNA, 945 bp, Salmonella enterica; identical to SEQ ID NO: 19872

SEQ ID NO: 403897 - DNA, 1083 bp, Salmonella enterica; identical to SEQ ID NO: 29000

SEQ ID NO: 403898 - DNA, 327 bp, Salmonella enterica
ttgttcattacctttcaaagcaagaagttaaggactatttgcgagagtatgcatgaggcaaatgagatctttggtgacaaagtggcatcaagactacgctcgcgactttccgatctttccgtgacagacaacatattactgttgcccgtaggttcgccggaggtctgctttgaggatggggaagagtgtattacaattaccattctcggtgatgtaaaaatgggatttgtctgtgggaatacagttcagcccaaaaatcaagataatacaattaactggtcccgagttagccggatacggttagtgttcataggtgacgtgaaatga

SEQ ID NO: 403899 - DNA, 264 bp, Salmonella enterica
atgaaaggtaaacatcaagacactaaagccctgtctgacgtgctagcggaaatgcaacggcaggatgccaaatggggggcagaccgtaatcaagatccttttatctggggagcgattctcggagaagaggtgggagaatttcatcaggctgtcctccatgatcgttttggtggtaaagcagccggtaccagtagggaggaagcagtacaaattgctgctgttgcactgcaaatcatcgaatattatgatcgcgtaatagattga

SEQ ID NO: 403900 - DNA, 543 bp, Salmonella enterica
atgaccaattcagcacaccagcgactggatatggcgggaaatggtggcccgggggttacaggcagtgaaaccatcgtcagggatgctgttgccaaatggcgtaaaggctggaacccaccagttactactgccgccagacttccttcagtgtcccgggtaagccgctggttgatgccctggataataatcaggggtgaagaaaattatgcttcccgatttattagtctgatgtgtgaaaaagaaccggcgctgaaaatagcgcagcaactagtacttgagttctaccgtattctgaaaaccccaaataaatcaaatctaagcagttggttcactcgagtccacgaaaacggttcagcagaacttcggcgcgtggctgcggggatggaagctgatgctgcggctatatgtgaggcaaccagcagccgctggagtaacggtgttgtcgaaggtcatgtaaatcgcctgaagatgctgaaacgtctgatgtatggtcgagccggatttgaactacttaggcagagggtaatgagtccactggcatga

SEQ ID NO: 403901 - DNA, 1143 bp, Salmonella enterica; identical to SEQ ID NO: 19877

SEQ ID NO: 403902 - DNA, 768 bp, Salmonella enterica
atgaaattaactaaacttgtacttgaaaatttcagatctgttagagagcggcaggaaattgattttgcatctgtaacattactattggggccaaacagcgcgggcaagactactattttaattgcattattttatcttcaacaaatattagaccgtgagcagtgtgatcctatatatttagaagctatggggaacaggcgcatagatggatttagatctctagtccataatggggatctgaataatgtaattactattggtatcggtttcgatcctgaacaaacaataggtgtagaatataaaacatatttagaagaacttggtgatattttcgatattcattttataaaaatgaaagacattgcagatgaaactgaaaaggtttatgtagagtttaaaatcgcatggtcacaattgcacagagcagcatatataaagaactatgctgtttctataaataatgaatttattggagagctaagtaatgatgagtatactaaatcatctttagtaaatagattgaactttactcatccgttgcttcttcctattgattataatttatggcttgaatctattgataaggaaggattagatacgattgccagtgaatttgaaatatctttaaatgacttaattcctggcttagaacgtaataaaagtggtgcaacagagcgagtaaaaactgttgattatatatttgaagaagataaagaaaaaccaatgtttcctgtttttttaaagacgaaaattggtgcgttaccctga

SEQ ID NO: 403903 - DNA, 270 bp, Salmonella enterica
atggaacgcgtctactcagaggttattccagacgccattccagaaaccccagccaccgatgctttcctggctgaagtccgggcgcagggggtggatgctgctatagaagctgcaaaaaatctggtggcccaagaatatgagtataaggatttcaaagcggcgcagagtgattgctgtatgtaccctggttcagacctggtagggaaggttgaaatgactgagtggttagttgactttgctgcccagcttcgcaaaggaggcaaccagtga

SEQ ID NO: 403904 - DNA, 483 bp, Salmonella enterica; identical to SEQ ID NO: 379699

SEQ ID NO: 403905 - DNA, 528 bp, Salmonella enterica; identical to SEQ ID NO: 381168

SEQ ID NO: 403906 - DNA, 234 bp, Salmonella enterica; identical to SEQ ID NO: 381169

SEQ ID NO: 403907 - DNA, 2049 bp, Salmonella enterica; identical to SEQ ID NO: 381170

SEQ ID NO: 403908 - DNA, 435 bp, Salmonella enterica
atgaaaactgaactgaccctgaatgccctgcagtccatgaacgcacaggaatatgaagatatccgtgctgcgggaagcgatatgcgccgtaatctcactcacgaggtgatgcgtgaagtggacgcaccggctaactggatgatgaatggcgagtatggcagtgagttcgggggctttttccccgtccaggttcgtttcacgccagcccacgaacgtttccacctggcattatgttcgccgggagacgtctctcagctctggatgctggttctggtgaattgtggtggacagcctttcgccgtcgttcaggtgcaacatatcttcacgcctgtcgctatcagtcacacgctggcgcttgccgcgacacttgatgcgcaggggtacagtgttaacgacatcatccatatcctgatggcagaaggaggtcaggcatga

SEQ ID NO: 403909 - DNA, 597 bp, Salmonella enterica; identical to SEQ ID NO: 381173

SEQ ID NO: 403910 - DNA, 1185 bp, Salmonella enterica; identical to SEQ ID NO: 376344

SEQ ID NO: 403911 - DNA, 924 bp, Salmonella enterica
atgtgtatccaccttaacttaatgatttttaccaaaatcattaggggattcatcagtgcgttacctcaactgggaagaactgttgatacaaatttgaaagtttttgatatatccgagccagttgagtattttaatcgagatataatcaccagagtgctaacgcaagtttttacttctccgttagataaattaaataattatttaaaggctagcgtatctattggaccgttaagaattatacctgattcttcatttacgccaaatccttatccagaacaaaatggatggtttgatggtacatcagcatgggataagctgtgtttatctcaacaaaatgatagtgatttgattaaaaaagtaagtgattggttttccaatagagataaactaaacactaattataatatatttagtggaggagaatttgatataaaaacctcccctcaacttttaggtctgaaagataatgtttacttctgtaaaatagattcaagccaaatgttatttccaaatcaagtcggtgtcggattaactcagatagcacctcttattattgcagccaatatagttcaggatggattaattgctatagagcagcctgagctacatattcatcccgctttacaactcgctgtaggtgatctgtttacccaatatccccttgatgttaaaagacctatgtttttagtcgaaacacatagtgagcacattttgcttcgaattttaaaaagaattagacaaacaacggacaatgaattacctgaatcaaattacccagtaaaacctgattttatatcagtgatcgttttcgaggataataatggttcgactgttactaggaaaatagatattactgatgatggtgacttcaaacaaaaatggcccaaaggtttcttcgaagaaagaaggggagagcttttttaa

SEQ ID NO: 403912 - DNA, 675 bp, Salmonella enterica
atgtttaatataattagagatgttgaagccccggaatgtctttcgcacggaatttataacgacccgtcagtgactgacgcattaaaaaaaatatttcatgggaaatgctatttatgtgaacagtcgagaatcagcgatccagaaattgagcacttcattccacatgaaggagatgcttttttaaaatatgactggaataatttattctactcatgcagtcgatgtaatagcattaaaagcaacaggcatgtaaatttattagattgttctgatccaaccattgacatctcaatggaaatagttcatttagctccatctttaacatcagaagacgtcactattcgtccatcaaccgaagataatattaatgaaaagacattaaataccataagattattgaaggaatgctataactcaaagtcaactggcctcaggggtataaccagagaaaatcttttagagaaccttttgaaaaactacactaactttcttctgtcaagacaaaccctaataaaccttgaaagtacagaagatgaaattgactacgcaaaagcaagaatgaaagccatgtgtaaaattgccttccctttttcagtattctggaaatggcatattcgattagataattttttgctcgaacaataccctaacttatttgaagatctaggcatctaa

SEQ ID NO: 403913 - DNA, 1233 bp, Salmonella enterica
atgcaacatgctattgataaaatttatgctgttaaaaacaacaacccatcgataccatttattgttaatttagaaggcaaaaatcttatcatcactggaaataacggtagtgggaaaacagtttttctaagaaaaatatttgattttttaaatcagagtatagtaaaaactggaaacgatcatcatgtagaatatatcaagtccgaactattaagaatggaggaacgattatctagagttaaccctggtgatgatcattacgagtatcgaaaaaaccaagttgctgaactacaagaaaaactgaacagcagaaattatttcaacattacctttagagatgaaaattcattaaaagttaattatcatcaaaaaaaatcaataatacgattttatgaagccacaaggcaagcaattatatccagtgatggaagaataacaagtttagaaactcttactgatgagtataaatctcacggacctcaagaaaactcaggaatcttctttgaaagatatttagtaacaacatggaattatgctttactccaaaaggggttaaacaaaatagaagaagcaagcaaagctgaaaagtggattgaacgaataatagaagatttgaaacagttatttgaagaccccacattaactcttgaatttgatattgaatcactacgcatcaatattaaacaagagggtaaagaaaaatatcggctagaccaactttcttcaggtttttcatccattctttcaatttatgctgacttattggttagagttgaactgggcaagatagaaagagacgaaatatcaggtatagttttagtcgatgaaattgatgcgcatctccacgttactctacagaaaaaagtgtttagcttttttaaaagctcatttccaaacattcaattcataatttccacccactctccattcgttgtacagtcagtttctgacgctataattttcaacttaacaacccttgaacagatggaggatttatctttatattcatacacctcaatcataaaagggttgctgggtgaaagaagctcatccagtatcttactggaaaaaattgaagagttatcctctctgatgtctggtgaaaattttaacgacgcagattatatagagataatgagcgatttagagccttttattcaagatatggatgcaagatcacaagccataattctttctgcaaaaaataaatttattgaaaaacagcagggatag

SEQ ID NO: 403914 - DNA, 411 bp, Salmonella enterica
atgagcgattattattacagctttaaagaaaaaggttttttctggcaaccggataccgaatccgataattaccctgacgatttaattcccctgacagatgagtattatcgcgagctgatgcagggccaggtggatggaaaatatatcgagcacaggaaaggcggcccggtactggttgagcatcgcgaatatacacctgaagagctggttgcacaggctgaagccagaaaagcggaacttcttgctgaagctgagtcagttattgcgccactggcgctggcggtaaaactgaaaattgccacagatgaagaagttaaacggctggaagcatgggaactttatagcgtaatggtaaaccgtgtggatacctcaaatcctgcctggccggagaaaccagccagtagtttataa

SEQ ID NO: 403915 - DNA, 174 bp, Salmonella enterica
atgagcgtgggtgatagtgattttaaaagaaaagcagagatgagattaaatagctttatctctaaagcgggcattatggtaatggccactcacgatgatgaactggctaaatctgtatgtaataagttcatcaggcttgagcacggtgagatagttagcaaaggcggattttaa

SEQ ID NO: 403916 - DNA, 243 bp, Salmonella enterica; identical to SEQ ID NO: 375752

SEQ ID NO: 403917 - DNA, 807 bp, Salmonella enterica
atgacctttttgaaagaatatgtaataaaaaataatagtaatgcattagctaatgttagatggtgcagttgggataatatcgaattattagtcgaggagttatcaattgattctgcattaattggtatcattcatttggcaacagaatatgggcataaaacatcatctctcataaatattgaagatgcaaatgttataaaaccattaaagcttcttgatttggcaataaaatatcgggcggatatctttttaaatacagatagtttttttgccaagaaagattttaattatcaacatatgcggccttatataattactaaaagacactttgatgaaattgggcattattatgctaatatgcatgacatttcatttgtaaacatgcgattagagcatgtatatgggcctggggatggtgaaaataaatttattccatacattatcgactgcttaaataaaaaacagagttgcgtgaaatgtacaacaggcgaacagataagagactttatttttgtagatgatgtggtaaatgcttatttaactatattagaaaatagaaaagaagtaccttcatatactgagtatcaagttggaactggtgctggggtaagtttgaaagattttctggtttatttgcaaaatactatgatgccaggttcatcgagtatatttgaatttggtgcgatagagcaaagagataatgaaataatgttctctgtagcaaataataaaaatttaaaagcaatgggctggaaaccaaatttcgattataaaaaaggaattgaagaactactgaaacggttatga

SEQ ID NO: 403918 - DNA, 243 bp, Salmonella enterica; identical to SEQ ID NO: 375752

SEQ ID NO: 403919 - DNA, 966 bp, Salmonella enterica
gtgcaacaaaaatataaggtcagcgatacggctgcaactgttacaggatatgccgatactacgattgctttagacaatagtacttttaaagcctcggctactggtcttggtggtactgaccagaaaattgatggcgatttaaaatttgatgatacgactggaaaatattacgccaaagttaccgttacggggggaactggtaaagatggctattatgaagtttccgttgataagacgaacggtgaggtgactcttgctggcggtgcgacttccccgcttacaggtggactacctgcgacagcaactgaggatgtgaaaaatgtacaagttgcaaatgctgatttgacagaggctaaagccgcattgacagcagcaggtgttaccggcacagcatctgttgttaagatgtcttatactgataataacggtaaaactattgatggtggtttagcagttaaggtaggcgatgattactattctgcaactcaaaataaagatggttccataagtattaatactacgaaatacactgcagatgacggtacatccaaaactgcactaaacaaactgggtggcgcagacggcaaaaccgaagttgtttctattggtggtaaaacttacgctgcaagtaaagccgaaggtcacaactttaaagcacagcctgatctggcggaagcggctgctacaaccaccgaaaacccgctgcagaaaattgatgctgctttggcacaggttgacacgttacgttctgacctgggtgcggtacagaaccgtttcaactccgctattaccaacctgggcaacaccgtaaacaacctgacttctgcccgtagccgtatcgaagattccgactacgcgaccgaagtttccaacatgtctcgcgcgcagattctgcagcaggccggtacctccgttctggcgcaggcgaaccaggttccgcaaaacgtcctctctttactgcgttaa

SEQ ID NO: 403920 - DNA, 444 bp, Salmonella enterica; identical to SEQ ID NO: 22186

SEQ ID NO: 403921 - DNA, 1395 bp, Salmonella enterica
atggcagaacaagataaaatgtcccccgacgcgtctcctggcgtcgcaaacaaaactggtgtacgccgcgttaataaaagaccaatgtacattgctattggtggcttcgctttattctgcattctcgtggcgtacattgccaataaacgagccaaccaaggcatgtcaaatacggcagaaacaactattcagcgtgggagcagccgagatacctcggcaatggcaatggacgttatgggaggaagtacctccggcattattgaagccccaacagcaccgtcagaaattccgacacaggataataaaacccaacagagcacgaattatacatcggtccccattgttccagtagctgatccagatcagccccccgttccgccacaatcggtaacgtcacggtcaaacgatccagaagcagaccagattcgccgcaataaaatgcgtgattttattgaagctgtaaaagcaaaaacagaagtcaatttgcctaaccaactaggacgctcgagtactacaggtaatacaccacaaacccgcgatgaaatgctgcaagaaattgctaacgttcgccgtcagatggaacagaacaacgctggcgatgcaactgcaagttacgacgctcaggttcagagaatccgggcttcaatgaatggcgtcacagatagcaatagcgatacaggtatgcaattggcatcagtgggtggcgtatccgtttctcataatgacatcaaccagttcggtaagaaagggcagggtgacaggtggttactggatgaacaaatttcagcaccacatagccaatacgaacttcgtgcaggttgggtcattcctggcgtcatgattagtggcattaactcggatcttccagggcagattattggtcaggttgctcaggacgtttatgactcagcaacaggcaaataccttcttattcctcatggaactcgtgtgataggtacatattcaagtgatattacctatggtcaggaaggggtcatgattgcctggcaacgtctagtgttcccagatggaaaagctcttgatttaggttccatgccgggagcagacatggccggttactctggtttccgagatcaggttaataaccattacttccgcatttttggcaatgccttactgctatctggtatcaccgcgacaattgcttattctcaggatcgtaaccaaaacaataacaactcgaatcaagctccgaacatgagcagtgaaatgagtgcagcgctgggtcaggtattcggccaagctattgcgcaggttgtacaaaaaaacctgaatatctcacctacgctcgaaattcgaccgggttatcgcttcaatataatggttactaaagacttagcattcacaaagccttaccaatcctttgattactaa

SEQ ID NO: 403922 - DNA, 783 bp, Salmonella enterica
atgaatacacgtttcgttttagccgctaaaaaagcgttactagcttccttcgtggcgtcaatcatggccctacctgcgaaagctggtattcctgttattgatgctactaatgtggtgcagaccacaatcagcgctgtcaataacgttcaggctgtggctaaacagatccaacagtatcagacgcagttgcaacaatatgaaaacatgctgagaaacacagtcgcacctgcagcctatatatgggatcaggccaattcaactatcaacaaattattgcaggcacaggacactcttaattactacaaaaatcaggccgggagtcttgactcatatctaaaacgttatcaggacattaattactaccgttcatcgccatgctttaacagtaatgttgaatgcactgcagatgaaattagcgcactacgtaaagctgaacaaaataactctgaggctcgtaaaaaggccaatgacgccgtttttaaggttctcgatgaacagcaagaaacactgcaaagagatgctgataaccttgctgacttacaaactcaagtaactggagcacaggggcaaatggaagctattcaggccgctaaccagcttgccagtgcacaaacaaaccagttactgcaaatccgctcgcttctagttgcccagcaaaacgctgcaactacactggcacaggctcaggccgataaagaagctcagcaagcagcagcatcagagcagttacgtaatggagacaacatctcaacatcatcatccaaaaactggtccttccagtaa

SEQ ID NO: 403923 - DNA, 201 bp, Salmonella enterica
atgaaactgaaattattatctgcaattgcgttagtcagcacattcttaattacagggtgtgacggagaggacaagacagattgcaagaaagatccaacagcgaagggatgcccacactatagtggtaatatcacccattcagaaaataaaagctgggatatgaataaggaagaaaacagtttttataaagaggacaaataa

SEQ ID NO: 403924 - DNA, 1554 bp, Salmonella enterica
atgctctcggcattaaatagggagaatataaaacaattctctttcttaatactggtaatttttttattttcctattcatcgtctgcatctgcagcgatggatagtaatgtcatggacgaagtgttgagtaaatatcaggtcgctgcttctgcatggagcagcgtcatgatcaaatatgcaacatggctgttttggtctttagcattgattagtatggtatggaccttcggcatgatagttatgcaaggcgatagtattagtacagctctagccgaaattgtccgtttttttgttgtgattggtttcttttggtatttactatccaatggacctgctatctcaatggcaatcatcaaatcaatgtggcaaatcggtgctgaggccataggaaagaatgccgctttcactccgggaggtgttacacaaatcggttttgatattttctttaaggtacttgatcaatcatcagtctggtctcctgtagatagtacggctggtattatacttggaataattatcctcggcatacttgctatcgttggtgtaaatctcttacttcttttcatctcagcttgggtgcttgtttacggaggaatatttttccttgggttcggtggttcgcgctggacttcagatatggctatcaatttcttcaaaactgtcctctcaactggtgctcaacttatggggatggtccttattattggcataggtaaatctattcttgatagctattacacaagtatgagcaacgcaattagcctcaaagaaatgggagttatttttgttgtagcgttaactcttctttatttgagcaacaaaatcccggcagtaattgggggactcgctggaggtagcacaggtggaatcggttcatttggtgcgggtgctcttgtaggtgctgcagcttccgctgcggctattgcagcaactggtggtgctttagctgcagcaggtgctgcaaatgcagccggaggtgcatcagcacttaaagcggcatttgaatcggcacaagcagcgatggccgaagagtctagtactggcggtaaaggcggttccggtggaggatttggcagtggggaggatacaggttctgtagatacttctggaggacaaccatcaggcggttccagtggttcgtctgcagagaacagtacaggtagctccagtggaggaagccagggctttgcttcatcattctcacgtgctggccgcatggcttcgcatatggcgaatagtttggctaacggcctggctgcacgcaatgcagccaagcatgactcaaaagtcagagcggcaagagacatcattgcacaaactccaggtggaaagcttgcttctcaaatccgttcgcaaactgttgaacgtcaatcgaacaacacagaagaatcttttggctacgggagcataacaacaagtaacaagttcaacggcgacagtcttggaggggaggagcaaacaacgactcaaacagaaaatactggttctatagatacacaaacatcacaaagtggtgatgaatacgaacaatttaaaaacaagtcaaagttctga

SEQ ID NO: 403925 - DNA, 774 bp, Salmonella enterica
atgccgtatttagatattccaccggctcaggttgaacgtgtagtttgctcaattactgcagcgataaaatatcaggttccggctaacatcatgttagccatagctgaaaaagagggtggtcgtcccggacttgagaataaaaaccgtaactcaaacggcacatatgatataggccgtatgcagtttaatacggtttatttaaaggatctggaaaaatacggcattacagaagaagatgtagcacagccaggctgttattcgtatgatttggctgcgtggcgtatacgcggccatatcaaaaatgataagggagatatctggacaaaagcagcaaattatcattcaaaaacgcctcaatttaacaaggtatatcgtgctgacttgatcagaaaagcagctaaatggcagacctggattgaagctcgctttaatacgtttgacacaacgaaacctgcaggaacgactactccacagcctcaacaggcgacggttggagttacgccagaagaaagagcagggaaaaacattacactggttactaaccttgcacaaagcgacacactcgctacagaaccgcccaaaaatgacgggacaacagtaacaccgactacaccgaatcaacttatcggtttttccgcttctgtaaaacaaataccggttgaaagcgtcgtaaaagctgactatcagcagcccacacagcaactaccgggtcgttataacaaggctgcagctgatgcactggctgcagtatatggaaatatcaaactacgttga

SEQ ID NO: 403926 - DNA, 615 bp, Salmonella enterica
atgaagatagcgcgggtgtatttgcgggttagtacagatgaacaggatttgacccggcaaaatgaaattattgaaaatgccaggaataatggattctatgttgccggtatctataaagaaaaggcgtccggtgcaagagctgaccgcccggaactgcaacgtatgattgatgatctgcagctagacgaagtagttattgcagaacatatagatcgtatcagtcgtttaccgctcgatagtgcgctagcgttaataaactctataaaagagcggggcgcgaagctcgccattcccggtattgtggatcttaccgaactggcaaacgctcaatccggtgtcgcgaaggtcgttctggaatctgttcaggatatgttactcaaagttgccctacagttggcaagggatgagtatgaaaaccgtcgtaaacgccagaaagagggcattgagctggctaaacggcaaggtcggtatcaggggcgaactgcaaatctacggctccataaacgcatcattgagtatcgttcaaggaagacgagtattgcggaaacagcgaaactttgtgaatgtagcgttagtcttgtaaaagctgtatggtctaaacataaaaagaagtaa

SEQ ID NO: 403927 - DNA, 447 bp, Salmonella enterica
atgagagtaaaaatcagtggcttgcttgttttaatgatgacgttttcattggtcaatgttgcatatgcgaaaaatgaacagccttttagagtggttaacatgaatgatattgccgatgaaggaaatcaaaatgttaaatttattaataaaaaaggtaactgctactatttcggacaggcattattagtttccactcaaaatgcaaaaatatttggtgtggaaattcctgacgcaccgaaaagcaaagcgtggaattttattatcgaaagcaaagtctgtcagggtggcgaccgtgataagactccttactcagtgaagcaaacattatatttagcccctgatacgaaaaccattcagagaaagagtgattctgtattaatccctgcaggtactgagtttttcgttttcccatctgaggaagaaagaaaaaagtattttgataaatga

SEQ ID NO: 403928 - DNA, 480 bp, Salmonella enterica
atgggtactgatgtaaaagtggagtttgaggcgaagagaaacggtaagtgggagcaggtacatactcaatacgctatcgaacgcaattatttattcttcgcatggttagccaaccaacgaaatgaatatggcgtccagccaatagcaaaacacagaggtttgccgagagattatcgttacgaggatggtccgggggagcattcacaaagctggctgagtgccgatgagatcctcaatgcaccagaccaggaaattacaatgaagggctgtttggccgaagctgaatataaaaaatggaatggtgccggaaagccgtcagaggatgttatttatggaccagacctgtcaggtcgtcctggttatattgaagtatcctggacagtaaaaatcagagaagagttctctgattttctgaaaacagtagaagcgcttcgaaatgagtatggcgaagtgcgtatggtgtttgggtttgatagctga

SEQ ID NO: 403929 - DNA, 624 bp, Salmonella enterica
gtgctttatatgttgatctgcagtgttctgatgctgacgctggtaaaaatcatgtggcagtcgatgatcgcggcggcttctggagagcgccagttaatcaagaataatgccaaactgatatttacctgttttccagcaatttgctttattgtttcaccgtttattttgtctttcctttctggtgaaggtggttatacagttaaaacactttcacaactttcagttgcgtcacaatggttaggttttatttcatctctagcaatggtgatgatgttttcattttattccgaacgtggaaagaaattctggaatactggttgtgccgttctctcattaattctcgcatttatattttttgacagcgcaatgttcaatgccggtgagaatggttccgctaattcgatgtttattcagtccatttcccccgatgttaagtgtgaacgtggaatggttgtttttaaatacaaaaaaggtgatgaatctgaatggcgctgtcctacatcaattgcaatgatgcaggaatcaggaaagatgtttattccatggcctgattataaagatggtaaaagtcaagatttaactaaaggcattgataagctgcaggatgaatttaaagataaatag

SEQ ID NO: 403930 - DNA, 207 bp, Salmonella enterica
atgtcccatatatcctatagcaaaacagcatcatatgacagacggccactggagtatctttccctgtcagatttcatccatgctcttccaaccgttaccattgatgagattgaaaaactcgctgagacaaacatccacttggtcgagcagataccacgttacctgagccaaatggtcagccatgaatgcagacttattggtttttaa

SEQ ID NO: 403931 - DNA, 987 bp, Salmonella enterica
atgaagccacacactctcccaaaatggtgcgttatgaaaaaatttcaggtcagaaatttcccggacgatgcatatttcgccttggaacagttagcaaacgaaaatcaacgttcggtcgaaggtgaggcccgctatgctctgttgaaatggatagcacctcctgagcaggtttattctggagaagaactataccggcaggaagtgtctggccgcctcaatacagttctgcggaaaaccaaccaattccgtaactacaaacctcttgtgccgtccaatgtggccgtagagctgaggattgaagatcttggccttgtcgccaactggttcagtggtgacgtactcccttccttcactgagctgcagcggttaagcaagttatttggttgtcgcgccgactggttaattcacggtgagggggatgtgtatgaatggaactcaggcgtcagaatgcacggcgcaggccgggctgctgttaagcaccttctcagacctgatagtgatggtaataaagtcacagacatcaggctgctaagggaagatagtgatataggagcacttctgatactccgtgagtttgaaaatacacggtatgttgatgcgttctggacaaacctacacgtaagtgaagccattggagccggtggcgagtctgatttggctgatttttttgtcactcttcgggcgctgtacaagagttttgtcaaacttgatgtaaacgtcaaaggctaccttatgccgcgatctgcctataagcaaatcagagaagaggaacaagcctatccactgatgcttctcaaggattatcgtgtaaatgaaagcatgtggtgggaggatatttgggataaaagtcaaagaggtaaatttaattactggaaaggtgatgaggcgctgattcgtcgcattgaagatgcaataaagcgtaataaaagattgcttgatgaaattgaagctattaaaaactcagatcctttggaccatgatgattaa

SEQ ID NO: 403932 - DNA, 492 bp, Salmonella enterica
atgaaaaagatatatatcgcagcgtttttattaatttttacccctttaatttatgccaccggatttccatgtgctggctgtggaattgttgataatatgataaaaggaaacgctgatgaaacaccaataatggtgatgctagatactccgattgaaaaaaatgacattacgccgaaggaaataaacttaatatcacacgacgataaatgtatttactctggtgtacttacacagactctttcgaaaaataaagacagccgtattattgatgtcaataaaaaggtttgcggctcgaatactgaaaaggtgtcttactccgttttgagcattagttccagcgagcaatacagcaaaggcacaccgctaaagctgtatcatgtcgccgtaatgacttcggcaggcccgttgttcagcgctgatgtaatgagcgaaatgattaaagatattgcagatgcagtagaacaggctaaggcaaaaggactaactaagtga

SEQ ID NO: 403933 - DNA, 3819 bp, Salmonella enterica
atggcagaagctaaagcgaaaaaaccattttatgagattgtggctgaaaacctgatagcccagcttaaagaggggacagctccatggcagaaaccatggaaccccggcgctcctggtgtcgcattgcctatgaaccctacgacgggtaaacgttataaaggcattaacgctattcaccttatggcgcaggggtatagcgatcaacgttggatgacctataagcaggcgacggctgcaaatgcgcaggtaaggagaggcgaaaaaggcacgccgatccaatactggaaatttactgaggaacgcatcaaacgcaacgatgatggtagcgttgtgctcgataaagacgataaaccggtaaaagaaactgtccaactggagcgaccgaaggtatttaacgcagttgtgtttaatgcggagcagattgacggtctaccgccgatggccgttcgccaagataagagctggaacagtattgaacgtgctgaatctattctcgaagcctctggcgcgaaaatctctcatgaccaggtagaccgggctttttaccgtatgtctacagacagcattcatttgccgcagcaggcttcctttccaagtgctgatcgttactatgccactgcacttcatgaattgagccactggacaggtcacgcatcgcgtcttgatcgtgacctgtcccatccttttggaagtgaaggttacgccagagaagaactacgcgcagagattgccagtatgatcattggcgatgaactggggataggtcatgacccttcccagcatgttgcctatgtaaaatcctggattaaagccttacaggatgatccgctggaaattttccgtgcagcagctgatgctgaaaaaatccaggggtttgtgttgggccttgaacaacagagaatacaggaacaaccggtaactctggaaagagagcagcgcgaaaaagagcataatgaggtaatggctgaggtacagcggctgactaacccgcagattttcgatgcggaaacagctcaactctatcatttcacattcatgacactggagcagacagctgaggaagctggttacgttacctattacagccgtggcactggtgagctgggcgaagaaactattcgggttaattacgaagacagtaatggaaatactattcctgttcatactgatgtggttgggcgtggaaaagcattgacatatatcggtgatgagcgtgtccccggaacgggattttcatccgataatgaatggcaaagcaatgctcttaaaaccgctttcgccagcatagataacaacctaactttagtcgctaaaaaagttcatagtcagattgaaaatatcagtggagacccgcgagaattaccgcaggatgttaagtttcctaaaaactggtggcctaattccagttttctggcgtcgaccccaaatgtggagaactcaaaagcagctgcagaggctgatatgaccactaaaattgaaacgtctattacatcagcgcagcagcgccagtatcgtgcagagaaatttattctttcgaatctcgatagtggtctttctaagcacgttcagaatatgaaccgtcgccagcttacgttgtcacgaaacgttctctatgatgctcaaaatagcaatcaggatagtgatttttggcagcgtaacaaggaatttcattcttcgttcagtcaaaactggaatgaggctcaggacaagatcaagagcgcataccgtgagattgattttgcattatcacttctacctgagccgaaatataacattgtggaaaatcctggtcagaatgagcatgtgaatataatcatgcagaccaacagtgcagttaaggcgctggccgctgttaacgaaggggataaccgttcaatttatgactcacgtctcatcaataacggtaaggttgatctgaatgacctgcagaacaatttttatcaaacacttgaagcagaaaaagcagccttaaagcaaggtattatcaagcctgatgatgagattagcgtgctcccaccaggagaagcacaggaatggtatcaagaccgtgttgaaggcctgatggagggcgctgacagcccggatgaactgaaaagcgctctggatgcgcttggcccagaaccgggagataatgaggcggttttccttggtgaagatggagggcgaattcttccggcattcagtctgaacgttgcgcaggaaaatactccaatcaatgtcccctacaaagaacgcaatgaagctaaaacgcttggggcaaaatgggatcgaaccgaacagacctggtttgtaccaaaaggtgtatctctggataaatttgcaaaatgggttggtgggccaactgcagaaaaaaattcatctgtcgtatctgtgaaagaagtaacgccaaaagtgggtgagcgtcagaatctggctgtcccttataaagaccgcgcagaagctaaagcagctggtgctaaatgggacaaagagaaaaaaacttggtatgccgaagctggggcagatatgcaaaaactggcgaagtggaaaccggaaaatgtggtgatcgaacagtcaccggccatgacgctaaaggaggaagtagaaaccgcgctgaaagatattgggtgcatccttgatgccgatactgacaaaggacagaaacatccaattatggatggtaagaagcatcggatcacggtagagggagacaagaaaggggaaaagtcaggtttttatatcatctatactgacggccatcctgcaggcttcatgcagaacaaccgcaccaaagaagagttacgctggtcttccaaaggaaatgtgatgtccgacgaagaaaaagcgctcctgcgggcgcaggctgctcagaaacaggccgaaaaagcggcacagcagcaaaaagaccatgagtcctctgcaaagcgtgttcaaaagcagctcgctaaactcaatgaacctcagcagcaaactgcttacctgaagaagaaagggctgcaggtacataaaggtgtgttcactgataaggacggacagaaaacctttattcctgcttatgatgtccatggtaagcaatggactatgcagtacatcaacgaggatggcacaaaacgttttgccaaaaacgctcgcaaagagggatgtttccatgtcattggcgggctggatgcgcttaaagaatccccggtgttgattgtggccgaaggttacgcaacggcagggagcatcacagaggctactaatataccaacggtcgccgccttcgattcaggtaatctggaatctgtcgcgaaaacgcttaaagaagcctaccccgataagccaatcatcattgccggtgatgatgatatttctcagtcatgcaaaatgaaggtgaaggataaagccagtgtaaacgtcggtagggaaaaagcgctggaaacagcgaaagctgtcggcggtgtggctgtgtttccggtttttgctaaaggtgaattacctggtaaagacgaactcagccagattaaaccggcggcgtatcttgcacaccagaccgcctcgcgcaaactggaggcccatacgagcggtgataagccactctcggatgccgaagtgaaggttctgcaggcagcacagttatcggaaaagcagcttgatattattcgccgtgctgatcgttatactgactttaacgatctggccgtaaatagttctcttggccgggaaggtgtggcgatgcagttgaaagccgtcattgctgaccagctgaataaaaaacagcagcagtcacaggtccagaccgaagagaagaaactcattcaggaaaaagagaaaaaacggaccattcgccacgctatgtaa

SEQ ID NO: 403934 - DNA, 186 bp, Salmonella enterica
atgactgatactaatgcagtaattcgccctgatgttaacgacgcaatacaggaaaaatatcgcgatctgatgacaccgggatatgtagtcgaattttctcccgatgaggctgatcttgtgggggcattcgaagatgatgcgctgaatgtacgtgacgcatacgaaagcgcttttgatgcggagtaa

SEQ ID NO: 403935 - DNA, 2031 bp, Salmonella enterica
atgagagtatttattgcagaaaaaccgacggttgcaagggctatcgctgaggtattaggcgcaaccaataaaaaagacggttacattgagtgcggcagtgactatgtgacttggtgttttggtcatatgtttgagcaggctgaacctgatgaatatacaccagacaatgtgcctcgtaatgaaagcggtaaaaaaatctggcgagaagatgaactgccaattatccccgaaaaatggattattaatcctcgtgaagatgctgagaaacagctgaaaaccatccagcatttggttgagcgagctgacacgattgtaaatgctggcgatccagatcgcgaggggcagttactggttgatgaaatccttgatgacatgggatgtactaaaccggttctgcgttactggtgtaatgcgaatgatacggtaagtgtcacaagggcgttgaaaggacttgagaacaacgataaatatgtaaattttggacgtgcagctcttgcgcgtggtcgggctgactggttggttggaatgaacctttcaagaggattcacgttgtcggcagcgcgtggtggctcgcgtgttctgttgacggtcgggcgagttcagacaccaacgctggcacttgttgttgcccgcgatctcgaaattgaaaacttcaaaccaattccttatcacaatattaaagctgtctttaaacatgacaaaggagcgtttgttgcggcatggcaggccagagaagatcagccagggcttgattcagagggaaggcttattgacactaaagaagctgataagctagtagcggctttaaccggaaaatccggtaaggttgttgaatataagcaagagccaaagaaaaaatatcatccaaaagcctattctcttggcagtatcaccgctgttgcttcaagtaagtttggttattctggtgagcaagtgctggctatatgccagtctctttatgaaacgcataaacttaccagttatccacgttctgatagttcttatttgcctgaatctcaacacgcagatgcacctcaaattctggattctcttcgggttacttatccgggaatagctgctctaatcgataaggctgatccaaaagtaaaatcaaaaacttttgatgactctaaggttacagcgcatcacggcattatcccaacgatgcacaaaggtaacgttgaaaggcttacgccagaagagcgtaatatttacgaccttatcgtaagaacatacttggctcaattttatccagtacatgaatataaagcgacatcaattattattgatgttaatggtgaaacatttggggccggtggtcgcgtaacgactaaaaatggatggaaggatgtttattcagatggagaggatgaagaagaaaaagaaaatgagtctgaacagactcttccatcaatgagaaatggtgacgaaattatttgtgctcaggcacagcggcaggatgctaaaactaaagctccgcgtcgttttaatgacggtacactcaacactgcaatggaaaatattcataagtatgttgaagacccggctcagaaaaaattactgcgggaaggtgatggtattggcacatcagctacccgcgccacaattgttgctgatttaaagaaacgtggttttattgaaaacaaaggcaaagacattatcagtaccaagctgggaagggggctgatagccattctgccagaacttgttaaaagcccggtaatgacagccatcaacgaacgtatgttactggaaatagagcaggggaaacgtgacgttgattcttttgtgaagattcaggaaaaatttgtacgagagcagattaaggttattaatgccggagctatcaaagttgccggtggtgtgcaaatttctgacaagtacaaatgcaaggtatgtggtaaaggacttattcgtcgtccgtccaaaaaatccggtcacttctggtcttgcagtggttatcccaattgtaaggagtcgtacccagatattaaaggtagtccaaactataaccccataaaacgcgcttaa

SEQ ID NO: 403936 - DNA, 534 bp, Salmonella enterica
atgaaaaaaatgacccgctatgccgccattggtgttatttcggcttcattgattggtgcagttgtgtgtggctttggatatgccgccgggttacgcatcaataccacgaaaagtatccctgttggcttgtacaaaatcagccagaaagcgccagagaagggcgactatgtaattttctgcccgcctgaaaaggctattttctcactggcacagaagcgtggttacatcggcagcggcttttgtccaggggggtatggcgagatgatgaagcggattttagcggctaaaggtgatgaagttgcttttcgtgatgatggtgtttacgtcaacggacagttattgccttacagcaagccgttaagtgttgatccgggcgggcgtaaactgcccgccattcgtgaagtgtacacgttgggtaaatcagaactgttgctgatgactgaccgcagcgcatcttcatttgacgggagatatttcggcgcggtcacaaagtcacagattatttctacgatattacctgtaatgacctggtaa

SEQ ID NO: 403937 - DNA, 1944 bp, Salmonella enterica
atgagaaagccaaataatgccgtagggccgcaggtccgtaataaaaagaaggcagcgaaagggaaactgatcccggcgatggctataacttcactggcggctggcattcaggccgccacacagtattttgcttacagctttaattatcaggaactgttggggccgaactttaatcacatctatgcgccgtggtcctatttcaaatggtattcagcatggcatgagcgcttacctgatgcgttttttgctgctggcagtgtgggggcggcggttgctgccggtggcctagttctgaccgcgctgacaagtatgatgaaagcaaattcatccaaggctaacgaatatcttcatggctctgcaagatgggctgatgagcaggatatcagagatgctggtttgctgaatgatgaaggtgtttatgttggtgcgtgggaagacaaaaacggtcagttgcggtatctgcgtcacaacggcccggaacatgttctgacgtatgcacctacccgttctggcaaaggtgtcggcctggttgttcccaccttgctttcctggaaacattcaacggtagtggctgaccttaaaggtgaactgtgggcgatgacggcgggctggcgtaaagaatatgccaagaatctgtgtctgaaattcgaacctgctgcagctaatggttccgtcgcttggaatcctcttgatgaaatccgtgtgggcactgaaaacgaagttggcgacgttcagaatcttgccacgctgatagttgacccggacggtaaaggactaaatgaccactggcagaaaacatcccaggcgcttttagtcggtgtgatcctccatgtactttacaagcacaaaaatgaaggtacgccagcaacgcttccgtatgttgactccatcatggccgacccggaaagaggggcaggggaattgtggatggaaatgacgcaatatagtcacataaatggcgagaatcatccggtggtgggggctgccggtcgtgacatgatggaccgcccggaagaagaagccggttccgtgctgtctaccgcaaaatcttatctcgcccttttccgtgatccagttgtggctcgtaacgtcagtgagtcacattttaaaataaaagacctgatgaatcatgatgatccggtttcgctgtatatcgttactcagcctaatgataaagctcgtctgcgtccgctggtacgaatcatgctgaacatgattgttcgtttgctggctgacaagatggaatttgagcgtgtagataacaaccttacgttatggcagcgttttaaacaggcgtttggtttttcagttcagggaacaaaaagagtacagacaaagaaaacctacaaacatcgtcttctgggaatgatcgatgagtttccaagtctgggtaaactcgaaatcattcaggaatcattggctttccttgcaggttatggcatcaagttctacctcatctgccaggatattaatcagttgcgtagccgtgaaacaggttatgggccggatgaaacaataacctctaactgccatgtgcagaacgcatatccacctaaccgtactgagactgcagagcacctttctaagttgactggacagacaacggttatcaaagagcagatcacaaccagcgggaaacgtgccagtgcgatattgggtggagtatccaaaaccattcaggaagtacagcgcccacttctgacagtggatgaatgcctgcgtatgccaggacctaagaagaatgctgaaggtctgattaccgagcgcggtgacatggttatttatgtggcaggttttccggctatctatggaaaacagccgttgtttttccaagatgagattttctcgcttcgtgcttctgtacctgcaccaaaagttaccgatcggattcgagctgtagctgccgcgaatgatgacgccagtaatgaggctatcgcaatatga

SEQ ID NO: 403938 - DNA, 189 bp, Salmonella enterica
atgaaacaaaattccgaagaattagggctgttactcgccatgctaaatacggggcatggtggtgcattggcaggaaacccaaacgaagccagcatgaatacaggcaaggttcaacaactgttaaacgtgatggacgtcaccgctgatgactggaacataaaggagcaagtccatgagaaagccaaataa

SEQ ID NO: 403939 - DNA, 2634 bp, Salmonella enterica
gtgatttcgcgtcacatcccaatgcgaaatgtcaaaaagagtagttttgttgagcttgccaagtatgtgcaagatccccaaaacaaacaggagcgcgtgggtgctattaaggttacgaactgtcatcatgaaaatatccttgatgcggcccgttatgagattgagcctacacaacggcgtaatacgcgcgcagcgggcgacaagacctatcaccttatcgtttcctttcgtcctggagaaaaaccgtcacaggaggttctggatgctgtagaagaacgtatctgcgcggctatggggtatgccgatcatcagcgtgtcagtgctgttcattacgacactgataatgtgcatatccatatcgctataaataaaatccatccacaaacttacaacattcataccccctacaacgattacaaaacccgttcagcggtatgtatggcactcgaaaaggaatttggccttgaaagcgataatcaccgggcaagtaagacgcgatccgaaaataatgcggcagatatggaaaggcattccggcagagaaagtttgcttggctggataaagagggagtgcgcagatcaattaaagagagcggctaactggcaagagttacatcaggcaatgcgccagaatgggcttgagttacgccagaaagggaatggattcgttattactggtcccgatggccttgctgtaaaagccagctctgtagatcgctctctgtcccgagcagcgcttgaaaagaaattaggctcgtttgagtcttccatacccgacacgaaaccttccagactttccccagaagcgattaaacaacgattcggttcagctgtacatgttaagcggcccggagaacgccccccaccaattcgtgaaaaccgacaggttcaccttggggagattcccgttatgtcgattaacagtggtaaacgctatgagggcaaaccgctgggttctcagggtgcaagtacctcagttctttacgggcgctaccagagtgaacagcaacggcttactgctgcccgtaacgaagcgctgcgtctggcaaaggttaaacgtgatcgcctcattgaaaatgccaaaaggacaggccggttaaagcgggcagctatcaagttactgaaaggaccgggtgtgaataaacgccatttatatggtctggcaagtaaggcgcttggggaagaacttgaacgggcaaatgccatttataaaaaagaccggcaggcagcttatgacattcataaacgccgtacatgggctgactggctgcagttcaaagccgcaggtggtgatgatgaagcgctgaaaattttacgccagcggaatgcacaacgggctcgtaaagaggccaacattctgcatggcgataaagtcaaaaaagatggccgtatccctggattgaaaccggacagcgtaacgaaggaagggacgattatttaccgcgtgggagagagtgctatccgtgacggtggtaaacgtctggatgtatcacgtgatgctggtgatgacggtcttcatgccgcactgctgatggctaaacaccgttacggagacaaactcaccgttaacggcagttttgaatttaaaaaacgcattgtagctgtagccgctgcgcgtgagctggacgtgtcatttgccgatcctgaactggaaaagttgaggcaaattctggctaagaaagcggcccgcgagcgtgaatacatccacatcccctttgagcaaagaggcaaggcccggcaagccggagccatgtgggacaccgaaaagaaatcctggtttgtcggtccttacgcaaccagagatcggattgaaaactttatccgaatgaatgagggaaaagacaatgaacaaagacgacaaagatatgccggaacagaacgaaccgatgcaggacgagaacgaagcggtaatggcaatgctactggagcaaatgagccaggagtcacaggacgaagcacctccgctgatgccggaaacggatatggaaccagcagcagcagaagacgaattggctcaggcgatgctgttactacagcaggaagccagccaggaaggagtgatgacacccgtacagggagaagtcgagcagccgaaccaaatggcgaacgaggacatagtaagcccaacgttgcgcgacctggacgccagccgccgcccacagcaaaaaaccgtctgcgagcaatgtccgaactcggtatggttcgcatcgccggaggaagtgaagtgttattgcagggtaatgtttctgaccagctggagcacaaaacagccgaatgtgctgatcaactgcgacgggatatggctggggcaggaggaataacaacacctgctgaggttaagaaaccgctgagtagtgctgaaaaatatatcaatgaacgtgagcaaaaacgccttaaagggttcgatataccgaaacatagagggtataattctactgataaaggtctgtttgagtatgcaggccaacgtaaaagcgggctggaaacgttagccctgctaaaacgggatgatgaaattgttgtgatgcctgtcagcgattacaccgcccggagactgagcaatcttaaagtcggggagtcagtcacacttaccccttccggttcagttaggacaacgaaaggaagaagtcgatga

SEQ ID NO: 403940 - DNA, 360 bp, Salmonella enterica
atgacggaacaagtgaaaactacacgtaagcatggcaagcacattcgtgtgccagttctgccagaagaagaagcgatcattaagcgcaacgcagatgccgctggactgagcactgccgcatttctgcgtaaggttggaatgggttatgaagtggaatccatggtcgatattgaacaggttcaggagctgagtcgggtaaatggtgatttaggtcgacttggcggattactgaagttgtggctttccaatgacgagagaacccgtaatttttccgtgtcactaatcaaaactcttttggcaaaaattgagtcaacccaaaacgagctacgaacagtaatggataggatactgatcaaatga

SEQ ID NO: 403941 - DNA, 435 bp, Salmonella enterica
atgggaaaagactatttaactgacctacaggagtgggttacgcagaaaaaggggctgaacagcaagagtgcaaacagcgcgagggtagtcttcctggcaatccgggaagacgtcaaaaacgcgattgaagccggttactctcttacaacgatatgggaacacatgcacgaaactggtcgtgttaataccacatacgaaacttttcgtcggcatgtccggcgatacatagatgagcgaaaacgtgcagctgctgttagcgaaagtacacctgctggaactgcggtaaagaaagaaagccaacaagccggaccgtcaccaaagaaagaaaacgtgatcccggagagaacgccggtcaaaagagagccgcctacgaatcccggcagtcagctgccaacttttaattttaatcctggaaaaaagaaggggactaactaa

SEQ ID NO: 403942 - DNA, 786 bp, Salmonella enterica
atgcctactgcagacaaaaataaaaaacaaagtgaagctgaatcagtgccggtacgccatgctgttcacagcgcccagcaaggaaaaggtggttgtggtaaatccgttagtaccgctttgctgggaatgtacaagattagcaaaggtgaactaccgctgtgcatcgataccgatccgctcaatccgacattctctaattatgaaaaactgaacgtccgacagttgaacatcatggaaggtgatgaaattaatcaacgcaaactggataccctcatccagtggattgatgaagccggtgacagggacgttattatcgataacggcgctccgtcatttattccgttatcaagttatatgattagccagcaaatccccgccctgctttatgaaatgggtaaacagcttgtcattcatatctctattgtgggggggcaggcacatgattacaccgtcgaggggttcaaggccatggtggagcagtatccgtcagaaacccgttttgttgtctggcttaacccgtattggggcgcggtggaatccgatcagggagtgccattcgaagaatcagaagcgtacctgatgaataaagacaaggttgatgcgcttatccgtttgcctacgctcaaaaaagagttacacggccaggactttgccgacatgctggaaaactacaagaccttcgatgaggccattgaagataaatcattatctattatggttcgccagcgcctgaaacaggttcgcgcccttattttcgaacagcttgatttagcaacggtgatctga

SEQ ID NO: 403943 - DNA, 438 bp, Salmonella enterica
atggatgataagacggaagaactcattgcgctcattgctaaaaagcacggtatagctctggatgaaaccgatccgattatggtcgttcctaccctgcttcgttatttgctggatgaaagccaggagaaacagagagaaattctggatgagtttaaatccgagctacaaagcgccctgatgcaatgggattacagcgcgaaggataaggctgaccgtatcctcaacgccacgctaaaggccaatacggaagtaatggagcgggttttgacatctgcggctacagaaaccgctgccataataagaaaagaagttcaggacgagatcagaaaatcgcggtcgcacatagaaggggcaagaaaacttgccatgatgaatatggcgtcggcagtaatcaccttaatggctgctgcagtcgcattcgttgcaacgttttactag

SEQ ID NO: 403944 - DNA, 219 bp, Salmonella enterica; identical to SEQ ID NO: 22355

SEQ ID NO: 403945 - DNA, 684 bp, Salmonella enterica
atgaagccaactactccatttaaaaatcccggcgcggtccgggatacctcccccccccctcgtcagcagcctgatattacacctgatcttctcgcagagtcggaagccgtaaatatccaggaacaggtacagcaactgtatgacgaacagcagcagttgatcaatgacccataccatttgcaggattcgcaaactgacgccggtaacattgagcaggaatataatgatgcggtagaggcggcagtagcggataaagaaacgcaggcagaaaaccttgaaaaccggctggaatcgctgatagacaagcaggaggcggttctgcagcagatgatgagtcgtcagcctgggtttttggctctgcccggccagaaggcaaaatggaagtcacaggtacaacaacaacagtcattgctgagtcgcctgcagaaccggctggaaactgtcaaagagattcatgagggaatggggttacatggtccgcgtatacacgagctggcgaaggccaaagtacgacatgataaaccagagcttgccgaaggatgggatgaaatgcgggccgcgcagcgagcacatgagaatctgatgcggaagcaggcgaaggaacagaaagaaaagctacaaagagagcaggctccatcactaagtaaggggaatagtctgagtcttacaagagcaataacttga

SEQ ID NO: 403946 - DNA, 354 bp, Salmonella enterica
atgagcaaacagcgtgttcttgtcatgaacggccagcgagtgctgcaaagcgaagaagctggaaaatggaaaaatgacaatgttgatagagcgggcagcataaagccaggcatttacccgctttatctgtccaaggggccggataaagccatctcttataatgggccgattttacacgcagataagcaatcagtatatcagcaggtaggtaagcagattttcaagcatgatcgccaaaatttcgataaactgccagaagtaggtacggaaaaaagtatttcgtatgaccagacttccggtaaagctcaggtagcagcagccacagagaagcagggccggaagttctccagatag

SEQ ID NO: 403947 - DNA, 1014 bp, Salmonella enterica; identical to SEQ ID NO: 19168

SEQ ID NO: 403948 - DNA, 765 bp, Salmonella enterica
atggctatgaaagtattggttacagcaaatcaaaaaggtggtgttggcaagacttccaccctggttcatctggcatttgatttttcagaacgaggcaagcgggttgctgtaatcgatatggatacccagggcaacgcctcttttaccctgaaacagttctcgtccggcattaaagcgaatgaaatgtggggcgagatcgagccaactcgctttacccaaatgcctgagatcggaatttctctcattgagtcagatattcaactggcaaacgtagaaaaattaaatctgccggaaatggtgaagcagttccgccataacctgcagcagctggcggacagtggctttgacgtctgcctgattgatactgcgcctacggttaacaatgcgcttatagttgcgctggcgagcgctgattttgtggtatgccctattgagcttgaggtgtactcaattcagggtattaaaaaaatgctgaccaccttcacccaggtgaaacgcaaaatgaacagcaagctggaatttattggtatggttccaagtaaggtagatggccgcaatcctcgccatgtaaaccacctgcaggagctgcagacggcctaccctacgttaatggttcctgtgtctgtcgggttgcgaagcagcattgctgatgcactggcttcacatgtccctgtctggaaaatcaagaagacagcagcacgtaaagccagccaggaaatgagagcactggcctatcatgtttttactaagatggagattgcataa

SEQ ID NO: 403949 - DNA, 345 bp, Salmonella enterica; identical to SEQ ID NO: 19170

SEQ ID NO: 403950 - DNA, 591 bp, Salmonella enterica
atgcgtcctcaactctgggttattgctgggcctaatggtgcaggaaaatctaccctagttaagcgacatatccttgggaaaatagaggttgttaaccctgatgatattgcgcgggaacaaggtataagcaatcgaaaggcaggagagcaggcactttttctgcgcacggaaaatctcaaaaatagatgtactttcgctgtagaaacgacactcacaggaatgggggagattaagttaatgcagcttgctgcaactgcaggttacaaaattaatttaatctatgtgggggtgaaagatgtaggaatgtcagtagctcgcgttaaccagcgtgtaagccttggtggtcataatgtgcctgttgatgatattttcagacgatacgagcgttctgtaaccaacctacctaaagctatggccgtggctgaccgggtatgggtatttgataacagttataacagacggcgattacttttccgcacagaacaagataaaacaaagttcatttctaatgatttgcctgattggtttaaaaaagtcgctgggacagagattgagcaggccagaatgaaaaagaagaaattaagtcgttag

SEQ ID NO: 403951 - DNA, 252 bp, Salmonella enterica; identical to SEQ ID NO: 19172

SEQ ID NO: 403952 - DNA, 324 bp, Salmonella enterica
atgaccaatgtcgttaaatttcctcgtcaagagggcagtaaaccgcagcaaattcgggcggtcgaggatgtcgctggtccagcatcagaaaacacagtacgtaatatcctgtatggcgtcattggtgcggtatacatggtgctggtcatactctggattcctgttcgcttcctgctgatcgcgaacgttgtcatccagttttttaaaatgctgtttaaatggagtgatggcccatttgctgcagcctggccgttcgtgaccagtttccttgtactggctactctcacttacattatggcaacatggaaacccaaagtgtcatag

SEQ ID NO: 403953 - DNA, 261 bp, Salmonella enterica
atgcaaactaaaccctaccctgtctcaatcaggtcagaatgttttttaccctttggtgcgggatggaattgtcctacgccagaagaaattcgtactttgatgcagctcgcagagctaacaggaagcaaagcagccacactgaccggtctgaaagacagccgaaccgtcaggcgctgggttgggggggatacacccattcctttttcggcctgggctattctggttgaatatgcaggattgggtaaaatctggaaggtgtga

SEQ ID NO: 403954 - DNA, 1107 bp, Salmonella enterica
atgtccaaacattatcctggcgatgactctcgcgatcagcaaatggaagccattgcgcagcagctgccggacgaccatcgcattctcgacgcggcgtactcagcgctaattgatttgaataaagcctgtatgaccggcgatccgcaacagcgccatgatgctgtgtaccggtttgaagcctgtatctggaaaatgaacggtaaaaccttctttgggtgtcatgaagcggctcatgttattagtgaatattgccgtgctgatgacggtagcattcctatgtggggccagcacggtgattttatcatcgaaagtttcagtggtatgcgagcaagggttaaggtcgaagccggatgtatgatggggtatctttccacctcgttccatgccgttgatttaagcgcaccctttgtatccgaaacagggtatcgttcgcattttgtacagctttcagatgtcaaacctggagaaaccgttgatgcacacgtatcccgcgtatttcaaagcctgattgacgccagaaagaaacctgcttttatcgctgctgattcccgtgacaggctggcatctgagcctttgcctgattggttaaaatccctttcgcccccccctgatagaacgcctctaacgctcccagacggctttgttagggtcgaggcgttattacccgcctctaaagcatttatcgcccgtaaatgggctgtagcagctcaggaacgcattacagctattatgcagagagagctggaggctgaaagggaaactatgcgggctgaaagcgaacggcgcaagcaactggcaaaggaacgtcccaaagaatacaaagagcggatgattactgttcagcgttataaagaattttacgttggtgctcgatgtgaaatcgtgagtgtgcatcatccagtgtttgctaaaaatattggcactattgtaaaaatcgttacgatatacgattcaggatgtgtggaggcgcatgaagataagcctatacgttatcgaatcaaccgtcgcggaactcaggtagtggattttgaccctacttgcgttcgtactttttacaatgttgatcaactgaaattactggaaggcaacaaaacaggtgaatcgtga

SEQ ID NO: 403955 - DNA, 468 bp, Salmonella enterica
atgaataatgaagttatcgttactgctcgtaaacttacagattatgaagaacgcctgatgtttatgccgaaattcttcggccaatactggctttttgtggaaaaccacacttataactggatgcgtaaattaagtcctgaaaataaaagccgatatttaagcagtgcgctggataaaattgaagcccattacaatggtggtgagtgggatttttatgaactttcaaatggtggttattttatggcgccaaacagccgtgaacattaccgtatttctgtccagggtaattactttgacggtttgttaagcgcagaagctgcaggtatggtggcaaccagttttgtgctggcccagcttgctaattctaatctgccattttcagaaagatgtagtgcttattatcatcaactgtttgattacgccagcgggcatcaagaatatgcgcagttccgtgcggccatcgattaa

SEQ ID NO: 403956 - DNA, 387 bp, Salmonella enterica
atgaaattcgttagttcacaggaagtgattgagtttcatgaccgcttgatttcgcgtgatggtggcgtggcgggtatgccagaacccggtcgcgctgacgcgatcattcatcgtgttttgaacatgtatcattatgaaggtgtgacagatattatggatctggctgccgtgtatttagttgctattgctcgtggtcacattttcaacgatgcaaataagcgaactgccttgtttgttgcgcaggtctttttaaaacggaatggtgtacatattattagttcacgtatttcgtttgatgaaatgcaaattatcgctttgaatgctgcaaaaggtgaatataactggaagatggtttctgaccatcttaaagccattatactaaattag

SEQ ID NO: 403957 - DNA, 282 bp, Salmonella enterica
atgagtgaaatatactgcattgcaagtgcagtcattatcgttggttacttttatctaataatcagtgtaattactgcaccacaaaaattgtttcctatgcttcagctaataactctaataggtatcagttcgttattttcttttatgtcattcaagagtgaaagcatgtggacgggtgagcctgaattattagttgcgattatgtttggcactttttcagcaacactgattttttacatgtttaaaattttgattcgtgcttttgattcattggctaaataa

SEQ ID NO: 403958 - DNA, 285 bp, Salmonella enterica
atgcttataaaggcaataaaatctgtattcaatttttacatgctttgtatgcagcctttacttggggtatttctcgtggggtacagtatatggaagttttcaggtgacggtatctgtacagcagacaaagttatagcctgtgatatatcaatatatctggaaccagcattttaccttctcattggcaccgttgttttatttgtatggtatattgcatggcagacagaacgctctaaagaagaagattttaaatcaagcattaagccggaagattttgtgaagtga

SEQ ID NO: 403959 - DNA, 309 bp, Salmonella enterica
atggatacgatcaccgcagaaccaaccactgtaggcgaaatgctttcagaagagtttttaaagccgctgaacatcacccaggctgagctggcgctggtaatgggcgtgtcccggaaggttatcggccagataatcaataacagtcgccgtatcagtgtagcagaagcctcacagttggccgtattattccagacagatgaagatttctggattaacctgcaggccgcacatgaccgctgggagagccggaatattattgcgaataaccatttccgccctattcaggaactgctgatgagggctgtttga

SEQ ID NO: 403960 - DNA, 300 bp, Salmonella enterica; identical to SEQ ID NO: 22350

SEQ ID NO: 403961 - DNA, 879 bp, Salmonella enterica
atgactaaagaagaaaaagacgctcaacttgaacagctaaaaaaagctgcgcaggcacagcgcgccaaatcagtagaaaagagaaactcttctaatcaactttcgctttttgatatagcgccttggccagactctatgagagccttgccgaacgattatgcccgttcagcgctttttacagtcaaaaacaaacgtcagccccgtgaagcactgcagaagaaagagattttccacattaataaagatgtgcggatcacctataccgggcttgagttacgtgctgaagacgatgaacttgtgtggcagcaggttcttgaatacgccaaaaggaaaccaatgggtgaacctattaccttcacgttttacgaactttgccaggatctaggctggtcttataatggtcgttatatagaaaaggccgaggagtgcctaacacgcctacaggcaactgccatgcaatttatttctgagcgtgtcggtcaactggaatctgtttcattgattggtcgctttcgcgttcttgaccgtgggaaacggtcgtcaagatgtgaagtcatcattgataaagagatggttttgctttttgcaggtgagcactattcaaagtttgtgtgggagaaataccgtaaactttcacctacagcccgccgcctctttgattactttggttctcaccgggagccatatcctatgaaattagatacattcaagatgatgtgtggttcggaatccgatcgcctgaaaaagtggcgagagcaggttaataaagcatgtgctgagcttaaagatagtgggttaattcatagtgcttggatagataaagatcgtattcattgcaaacgaaccaacgatgccgcagagaggaatgatgacacttga

SEQ ID NO: 403962 - DNA, 375 bp, Salmonella enterica
atgaaaaatcttaatcgttttcagtttatcggaaatctaacaaaagacacagagttacggtatacagcaaaaagcacaccgatcgcatttttcgatatagcggttaacgggagctataaagagcaggaaaccggtgaagttaaggaatataccgactttttccgcatcaaggtatggggtaaggctgcagaaaacgctgcaaagttcctagggaaaggctcgcaggtctttgtagaaggttctatgcgtaacacccagtatgaatcaaacggccaaaaagtgtatggcatcgattacattgcagagaatattcagtatttaaatataaaatccccggcaagcagtcccgcaactgcaggtaagaaaactgattga

SEQ ID NO: 403963 - DNA, 195 bp, Salmonella enterica
atggattccatcacccttaaagatgggttcgcttttccatttgttaggtccgacaaaaaagagattgaaaccccagctttttgggatagctcctgctttgtcatgtctctttcttcaagaagcctgaggatgttagtaaaaaaaattaggttgtacacgatacgcttacgcctcgatgtaaattttagcggctaa

SEQ ID NO: 403964 - DNA, 957 bp, Salmonella enterica
atggacactgtagattccgtcgatttaagagcgatagaaaagctcaaaagggacatgggacgaagcctaatggaagcgttagaagatcctgaaacactagaaataatgctgaatccagatggtaagttatggcgtgaaaaattcggtcaacccatgttctgcatgggaactgtgcctgtacaacgttcaaaaaccattattcaaactatcgcgggctttcacaaaaagattatcgatcccaactcgccatttcttgaatgtgaactccctattgacggttcccgttttgctggtcaactgccgccactggttgcaggtccaaccttcgccattcgtaagaaagcctcacgtattttccttctggatgaatatgtagataaaggcgtaatgaccagggcacaagctgactttatttgtcgagcaattgccgcacataaaaatattttggttattggtggtacaggttcaggaaaaacaacgctgttaaacgccatcattgctgaaatagttcgccagtttccagacgagcgtatctgcattattgaagatacaggtgaactgcagtgcgctgcgcagaattttgttcagtatcacaccactgttaacgtcaccatgacagacattcttcgtctgatcctgcgtatgcgacctgatcgaattttcgtaggcgaaacgcgtggtccagaagctctcgatatgcttgacgcctggaacaccggacacgaaggcggcgcagcctcacttcacgctaacaacacactttcggctctcacgcgtctgcgttcattgatctcgcgtaacccctttgctccgcgtgagattgaaccggtaattggcgaagcggtcaacgtgatcgtccagatatctaaaacttctgagggtcgccggattaaagaaatccgcgagattcagggttatgaaaacggggaatatatatcccaacttatcgcggcttaa

SEQ ID NO: 403965 - DNA, 384 bp, Salmonella enterica
atgaaaacaggtttcttccacttcaatctgagcaagcacgcctttattgcatttttaggtgccatgctgttcttcatggcagctgaacctgctctggcgtcaaacacatcaggcggtggcttgccgttcgatgactggatgaccaatatccgtacttctattacaggaccatttgcatttacagcttccattatcggcattgtcggtgcaggtgcgatgttgatctttggcggtgatatgaacggattccttcgtactctgattttcatcgttcttgttcttagcttcctggttgcagcacaaaacactttgtctgcaatcacagggcagggtgccgaactggtagcaatgctgactaattctaaaactgggggagcggcataa

SEQ ID NO: 403966 - DNA, 327 bp, Salmonella enterica; identical to SEQ ID NO: 22155

SEQ ID NO: 403967 - DNA, 2544 bp, Salmonella enterica
atgaataccgcaattcctgttttagttgcgctgatagggctgatcttgcttggcatgatgctggcttactatcagcgtatggtgaaggaatatcaccttaaaaaatatcgctcaaaggatgaatccttcgccgacatgcttaattacgccgctgttgttgatgatggtgtaatcgtatgtaagaacggttcttttatggcgtctttcttttttaaaggtgcagacaacgcgagtgcgacagaccaagaaagagagcttgtatcatttcgtattaataaggcaattggcagactcggcaacggctggatgatgcacgttgatgcgattcgcaatccggctccgtcatacagtgaccgaaacgcttcacactttcctgatcgagtttccgctgccgtggatgaagaacgtcgccgcctgtttgaaaagctggggcaactgtacgaaggctgctttatcgttacgttcacctggtttccacctgcactggcggaaagtaaattcacggaactgatgtttgatgatgaacgcgaagtttctaccgataaagacactacgctgaatctcattgaaaaatttaagcatgagatcagcataattcaggcaaacctttcgcaggctgtttcgattgaacgactgaacggcgtgaaaatcgaacaggaagacggctccgttgcaacgatggatcagcagctggagtacctgcagtattgcattacggggctgcaacatcctatacgtctgccaaacaatcctatttatctggatagcctcattggtggtcaggagtttattcctggcatcacgccacgtatcgggaaaaacttcattcaggttgtggcgattgaaggctacccctctgaatcttatcctggcattctcagcaagctggccgagcagccatgtgaataccgctggtctacgcgctttattttccttgattctcacgaagccatatcaaaactgacggcattccgcaggaaatggaaacagaaagtacgcggctttatgtcccagctattcaataccaataacggttacgttgatgaagacgccttgtccatggtcaacgatgcatcttccgctattgcagaaactaactctggtttagtcagccaaggttatataaccagtgtcattgtcctgatgaatgaggaccgccagaaagtcgaggatgccgcagagtttatgcgcaaggctgttaacaatactggcttcgctgcgagaattgaaacagtaaatacggtggatgcctactttggttccttaccaggccacggtgttgaaaacgtacggcgaccgctggtaaacactcttaaccttgccgatctgatgccaaccagcactatctggccgggcgaaaataaagccccaagtccgctattcgaagtaggtgcaccgccattaacacactgcgttacttctggaaacactccgttcagacttaacctacatgttcgtgatctcggccacgctttcatgtttggaccaacccgtgcaggtaagtctacccacctggcgttaaccgctatgcagtggcgtcgttactctaattcgcgaattttcactttcgacaaaggactgtcgatgtttgcaacctgcaaggctgtaggtggaaaacatttcacgattgccggtgatgataaccaactggcgtttgcacctttatcacgccttgatacccctactcgccgcacatgggcgatggaatggattgaagccattctgatcctaaatggggtcaatgttgacgcacctatgcgcaactctatagctgatgctattaagagtatgtctgagactcattccaaaaccctgtctgaatttacagtcacggtacagaacaatgttattcgtgaggcgctcaaacaatacaccattgatggcaacatggggcatctgcttgatgcagaggaagatggtcttgatatttctgatttcatgacgttcgagattgaacaccttatgaacatggatcagaaatacgcactacctgtgctgctctatctctttcgtcgcattgaagaatctctggatggtaatcctacactcatcattcttgatgaggcttggctcatgctgggtcatccagaattcaggggaaaaatccgcgactggcttaaatccatggcgaagaaaaactgcgctgttcttatggcaactcagcagcttagtgatgcggccaattctggcattcttgatgtcattattgagtcaactgcctccagatttttcttgccaaacggcaatgccctgcaggaagaagctatgtctctgtatatcaatatggggcttaatcgccgccaaattgaaatcatcgcgtcagctgtaccaaaacgcgattactactatgtatccgaacaaggtcgtcgcctgtatcagcttgcactagggccacttgcgttggcatttgtaggagccacagatcccgattcaatcgcaacaattaaacaactgtctgaaacatacggtgatggttgggttgatgaatggctacgcactaagggactggacttaaatgattacgagtatgaggttgctgcatga

SEQ ID NO: 403968 - DNA, 708 bp, Salmonella enterica
atgaaactttttaacaataaaaaaacccctcaacctgatagccctaatccgtatctcaacgcacgtcgttcatggaatatccatatgggacatgtgcagcagttcgggacgctgggtattttcattggcgtagcgggcctgcttattggtctggctgctgtggggggaattacctatatcggaagccaatcgaaaatcatcccgatggtctatgaacaggacagggctggtaactatatcagcctgacaagggcagaccgcttgtctccagccaaaatcgacgactaccgtaccgctgtatggaactttatcgataacataagaatggttacgccagatggcgaactacaacgtaaagccgtattacgcacctacgcatttttatccccggatgatccggccacaaaaaaagcgaatgaatatttgaatagttcgaaagaacgtaatcctttcacccgagcaaaaacggaaatggttagcaatgagctaatttccgttctgcagcaaacacctgacacctggcaggttgactggattgagacaacacgtaaccgcgacggtacgttaaaaaatccaccggttcgaatgagagcactggtcaatctttatcagaacactgacttgaacgcaaatattaaagaaaacaatgacgtgataaacccacatcgtattttcattaaagattttaactggtcaaaacaactgtaa

SEQ ID NO: 403969 - DNA, 729 bp, Salmonella enterica
gtggctcttatggtgacgagaaggtacttactaggtggtgaatatccctccgaggaatttgttcaagcttctttagaaaaatatttttttcgacaagggttcgatatagatacgggatcttatattgaccttatttgtcgtgataaagaatctagggatgttgtgtggcatattgaagtaaaagggaaaacatcacagccagggttggattttcgaacttgtcttggacaattagtgcagagaatgacaaaagataatattaattatgctattgctgttccaagaataaaacagtatgaaagattaatagaagaaacgagcattcttgctgttagtaaattgaatttacactggatatttgttgggcctgatggcagtgtgacaattaaggaacctgatagctctacgatgaaaaatggtaatgctaatggtaatggaagagaagtttctcttgtgaatggagggtttaaaagatttattccgggggattttatgccaacttgctcatatgggaaagctcctgttgtatttaaatcatctcggcgagaaatgtgggattggttggacgattttgttatttcaaatggggtgatcccaagtattgctgatattaaagaagaggctgaatcgcggagtgggaaatggacgctttctaatgttaaaatagagtatcagttttggaaaatatatcacttgtataaggggcattttttctatcaatctgagtag

SEQ ID NO: 403970 - DNA, 300 bp, Salmonella enterica
atggcgactgctactaattttgatgcgtggttagatgatgttgatggcgattatgaggaggttatggctctttatgattccgttcagaatgtaagtgatatggggttgtatcagtgtgttgagggtggtcggggtgatgcttgggtcgtgagctctaatcatcatccagaagctctttttctagcatcagctgtggctagggatactttcctcaaattgattagagaaaggctatgtggcggcgaagatgttgattcatggtatggatttcaacgaaatatatcgaatgatcactcgtaa

SEQ ID NO: 403971 - DNA, 249 bp, Salmonella enterica; identical to SEQ ID NO: 376948

SEQ ID NO: 403972 - DNA, 801 bp, Salmonella enterica
atgagactgatccccctgagtaccgcagaacaggttggcaaatgggccgctcgccatatcgttaaccgtattaatgcgttcaaaccgaccgccgatcgtccgtttgtccttggactgcctaccggcggcacgccgctaacggcgtacaaagcgctggttgagatgcacaaagcgggcgaggtcagctttaagcatgtggtcacctttaatatggacgaatatgttggcctgccgaaagagcacccggaaagctaccacagctttatgcatcgtaactttttcgatcacgttgatattccagcagaaaacatcaatcttctcaacggtaacgcaccggatatcgatgcagaatgccgtcaatatgaagaaaaaattcgttcttacggtaaaatccatctgtttatgggcggcgtcggcaacgacggtcacatcgcctttaacgaaccggcgtcttccctggcttcccgtacccgtatcaaaacgttaacccatgatactcgcgtagcgaactcccgcttctttgacggcgacgtaaaccaggtgccgaaatacgcgctgacggtaggcgtaggcacgctgctggatgcggaagaagtgatgattctggtgctgggccatcagaaagcccaggcgctgcaggcggcggttgaaggcaacgtcaaccacatgtggaccattagctgcctgcaactccatccgaaagcggttgtggtatgcgatgagccttccacaatggaacttaaagttaaaacattgaaatatttcaatgaattagaagcagagaatattaaaggtctgtaa

SEQ ID NO: 403973 - DNA, 462 bp, Salmonella enterica
atgctgtaccggcggccagacgtaaccgaaaatagcggccagcaccagacagaaaaagcccgttgcgatcggcacaaaacgctttccaccgaagaaactgagaaaatcaggcagtttgataccagaccagcgattataaaccgcgccgccgaccagaccggtaataatccccgccagcacgcccatgttgatttccgggttaatcgtcaccatcgctttggtcatgacgaagtaacccacggctcccgccagtgctgccgcgcccgcgctatctttagaccaactggaggccacgccgatagcgaaaaccagcgccaggttatcgaaaatagacccgcccgcttgcgcgataaacggcatattcagcaaatctggttggccgaatcgcagcaacaacgctgccaccggcaacacggcgatagggagctgcaacgccctacccagccgctggaaaaaacctaa

SEQ ID NO: 403974 - DNA, 198 bp, Salmonella enterica; identical to SEQ ID NO: 10277

SEQ ID NO: 403975 - DNA, 180 bp, Salmonella enterica; identical to SEQ ID NO: 181145

SEQ ID NO: 403976 - DNA, 135 bp, Salmonella enterica; identical to SEQ ID NO: 187577

SEQ ID NO: 403977 - DNA, 240 bp, Salmonella enterica; identical to SEQ ID NO: 32521

SEQ ID NO: 403978 - DNA, 690 bp, Salmonella enterica; identical to SEQ ID NO: 32520

SEQ ID NO: 403979 - DNA, 432 bp, Salmonella enterica; identical to SEQ ID NO: 403853

SEQ ID NO: 403980 - DNA, 1665 bp, Salmonella enterica
atgtgttctattttcggcgtattcgatatcaaaacagatgcagcggaactgcgtaaaaaagcccttgaactgtcacgcctgatgcgccatcgcggcccggactggtccggcatctacgcttgcgataacgcgattcttgcacatgaacgtttgtcgattgttgatgttaacgccggcgcccagcccctgtataacgccagaaaaacccacgtgctggcggtgaacggtgaaatttataaccatcaaacgttacgcgcggagtatggcgattgttacgcgttccagacaggctccgactgcgaagttattctcgcgctatatcaggaaaaagggccggatttccttgacgatttacaggggatgttcgccttcgccctgtatgacagcgaaaaagacgcttatctgattggtcgtgaccatatcggtattattccgctctacatgggctatgacgaattcggcaacttctacgtagcgtcagaaatgaaagcgctgaccccggtctgccgcaccattaaagagttcccggcgggcagctacctgtggagcaaagacggcgaaattcgtcagtactatcagcgcgactggttcgattacgatgcggtaaaagacaacgtcaccgacaaaaacgcgctgcgtcaggcgctggaagaatccgtgaaaagccacctgatgtccgacgtcccttacggcgtgctgctctccggcggtctggactcgtcgattatctcggctatcaccaaaaaattcgccgcccgtcgcgtcgaagatcaggagcgctccgaagcctggtggccacagttgcactcttttgcggtcggtctggaaggttcgcctgacctgaaggcggcccaggaagtggctagccacctcggcaccgtgcaccatgaaattcacttcaccgtgcaggaaggccttgatgccattcgtgatgttatctatcacattgaaacctatgacgtgaccactatccgcgcctcaacgccgatgtatctgatgtcgcgtaagatcaaagcgatgggcatcaaaatggtgctctccggcgaaggttccgatgaggtgtttggcggctacctgtacttccataaagcgccgaacgccaaagagttacatgaagagacggtccgtaagctacaggcgctgcatatgtatgactgcgcccgcgccaacaaagcgatgtccgcctggggcgtggaagcgcgcgtaccgttcctggataaaaaattcctcgacgtggcgatgcgtatcaacccacaggataaaatgtgcggcaacggcaagatggaaaaacacgtgctgcgcgagtgcttcgagtcttatctgccagcaagcgtcgcgtggcgtcagaaagagcaattctctgacggcgtaggttacagctggattgatacgctgaaagaggtggcggcgaaacagatttccgatcaacaactggaaaccgcccgcttccgctttccatacaacacgccgtcgtctaaagaggcgtacttgtaccgggaaatttttgaagaattgttcccggtgccgagcgccgcggaatgcgtacccggcggcccgtccgtggcctgttcttccgccaaagccattgagtgggatgaagcattcaaaacgatggatgacccgtcaggccgcgcggtcggcgtgcatcagtcggcgtaccagtaa

SEQ ID NO: 403981 - DNA, 753 bp, Salmonella enterica
atgaccatcaagaatgtaatctgcgatatcgacggcgtgctgatgcacgacaacgtagccgtacccggtgcggcggaatttctgacggggattctggaaaaaggtctgccgctggtgctgctgaccaattacccgtcgcaaaccggccaggatctggcgaaccgttttgctaccgctggcgttaacgtgccggacagcgtgttttatacttcagcaatggcgacagccgattttctgcgccgtcaggaaggtaagaaagcgtatgtcgtgggcgaaggcgcgcttattcacgagctctataaagcgggttttaccattaccgatgtgaaccctgattttgtcatcgttggagaaacccgctcctacaactgggacatgatgcataaagcagcatttttcgtcgccaatggcgcgcgctttatcgctaccaacccggatactcacggtcgcggcttttatccggcctgcggcgcgctgtgcgcaggcattgaaaaaatttccggccggaagccattttatgtcggcaaacccagcccgtggatcatccgcgcggcgttaaacaaaatgcaggcgcactcggaagagaccgttattgtcggcgataacctgcgcaccgacattctggcggggttccaggccggtctggagaccattctggtgctttcaggcgtatcaacaatcaatgatattgacagtatgccgttccgcccaagctggatttacccttccgtcgctgagatagacgttatctaa

SEQ ID NO: 403982 - DNA, 1221 bp, Salmonella enterica
atgacaccaggcggacaagctcagataggtaacgttgatctcgtaaaacagcttaacagcgcggccgtttaccgcctgattgaccagcatggtcctatctcgcgcatacaaattgccgagcaaagccagcttgctcccgccagcgtaacgaaaattacgcgtcaactcattgaacgcgggctgatcaaagaagtcgatcagcaggcctctaccggaggccgccgcgctatctctatcgtcacggaaacccgcaacttccatgccattggcgttcgcctgggccgtcatgacaccactttaacgctctacgatctgagcagtaaagtggtcgctgaggagcattatccgctgccggagcgcacccaggagacgctggaacacgcgctgctcaacaccatcgccgtctttattgatagctgtcagcgtaaaattcgtgaattgatcgctatctcggtgatcctgccagggcttgtcgatccggaaagcggcgtgattcgttacatgccgcacattcaggttgaaaactggggactggtcgaagcgctggaaaaacggtttcacgttacctgtttcgtgggacacgatattcgtagcctggcactggcggaacactacttcggcgccagtcaggattgcgaggactcgattctggtgcgcgtccatcgtggtacaggcgccgggattatctccaacggacgcatcttcattggccgtaacggcaacgtcggcgaaattgggcatattcaggtggagccgttgggcgagcgctgccactgcggtaatttcggctgtctggaaaccattgccgccaatgcggcgattgaacaacgggtgctgaatttgcttaaacaagggtatcaaagccgtgttccgcttgacgactgcacgattaaaaccatctgtaaggcggcaaaccggggcgacagcctggcctcggaagtcattgagcatgttggccgccatttgggcaaaacgatcgccattgctatcaacctgtttaatccgcaaaaaatcgtcattgccggcgagatcattgaagccgataaagtcctgttgcccgctatcgaaagctgtatcaatacgcaggcgttaaaggcctttcgcaaaaatttgccggtggtacgctccacgctggatcaccgttctgctatcggcgcatttgccttagttaaacgcgccatgctcaacggaacattgctgcaacgtttgctggaaagctga

SEQ ID NO: 403983 - DNA, 1215 bp, Salmonella enterica
atgttgtctccgccccgccagtcaatgcggggcggtaaatttttgatatcgggggtcggaatgtatgctttaacccagggccggatctttaccggtcacgaaattcttgatgaccatgcgcttgttgtcgctaatggcctgattgaccgcgtttgtccgatggctgaactgccgccgggaatagaacaacgctcattgaatggggccattctctcccccggttttattgatgtgcagctaaacggctgcggcggcgtgcagtttaacgataccgcagaagccgtcagcgttgaaacgctggaaattatgcagaaagccaatgaaaaatcgggctgtactaactttctgccaacgcttatcactaccagcgacgaattgatgaaacagggcattcgcatcatgcgcgaatacctggaaaaacatccacaccaggcgctgggtctccacctggaaggcccctggcttaatctggtaaaaaaaggcacccataatcctgatttcgtgcgtaaaccagacgctgcgctggtcgatttcttgtgcgataatgccgacgtcatcaccaaagttacactcgcgccggaaatggtgcctgccgacgtaatcgctaaactggcgaatgcgggcattgtggtttccgcaggtcactccaacgcgacgttaaaagaggcaaaagcgggcttccgcgccgggattacctttgcgactcacctgtttaatgcgatgccgtacattacagggcgtgagccgggccttgctggcgctgttctggacgaagcggatatttattgcggcgttatcgccgatggtctgcatgtcgactacgccaacattcgcaatgccaaacgccttaaaggcgacaaactttgtctggtgacagacgccaccgcaccggcgggggccaatattgagcagttcattttcgcaggtaaaacaatatactaccgcaatggactgtgtgtggatgaaaacggtacgttgagcggttcgtccttaaccatgattgaaggcgtacgcaacctggtcgcacattgcggcatcgcgctggatgaagtgctgcgcatggcaacgctctatccggcacgcgctatcggcgttgataaacatctcggtagcattgcgccgggtaaagtcgccaacctgaccgcgttcacccacgattttaaaattatcaagaccatcgttaatggtgacgaggtcgttgacttgagtaagtga

SEQ ID NO: 403984 - DNA, 801 bp, Salmonella enterica; identical to SEQ ID NO: 403972

SEQ ID NO: 403985 - DNA, 462 bp, Salmonella enterica; identical to SEQ ID NO: 403973

SEQ ID NO: 403986 - DNA, 405 bp, Salmonella enterica
atggaaattaagttggtcaaatactggaagattgagctattcgaacaatccaaagataaatcggtaatttcaaatatgatgaatgaacccaaaaggccattcttcaccggctactctaaagagccaattaaaccgaataaacttcagggtggcgattttatttctctggctccatctcctgactccatagagacaaaatctgttcggacgtatcgggttgatgaaattaactgtactccgatatacgaacagccagttgacgcgtttgctgatgctgcagaaccgctaattaagtggcttaatgaaaacgctaacccacatagccaggtcgtcgtgacaagcacaggcgctgagctactcgtcggtgagcgagtttataacactgaaaaattcctgaaagactga

SEQ ID NO: 403987 - DNA, 753 bp, Salmonella enterica
atgtggttatggtccttatttgacattaaattcttatctatttttgccgcaggcttcactatatattttggcgtacaaaaaatatcaaaaaaggtgacagtgtcgtattcagcaaatgtaagtaaaatatatgacatgcatatatcaaccataatcctgactaataaaagagataatgcaattgctatatcttcaatcaatatggagattgaagggaaagggatactacgagttattaaatttgactcccctcttcttctaaagaactatgattctttaaaagttgaactaccaaaatttagcagcctttataataatgatggcgtagttaagttagatatttctgataagtttcatttttatataatcacgacatctggagatgaaatcaaatgtatttctgaaaataaacatgtggcaccaaatatgaaaaacaaaataattccagacataataaaatttaatggcattgtcttaacaaacagaatgtcttatatttttttctatgcaaatgacaacggagagaaatactgcataatagatgcttcattgtccataaatggcgacaacccatttcattttcatgttcttaaagaagatgaattaagagatttttctagcatccttattggttacggatatcaccaacggtttaaaagttatgcattatttaaaatagacaaccatcttgctccttctttggttttaaataaatcaatgatagaaaataatattattgaaatgaataagtaa

SEQ ID NO: 403988 - DNA, 549 bp, Salmonella enterica
atgtctcacaattcagatatctataaacttatcggagcggccgcaggtgttgaaaatggtcgctctgaagcatccttaaactctactgacagtcaagaacaggtttttaaatctgcatttgagccgtctaatcatgagagcgacgatgattcttcttcagaaaataaagctattctggaggcagaagagtttggttctaatactggtgcattgcatgagtttatgcagcagaacagaatggacagtcttcaagctcagcttgatatgctcaaatcacaagtacgggataagatagctgacgcaactggtaaagaaatagacaatgagcttcggacaaaaatggcctcattcacggtttggtttatgtcgtgttggtgcttattcgttgtcgcaatgtttacatcgtttcttattgcacatgaaggaaagcctccagttgaagcgatcgttgcattactaggtacaagtacaattagtattgttggtttggttggtttcgttgttagtggattgttcaaatcaagaaaagatagtgataaagaaaaataa

SEQ ID NO: 403989 - DNA, 474 bp, Salmonella enterica
atgtacagtccggtacaaatagccaataaattcataacgttgggaaaccaacatcataatcctctgacccacatgcaactgcagaagcttacttatattgcccatggttactatttagcattaacaggtaagcctttgctcaatgaatgtgtctccgcgtggaagtacggtccagttattcctggaatgtacgatgctttcaaagactatgggaataaacctgttacgaatgtagcagtagctccttttggtggcatcgttactatggatccgcaagcagagagcattatcggggctgtttataagttttacggctcgaaaaatggaattgagttatcaactctaactcatatgccaggtacgccttggtcacaagcttataatggtattggctcgtcaatcatctcaaatgatgcgatcaaggcttattatcatgatttattgaataaccgacagcaatgtcagggcctctga

SEQ ID NO: 403990 - DNA, 504 bp, Salmonella enterica
atgacaaaaatagagatgatgaactcgttagaagattctcagcaagaaaagatgatgaaccaaatagtattggacgatcatttgttgaatcaaatatcaatgacagtagagccattgacagaatcgatgatgatattatcagaatcagtcagcacagcattaaaccagacgcaaaagacattaaccagagtgaacaactcattagaagcaacaaatacagctttaaactcagcgaaaaatataatagaccaacaagccgtaaagttagaagaacaacacagaaaactgcacaaatactcaacagagttaaaaaacaatacaataaagaaccaatcaagccttataatcaaggtagcttcaatagtgggagttctaaatttagcagcagttctatcagtaggatacttgatcatgcagaaacagccacaactgccaccctgtctcttatacacatctccgagcccacgagacctctctacatctcgtatgccgtcttctgcttga

SEQ ID NO: 403991 - DNA, 336 bp, Salmonella enterica
atgaaaatgcacaacgaccctcactcctggacggagttaattgagttacttcatagctggtggcgaggtgatacaccaatcggcgcagttcttttatcggtagcgatggctgtactgcgaattgcgtatgtcggcggcggctggaaaaaaatgggtctggaagggttgatgtgtggcgccatgacgctgacggctgtttccgcactcgagtatttcagccttccacaatctctatccattgctatcggtggcgcgctgggcttcgttggcgttgagcaggtgcgctcagtggccacacgcgttttcaatgttcgctttggtggcgacgccaagtaa

SEQ ID NO: 403992 - DNA, 1020 bp, Salmonella enterica
ttggataagtttgatgagattcatgtggacattgaatctgagcagcaagccttcgatttgcttgaaagctatcttgatggttatggtttacctgacagcttaagtttcaatggatggccaaaccttaccatcaaattaaccggtgagaaatttaacagatcccttacaccttcagtcatgaagggttttgttgaaatgcaggctcaaatcaacaaatcatatgcccttgccaagtacggtgtccctgacgtccgcaaactgaccaaagaagaacttgacgctctggaaattgaagttacggtagaacaaggttcttcaatagtagaaattaacattgatggttttttaaccaaactcacacaggaacttgttggtaaaatgaacgcaactgagatcatgtttactgttctcggcgcagcagtcatctggggcggagtaacagtatttaaacggttcttggacaaccgcaaagatactcgccttgcagaaattgctaaggatggagagaaagaacatctccggactatgcagatcatgagcgagcaagaaactaaacgcctgcgggtcatttctgaaatggttgcggaaaagccgcttctcgataacatggaccgaatgtcgtatgacgctaaaacccagatggttaaatcctttgtgcgttcagatagcgcccaaattgatggcgttactattgattctgaaatggcgaaagagttagttactaatgctcgtagacgttcatcagaaatgagaattgatggtatttatcggattgaagaagttaataacactgatccagagagcttcaaagttaaggttcgtcgtgtcgataccgaccaacgcctaacctgcgtagttcaggatgtattccttgatgaatccggaaataaagaagcgttgcagcgagctgaatgggaaagaaaacctgttcatctgagtattaacgcaaaacatgtcgatggtgacattaaatcagcagtaattctctatgttcgagacgtggagaaaaagcccgagtaa

SEQ ID NO: 403993 - DNA, 378 bp, Salmonella enterica
atgcgtgatattcaaatggtacttgaaagatggggcggatgggctgcaagtgataactgtggcgtagattactctcatatcgcggcaggattcaagggattactgccacagacaagcaaaaccagattgtcatgtactgatgatgatgcgcttatcattgaaggttgcctagcacgactgaaaagccgaaagccgtatgagcattcgcttcttgtcgctcactacctatacggtatctcgaagaggaagatagctaaagcgcgaaagaaggatgagaaactgatacgcatcgagatacagatagctgaggggtttattgatggctgcctctcgatgctggaaattcgtttagagatggacccggaagtcaaaaattga

SEQ ID NO: 403994 - DNA, 1068 bp, Salmonella enterica
atgaatttcaaggataaaaattgtttccctaacgaactcatagcgttggcgaaaatttcaaaaaatgatgttttagataagttcggaacggatgtttttaaaaaggttgtttatgatgttttaacaggtaaaaatgttcgcgaattcactgaaatactaactcgtactagattgttagaaagcaatctctctttttttgacttttttgtggataaaatgaaagaagggataacgccaaagcagctttatctctatgcaaaaaatgcattatcgaacaagtcttatgttaagtctaatcaacctgttctcgagtggatggttatgatgacaaataaacagacccaaaatgttttaagagatgagcatggggatggttttgatagacttgctttaaggacgcaagaagaaatacttaaaataaaaaacgggtatgaagataaaattggagagatatctattggtgggcaaaaggtgtctttagaagatttttgctatattattttatctcttggttcgcaaactttaactattaggggatctgagaaatctcttcatggtaaatattttgaaaagctaatactcggttctttatttacaataatgggttttgaatataaagaaaaaattgaagaagggttaaatgctaaatgttttactctttcaacaagagctgatgacagggagtctgatgctactcttgtttttaatgggaaggcgattagggttgacattggttttattggtaggggtaacacagaaataagtttggataaagtatctagatttagacgaatggatgatattggcggagtgatgcataatataagcacaatggttattgttgacgttattggtgatagaagtagaatagttaatatggctgaagagattgatggtaaagtttttgcgatgagtgatccgtattgggttgcaaaggtctcttcctatattagttcgaaactgaatgtagatgatcttttagaggataaacctcaacttaaagacatacagtcttttatatctgatgcattagagaatgtagatctggaaaaatacattaaattataa

SEQ ID NO: 403995 - DNA, 1131 bp, Salmonella enterica
atgacagttaaaaacaattacttaaacagaggttatttggtaacctctacgactcaggcgaaaaaaatagcaaagttgcacctagagaaattagacttagctgataaattttcctttgggttacctgaagtcgatgatcggtaccatgtatggcgtgtaccattagtagcgacaggccacaggattggtgaaatagttataaattcaaaaacgtcaactattgattataagaaaagttcgaagtctccatttcttattaagaaagcaatggaggttgtccataccccaaaaaaggtaaaaaaagaaaaaaaaatcatatcaaagtcaccattaaataacatgttactacaaggcaactgcgcggagaccttgaaaaaattacctgatgaatcagtgaacttagtattcacatcaccgccatattacaatgccaaaccagagtattccgaatatcatacatatgatgaatacctctctctattgcgttcagtaataaaagagtgccatagagttttaagcgaaggtcgttttttcgtcatcaatgtctcgcccgttttaataagaagggcgtcacggaatgaagcatcaaaaagaatagctgttccttttgacttgcacaggttatttatagaagaaggctatgaattcatagatgatatacattgggttaaaccagaaggagctggctgggctttaggtagaggccgtcgattcgcagctgaccgcaatccgttgcaatataaaccagtaccagtaactgagtacattcttgtttacagaaaaaaaactgataaattaatagattggaacataagaaaccatcatagcaaagaggatgtttttgactcaaaaatcggcgacgattacgaaaagacaaacctatggaaaataaatccatctcgtaacagaaaacatcctgctacatttccatacggtctggcagaaagagttataaaatactattctttcaaaaatgatgttattttagatccttttgctggatcgggaacaacagcaaaagcagcaattgatttaggcagaagatttgtgatgtgtgagatatcaaagcagtatattgatctgatcatagaaggaaccatgctaggtggtgatttaaaaatcataaattaa

SEQ ID NO: 403996 - DNA, 234 bp, Salmonella enterica; identical to SEQ ID NO: 400820

SEQ ID NO: 403997 - DNA, 381 bp, Salmonella enterica
atgaaaaaaataacttctctattattactcggagtctttggcttgaccggctgcgctcaaaatgtcagcccacaagtagcagctcaagctcaagcgcctatatattgcgaaaataagcagcaatgtgatgcttactggactaaagcaaaagcttggatagcaatgaactcaggctggaaaatacaaatggcggatgaaacggttattgcaacgtactcacctattggtaatagtgcaattttaggatatcaagtggtaaaaactccaattggaggggaaaggcacgaaattgtcgttcaaacagcctgcgccaatatgtttggctgcattcctaatgccatcgaacaaacagcaaaattaaaaaactacataaaaaactga

SEQ ID NO: 403998 - DNA, 210 bp, Salmonella enterica
atgaccaagtttgaagctttcaaagatcagataacgaatgccgctaaagcatcttttcctgagtgggtaacgtttgaatatgaaaatgattttcctggatataatgaatcctttgtttatgaatccgtctgtgctattaaaaaaacgggtgagttagaagtaagaaataatgcggacagatattttagtgtgaagtttatatcggcctag

SEQ ID NO: 403999 - DNA, 213 bp, Salmonella enterica; identical to SEQ ID NO: 10074

SEQ ID NO: 404000 - DNA, 486 bp, Salmonella enterica
atgagcagtcttttagcgctggcgaaggacttggagcagcaatcgaaagcgcagcagcagagtaccggcgagatgctgaaagccgcattcagcgagcacgagcagtctgtaaaagcggaactgagcgcaagcgcgaagagaatcagcgacgccatcagcgcccacgagcagggtatgaccgcggcgatgcagtcgaaccggctgagcgtgttgcgtatggttggccggacgtggctgaccatcaccctggtctcggtactgctgatcgccacgagcgggagcattctgtggtggcaggggcagcagatcaccgggaattaccagactatccgggcgcaggagcggacgcaggccatgctgtcggagaagaaccacggcgtgcagctgtcgctctgcggggagaagaaactgtcctgcgtcaaagtgaacccgaaagcgggagcttacggggaggaagggaactggatggtactggagaggaaatag

SEQ ID NO: 404001 - DNA, 288 bp, Salmonella enterica; identical to SEQ ID NO: 15891

SEQ ID NO: 404002 - DNA, 396 bp, Salmonella enterica; identical to SEQ ID NO: 15892

SEQ ID NO: 404003 - DNA, 264 bp, Salmonella enterica; identical to SEQ ID NO: 15893

SEQ ID NO: 404004 - DNA, 1059 bp, Salmonella enterica
atggcgatctatgccgtatggaataacaaaggcggagtggggaaaagttatcttacctttcaactagcctctgagtacgccagacagaacccgacaaaaaaggttctggtgattgatctatgcccacaagctaactcatcctcaatgttacttggcgggatggttaatggcgaaaatacgctaaatcagattcattctgcaacacaaagaaagactatttctggatatattgaggataggattagaagtccatatattccgacaaatacaggttctaactacgtaatcaacgtatctacatacaatagcagaatcccagataatctatatcttgttactggcgatgagcaattagaacttcaagcatcaagagttgttggagcatcattccctggacctcatgacgcatggagaactgttcatctttggattaacgatctaattagtgacatttgtaactcatgggataatggcgacagctgcgttttcatcgactgcaatcccagcttctctatttataccgagttagcattaaccgcagctgaacgcctattaattccattctctgctgatggttcatcaaaaagagctgttaaagcagttctttctttagtttatggcgagcgacgtcatctgaacgaaccacagtcagatttctatttaaacagcaatcgttattctatgtcattaccacaaatatacatgtatattggaaacagattaactcaaatgaacaactcatcagctagcgcattcaaaactgtggtaacagagatcggcgatgagatttggaaagtgtggcaaacaaaaccaagtttattctgcattcatccaaatggaagctcaacgccgaataataaaaaatcctttaggaacatgttccagtatgaagtaaatgatgccaatacagcatctgtcgtatcaggagcacttggtattccaattgccacactaaccgcaggaaataagaatgttgcgggaagaacaataaaggtaaatcagacacagcttgataagcaagtgcccaacattgtcgctcttgccggtatgattgagtaa

SEQ ID NO: 404005 - DNA, 255 bp, Salmonella enterica
atggattctaataacagtcagaaaaaccttcaagataagcatgctgatcttctggataaaacttatactctcggctggttggatgggtattcagaagggtatgatgatgccattgaagattgtcaaaatgccttgaataaactggaaaatgaaaacgaattgctcaatgaaattattgaaaacaaagataatgtaatcagtgaaatggcatctagtgtgggcagggcgttgcaaacggtaaagaaaaataaataa

SEQ ID NO: 404006 - DNA, 162 bp, Salmonella enterica
atgcgttatccctggaacgggagcgtcagccggaaatacaggaacgcacgctggatggtccttcgctgggatggtgaaaccatgaaaaatggcagcttcagtggattaagaggggttaatgtggcctgtaccatctggttgcataggtattcatgcggttaa

SEQ ID NO: 404007 - DNA, 234 bp, Salmonella enterica
gtgacggagctggaaagacatttgctgaacgcattagagcaactgcaacaggactatatgcagcggctgagcgaatgggagagcgccttcgtggaattgcagaagatgttttcgcttacgcaacgggacaacgcgatgctgaacgagcgggtcatgcagttgagtcagcaggtgcagcacttgagcgagcagacagaacgcttgagccagttatacagcgagaactggagataa

SEQ ID NO: 404008 - DNA, 234 bp, Salmonella enterica; identical to SEQ ID NO: 404007

SEQ ID NO: 404009 - DNA, 585 bp, Salmonella enterica
  misc_feature (549)..(558): n is a, c, g, or t
atgatcgtaaacctatcacgtttaggtaaaagtggtacgggaatgtggcaatactcgattaaatttttaacggcactgcgagaaatagctgatgttgacgcaataatctgtagcaaggtacacgctgattattttgaaaagctcggttatgcagtagttactgttccgaatattgttagcaacacatcaaaaacatcgcgacttagaccattagtatggtatgtatatagttactggcttgcgctgagggttttaattaagtttggtaataaaaaattggtgtgtactacacatcacactatccccttactgagaaaccaaacgataaccgtacatgatataagacctttttattatccagatagttttattcagaaagtgtattttcgctttttattaaaaatgtccgttaagcgatgtaagcatgttttaacggtatcttataccgttaaagatagcattgctaaaacttataatgtagatagtgagaaaatatcagtaatttataatagtgttaataaatctgattttatacaaaaaaaagaaaannnnnnnnnnagctgttggtgcaagttggccacataa

SEQ ID NO: 404010 - DNA, 900 bp, Salmonella enterica; identical to SEQ ID NO: 402980

SEQ ID NO: 404011 - DNA, 276 bp, Salmonella enterica
atgtttatcatttcaggcagaacaatgctaaagaaggcgcagcaggaaggctatgctgtgccggcgtttaacatccacaacctggagacattgcaagtggtggtggaaaccgccgcagaattgcgctctccgctgattgtcgccggtacgccaggcacctttagctacgcaggcgtcggtaatatcgtggccatcgccgcagaactgggaaaagctggaaccatcctctcgcggtacatctcgatcatcatgaaaaactggccgacatcaaaatga

SEQ ID NO: 404012 - DNA, 330 bp, Salmonella enterica; identical to SEQ ID NO: 400270

SEQ ID NO: 404013 - DNA, 144 bp, Salmonella enterica
atgaaacggaatggaatgaattggaacggaatggaatcgaatggaatggactggaatggagtggactcgaatggaatggaaacgaaaggaatggaattgaatggactcaaatgttatggaatcaaagggaatggactcaagtag

SEQ ID NO: 404014 - DNA, 219 bp, Salmonella enterica
atggcgttctctgcaagccggatgcctttttctgccgcctggcgtttaatgtccgcttccagttgcgccagttccggtttcagtaaatccgccgggcggcaggtgacggcctcttcgccgtccagcactctggcctgtaacgccgcgttgaccggcgctggcgtgtggccgtattcgcccttcagtatcccggcggtttctttggcgatggttttgtag

SEQ ID NO: 404015 - DNA, 747 bp, Salmonella enterica
atgacaacggataacacgaacacgacacgtaacgattcactggctgcccggagcgatacctggttgcagtcgttgctggtctggtcacccggacagcgggatatcatcaaaaccgtggcactgttgctgatggtgctggaccacatcaatctgatatttcagcttaaacaggactggatgtttctggccgggcggggtgcgtttccgctgtttgccctggtgtgggggcttaatttgtcccgccatgaacatatccgtcagtccgccgttaaccggttgtggggatgggcggtgattgcccagttcgcgtattacgtggccggtttaccgtggtaccagggcaatatcctgtttgcctttgctgttgcggcacaggtgctcaggtggtgtgaaaatctctcgcttctttgttctctgggagccgtgatactgattgttgcatggatacccctgtctcagaccagctatggcgttccggggctgctgttactggcggtcagctaccggctgtaccgggcggacgacctgacggagcggatggtactgtcagtctgtctggtgccggctattctggcgcagaacctgataaccagcgaggttgccgcgctggcaggactgctggtcacgggcgtgacgatatggctggtttccctgacgggcagaaccctgccgcgcttctggcccggggattttttcccggtgttctacatcctgcatctgactgtgctgggcattctggcgctgtaa

SEQ ID NO: 404016 - DNA, 252 bp, Salmonella enterica
atgaacggattcagcagaaattcacgaaatgctcaggtctggtgctatcagaaagcagggaaccgggctgtccggctggaagtcagaggattctggagggaagcctctgaggcatggcaacaggccgccagtattgctcccgggcggcctggcagcagtttgcccggaaaagggctgaacagtgcctcctgcgctgccggagcaggtggtaacaaaaaaagcagcctcctgcgaccaggtgcaggaggctga

SEQ ID NO: 404017 - DNA, 258 bp, Salmonella enterica; identical to SEQ ID NO: 233790

SEQ ID NO: 404018 - DNA, 177 bp, Salmonella enterica
atggcgggacaacagcggttttggtgtccgaaattgtacaattctgtacatctacgcaaggaaatgtacggaagtaagccaaatggttatcggacggtcggaacatttcgtacagcctttacgttcagtgagttagctggcctggatgtaaccactcgttcaactcaattctcttag

SEQ ID NO: 404019 - DNA, 225 bp, Salmonella enterica
atgatgaattacagcggatttgaagatatgcgtgaacaagtggctgaactggccaacaccatgtgcgacctgcgcacaaccatgaatgagatggagcagcggtacagctttaatgctgacaccctgccggaacgtctggtgcgtcagacgttgtttcgcgcaaaccgcctcctgatggaggcatataccgaaattctggaactggattcctgcttcaaagattga

SEQ ID NO: 404020 - DNA, 480 bp, Salmonella enterica
gtgatacaggggcaggcggtggaggccgcctgtcagcccgcgcgaaaacccctggcaggctggcgcctgccggaagggaagcgggccacgctggcgcgtcgcccgttacccttcccgtttgtgatgtgtccggaatgttttttcctgatgttatgtttctgtggttactgttcttcttcctcttctttccgttcctctcctgtttatggctttcccgggcgtccccctggcggggcgggctgtcgtgaacggagccagcggagctgtctccgccctggcgggcttccatccctgacgcaaaccccccggcttgcagcgaccggaacggtcgcgccgcccttgtcgcgccgtggcctgcgctcccggcatcccggcaaaaggccgccgggatgtaaggggcaacgccgtttcgcgcacgcgctctccgccgttgcggcgggtccctgctcattgcctgccgggtgccacacacccgtatga

SEQ ID NO: 404021 - DNA, 207 bp, Salmonella enterica
atgcacatcccgcaaaagtttttgcccaaaagcaggcaaaaacttttgcggtctgcccccggacagtcgtttccggccgtggcagtgatgccccttgcggcgaaggttctcaaaaaggtgatggtgaataccggagggaacaaagagcaggtccccgcaaaacgtcaaaaacgcggctcccgaaactcaaaagatgatgggggctga

SEQ ID NO: 404022 - DNA, 303 bp, Salmonella enterica
atgagcgcattttcttttaacaccgcttatcagccaacaggcgatcagcagaaagacgcaatcgcacaaatcgacatcatgcagaatcgtgctgttcaggcaaatcttgcataccagagcagcctggatgcagaaacgctgttgaaacagttatggcaaatcaatgatgaactgggggagctgttggatagcgtggaaaatcacacgccagttatcagaaaaaaagccagtgatttgagtgcactgatgatgcttttcagccaacaggccggtcagcctatgaccatgttgttgatttgttaa

SEQ ID NO: 404023 - DNA, 687 bp, Salmonella enterica
atgtgtgcactggatcctagagaaaggccacgtaacagtcaatctgtaaataaatatattctgagtgttcaggatatctatcgtaactcacctgttcctgtctgtgttcgaaatcagaatcgtaaaatactttatgccaatggtgcatttattgagttattttcaaaagaagatcagcccctttcgggggagagctatattcgttatcaggttgaggtttatttatcctctctggagctggagtgtcagtctcttgggcatggttcagctttttgtcgtcgctttaattttcatggcgaaatctatcagataagaatggaaaatatttcttttgacagtaatgagtcagttgttttgtggcaaataaatttgtttcctgactatcctttttttcagcaaaatgattgtctgaaaaaatttgctgttgcgaatgataaattttggttgaatgaactctctcctggtactttaattgtgttttcgatgtatatgcttggtgttggtcatgcaacaattgccagggagttaggtattaccattcgtgcatcagaggacagaattaaaccgatgaaacgtaaagttaaaaccagatatgctaagtttgatctttttagaatatctgtaataacaagtaatgaattcacaaaattaattgatgtgatacgtgaatattatagtgttaagtaa

SEQ ID NO: 404024 - DNA, 360 bp, Salmonella enterica
atgaatgctattttgagtgttcagggtgcttctgcgcccgtcaaaaagaaatcgtctttcttctctaaacttaacctgcttcgcctggtgcgtgcggttgttcctgctgcggtgctgatgatgttcttcccgcaactggcgatggctgcccaggggggcggtcaggacctgatggccgggggtaacgccaccgtcaaggccaccttcggtaaagactccagtgcggtgaaatgggtgattctggcggaagttctcgtcggggccatcatgtacatgatgaccaaaaacgttaagttcctcgccggttttgccattatctccgtgtttattaccgtgggtatggccgtcgtcggtctctga

SEQ ID NO: 404025 - DNA, 561 bp, Salmonella enterica
atggtgggtgatgcactgacattccgtgtggcgtttgtcgttcgctggctgttgtgggccgtcaggtttgtggttatctggccgctggcgacaatggccctgatggcgttatttgttttatggaaggacagcaccacgccaggaaaattactggttcaggaaattgacttcgcaagacaaacagcccctgccgggcagtttcctgtaagagaatgtctgccttctctgcatgaccttccgggaggagcagagaacatctgccgttaccgtaatgttggggccgcagagtatgccagggagactgaccggtcactgatgcaactggccaccgcattatgggcaacactggcactgatgtatatgtcgtttgcggcaggcaccgggaaatatccgatgtggcccggaaaaatgaaatgtgtccgggtggcaacagcagatgagcgtctgaaggaagttcttgcagaagacacttccctgccgggaaaaatcaggagatgccctgtttatttccctgatgacagaacaatcaaaaataacggagataaaaatgaacatgcgtaa

SEQ ID NO: 404026 - DNA, 219 bp, Salmonella enterica
atgaacatgcgtaatattattaaaagcagtcctgaatcactgccgcacaattttaatatagccgctgtcggtgtgatgaagaagggtatgtcaatgagtttattttcttctccggggcatattatggttgtcggacaaacctgcgcggggaaagcaaatctgactgcagagttaatttctgctgttgtggggaataataaaaaaggagaagggcaatga

SEQ ID NO: 404027 - DNA, 516 bp, Salmonella enterica
atgaaaaaaatttctttatttgttcctctgctgggaaccttattactttccggctgcgccggaacgaactctgattttgagtgtgatgccaccacgtcagatacctgcatgacaatggaacaggccaacgaaaaagccaaaaagatggagcagcctgcagatgcaaagccggttgcggcatcactgccgcgcctggctgacgggaacttccggacaacggcggtacaggccgttcccacagcaacaacgcctgtcagcaggcctgttgtggcagcccgtcccgagcagaaactgctggcaccccggccgctctttactgccgcccgggaggtgaaaacgattgttccggtcagttcagttgcgccggtaacacttccccgcccgctaagaacgggtgagcagacggcagcattatggatagcgccttatattgataatcaggatgtttatcatcagccatccagtgtgttttttgttattaaatcgtctgcgtggggaaagccccgcattaattaa

SEQ ID NO: 404028 - DNA, 219 bp, Salmonella enterica
atgcatacctttatttttcttgtgctgatgaaaaatgttggcggtggtggtatctggaatattacacctatgccaaatacggatgtatgtgtacagatccttcggagaatcgaagcgcgtggaggcaggggctttggaaatacaggggagtgtattgaagttaaaacaaatgaacctttgaacaatgtgatggatacactgaatggtggtgggcaatga

SEQ ID NO: 404029 - DNA, 405 bp, Salmonella enterica
atgagagcttactacttcgaaggaaataatattgactggtttatatgcctgtgcctctttcttgtggttatctgtgttgttaacgcactggctatgtttgttatccctgaaaaattcagcctgcaggtcagcagaggaaaaacattagtttgtagtgcgcttattggatgtttttcttttattacgcttgttgtgtccgccagtcagtcattcacgatggatgaactggacgtcgggagatactggaaaaatgactgtaaacttctggaagtgaatataccgacaggcgcatttactgaaccggttaataaactggaatgtgccggagtcatcgttaatgtgccagtggctcagtatgaggagtatatccgacagtgggaattatataaggctaaaatgaaatga

SEQ ID NO: 404030 - DNA, 363 bp, Salmonella enterica
atgaattcgatatatttaaaatatgttctgtcttttatattcgttggtggtatggctatgttgatatgtggtcttttctacaatgattaccttgagcaacaacctgcaacaccagaacaactgacagagattacacaggataccccctgtgcagcagaagcatttaaggaagctattacgtctgacatctctgattatcagcctgaacctttaagtcttggtaaggcaaaagagcttgcatcagaatgtagaaatgaaaacgaaatggcagaggcgcgacgggtaagaaaaaatgagcgcaataaaatacgcgaaaaacaacttcaggcattaagtgatgctgattcagtaaaggaacgttaa

SEQ ID NO: 404031 - DNA, 177 bp, Salmonella enterica
atggaaaaagaacagaaacaatgtggcccgcagcttcccttgcatcaggatgaagctccccctgcattccaggtcacttacagtatagagaaaaaggaaataacagcagagcaatacagagactggcaattaattgccgccagactcagaaaaaagataaacagagaaagaagctaa

SEQ ID NO: 404032 - DNA, 312 bp, Salmonella enterica
atgaaggtgaggataataagagataagcacgcagaggacttcagaaaaatatgtcttctgtttatccggttaacgagcaatgtattaaaactgtttccttttgctatggtgatgtgctctgtggtgtggttttatttttgccctgaatatattctctcagacattgttaacgactggcatgatgcagatacactggaaaaaatacggcttgtcagactgtatctgaagacgtcttttattcttacagtggtgggtgttgttatttcatatctttcttcagataagtttattcccgttaagcgcaggaaatga

SEQ ID NO: 404033 - DNA, 372 bp, Salmonella enterica
atgagtttacctgcaggctattaccggattgacccggacatccgtgcactggtggccgcgatgaacgttcacggatttcgtacatatgcgtcctgtcagggacatggtttccctgtcacaaagctgccgccttatattgcctttgtctgtccggtaaaaatggcagcccttcttgagcagcgactgcggcaggattcggagtccatgatgccccggttgctgtggggctggtccgtcgaggcttcttttaacagtgattttcagctctgtttccggcttcagccggaagggcctcatcactggtatcaccggtactgtcgccgctcactgcgtacagacttcaggacgctggtccgcttagtgaatccgtaa

SEQ ID NO: 404034 - DNA, 363 bp, Salmonella enterica
atgaattttatttctttatggcctttattgctggcccaggtgacagtgatgtcactgacagtgattttccttgctgctgacaggcgttttttttcatgggactgttttgtggtttgtaccctgtccatgatgatggcggaaggtattgttattatgaaatatgaactgtggtatatccctccggccctgctgggtctggcaggcgtgttgtcatggatgctgctgctactccatacaggatatttttcaggcatgtcagttgtgcataagcgtctgtggttagcagttgcctcagtgttttctggtgcaggaatgattatattctactggttactccagccatcagaaaccattatgaaataa

SEQ ID NO: 404035 - DNA, 402 bp, Salmonella enterica
atggataaagaaaatagtagtattcctgaaagatggttaattgcgtctggtgttgcggttattttactgaccttattagcttttatgagttttccggatccggatgtcagtatgaatcgctattatagctggctgatgaatgtgttaattctgagtgtgaccggggtaatgtatgtggcgctgtctgttgtaatggtaatgctttattttctttacgagcgtaacagcaggttattgtacttgtctgtgcttgccctaatcattgcagcaggtatctggcttctcagatttctggataattatttaatgacgccagcatttcatgttgctctgtttgttttatgggtgttcctctgttttttgtaccttcgctgtaaaaatgaaatgagtatatcggaataa

SEQ ID NO: 404036 - DNA, 387 bp, Salmonella enterica
atgaaagaaaaaagaaatgatgcggaactaaaaaacagaaaaactaaacgggattatgaacgcagggtttctgatatatattttgatctgttttttgtattcgttgctgccggaacttttttatgggtgattatgcacagtatttttgatgcctgtattgattcgtggatggctgacccgaaattacttaatttccactatatgtggaacatcctgatgtatgtcattccgtatacgttatgggcgtttgcaggtggatttcttatcgtatacgtcaggaaccctttaaatgaattaataaacggggggatcaggatattccggctgaaacgccgtatgcgccgggagaacaaattaagggagggtggcaataatgcttcgcattaa

SEQ ID NO: 404037 - DNA, 1374 bp, Salmonella enterica
atgcttcgcattaaacctcttctggttctttgtgccgttttactgacggtcacacccgcagcgtcagcggatgtgaacagcgacatgaatcagttctttaacaagctgggctttgcgtccaatgtcacccaggcgggcgtctggcaggggcaggctgccgggtatgcctatggtggctccctgtatgcccgcacccaggtcaaaaatatccagctgatttccatgacgctgccggatatcaatgccggatgtggcggcatcgacgcctatctcggctcgttcagttttattaatggcgatcagttgcagcgttttgttaagcagattatgagcaatgctgccggttacttctttgaccttgccctgcagacaacggtgccggaaatcaaaaccgcaaaagacttcctgcagaaaatggcaagcgacattaacagtatgaacctcagttcctgccaggctgcacaggggattatcggcgggcttttcccccggacgcaggtgtcccagcagaaagtctgtcaggacattgccggtgagagcaatatttttgctgactgggctgcttcccggcagggatgtaccgttggcgggaaatctgacagcgtcagggataaagccagcgacaaggataaggagcgggtgttgaagaacatcaatatcatctgggactcgctgtccaaaaacaggatgcttgatggtaacaaggagctgaaagaattcatcatgacgctcaccggtacgctgatttttggggaagacagcgagattacccccctgccggcgcgtaccactgaccgcgatatcctccgggcgattatggaggggggaacggcaaaaatttaccactgcaacgattcggacaagtgtctgaaggtggtggcggatgcaaatgtgaccatcgcccgggataaagccctgaaatcacagattacaaaactgctcaccagtattcagaataaagcggtgagtgatactccactggatgacagggaaaaaggcttcatttccagcaccaccgtccccgtctttaaatatcttattgacccgcagatgctcggtgtgtccagcagcgtggtttaccagctgacggactatatcggctacgacatcatgctccagtacattcaggaactgcttcagcaggcccgggccatgattgccaccgggaactatccacagaccgtgctggacagtgtgctggagaatctgaatcaggcacagcaacagattgctgttttccaggggcaggtaaaggtccagcaggatgcactgctggttgttgaccgtcagatgagttacatgcgccagcagctgtccgcccgtatgctcagccgttaccagaacaactatcacttcggagggagcacgctgtga

SEQ ID NO: 404038 - DNA, 540 bp, Salmonella enterica
atgctctttctcaccaatttcaccggcagcgaactctgcaatcttatggctgggggaacggaaaaaggcacgggtgttcatgacgtcaaacagcgaggctgccgatttctcaccgtagatatcttccagctgggcataggactggataccgaacacataacagccaccgaacttacgggcttccggcaggatctccaccaggtccggcagtttgtgcagcgtgggcaactcgtcacagaagaaccacacacgacggttacggttctcccccatcgccatcaggccacgaatggcaatggacagccacatggaaaccaccggcttcagggaggcatgggtgtcggcgttcgacgagataaacagccagccgtttttcttatcttcccggacaccccgcatccagtcacggatggtgaagggttcaccgttatgctcgatcccctgcaggtaacggatggctttcacgtagttggtcagcacagcacggatggaaatcgccgttttctcaattttctcttccaccaggttggccgccggtga

SEQ ID NO: 404039 - DNA, 315 bp, Salmonella enterica
gtgaagtggcgttactcactgcgctggaaactgccttctccctgtcctggggagcatgaactggtttcagaagtggtggaggcggggcagcctgcaccggcatccgttatgtctcgctgggttgccggtgcagggtatgcggtctgtctggattttatttctgatcgccaggtgtgccgctggagcgaagaacgtaaggctgcggtacggcggcggaatctggagaaacgtatcaacaggcatgcaccactgtttgcggatgaactgattgcccgtgaactggctgaacgaccggattattttcagggaaagtga

SEQ ID NO: 404040 - DNA, 1110 bp, Salmonella enterica; identical to SEQ ID NO: 379980

SEQ ID NO: 404041 - DNA, 234 bp, Salmonella enterica; identical to SEQ ID NO: 8563

SEQ ID NO: 404042 - DNA, 750 bp, Salmonella enterica
atgacttatgcatccccggctcttcgtcgtaatccacaggaagtatctgaacactttattaaactcgttcatgctcgaattgctgaagtgtctggctggaagtatatattcgaaagaatacctgctttcaaagacgcttgtgcaaaagccccgagccaggttccttgcccgtttactggcgcagggaaatcgaagtttcgtttccgacaaaaagacctttataccggatgtgcgatccataatgactttccggtaaatgagttttgcgacggaattgatgttctggcgaaatattatgaattaagtaaaacgcagacttgcaaaaagattctctcagattttttcgggatggatctgcatgctccgttaactgacgccgacattgaaaatgaacgacgctataaatcagcagttcgtgccacagaaactcttgaccgagaggaagtggcaaagcgaatgcgaaaacttgatgtgatgtatcactataccggtgaaatcaagcctaatactcctgttgctttgtacctccgtaatcgtgggatctcccgcttactgagtcacttaccaaaggatttaggctttaataaccggatctactattgggataaagataagcagaaatcgattatctatccgggaatgattgcgatctatcgtgacacccgaggtcggcctctgactattcatagaacatacgtagacaaaaatggtgataaggcacctgtagaaaatccaaagctgataagataa

SEQ ID NO: 404043 - DNA, 825 bp, Salmonella enterica; identical to SEQ ID NO: 376363

SEQ ID NO: 404044 - DNA, 1569 bp, Salmonella enterica
ttgttagtacactcggaatctaccgcaaaacatataatggactctactcgttctagagtccaaaaagtaaatccatacaagctaatatctctctgtttaaaatacaataataaaaaacatgctactcacgaagaaatgatgcggcatcttccatggataattaatctatgtattaagtggtctgctgcagtgatatcaacaaagcgatcttttcgtgacatcaatgaagaacagtccttaaaattatttcaggcagtatacagctctctcgacttcgtacctaatggtgtaatgaaaaaggatggaattgatttttttatcagaaacattatctatcaacaaatgatttatcaaaaaacagatgctttaaacacaattagtcgacaagcattcctatttgaagacctagaaaaaacacatagcattgaaacgaagtttaaagaactaacaaatgtcgaaattaaagactttttagcgctttcatttgtaatgatatcattaatcttaagcaatgagagcaataccgtatttaccgcaaattcattcgcgataattttcgatatcataccaaaatctacagtcatagattttctaaattgcttatcaatagagcaatctaaactgcaggatttcgccaagactaatatgcatagtactcctttagttgagtattatttaccaacaccttttatagagaaaccctttattaaagtaaatgatgaatacctgcaagtccatccacaattaacatctacaagtctgcaaacattcatttatgatttacttagaaaaaataatgcagaagaatttatgaataaatttggcaaattgtttgaggattgtcttcataagttaataattgagagcaagataaaataccacaccgaaaaagatttgataggtttattaccaagagacaataaagttgttgactttgttatccataataacgaatcgaatatttacatagatgtcaaaggagtagaaatccgtagtagagggatggttacactcaaccccaaggatatatctggcagcatcaaaacatccgtattaaaagctatcagacaatcattggaagtacatgaaggccttgataaaataaaatcaccagtaattccattcagagaagaaagctatatcatctgtgttacatttaaaaacctctaccttggaggaggtaagcatatttttaattcatatgctaaagaagatattgttaagatatacgaaaaattcgaagaaaaacatcatataccttatgaaaatattttttgcattgcatttgaagagttcgaatatctattagcatcatgtgaataccataaggtcgagcctcaagatgtattaagatatgtcgttaagcaaaacaaaaacccctcaacctccgcatttatgcttggtcagcatttgagggattactttaaaacaattaaaaactctacattagttaacgaatctgggttaagaataataaatagaatcacatcaaaactctcaatgccgactaagcaacaaatccatgcggataaggcagtcaatggcgacaaattggcggcagaacattaa

SEQ ID NO: 404045 - DNA, 744 bp, Salmonella enterica
atgaaagagcgcggaatgatttttaacggggagatggtgcgcgccattctcgacggccggaagacgcagacgcgtcggatcatggcgattcagccagagcattcagagctgggattacgccgagtgattggctccaaaaatggcagagataacgggaagtatttttggtcgcagtccgatgcgtgcggcctgaaggcccgctcaaaagtgttcggttgtccttatggagaagttggcgatcgcatctgggtgcgggagacttggggagtagtaagtcacgaacttgatgaagatggccgcatccagccatggaaccctgaccgctctgctacagcgattcacgaaatgccgtttggtaatggttattactctggtcacgccatctatgccgcggatggggaatttacctggggtgatgacgatggctatgaggatggtcgttcgtgttggaaaccgtctatccacatgccacgcgcagcctgccgaatcctactggagattaccgacgtgcgagtggaaaggttgaacagcatcagccaagaggatgcgagagcagaaggaattattgacggtggctgtctcaattgcggtgaacctgaaccatgcggttgcgctaatccagagcctgacgcgacagatgctttcgcctacctgtggcaatcaatctatgggcaggaaaactggaacgccaacccatgggtctgggttattgagtttaagcgtatcgaaggcggtgcagaatga

SEQ ID NO: 404046 - DNA, 993 bp, Salmonella enterica
gtgagcgaattagcaattatcgaaattgcgccggacatggcgccaagcatttacgtagaaaacggtctggaaaaattcctcgaacagatccgcgaaagcgttaaggaagttcctgacctgagtactgccaaaggtcgtgcccgcattgcatctctggcagcacaggtttctcgcagtaaaacagcagttgaaaagcctggccgtgattaccttcgtcatctgaaagaagccgtcaaaccagctgaagctgaacttcgtcgatttgtatcagcttgcgatgagatgcgcgatgaggttcgccgcccacttaccgaatgggaagccgagcaggaacgcatcaaggcagaagaagcctggaacgcaatgcacgaagaagcgctggtgatgaacaagatgttcgatgatcagcgtgccgcgcagatcgaagcagaccacgagatggcattgctgatgaatgacgtattcgaccgcgaagcgaaggcgaaagcagaagaagcagaacgccagcgcattgctcatgaagaagagttgaaacgccaggcagaagaaaaggctaaacgtgaagccgaagagaaaatcgaacgcgaacgcgctgaatcagcacgtcgcgaggctgaattaaagttcaaggctgagcaagcagagcgtgaccgtattgccgcagagcaaaaagctgaagcagagaagaaggaagccgctgatcgtgccgagcgcgaaaagcaggaagctatcgcagccgaacaacgcaaagcacaggaagaagcagatcgcattaagcgcgaagccgaagcaaaagaggctgctcgcctggctgaagagaagcgaatcgctgatgaagctgcagcacgcgctgatgatgtggagcaccgtcgggcaattaatgcggctgccgttcagtcgcttatcgatcagggcattccagaagactgggccaaagcttgcgtagtcgctatagctcgcggaaaagttccagcaacaaccatcaactactga

SEQ ID NO: 404047 - DNA, 321 bp, Salmonella enterica
atgagcattgtcgacgattcacatctgaccgacgaagtggttaacgctgctttcgaaggtaccaacttcgggcgtacagactttcgcaccatcctggcagaaacagtcatgaagcgagcgtctggttatcactctggctatacggcaacgactatctgcatgaatatcgggttgcttagcaagaagaaccagagcgcaactaagcttggccttacgttcgctttccatcactactataagccatgtgttcgtgaagcgcttatgcctgataacagcttggaaatctggaaaaaactcggagagcaggaggcagcccaatga

SEQ ID NO: 404048 - DNA, 594 bp, Salmonella enterica
atgacagcactcaacaaacaggcgctgcgtgaagcggcgcaggaagaaatcatgctccgctctgtcagtgacgcatctgacgcttggcaggatgaagcaagcccggaagctgttctggcgctgctggatgaactggaagccgcacaaaagcaggcaacgcagcaggggaatattgccgttgaactttttgacgaggtaacccgtttgcaacgcagtgctgacgataaagcaccagagctgcgcgaacaactggaagccgcagagaagcgcatagcagaactggaggggggcgcattcaatcccgcaattcttgatgtggtagccgaacgccagcggcagaaaaccattgagggatggacgccagagcatgacgacgagcactgcaacggcgaactggcaatggcggcggtttgctacatcaacgaaaccggcgcagtaaaccgcaatggtggaaagccgtggggatggccgtgggatgcgtcctggtggaaacctaaaacccgccgtcgcaacctggtaaaagccggggcacttattttggcggaaattgagcgtttagaccgcgccgctggcattggcgtgaagggagagtga

SEQ ID NO: 404049 - DNA, 204 bp, Salmonella enterica; identical to SEQ ID NO: 79018

SEQ ID NO: 404050 - DNA, 123 bp, Salmonella enterica
atgtccaaatgcgacgctctgctttactcgatggcggtgggttttggtctggctgcaggtattcgcgtttacgtagcctgggaatcattaatcaatctggtgtggggtgctattagtgcctaa

SEQ ID NO: 404051 - DNA, 300 bp, Salmonella enterica
atgatggatatcgacgacgaaggacgcaaagcagagcttgacgccaaacagcaaattctggctcagcgcgatatcgacgacatcaagttcgtcatgaatagcgagcaaggccgccgcgttatctggtcgattctggagatgggaaaggtgttctcaccatgcttcgctggtgattcgcatttaaccgcatttaacgaagggcagcgcaacctggcactggcattgtttcagcgcgttatggcgcactgccctgatcagtatctgaagatggccgcagagtctcaggagaaagacaaatga

SEQ ID NO: 404052 - DNA, 546 bp, Salmonella enterica
atgatccgtaaacgcatgatcagactgagaaacgacggtaattcgactattgcagatttctatgcagtggatgaagagccgcagacatttcagatggacatatttaactggactggttctcaggttgtagcagattccgctttccagaacttcttttcactttccgggatcgttaaagctgctgacggtaacgcgaatctcagcatcaattcgggaaatcttatattccctgctcaggaagcgcctagccaggttcttttcagtacccgtattaacggtaccgttggtggtgcgtcaggaacggcaagggaatggatgattcagaccaggcgcccaaatggcgacattgtcggatccgagtcaagcgtgaaggtgaacggaaccagcatcagtaaccgtgacgatgtacttgccagtttcaccatgaatgaacttgatccgttcaccgtcagcggaattcaggtcggtctttcaaatgaatcaggccagaccatcacgttgacctctgtatctgtcagggttcaacgcgtcatcagcattgattaa

SEQ ID NO: 404053 - DNA, 1803 bp, Salmonella enterica
atgagttactttggccttaatccagtaaaccagaatcagcagcttgacgaagcagcatcaaatccagctggctttaacagcgatgttggttttttcgacaatgctgtaggagcggcattgtctggtttgtactccgggctggtggcaaagccagatcagttgctatgggcagggatggataaaatcgtatccccgattgctcagtttgttaacgaaaacacctcgctcaatgacacttcagtttcatacattgctgagcagagaaaactagcagagcagcaggttaagcggctgacgcctgatgccgcgacaaccggaaccgccgggcaggtcctttatgggttgttcgatatgggcgggcaggctgttgttggtacaacgctcggtggtccggtcggaggtgctgcggcggtaacttcgctacagggtttttctgagtttgaacggctgacagcacagggtgttgatttcaggacggcgcaggaagcgggattagtgcagggtattactgctggtgccggaacactgatccctatgagcctcgggttacgtgctggtggtgcgctggcggaaggtgtggcggctcagcttgcgcggacgggtgaaagttcagtgcgacgcgccgcagcaacagcagtacgtgcaacgccagatattgcctatgccgcaggtacaaatattgcgttcggtatggcacagcgtgggcttactgcaaaaacgcttcgtgatggtggctatagcgaaatggctaatcagtatgatgtgttggatcgacaggcaattgctattgatgctgttcttggagtggcgtttggtggtgtcggcagatttattaactctcgcggcgagtctacaagcgcaccaaatttttcaccagttgatgtcgatgctgcactggcggcgaatgccgctcatcatgctgaaattgatattgctcccggtgtgccgatcaacgtgctttcgcgtaattcgcacattcaggctctgcgaaaagccatgtctgatgttagccaggggagacctgtagacgttgccagcattgttgagtctgcatctttcagtgaaattcctgggcgcaagagtctgctttctcaggcagttaatgaggctctgtcatctgtagatgatggagtaacggcgcgcgctatagaaaatcggttgcttgaagaacaggccgcgcagcttttgccgcgtggcgatagacaggtttaccagtctgaaatcgctaatagccaacgaattattgaaaatctcactgaacagcgcgcacaaattcttgcagaagagccaaccggtagcggtaaagctttgtctcgtgctcgatcagataaacaggccagacttcgcgatattgatcaacgaatccggcaggcacaagaacgcctggagttttcccgtaacgcgttggcaccgcacgagcctggcggtcagttttttgaagctcgagcagaactggcacgacgacagcaggcagaaagtgaacttaatgctcaggctgtttcattctataaaacagcagaggtcaggacgccagacgaagtagctccttttgagcccggtaagatattgcaacagacagaacaaaaaatgatggcagatccggcaggagatattgatctgcgtatagctgaagactcgctgcttgaatctccggacatgataatcaccgtgctggatgatgatggtaatccacaatcgcgcagtgcgcgtgaagtactggatgaagcgaacagggaaagtgagcaggcaatacaggattccagcctgtttgatgttgctgtggcgtgtttcttgagaggttaa

SEQ ID NO: 404054 - DNA, 489 bp, Salmonella enterica
atgatctgggcattcgtcaaagcgtactggaaacaattggttgtcgtgctgatgcttgctgctctggttattactgcggtgattgcctggaatgttcacggtgaccggcagtatgcctccgggtatgcgcaggcaaagacagatcagaaacaggctgatgataaggccagggcacaacgcgatcaggagaaaacacaaattgaacgtgaagcacaatcccgtatcgatgtggcgcgtgttgacgctgagcatgctaataccgctgctgacggcctgcgcgccgagcttgacaaaaccaagcgactcgccgaacactataccggatctttccccactggcacgccagccagtaaggtcatcggtgtgctcgccgacatgcttgaagaaagcaacagatcttacattgcgacagcagaagaggctgagcgatatcggtctgcaggactcacatgcgagcggcagtacgactccctgaaagtggggtactga

SEQ ID NO: 404055 - DNA, 363 bp, Salmonella enterica
gtgcttaagttatttgcaaggtacacatcgataggtgtcataaacacactaatacattgggttgtgttcgccatatgcatttatgctttccatacaggacagaccattggcaacttcgccgggttcgttgtggccgtgtcattcagtttttttgccaatgccagattcacctttagatcttctacgtcaaccttgcgctatatgctctatgtcgggtttatgggctctttaagtgctgtggtcggctggtcggcggataaatctggtcttgcgcctatcttcacgttaattatcttctccgccatcagtttggtgtgcggttttgtttattcaaaaatcattgtctttagggatgcgaaatga

SEQ ID NO: 404056 - DNA, 513 bp, Salmonella enterica
atggcaaaggtcgatcaaacaaaagctaatgctctattgcgagcagcaaggactatgtcgcttggggcaaataaaaatacaatacgaattttgtacggtaatcatgttgctgaaaatatcgattttgagcctggtgcaaaaacaaaactcaaaaaaggtatccggggctggagcaaacgcacagataaccgccgagccttttctgctgttattgatgtcgcagttaactattttggttttgatccaataaatccggaagcgagttttcggcaaattgacttcaaccgaataatgagtgtccttcataatctgggatactttgtatgcgcaccggaagttaataaaataatagaaatccttacttctatgaaagaaattgaagaactaggtgcctgcgaaaaatgtaaacgcccatacattgtgccagtgacaaatgatgctcattgtccacgttgcagattatcttcaactgcttcagccatagagaggtattctcaagaagaattagattaa

SEQ ID NO: 404057 - DNA, 1518 bp, Salmonella enterica
atgcgtaacggcgacagtcgtccattgcagcgtccgacgacgccgctgccttcattagatcttctgacgccgccgccgagcgaagttgaaccggtagatacctttgcgctggaacaaatggcgcgtctggttgaagcgcgtctggcggatttccgcattaaagctgatgtggtgaactattcgccaggcccggtcattactcgctttgaactcaatctggccccgggcgttaaagcggcgcgtatctccaacctttcccgggatctggcgcgctcattgtcaacggtagccgtacgcgttgtggaagtcattccaggcaaaccttacgtagggttggaattgccgaacaagaaacggcaaaccgtttatctgcgcgaagtgttggataacgccaaattccgcgagaatccgtcgccgcttaccgtggtgttaggtaaggatatcgcgggcgatccggtagtggcggatctggcgaaaatgcctcacctgctggtggccggtacgaccggttccggtaagtcggtcggggttaacgccatgatcctcagtatgctgtataaagcgcagccggaagacgttcgctttatcatgatcgacccgaaaatgttagaactttcggtctatgaaggtataccgcatctgctgacggaagttgttaccgacatgaaagacgcggctaacgcgttacgctggagcgtcaatgagatggagcgtcgctataagctgatgtccgcgctcggcgtgcgtaatctggctgggtataacgagaaaatcgccgaagcggcccgcatgggacgtccgattccggacccatactggaagccgggcgacagtatggatgttcagcatccggttctggaaaaactgccgtatatcgtggtactggtcgatgaatttgccgacctgatgatgaccgtcggtaaaaaagttgaagagctgatcgcgcgtctggcgcagaaagcgcgcgctgcggggattcacctggtactggcgacgcagcgtccgtcggtcgatgtgattactggtttaattaaagccaacattccaacccgtatcgcttttaccgtatccagcaagatcgactcccgcaccattcttgatcagggtggcgctgagtcgctattgggaatgggggacatgctctattccggaccaaactccaccatgcccgtacgtgtccatggggcgtttgtgcgtgaccaggaagtccatgcggtggtgcaggactggaaagcgcgcggtcgtccgcaatatgtggatggcattacctccgacagcgaaagcgaaggtggcggtggcggttttgacggcggcgaagaattagatgcgctattcgatcaggccgttaatttcgtcacccagaagcgtaaagcgtccatttccggcgttcagcgtcagttccgcatcggctataaccgtgcggcgcgtattatcgaacagatggaagcgcagggtattgtcagcgctcaggggcataacggtaatcgtgaagtgctggctccgccgccttttgagtaa

SEQ ID NO: 404058 - DNA, 456 bp, Salmonella enterica
atggctaacgccagcatcggtttctggatggcggtgctggtgagtgccggcattttggggcaatggccaatgggacgtctggcggacaaatttggtcgcttgctggtgttacgcgtacaggtattcgttgtcatactcggtagtattgccatgttaacccaggcggcgatggcgccagctctgtttattctgggggcggcgggttttacgctttatcccgttgcaatggcctgggcctgtgaaaaagtcgaacaccaccagcttgtggcaatgaaccaggcgctgttgttaagttatacggtagggagcctgttggggccgtcttttgctgcgatgttaatgcagaattattcagataatctgctgtttattatgatcgccagcgtatcgtttatttatctgctgatgctgttacgtaacgccggccaaacgcccaatcctgtcgcccacatctaa

SEQ ID NO: 404059 - DNA, 546 bp, Salmonella enterica
atggagggtgatttacgcaggttaaggggagatcgtgacaaaaaaagcgttcctcactgtatcgttcatgcctgcatgaacgggttattcttcctgactacagaattacatcgctccttcagttcatacatcacttttacaacacttttgcattacttttacatcatttgtacatcacttttacatcattccttcagctcatacgtcactttcatcctctgtgccatttgtacatccgacccccttcctgaatgtgctgaaaacggtttttccggctgtgccggcaacgcctcacggccacgcaataaattgcgtccccgttcaccgttttcgggagggacttttcatcgggtttcaacgaccaggcagagaatcgggtcgctaatcggttgccatgcacctgagtgcataacgattcatgcgcgtaaaactcacagaagctattctgagcggttttcggggggtaaggtgtgttgttttgaggctcaggcgggaaaatcgcgcacaggccgtttcagcggtgcgcgtaatgtgacgttatggtaa

SEQ ID NO: 404060 - DNA, 324 bp, Salmonella enterica
atgagagcatttaatagtatccagcaggatattttcttaaatgctttcagtcaaaatataattctaatctctaatggggcgggctttcgcgggatcgtggaatctcgccccattgtcattgatggatcggacggactaatagaaagtacagaattatatttcactgcaaagaaacaagaagatattgttttaggtagtcaagtttcattagtaattgacgatgcacaggccgaagtaataccaagcccactaaatacctataccatttataacattgaaaacgatttaagcgggatgattaattattatttccgcatggagtaa

SEQ ID NO: 404061 - DNA, 1533 bp, Salmonella enterica
atgtggtttaagaataaaaaagccgaaccaaaaaccaaaaaggaagtaccgacaattaaaggtgatattcgtacaaaagaacgtctaatcaaaaatcctactttcaaacgatcattgggatcggcaatgacaacaaaacaggcaatcgacacggcactaggactaggggcaagtttcgtaactgccgatgtaaacggactaattaaccgtagtctagcgtcaatggtaatagctagccgtgacttaagcattaataacccaattgctaaaaagtactttaccgaaaccgctagcggcgtagtaggtagtcagggtatctatgttcgtcccgatgtacatctatacgaagacgaacaagaaaacatccgaatcagtcaggaactagaatcacgtttctatgactggtgcgacaatcccgaccgttttgatattaatggtgtactagattttagtacattccaaaaccttgtagaaaaagaacgagctatcggcggtgaaattttcattcgtattcataatatcaatggcaatattaaaattgaattaatcaatggtatccgttgcccgaccaataacaatatgttatttgccgacggtcactatatttcaaacggcattgaatataaagatggtaaacctattgcgtactatttcatgcgttataatccaattacctatagctatgattatgcaaaccccgaacgcgtagacgcaagcgaaatacttcattattttcaacaagaatttcaatgtaaccaagaacgcggaatacccgatctagtatgtgccgaaccattactaagtgaattagatagtttcctagaagcaagtctagttactaagaaagtaggatcggcggtaatgggctttatcgaaaatgatgcatccgaaagtgatgatatttccctagacgatggaacaccaaactatttcgataacgaagccttagaaccgggggcacttgtagaactacagccaggacaacgcctaaaagatttcagcccaaaggccgctactgacggtattagtgagtatgtagatcaacaaatgacactaatttctatgggactaggaattacccgccaaacattaacgggcgatacttcatcggctagttattcggcaagccgtctaagtgacaagattcaacaaaatacatatgcatcccgtacaaatctattaaaagtaaaagtacttaaaccgttatatcgtttatggttgcgtcaagaattactaaataatagtaatgagatgggattaaagtttagtgattttaatgcacttctagaagcacaatatcatacacaacgtcccgttagtttagatccgctaaaagatgcacagtatgccgtaatgatgctagatgcaggattagcaagtaaagccgaaattattgcagagtctggtagagatcccgccgtagtattagcccaaattgcaaaagaaaaagaggacgcacaattacaggaagtaaaacaggatgagcaaggaagcgaaaccgaaactaatcaaaccccagacgagggaaattaa

SEQ ID NO: 404062 - DNA, 303 bp, Salmonella enterica
  misc_feature (38)..(47): n is a, c, g, or t
gtgattttattaaaatccccgttagaacgtattctagnnnnnnnnnngtattctagtggtatggttctgaggcttggtttttctatttctactgcaattaatcctgaaattttactgatggatgaatggatgagcgtgggtgatagtgattttaaaagaaaagcagagatgagattaaatagctttatctctaaagcgggcattatggtaatggccactcacgatgatgaactggctaaatctgtatgtaataagttcatcaggcttgagcacggtgagatagttagcaaaggcggattttaa

SEQ ID NO: 404063 - DNA, 312 bp, Salmonella enterica
gtggtgaaggtcagcgacggcggcgatatcagccagcttactgcggctgttccggcagcctcttccgcaccggttcaggctgccgctcccgcaggcgccggcaccccggtcaccgcgccgctggcgggcaacatctggaaggtgattgccaccgagggccagacggtggccgaaggcgatgtgctgctgattctggaagccatgaagatggaaaccgaaattcgcgccgcgcaggccgggacggtacgcggtatcgcggtgaagtccggcgatgcggtctccgtcggcgacaccctgatgacgctggcgtaa

SEQ ID NO: 404064 - DNA, 342 bp, Salmonella enterica
atggcgtttactgaccttgaatatcaggcggtcaaaaaggaagttcaccaattcattgaaagcataaggccacctgagcacattcgtaatgaactggatattgtctatagcatcaatgaccagacgatagatatcggtgaacagcgccccgtgtggcagggtaagcctggtgaaacaagcgtcctgccatcagcaagaatcaagtacatacgctctctggatagatggaaaatctactggatgcggaaggatatgcgctggcatctgtatgacacagcagaaacgcttacggaagcgttagaggtggtcatggttgaccaggattgctgtttcttcgggtaa

SEQ ID NO: 404065 - DNA, 1107 bp, Salmonella enterica
atgtgcgaagaaaacaatctgggtgaaaaaccaatgccgaagtcaatctgctttttcaatcacaagggtggcgtcagcaaaacaaccacggctttcaatattggctggggtctggcgagcgccgggaaaagagtaatgcttgttgacctagactcacaatgcaatttaactggcatggttctagggtatacaaccgtaagcgaaaaccttgatgcgttctacagcagcagatataaccttacaatggaatccattgtcgatgccttgatgaatggaacatctatagaagatgttgtaaacggcagttcggcaaagctttttgagtgtcagaatgacaacctttatcttcttcctgggcacttaagtgtatcaatgcttgattctcagattagtgtagcactgaaaattgcttcaggcgtgccactaacccgcaaccttccaggtaacttaccaaaatcaatcaatctgatcgcgcaaaaaaataacattgattacataatttacgacttaagccctagcgttggaggcttgaatgagcttgcgttgatgtccagcgactttttcattgttcctgcaacccctgacttcttctgctggcaggcgataaattctcttgccgagacaatttcaatatggcattcagagcttgagtttttcaagcagaccgccagatcgtcaacggcagtaaacatcacaaacaagccgagatttataggggccatccatcagagataccgccctagaaatggaatgcctgtaaaatcctttgagcattgggtaaacgaaattcatggagccgtaaataatgtgttggcaccagcattgcataaaattggatgctctgttacggaacaagaaattcaagattccctgaacgccacagacacaccccaccttcgagcttatgacttagctcaaatatcagattttaattcccttatagccattagccagaagttgtcaaagccagtatttgcgataactgatgatgatttaagagaagacggcaaagctggcaatgtttttgaaactatgcgcgataatagaaatacatttttccagcagttcgaaagactatgtcagcgagttttaatgcttacagcttaa

SEQ ID NO: 404066 - DNA, 642 bp, Salmonella enterica
atgaaacaaatgacactaattgagatggatggatttctgaaaggtaaatgcatcccacgagatttaaaggttaacgaaacaaacgctgaatatctggtgcgtaaatttgctgaagcggaggccaagatttcggctctgtccgaagaccaccagaaagcgattgagtcaattaagcaggctgattcggctgttaagttggcacacgagaagttttcagcgatggcggcggagaatgcggggatgaagtcatttggcgacaagcttaatgagatgcataacgacttaaacggcgaaggcacgggcattcaggggcgcgcagaggtagcgtgccagcaggtggctcttgaagcggcaatggaagaatttgacgctatcaaaaccccagccactgacgctttcctggctgaagtgaagactgaagcacgcaaggagggagcttactttgtggcgaacagaatgctggctgcctgggaagctggttttattgatgatactgcgaagaacgccgcggatattgccaggatgattcttacctctactgagtttatggctaatgcgccggaaggcgattttgatcgctcattctctgatggcgttctcgaagatatcgccgaacagcttcgtaaaggagtcatccaatga

SEQ ID NO: 404067 - DNA, 879 bp, Salmonella enterica; identical to SEQ ID NO: 52347

SEQ ID NO: 404068 - DNA, 318 bp, Salmonella enterica; identical to SEQ ID NO: 52346

SEQ ID NO: 404069 - DNA, 564 bp, Salmonella enterica; identical to SEQ ID NO: 38989

SEQ ID NO: 404070 - DNA, 282 bp, Salmonella enterica
gtggagctaaatgacccgacagcaactataaatgcgttgttatgtgcttgtgttgttattactctgatgttttatcgtcgtggtgattcgcggcatcgtccttgggtttcacgtttagcttggttgattactgttacatacagtgctgttccgttggcctatctctgtgggatttatccccattcctcatggcccattatcgtggcgaatactatttttctttccgtgctggtggccgtcagaggcaacgttgcacgtctggttgatcatctgaggcactaa

SEQ ID NO: 404071 - DNA, 954 bp, Salmonella enterica
gtgttgcaagagggggttttctggaccgccaaccagctattcggcatcaccttcgtcgagcgttttgacattccggtgtatcaccctgatgttcgggtgtgggagattttcgattccgatggtgtcggcatggcgttattttatggcgacttcttcgcgcgggactcgaaaagcggcggcgcgtggatggggaattttgtcgagcaatccacactcaatgaaacccggcccgttatatacaacgtatgtaactatcagaaacctgttgatgggcagcctgcattactgctttgggacgacgttattacactcttccatgagtttggtcatacgttgcatggtttgtttgccgtccagcgttatgccacgctttcaggtaccaatacgccccgcgactttgtcgagtttccctcccagattaatgagcattgggcgagccatccacgtgtgttcgaacgctacgcgcgtcatgtcgacagcggtgaaaaaatgcctgctgatttacaggaaagaatgcgcaaggcgagtttatttaataaaggttacgatatgactgaattgctcggcgccgcattgctggatatgcgctggcatatgctggaggagagcgtagcagagcagtctgtcgctgagttcgagcagcaggcgctggccgccgagcatcttgatttaccggcagtgccgccccgctatcgcagcagttattttgcccatatcttcggcggcggctatgcagcgggatactacgcctatctgtggacgcaaatgttagcggatgacggttatcaatggtttgtagagcagggcggcctgacgcgtgaaaacgggcagcgttttcgtgatgctatccttgcccgggggaatagtactgatttagaaacgctttattcagcctggcgtggacatgaaccgcatattgaccccatgttgcaatatcgtgggctcgatcgctaa

SEQ ID NO: 404072 - DNA, 1326 bp, Salmonella enterica; identical to SEQ ID NO: 373444

SEQ ID NO: 404073 - DNA, 159 bp, Salmonella enterica
atggagctgcaaaagccattattccgggtcaagctggttctgaacagtcaggtgcacaaacaaaccttagtgaagccggtaatgcgcagggacaaaaacctacaactgatctccctaccgtgcaactttccccagccagcaatgcttcgcctgcggtaa

SEQ ID NO: 404074 - DNA, 513 bp, Salmonella enterica
atgagcgactacatacctaaaaagagagggctgcttatactggattggtatgtccccattaatattttattgctgattctcgttatgtgtgtctttttcacccgttatacatttggatacggtttattgaatgggtgcctgcctgctgatttttatatgattgatcattcggataaaactattaaaactggtgaactcatagctttcaacatgccgaaatcggttcgttttatcccagaaaatgaacgagtcataaaaattgttgccggtgtgggcggtgacaaactcaaagtaacaatggatggggtttataacggggacaaattttttgaagctaatgcacgtcgtatttcaaagaaatacagtattccgtccattttgattgaaaaagaattgataattcctgaaggcgaagttttcctaattgggcaaaccgatcactcatgggattcccgtttttggggaacagtaaagctgaattcagtaattgggaaaacatatgcgatcttttaa

SEQ ID NO: 404075 - DNA, 255 bp, Salmonella enterica; identical to SEQ ID NO: 28072

SEQ ID NO: 404076 - DNA, 243 bp, Salmonella enterica; identical to SEQ ID NO: 375752

SEQ ID NO: 404077 - DNA, 243 bp, Salmonella enterica; identical to SEQ ID NO: 375752

SEQ ID NO: 404078 - DNA, 687 bp, Salmonella enterica
atggcagaaattattcagcgtatagataaaaacaacgctgaggctccggagatgcggcgacgcatatgggctatcgtgggggcctcttccggaaacttagtggaatggtttgatttctacgtctactctttctgctcgctctattttgcacatatcttctttccttctggtaataccactactcagcttttgcaaacggcaggcgtctttgccgccggttttttaatgcggcctatcggtggttggctatttggacgcattgcagatcgacgcgggcgcaaagcctcaatgttgatttcggtgtgcatgatgtgcatggggtcgctggtgattgcctgcttacctggttacgataccatcggcacctgggcaccggcgctgctacttattgcaaggttatttcaggggctctcggtagggggagagtatgggaccagcgcgacatatatgagtgaagttgcgcttgaaggtcgtaagggatttttcgcgtcgtttcagtacgttacgcttatcggtggccaactactggcattgctggtcgttgtgattttgcagcaggttctggacgatgctgagcttcgtgcctatggcgtattccctttgcgctgggcgccgtgctggcggttgtggcgttatggctacgtcgccagctggatgaaacctcgaagcatgagactcgcgcattaa

SEQ ID NO: 404079 - DNA, 243 bp, Salmonella enterica; identical to SEQ ID NO: 375752

SEQ ID NO: 404080 - DNA, 1176 bp, Salmonella enterica
atgtcatatcagtttatacatgttgaagattactctaaagtaatatcaaaaaaaagaggtaatgggggtaagggaaaatataacgaagaaacgaaaggaagatctgtaagagatattattgcagaagcaaaaagagaagaagggaactgtccacacgttgaaaatcctaaacctcctcttttgttgtatggtaaaaatttagatgaggttgaaaagttagcttatgaatatcatgaaaatacaaagctaactgataagaacggaaaagaaaaaaagttaagatctgatgcaaatatattacttgctggggttgtttctttgaatagggaaaatgaagatatttgggatgagtataaaaacgatgccatcgcttttctttcaaataaatatggtaaaaagttagtttctgtaatagagcatacagacgaagcaaatccacactttcacttttatgttattcaagatcccggaaagcgatttgatttaatacatgatgggaaaaaagctttatttgaaaacagagacaagaaaaaacacgatcagaatatagcttatttaaatgccatgagaaaagttcaagaagatttttttcgtgtcgtatcttctaactatggtttatcaaaggatggtccgaagagaaaaaggaccagccgaaaggattattttaagcaaaaaagagaaataaaacttattcagcaagtaaaagaacaggcaaaaatagatggttataattttgcagtggatgattttcatgggaaaagctggttaaacaaagttgcaacttcttttactgttaaaaacagcaccttacaggaagctactgccagaggtgatagatataaaaaaggactttccagcacaaaaaagaaacttaaaaatatagaaagtgatttagaagaaacagaaaaagaactatcttcactaaaagataactttaaagaaagagtgaataatcaaacatcattacttaaagataaaaataataaactaactattgagaatgaaaatataaaaaaacagaatgagcagttggaacatgaaaataaaaatataaaaaccatgttggaagagtctcttcctctctacgagcttttaaaaaataaatatggagatcgctttgatgaatggaaagaaagtttatttaatactgtaaaaacgaaaatgaagtttaaatag

SEQ ID NO: 404081 - DNA, 402 bp, Salmonella enterica
atggataataaatcgtggggtgaattgtggcaggattgtttaggtgtggattacacaccttcggtgaagattaaagcggtcaggaacaagaagactggggaagtggtaaatatgggtgaagacggcatggaacatgctgttgcagagactttgaagtattcagtaaagccagcggatatgtatgcagatcgtgaatggtttcacgagatgacaagacaagtccataagatgagatttgtctctacgggtggagtgctgaaagatatattcagcgaagatgtatcagaaaaagaaatgttattattgaatgacgaggaagaaactgacgaggatttaaataataatatattcttcaactggtataagaaaaacagcaaatacagacgaaggattgttgagtaa

SEQ ID NO: 404082 - DNA, 891 bp, Salmonella enterica
atgctgaccaacctcgaaagccagctgaagcagcagaacgcggcggacaggctggaccaggtgctggcggaaatcccccgcgtgcgcgaggacctcggctttatcccgctggtgaccccgacctcgcagattgtcggcacccaggcggtgctcaacgtcctgaccggcgagcgctacaaaaccatcgccaaagaaaccgccgggatactgaagggcgaatacggccacacgccagcgccggtcaacgcggcgttacaggccagagtgctggacggcgaagaggccgtcacctgccgcccggcggatttactgaaaccggaactggcgcaactggaagcggacattaaacgccaggcggcagaaaaaggcatccggcttgcagagaacgccattgatgacgtcctcaccgtggcactgttcccgcaggtcgggctgaaattcctcgaaaaccgccataacccggcggcgtttgagccactgccgcaggcggaagccgcgaaacctgccgtgaaagaggaaaaagccgcaaaacccgccgcttccggtatctacaccgtcgaagtggaaggcaaagcctttgtggtgaaagtcagcgacggcggcgatatcagccagctggccacggccagttctgcgccggttcagaccgcggcgcctgccgccgccccggcgggcgcgggcaccccggtcagcgcgccgctggcgggcaatatctggaaagtggtggcgacggaaggccagacggtggccgaaggcgatgtgctgctgattctggaagccatgaaaatggaaaccgaaatccgcgccgcgcaggccgggacggtacgcggcatcgcggtgaaagccggggatgcggtggcggtgggcgacaccctgatgcagcttgcgtaa

SEQ ID NO: 404083 - DNA, 510 bp, Salmonella enterica
atgggtcgcaaacgtgcgcccggtaatgagtggatgccaaagggtgtattctttcgcccttctggttactactggaaaccgggaggatcaacagaaaatatagctccagctgatgcaactaaagctgaggtctgggtggcttacgaaaaaaaagttgagggtagaaaaaacagaattacattcacacaattatggcgaaaatttcttgccagtgccgattatgctgatctggccccaagaacgcagaaagattatctggcacatgagaaatatatacttgccgtatttggtgatgccgaagctaaagcaataaagccagaacatatccggcgttatatggatgcccgtgggcaaaaaagccgtgtccaggcgaatcatgaacacagctctatgtcgcgcgtatttcgttggagttatcaacgtggttatgttcctggtaatccttgcgttggtgtggataagtttcctaagcctcaacgcgatcgatatattaccgatgaagagtactga

SEQ ID NO: 404084 - DNA, 966 bp, Salmonella enterica; identical to SEQ ID NO: 403919

SEQ ID NO: 404085 - DNA, 780 bp, Salmonella enterica; identical to SEQ ID NO: 56175

SEQ ID NO: 404086 - DNA, 702 bp, Salmonella enterica
gtgctctgcgttgccaatttgtgcacgctggccgcctttaatatcaagctggccattcaggtttattacactcagtacgtgctgaacgatattcatttgttgtcatggatgggttttttcagcatgggctgtatcctgattggtgttttattagtacctgctgcggtaaaacgcttcgggaaaaaacaggtttatcttggtggtctgatattgtgggccgttggcgatatcctgaattttatctggggtggaacgtcattcctgtttgttattttctcttgtatcgccttcttcggtaccgctttcgtcaacagcctgaactgggcgctggttccggatacggttgactacggtgaatggaaaacgggtattcgcgctgaaggctcggtgtatacgggttataccttttcccgcaaaatttccgctgcgcttgctggctttttgccaggtattatgctgacgcaaatcggttatatccccaacatagctcaaagtgacaccacgttgcttggtttgcgtcagctcatttttttatggccttgcggtcttgccattatcgcagcactaacgatgggctttttttataagctcaatgaacaacgtttcgcttttattatcgaggaaattgcccaacgaaagaaaacaggtaatcaaattgtcgcgactaataataaacaaagtatttctactgtaaataattaa

SEQ ID NO: 404087 - DNA, 450 bp, Salmonella enterica
  misc_feature (407)..(416): n is a, c, g, or t
atgtcagattcgaagaggactaacctccatgcacaagagaatttttatcggcctattcttgagtatcgtagtgcctcaatacttttgatttgttcggtttctatgctttatatgggactttcttcagacggactggacatcgccccaatagttctgttcacctcaatattgctttttttgctgtgcctttatcgttgcaaaacagcagcgccatttttgatggctcattggcgtgtattcaagcgacatttcatgttcgttagtcttgattcactgcgtgtaattaacaaaagtaactttttctccaatgagcgaaagtatcgtcaactggttcaggattatcaaaataaaaataaggatatacccgagcgaaagtcctatttttgtgatgggtttgagtggggtcnnnnnnnnnnggtccggaacatgcggatcgggcatatcaaatag

SEQ ID NO: 404088 - DNA, 414 bp, Salmonella enterica
atgttaagcagtaaaaaaaggaagtcccctacaaatatcaaagaatcgctcaatgataacgctgaccgtttttataagatgtttcgcattcataccacggcaaaagttgctatgtcgctaattgccatgaccgctgtagggttttctttctacaatctttacgaacaatggcaggacgctgaagggaagaaagaccatatagctgtaatacggatttctggcgagatgggtaccggctcggaaacgggcgatggaacagtgatcgcaacagctcttgccaaagcttacaataatccccatgccaaagcagttattatcgaggcagagtcaggtggtggtggtccctctgacgccatcattatttaccgccagataaacgcgcttaaaaaccaccacctgactctgcctcgataa

SEQ ID NO: 404089 - DNA, 243 bp, Salmonella enterica
atgactaaagagaaagatactgagcagcaggacctggtcaccagggctttctctgttagagagaaagaatcaggtaaagacatcattttgcgtcctaacagcaaccgtacggtgcagtctattgctttgatgcggctcgggctgttcgtcccatcaccaaagagtgtggggcgtcaaaatcgggaatataaaacggttggctttgacgcaacgaaagagttacagacgctcaccgacaattga

SEQ ID NO: 404090 - DNA, 786 bp, Salmonella enterica
atgattgtcaaaggaaaatttgaatctcctttgattacaattgatcctgatagcttcagtcagtatcaagtaactcaagtaccgacaattatttctagggagcaagctcgttttgcaaaaatggtaggctccttcaacgttgagttttttcagcgagaacttgctaaaaaacccgatcaggatattttcccggttgctggtaccacttatcccgttgaagaaaagagcatcattaaagaactggaagaacgtgcacaaaaatatgactgggaaggtgcaaaaaaaagggccgtttctgacacatggaaaaatcaatggatggtcgacctccctcctgcccaggaacacaaagaatttttaattgaccctacagtgagggtcactcaggacgtaaaagataagcagggccgtgtaatagcttccgccggtgagttgattaatccactttcgagatttcctcaaaacctgacgatgataattttcgatccactcaatccgggccagctggtatgggctgagcagcagtatcgacaacgtctgggtagtggaaaagtaatgccaatgtttacccgtatccaaaaagataatggatgggatcacctaaatgatttacgtgaaaaatttaacggtaaggtgtttaaagttaacgaacagattatctcacgctttcagattaaaaacacacctgcgcttataactactgaccaagataaattccggatcaccctgtttagcgaggcagaagtccgtggtatcggagccccaaatctttcagaggaaaaataa

SEQ ID NO: 404091 - DNA, 927 bp, Salmonella enterica; identical to SEQ ID NO: 128534

SEQ ID NO: 404092 - DNA, 246 bp, Salmonella enterica
atgaacactcaatacgctttgaagaccttgaatcagttgcgtcctgttttaatcggctttcgcaaagccaatggactgacgcaaagagatgtttctgaacgtttgggtgtaacacagcaaacttatgcccgactggaggccaaccctgcaagtgtgggttttgagcgtttgtttagagtgttcagcgtccttggagtggagatcgtactttcatccagggaaccattgtcagatgcaaagccctga

SEQ ID NO: 404093 - DNA, 150 bp, Salmonella enterica
atgttttacctgttgcatgaaattcttgcttttaacactcgctgtggagacgggatctttcatggttggaacacggcttcagaattgtggaagtttgaaatctttccccgcaccaccatcatgatgcagcatacttcggcaatacattaa

SEQ ID NO: 404094 - DNA, 1068 bp, Salmonella enterica
atgaatagtaaaattttatcagtacattacttaagggctttagcctccattgcagtgttaatagatcacttctcaggtctattagttattaatggcaatccaatcccattcttagagaggggaggatttggagtagacttattttacattatcagtggattcataatatatatttcatctggaaataaagaaaataatagtcctgcaaagtttgccataaaaaggttttttagaatatatccattattcattgtggcatggataataggtatgtctattgtattcaagagtgatagcatatggtcattttttgaaccactattgttggtatatcaaaattatgatggcgctgcccctcaattcggtactcatgttatgggaactccatggacactggcgtacgaacttctcttttacgcaatttttgttttagctatttcaataactcacaagcaccgagcggcgttatctatagcgattctgatcctaatgccgatatcactacaactaatgttcaacggatcattctccattcagagttctgcgtttgccaatgcaagcaaagacgttcctctatatggtgttattcgaatggcgagtggaacaataatgtttgagtttgccatgggaattatattaggcgttgccttcaaaaaaatgaagaagattgatataacacaaacctcatctacgttatttttcttttctggcgtaatgatatctattgcaatacttcttactaacggaaatcagatttctaaatttggtttgcaggggtatttcattccatcaattgttctttttatatcatttttcttcagggacaagacatccaatataaaacataatgtattccttgaatttttcggaaatgtttcctactcgctgtacattacccatttcataatttacgtatggatagttcagcatcttgacagggtgtggatggagcccgtaagaggatatcctattgttataatcggaatggttgttagtgtaatattttcatggacatgttatgtttgggttgaaaaaccattcatcgaaataggaaagagatatttataa

SEQ ID NO: 404095 - DNA, 1020 bp, Salmonella enterica
atgaccgccaccgcctactacaacgaaatagatccctttgccgccgcctggctgcaaaaccttatcgacgctggttgcattgctcccggcgtcgttgacacgcgctcaattgaggaagttaccgccaatgaccttaagggattcacacagtgccattttttcgccgggatcggcgtctggtcttacgccctgcgatgcgccggatggcctgacagtcgccccgtctggacaggttcctgcccctgtcagccattcagccagtcagggaaacgccggggattcaatgacccccgccacctgtggcccacatggtgccagctcattaaggagtgcacaccttacgttatctttggtgaacaagttgcaagcaaggacggcctcacatggttcgacgctgtacaacttgacctggaagaggcggaatacgccgtcgcagttatcgatctttgcgctgcgggcttcggtgcgccgcacatccggcaacgcctcttctgggtggccgacgccgacagccaatgcatggaaacactcgtcgaatgcggggagagagggaggattgaatttgcaaacggctgtagccttatcgggctggcccaccccgacaacgacagcagggaaaggcggctaccagggcggaaggattcgcaacaggaagctgtcaacggatcggctggatgtggcggcacagatagcaggctggcctacgccgacaacgagcaacgaccgctcgccgtgcccacaagaggccatgaagacctatcgcgacaatggaacaaaaattcagaagcgattgcaggatttagcagcgacagcggcgccagtccggttaacagcgtctggcgagatgctgactggctgttctgccgagatggaaagtggaggccagttaaacccggagttaagccgctggttaatgggactcccggacgcgtgggccagttgcgcgcctacggaaacgccatcgttgcgccggtcgcagaaacgttcataagagcatacatggaggcggtcacgccatga

SEQ ID NO: 404096 - DNA, 399 bp, Salmonella enterica
atgaacacattaattaaaaacgtccccatcgccagagcgggaaagattatagacggtcgtgaaatcacgcggtcaatgcttgaacattgcgtagagacgtttaacactgattattatcagccaaatataggtgagtttattggcaatccaatggtgactatcgacattaaaaatcagggaaaaatagagcgtctgacactgaaaggcgacacgttatttgctgatattgaaatgtacatgcccatagccgatgtaaaaaagttgtgccagtttccggctattgcatacagaaactacgaagacataaaagcagcagcattaatgtacgtagctcttactgaactccctaaccgcaaagactgcatcgcccttaacgattgcgaaatgagagagatataa

SEQ ID NO: 404097 - DNA, 243 bp, Salmonella enterica
atgggaaaacgctctgaaattaaattcataagaccttgcctctccatatatgaaaataataaggtattgaccccagcttatgctttgcagtgtttgacgcagaaaaaagtggttcagataaacttagataattgctctttacaaagaatggaggaattatcatcgacatcaactctggaggatgtaaaacgagttggcctattgccgttagtaaatctattacaatcaggaaatgtatgttaa

SEQ ID NO: 404098 - DNA, 381 bp, Salmonella enterica
atgagcattaagcaggaagaatattcattttattacaaggttaaaaatgaaagtgccaggaaacgcctcggctttaaagccggttttttctggtgtactgctaaaaagcagtcactcgccctctcccgtggcgaactggctatggatgctgccggatttgatgaagctgattttgccagacctgtacgcgtacattttccggtagaaaatgacattccgcccgagggtgtctttgacactaaattttgtgaaaaccgcgaacccggtggcgaagacggcaaaaccctgacacttatccccggcgcagcttctgctgttaaatcagatgaaacagaactcgccgacggtgctggcactcctgccggagaaaacgggatatag

SEQ ID NO: 404099 - DNA, 585 bp, Salmonella enterica
gtggttgcgacactgccgttccgccatcgcgttctggcacagtatattggcgatggagaatatctttatcacgtcgatacagaccagaaaaaagaaatcgcgtgtctggagatggatactcagaataccactgtccagaacctgatactcgcagcagaaaatgtagagccgttcaaaaaagctatcgagcacgatattcacaaagcagtgaatgcgtataaacaggtatttcttgtcgatggaaaagtgcctgagttatgcaccactattaagttttttaaggaatggttcagtgctgaacacattaaccgcggcctgctggttaaggaatgggctgaacgcctgaagaataaacctgcacccgttaaaaaaaccgggccacataaagtaattgtcgccgacgtaaataagccagaacgtccacgccgtagcgaaaaaccgacacacagaacgattaactatgagctcgcctgtggtttctgtgaggagctggatctgaataacctgcgtcctgcaatggattttgcaaaacgtatcatcgccgaagaccgggaagactggaagcgaatgtcgatacccggttga

SEQ ID NO: 404100 - DNA, 492 bp, Salmonella enterica
ttgccgcgtaaacaagtaattttgtggtatatggataattcaagtaacgactactggctggtttatccggccagtcatattgctgtatttgacgctgaaacccagacgtggagtctgaaagaagaccatcgtggcgagacggtttacgatacaacaactggtaatcaggtttatatctccgaactcggcccgttgcccgaaaacgtcacatcagtttcaccagacggtgaataccagaaatgggatggtaaggcgtgggtgaaggatgaagcggctgaaaaagcagtgcagcttcgtcaggcggaagagaccaaaagcaggctcctgcaaatggcatctgaaaaaatcgcgccgcttcaggatgcggttgatcttggactcgcaacagatgatgagaaagcgcagctcgacgaatggaaaaaatacagggtgctggtaaaccgggtggataccttaaatcctgactggccggagaaaccatctcagttataa

SEQ ID NO: 404101 - DNA, 1134 bp, Salmonella enterica
gtgccgcagcctgacccggtgccgcagcctgacccggtgccgcagccagaccccgcgccgcagcctgacccggcgccacagccagacccggtgccacagcctgaccccgcgccgcagccagaccccgcgccgcagcctgacccggcgccgcagccagacccggcgccgcagccagaccccgcgccgcagccagaattaccggctgagaatataaaacggcgtatttcggcatcaactgcagcggttttaaatatggcagcagtacagccgctggtatttgatgctgaactggaaagtgtacgggagcgtttgcaagccagaaaaatggccgggcgtgacgacccattatggatgacgcagtacaatacccggaataacgtctccacctctgcgggagccgagtttaaacaaacgcttggaggtctgatcatgggcattgatcgcctttcacagtatgaaaagagttcgggtacgctgggggcatttttcagctattcacactcgaatattggcttttcgcgcggtggcgaaggttacgtggacagctattccttcggcgcttacgctggattacagcacgaaagcggtttttatctggatagcatcgcgaaggccaatcttttcgacaataacgttaaggggcgaatgaataacggaggcgctgcggatggtgattatcgtacctggggcattggggctcacctggaaagcgggatacgattaagcaacaataactggagtgcgacaccatatatggcatttaccggttttacgggcagcgcccggaaatatgccctttctaatggtatgcaggctgacgtggatactacgcgtatgctaagagcagaggctggcctgggtatggattatcgcctgatactgagcaatgggggtgaactacagccatggctgaaaatttctgcacgacaggagttggctgataataatcaggtgactatcaataacagggaccgttttaataatgatctgtccggcatgagaggtgtatttcagactggggtacatgccaaaattacggataatctgacagggcatctgagcgccggttacggggatggggccggagtacaatccccctggcgggcgacggtaggcatgtcatggtcgttctga

SEQ ID NO: 404102 - DNA, 336 bp, Salmonella enterica
atgaaacaggcaaccagaaaaccaacgactgtaggcgatatactgctctatgagtacctggagcctcttgaactgaagatcaacgatctggctgaaatgcttcatgttcaccgcaacactgttagcgctttggttaacaacaatcgtaagctgactactgatatggcatttcgtctttctaaggtgttcgatacctctgttgatttctggcttaacctccaggcggcggtagatttatgggaggtagagaatgatgcgcgcgctcaggaagaattaagcagaatttgcactgtcagtgattttattgctaaacgcgaggccaaaaaggccgcatga

SEQ ID NO: 404103 - DNA, 822 bp, Salmonella enterica
atggagaacgtaaataccccacccgtacggttcactaccttgagacacaaagaaactaataacgaactgataggttatttttgctgtggagatccaagcatcttaaatgccgttcttagctattttgggcgcggagatttacatcatgcttgtccttccgaagcatgggtaatgctcaatccgaaaaatggtgggatgtatttttgtaacgctgaagaaattgagaagaactacacccccacaactgatacccaaataaccctttcccctataacagattttgaaaaatacagttcttctgatgaggtggtggaggcactgcaaatccctttattgggcggtattcgccgtttcatagggctaaccaatattgatttaacattacgtttgtcaccgaaagatgtgtatgtttccgtacaaaagaatgtcattagaaagagtgaaccaccacagattttagcactcccaggcgactggatagtgaagcatgtcgatggcagttttagtacatgtacacctgaaatttttgaatccacttataaattcattgatattgagtctgctgatttttctgatgccctgatgtggctgaaagaaggaaaacgtgttgcacgtaaaggctggaatgctggcggccagttctgctggatggtccaggaggggcaatacccggcgcggatggaagcaatcaagggttattaccccactgatatcgttccctacggagcttactttgcgctgaaaaatgcccaggatgtggtagtgccgtgggttccgtcagttggtgatcttcttgcaactgactggattgttatcgcatga

SEQ ID NO: 404104 - DNA, 240 bp, Salmonella enterica
atggatatcaataagcagcaactacaggtattgcgccgcatagccatagccaatggtgaacaggtctttcaggaaaaagatggcttccgctggagcgaagacgctggcgggcaagtttgtacggctcccgtcaaaaagttggtggagatgaacctcgtgcgcatagcaaaggttaaaggcggaacaattcttcgctgcgctgttacacaagaaggtagcaattacctgaaaaacaaataa

SEQ ID NO: 404105 - DNA, 207 bp, Salmonella enterica
atgatggataagcaaaaacgtaaagcaatgcttcaaatagcagttgattcgctccgcgctgcggagtacgcactcggccagctcactgactcatacaccgaagaacacgacggtaaattcagcgcctgccatcctcaaagctcttttgcatcttctttgggacaactaacccagctacgcaaatcactgatgaaagccagagtttaa

SEQ ID NO: 404106 - DNA, 231 bp, Salmonella enterica
atgaaagacctctttgtattttcgaaggaattgcataaagaagatgtcttagacgcggaaaaatgtaatcgcattagagcgagaaacaatgcgattacatttctgggttttatatctaatgatatcaatgaatttccgcagaatgtgctgccatttgatatgtcgcgcggtcgtgagttggttgctgacatgggggttaacattgatgatgatatctgcgatgagcattga

SEQ ID NO: 404107 - DNA, 207 bp, Salmonella enterica
atgattagtcatcactatggaacccagaccgttaaccgcggtgccgttatgcccggaatgctcgtaaagcatcgtgaaggcacctggactgcatcagcaaacaaacgcggtcgcctctacctgcatcgcggcattgagcgcacttacacaaccgatttgctggttgaagtctatttgaacgggtttggccaaggcctcagccggtaa

SEQ ID NO: 404108 - DNA, 210 bp, Salmonella enterica
atgaccactattaccagactggtcgcgctaatcaccctgtttgttatccccacagcaatggctgcggatacccctcactgtgttgtcaaggagtcgtggccgatcatcatcactcaatgcgatgacggaacagtaactgtggctagcgtgagaaaaggcactgcttcagtgtgccgtaggggtgaaatatgccaggagatttctctatga

SEQ ID NO: 404109 - DNA, 459 bp, Salmonella enterica
gtgaaaatcatacccgtgacattcaaagtcgcccggcaatttgtatcgcgtttacatcgtcacaataagccaccagtgggccacaaattcagcgtgggcttgcaagatgattctggtctgctagttggtgtcgccatggcaggtcgcccggtagccagacattttgatgatggcatgaccatagaggtcaacaggacgtgtactgacggaaccccgaatgccaacagtatgctttatgcggcagtgcgccgatctgcgtggggaatgggatatacccgggtaataacctacacccaggcaaacgagtctggtgcatcactccgcgctgccgggtttgtacgggtaaaatctttgcctgcgcgtggcggatggtacgagtcgagtgttaaacgtcgtgctgggcgggacccggtgggcaatggtggtgttgaacgacaattatgggaggttaggcgatga

SEQ ID NO: 404110 - DNA, 465 bp, Salmonella enterica
atgagtcgcgtcactacaattgccgctgcgttaatcatcctgctgattgtctcgctggcgtggactaccgaccactaccacggtaacgccgtgaaatataaatcgcagcgcgacaccgctactcacagcctgaagctggcgaacgcgacaattactgacatgcaggtacgccagcgtgacaatgctgccctcgatgcaaaatatacgaaggagttagccgatgcgaaagctgaaaatgatgttctgcagcgccgtcttgccgctggtggccgggtgcgcgtcaaaggacgttgcacagtgccagccagtaccacacccgccagcaccggcagcgtgggcgatgctgcctccgtcgaactctcgccagttgctggacgaaacgttctcggtatcagatccggaattatcagcgaccaggcaaaactgaggtatttgcaggactatatcagaacacagtgcaggtga

SEQ ID NO: 404111 - DNA, 1092 bp, Salmonella enterica
atgaaaaaaacagtggcattaacaatggcagcagctgccgtcatgatggcgtgtacggctaacgcagcagaaatttataacaaagatggcaataagctggatttgtatggaaaagtggacgggttgcactatttttccagtgaccgtagcaaggatggtgatcagtcctatatccgtatggggattaagggcgaaacacagattaatgatcaactgacggggtatggccagtgggaatatcaggtacaggctaatggtgctgaaagtgatggttccaaatcatggactcgactggggtttgcaggactgaagtttggggattacggttccattgattatgggcgtaattatggtgtgctgtatgatattggcagctggacagatgtgttaccagagtttggggatgatacttatgaatcggcggataacttcctgacaaaccgtaccagtggcgtgctgacgtaccgtaatacggatttctttgggctggttgatggactgaatgtcgctctgcaataccagggtaaaaatggcggcagccatgaatccaataatggacgtgacagtattgctgaccagaacggggatggatacggactttccgcgacctatgattttggcatggggatcagtgcaggtgcatcttatgccagttcaaaacgcacagcggatcagattgcgcgtgataactacaccaaaggtgacagagcggaagcctggactggtggtctgaaatatgatgccaataacgtctatcttgcagcgacttatgcccgcacttataacatgacctatatgggcgacgatcttaatggttttgcacacaaaactaataactgggaacttgtggggcagtatcagttcgataatggcctgcgcccgtcactggcgttcctccagtcccgtaccagtggagttaatggactggggtcgtttgatctcgtgaaatatattgatgtgggttcctattactacttcaataaaaatatgtccgcgtatgttgactataaaattaatctgctgaaaaacgacaatccggcaggaatgaatacagacaacatcgtggccacgggcctggtttatcagttctga

SEQ ID NO: 404112 - DNA, 618 bp, Salmonella enterica
atgaatgagggctggtatcaggtccgcattgccggagaggatgtatcagcggacaaccttacggccagattacatgaaccgttaccgcccggcgcggtgatccatatcgtaccgcgcatggagggggcgaaatctggcggtatttttcaggtagttctgggtgcagcagcaatagcagcgtcgttttttacggctggcgcatcactggctgcgtggggtgctgcattatctgcaggagcaatttcggcgtcttcagtgctcttttctgtggggttaagcatgatgctgggtggcgtggcgcagatgcttgcaccgcaaccgaaagcgccctccatgcacaatgcggataacggtaaacagaacacgtatttttcctcgctggataacatggtggcccagggtaatccgcttcccgtggcatatggtgaagtgatgaccggctcccggcgtatatcgcaggagttaagtacgcgtgacgagagttcaccggataaggttgtgcattttggcagaaaaggcttcatgggggcgcttggactgaccggaaaactggaagataagaccaacgcaatcctggctgcgcagggcatcacgaagcccagagtagtgatcaggtaa

SEQ ID NO: 404113 - DNA, 564 bp, Salmonella enterica
atgaaaaatacaatcacttttgcacctcttgttctggcatgtcttctcctgtctgcctgtagttacagtcatgaccagactgaacaaccgtcgacaggctcatacatcacattgggtgaattcccggccagtcgtgacggtgcaaagaatatccctgtagcaatataccatgaaacattcatcacgaaagaagtgagtacggaaaaccgggaggacggacagactatccgtaaggcgcttactgagccgtttcgtgtgggacttcaggcggtagcgacgcctgtttttaatgcggacgggacttcaaagatggtgctgaaagggaccttcagctgtatttcaaggcagtattcgccgtcatctgaccctcagacgtcaatacatttgacacgtacatataactttgtgctcgagaagaaggcatatcctggtgacaggctggttgttcttacgcatgttcctgcagaaggaatctgcacaaaagacaaagaagaactgccggtgatgctgctcaaagaggttccgctggtgatgtcggacaaagaggtttcgcagaattactga

SEQ ID NO: 404114 - DNA, 426 bp, Salmonella enterica
atgaccactattaccagagaacgccttctcacaatccaatcgtggcgggaaacatacggacctggtagcaatgttgtgctgccagcagaagaagcggaggagttggcgcgtatcacgctggcatcgctggacgctaaacctgtcgggtggaccgatgccgaagaattgagaggcgttgaaaaagacggctgcgggtacatgtttacagtcaatccaatgacggctcacgtagaccagcgtcgtgtcattaagctctacaccgctactcctgggacagtagtcccggaagaggtcccagccacattgcgtgatgaaattatcgatctgtgcgatggctacgaaattggtgatgtgggagcgcaggaaatatggagcgcctgccgtctgtttatgattcagggagaatcgttgccggcattggtgtga

SEQ ID NO: 404115 - DNA, 330 bp, Salmonella enterica
atggagcgcctgccgtctgtttatgattcagggagaatcgttgccggcattggtgtgagggggaatgtaatgaacaatgataatttgctctgtgcccgtattgaggcgctgaagcttacagcagttcaggacagtataaagcaggctattacagggtttgtcgttgaagggcaactggatatcgcacagttaaaactgcatgcacatttgttgcgaaaaaaactgcaggcggaaggtaccacgctgaaaactacgcatgcacaggagttggttgcctgtaagtatggtttcagtaactggcagacggcgatcgccaggctgaagtcgtga

SEQ ID NO: 404116 - DNA, 921 bp, Salmonella enterica
atgacgaccacgacggcatcttctgtcgataatccgtcagataatgatttacctttatccgcgcaccttactgaacccgccgaaccgaccattgacatgccggaaatcccggtcgcaccagataattcagcgcagtctgccgctcagcgactgggcgggaaggggggccatagctggccaccttcttctgaccgacgctctctcatgcttaaagtgatttccacactggcgtactgcgtattactgggggctgttttctttctctggctgactgtacgccagcaacagatacagctgacgacgctggatgcggcatttcgcagcggacagctgcagacactccccgaccgcatgcaggctattgaagacaggcagcagcagtacgttctcaaatctcagtccgaaaaatggcagcagagcctgagtgaacaggcgcagagcctcaccacgtttcagcagcaactttcctcgctggccacagatgttaaggcggcccgggccgaggccgcaagggctgttgccgggcaggatgacacgggcatgaaactcgacacgcttcagaacgcactcaatgcgcagacattgcgcattgatgcactggagtcctggaaagaagcgtggagtaaacgtactgcttcgactaccacgaaagctgctcctccccccggaggtggccagtcttccgtaaaaaagtcttcaaagccccggctccttaagctgacaccgcctttcacgctggtaagtattgaacgtcggggagggcaggcctacgccgtaattttacctgccggggacgggggttgggcacagttgcgtatgctgagcccgggagaaagtttgtcaggctggatgctgacaagggtcaacggcagtcaggctgagtttaaagtcaacgggcaggtacagcttttaacgatctga

SEQ ID NO: 404117 - DNA, 408 bp, Salmonella enterica
atgtttcgttatctctcattgctggcactgatgctgtcagcctcttcattcgcgtcaattgcggtatatacggatcgacaccatcccccgattaacgtaccgccaggtacccgcgttatttacctggatgcagcagaacagcggcaacaaaacatgtttggcccgctggcaaaagaccctgtccaggcagagcgtcaggcacagagtgttatccagacagctgactgggcgcagcaacagagggctctggtgcaggcctatcagggggtgatacaggcctggcaactgggcctgaaaaaatacccggcggtggtatttgacgatcgtgatgtggtttacggtacctcggatattgcgtgtgcacggtcttactggaagggcagaatgcgtacggaggggcagccatga

SEQ ID NO: 404118 - DNA, 492 bp, Salmonella enterica
atgagtgatgaaggatttaatcctgaagacatcaaggacatcaagtcccgacatagctatggccagaagaaaaccatacgctcctcaacggccggtattccggattttgtgccccgtgaaccggtaatccagagcattgtaaatacacttcaggatgaggaagtctgggctacagccgctgatagtgcagaacaacagcaagcacaggaactcccccctgccagcccttgttttagtcaagctgatatcgacgaatttctggcgaggaaaccgcagaaatatcagatgactgagcgggactacaaggaattaggacgcaatatggttctgggtatcggcgatttgattgtcggtacagtccaagcatcaggtttagtcttagattatgcacataatcctagttcacaatcccaaaatggagataagtgggaatggggtactgaaggttatggtctgtattcaggcggagttaaaatttgtggcatcgattaa

SEQ ID NO: 404119 - DNA, 375 bp, Salmonella enterica
atgcctgaatcgaaacatccagttttttttgtggtatatgtttcaggagctatattgtttctgctactaatggagttgtcacgagtccatgatttagtaatgctggatagacctgatactgaatcatttattacgcaggctgactttcattgtacgtataaaaattatagtgacagttcgagtgattataaaaaatgcatgggagactggtatcgtcttgctgcttatgaattaaatatgaaggctattgcatatgattatcatgattgcctgtcttataatggtaacaaagcgttgtgctggtataacctagaaactaactacgccctgataaaaagacttgataaagcaatactgattgaacacggacaatga

SEQ ID NO: 404120 - DNA, 324 bp, Salmonella enterica
gtgaaggccaccagccgttcatcagatttactggaagaaatcagtctggcaagcggtgaacagagtaaaggggtctcacagattggcgtcgcagtgactcagatggaaaaaacgacacaacagaatgcggtgctgcttgaaaagagtgccactgcgacagaaagtctacgtgaacaggcagtccaactggtatcagcggtatcggtgtttcgggtgtcggagcattcagatcaggcgcaggttcggccagttcagataaaaacgcctttggagtcattacaggtgaagcccacgtcgacagacaaggaatgggtatccttttag

SEQ ID NO: 404121 - DNA, 441 bp, Salmonella enterica
gtggctgacaaactgcctgcggcggtgaaacatattacccgttcggttgatgactatgtgacgtttgttcagtcgatgcaagaaaaggccatcaccacagcttatgatgcacatcaatatgtcatatgggccagtctggccattgcgctggcagtaaccttattagtcctagccctgtccgctctgctggttcgctcaaaaacccgtcctctggccaccgctgtggggctggctgatgccatcgccgcaggcgatttatcccgctccattaaggccggagggaatgacgaatgtgcccatctgcttcagtctctgggcaacatgcagatgagcctgtcagcgattgtctcagagattcgcggcagcgcagaaagcgtgtcggcgtcaagcggacagttatcacagggcacacatgacctgtcctcaaagactgaagagtag

SEQ ID NO: 404122 - DNA, 135 bp, Salmonella enterica
atggagcagattgtttccctggaacgggaaactaatccggaagcctatgaccgtaaaaaacagagttatgtccaggctactgagcgcaacaaagtgattatggataatctgcttcagggagtgacaactgaataa

SEQ ID NO: 404123 - DNA, 501 bp, Salmonella enterica
gtgaaaacaattgggttattaggtggcatgagctgggaatccatgatcccctactataaattgattaatgaaggaattaaacatcagctgggtggccttcactctgcacgtttacatctgcatagggttgattttcatgaaattgaagagtgccagcgtaacggggagtgggacaaggcgggcgaattgctggctaatgctgctctcgggttgcaacgggcaggcgctgaggctattgtgttgtgtacgaacaccatgcataaagtatcggatatgattgagtcccgctgcccgctgcccgctgcccgctgcccgctgccttttttgcatattgcagatgccatcggaaaggcgattaaaagccagggcatgaatcgtgtggctctgcttggaacactctatacaatggagcaggatttttatcgaaaacgtctggagcaaaaatttccctggaaactattgtgccagaagccgaagatcgagcccgcattaattcagtga

SEQ ID NO: 404124 - DNA, 150 bp, Salmonella enterica
atgttcttctggaaccagcagacctatttcagtgtacccaaaaatgaccgcctgagcgccctgttctgccagttgcccgataatctgcaggtaatattgacgggattctggtttacattctcccagacacagttcatcgaatatcactga

SEQ ID NO: 404125 - DNA, 378 bp, Salmonella enterica
atgacagcagcattgaggtttacagccacagactcgcatatcagcgaatatcctgatcctatgagtttcatctgcggtacaagcgtgataattcacgagaagtacgagggagaggaaggatgggataactggtattactgcacaattcccggtcataccggtggcttggtgcccggacagatccttgagagatgtgaggggacgtatcggggcattgcaaggcaggattacaacgcccgggaactggaggtgaagagaggtgatgaggttttcggactgagatcactgaatggctggatgtggtgtgagcgtacttctgacgggcagactggatgggttcctctgtcgctgttgcataagcatgaagagagaatctga

SEQ ID NO: 404126 - DNA, 5949 bp, Salmonella enterica
atgaacagaatatacaaactcaaattcgacaagcgtcgtaatgaactggtggtggtcagtgaaattacggcgggaatgggtaaggaaaaaagcactggccacatcacagacctgccagccctttccccgttcagaaagctgctgggcaccctgacacctgtttcactcctgaccggactgatttccggtcttctgccggcgatggtgctggcggcagacctgccgaccggcgggcagattgtgggcggccaggggagcatcagcacgtccggcaaccagatgaccatccatcagcagacgcagaacatggccaccaactggcacagcttcgacatcggtaaaaacaacaccgtgcagtttgtgcagcccgacagcagttcggtggcgctcaaccgggtaacgggagccagcgggtcgcagattatggggaccctgaaagctaacggtcaggtgttcatcctcaaccccaacggggtgcttttcgggaaaaatgcccgggtggacgtaggtggcctggtggcctccacgaagaacatcagtaccgcagattttatgaaggggcagtacacgctcagtggagaaggaaatcccggcgcacaggttattaaccagggcagcctgacgacgtcgaagggtggctatatcgtgctggccggggaacgggtcagcaacagcgggaccgtcaccacgccgggcggaaaaacggtcctggctgccggtaaaacggtcaccctgcagctcgataacggcgggctgacgtcggtgtcagtgaacggcagcgttgtgaatgccctggtggagaaccgggggctgatatcggcgagcaacgggcaggtgtacctgacggcgaaaggtcaggatatgctgctgaacacggtggtgaacaacagtggcaccgttgaggcaaaagggctggtaagccgggccggcgagatagttctcgatggtggcgacagcggggtagtgagccagtctggtcagttactggctgacagccagaccggtcagggcgggaaaatcaccctggaggggcagaatatccacctggcaggcggcagtctgacttcggcgaccggcaaaaccggcggcggggaggtgtacgtgggcggtggctggcagggtaaggacagccgcatcagaaacgcttcaaaagtggtgatggataaaacggccatggttgacgtttccgccacggaggcaggtaacggcggtaccgcagtgttgtggtctgatgattatacgaacttccgcggaactgtcctggcaaaaggcggcagccagtccggtaatggtggccgggtggaaacgtcgtctcatcgtaatcttcaggcttcaggtacagtggatgcatcttctccgtcaggaaagggcggtgagtggttgctggatccgacggatgtgaccattgtgggctcaggtgctgattcgaatatcgatgccaccacaaacgcaggaattttcaccccgacggccagtggggcgcaaatcctcaacaccagcatcgtgagccagctcaatgccgggacgaacgtgacggtcaaaaccagcgggacagatacgggcgggcagaccggtaacatcacggtgaatgcagatatcgtgaaaaccgccggagcggatacgaagctgaccctgctggcggataataatattgcgacggctgataatgtcagcattggagccaccaccgggaaactgaacctcgatttactggcggggaacacgacaaataatgcctccatccgtctgggcacaaggataaatatctcgctcaacgggggggacctgctggcaaatgccgggagcgcgaacaatggtgtttcattaatgttcaccaataacggtcagattcatggcggaaacgtcaccctgaacctgacccgcggtctgaacggttatgcatataaggttcaggcggataatgacctgacgataaacggtccggtgagcggcagtaccggctggagcgtaccgttgagctttatagccggcgggaagctaacgataaactcgccggaagatatcagtctggttgctgcggaaaccaccaatggtggggggcgtgtggtcattcagggggataaaggtgtcagtctgaacacggtggccggaaatatcagtctgactgcggcttcagctaccaccaattcggttaatgtcagcagtgacaatggtgcggtttccatgagtgcgggcggtaacctgtcactggtatgcgctaccgtgacatccggaaccggtcaggatgtcacgtttggggcggcgggtaaggccccggcacgggtgaacattaccggcagtacgattaacactgatggagggaatatcagtattgaccatgctgcagaaggtcaggccatgacagtactgatttccggtagcacgctcaatgccagtgcggcaggtaatgggcagagtggtaatatcactgtgcgtgcgtataaccctaatgtggacctcacggtgtcagcccttaccggaacggtgcgtaatggcggctccatgatagatattggcaacaacagcaatttgcatggtgacaacattaccatagtggccactcaggatggaagtaactcaaagtcacttcccgtttatatgcatggagccactctgctggctgacggtaacatcagtctgagtggagtgggtactggcggggccactccggcacaacttgagctccgtggcgcaggtaatacactgaaaacaaccagtggtgatatttcgataatatcgggcaacagcagtgtcctgataaacgctacaggctcttccagggcaaatatcacttccgggggaaatataacgattaccggaaacggtgggcgtgcgctgggcgtaggtgttatcaatgccagtgttaatgccactaataacataagtattaccggaagtacaactggtggggggagtgtgacctcggacagatttggcgggatttatctggctggtaatgtggatttccattccccgaatggctcactgactggtaccgaggccaatcgtgtttcccctatcagtgggggcgtggtattggggaatggtgttaattcgggtcagacaacaaatatcttgttcgatggtaactttaacataaggggtacttctgacgtcacgaatacacctggtaacattaaattcggaggtgggatttattatgccggcaataccacaacaactttctctggtggtaattcagttattcaggctacagggagtaattattcaacggctgtcaatggggattattcgctatatagttcaataatccctcaaaatataacactggcagaaggagctaacctgagcatgaaattaaattcaggctttgttagtactgtaatgccattgattactgcagatttcaataatcgttctgtaggttgggtgttttcgggaaaagggaatgtctctatcgatgcaagcaatagtggtacggggcaggactccagtaccctgcagcttaatttacttaataataaagatcttgatggttcttttactgttaatgccgtcaatgccagggggaatgctattttaatgtccggctataccaatgtgaatcttgtaaatgccactattacaggtaccagtcggggcaatggcacagggatacagattagcagtaccagagggacggttaacctggataatgtcactttgaacgggatcagtgctcagggtaatggcatttctgtcagtggtaacggcaatacatccattacagatagtgttcttaacggcacagccaattcaggtaacggaataggagtacgaattattgccggcagcaactataccattgacgggggaacggttaccggaagatctgttaatggttctgctgtgtctgttacgggacctcttacggtgaataatggcacatcagtgacggggacggcaacaggtagtagaggcactggtgttagtgctactggcagcctggttgcgtcccggggagatggcattcagattcacggaacggcaacttcaggcaatggtattgcgttggtcggcaataccgttctgacgggagctaagctgtcaggtaatgcgtccaccggaacgggactgaacgtgagcgggaatgcgacgctgacgaatgccacggtgagcggtgagacgcagacgggtaccggtgcggtagtgagcggtaagctgacggcggatgacacgactcaggtcacgggtaaagccacacaggaaggcggcacaggtgtcacgcttaacggtacggtgaccggcggtaaggttgacggtatggcaaccagcggtgatgcggtgcaggtaactgacggtggtgtcctcacgaatgcagtggtcaccggtaatgcgtccaccggaacgggactgaacgtgagcgggaatgcgacgctgacgaatgccacggtgagcggcacgactgagaccggaaccggtgcggtggtgacgggcaagctgacggcggatgacacgactcaggtcacgggtaaagccacacaggaaggcggcacaggtgtcacgcttaacggtacggtgaccggcggtaaggttgacggtacggcaaccagcggtgatgcggtgcgggtaactgacggtggtgtcctcacgaatgcagtggtcaccggtaatgcgtccaccggaacgggactgaacgtgagcgggaatgcgacgctgacgaatgccacggtgagcggtgagacgcagacgggtaccggtgcggtggtgagcggcaagctgacgataacagatggcgtgtctggtgtcacagccaaagcaaccggcaacggaacgggtctgctgatggagaatgcaacccttcaggcaaatggatatgttggtccggataaggcccatgcaattgtggccaccgctgagggtgccgggggcaccgccattaaaattcagggggataatcatctgggttatgtgccgattacagggaatgctttttctgtcggaggaaccggtgtgtctcttggtggtcaggtatcctttgcaaatattaagggggtggcagacagcggtacggctgttgcggtcgctgacggaaccgtacttgatggtggtgcagtacatgggcgttcagacaatggaaccggtcttgcggcagacggtaatgtcactctgaatggcgcattgattagcggtagcgtacagggcagcggtaccggagtcagcctgaaaggcaacatcaccggaggtacggttacagggatatcagtcagtagcggtgatgcggtgcagattgtcgattcccggctcactgacactgaggttaagggtgattcacagactggtgcgggcgttaaaacgcagggtaatgtcaccctgcaaggcactgaattaagtgccacatctgaacacggtattactgacctggatgtttccggcgccctgaatcgtgaccagtattcagtgattagtgctgacaggatagcgggacaggagaatatccatgttcttcagccggacaccccaccatcaccggaagagggtggtgcgaccggaggcggaggtaataccactccggataccggggactcaggtggtgtagcgggtggcgataccgggtccggtgagtccggggggaccgtcacgccgccatcgggtggtaccggtggtgacgccgggaataatggtaataccggttcaactgccggaagtgaaggaagtattccggataataatgcggcacagcctggtggggctcccggaccggccatccgggaacagatactcgtgtctgcactccgccagcaggctgtggatgcgcaggttacccgtatgaatcaggcaacaccggacgggttccattcagcagcaacgccggtggtaccggtaaccggataccaggcaaaacctcagaatgtggagataaacctgtgtgacgaagagagttgccagcctgaggcgcttgacgctgccatgcctgcagaaggtgtcgtgacgtcatccggtaagtag

SEQ ID NO: 404127 - DNA, 471 bp, Salmonella enterica
atgatgcgggaaccctgtcaccgtcctgatgattttgatgacaacggcctgctgaaagcgccggtacttttctggggcgggctggtgatgctggcgcgggcctggtggctggcggggctggcaatagcctcagaccatggagggtactggctcgtacagttttacccggatgtgacgcagcagtggtcgggacttttaaccggtctgccggcgcttgccatgctgttttgttatccggttcgcagtcagtttcctggcctggtcagagtggtatttctgttgatgctggcgactgcgctggccgccgcggtgtgtgatggcctggcactggcgaggcaggccccggaggagcaggatgcggtctggttgttactgtgcgcggacgttgcctgtctgtcgatgctgctgccggaccgccggctgagggcggtatttttcagcaatggtccgtgcatatacgtaaacaaatga

SEQ ID NO: 404128 - DNA, 381 bp, Salmonella enterica
atgccggaaagtcagtttattcaggaggtcaggcaccgggcagatatgttggccgggagctttaatccgggaaaggccattatatgggcacagaaagcgggcaattatcagcggatacttgacctgctggaggagacccggaaatacctgtcaggcgatttcactccacaggaggtgagtacattctggcgcgggctggaggcgtcaccggaaataaaagcctttatttactgtctggaaccgggggctctgttactgatccggcggggagtgaagggggatatttacagtattccggtactgcattgtgtggtacgtcattttattcagcagtatctgcaaccggggatacaggaaaagccagtggcagcaacagtatag

SEQ ID NO: 404129 - DNA, 531 bp, Salmonella enterica
atgacagggaaaatacacagcaacagcagactcacagaacccgatgattccggatttaccggggggaaaaatcaaggcctgaagaaagtaaaacaaagtaatcataatatatacactataccatatggcatggagccgtgggctgatgagccattatatctggtggtggcccgctgggggctgcagcagaaacggtggataaaccgcaatgacatcgcggcggttttccatataccggacaggcaggcttcatttcagttgtcctatatttcacgcaaaaaagaccgggtggcgtgccggacacgttatgtgccggctgaagacaccgggcgtcagagggtggagatttttatcgacggcatccttccgacgccggtggcgagtcagacgcatgcgcctccccgccgtcgcaacgcgccggctaaacagaccgggataatttcacggggggtggggagcggaatggccgacaataccggtttgtgggagcggctccttaaagggtgccgtggggggcgtgatgatgaatga

SEQ ID NO: 404130 - DNA, 732 bp, Salmonella enterica
atgatgaatgagtccctgattatcttcagccgggagtgggcggtgacggcggctcttgctgcatatctggcgccggcatattcccgtccggttacgccggtatacggtctggtgcaactggcacgcctgttgcgggagcagccgcgcaccccggtggcgctgggactgcgtccgcatgagcatgtggcggagctgtaccggctgcagccgctgctgtctgaccgggctgttctgtttgtggggcgctgtttttactggactgactataacctgccggagtggctggggatggagcggtacgggttctgtacatgggatgcgatgcagcacccgttctcccggcggatggaactgcggcgtttcaggcagtttgcggctgatacgccggataatgtcagttggccgactcctgtggcatccgccatgactgagattcagatactggaaagggcgaaccggtggctgtaccgggcgctgtcggcatccggtctgacccggtatgaagtccggatactgtcgttgctggccggaggccgtaaaggaaggttgtcctgccagacccggagcctgcacaaaaacaactggttgtataagctcgggatgacaaagcgtctgatggacctgtaccggggcgtgaaggtccgtccggaactgcaggccgggctgccacaacaggcagaagaaagcgtaacagaacacgacggactgctccggcaggaggctggatggtga

SEQ ID NO: 404131 - DNA, 327 bp, Salmonella enterica
atgaaagaaggtatttatacggtggtgtttgaaagccatcagcagtcggtgggggaaggtgtggtggtggtcagtaacggccgggttcacggggcagatattgcctgcactatccgcggaataatgaaacgtccggtgatggagctggaggtgcattattataaccgggatattccgtcggtactgggaatggaggaggactactggctggagatgagttactgcgaggccggggaggggcactatgatttcaccgggcatgtaaaagggcatccggaacgaaagctgagggcatatgcggtatttatgacgcccttgctgacatga

SEQ ID NO: 404132 - DNA, 420 bp, Salmonella enterica
atgggagattctgacgaaagtttggcacctatggtagatggacttagtagtgggctttgtatgttaattttagtagcaacagtttttatgattagtagtattgatactacagtcgctgtacattctgaaccatttagattctataagtcacaaatgataaataatatcatttattataatgatgctattgagattactcctgatgaatttaaaatgattgccagggcgataaatagcaatggaggagggagggtaatcatatctgggtaccagaaagatcagtcattaaataagcttttatataattttattgtatttcaaaatggattaggtgatataaacaagaaaattgaatataaacaggctaaagaaaacatatgtaacagggatgtatcctgtttgatttgggaggttgattaa

SEQ ID NO: 404133 - DNA, 1074 bp, Salmonella enterica
atgtattttataggtgttttcatatatctttttacaatcgcttcgttttttatttttccggcgatgagattcctgtttaaagaggctataacacttgcaccggaagttgctggggctgtttgtgtcgtgtgtatatatccattagtgatatttttagtgcatataatcaggaagaaaaaatcttttgaaagtaagttatatttaaccagtcaggcaaaactggctgcatcattatcagtttcacttggtctgattggaacatttcagggattgactgatatggtgtcaactatttctcgatctatgcaatctggaggggatgatctggtagggaaaatggattcgatgatttcatccatatcatccgcgcttgcatcaatgtcttatgcctttattacatctatttttggtgttgcctcatctgttataatattactttcacttaattatatgtcaacttattataataaaaaggatatcagagataagtttgttgataatgattataatttctcaaaacaaaaactagagcaattaagtgaagaagttcgtcgtttaagtaaaattaatattttagtctcagagcgactgcttgcatgtaatctacagaatgaggttattgatgaaggtttaaaaaaatatctggagctcatttcctgtagcaatgaattgaatgaaaaatctttaaataatttaactgtgttatcaggagcgtttcaggagaaaacaacttaccttatagagcaaggggagttaatcctttctactttagtagacataaaatcggagatgggaagatggtatgctgatgaccttgttaaagagttaattgataatctggagatgaataataaaatcgataatgactggaaaaataaaatttatattagtcatgagtctttaaaagatagtgttgatgatttagtaactgcaggcaggaatgctcaggaaagtctaagtaaaatcagtgataacagtataaaaatgagtgaactgcttataggactaaacgaaaaagaaaaatttaagtcagataagatgaagcgacttgcagaggcattaatacatgaataa

SEQ ID NO: 404134 - DNA, 1314 bp, Salmonella enterica
atgaataagctttttatggcatttgttatgttgacacccattttcccttgttatgcaatggactataacctgttcatgagggatgtatataaaaattcagatgtgattaaatcgaaattatatgatcttgagtcggaaaaaaacaatgcttctaaaacagatttcttttatgcccccaaagtaaaattaaataattcatataaaaacgacagcgcatctaaaaagtattttgacaatacaattaatgttaactcattactttttgattcgtctatcagcaatagatttaaagaaaagaacgctcgcttatcagagtttgaactgtctgtattaatggaaaaagaaaaactggcaaagcttgttattgaaaatgctataagtatatcccagtatcaggcacttaacagtagagctcatacgctggatgattctgccagacaattatggcaacagattaataaccgttacattaatggaacggcgagtcaaagtgatttgcagcaagctgatttacttgtacagcgcatagagggtgatatcaggcgaattgaacaggaaattaaaaattttcaggccaatatagagattggtacagggttaccctatcctgaagatagtatcaccttaaatgctaaaataatggatgaaattaaaaatatcaatatcaataaggaagagttgaaaaataattttgaatatctgcagttgagttatcaggcagaggaaacgaagcagaacgccgaacaacaaaactcactactttcagttagtctggttggggaggataggagaaataatcacagaagaattgaggatgactcctatgttggtgtttctgttgatttgaatatctttgattttgacaaagtaatgaacaagcaacaaaaaatcaatcaatataaatcaacaaaagcgcgaatggatcaaaaatataaagagttaacgggacagctaaaattatttgaacttcagtataattctagtgaagttgaactgaaaaactacttaatgcagcttgaaacaacgaaaaaaataatagaaagtcagagacaggaatacaatatagctaagatatcttattatgaaatgctcaatactgagtttgattattttcagctacaggaaaaaatagctgatcaaaacatcaagaaaatgtcaaatcgattatccgttttagcattattggctcctttaaaaataaacggcctgtaccttgcatcaaatctggcatctataaggcgatcaaccttgtcttttttgatcttcatgaccagttgtgatggctctatatatgaaccattagtcagattttga

SEQ ID NO: 404135 - DNA, 450 bp, Salmonella enterica
gtggagttacttaacaacagtgctgaaattagtaaaattcaatcacaaataattgaggcaaactttaaaatactggatatcgagaatgtcagaaaaaaacagagggatgatttttataaccgactacttggagagatagttaatgagagcaagttattgagtgagcaaaaaaaagatattctgaaaaatactggtgaaatggagttgctaaggaataaggttaaatctaacagtgttctctcgccagtggatggggttattctggatattactcaaaatctgactaatggttcatatatagagccatcacaactggtcatgaagatcaaaaaagacaaggttgatcgccttatagatgccagatttgatgcaaggtacaggccgtttatttttaaaggagccaataatgctaaaacggataatcgatttgacattttcttgatgttttga

SEQ ID NO: 404136 - DNA, 831 bp, Salmonella enterica
atgaacaacatttttgcgaaagtaaaaggacctcgtaagaaacctttttttaaattggtatcagactacactttgtttgacgctttggatttatctactattagcctcatcccatataacccagaccataaactcgatgatgattcatggttcaaaattgatgattttagccaacaactattttgtgtatcatttcttaagaatgaatttgattctaaggacttcgacgatttaacaaaaaaaaactttactaagatttcctatatattctctcatcagaatgatgatttttatttccagaaaataaccccttcattgtttattaaaagaaaaacaattgcttttggtgaaacagcagagatagaagaaaatgaagggcgattgattgttaatcataaacctgatgcggtatatctcaaggaaagggatatattattattcagaaatcttgccacaatttcaagtatctttaaaggtatcgatatactgtataaagaagctaccgaagaagaagttaagtcgtttttaagtgaatccttcattgtactttctaatgactatgatgtagaaaaagtgtcaaaaccaaatcgaaagagaatcgcattagctatggacacacttgcagcgatgccagtcgaagaccgaggtgagatgcttaattacattaatgattattgtgctgaaaaacttaaatatgacactgcagagtgtaaatttgaattatcatcagaagaagaattaaaatatttactgtatggtatcgaacagagattttacactactagatttggtaatgaaaagagattagccaactcaatattaagaatgtaa

SEQ ID NO: 404137 - DNA, 567 bp, Salmonella enterica
atgataataaatttcctttttagagttcttctgacatttaacgcaacatcgttgttggctataattttctttgtacaaaagaaatacactctatattatttttttcaagaatttgaatttagtcattggttgagtttattaccaaaaatggcatcatatgtattttacatgctaatacctatattactaacttggattagtttgcttttaagttctaaactgggaaaggatgaatttagagaaggcgaagtggtttctgtggagcatgctaacaactcatttcttccaagttatcttggttatttctttgtcgctttaagtataactagttggtctaccttattttttgtttatggggttttatttattttcacctttatgtctcaagcattatactttaatcctttgtttttattatttagatatgagttttataacattaaaaacaagagcggcgcatccatttttttgattagccgtcacaaatataaaacccctaatgaaataaaaatacccattgcttttagaataaacaattatacctttatcgaaaggaaaaaaagatga

SEQ ID NO: 404138 - DNA, 2916 bp, Salmonella enterica
atggcaacgcaaagcgaatacgagttagaaacgcagctggttaaccagctggtggggatgcactacgaactggtaaatgttaccgacgaaaccagtatgaaagccaacctgcgcaagcagattgaaattcacaatcggctggaggctgccccacttaccaacagcgaatttaaccgtatcttcctgcatctgaccaaaggtaatgaagccatcgatcgtgccagaatcctgcgcgatcgctaccagttactgcgtgatgacggtacggagaaatggctcagttttatcaataaagatgaatggtgccagaacgagtttcaggttacccgtcaggttaagcaattcaacgccgaacaaaacacgcgcaaaacgcgctttgacgttacgctgctgattaatggcctgcctctggtacagattgagctcaagcgccggggcctgggcctgaaagaagcctttaaccagatcgaccgttaccatcgggatgccttctgggtaggcagtggtctgttccagtatgttcagctatttattatcagtaatggggttgataccaagtattacgccaataaccgggctaaccatttcgagcagaccttcttctggacagacgagaaaaatgaacccattaagtcgctggagaagtttaccgaagccttcctgaaagtttgtcacattgcaaaaatgatcactcactacacggtgctgaacgaaacccgtaagtgcctgatggtcatgcgcccctatcagtactatgcctgcgaagcgatgatccgtcatgttaaggacagtctccatctacagggcaagccacgcaatggctatatctggcatacaacagggtcaggaaaaacgctgacgtcgtttaaggccagccaggtgatcatgtccatgcctgaagttgaccgggttattttcgtggtcgatcgtcgcgatctggattatcagaccgcgaaagagtttaacagtttcgctaaagacagcgtagatactactaacaataccagtacactaattaagcatctaaagacgaataacagcaaactgacgctgaccactattcagaaactgaacaatgccattactcatgaaggctataaggcacagctggagcacctgcgtaaggaacgcattgtctttatctttgacgaatgccaccgcagtcagttcggcgacactcacaaggctatcgtaagtttctttgaaaatgcgcaactgtttggtttcacaggtacacctatctttgccaacaacgtgaacatcaccaacggcgtcaaacaaaccactgaaatgctttttgataaatgcctgcacaagtatgtcattgttgatgccattcgtgatgagaatgtattgcgctttgccgtggagtatgtagggacctatcgccgtaaggaaaccagcaatgagatcgatatcgatgtggaagatatcgacaccaaagaggtcatggaaagcgatatccggctgggcaagataaccgactacatcctggctcaccacgatgcaaagacccgaaaccgtgagtttaccgcaatgttctgcgttggctcggtggacatgctgattaagtactataagctctttaaagataaacaaaaaaagcttctgcaggccgatccgggttacaaaccgttgcgtatcgcaacaatctttacttatgcagccaacgaagcggacaaaagtgataaggaaacggttaacggcttactagatgaagaagacatcagcctgcctcaaggcgggaaaatagatatctccagccgggatcatctggacagcttcatcaaggattataatacgctgtatggcaccagctattcagctaatgattcgcaaagcttttacaattattacaagaatattgcacaacgaaccaaagaaaaagggatcgatatcctgctggtggtcaatatgttcctgacgggatttgatagcccagctctcaatacgctttacgttgataaaaatctgcgttatcacgggctaatacaggcattctcccgaaccaaccgtattcttaatgagaagaaaagccatggtaacatcgtctgcttccgtaacctcaagaaagccactgatgatgccatagcgttattctcgaacaaagacgcatcttcagtcgtgctggttaagccttttgaggagtatttgagcgattatcaagctgctgtagataccttgttgaccctgacacctacagtggaaagcgtggacagccttcctgatgaaaaagctcagcttgcttttgtgacggctttccgtgacatgatgcgattgaagaatatcttggagagctttgctgattttgatgaagtaattaagcctttatcggatcaggttcttgccgattacaccagtaaatatctcgatatttatgataaggtgaaaaaacgcactgccaaagataaagtctcgattctggatgaggtcgattttgaagtgtcactgattcatcgggatgaaattaatgtcggctatatcctgaggctactttctggcatccaggcaatgccacctgaagagcagcaaaaacagaagaagaaagttatggatatcgttgacagtgacgtcacactgcgcagcaaacgcgaattgattgataacttcatcgaagaaaacctactgcatgtttcgcatgatgaagatattacccaggcctttgaaacctacgttgaacgtgaaaaacgtaaagcggttgcaacactatgtgctcaagaaaatctggatgaaagaaaggttgccgccttgctggataactacctgtttaccgatgtgatcccacgcgaagacgaggtagcaagggctctaacgtggacacctaaaatacttgagaggaagactgttcttaaacgtgtctatgacaaggtctgtggtgtgattgatacctttatcaacggaatgcgtgggttctaa

SEQ ID NO: 404139 - DNA, 1230 bp, Salmonella enterica
atggtgccaaaactgcggttaagtttattcaaagatgataaatcatcaagatggtctctagctaaacttggtgaaatagttgaatttaaaaaaggtaaaggtatatccaaaagtgatatatccaagaatggggtatatccatgtgttcgctatggtgaattgtataccatttacaacgaaaagattgataaagttctatcaaaaacaaactgtgcccctaatgaacatgttatcagtaaatctggagatatccttatcccagcatctggtgagaatgcggtcgatatcgctagagctagtgctatattaagggatgatgttattttaggtggggatattaatatcctttcacctaaatcaaatagccttaatagccttttcttgtcttattctattgtaggtaaaaagaaaatggaattagcaaaaatggctcaaggaaactccgtagttcatttatactcgagccaactaaagactcttgaaatatggcttcctttaattgatgagcaaaccagagtcgccgacttcctgtcctctgttgacgaaaaaatcacgcttttagataaacaatacaaacaactgtgccagtataaaaaaggcatgatgcagaagatttttagtcagcaattgcggtttaaggatgatagcggggacgatttttcagactgggaagaggtagagctaaaaaaaatagcctctaaggtaaaaagtaaaaatagagataattcagtaagtaccgttctgaccaattctgctacgctaggcattgtttgccaagaaagttactttgaaagagagattgttacagaaagcaacttaacaggatattacgtcgttgaaatcggtgatttcgtatacaacccgcgaatatcttcaacggctcccgttggtcctataaaactgaacgaattgggccaaggagtgatgtctcctttgtatacggtttttcgttttaataaaggcttgttgaaattttatcaatatttttttgaaagttcagtttggcatgattacatgaaaagtgtagcaaatagtggcgccagacatgatcgtatgaatatttcaggagcagatttctttgatcttccgataccccaaccttctgatgaagaacaaactaaaattgctagatttctctctgctattgacaacaaaatcactaccaacaaagcaaaactggacaagttaaaaatctggaagcaaggcttgctccagcagatgtttgtataa

SEQ ID NO: 404140 - DNA, 1608 bp, Salmonella enterica
atgtcgccccagattgaagcgcaaaatttgagtgaactgcaaagccgcctttggaatattgctgatacgctacgtggcaagatgaatgccgatgagtttcgtgactattgccttggtttcatcttttacaaatatctttccgagaagtttgtcacttatgccaacaaaatcctgaaagaagacgggattaagtataacgagttgaccactgagcatccggcttatcaggacatcattgatgcggtaaaagacgacagcattcagacgctgggttactttctgcccccaactgacctgttccacaccatggctcagcgtgtagcgaaagatcagaaaggcgcaggagaaggttttattctcgaagaccttgctactaccctacgtaatattgagcagagcaccctgggcactgactccgcagatgacttcagcaacctgtttgaagacctggatttaggctccagcaaactgggtaatactgccaaagcaaaaaatgagctgattggtagggttatcaccgaactcgacaaactgagttttaacctgagtgaagccagttctgacattctgggcgatgcttacgagtatctgattggtcagtttgcatccggtgcaggtaagaaagcaggcgagttctatacaccgcagccggtttctaccctactggctaaaattgttactacccataagctcaaactgaaaaacgtctatgacccgacctgtggctctggttctctgctactgcgtgtaaaacgtgaagcctcttccgtaggtaaaatctacggtcaggaaatgaaccgtaccacctacaacctagcccgtatgaacatgattttgcatggcgttcactacgctgactttgaaatcatgcaggaagatacgcttgaacatccgcagcatacacatctgaaatttgacgcgattgtcgccaacccgccattctccgccaagtggagcgccagcccgctgtttatgaacgatgaccgctttgcgcaatacggtagactggctccatccagcaaagcagatatggcatttgtgcagcatatgttttatcacctggaagatgacggcaccatggctgtggtgctgccgcatggcgttctgttccgtggcgcagcggaaggtcatattcgcaagtttatgattgagcagctgaactgtattgacgccgtcatcggcctgcctgccaatatattctacggcacaagtatcccaacctgtgtgctggtgttgcgtaagtgccgcaagcacaacgacggtatcttgtttattgacgcaagtaacgactttgagaaggtgaaaacccagaatcgcctgctgccgaaacatatcgacaagattgcagatacttacaacgactggaaagctcaggagaagtacagccatattgcgacgctggaagatattcgcaacaacgattacaacctcaatatcccgcgctatgtcgatacctttgaagcggaagaagagattgacctcaacgccgttgcgcaggaaatccgcgatctggaacggaaagtggcggagatcgataagaccattgctggattctgtaaggaactaggaattgataagccgtttgtgttggctgagggggataaataa

SEQ ID NO: 404141 - DNA, 468 bp, Salmonella enterica
atgagtgactgctggcaatcgggtaataccttcaacggtgataaagaacaggttgtacgccccactcaagcggttctgtcagtccagacgggagatgtagtcattagcctgattcatggtaaggccgcaatcgtcagccctgagcatgccgggcgtctgctcagtaataactatgtcagggtcgaagttgacagccggaaggttattcctgcgtggtttgtatggcacttcaatgaaagcagggaaagccgccgccagcaagctgtggcaacacaggggtcaacgtttgtattgcgtttgtctctcactgaggtacgtcagtttactgcaacgctacctcctcttaataagcagaaggcaatcggtgggctctatttggcaaccattgaaaaacgccattaccaagagcgcctagccgcactaaacgaacaacagatcctgagccagctcagtgatatgattcagtaa

SEQ ID NO: 404142 - DNA, 417 bp, Salmonella enterica
atgcgcatcctgaaatgttacctggcaaatgaccgcgaaggacactttgtgacggccggtgaggccatgagcgcaccggggcaggtatggagttgcgcttcctgtggctgtcggctggtattgcatgccggtgctttcggtgacccggcctggtttgaacacgatacgcagaccgtggcccgggatgtgctgatgaactgtgcccatcttgacccggaagtgaaagcggaagcccggcgcaggaagctgcgcaatatgctcaacggactggatgcaacggtaatgacgctgtcctggtactgtgtgtggtgcggtgaccattatcagggcgtgaagcactgttaccggtgccataccggtatctacagcatcgaagaaacgaactggcagagaaactactgctgcagtaccggatag

SEQ ID NO: 404143 - DNA, 423 bp, Salmonella enterica
atgtacgcaaaatccttcaaggcgcttgacggtaatggtcgtctgaccggtgcccgtaccgcacagaccgccccttacgaccgctacacctgccatctctgcggcagtgcactgcagtaccatcctgaataccaggcggaacgtccgtggtttgaacaccagcctgacgcgctgacagagaacggtcgacagcactgcccatacgttaaaccggaccggaaagaaacccgacttatccggcaactgcagtcttacgtaccggatgccttaccggtggtacgcaaggccgactggcactgtagcggttgcaacaacgactactacggagaacgttactgcctgacctgtcgcaccggcgaatacagccaagagcgcgctgatgcaacggatttcacacaggtggatttcgtatgcgcatcctga

SEQ ID NO: 404144 - DNA, 570 bp, Salmonella enterica
atgcaaaacaatcaacgatgggagccagactggttcctgaaagccctcctggacaaccatatagacaaaatggttgaacgctattcctgcctgcgggctctacgcatcgacctgttctaccaagatcatactgccagatatcatctgcaaaaccatcagtatcttgaaatggatctccgattactgatggattacatgatgcaactgaaggtggtggtagggttcttctgggttatcgaatggacagaggatcatcattaccacgctcacgtagtcttctggctggatggcaatcgaacacagaaaacttatccctgggctgaaaaggcccgtgagtactgggatcagattaccgggagagagggtgggctgcaccggtgcgagtttaaaacgcattaccgcgccaatatcaacatcccggtccactatagcgatgcggatagtattaccaatatccgacaggtactggcgtatatgaccaaaatccagcaaaaacaggggatgccgttgtttggctgcaatgaagtaccaccgcgcccactgacaggacgaccacgacgtgaggtctga

SEQ ID NO: 404145 - DNA, 945 bp, Salmonella enterica
gtgccgggtaataaaaaagcggacggcacaaatttaagcgaattatcagcatcagaaaaagaattcctaggcaaaataatatttcattctgatgccccattaaagcaggctcaacctgaatttttacccttatcagcggatatacccgaagaattagaaaaacgcattgacgaacttcttggcattaaaaatgaagctaaagaggatatatttattgaagatagtcagaggggaaatgctaatctctgtaccaaaggacgagttaataatgacagtaatgtcagtaaattaccgccagcagatatattgtttgcaaatggtatagctaacccgcactcagaggaaataataaaaaacagcctctacagtatcatttatattttatattttacatgtcaggatgataatcaaaggctaaagataatagacagaactaccctgttgtggggggagtgtcggaaaagatatccatttccttttgcctggctcaatagtaataataaagagcattgccagtggctctgggacgaaatgcataagcgatgtattggtgttccattcctcgctcgtgaccatattcagcagtggcattttcttgtggcaacattcgataactggaaaggctggacaatgattcagagagagtatttaacggaaaagaatccgaaacgtaatccaggaaaactcctttcgggcggtctcgatccggacagggtagaatttgaacacaaaactatcctgcttgatgagcttaaaagtgcatgggagcaaaaggaaagaagagtcagaagagcgaaggaaccagccgctgtgaagttgaccaaagcggctcaaaaaaaacttgagtttattgcgcacgtagagaaaaccacaccgaagggaattcttaacgagctgattaacgatgcctttaatgatgcgaagagtaaatcccggcaatcataa

SEQ ID NO: 404146 - DNA, 477 bp, Salmonella enterica
ttgccgggaattttccgcagcgtatgcacgaattcgctcgtctgcgggcagtcctttggcgaaatcagagttccgcaccggggcgatgtcgttaacaaggtcattgagggagcctacgacgtactcagcgtctttgaccggatggaagagaagcgcgacgccatgcagtcacttttattaccgccactggcacagcatgcactggcgaatgctgccctgacgtaccgttttggtgaagagcatcagccggtgacggcaacgcagatactgacaccccgacgttatgaagaccgcagtgatgacctgtggacaacgtaccagcgtatccaggagaacctgctgaaaggcgggcttccgggacgtactgcgaagggcaaacgcagctatacccgagccgttaacggcattgacggggacatcaggctaaaccgtgccctgtgggtgatggcggaacagatgcagcaggcgctgagttga

SEQ ID NO: 404147 - DNA, 375 bp, Salmonella enterica
atgcaaattttaccctcactcccgcccggaccggcatcgtcacacctcacgcctgtcggcatctggcagtccctgctgtcgcatctgctggaacaacactacggtctcacactcagtgacacacagtttgccgatgagaaggtgattaagcagcacatcgacgccgggatatcactggcggatgcgctcaactttatggtggagaaatcagagctggtacgtatcgatcaccccggcttctccatccatcatcagtcaccgtttatcggggcgacggagattctccgcgcccgcaaagccaccaggctgctgacccgcaaggattaccacatggtcaccgctcttgtcaccggcaaataccgcgagggtatctga

SEQ ID NO: 404148 - DNA, 216 bp, Salmonella enterica
atgacatttaccaccaccccaccagaggcatttgcgcaactgaccccttctgtacgcctgccgggcatatgctgttgtaccgcgcatattacccctgaggacaaccggagactggcgcaggcattatcaccagcgacagcaggtgagcacagctggatacacgataccggctacgggtatttcatccggcttaatgcccgtttacatcccgtatag

SEQ ID NO: 404149 - DNA, 123 bp, Salmonella enterica
atggggctttcaaaggactgtcgtcggttagtgaccacgctgatgcaacgatacggcatccacatcctgcatctggatgcggatggcgatctgctgcccggttttgccacctttgagtggtga

SEQ ID NO: 404150 - DNA, 843 bp, Salmonella enterica
atgtcagagactactcacaccgaacctgaggtgttaaccgaccctaccgatgtgatttgttccaccagcattgagcgcatcgtcaccggacgtaacgctgcactggcgcggattgaagcactgatcctgcaacttgatgatatttcactgctgaccttctccctgggagctggtacggcaaaagaatggggaatgcagcaatatcgctatgactgtttgctaatggagaaggcggacaaggctatgaaagtcattacccgcaatctggatcgcagtatatggcgggatttgatgaaaaggtcgggaatgctttcgatcatggacgcggaggcccgcgaccagtggtacagaagccttgaagggaatgatattcctgctgtcagcgaagccaatattctgagcacatttgagcaattacatctgaataaaggaaaggtatttgagcgtggagtgataaatgtgtttaaagggctatcctgggattttaaaacgaatagcccctgcaagtttggtgtaaaaatcatcgtcacagggctggtcaaatatgaccggtggggattcgggcttaaccatggctggcaacgtgaccggttagttgaccttgagcgaatgctgatgatcctcgacgaaaagccagtgcccgacaaccgctctgacgttacccgtcggctgggagatcacattgatgcgaaccggcacaacaactgttacgaggatgagatgtttaccattaggtacttccggaaggggactgcgcatatcacgtttaagcggccagagctggttgataagctgaatgatatcgtggcgaagcactttcctgggattttagctgcgaaatga

SEQ ID NO: 404151 - DNA, 5055 bp, Salmonella enterica
gtgggaaaagttgagtctggggccgatgtatatgtggaatataatgggcatacagtcagagcggatgttgatggtaatggaaattggtctttggttcttgcagataaattggttatcggggaaaataaatatacagttttggcgactgatatagctggtaatacaaaaaatatatcaggtgtattagattatcgcccggttataactagtagtttatatcttcgtgaagagtctgactccggatttaacaatgacggtattacaaatactaaacagccgagcataactgggcagactaaacctgattcagaaatagtaataaattttcatggacagatttataaaacatcgtcagattcatcaggggcatgggtatttaaatttcctgaatcattatccgacggtaattataaatattctgttactgtaaccgatcgtacaggtaacagtaatactgctgataactcatttattattgatacatcagtcactctgcttacggcaatgctttcgccaggtgacagagttcctggacaggatagtaatgttactgggtcagagcgaccagtaattacaggcaaagtggaagttggctctgaggtcgttattacatataacgggcatacaattaaagccgatgttgatacaaatggaaactggtctgttgatttgtataaaggcattaacattgggaagaatgattatattgttacagcaactgatatggctggtaatacaagatctgtctcaggaagtgtttttctttcatatcaggacagtactttaccactaacctcacatctttccagtagcactgatacaggagccagtaactcagatggagtgacaagggcacaatcattagcttttgacggagtcactaaatcgggggcttccgtgaatataactattgatggtaaaacatatactacaaaggctgatgataatggaaactggtccctatctaatataacaggcctgtcggatggagtgcattcttatttgacaactgctactctggacggaaaaagcacatcagttacttcatcagtggttatcgatcgtaccgcaccaactaccacgcttagagtggataacgctcttagcgaaggtaataatttctttggtcagggaggtacattgatatggttcaggggaaccactgaacccggagtaaaagtaacaatgaatggggcttacgatacaattcatacgacaaccgcggataaaaatgggaactgggctcttgcatggaacagcgtcacaggcgatggttctcgttattggccattgaatagtagttttaactataccttaaagcttgaagatttggctggtaatacttattccagtcaggggcgatatacatataatgcttctagtcctgttttgaattccattatagtttctggcgagacattggctggagacggaaaaggatatcattttcataccaatgaactgacacctgtcatttcaggtactacaaaaaataccagtaaactagtcataggtctggcgggtaaattgtacgaagtacctgtttcaactgatggttcattttctttcaaggtacctgctggcgttttttctgattcgaagattcagtctgttcctgttcaaatcacagcttatacaaatgcaggaaagacagtaacatcctggataaactatattgatgtactacatcaaactccttcaataactgccgatttgactcaggataccgatacaggtcttcttggcgatggacttacctcaaatcgaatgcctcatttagcgggtattgtgaccggtcttggcgtggctcctgataccacccatgtttcaatcacgattgatggaggtgttgatcaagagttgtatttagataaagatggaaactggttatttgatggattaacaaagcctttaatccctggagaacataattatcaaattcatgttaaagatcagtatggtaatactggaagttacaatggggcatttactgtctctgatatttattttgatctttcgaaagcaacagactccggtactatcggagatttacttacaaataatacacaccaggtttttgtagggaaagcttctgccgcggcaacaactgtcagaatagaaataatggggcatttttatgatgtaacacctgatgcatctggaaactgggtttttgatttttatcatacaacaggaatagaacttgctgatggagaatacaatgtcactgtcagtcagattgttaacaatctcatttctgattcaattaacagtaaatttataattgatactactcctccagcactaagtgtttcttatcctcaaaccggttttgataagacaatgactaacagcccagtattgtcaggtatgacagagccaaaacaagaagtaactatcaccttggataatgggaaaacatataacgttgttgcagatgaaaaagggaactggtcacaggaattgtctcttcctgatggtgaatatacttatcgtgtcagtactagtgatatagccggtaatgtaaatgaaattaatggtaccattttaattgataaggttcctccatctggattaacgtggggtatatcagaaacagcacagtttactacaggtgatatttatacggcggatgctcatcctgttttggttggacatggagaacctggtgcaaaaatcacgattactcctttaaatgatagttctcctggcgaaacagttactgttggagatgatggtttttggcattttaccactccgtctatatggtggagtggttcctccgtatcaaatatttatcatattaccataaaaatggaagatggtgcaggtaatgctgttacatcaaactcagcatttcaggtaacaagtactcctcctgatattaccgcatttttagctccggacagtgatactggagctaaaggtgatgatttaactaatattacgactccggtatttatggggagtacccgagcgttttctactgtgaaattaactattgatggtaaagtttacaccactcagtctgaccaaagtggacagtggaaaattaatatccctgaagatgaagcgttaaatcaaggtatttatacctattctgttatttctacagacgcgcttgggaaaacctcaaatccattaatgcatacaataaacattgatacaaatccagtacctcttaatgatgttcatctcgaggggtattcaggtgatgacgttttttcgaataatataaatcaggttctgacaggaaccacaactgcaggtaatcaggttgatgtcattattaacggaagtaaatactctatcgtagctgacacaactggtaaatggtcactatctgttactgcattgcaagatggggtatatagctattctgtgagtgctcaaaatgcagccggaacacagagtcctcctacttctggtaagtttactatagatactcgtcctccagtgactaccgtttctatttccagtgacactgatagtggggctataggtgattatttgacaaataatataaaccctgtattgactggagtgacaaagccaggagctgttgtgacactcactctggatggaaaggttttttcagttacggcagataatactggcatatggtcggttatggtctctccatcacttaatgatggagttcacaactatagtgtttctgtcaccgacagagctggcaatgttataattcaacctgttgatggatatttgacaattcagacccagtattctggagacggcatctcgtatgctaatttgactcctgagtccttatcgggaacatctgatgttacaactaaaattcaaacgcctattttttcaggtgcagggcctgtgtccactcgtattgaacttcgaattggtgatcagtctttttatggaatgagtgatgaaactggcaaatggactatctcagtgacagaggatatccctgaaggtaattactcataccagatttatgctgttgacaacgtgggtaataaatcggctccttttgaaggccatttatcaattaaaactacggcaactctggaggttagtggtcttcaggattcaagtgacagtggtgtaaaaggcgataacattacaaatattacaaatcccgttctgtctggtaaatcagaaccagatgcgttggtcaccctgacaatgaacggagaagattatcaaaccattgccggaactgatggggcatggagttttcctgttaaaggtcccctaccggatggggactatgtctggaagatcactgtgtttgaacccagctctggaaccaacggtgaaaatacagggcaaattacaatcgacacgaaggcaccggaagtgcatgagtcatcggtaccccagggagcgacaaacgacacggcacccgaatttgaaggtacaggtgaagccggtgcgacagtgaatgtcacgctgacagacagtctcagtagctcatatacccagtcggttatggtaaacacggatggttcatggagcctgaaatgggacagtactaaagatgcgcttcaggacggagactatacctggaaagtgacatcatcggatgtggcgggaaatgagagtacaccgccactgacaggaagcttcacgctggacacgaaggcgccggaggtgcatgagtcatcggtaccccagggagcgacaaacgacacggcacccgaatttgaaggtacaggtgaagccggtgcgacagtgaatgtcacgctgacagacagtcacagtagctcatatacccagtcggttatggtaaacacggatggttcatggagcctgaaatgggacagtactaaagatgcgcttcaggacggagactatacctggaaagtgacatcatcggatgtggcgggaaatgagagtacaccgccactgacaggaagcttcacgctggacacgaaggcaccggaagtacatgagtcatcggtacctttgtcatctgtatcgactttttcgtcatcaattccaatgttgtccactacattaatacatgaggggcatacctctgatcatgatagtaatggttcatatatatga

SEQ ID NO: 404152 - DNA, 465 bp, Salmonella enterica; identical to SEQ ID NO: 379363

SEQ ID NO: 404153 - DNA, 216 bp, Salmonella enterica
atgagacaatatactattaataacgaatttatttataatgagtcgttaagagaaataatatcattacatgataaaaaagtgctaaaggtgacgctaatgcgtgcgcgttgtttaagctatctttttgaaaatgcctacaagaaactgattacgcgggagatgatttcacacgcagtttggggagacgaagtcaatttgttagcgatgctaatttga

SEQ ID NO: 404154 - DNA, 201 bp, Salmonella enterica
atggcggtttcggacacgaaaacttatcccattgcctcttctattatcaatagcggcggcaacctcggcgggtttgtcgctccgatggctgcgggttttttacttgataagaccggcagctttaattctgtatttacctatttcggtatctgcgcagcaattggtctggtggttattctcttcctcgatgagccacaataa

SEQ ID NO: 404155 - DNA, 141 bp, Salmonella enterica
atgtatgaagcagcccgtgtggatgaccctatctaccacaccagtgcgctcgccgggtttcttatcggcgctatcatcggcatcgccattatcgcgcttgcgcctttgccttctttagctgcggttttcttgccgggctga

SEQ ID NO: 404156 - DNA, 2916 bp, Salmonella enterica
atgagtggaactaatcctgtatttttagtccgcaaagccaagaaatcatcgggccagaaagacgctgtactctggtgcagcgatgattttgaagcggtaaatgcaacactggattatctcctgattaaatccggcgcaaagttgaaagattattttaaagccgtcgccacaaatttccccgtcgttaacgagctgccaccggaaggcgaactgagcctcactttctgcgattactatcaactcgctaaagacaatatgacctggacgcaaatcccaggtgtaaccctgccatcatctgaagccgccgccgcggcgcgccagcatatcgtcgacggtgttgataccgaaacaggcgaagtgctggaagaccacaccgaaaattttgagaacaaagacagcagccctaccccgtcccccgagctaacggttgtcgcaactatgcccctccgtcaccgcgttcttgctcagtacattggtgaaggtgagtatctttatcacgtcgatgcctcccagaaaaaagaaattctgcgtctcgaaatggacaccgataattcatatgtccagaacctgctgcttgccgccgagaatgttgaagcgttcaaaaaagctattgagcatgatattcacaaagcagttaatgccatcaaaaatgtattcccagttgacagaaaaattcctgaactggggactattatccagttccttaaaacatggttcgataccgaacatatcgatcgtggtttgctcgttaaggagtgggcgaagggtaatcgtacatcggctattcagcgcactgaaagtggcgcgaacgcaggcggcggcaataagactgatcgtcatcctgatgtaaagcataattttgacgttctcgacattgaaatagcactcgccactctgcctatggattttaatatctatgagcttcctggtagcgtttaccgccgcgcaaaagagatcgttaagaaaaaggaaagtccattcaaagaatggtccgcagcacttcgcgcaacgcccgggatcctggattattcccgcgccgctattttcgcgctgatccgaagcgcccaccctgaatattatcagtatccagggcgcctgaggggttatatcaatgccaatttaacggaaagcaatcacgagaaacctactgcagagactcttgctgccgcccgtcacacaccggaaaaagatgcagtagaagaagccaaccgacagctggctgccgaacgcggtgacttcgttcctggtataagcgacccaaacgatccgaaatgggtgaagacagggacaagccaaccggcatctgagcccgagctggttaaaaatgttggcaacgggattttcgacgtgtccgctttaatgcagaactcatcaacttatggcacaaaaacggctccggaggccaccagcagtgtgcaggttcaagaaattgtcagtgatgaaaaacaggctggtgatgcgatgcaggcaggcgaaaacgatctggggaatggtgaaaaagcagataccatagagaaccagagtcaggctgaaacgcaccagaataacacttcagtgagccaatctgagcctgaggagcaacaaaacgtgccagattcgccacaggaaaaaccagaagcggcctggccggaatacttcgagccgggccgctatgaaggtgtaccgaacgaggtttaccacgctgccaacgggatcagctcaactcaggtgaaagatgcgcgcgtgtcgctgatgtactttaacgcacgtcacgttgagaagaccatcgtcaaagagcgctctccagtacttgatatgggcaacctagtgcatacgctggcgctgcaacctgaaaacctagaagcggagttcagcgtggagccggagatccctgagggtgctttcaccaccaccgccaccctgcgcgagttcatcgacgcgcacaacgccagcctgccagcgctgctgagtgctgacgatatcaaagcgctgctggaggagtacaacgccaccctgcccgcgccagtaccgctgggcgccagtctggaagaaacaggccaaagctacatggcgctacctgctgaataccagcgcattgacgcagaccagaaacaaacagccgcagccatgaaggcctgtatcaaagaatacaacaccaccctgtctacgccggttaaaacgagcggcagtcgtgacgcgcttcttgagcaactggcaataatcaaccccgacctggtcacgcaagaagcgcaaaaatcggtgccgttgaaagtatctggcacaaaggccgatctgattcaggccgtgaaatcagtaaatccggcagcggtattcgccgacgaattgctggatacgtggcgggagaaccccgaagggaaagtactggtcacccgccaacagctcagcaccgcgctgaacattcaaaaagccctgctggggcacccgaccgccggcaaattgctgactcacccaagccgcgctgtcgaggtgagctactttgggattgatgaggaaaccgggttggaagtccgggtacgccctgaccttgagatcgatatgggcggcctgcgcattggcgccgacctgaaaactatcagcatgtggaacatcaaacaggaaggcctgcgtgcgaagttgcacagggaaatcatcgacagggactatcacctgagcgcggctatgtactgcgaaaccgccgcactggatcagttcttctggatattcgtcaacaaagacgagaactaccactgggtcgccatcattgaggcgtccaccgaactgctggaacttggcatgctcgagtaccgcaaagcgatgcgtgcaatagcgaacggtttcgatactggcgaatggcctgcaccgattaccgaagactacaccgaagaactcaatgattttgatgtgcgtcgccttgaagcgctgcgcgtacaggcataa

SEQ ID NO: 404157 - DNA, 141 bp, Salmonella enterica; identical to SEQ ID NO: 381289

SEQ ID NO: 404158 - DNA, 207 bp, Salmonella enterica
atggcgatgaaatactcctggttccatcatcacgactgcacaaccgagcaggccgacacgctgatatctgattatcagaagcggggcataaggacagaaaagagccttaatcctgatttcattacctggactgtcagcgcgaaattacctgaatatgcacaccgggtgcggacgccaaaatccttacgccaaaaggtctgggggtga

SEQ ID NO: 404159 - DNA, 621 bp, Salmonella enterica
gtgctgtgcgcctttcctgcttacgcctctggtcctgattgtctgcaccggcgttcaggcggctgtcgtgccttccgcacccggcgcaggcgcactgggaaaccagcagcaccggtcagcgcaccgctggtgcagcccgaagaagggctagcccgtcacgcgctgtcggcggataaccataccacggtgagtgtgaaacgggtggtgttcactggtaatccgccgggactgaaggggctgagtgaggccgacctgcagtgcgaactggctaccgacctgaatcacccgcagacttttgccgggctggaagccatggcacaaaaaatcaccgccctgtaccgccatcatgggttgctggttgcccgggcggtactgtttgtggggcgctgtttttactggacggattataacctgccggagtggctggcactggagcggtacgggttctgtacgtgggatgccatgcaggacccgttctcccggcggatggagctgcggcgcttcagtcgtctgtgtgtcgatgtaaaggacgcaggggaagtgctgcgtctgaaacaaatcagtgggctggcggaactgttcggtgatgaaacattttcacaagcctggaccgtggagtga

SEQ ID NO: 404160 - DNA, 393 bp, Salmonella enterica
atgaagattgtttttcatataccagagctttcccggagtattccctgcctcaataatgtgcgtaattaccttaatcacgccacgaggccacatgaaacattcatacaggttgtttttaatgcggatgctgtaaggagtccgattcgagggaagaaagcgctgaacgctggcgtactttgtctgaacaacacccgtgtattcagctgtccgtctgtaataactcccttcatggatatgctctttctcctcaacaactcattgacaccatccggatcatcccggcggcagtcgtgcccctgccagatctccagcagaacggatgactatacattcgtccataacaccgacagggctccccgacttgatgcaggcaccgcgcctcaaactgagtaa

SEQ ID NO: 404161 - DNA, 252 bp, Salmonella enterica
ttgatgcaggcaccgcgcctcaaactgagtaagcaagctatgttatatctgttcattctcatcctgattatcccgttgccggcggttgctactgacacccaaatcacactgcagtgcgatggccggagcccgctgactgtggttctagccggatatgggctggttactgagtcatggcccccggtgtttttcgaaactggaatacgcataaaggatgaacattttacttctggcagacctgtggccgtgtga

SEQ ID NO: 404162 - DNA, 309 bp, Salmonella enterica
atgcttaacatgctcgagacaccgggatatccttggacggttgagacgctggcgcaacgagtacatatgtcccgtgcgagtttcgcccagctatttcggaacgtgtccggaacgacgcccttaaccgtgctaactacgctgcgccttcaaattgccgctcagtcgctctctcgtcaaaccttgccggttattgcgatcgcagattcggtgggttatgcgagtgaatcctcttttcataaagcgtttgtccgtgaattcagctgtacgccaggcgagtaccgtaaacgggccagccagctctggcgataa

SEQ ID NO: 404163 - DNA, 966 bp, Salmonella enterica
atgttcagaattttaatgttactcctcgtttggggtgggagctatgttacggtcttttcggcaagcgctgctactggttgcacttttgctgatggagatgaaataagtatcaacgttccacagatggcacttcctgcggacacgcctgatggaacagtattatatgtctcgcccaaaataactaaaagaatagagtgtgagtcttctgcatggaattatgtcacgctcagtacaaccgccgacttcaatgcttttttaaatcagaggaatggtatacaatttactgtatatgttgatggcgttgcatttgatcaggcaaaaactcatgttatagggtatacgacattagataatgataatactggttcttataagttcatcaaagatgtatctatttcatatgaaataaaagtggacagcagtaaggggaaaattcctgtgtcaggtacgctgttatccggaggatttcagagtatttttgtgcttcttcaggaaaattatggtgctcatcgtggtatcatcagtttatatactccgaatataacgtatattccctgtaccatggctgtgtcagtcagtcctgaaacgatcgattttggtgcggttaaaagcagcgatttagaaaaaggggttaagttgcaaaaaacattttctacgctaatcaagaaaagcaaggggtgttcggtggctgtcagcgcgccgtttggcatcaatatgtattttgagcccacgaacccagtgataaatgccgatggttcgcttaagctaaacgacggggtggggctgagtattgcagattccactggaagagccatcgcttttaacaccgctcagaaaatagatgatgtcaaagtggattccattctgaaaaatgattttagagcaaatatacataaggtttcaggtcaggatatcagcataggacctttcagtgcagatgtcgtggtgaggctcagttattactga

SEQ ID NO: 404164 - DNA, 732 bp, Salmonella enterica
gtgttgtttaaatatgggaataaagggttcgtatcgtttgcggtgggcctgtcactgctggggagctcggtggttcatgccgccgtgaacgttgaccggacccggattgtgatgggcggtgaagataaatcgttggcgataacgttaagcaaccagagtaaaacccagccttatctggcccagtcgtgggttgatgatgccagtggaaagcgttctgaatcgtatttactggcgttaccgcccctacagcgtatagatgcgggtaaaaagacccaggtcagaatcatggcgttacctgccgcggcgtcactggccagagaccgggagacactgttctactttaatgttagagaaataccgccgaaaagcgataaggaaaatgtccttcaaatcgccttacagagtcggctgaagctgttctaccgaccggaagagataaagaaaaaggcgaacgaccgcgttgaggaaaaagtcacgataacccgccagaacgacaagttagtgctgaagaatccgacaccctactatattacgctgggctatttggggcgtgataacaaaggtagcttccccggtttcgacagcgtgatgttagcgcctttctcatcgcaggactttaatgtgaaatgggaggggagcacgttgcgtgtcggttatattgatgatttcggcgggctgaatattaatcaatatcattgtgccggagcgctgtgcacgctgaaaggaaaatag

SEQ ID NO: 404165 - DNA, 2475 bp, Salmonella enterica
atgagtattaaaccttcgtatctggcatttctgttggcgatttattttcctgtggttaatgctcggggtgttgagtttaatactcatcttttagataccgataacagaaaaaatgtcgatttatcggcgtattcgcaggaaggatatattgctcccggtgaatacctagtcgatattattctgaatggtcagatgattaaagaccagcaaatggttaaatttaacccagataatactaaaaataacagttatgcctgtctgactccgtccgtgattgatgccatggcgcttaaaaacgaggttaaaaaacagctgaccttctggccgggcacgcagtgtgtacgtcttaccctgccggacagcagcgttgtgtattcgccggataatcaggccctgtcgatcactattccgcaggccgaccttttgtaccaggacgaggaatggtccccacctgcgcagtgggataacggagtaaacggattaatttttgactataacctgttagccagtcgttatatgccggataagggagatgtcagcaccaattacagcctgtatggcacgtcaggactcaacctgggggcctggcgtttgcgctcggattatcagtacaacacgacccgggggcgtgattacaaccagtcatcattgagtctgccgcaaacctatctgttcaggcccataccttcgctgcaggccagactggtgatagggcaaacctatctgagctccgatatttttgatacgttccgcttcaccggggtatccctgaccagcgatgagcgtatgctgcccccgtcgctacggggttacgccccgcagattaccggcattgctcaaacccacgctcaggtcaccgtctcccagaacggacgaatcctctggcagtcccaggtgccggcaggcccctttgtcgtcccgggactcagtgaaacggtgcgcggaaaccttgacgtgaccgtccgggaggataacggtcatgtgcgcacctggcaggtgaatacctccagcgttccgtttcttgcccgtaagggcaacatacgttttaaaaccgcaatagggaaaccgctgacctatgccggaaccagtcacaccgtggagcctttattctcaactggcgagattacgtggggggcgtttaataacacctccctgtatggtggctttatagccagtgacgggcaatatcgtgcactggcactgggtgttggcgaaaatatggggctgctcggggccgcctcctttgatattacccagtctgtggcacaggtgaacaatcagccacagcagaccggttacagctaccgttttaactacgccaaaacctttgataagacgggtagcaccattgcgtttgccggctaccgcttttcagaaaaaagcttcatgtcgatgaaccagtatatcgaccgttcgaacggttacgggacatcactgacagaaaagcagagctatatgctgacgttcaaccagtccatcagttcactgaacctgaacgttctgttctccctaagccatcaaaactactgggatagtagcgccaatgataactacactgcgtcactcaacaagagctttaaccttggtccttttcagggggcaacggcttcgctttctgtagggcgcagccggaccttgctcaacgaacaggataatcagatttatctttcgctcacgctgccctggggctcccagcgacagataagttacagcatgcagcatgacagtaatgggcggatgagccaggtggcgaccctttataaccgaccatcggataaaacttcctggagccttggggtggggcaacagcgggatgagggacagcagaatggagctttgctgagcggcaatattcagacaacgacaccttacggtcagggtaatgcaaacctcagcatgctgagccagcagtataagaaccttggcctcagttggtatggatcctttacggctacccgacatggtgccgccttccaccagaatatggctgaaaacgacccgcggctgatgatcgataccggcgatgtggcgggtgtgccggttgacaatgataacggggtgacgaaccgctttggtattgcggtggtacctgccggttcaagctatgaacggtcagacattgccgtcgatattaccgcactgcctgcggatatcaccgtctccgggaacgtcatcagtaaagtgttgacggaaggggccatcggctacagaaaaattacggccacgaagggagggcagttgacgggaaccattcggcttgccgacggcacattcccgcctttcggtacacaggtcaaaagtcacagcggtaaagttctgggcattattggggaccagggatttacctaccttaccggcgtcagcagtgccaaccgcaaggatgtcagcgtcgtctggtctcaggggcagtgcagactccagcttcctgaatccccggacctggcatcgggtgtcctgctgttgccctgtcattag

SEQ ID NO: 404166 - DNA, 591 bp, Salmonella enterica
atggataaagtaaataagttagttctggcagcttgtgttgcgggctgcatgacaagcagtgcatgggctgctgcaccaacaggtgttgattatggtcatggtactctgcactttacggggagtgtgattaactctccgtgcagcattgccccgggcgatgaggatattaacgttccactgggccaggttgccaacaaggtgttagaaacaggtgcaggttattctgacacctatcccattacgattcacctgcaaaactgtgacctgaccgcccatgccggtgcgaccagtggtacaggtaccgtggattatccttctttctctaaagtttcagttcagtttgcaggctcggcagatgcgaaaaatgctgacctgtatgccaataccggtaccgcacagggcgtgggtattcgcctgatggatacgatggcggggaatctgcccctgacggccaacgccgcctccgcggatcatgatctgacctcgggtgataatatgctgaaatttggtgcccgacttgagaaaaatggcgatgccgttgcgacaggtactgttgcagctgatgtcacttatgccatgaattacaagtaa

SEQ ID NO: 404167 - DNA, 432 bp, Salmonella enterica
atgacggatgatattgggcgacaaaagcaatcagatgatttctgggcagaagtcattcatcgttcaaaaaaccaactatctgatattaatatcaggaagttccaagaatggagaattatggtcggcgacaaggaaattaatcgattactaagattaatggaattacttttatctccggataatcagaatttcgaaattaaattcttatttgattggcttaacttcaggataaatggccgctttctattcagctgttttagaagtagcggaaaaacaattatcaaacaaggtatgaaaggtgaaatatattgtgtacctgttttgtatgttattattcgctatttaattgacgattcaaggaagctctccccgtcatattgcaaagagaaagagattgatatcagccaaatctttcaaccaaattttacttaa

SEQ ID NO: 404168 - DNA, 456 bp, Salmonella enterica
atgaaaagcaaatcgattaataaagacaatcataaaacaatacccatgagcgtatcccaacaccatcgacaaccactctatatagttattgcattatggtgccaacaacaaaatcgatggattaatcgtaatgatatagctaaggcattttctatatcagaacgaagggcttcatttcagttatcttatataactcatcgtcaaaaaaacaaagtcacatttagactgcggcgaagaataatatctcaccacccatgtaatgagatatgggttaaaaaagtcatcatagaatattcagatgataatattagaaaacaatcagcacaagataataagtcaaaaaaaagaaatatgagtgcttatcgttctcgagtgggtaatggaatgtcttcagggacagaaatttggaaaacattgataatgatgcgttcacctccggtggaaggagataattaa

SEQ ID NO: 404169 - DNA, 231 bp, Salmonella enterica
atgctgtcgacactcccgcaggacaggttccgtaattattatgattataatcagttcgctgctggtcattattggatacaggctatagtgggcgccgcttcaacgatcactcttcctattggcgaattgaaagacggtctggacagactgccagatgaggttctgacactgacattcatggatatggaaggacatacatttatcacatcgttaagtcgtgtgggcgcgtaa

SEQ ID NO: 404170 - DNA, 327 bp, Salmonella enterica
atgaaagaaggtatctatacggtggtgtttgagagcagccagcagtcggtgggggaaggtgtggtggtgataaacaacggccgggtacacggtggagacatagcctttactattcggggaataatgaaacgaccggtaatggagctggaggtgcattattacaatcgggatattccgtcggtactgggaatggaggaggactactggctggagatgagttatcacgaggttggggaaggtcattatgatttcagtgggcatgttaaaggacatcctgagcgaaccctgaatgcgtatgcggtttttatgacaccgttgctgaaatga

SEQ ID NO: 404171 - DNA, 378 bp, Salmonella enterica
atgtctgaaagtcagtttattcaggaggtcagacaccgggcctccctgctgaccgggagttttaatccgggcagggccataacctgggttcggaaagcggataaccggcggcagatactgtgcctgcaggaaaagacccggagatatctgtcaggcgaaaacacgccacaggaggtgagtgcgttctggggcaggatggagaccctgccggaggtaaacgcctttatttcctgtctggactcgggggttcatgttttgaaggcccggggcagacggggggatatctacagtattccggtgcctcactgcgtggtgagtcattttattcagcactatttatgccgtacaccggaaataacgtccgtgacagacgtgtag

SEQ ID NO: 404172 - DNA, 6306 bp, Salmonella enterica
atgaataagatatataaactcaaattcgacaagcgccggaatgaactggtgattgtcagtgaaattacggcgggggcaggcaaggaaaggagcacaggtcacatcgcagacctgacagccctctctccattcagaaaactgctggggaccttaacccctgtcgcgctgctgacggggctgattgctggactgttgccagcgatggcgctggcggcagacctgccgaccggcgggcagattgtcggtggtcaggggagcatcagcacgtctggcaaccagatgaccattcatcagcagacgcagaacatggccaccaactggcacagctttgacatcggcaaaaacaacaccgtgcagttcgtgcagcccaacagcagttcggtggcgctgaaccgggtgacgggcgccagcgggtcacagattatggggaccctgaaggccaacggccaggtgtttatcctcaaccccaacggggtactgttcgggaagaatgcccgggtggacgtgggtggcctggtggccgccacaaagaacatcagtaccactgactttatgaaggggcagtacaccctgagcggcagcggtaatcccggcgcacaggtggtgaaccagggcagtctgacgacgtcgaagggcggctacatcgtgctggccggagagcgggtcagcaacagcggcaccgtcaccaccccatccgggaaaaccatcctggcagccggtaaaacggtcaccctgcagctcgataacggcggactgacgtcggtgtcagtgaacggcagcgtggtgaatgctctggtggagaaccaggggctgatatcggccaccaacgggcaggtgtacctgacggcgaaagggcaggacatgctgctgaacacggtggtgaacaacagcggcaccgttgaggcaaaagggctggcgaaccggggtggggaaatagtcctgaacggcggcgacagcggggtggtgagccagtcaggccatctgctggctgacagccagaccggccagggcggaaaaatcacgctggaaggacagaacatccacctggcaggcggcagtctgaccacggcgaccgggaaaactggtggcggtgaggtgtacgtgggcggcggctggcagggtcaggacagccacatcaaaaatgcctcaaaggtggtcatggacaaaacggctacggttgacgtgtcggccactgaaaacggcaacggtgggactgcggtgctgtggtctgacgattacacgaacttccgcgggacggttctggcaaaaggcggtgcaaagtcgggtgacggcggccgggtggaaacgtcgtctcaccgcaatcttcagacatctggtgcggtggatgcgtcagcacgcgccggacacggtggtgagtggctgctggatccgacggatgtgaccattgtgggggccggagctgacacgggtatcgactccgccaccgcggacggcaccgacattttcactccgacggccagcgggggacaaatcctcaacagcagtatcgtgaatcagctgaacgccgggacgagcgtcaccgtcaaaaccagcgggacggatacggacggagagaccggcaacatcacggtgaatgcaaacatcataaaaactgccgggacggatgcgaagctgaccctgctggccgataacaatatcagtaccggcgacaatgtcagcattggtgccacgaccgggaagctgaacctggatttactggcggggaacacgacgaacaacgcctccatcagtctgggcaagtttatcaatatctcgctcaacgggggggacctgcttgcagatgcggggaatagcgccagtggtgtttcattaacattcatgaacaacgggaagatcaagggaggaaatgtaacgctgaacctgtcccgggggcttggcggatatgcttataacgtgaatgcagataatgacctgacgatcaacggttcggtgaccggcagcacaggctggggcgcagtgcttggctttaccgccggcggtaagcttgcaatgaactcgccgggcagcatcagtctgcaggccaacgaccccggcaacggcggtggacgcgtactcattagtggagataaaggcgtcacgctgaatgcggcagccggcaccgtcacactgaatgccgcaaaggccgccaccaatggcgtgaatatcaccagtggcaacggtgcggtgagtataaccaacatggtgcaggacggcagtaacggcatgacgctcacgaatgccaacatctcatcgaaagatggcatcgtgctcaacgggaccaccttctggggacaggcagtggtgatgtccggtgtgaacctgacgaccggtggtgatgtggatattaccggactggcgaaaaatctgaccaccggaggactgggcgcagcctcctcctccggcgtgcagctgtcgggcagtaacatcagttccaccgggggtaacatcactctgaccgggactgccggcaccgacgtatctcacccttccatcagttcgctgcaggtcagcaacagcacccttaccacgaataacgccctcaccctgaacgggaccaccgagaccactaccggcgttaaggtgacgggcagtaccttctcagcggccacacttaacgtcaacggggtggcgagcgttcagggtaccggcttttcgctggccacaagccagttgctgggcggcctggcggacctgaccaatgtgagtctgagttcggcgggctcggcggccggcgcccagaacatactggacaacagcatcgtgaatgatgctaaccgcgacacgctgctggcgaagcgcatcgagaacatgacctccgtggaaatgaacggcacggcgatttttgacgacagcgcgaaggctgacaaaggctggacgcacgactacagctcggtggatacgcccaatggcggctggatatttaacaataccagcgtgacggcgggcggggacgtgaacctgaagggggtggcgttcaccaatgcgacggtgacggtgagcaacggcagcctgacgctggataacggtggtgcggttccgctgaccggtacgacggtcacggttaatgatggtgcggtcagcgttcactccggggggggtaacatcgacctgacgaagggcaacatcagtgcgaaagggaatatcacgcttaaagcggatgcgggctctatcgccatttcgggcacaaatgcgtcggtaaaagccaatatcacctcgactgaagggggggtgaacttggtttcaatgcaggctataaatataacaaacgcaaattttttagcggataaagatatctctttaaatgttgcttctgaggtaatgggaacgctggggattggtaatgcctctttcacttctcaaagtggtgatgttgatttgtttttggatacgaaaaaaatcactagtatcaagacaactggtgattcgcagtctggtggattgatattctcaggtgagaattcatttgaagctaaaaatataaatatttctgcattgtccagtaaggatgcttacggttattcacttttgtttgaaagtggtgcgatattgaatttaaaaggtgaaacgcatattaatgcgagcaatgaaggcgacggaactaggcgtccggatgcagccctgggtattcgatatcgaagagctcaaattaatgtgtccgacggtgatctttacataactgcaagtgctttgtctggctcagctatctttagttttcttaccgctgggcagtgggcagatggaggttttgaatttgtgttaaataattcgaatttatacattgatgctaattcaaagtttgggtctgggattactttaggtggttatggcggcagtacttatgcgaatggtttaacatttaaaggaaacggtaatgtgagtgttcatgctcaaggggccgtgggtggaatagcattaagcagattgtatactggggaattggatggaaatgttcaattgactggggtcggaggtagtgcagcagggattgatgcaagtttaaatactgtttttcagggaggggtttccctatccgggagtagtgctgacgatgtagggattttactttcctttggcccaggtattcaggaacataatatgaatctgaatggttctaatgttgcggggtcttcggaaaacggaagtgcgggtatattaattgaggggaaaaatatatcgttcaccaatggcaccctgaccggtacggccacgtcaggcaatggttccggagtggtgctgacaggaggcggcaactacacccttgatggcgcatcaatcaccgggactgcggccgatggttccggtatcgccgtgaatggcatgttgaccgtgaataacgggacgacagttgaaggccatgccacgggaagcgggaacggggtgacggtttcaggcgaccttgctaccgacagcggtgacggcatctcgatttcaggtacagcatcctctggtgacggtattaaggttgatggtgacaccacgctgacaaacgcgatgctgaacgggagagctgacagcggcaacggagtcaatatcgccggtaacctgaccacagacagctccactcaggtgagtggacatgcagccagcggaacaggcgtcaatctgggtgcagccctgaccggtgcttcggttaaggggagttcagacaccggcacaggtgtgcagttagcggataacgcggtggtgacagaagccgtgctgaacggcagttccacctccggtgacggtgtggcggtcaccgggagtgtgacgctggatgataccagcgccgcggcgctgaatgcctcttcgacaagcggtacagggctgaagcttgcggataacgcgaatgtcagcattcagaccatcacaaaagtgacccaggagaagaaggacgcggacggtaatccggtactggatgcagacggcaatccggaaacggagaccatcaccacacaggctccggtcaccacgccggtgacgctgacgggaacctcagagcagggctcggggattgccaccgagggtaacgtcagtatcagcgggattgtgctgaacggcagcacaacagcagatacggggacgggcgtgagtctgggcggtaacctgaccattgcggatgacatttcaggggtgacggcaggagcgactggtaacgggacggcgctggtcgtgaacaatgccagcattcactcagatggttataccgatagcgggagggactttgtcatcaatgcctcagtgtcaggtaacggcacagccattaaaactcagggcagcagtcaactggatgaagttgtactcaacggcaatgccacgggcggcggtacggcggtggagctcggcggtcaggtgtcgggggcgaacatcacgggcacgtcagacagcggcacggcggtacgggtgactgacggggccggcgttgatggttctgcagttaaggggcattcggacagcggtacgggtctgcaggtgagtggcaacgcatccctgaacaactccgacctgagcggtaccacgcagaccggaaccggggccgcggtgacaggcagcctgacggcggatacatcttcgcaggtgaccggctcggccactcaggacggcggtactggcgtcacggtggacggttcggtgaccggtgccacggtgaccggggacgcaaccagcggagacgcggtccgtatcgcggatggttctcagcttaccggcgcagacatcaaagggacttccgtcactggttcaggcattaagacgcaggggaatgtcagcctggaaggcggaactcaactggcaggtggttctcaacagggagccgcactggatgtctccggtacgctgaaccacgacccggattcctcagtgacaacgacgcctgataacaccggaagcgtcattggtaacgagaatatccacgaagtcattcctgttgtgccaccggtcccggatgagggtggcgacaccgataaaccaacagtaccatctgagcctgaccagaaaccggggggcgataccgataaaccaacagtgccatctgagcctgaccacaatcaggaacatgatcacaatcagtcacataatgcgtcacttcgcaaacaggctgaagtaaacagtctccgccagggggcagcaaatgcgcaggtgacgcagatgaaccgggcatctcaggacggtttccatgccgcaggctcgccgtcggtgccggtaagcggttatcagccggcagagcagacggtggatatcagtctgtgtgacggcagtgactgtcagtcggagtcgctggacgccgggacaccgtcgcagggcagggcgaaggcatccggtcgctga

SEQ ID NO: 404173 - DNA, 714 bp, Salmonella enterica
atgagaagagcacaaacagatttatatgattcattccatctctttcagaagaagcaggaaagcacaagattactattggaaaccaatgagatattgaactattttcaaaacaaaaaatataatgtaaatttccagataatcaaccggatgctatggattggtgctttacttccttttgctttagcgtttatttttaacatattaaaaaaccaaaacataatatccccacctgactatagcatgctttttttttgcagctctgccgctataatcatatatttactgacagggatttatataatcttaaataaacagaaacttggacgcatggatgacattattatatcaacatgtaaaaacacacctttatggtccctttctgcattaaagtcagcatcattaatcacatcttcgcttcacaacgcatatgaaaaaaggttgtctacatttaaactaatctgtactgttttcccggttattttagcattagtcacaaatatattttccgaatcattcataaacatatacacatccatttcaaaagacattgtcctttcagttcttacgctttttgtaatttgcggcatcacattgcttcttgttattgcttatatcgaacttattgttcttgtattttatataaaccattgttcttctatgaaggcatcaatcgactttcttatttccatttctgaaagtaactcttttgagtaa

SEQ ID NO: 404174 - DNA, 210 bp, Salmonella enterica
atgattgtggatataagcgatttactgacgcatatagatgaccttttacgttcaggtggaggaggagtttttttaatcattttttctggatttgttttcgcagttatttcaacagcaatcctggcaatatctgttgtcaagtgcatgctcggcgtttatcggttactcaaaagagttactttcagaaatggaaataagaaagtcgattga

SEQ ID NO: 404175 - DNA, 225 bp, Salmonella enterica
atggctaagacacaaatgcagttagcaaaccgggcgtggcgcaccgaaacaaaatctcttgggtggcatcacgggtggaaaacaggtcgtaaggggtggaaagcattctgccggaagaatgcagcaatcacagttgaagagcacctcaaaactgaccctccatttgaggaccaggctgatgccaactggcatgttgctgaagaactcacgtattggacgaactaa

SEQ ID NO: 404176 - DNA, 744 bp, Salmonella enterica
atgacagcaatcgacaaacatgcgctgaatcctgcagaacttgaatctgcgctgcaggaactgaaaagaatcagcgagcaacctgccgttggtacgcactatgcccgtgttttgcgtcagcacatagccaatcttaatggtgaactgggagctgcaaagaatcatatagcagaactggaaagtgaaaacggcaatctgcaagacattgcgcgcaaacagaatgagatagccatcatggcccagttggaacgcaatggtgcaacgatgaagatgaggatactgcataaacgcatagcaacactggtgggacggacatacattccgcagccgctgaatatcgaaaatgagtatcaaaaccacgaatacgtagcgggatggaatgattgccgtaatgctgccagcgttcgccaacagaccccagcggtgtgtgacgtcattgcagagcgctatcggcaaaaatcagtcgaaggctggactcctgagcatgacgacgaacaacgcgacggagtactggcattagcagcatcatgctatgcggagaatttcgcattgttttcaacccggcaggaaggcgtgccggtggactggtctgatgcaccgcaaccggctaactggccgttgtcttcggtgtggtggaaaccatccagcccacgcggggacctggtaaaagctggcgccctaattctggcagaaatcgaacgcggtgatcgcgcgtttgcaactgacacctgcgagggaaaatga

SEQ ID NO: 404177 - DNA, 288 bp, Salmonella enterica
gtgacaacacacaacacagttccaggacactacaacctggaaagcgtctacgacgagaaaatcaacccgctcatgcagcaaataatcgccatatgcaaggaacaccatatgccgatggttgcttcattcgcttatgagaattgtgaggaaaaggggcgctgctgctgtactacaactctgacatttgaagggcgccacatcaaagaatttgcagaggcgacttcggtcattcgtgggaatcctcttttttctgcattcacagtcatgtcaggagtaaaagggcaatga

SEQ ID NO: 404178 - DNA, 189 bp, Salmonella enterica
atgagcaggttaacccgtgaattggttgcaaaagcgatgctcagcagcgttgaaaattatgtgtttgagatcatcgactctgttgagaatgaggttggagtgctgaccgaagaggagcagtgcacactcgatgcctgggtcaataaggccgtgggaaaagcagcagaggaactggagactgcccagtga

SEQ ID NO: 404179 - DNA, 168 bp, Salmonella enterica
atgtctgacaccgacctgacgtcagtgaaccctgtacttacgccgcataaccttcagatattgcagtggatgatccagccagcctcagagggattgctgattttatccagtccggcgccggcaggggccaaagcgccagagggtatttcaggggaatcacatgtctga

SEQ ID NO: 404180 - DNA, 276 bp, Salmonella enterica
atgcgtgaaataaaatggcgaaaaatcgccctgaatgacctgttagggatcgttgattacatcgccagcgacaacccggacgccgcgcaacgtcttcatgatgagattaagcagaaggtttcagcgctggctgaaaacccgctcttgtaccgtaccgggagagtcccggacacgcgagagatgacagtgagaaatcattacgttgtcgtttatggatttgacgaaaaaaaagtttacgttttaagggttcttcacacggcgcagtcatggccgtaa

SEQ ID NO: 404181 - DNA, 288 bp, Salmonella enterica
atggcacagtcttcaatgatgcatatccgcatcgataaccagttaaaaaacgatgcagccgcagcgctggcggctcatggccttactatatcggatgcagtaaggatcaccctgacgcgagttgtcaaagagggagggttacccgccaatctggttacagacaccgagagctatgatgcatggtttaaagcaaaggtttacgaggcgattagcgatactcgttcagtgtcacatgaagaggcgatgaatgaggtgcaaaacctgataaacaggaaacgccatgcgtga

SEQ ID NO: 404182 - DNA, 1182 bp, Salmonella enterica
atggactttgccgacagaataaaaacaattcttgagcgtggtaacgcacaggataaaaataaaaactcagaggggcataatatggttatcgccactaatgacggggttaaaaaaaacgcggggaatgagggcaataatggagttattcattattcagccggagcaggtgagaaaattcaccccggtcaggctatgtgtgaacgcattattgaggaatttagtggtgtatcatatgaaaagctggttttttcggctgatgccgcaatagtcccgcgtgaagttgttttaccttcacccgcacagaccggagaacaggctgcaacatggagcgcggcctttctgtcagaaattaatataattccggtaactgacagcaaaggtagcgttatttatcttggcccaatcgacccgctggcgagaacagggaaccgcgatccgcgaggtgccgtttcgatggagccgcgcttttattactgtcagcaggtaaattttgataccagtatttcttacagcaatctggatcgtttttcggggctggaaaattacccgaaaatagtacgcgcagcggttgataatcgccgcaatctggatctgttactgattgggtttaatggcactcatcacgcagatgtatcaaatccagagagttaccctaatcgcgaagattgtgggatggggtggcttgagaaataccgcacagaagcgcatgagcgcgttatcagcgggctttctgtatcatcgcgggaaacaatgacgacgggaacacatcacagtatagatggtctggtacaggatgtatggggatcggcaatagatgagcgctggcattatgatctcgttgctgtctgtaattattcgttactacaccgtaaacattttccgttaattaatgatctggatacatcgcggatgaatacggaaatactggtcaacgaaaaaataattaaaaatccgatgctgggaaatcttcccgctgttaccgccccatttttcccggaaaatgcgatattaattacctcgcttaaaaatttatcgttgtactggcaaaagggaagtatcagaaaattaatcaaggatgagccgcattatgatcggctggcattctatgaatcatggaatgaagactatattatagaaaattatgaggcgggttgcctgatagatggtattacatggaaataa

SEQ ID NO: 404183 - DNA, 726 bp, Salmonella enterica
atgacccagttactggatataaaggaaatttcagccaggtacaccgccgcccgtgaaaaatttgatgacctctacaggcagtatcacgagcaggaaaaactggtaagtaatatgctcattacccgcgagcaactggaagaagagtccagcagcctgtcagaaaactggcttaatactttgattggtgccgcaggtattcagacagaggaaacgggtaaaatttccgtaatggcggggatggctaaagagaatcttgagcgtattattccggcaattgaagaggccaggttaaagttactcgatctgtgctatgaatccgcaagtgctggcgtggattataaggggaagcacaacgcattatctgaggctgttatcaatccgttacgcgaagatttaataaacgaaatacaggataaagtaacgttattgcacggacttaatttattatcatcactgcccgcatatgaaacggaaagcgttttatcagaagttgtcactaaggttaaaaaaaataacagtaaacccgatgcgctggaatatcttcacaaagcggcagatgacaatgaaacattgaaattataccccggcaatattccgccagaagtcgctacagttattcaccgttcaccttcccccgcacaaatggcggttgcaagaaatgccccgcagaaaaaaaaggcactggcggagggtatagaaaaatgtaaaggttttgagggttactga

SEQ ID NO: 404184 - DNA, 231 bp, Salmonella enterica
atgccagccagaaataaaaaaagtgtattacgctcactgcgcatacctcatgaacttgatgaaaaaatagcggcaattcgtgtgattcagtccggcagttattcggggtgtgtggttgagcttgtacgctctgcgattaaaagccagacggaaaacaacaggagtgccgaagagagaacggcggacagcgtcctgcaatgggcaaaagggaaaggacgccagacgccctaa

SEQ ID NO: 404185 - DNA, 225 bp, Salmonella enterica
atgtttcgctgccctttctgtggatcttcctcccgcataagaacaagcctggcactgaccaaagaaaacacggtcaggcgcaaatattatcaatgcaataaccttgagtgtggcctttgcttttccacgctggaagccttcgaaaaaatgacgtcaaaacacacaccaaaagaaaaccttgcgccggggattcttccgcctcccattagctcaaagctggcatag

SEQ ID NO: 404186 - DNA, 291 bp, Salmonella enterica
atgtctgaatttaataaaacgcaaccagaaaacaaactgtattcttatttgctggatagcgataataaaaaccgtctggataccctggcgaatgctgcaaggttgatttgtttactttgtgataatggtgcggaaagcggcggatttactgacggcctgccagtaaaaggcgtggcggcggtgtttgaaatcattgataaggagatcgactgtataaaaagcagcgtttacgaaactggccgggaattttaccccgatataattgccccccaatccatgcaagggcgctga

SEQ ID NO: 404187 - DNA, 192 bp, Salmonella enterica
atgtataaagtctatgtgacagagctaaacacgctgaccggggaaaagaaatgctacggatacaagcagggatttaaatcactgggtaaagccgtgaaattaacccgtaagctgatggatgaaatagaccgcttgcgccctgtaccggatgaatacgaatatacaatagaggcagggaaagaaaagcgctga

SEQ ID NO: 404188 - DNA, 183 bp, Salmonella enterica
gtgtttaaactcgttatcaccctggtaaaccatgaaacaggcacaacccgtaagcttgaaagcgcacgccgctataagcacgacagcgaagcacgcaaggccgccaataaaatgcggtacgtttgcacaaatgatcgcggggaaataacccacgaatgcaaagtaaaaattgtggaggtgtga

SEQ ID NO: 404189 - DNA, 774 bp, Salmonella enterica
atggaaatcaatgacgattttttagattccggtgctaaattattattgtctgcattttttatatacagagacgcgtcgaggtttactaaaaaagatgttgatgagttctttatatcaacaatgcaaaaatatgatctttcaaggagtgcttggttgtttattataagttcaattcgatatcatttatatagtgagttacggtctgtgctttttgttatatttagtaatcttgattctcaaataaaaaaagaaatgtataaagataaagggcatttaatggaaatcatttcttatgaattcaagaaacaacggttatttataaaaatacctgttttgaataggataagtgaagattatttcaattttattgagcacgatattatactctcatgtgatgaaagatatgatagatataatattattgaaagctatatccttgattacatgaattatgtaaatgatttattgttaacagtgatatacgattttaacaataaaaggaaaagaaaacgaggggcaataaataataatgtggaattaaaagataaggttttcaaaattgctgatttaactgtcaagaagatacccaatctgtctaattatagactggcaaaagcaatacagaggcatttttcaggaaacaaaaagacagtttcatacaacacttatcttgcttgggttaaagaatgccgcaaggaaatgggggcggagtatgagtcagatgatacatacaaaaaatctttctctcttgaggggactgagttttttagctaa

SEQ ID NO: 404190 - DNA, 441 bp, Salmonella enterica
atgacaactaacaaccacccggcgcacggtcctgtatcagtcgctcgcctgtaccaaatacgcgaccacctgcagcatgatacccaatactcaaacggcgggaacagagcttacattctcgctgatatgttgaatgtgattgatgaggtgctagcatcgaggaacgcagagccagtatttttcatcgaggttgacggagacgactggattcaagctggcaggatcccgggcagtacgtttgattttaataatctgccggatggcgtcaataagctctgggcctccccgcagccagcggcagtagtgccggatgaaaagccgatgccagaagcgtcgaaaatgcatgcgatagacgctgtagctgcaatcgctgaagtcaagggatggaacgcctgccgcactgcaatgcttaaagcagcaccaaaacaggagaatatttaa

SEQ ID NO: 404191 - DNA, 1320 bp, Salmonella enterica
atgacgttaaacaaatattgccagtcgctggtggcactacgtagccaaccagcccacgaattgaaagaagttggcgatcagtggcgaacaccggatttgcttttttgggggatcaacgcgctatttggtccattagttctggacttgtttgctgacgacgacaacgcgaagtgcccggcatggtacaccgccgaagataacgcgctgacgcaggactggtctgaacgtctggcagaactgggtggcgctggctatggcaacccaccgtatagccgttcgcagtaccacgagaaacaggcgatcactggtatgacgcacatcatgaaatacgcagcagcccagcgcgagaagggcggtcgctatgtattcctgataaaagccgcgccgagtgaaacgtggtggccggaagatgccgatcacattgtattcattcgcgggcgtattgggttcgatctgcctgtgtggtttgtacctgccgacgaaaaacagaaacccaccagcgcgttttttgccggtgccatagctgtattcgataagtcatggcgtggtgagcggtttagctatatcaaccgtacagaactggaggcaaaaggtcgggcgtttatggctttggcacaatttgccgccagcaagcctcaatctgcaactgccacacctactgcagctgataagccagaagcagagttgccactcacccagaaagatatttttgatgtcagcggtgtagaggcgtgggcatgcgttagagctgcgtttggcgataaagaagaatacacattcagtgaatcgaagtttgggcatacctgggcggcggattctgtcgaagctccagaattcactcaggtatcaccattaacgatcgacaaagcgaagctgcttattcgtgagagtattttgttcggtgtggatgagtggctgttgtcgattgaattcgatgacgctgctgtgcgcatggatatgtcggaacgtattcgcactgttgcccttgaagcatctggtgaatatggcatgaacagcactgatttcattgcagctatgggaagccttgatgtttcctgttggtccaatattcgccagatccgcatgcacatccgtgataatgctaaaccggtagcggatccgcttcccgagtcccgtatctggccgctggaggttggaattgtattcgaccaggtggatggtgctgacatgctggatgagtcacagcaacacaagctgaaagccaacatcaatcaactctggctggaacgaacgtccaccagcgaaatcattactgtagcttctgaacttgttcgcaatatgcggggagaggccgcgtga

SEQ ID NO: 404192 - DNA, 579 bp, Salmonella enterica
atgacgccgctgattgattacttccgtaatgcccgtgaatcactgggtgtcagctcgaaagaaatagctgaggcaaccggaaagaaaaacatggcgtcacactggtttggtgcaagccaatggcaactaccaaatgaagtggactatagaaaattgcaggaactgttcacgcggatcgctatcgataagcacattcagcagaagcttgaacatcctcaccaccagctggtagctacctatcagtcattaaaccgcaagtattcagaatttctggaggaatacaaaaccctccggcgtagcttctctgtttccgctcttgttccgtataccgacgtatggacgcataagcctgttcagttttatccgggcaaacatccatgcgaaaaacctgccgatatgctgaagcagattattagcgccagcagcagaccaggggatatcgttgccgatttctttatgggctctggttcaactgtgaaagctgcaatagaacttggccgtcgggcgatcggggtagaactggaagctgacagatttattcagaccaccgaagaggtggaaaaactgagcaaaacataa

SEQ ID NO: 404193 - DNA, 489 bp, Salmonella enterica
atggaccaggaaattgccgctttaaaactgaacatcaaccagctggcggggatcactggcgtacaccgtcagacggttgctgccaggctgaaaaatattgaaccggcaccaggtagcaacagcaaattaaagctttacctgatcaccgacattctgaccgaactgatgatccctactgtgtcagccaatatcgatgacatgccgccatcggacaggctttcccactggaaagctgagaatgagcgacttaagtttgagcaggacacggggcagctcattcccgccgatgaagttgcgcgagaattctcattgatggcgaaagccgtcgtcatggtacttgaaaccctccctgatgtacttgagcgtgactgtgcattaacgcctgttgcggtttctcgcgtgcagagcgttatcgatgacctgcgcgatcagatggcggagagggtacgggatgctgaagaagaggaggaagagccagaggaggactga

SEQ ID NO: 404194 - DNA, 2103 bp, Salmonella enterica
atggcaaagcgggcatccgccagaggcatccgccgcgatgtttccggtatcttacgtgccccgcgtcgaatgcaggtggccgatgcggtcagtacttatatgcgtgtgccaatgggggcgggtaactccgttccatgggatccggatctggcaccttacgtgattgaaccgatgaactgcctggcatcgcgtgaatatgacgcagtggtgtttgttggtccggcgcgaaccggtaaaaccattggtctgattgatggctggattgtttacaacgttgtctgtgatccggctgatatgctcctgattcagatgactgaggaaaaggcgcgcgagcactccaaaaagcgtcttgatcgtacattccgttgcagccctgaagtgaaatcccgactgagcccgcggcgtaacgataacaacgtatatgatcgcacgtttcgtgccgggaactacctgaaaatcggctggccatcggtcaatattatgtcctcatcggactataaatgcgtggcactgaccgattatgaccgtttcccggaagacattgacggggaaggtgacgccttttcactggcatcaaagcgaaccacaacgttcatgtcatcaggtatgacactggttgagagttcgccgggccgcgatatacgtgacacaaaatggcgccgtagctcaccacatgaagcacctccctcaacggggattctggcgctgtacaaccgtggtgatcgccgtcgcctttactggccgtgcccacattgcggtgaatatttccaacctgaaatggacaacatgacaggttaccgcgatatcgcggaccctgttcaggcgagcgagaaagcgagtcttcaatgccctgcctgtaaagatcacatcacaccggatatgaagcgttcgctgaatatgaaaggcgtgtggctgcgcgatgggcaaaccatcgacagcgatggtgttatcactggagaagggcgccgctcgcgcattgcctccttctggatggaaggacccgccgccgcgtaccagacctgggcgcagctcatctataaatttcttactgccgagcaggactatcaggccaccggcagcgaggaagcactgaagacggtaatcaacacagactttgggcgtccgtaccttccccgatccagcatggatcagcgtaaaagtgaattgcttgagcagcgtgcggaggatgtaccaaagcgctctgttccggacggggtttgttttcttatggcgaccgtcgacgttcaggcggggcgcaaccgacgttttgttgttcagattactggttacggcagcatgggagagcgctggctggtggaccgctacaacatccggcagtcgatgcgccatgacgccaatggtgagagccagcagattgacccggcaagctatccggaagactgggatttattgctgaccgatgcgtttaacaaagcctggccattggcatcggatccgacccggtgtatgcggctgatggcgatggccgttgactccggcggtgaggatggtgtgaccgacaacgcttataaattctggcgtaagtgccgtcgggagggactcggaaaacaggtttatctgttcaaaggcgacagtgtccgccgatcaaaactcatctccagaacctttcctgataataccggacgctcaagccgacgagcacaggcttctggtgatgtcccgctttacctgctccagaccgatgctctgaaagacagggtgaacaacgctttgtggcgtgattcacctggccctggctatgtgcatttccctgactggctcggcagctggttttacgatgaactgacctatgaggagcgttcgaccgatggtaaatggagtaagccgggacgtggtgcaaatgaagcatttgatctgctggtctacgctgatgcgctcgccatcctccacggctacgagaaaatcaaatggcccgctgctcctgagtgggcgaggcgggaaacctggctggagaacgcgccaccggaagctggcgaaacgtcatcccagacaccagaaccagtacccaccaaaaaacggaagcggaaaaatcccgtaaccgatgatgctaacccttggagtagttcaggaggatggttgtga

SEQ ID NO: 404195 - DNA, 222 bp, Salmonella enterica
atggttgtgaaccgtgttgatattgaagccatgatccagcgttataccgaagccgagatggcggtgctggatggcaaaactatccgtttcaatgggcaggaaatgacgatggagaacctgtcggaaatccgtaaagggcggcaggagtgggagcgtcgtctctcttctcttatttctcatcgccgcgggcgacccggttaccgactggcgaggtttgaatga

SEQ ID NO: 404196 - DNA, 1509 bp, Salmonella enterica
atgagccttttagatgatgcgattggtgtcttttcgcctggctggaaagccgcccgtctgcaggcgcgcgcgaaaatcagggcatatgaagccgttaccccgaccagaacgcataaggggcgccgtgaaaaccgttctgcagatcagctcagcaaaatgggggccgtatcattgcgggagcaggcccggtggctcgataacaaccacgatctggtgattggggtgttcgataagcttgaagaacgggtggtggggaaagccggaattattgttgaaccccatcccaaactgatgaacggtaaaatcgccaaaaagctggccgatcagatccgtagtaaatgggcagaatggtctgtcaggccagatgtcacgaaccagtttacccgtccgatgcttgagcgcctgatgttgcgcacctggctgcgggatggcgaagtatttgcccagcttgtcagtggaaccgggaatggtcttacgccagcagccggtatccctttctggcttgaagcgcttgaacccgattttattcccatgaacagcgatgctgccagccagcttaatcagggggtattcgtcgacaactggggtagaccaaggaaatatcaggtttataaaagcctgcccgtttcaggccgtcagcttgataccaaagaagttgatgcggaaaacatgctgcatcttaaatttgtccgccgtctgcaccagacccggggcgtatcgatgctgtccggcgtactgatgcgcctgagcgcactcaaagaatatgaagacgccgagctcaccgccgcacgtattgctgctgcgctgggcatgtacatcaaaaagggggacgggcaaagcttcgaagagagcaacacttcttccgatgatgatgatcgggaagtgatgattcagcctggcatcatttatgacgatcttaagccaggtgaagatatcggcatggtgaaatctgaccggcccaatactaaccttgaaaccttccgtaatgggcaacttcgcgctgtcgcagcaggcagtcgactcagcttttcaagcacagccagaaactacaacggcacctacagcgcgcagcggcaggaactggtggaatcaacagacggctatctcattttgcaggactggtttattggcgcggtgacccggccaatgtaccgcgcctggctgaaaatggcggtggccgccggcgagattaaattaccccgcggtctggatatggagtcgctgtactcggcagtttattccggccctgttatgccgtggatcgatccggttaaagaggccaatgcctggaagttacagatccggggcggagcggcaacagaatccgactgggtccgcgccagcggacgtaacccgaacgatgtgaaggcgcgacggaaggcagaaatcgacgaaaacaaagagatggggctggtgtttgacactgaccctgccaatgacaaaggaggcacaagtgccgaagccaaagagccgggcgcatcaccgtccgaaagccagcgcaaaaagtaa

SEQ ID NO: 404197 - DNA, 2025 bp, Salmonella enterica
gtgccgaagccaaagagccgggcgcatcaccgtccgaaagccagcgcaaaaagtaattcctggttccgtatgcaggccagcgccgacaacgaagcggatatttatatctacgacgagatcggctactggggggtgacggcgcgccagtttgtgaatgacctgaaggcgcttggcgacattacccatatcaaccttcatatcaattcgcccggtggcgatgtctttgatggcatcgccatttttaatgccctgaaacatcacggcgcagcgatcaccgttcacatcgatggtctggctgcttcaatggcttcggttattgcgatggttggcaacccggtcattatgccggaaaacaccatgatgatgatccacaaaccatggggattcgcaggtggcgatgccaacgacatgcgggattatgccgatctgctggataaggtcgagtctgtcctgatcccggcgtacgcggagaaaacaggaaaaacgaccgaggaaatcgccgccatgctggacgatgaaacctggatggatggtaaagaatgcctggcgcatggctttgccgatcaggtaactacatctctgcaggcgatggcctgcattcaatcaaaacgtatcgaggactttgaaaagatgccaaacagcattcgtaacatgatcgccccgccgcgcaatactacccagcgcgaaccgcagcaaccacaaccacaggtgccggcaacgacgaccacagcgccagcgtccacttctgatgaagccactatccgtgcacaggtgcttgccgagcaaaagaaccgtgttaccgcgattaacgatctctttgcgatgttcggcggcaagcatcatgagctgcagaataaatgcatcgcggatccggaatgcaccgttgcacaggctaaagatgaactgctggcggcgctgggcaaaaatgcaaccccgtcgaataaaaccacggatgcgcatatttacgccgggaacggtaactttgttggcgacggagttcgccaggcactgatggcgcgcgcgggcttcgagagcatggagcgtgataacgtctacaacggtatgacgctgcgcgaatatgcccgtatggcgctgaccgagcgcggcatcggcgtttccagctataacccgatgcagatggtcggtatggcactgacgcacagcacgtctgacttcggcaatatcctgctcgacgttgctaataaagcgttgcttcagggctgggaggaagcggcagaaacttttgagcagtggaccaagaaaggccagttgtctgactttaaaacggcgcatcgtgtcggcctgggtggtttctcctccctgcgtcaggtacgcgagggggctgaatataagtatgtgaccaccaaagataaaggtgaaagcatcgcgctggccacctacggtgaaatcttctctattacccgtcaggctatcatcaacgacgatctgaatcagttaaccgatgtacctatgaagatggggcgtgcggcaaaagggacgattggcgatctggtatatgccgttcttaccgaaaacgcgaaattgtctgatggtaagccgctgttccatgctgatcacggcaatatttccgcaggcgcgatttctgtagccagccttgatgaagcgcgcaagatgatgcgccttcagaaagagggagagcgtcccctgaatattcgcccggcattcatgctggtgccagtcgcgctcgaaaccctggcaaaccagacgatcaagtctgccagtgtgaaaggggcggatatcaacgccggtatcatgaacccaattcagaactttgctgaagttatcgcggagccgcgtcttgacgccaaagacaccagcgcctggtatctggccgccgctaagggcacggacaccatcgaagtggcttacctgaacggcgttgatactccgtatatcgaccagcaggaaggcttcacgaccgacggcattgcgaccaaggtgcgcatcgatgctggtgtttcccctctggattatcgtggcctggcgaaatctaccgggaaataa

SEQ ID NO: 404198 - DNA, 327 bp, Salmonella enterica
atggcgaagaattttatacagcatggcaaaactattgagattgccaacacgggcagcggtgcgatcctgagtggttcgccggtgatggtggggaaagtcgtggcgattgccattactgatattccggcaggccagacgggggacggttttgccgaaggggttttcctgcttcctaagctgactaccgatgcgatcaccatcggtgagcaggttcatatcaaagatggcaaagtgcagaacgatgcgacaggagccgatctggccggggtagcctgggaagatgctactgccagttccgcaattgtagccgtgaaaatcaatgcttaa

SEQ ID NO: 404199 - DNA, 243 bp, Salmonella enterica
atggatgcggtcacggtaaacaaaatgggaaagccagcgaccatcaacggggagccaatgattgttattccggctgagtttctggaagaaatggggcctttgagcggaacagggcgatcgctggtggtgtttacctcaggatacagtccgcgtcgtaatgacgtggtgatttttgaaggggaggaattccatcttacccgtcacgaacgctttaacggcaaaccgcgcatctttatcgagtaa

SEQ ID NO: 404200 - DNA, 555 bp, Salmonella enterica
atgtcgattaaggggctggagcaggccattgctaatctgaacagcatcagtaaaagagctgtaccgcgcgcttccgcccagacggtgaaccgtatcgccacgcaggcggtcaatcgcagtgtgtccgctgtcgcgaaatcaacccgcgttccccgaaaactggtcaggcagcgtgcacggatacgtcgggctacggtggagaagccgcgcgctctgattcgcataaaccgcgggaatcttcccgctatcaaactgggaccatccagtatgcgtctgtcacggcgtaaacgtgataagtcaggtacgaacagtgagctgcgtgtggggcgttttcgttttcccggggcctttcttcaacaactggcaaacggtcgctggcatgtcttgcggcgtaccacaaagagtcggtatcccattgaagtggtcagtattcccctttccgttcctctgaccgaaacgttccgggctgaagtgccaaaacttatggacgaacgtatgccgcaaattatgcgacaaaacctgtctaaccaactgaggctgatccttaaacgatga

SEQ ID NO: 404201 - DNA, 399 bp, Salmonella enterica
atgaaaaacagtgatatccgcaaagccgtactaaccgcgctccagcgcaatatctcagatgcagtgacatggttcgatggtcgtcctgggtttctggatgagcaggatcttccggcggttgcggtttacctttctgatgcccgagcctcggatgaaagtgttgatgaagatatgtggacagccgtgctgcatgttgaggtgtttctgaaagccacggctacagacagtgctctggattcctggatggaggaccgcatctatccggcaatgtctgatgttcccgaactggcaaatcttctcgaattgatggcagctcaggggtatgactatcagcgcgatgaagaggccatgacgtggggatctgccgacctcagttattccatcagctacattatgtga

SEQ ID NO: 404202 - DNA, 738 bp, Salmonella enterica
atgactacaccaaacccactggcgccggtaaagggtgccaccaccacgctctggatttattccggatcgggcaacccgttcgctaacccattatcggatgttgactggacgcgcctggcaaagattaaagatctgcagcccggtgaactgactgccgaatcaaacgatgatacctatctggatgacgatgatgccgactggactgctaccgcgcaggggcagaaatcggcgggggaggcgagttttacgctggcctggaaacctgccgagagcgggcagcaggatctggttcgctggtttgatgacggtaccgtgctggcgtacaaaatcaaatacccgaatggcgccatcgatgtattccgtggctgggtaagcagcctgggtaaaacggtgacggcaaaagacaccattacccgttctgtcaaaatcagtaacaacggcaagccaggtcttgctgaagacagcgctgctgcagtgatagacgtaaccggcgtcagcctggataaatcgaccaccaccgttgcagttgctgctaccaccacgctgaatgtcactgtggcgccagccagcgcaagcgatccatctttccgggccaccaccacggatgcaggtaaagccacggtgactgtcgctggtacagtgctgacggtaaccggcatatccgccggaaccgccgacattatcgtgatgaccaacgacgggctttttgtcgcgacctgtaaagtcaccgtttcctga

SEQ ID NO: 404203 - DNA, 408 bp, Salmonella enterica
atgtttttaaaaagtgagccgttcgaacgcaacggcaagaccgtcacgctctacgaactgtcggcgctgcagcgtattgagcatcttgaacacctgaagacactggaaagtatccccgatgccgacatgcaggcggcgatggatatgacgattaaatccggcgcacttctggtggccatgtctttatggcatgaccacgctctgaaagggacgcacaaaacgccgaaagaagacgttgaacagatccagaatgaggtgctgatgacctggccactggagattatttccgctgcagagtacagcgtaaagctgctgtccggcatggtgccgctgcaggaagctaatgatccagaggatgttgctgtgactgagccggtcagtctggaaaagtcctcgccagcgagctga

SEQ ID NO: 404204 - DNA, 279 bp, Salmonella enterica
atgcttgctggtatgtcgtcaacggaatacgccgactggcgaacgttctaccaggacaatttttttaatgatgtgcaactggatgcacatttttcctcgctgatgcatatcgtcattaccgcgcttgaccccaaaaccacatcaacccctgccagcttcagccttctttcaccttcagcggaggatattgccaacgatgaacccggtgacgctgtgctgatggcaaaggccgagggcatttcaggaggtgttcgctatggcccagacggcagtgggtga

SEQ ID NO: 404205 - DNA, 2517 bp, Salmonella enterica
atggcccagacggcagtgggtgacttggtcgttaatcttgatgttaactcgtcaaagttcaacgagcagatggagtacgtaaaaaggcagtttaagcagacgggtgacgcagcgaatgactctgcgctgaaggtgcagcagtcatttacccgccaggagagcgccgcgaagaaggccggtatttctgtaggccagtacaacgcggcgatgcgtatgctgcctgcgcagtttacggatatcgccacccagctggccggtggtcagagtccgtggcttatcctgctgcagcagggcggtcaggtgaaagactccttcggcggtattattccgacctttcgggcgctgctgggcaccatatcgccagtgatggttggggttggcgcgctggctgccgccactggcgcggtggtttacgcctggtatcagggctcgtccacgctgtctgatttcaataaaacgctggttctgtccggtaacactgccgggctgacctcaaaccgcatgctggtgctggcgaaatccggcgaacaggcgggactcacgtttaaccagactagcagtgcgctgacggagctggttaacgccggagtgcgtgccggtgcccggttcgatgatatgagtcaggcggtagcgaaattcaccgatgcgtcaggtgtgccggttgataaggtggcggcggcattcggcaaactgacgaacgatccgacctcaggtcttattgccatggcgcagcagttccacaacgtcacagcggaacagattgcttatgtggcgcagttgcaacgcgccggggatgaagccggggcgctgcaggctgctaatgatgcggcgacgaacggttttcgtgagcagacaaagagcctgcgcgacaatatggggtcgattgagaccgctgccgacagtctgaagcgtgcctttaaatcgatgtgggatgcggcgcttgatatcggacggcctgacaccacgcaggagatggttgccaaagctgaagcggcctttaagcgggcggatgaaatctggaatctgcgtaaaggtgatggttatgtcaatgatgatgcgcgcgccagctactggaacgatcgggagtctgcccgccttgccctggaaatggcgcagcagcaggccagtgtggcaaaggcaactgaggataacgccgcacgcgaggcggtgattgaatctgatcgccagaagtatgccgcgcaagcgcaggctgcatattcaaagaccgaatcagctttggataaatttacggcaaaacagaaagaatataatcaggccatcaaagacggacgtatcctccaggccgattacaacattctgatggcagccgctaagaaggaatacgacgactcactgaagaagcctaaaaagccgtcagcagtgaaaacacctgcaggagtaaaaagtgccgatgctgccagcgcgcagacactggagctcgaggcgcagttacgcactctgcaggagcataagagcatcacggatactatcagccagcagcggcaggaactgtggaaacagcaatcccgcttttcggtgctggaagaggccgccaaaaagcgcgcgctgaccgccgatgaaaaatcggtgctggcgaacaaagacgaggtactggcgcgggccgaagtgaatgcccgactgggcgatcagattgttgcccaggaacggttaaaccgcctgcaggacagctcgcagaagtacgttacccagattggggagaaaacccgagcgcttgtggccgggggcagcatgagcagtcgcggcgcgcagcggcaaaacgaagaggcacagctgcggcagggctggatgaatgcaggcggcgcggattccgatcagggttatcagaacgaactggaagcactgaaaaaatattatgccgcacaggacgagctccgcggcaactggcaggccggggcgaactcagcgtgggctgactatgccgattcagcggctgatgcctatggttcgatgaagtccgcagcttcagccacattcgatggtatcagccagtatatggccgatatgctgacgacagggaaagcaaactgggccgatttcacccgttccacgttgtcgatgctgacgcagatcctgatgaagcaggctatggctggcctggtcagttccgccacgtcagcgctgggttttgctggtggtggttataccggatccggcggtaagtatgagcctgcaggtgtggtgcaccgtggagagtttgtctttacgcaggaggccacaaaccggatcggtgtcggcaatctgtacaaaatgatgcgcggctatgctaccggcggtctggtgggtgggagtggcggcggcattgcttctcctttcggtgtcagcgtttacgcgccggtttccgtcacaacgggccagggtgagtcgggccaacagaaagggagcggtgatgcgctcgggaaagcctaccagcaggttatcgacagctctgtccgggcagggatcgcgaaagccatacaaccgggaggcatgatttggaatgccaacaagcagaggtaa

SEQ ID NO: 404206 - DNA, 348 bp, Salmonella enterica
atggcgattgaacattttagctggcggatcaaggcatccagccagccgactctgaaaagtaaggataccatccgtacggcgcagtttggtgatggctataagcaggtgtcaggtgccgggctgaatgatgaaacactcagttatgagttttcatttaccggcgaaccgcaaaccgtccgggatatttatgctttcctgcggcgccataagacgaaatcattttcgtttaccccacctggcggtgatcttgcgctgtggcgcgttgaggcagacagcctgcagcgcgtcaccaaaagcaaaacagtggaaaccgtatcagccacctttgaacaggcgtttgcaccatga

SEQ ID NO: 404207 - DNA, 756 bp, Salmonella enterica
atgagcttaaacagtgattatcagaaacttgagccgggcaatgttgtccggctttttgatgtcgatggcaccgcattcggtgtttccgacgttctccgcttccacgcccacaatattgcccatactcccgatgaaatttccgctgctggtggggatgaaaataagctaccggcgaaatcgatctggtggcagggacaggaatataaagcctggccctgccagatagagggtattgagacggcgacagatgggacctgcgcacagccaacgctctcggtcgctaacctggatagttccattacggcgctgtgtcttgcttatgatgacttgttgcaggcaaaggtcaccgttcatgacacgctggcgcagtatctggatgagaaaaactatccggagggaaacccttcggcggatccgcagcaggaaaagctgaaggtgttttacattgacgccaagagcactgaaaccaacgaggtggtggcgtttacgttgtccagtccgatggatctgcaggggctgatgatcccgacacgccagctacattcactttgtacctggtgtatccggaacaaataccgctccggtgatggatgcgactatgccggaacgcactatttcgacaagcacaacaacccggttaacgatccgtcactcgatgaatgccccggtacactcactgcgtgcaagttacgacatggcgaggggaacgagttgccgttcggtggtttccctggcacatccctgatcaggagttga

SEQ ID NO: 404208 - DNA, 711 bp, Salmonella enterica
atgcgtcagaaaattatcgacgccattatggagcatgctgctgctgaatatccgcgcgaatgctgcggcgtggtggtgcaaaaaagcagggtgcagcggtacattccctgccgtaatctggcaaccgatccgacagagcatttccacctgtcaccggaagattatgccgctgccgaagactggggaacagtgattgccattgttcacagccacccggacgcaacgacacagccgagcgaactggataaagcgcaatgtgatgcaacgctcttaccctggcacatcatcagctggccagatggggatctgcgtaccatccagccgcgcggtgaactgccgctactggagcgtccgtttgtgctcggccatttcgattgctggggtctcataatgagctacttcaggcagacgcatggtatagaactgacggattaccgcgtggattatccctggtgggaggatagttaccccgaaaatttctaccacgattgctggtatgaatgcggattccgagaattcagtggcgtaccgcagccaggtgatatggttatcatgcaggtccaagctaataagtggaaccatgcagggatcctactggaaggtaacatgttactccaccatctttatggccatttgagccagcgtgtgccttatggtggatactggcaggaacgcacgatgaaggtactacgctataaatctctgtgctaa

SEQ ID NO: 404209 - DNA, 342 bp, Salmonella enterica
atgaaaaaagcattattggccttttctttgttaaccatggctggatgttcgagcatgcaggatctccgaaaagagccagcgtcaaattcttatcagtcgaagaaacaaattgacgcggtggctgaatgcatactcggtggctggcaagaagaaagccaaaaatatggaagcgtttttattcagccttatgacggtggtaaaactgtttttacacaatctcaacttgagatggttgatttaatatcggacggtggaattaccaagatagaatttcgtcatcaaggtggcctgttcgcttatcgaatcaacagccggattaaagtaatagaacgctgtatctaa

SEQ ID NO: 404210 - DNA, 594 bp, Salmonella enterica
atgacaacaattcagctaggcggagtgttaggaaagaccttcggtagaacccatcaacgactgatagcgcgaactggtgaagctgctattgctctaagtaaaacattacccggttttgaaagtttcatgatcagcagtaagcgtcgcgggttaactttcgcagtgtttaaaggaaaaaggaatatcgctgcagatgagatggggtttccctctgaaggtgacgtagtaaggatcatgcctgtaattatcggtagtaaacgcgctggtatttttcagaccatattaggagcggttttgataactacggctgtctttgtttctggcggcgttggcgctgcgttcgctgctggtggcttgactgggtttgctgctgccactggtgcatcgttggtcctcggcggggtaattcagcttctttcaccgcagccatccggcatagccagcaaacaaggtgcagacaaccgggcttcgtatgcgttcggaggagtaaccaatacagcggcgcagggatatcccgtccccctagggtatggtaagcgtcgaattggtggggcgattatttctgctgggatatacgtcgaagatcagcagtaa

SEQ ID NO: 404211 - DNA, 3204 bp, Salmonella enterica
atggctttagcaaccacgattaaaggccgcaagggcggcagttccagttcccgaaccccaaccgaacagccagatgatctgcagtcggtagcgaaggcaaaaatactcgtagcgctgggagaaggtgagttcgcaggacagttgactggcaaggatatttatctggatggtaccgcgcttgagaatgcggatggctcgcagaattttagtggcgtagtgtgggagttccgttcagggacgcaggcgcagaattacattcagggtatccctggtactgaaaatgagattaatgttggctctgaggtttcaagtgcaacagcatggacacgcacctttaccaattcccagctttcagccgttcgtctgcgcctgaaatggccatcgttatttaagcaggaagataacggcgatctggttgggtattccgtcaattatgcgatagatctgcagaccgatggtggtacgtggctgaccgttctgaataccagcgtaaccgggaaaaccacctcaggctacgaacgcagccaccgtattgatttaccacaggctggcagtacctggacaatccggttacgtaagattaccgctgacgcaaacagcgcgaagatcggtgacaaaatgacgctgcagagcttcacggaagtgattgacgccaaattacgttatccgaataccgctctgctttacatcgagttcgactcaagccagttcaatggctctatcccgcagatttcctgcgagccaaaaatgcgcgtgatccgtgtgccggataattatgatcctgaaacgaggacttacagcggtacatggcaaggggcgtttaaatgggcctggaccgataacccggcgtggatattttacgatctggtgattaccgatcgctttggtctgggtaatcgcctgagtgcagccaatatcgataaatggacgttataccaggtatcgcagtattgcgatcagccggtaccggatggaaagggtggaagcgggacagagccacgctatacctgtaacgtctatgttcaggacaggaatgacgcttacactgtgctgcgtgactttgcggctatattccggggtatgacgtactggggcggcgatcagattgttgcgcttgccgatatgccaagagatgtggattacgcttacacccgcgctaacgttatcgatggacgctttacctattccagcagcacttcgaaaacgcgctataccacagcgctggtttcctggtctgatccgggtaacgcctatgcggatgcgatggagccggtgtttgagcagcctctggtggcccggtacggatttaatcagctggaaatgacagccatcggctgcacccggcaatcagaagcgaaccgaaaggggcgctggggtattctcaccaacaacaaggatcgcgttgtttcgtttgatgttggcctggacggaaacattccgcagccgggatacatcatcgccgtgtcagacgagcttctgtccggcaaagttatgggcggccgcatcagtgctgttaacggtcgcgtgattaaacttgaccgcgtagctgatgcagcagcaggcgatcgccttattctcaatcttccctccggtgcgtcacagagcaggactattcaggcggttaacggggaatcagtcacagtcaccacggcatacagtgagacaccacaggccgaagctgtatgggtggttgagtcagatgaactctacgcccagcagtatcgtgttgtcagtgtctccgataacaatgatggtaccttctcgattgccggcgcatggcacgatccggataaatatgcccgtatcgataccggagccatcattgaccagcggccggtgagtgtaatcccaccgggtaaccagtcgccgcctgcgaacatcgtgatcagctcgttttcagtggttcagcagaatatcagcgtcgaaaccatgcgggtgagctgggaccaggcgcagaatgctatcgcgtatgaggcacaatggcgccgcaatgacggtaactgggttaacgtgccgcgcagctccaccacgtcatttgatgtatcgggtatttatgccgggcgctacctcgtgcgtgtgcgcgctattaatgcctctgaaatctcctctggctggggctactccgaagagaaaacgctgacgggcaaggtgggaaatccgccgaaacctgtcggctttgcgacaacgccgatcaactgggggattcgcctgaactggggattcccggctaacaccggggacacgctgaaaacggaaattcagtacaccgcgaacagtgatttctcaaatcctctgctgttgtctgatgtgccttatccttctgccgaatacactcaactgggattaaaagcggggcaggaattctggtaccgcgcgcagctggtagacagaacgggtaatgaatccggctggaccgactgggttcgtggtgaatctaatgcgaatgctgacgactacctgggcgatattgctgatgacttcctgacgtctgccgacggtgaccgcctgacaagcgacattgataccaacctggaagccgcattgcagaatgcgctggccaaccatggaacggtagaacatcagtgggcgcagtacggcgaagtacgcgcggatattctggtggttaaaacgaccatagcgcaggtcgataaggctatggctgaaatgtccacgcaggtgcaggcgcagttcaatgatgtgactgccgcgctggaagataagctcaccgctgtggttgacgcgaccggggcatctgcaatttacacccttaaaaccggggttcgaataaacggtgtgatgtataacgccgggatgtcgatcgcggtgctggcggaagcgggtaagccggtagtcacccgcgtcgggtttaacgccaaccagttcgttctgatgagcggcagcggcaatacgcaatattctccctttgccgttatcaatgggcaggtatttatcagcgatgcgtttattcagaatggcagtattaccaatgccaaaattggtaattttatccagtcgaataactttgttgcgggttcagcaggctggcgcattgataaaaatggaaacgctgaattacatggcaaactttacgctgacagtggccagtttgcctttaacggtgaaaacaacacggttgttataaatggcagtggcgtcacggtaaatctaccgggtggcgggcgcgttgtcgtcgggaggtggtga

SEQ ID NO: 404212 - DNA, 1182 bp, Salmonella enterica
atgtcagcaggaaccttaacccttaacaataactcagcctcggttgccggaactgacaccactttcaccactgagttagcagcaggtgattttattgtggttgtcgtgggtggtgtgccttacacacttcctgtgctggaagttaacagcaatacacgactgacactggtcagtaattacacaggaccgcgagcgacaggagccgcatggtcttccgttccccgcgtggcattaaatatggttactgccgcgttggtagcacaaagtgccgaggcgctacgtggtctgaattatgacaagcaaaactggcagcagtttttcagtgctgacggtgatgtaacgatcacactgcctgacaccagtcagacgacaggtccatcagcgaaaaagttaattagtagtgtggccaataaagcagataaggttaatggcgttgttccgaaagagcagggcggtaccggactttctcaaccatttggcgataaagcgggacaattttgccagggcaatgactcccggctcaattctgttaatggaaaggctgggggaaaaataacatcaacgatatcagtgatcggagaaaataaggcagtaaaagagacagcttctgaacccgataatggtgtgacgcttaacggcgcgtcggttctttccgtgcataatattgccggggttgaccgggctgtagcgagcattgaggcgcgataccagtgggggaaacccgtctccgacgcatatatcaattgcggattgctctctgcgcaaggaggatgggtctcaggatcatcgtatcgatttagtggcagtggagatgcgaccgcccctggctcctgggtcaatggcgcctcagacgtacgcgttaagcttaatgtgaagcccattgaaaaccccaaatcgaccatgcgtaagataacggcggcgacctggaatcttgacattaaggggcaggaaggcagattcggcattggtgttcttgccaacggtctttatgatgattacccggaagcatcaataaatgtaggcgataaagaattgtctgacggcacgattataagtgatgttctttctgtgcaggctggtgattctggggtactggctgcggttcatcatgcaacgatacttgagttgatggatgacgtggatgagcttaaaaaaataattttatctttaaagtcaaaatag

SEQ ID NO: 404213 - DNA, 243 bp, Salmonella enterica
atgatgccacgacgcagcgatattgaaatagcctggtatgcttcgatacagcaggaaccaaatggccggaagaccgtcaccacacagcggtttgtccaagaactgagcaaggttaactggaactggacaatgaagcaggccaacgaatggatcgagtggtatgtgacaaccttccgcgatgtatcaacgcaggaaggcgagaaccgtacctttcagctgttcaatccaaatggaggactgtaa

SEQ ID NO: 404214 - DNA, 534 bp, Salmonella enterica
atggttattaattacaaacagatgcgtaataagcgcgagcagattaaagaggaattacgttcaaagcaggacttaaccccaatgattgcgctggctcaggctatctttgatgcttatgaagcttcgcttgaactaccttctgacacctggactgatgtaaatggcaatcgtcaccgttacgtttcatgcggtacatctgtatcaggacaatttacacaaatgccactttctcaaatcccatcagcgcggccaaaaatacgcggtggcaataatgaggaaaaggttttcacgtttatcattgagacggtcattgatgatacgccaggggaggtagccagcatttttaccggactggctatcagtgaggacagcgataaagatctggttgtcaccgttgaaaaaaataccgtccccctcagtaaaaacggttccccttacaccacggtatgcgaagctattcagtatcacgtattaaacgggattgaagaacttcgccttgatggttcaaaagagatgatccagttatggagttaa

SEQ ID NO: 404215 - DNA, 174 bp, Salmonella enterica
atggttcaccgggtgctgacggtggtcctggtcagaacggaggtaggggcggggatggaggcattggtggaaatggtggaagaggaggacatggaggcaaaggggcaaatggtggtgatggtggtaacggggggattggtggtaatggtggcaacggtggacatggaggaatga

SEQ ID NO: 404216 - DNA, 183 bp, Salmonella enterica
atggaggaaatggcggtcctggaggtaatggaggtcgaggtggagatggcgggaacgcgtcttcaggacataacggaggtaatggtggtaaaggtggaaacggcagtggtacgggtcatggtgggcgaggaggtaatggtggacatggataatccccgcagcaacatcaccgggtggaactga

SEQ ID NO: 404217 - DNA, 396 bp, Salmonella enterica
atgcgtagttttattctcgacctgacgccggaacgctgggaaaaactgaaagccagccccggaaacttcccgataaccgaagcggatctcccgtctcagccggaacccggcgacacgctcattatcagacacctgctacccaacgggaggggaattatcgacctgggcgagtgcgtcattgccagcgcggaacccgtaaccaaccatccccaccgctaccggctgaaagtgaccttcaacatgacaccggaacaggtgaaacagcgctacggttgcccgtttacgccactatctgacatgctacgtaaataccaggaagaaaaagagcgcgtaaagctggaaaaagcacgccggatacttgcttctaaggtaaaggttgctacaaaaattttatag

SEQ ID NO: 404218 - DNA, 924 bp, Salmonella enterica
atgaccgccaccgcctactacaacgaaatagatccctttgccgccgcctggctgcaaaaccttatcaacgctggttgcattgctcccggcgtcgttgacacgcgctcaattgaggaagttaccgccaatgaccttaaaggattcacacagtgccattttttcgccgggatcggcgtctggtcttacgccctgcggtgcgccggatggcctgacagtcgccccgtctggacaggttcctgcccctgtcagccattcagccagtcaggaaaacgccggggattcaatgacccccgccacctgtggcccgcatggttttaccttgtatcgcagtgccgccctgacgtcatctttggtgagcaggttgcaagcaaggacggcctcacatggttcgacgctgtacaatttgacctggaaaaggcggaatacgccgtcgcagttgtcgatctttgcgctgcgggcttcggttcggcgcatatccgacagcgccttttctgggtggccgacgccgcttacaagcaacaccaagaatgcctaccaggacgcgaagaaagtcattgcccgcaatctggccggtcgccagcagaacttacaggatattgcctgcctgacgggctggcccacaccaacaacgacagcagcaaaaggcggctaccagggcgggaggattcgccacgggaagttatcaacggatcggctggatgtggcagcacagatagcaggacctgtccggttaacggctactggcgggatgctgactggctgttctgccgggatggaaagtggaggccagttaaacccggacttaagccgctggttaatgggactcccggacgcgtgggccagttgcgcgcctacggaaacgccatcgttgtgccggtcgcggaagcgttcataagagcatacatggaggcggtcacgccatga

SEQ ID NO: 404219 - DNA, 324 bp, Salmonella enterica
atgcttgaacattgcgtagagacgtttaacactgattattatcagccaaatataggtgagtttattggcaatccaatggtgactgtcgacattaaaaatcagggaaaaatagaacgtctgaaactgaaaggcgacacgttatttgctgatattgaaatgtatatgcccatagtcgatgtaaaaaagttgtgccagtttccggctattgcatacaggaaacacgaaaaccccaaattttgtgcattaatgtatgtaattcttgccaaatcacctaaccgtaaagactgcatcgcccttaaagattgcgaaatgagagagatataa

SEQ ID NO: 404220 - DNA, 279 bp, Salmonella enterica
atggcgaaggtcttgaatatatacgaacaagttgatatcgagcgtttgtcggcgctctacccataccgtgataagcatggaaatccggtactggaagaaagcctggaagattatgcgaagcgcaccaatcagaccgctaatgcagtgaaaagacaggctgacaggctagcgctccccattctccagaatgagaaaaacgcaaagcgccgcgtaaatctttacgcgctttttctgaaaaccattaggcacgcagaaaaatacgtaaaaatgacggaataa

SEQ ID NO: 404221 - DNA, 312 bp, Salmonella enterica
atgtcaatagaaatttcgaataaattaaaagcaattcgggaatctgaggggctaagtcaggctaagtttgcggatttaataggtattgcggttggtacggtcaagcagtacgaaacaggaattaggggggtagggaccgaagttttactcaaagtaacgatgcatccacaactcaaaaaatacacgacttggctgatgagtgatgaaactaacgaagcggccggacagataagtccctctctctcccctaatgggtgcgatgtcacatttcgttcacaaagaccccgcaagactggtacacggcacgactga

SEQ ID NO: 404222 - DNA, 975 bp, Salmonella enterica
atggggatcaaatcaattgcaggaggatacctgctggatatgcgcccggagggacgtaagggcagacgcattcgcaaaaaattcaaaacaaaatctgacgcggttttatatgaacggtgggttctggcgcagcaacacaataacaactggcagggaacgcccgccgatcgccgtccattgtctgcgctaattgatttgtggtggaagtatcatggccagctaatgaaatccgggcgtaactcgcacctgaaactgttacgcacctgtgaggtgatgggtgatccgggtgtgcataaacttgacgccactatgctgactgagctgcggatagcacgggtggagcagggggtaaagcccagcacaattaaccgggagattggcgcactcggcgcaatgttttcagcgctgatttcgtccggccactttctgcacgacaacccggtacacggccttaaaggaatgaaggttgacgagcgggaaatgggctatctcagcaaaaaggagtgcttcatgctgcttgagaagctggccgactccgtcaatgaacggctggcagccgaaattctgctggcaaccggtgcgcggtggggtgaggtggtcgcactggaacagcgccgcgttcaccattgccgcatcacttattcgaataccaagaacagcaaaaaccgtaccgtccccgtttctgaaacgttgtttaaaaaaatcaagaagcggggcggaaaactggtgtttccgtcgctggattactcgttggtacgtgatgccatcaaagagatcgcgcccgccgttcctgatggtcaggccgttcacgcactacgccacacattcgccagccacttcatgatgaacggcggcaacattctgacgctacaaaaaattctgggtcacgcgaagatccagaccacgatgatttatgcccatcttgcgcccgattacttgcaggatgcggtgaagtttaatccgatagctgaataa

SEQ ID NO: 404223 - DNA, 396 bp, Salmonella enterica
atgaaaaaaacgaaagaaaatacactgcatctaggaaaatttggaaaaatagatattgtctgcgattcatctctaaaagatgaggttgagcaatatttttctgttcgcgatgttggatttggaaaaggtaactgttttagtgctgcaagtaagtataaactttctctattttttgatattgcaggaaaaggaatggaggttgcaaaagctattatgggattacttaaccgtaatgacattgaaatcgaaatgcattgttctactgcggacggtttatcacccgtcaaaagtatcaagctgcgtaaggctgatgacgtggaaaaatgtaaagaactgcttgataagtgtgccgcaatttctgttcgtaaaaaggagccagaaaagggcggtgaatga

SEQ ID NO: 404224 - DNA, 327 bp, Salmonella enterica
atgtcatttaaatttactgttcacagtaatagatggaatcatacagatacctacaccatggaaaaaacagcgacaggttggcatatctctcatatagcaataaatggtgatagcaagccgaatggggagccaatcctatatgcaaacttcgaacaagactatattgcatatccaagcaaaactggagattttttagaatggatttggcaagagctggataataataatatgaatgatcaagaggcccaaacaaagatagacgagctggctgattgggttagcgtaacagagaaaaacactccaatgtggcaaggctggaactgttaa

SEQ ID NO: 404225 - DNA, 360 bp, Salmonella enterica
atgaaaagcacaaagactctcgaaatcacgacaaataaaatcttcgcaatcattaaaaacttttatagcaaaaacttcccttatcctactaaattcaatgcaattgatgcaattaacctttcattttccgacggcacatatgatcgatgtgtaaaaggtcggttggaaataaaagagaacaatatccctgtatatgtcggaatgcacaacgaatacactccagtatttaaaaatgaaaatttatgcctcaattttgttcaggatgtagacgcattacattcttggttagtaaaatatgagtttattgtcgatgatgtggcaacagaaaaattcacacaaactaaagaccttcatttctaa

SEQ ID NO: 404226 - DNA, 477 bp, Salmonella enterica
atggcagtcaatatgaaattaaaacctaaaacaccaaaaaaagtaaatgcagcaattaaaaacatcttaaatgaattaggtgttaaggaatcccctgtctatctaccacttacattatcggaaaactcacgagcaggatattgcttcaataattgtgaggactacgttaagtcaaaaaatgctgacgttatttatggatggatgttctgggaagatagaaaaaattcattcacagaagctgaatttcatgctgttatcaaagaggatggtaaattaaaggatataacaccaagagtgaataatgagtctgaaatactcttcgttccagatatggaacgtaatcatggtagaaaaaatgatgactcatggtactcatgggcgaatgtaaaaatgtttgatgatgtcattgcagaaagaacgcacccattagaaatcaaagagttagatgatgattatagtgaaatgattcgtttgtaa

SEQ ID NO: 404227 - DNA, 315 bp, Salmonella enterica
atgaaacaacacaaactgagaaaacaacttaaaaaaattgaacaagagcttggtcttattgaaacagaccccagcgttgtagggtatgcgctatatcacactgaaaagaaggcatttgttgaactcctacattctgaaatggggctaaccgatgcttatactggagatctggaggcagcatatattgcagatagccagttagaagcactcaatacatacagtaaacttgaagatggttggtatataaaaatcgtaccgttaatacaaaatgatctttttggcctgacacctaaaccagactatttaaaggactaa

SEQ ID NO: 404228 - DNA, 486 bp, Salmonella enterica
atgaatgcctgtatgaacaaaacagagagttcactggcgatggcagcagacaaagcatgcgcagaaaggatcaagcaatcgattcttcagaacttcacgtacgatgatattgaaaatgaaaccgggatcagtgtcagtacattgaaacgcctggcatctggtgaccgtgaaccgaaactcatcgagattcgacagattgcaaaagcaacaggtcgtaatcctgtttggctggcatttgggaacgatgctggttatgaaattgaaaccgtgtccgcagatatgcaagttgtggaaccaacagccaagtacgaaattaaagggactacagatagctcagccgaacatgaagtaaaaatcagggtcatcgctgcaataaaagacatgcgttcggaagatgttgtttttattgaaagaatgactgaattactcaatctccagaacacgattcagaacatttctggacgaaaaatgaagccaccaagatga

SEQ ID NO: 404229 - DNA, 1116 bp, Salmonella enterica
atgtttttcgactggctcaccatcgaacaggactttggctaccagcttcctatcctgggtgaagtggcgtatcagcgcgtacagcttgaaacaggggaggccggttcactgaatcagcccgtgtttcaacataaaggatctttttgcgatcaggtttcgatatctattaaaggctcgatcctgagaatgtcgggaaacccatcccgatggaacagactggacaatttgtttggccacacatctgttgatgcctgtgtgcaggtatacaaccgaattctgaatgaacttggcctgccggaattcacaaaatgtacgaaattgtggcagagacaggcaagtgaaactgaaaaggccggaacggttactgatggcgcatgtattcgtgaaattcacattacatccaaccgaactgtcggggcagataatgtagatgactatatatcgggcctttcaacgttacggtatcgcaatagtgaaccgcgattacacagtaacggtaaatcagttgactggctatccaaaaagggaaacgccttactcatttacccgactgtatacaacaaggcgcatgaaattaagcttcattcccttaataaaataaagaacaaattcggggattcatcagctgaagtttcatacatcaaaaagattattgatttctgcctggagcagggtgtagtcagatttgagcaaaaacttaagtcccggtatctgcaacgtaaccatcttattttctgggggctttcagactattcaatactcaatgatttacatgatgattttttagctcttgataaaaagcttatggtgacgtcgatggattttgaaacgattagtgaacatttaatcagtgaaggtattgttgattcaactcgatcagcgaataccactgcgatgtatgctatccagtggatgcatggtcactcatttgatttttctaaaacacaggtgcaaacccatcgagccagacttcgtaaaatagggattgatattgctcagcgctgtaatatatcaaaatttagcccaattattgttaagagagtgagagaagtttcagtaaatgaatgctttattccatcatggtatgtgaaaccccgttttttgcatgttgcataa

SEQ ID NO: 404230 - DNA, 288 bp, Salmonella enterica
atgattaaaattgaaattaaacagtctcaggccattgctgatacccgttccggcgtgtcgaagtccaccgggcaagcgtatacaattaatgagcagtcagcatacatatttcttggtcaggattacccgcaactcttcaagttgaatcttgaggcgagtcaggctccataccctgcgggactttatacgttacatccatccagtatttatgtcggtgatttccaaaaattacgagtaggaagaattgttcttgttccatatcaggaaaataaagaactgactaaataa

SEQ ID NO: 404231 - DNA, 219 bp, Salmonella enterica
atggcttctcagaatataatgaccggcaagatttgtgatggcaatactgagcagaattgccaaacaattacattaaattcttctgagttgccatatcagcagctccctccggcagaagatattgcactggtatggggaactgcttttacctctgtaatcgtcctttatttagtatcacactgtattggactcgttttaaacatgataaagagagcataa

SEQ ID NO: 404232 - DNA, 222 bp, Salmonella enterica
atgaagaagacaattttaaaatcagctgttgttattgctgccgcagcacctttcctggctaatgctgcggagtctggcggagtggattttactgcgttgactaatgcagtgtcattcgacagtgtaatcgtggcaattatgtccgtagccgggattttggttgggctttatgcctcaattgccggggcaaaaacagttctgcgcatgattcgtggggcctga

SEQ ID NO: 404233 - DNA, 1266 bp, Salmonella enterica
atgaaaactcttttaattgcattgttgttatctattgttagcttttattcatacggtgcagagagtgcagctgttattaatcaggctatttcaggtgtcattaaaaacaaagttacacagcgtggtttctcggcgaatgatccgcgatattatggaacattaaaaggcatttcaggttatctaaattctactgcatcaggctcgaaagtttataccgttgcaggtgtctctggtcgttcgtggttatcagttggactcagaggggccttgttaagccgtggtacgtttatagctcttgccgcttccggtgcggtagcatggttaattgaaactgaggactccgtacaaatcaaagtaaaagaaataacgggagagcagggtgttaaagggttttactggaatgttggcgccgaaagctatattacagcaacagagggtgctcagtcgatatgccagcgtaatccgacgttctgtaagacatacattattgaacaatataatgcagacccgacaagatcagatttaagaaccatcaaattttatattgattcatctaaaacacagctttgggcatctcgaactgcaaatcttgtttcctgtggtacaaacaaggttatggctacatgtcagcctgattatgtaccgggaagtaatgaagtaattaaaaccgttagcatacaggatgcgattcatagcatttcagatacggaaatgcagacagatctttcgccagaagttatttctgatgttgtaaataatgcatggcaaaaagcagcctccgaagcagggtattctggttttgtatacgaccacaccagaccagtgacatcgcgtgatgtcgctgctgtaactggtgctgtaaaacccgctgtatctgactttattaaaccgacagacaaaccagattttacactgcctgccgacacaacaggcacaataccaaccaatccatcgacaggagaacaggttaatcttggtgatgatcctggtattggtccgcctgagttggaaaatatacctacaggtactgaaattttatcaccattattatcattcaacccctttaaagattcagctgatgcactgaatgcagaaagtgaaaggattaaatatgcggagtgtccaaagcctgtactggagatttttaacggacaatataaattagaaacacattgtgccttactgaataacaacgctgcgatgattggtgttatttttatgttcatttattcaatagcagcattcaggattatactttctgcataa

SEQ ID NO: 404234 - DNA, 288 bp, Salmonella enterica
atgtttggcatcatgacctctgttttatatggtgttcttgggtttttattgcgatcagttattgtgaagtttacggtgttttttgcattgtattttattgtgcaggaatttgtaccgcttattcttgatatggttaatcgccaactcccacttcttgcattaatttcaagcattccagatagcttgaaatacttcttcaatgtttttaaagttatagatgggattaacataatactttcagcttttgtgactcgttttattattcgtagaattccgataataggataa

SEQ ID NO: 404235 - DNA, 1026 bp, Salmonella enterica
atggctgtatcattgtatatgggtgtgatggggagtggtaaaacatacgaggttgttttcagtgtcattatccctgccgtttcagcaggtcgccgagtaatcaccaatatcaaagggataaatgaagataaaatccatgagtattgtcgttctaaattcaagacaaagcagcccgggcgtgttgttttcgcatcgacggatgaaatattaaaggatgatttcttccctttttactctgacgatgaatcttcagaacaaaaagcagcattttgtgaatatggtgatctgatttgtctggatgagttatggtcaatatggccatcggactcaaaactatccgaggcacataaaagatttatttcaatgcaccgtcatatgactcatgctgttagtgggatatcatgtgatttggtcatcatcaatcagggtgtagatggtgtaccccggtatcttaaagagcgtattgaatcgacataccggatgaccaagctaaaatctctggggctatcaaagtcatatcgtgtcgatgttttttctggtgccaaaacattcaaaaataataaggtcagtactcgtaactatcagtacaaaaaagctgtttttgaattatacaaatcttatgaaaccactaacggaatggaggcgacaacagactcaagacaaaacgttttttcatccgcttttctgtgggtgaaaattgtatttttattatttattgtactggcatctatatattcaataagaacggtctgggtagatattagaggagagtcagtaccagagccgaatcataccgaactggaaattgtacggccttcatcagaaaattttgcgaaacctgatgccccatactcaaagcgctggcgtattgccggggaattgaaatcagattatgtcagcaaggttgttcttattgacggcaatggtcggtttagaacgctaccgacaaaccagttcgatggagaagggttcactttaaatggaatcattgatggtgaaattgtcacctattttacagggggttaa

SEQ ID NO: 404236 - DNA, 1248 bp, Salmonella enterica
atggtgaaattgtcacctattttacagggggttaatatgaaactattttatatcatagttatgctattcatggttccacctgcgttttctaaaggtgtcatgctgaatctttcgggattaacacttaatgatgctatcactttgttttatactgaagttatgagaaaacctttcatggtttctcctgaacttatcacggataaacgacaagttaatttcaatattacgccagatatggatgagtatacgtttattatgcgttatctccagaatgccggagtctctgtagccagaaaaagtggtgtggattacttttatctccaggagaaaaaagtatacgaagccccgaaatattcttttgtttacacaccacagtaccgttctgttgcttatctggctgatattcttcagtcacaagtgagcgggtcattttcaaatggtggacaaatagggcatggcgatgtttctccagcgatgattaaagacaataccgcatccgattttttgagtagaaatggggatgtacttgttttttacggtacgaaaaaagatattcagcgggtcgaagatttgcttcctcttatcgaccgtgccgccgaagaagttattgtcgccgggtacgtgtttgaggttcagacgtctgagcgaaatggttctggcctggcactggctgccaaacttatgtcgggaaaattcacaatagaaacgggtactgcacaaggactcagcaactttgtccatttcagttctggatcgctcgatgcactttatgagttgttcaaaacagacagccgttttcacgtcgtcagttcgccacaattgcgggtcagaaatggctctaaagcatcattttctgtgggatctgacgtgccggtactcggtcaggtcagctatgttgatggtcgtccggttcagtccattgattatcgttcaagtggcgtaatttttaacgttcagccgcaaatccgggctgctacgattgaccttaatattcatcagcaactgtctaattttgcaaaaacagagactggggtgaataacagcccgacgctcatcaaacgggaggtgaacaccgatgtttcgctcaaggatggcgacataattttacttggtggtctggctgagaataaagacagtaatgcagatacgggcctgtcatttttgccgtcgtggttcggaacaacggcaactgaaaaagcaaaaacggacatcattattgtacttcaggccagaaaaatcaggcggtga

SEQ ID NO: 404237 - DNA, 453 bp, Salmonella enterica
gtgagagcagggcggccagccccgcagctccgtgaggagctggccgtactgagacaccgactgttgattgattgtgtaaataatgaacagcgtaatttgcgcatgcgcaaatttctcgtcaatgcttatggggaatctatggctacaaagttgaagtttatccgactgaaaattgaagatgagttaatccagccggttaataatctggcaggcattcgcgatgagttaaaggccgacatagccagtgaaatcgttgagtggtatctgaaccaacgaaaagcaggacatgtacacattcggtacttctccagccctaaaggctcagattatcaagggatctggttccattcggatacgatcaaacgagcgaaacagcaagccgaagacgaccaacaaccgttaagccgactgatttatacggctctggcccgttactttgaacaatcgatctaa

SEQ ID NO: 404238 - DNA, 267 bp, Salmonella enterica
atgcagcaattttatgtgtctcatccgggcgaaattattgccagagagttggctgagatgggcattagtgttaaccgatttatcgaagaaacttgtattcaaccagcttttttagaagggaaaatggcgttaaccactgagcaggccgttctgatcgcagcaataatgggaagtactcctgatttctggttacgtcttcagtatgcatatgatttgcgacagcagaacaataaagcagaaacaggcaaatatgacgatcactgctga

SEQ ID NO: 404239 - DNA, 180 bp, Salmonella enterica
atgacgatcactgctgaaaaaattgaaaaaaggttgaagcaggtcagacgcgaacgggatgcctggaaaaacagcacatcccgtacaggcataaatcgatatagactgatgtgtattcttgagtccttactggaagatcttggaccagaaggcatcgatagccaggatgaaattaagtaa

SEQ ID NO: 404240 - DNA, 327 bp, Salmonella enterica
atgaagaattgcgccgtcagaaagaaacacaggaaattatcaatcatgctgaacaggaaaaacaaaaagccctggctgatgccattactgctaatgatgctgctgacaggttgcgcagaaaaattgccagtatcaggcgtgaactcgcagccagtgagacaagccgcgtttccgcagatgccgccagaaggcagacagccgccgagaccgcaaatttgtttgccgacctgtacgaagagtctgaccgccgcgcgggagaaatcgctaggtatgctgatgcagcagcaagcgccgggagagtctgcgaacggacatatgaagcggtaa

SEQ ID NO: 404241 - DNA, 300 bp, Salmonella enterica
atgtcaaccccgatatttgaaaagataaagctcattcgtgaatcagaaagattaaacaagaagcaattcagtgagttaacaggtattgcctatagcacgttgggtggctacgaatctggagttaaaagccctggagtagaatctattatgaaaatgctacagcacccccgattaaccaaatacaccctgtggtttatgaccgaccaagtcgctcctgaagccggtcagatagcaccggccctcgcacactttgggcaagatgtaacaacatcgcagcactcagaccaaaagattggttaa

SEQ ID NO: 404242 - DNA, 348 bp, Salmonella enterica
atggacacggcaaaaatctttaaactctcagatagtcatatagcattatcaaatgtgtttattcatataaatgataaaagaacaccggccggtaattatttttttcgtcttgatcagttgaatagtatctcagtagtgaataactcaggactaacacctttgttatgtgttgcgggagggtttattgatcctactgttacttatgaacaattcatgagttttctttttcaggtatttgatgaaatatcaaaatctgataacagcattaaaatttatgaattgattgttgatgatgaaaccgtgcgagatgttccaccccgcacaagaaaaattgtaacgccacaatga

SEQ ID NO: 404243 - DNA, 462 bp, Salmonella enterica
atgaaattcaatgtttttttaaaagtaaaccatggcgcacactgggttctctcctccggctcacctatttttgaaagcactttatttgaaacacggccagaggctattaatgtccttgaaaaatttgtaaccggcatggaatcaccaacatttattgacaatgacaatagcgatagctcctccccagcaacagttattttcaaacagattgattcccgctggcattggacattatttttttcattcaatggagtacgatctaaaatcgccgaaagctcagaaaaaggctttgactcattagaacttgccaaacaaaaagccaagattttctgtaattccattgtcgacgctccaattcttgaccagtttgatattgccattcctggcctgggcttcacaaaatcctttgaacgtgcacataacatcggcgacattcacccatctagtaagtgggtaaagtaa

SEQ ID NO: 404244 - DNA, 885 bp, Salmonella enterica; identical to SEQ ID NO: 371823

SEQ ID NO: 404245 - DNA, 159 bp, Salmonella enterica; identical to SEQ ID NO: 371822

SEQ ID NO: 404246 - DNA, 762 bp, Salmonella enterica
atgaaaaaaattcttactctgacgctttcttctttactcattattcccgcactcacccatgcggaatttaaaggcgggttcgccgatatcggcctccattacctcgactggacatcagacaccacggaaaaaaccagtaaaaaatcccataaagatgattttgggtacctggaactggaaggcggagcgaattttagctggggagaaatgtacgggttcttcgactgggaaaatttttacaatggccgccacgctaaaccaggcagcgaacagcgttacacctttaaaaataccaaccgtatttatctgggcgatacaggattaaacctctatctccatgcctacgggacgtacggttcacctcatcgcgcaaatttccatgatgacatgtttctctatggtttaggctataacttcacaggtaacggttactggtttaaacccttctttgccaaacgttataccgatcagacctactacacaggcgataatggttatgtattaggttgggtggccggctatagcttctcgttgggtagtgagaaattcagcgtaacgaactggaatgagtatgagtttgaccgcgatgcgtcctacgctgcgggcaatggcgggaaagatggcattaatggcgcagtagcgctgtggtggaatgcgactcctcacctgaccgcaggagtacaatatcgttacgctgataataagttaggagaatccttcctgcaggatggcattatttattccatcaaatacctgttttaa

SEQ ID NO: 404247 - DNA, 927 bp, Salmonella enterica
atgaactattcactgcgtcaactgcgtatttttattaccgtcgcccaggccaaaagtttcagtcgggcaggggacaggattggactgagccagtctgcggtcagtcatagcgtaaaagagctggagcggcaaaccggcgtcagactgttggatcgcactacgcgtgaggtggtgctgaccgaggcggggcaacaactggcgacgcgtctggagcgggtgcttgatgaactgaacagcatactgcgcgatgcaggcagagtagggacacaattaaccggcaccgtgcgcgttgccgcgagccaaaccatttctgcgcatcttattccgcaatgcattgcccaaagtaattcactttatcccgctattgattttgtattgcacgatcgtccgcagcagtgggtgctggagagcatccgccagggtgaagtggattttggcatcgttatcgatcccggcgcagcggtggatttacagtgtgaagccatcttatcagagccttttttactgttgtgtcgccaggatcatccgctggcgcatcaggaatgggtaagctggcaggatcttaaacaggcctcgctggtcttacaggattatgcttccggcagtcgaccgctgattgatgcggcgctggcccattttgctattgaggcggatatcgtgcaggagattggtcacccggccacgctgtttccaatggtggaagcgggaatcggcatcagcgtgctgcccgcgctggcgttaccgctcccgcagggcagccacttacaggttaaacggctgacgcccgtagttgaaaggcagctcatgctggcgcggcgaaaaaaccgatcgctctccacggcggcgcaggcgttgtgggatgtggtgcgtactcaggccagcgaattaaccgccgcgagggcgaaagatccgctgtatcagctataa

SEQ ID NO: 404248 - DNA, 999 bp, Salmonella enterica
atgaaactttttcgtatccttgaccctttcacgctgacacttatcaccgtggtactactggcctcttttttcccggcggaaggcagctttgtgcctgtcgttgaaggcattacgacagcggccatcgctctgctgttttttatgcatggcgcgaagctttcgcgtgaagcgatcatcgctggcggcagccactggcggttgcatctgtgggtcatgtgtagcacttttgtgctctttcctgtcctcggcgtactgtttgcctggtgggcgcctgtcaatgtcgaccctatgctctacagcggctttctgtatctgtgtattttgcccgccaccgtgcagtcggcgattgcatttacttcactcgcgggcggtaacgtcgcggccgcggtgtgctcagcgtctgcgtccagcctgctgggcattttcctgtcgccgctgctggtcggtctggtaatgaatattcatggcgcgcagggcagtctggaagaggtgggcaaaattatgctgcaactgctgctgccttttgtgctgggacacctgtctcgcccgtggatcggcaattgggtcgcgcgcaacaaaaagtggatcgcgaaaacggatcagacctctattctgctggtggtctactcggcgttcagcgaagcggtggtcaacggcatctggcacaaagtcggctgggggtcgctgctgtttatcgttgtggtcagcctcgtactgctggcgatcgtcatcgccattaacgtctttgtcgcccgtaaatgcggcttcaataaagccgacgaaatcactattgttttctgcggttcgaaaaaaagcctggccaacgggatcccgatggccaatattctgtttccaacgtcagtgctgggtatgatggtattaccgctgatgatcttccaccagatccaactgatggtctgcgcagggctggcacggcgctacaaacgccagaccgagaagttacaggcgcagcaggaaagccgcgccgcgaaagcttaa

SEQ ID NO: 404249 - DNA, 219 bp, Salmonella enterica
atggaaaaagagcagctggttgaaatcgccaacaccgtgatgccgttcggcaaatatcagggacgtcgattgatcgaccttccggaagagtatttgctgtggtttgcccgtaaagatcagtttccggcgggtaaactgggggagttgatgcaaatcacgctgctgattaaaaccgaggggctgacgcaactggtgcagccccttaaacgcccgctttaa

SEQ ID NO: 404250 - DNA, 2016 bp, Salmonella enterica
atggaaccaatcgaacaacaactgacagaactgcgaaccacgcttcgccatcatgaatatctgtatcatgtgatggatgcgccagagattcccgacgccgaatatgaccgcctgatgcgggaactgcgagagctggaggcgcaacgtccggaccttatcacgccggattcgcccacgcagcgcgttggcgcggcgccgctgacggcattcaaccagattcgccatgaagtaccgatgctgtcgctcgataacgtatttgatgaagaaagcttcctggcgtttaacaagcgagtgcaggatcgtctaaaaagcacggaaaatgtcatctggtgctgcgagctaaagctggatggcctggcggtcagcattctgtatgaaaacggcgtgctggtgagcgcagcgacgcgtggcgacggcaccaccggtgaagatatcacttcaaacgtgcgcacgattcgcgccattccgttaaagctgcacggcgataacattccggcgcgtcttgaagttcgcggagaggtatttttaccgcaggccgggttcgaaaagatcaatgaagacgcgcgccgtactggcggcaaagtgtttgctaatccgcgtaacgcggcggcgggctcgttgcgtcagctcgatccgcgtattacggcgaagcgaccgctaacatttttctgctacggcgtcggtattctggaaggcggcgagttgccggatacgcatctgggacgtttgctgcaatttaaagcgtgggggttaccggtcagcgatcgcgtgacgctgtgcgattctccccaggcggtactggatttttatcacaacgtcgaaaaagatcgccccacgctcggttttgatatcgacggcgtggtgattaaggtcaattcgctggctttgcaggaacagctgggctttgtggcccgcgcgccgcgctgggcggtggcgtttaaattccctgctcaggagcagatgacttttgtgcgcgatgttgggtttcaggtcgggcgcactggggcgattacgccggtggcgcgtctggaaccggttcaggtggctggtgtgctggtcagcaatgccacgttgcataatgccgatgaaattgagcgacttggcttgcgcattggcgataaggtggttatccgtcgggcaggcgatgtgatccctcaggtggtcaacgtggttctgtccgaacgccctgaagagacgcgtccgattgtgtttccaacgcactgtccggtgtgcggatcggacgtagagcgcgttgaaggcgaagccgttacccgttgtaccggcgggctgatttgcggcgcgcagcgtaaagagtcgctgaaacattttgtgtcgcgccgggcgatggatgtagacgggatgggcgataagatcatcgaccaactggtggaaagggagtatgtccatacgccagcggatctgttccgtctgacggcgggtaaactgaccggcctggaccgaatggggccaaagtccgcgcaaaatgttgttaacgcgctggaaaaagccaaagcgacgacttttgcgcgttttctctatgcgctgggcatccgtgaagtgggtgaagcgacggcggcggggctggcggcgtacttcggcacgctggaggcgctgcaggctgccaccattgacgagttgcagaaagtacccgacgtggggattgtggtcgctacgcacgtctttaacttttttgccgaagagagcaatcgtgacgtgattgggcagctactggcggaaggggttcactggcccgcgccggtagtcattaatgtgcaagagattgatagcccgtttgccggtaaaaccgtggtactaaccggtagcctgagccagatgtctcgcgatgacgctaaagcgcgtttagtggcgctgggcgcgaaagtggcaggcagcgtatcgaagaaaaccgatctggtgattgccggtgaagcggcgggttcgaaactggccaaagcgcaggaactgggcatcaatgtcattgatgaagcggaaatgatccgcttactgggtgcctga

SEQ ID NO: 404251 - DNA, 987 bp, Salmonella enterica
atgatgcaggatttgcgtctgatattaatcattgttggcgcgatcgccataatcgctttactggtacatggtttctggaccagccgtaaagaacgatcttctatgttccgcgatcgtccactaaaacgcatgaaatcgaaacgcgacgacgactcgtatgacgacgatgtcgaagaagacgaaggcgtgggtgaagttcgtgttcaccgcgtaaatcatgcccccggccagtcgcaggagcatgatgcccctcgtcagtcgccgcaacaccagtaccagccgccttatgcgtctgcgcaaccgcgtccagcggcgccgccgcagccgcaagcgccgatgcaacagccggttcagcaaccggtccaacctgcgccgcagcctcagcaggttcagccatctgcgccgccggtacagccgccgcaacaacagcctgcaccgccgtcgcaagcgccgcagcctgttgcgcagcccgcgccgccgccatcagcgcaaaccttccagcctgcggaacctgtggttgaggcggaaccggtagtggaagaagcgccggttgtggaaaaaccgcagcataaagaggcggtcatcattatgaacgtcgcggcccatcatggcagcgagcttaatggtgaagtgttactgaacagtattcagcagtcaggctttaaatttggcgatatgaatattttccatcgtcatttgagcccggacggcagcggcccggccttgttcagtctcgcgaatatggtcaatccgggaacgttcgatcctgaaatgacggacttcactacgcctggcgtcactatctttatgcaggtaccgtcttacggcgatgcgctgcagaatttcaagctgatgctgcaatccgcgcagcatatcgctgatgaggtcggtggcgtcgtgctggatgaccagcgtcggatgatgacgccgcagaaactgcgcgaatatcaggaccgcatccgcgaggtgatggacgctaacgcctga

SEQ ID NO: 404252 - DNA, 762 bp, Salmonella enterica
atggtttcatcatccacaaccgtaccacgtagcggcgtctattatttctcgcaaggatggaagttagtcaccctaccgggaatccgccgctttgttattttacctctgctagtcaacattgtgctgatgggcggcgcattttggtggctgtttacccagcttgacgcctggataccttcgttgatgagtcatgtgccggactggctgcaatggctgagctatctgctgtggccgattgcagttatctctgttctgctggtctttggctattttttctctaccctcgccaactggatcgccgcgccgtttaacggccttttagccgaacagcttgaggcgcggttaaccggcgccacgccgccagatacaggcatactcggcatcatgaaagatgtaccgcgcattatgaaacgtgaatggcaaaagctggcgtggtatctaccgcgcgctattgtgctgctgattctctattttattcctggcattggccaaaccatcgcgccggtgctgtggtttttgttcagcgcctggatgctggcgatccagtattgcgactacccgtttgataaccacaaagtgccgtttaaaacgatgcgcgccgcgttgcgcacgcagaaggtggcgaatatgcaatttggcgcgctcaccagcctctttacgatgattccggtgcttaacctgttcattatgcctgtcgccgtctgtggcgcgacggcaatgtgggttgattgctggcgtgctaagcacgcgttatggaaataa

SEQ ID NO: 404253 - DNA, 972 bp, Salmonella enterica
atgagtaagatttatgaagataactcgctgactatcggtcatacgccgctggttcgactgaaccgtatcggtaatggacgcattctggcgaaggtggagtcgcgcaacccgagcttcagcgtcaagtgccgtatcggcgccaatatgatttgggatgccgaaaagcgtggcgtactgaaacctggcgtggaactggtggagccgaccagcggcaacaccggtattgcgctggcgtatgtcgccgccgcgcgcggttacaaactcaccctgaccatgccggaaaccatgagcattgaacgccgcaagctactcaaagcattaggcgcgaatctggtgctgaccgaaggggcgaaagggatgaaaggcgctattcagaaagccgaagaaattgtcgccagcgatccgcaaaaatatctcctgctccagcagttcagcaaccctgccaacccggaaatccatgaaaaaaccaccggcccggaaatctgggaagacaccgatggtcaggtggatgtgtttatctccggcgtcggcactggcggtacgttaaccggcgtcacgcgttatatcaaagggacgaagggtaaaaccgatcttatcaccgttgcggtagaacccactgactccccggttattgcccaggcgctggctggtgaagaaatcaaaccaggcccgcataaaattcagggcatcggcgcaggcttcatcccgggcaacctggatctgaaactgattgataaagtggttggcatcaccaatgaagaagccatttctaccgcgcgccgtctgatggaagaggaaggtattctggcaggaatttcttccggtgccgcggttgctgcagcgcttaagctgcaggaagatgaaagctttaccaataagaatattgtggttatcctaccttcatcaggtgagcgttatctgagcaccgcgttgttcgccgatctctttactgagaaagaactgcaacagtga

SEQ ID NO: 404254 - DNA, 258 bp, Salmonella enterica; identical to SEQ ID NO: 371812

SEQ ID NO: 404255 - DNA, 1728 bp, Salmonella enterica
atgatttcaggcattttagcatccccgggtatcgctttcggcaaagcactgctgctgaaagaagacgaaatcgtcattgaccggaaaaaaatttctgccgacaaggttgatcaggaagttgaacgttttctgagcggtcgtgccaaggcatctgcgcaactggaagcgatcaagacaaaagctggtgaaacgttcggtgaagaaaaagaagccatctttgaagggcatattatgctgctcgaagatgaggagctggagcaggaaatcatagccctgattaaagataagcacatgacggctgacgcagccgcacatgaagttatcgaaggtcaggccactgccctggaagaactggatgacgaatacctgaaagagcgtgcggctgacgtacgtgatatcggtaagcgcctgctgcgcaacatcctgggtctggccattatcgatctgagcgcgattcaggaagaagttatcctggttgccgctgacctgacgccgtcagaaactgcacagctgaacctgcagaaagtgctgggcttcatcaccgacgcgggcggacgcacgtctcatacctccatcatggcgcgttctctggaactgccagcgatcgtaggtaccggtagcgtcaccgctcaggtgaaaaacggcgactatctgattctggatgccgtaaacaaccaggtttacgtcaacccgaccaacgatgttattgagcaactgcgcgccgtccaggagcaggttgcgaccgagaaagcggaactggctaaactgaaagatctgccggcaatcacgctggatggacatcaggttgaagtttgcgccaacatcggtaccgttcgtgacgttgaaggcgctgagcgcaacggcgcggaaggcgttggtctgtatcgtactgaattcctgttcatggatcgcgacgcgctgccgacggaagaagagcagtttgccgcctataaagcggtcgctgaagcgtgcggctcgcaggcggttatcgtccgtaccatggacattggcggcgacaaagagctgccgtacatgaacttcccgaaagaagaaaacccgttcctgggctggcgcgccgtgcgtatcgccatggatcgcaaagagatcctgcgtgaccaggttcgcgcgattctgcgtgcctccgctttcggtaaattgcgcattatgttcccgatgatcatctctgttgaagaagttcgcgcgctgcgcaaagagattgaaatctacaaacaggaactgcgtgacgaaggtaaagcatttgacgaaagcattgagattggcgtgatggtggaaacaccggctgcggcgacaattgcgcgtcatttagccaaagaagttgatttctttagtatcggcaccaatgatttaacgcagtacaccctggcagttgaccgtggtaatgatatgatttcacacctttaccagccaatgtcaccgtccgtactgaacttgatcaagcaagttattgatgcttctcatgcagaaggtaaatggactggcatgtgtggtgagcttgcaggcgacgaacgtgctacacttctgttgctggggatgggtctggacgaattctctatgagcgccatttctatcccgcgcattaagaagattatccgtaacacgaacttcgaagatgcgaaggtgttagcagagcaggctcttgctcaaccgacaacggacgagttaatgacgctggttaacaagttcattgaagaaaaaacaatctgctaa

SEQ ID NO: 404256 - DNA, 510 bp, Salmonella enterica; identical to SEQ ID NO: 371810

SEQ ID NO: 404257 - DNA, 240 bp, Salmonella enterica
atgaagagttatcggctggtcgttcgccagcagggacgtatcgtggggcattttgaaacgagcgggctggacgcgctggaagatatttgcgtagcgcgggcgatgtttggcatcactggcggctatcagtgcgagttgcaagtgtccgattccgaacgcaggatgctggaaagtggcccggatgggatgaagatcctgatgcgcgagaagtgctttcgcccggtgacctcgcagttgtaa

SEQ ID NO: 404258 - DNA, 867 bp, Salmonella enterica
atgggacaagagagtgatattcagtcagtgctcttcgacgacaaccatcgggcattacagaccgatatcgtcgccgtccagtcacaggtcgtgtacggcagcgtaggcaacagtatcgctgttccggccattaaagcgcagggactacgcgtgacggcggtcccgacggtgctgttcagcaatacgccgcactataaaacgttttatggcggcattattcccgccgagtggtttgcaggttaccttacggcgttgaatgagcgcgatgcgctacgtgaattaaaagcgattaccaccggttacatgggcagcgcagaccaaattgtcttgctttcgaagtggctaatggcgatccgggcttcgcatccggaggtgtgtattcttgtcgatccggtcattggcgataccgacagtggaatgtatgtgcaggcggaaattccgcaggcttatcgcacgcatttgttgccgcaggcgcaggggctaacgccgaacgtatttgagctggagatgctgagtggtaaaccgtgtcgcacgctggaagaggcggtggcggcggcgcaatctctgctttccgatacgctgaaatgggtggttatcaccagcgcgccgggcgaatctctggagaccataacggttgccgtcgttaccgcgcaggtcgtggaggtctttgcccatccgcgggtggcgacggagttaaaagggacgggagatctcttctgcgccgagctggtcagcggtattgtgcagggaaaaaaactgatgaccgcggcaaaagatgcggcgcagcgcgtgctggaggtgatgacctggacacagcagtgtggctgtgatgagttaattctgccgccggcaggggaggcgcgatga

SEQ ID NO: 404259 - DNA, 1293 bp, Salmonella enterica
atgatcgacggaaaaaccgctaacgaaatttttgacaatatccgtcaacacattatcgccggcacgttacgggcggaggattcgctcccgccggtacgggagctggcaagcgaattaaaggtgaaccgcaataccgtcgcagcggcgtataaacggctgataacggcgggactggcgcaaagtttaggccgcaatgggacggtgattaaaggcagtccgtctcccgtagcgctggaaggcggcgatccgcatacgcctctgcacgacctttccggcggcaatcccgatccgcagcgtctgcctgaccttagccgttattttgcccgtctcagccgcacgccgcatctctacggcgatgcgcccgtttcccctgaactacacgcctgggcggcgcgctggctacgagatgccacccccgtcgcaggcgaaattgatatcaccagcggagctatcgacgccattgaaagactgctttgcgcgcatctgctgccgggcgacagcgtcgcggtggaagatccctgttttttaagcagtatcaatatgctgcgctatgccggttttagcgccagcccggtcagtgtggatagcgaaggaatgcagcctgaaaagctggagcaggcgctaaaccagggcgcgcgggcagtgatcttaacgccgcgcgcgcacaaccctaccggctgtagcctgagcgctcgccgtgccgctgcgctgcaaaatatactggcgcgttaccctcaggtagtagtcattatcgacgatcacttcgccctgctttcttcgtcgccctggcagccggttattgcgcagacaacgcaacactgggcggtgatacgctccgtttccaaagccctcggccccgatttacgtcttgctattgtcgccagcgacagcgcgacctcggcaaaacttcggctgcggctaaatgccggtagtcagtgggtcagccatctgttacaggatctggtctacgcctgcctgaccgaccctgagtatcagcacaggctgacgcaaacgcggctgttttacgccgtccggcaacaaaaactggcccgcgccctacagcaatatggcatcgccatttctcccggcgacggcgtgaatgcctggctcccactggacacccatagccaggctaccgcgtttacgctggcaaaatccggctggctggtacgtgagggagaagcctttggcgtaagcgcgccgtctcacggtctacgtatcacgctgtcgacattaaatgacagcgagatcaacacgctggcggctgatatccatcaggcgctaaatcgctaa

SEQ ID NO: 404260 - DNA, 720 bp, Salmonella enterica
gtgcgagttcattttgttgtccatgagtcgtttgaatccgctggcgcttatctgaaatgggctgaagatcgcggttataccatttcatggtcgcgcgtctatgccggagaagcactaccgcccaatgccgatgagttcgatatgctcgtggtatttggcggtccgcagtcgccgcgcaccacccgcgaagagtacccgtactttgactctcgcgccgaacagcacttaattaatcaggcgattacggcccggcgaatggttatcggcatttgtcttggttcgcagctcattggcgaggcgctgggcgccgcggtgtgccaaagtccggaaaaagagattggtcactaccctattacgctcactgaagccggtctgcggcatccgcttatcgcccactttggctccccgttaaccgtcggccactggcacaacgatatgccaggactcaccgatcaggcgaccgtgctggccgaaagcgaaggctgtccacgtcagatagtgcagtacggcaattttgtctacggcttccagtgtcatatggaatttaccgtcgaggcggttgaaggattaatccaacattcgcagcaggagctggccgacgcgcaagggaagcgttttatccgctcggtcgccgagatgcgcgcatgggattaccagcagatgaatgaaaagctgtggcgttttctggatgaactcacgctggcgcactcacagaaataa

SEQ ID NO: 404261 - DNA, 363 bp, Salmonella enterica
atgaagaaaattgtctgctccgtcgttgcgctcctgctgactctacccgcctgggcgaagctaaacgcccatgaagaagcgcgcattaacgccatgcttaatgcgctggcgcagaaaaaggatctgacattcgttcgtaacggtgatgcgcataactgcgaggaagccgtatcgcacctgcgcttaaaactgggtaacacgcgcaatcgtatcgacaccgccgaacagtttatcgataaagtcgcgtcgtcgtcgtccatcaccggaaagccctatatcgttaaaattcccggtaaaagcgatgaaaacgcgcagccttatttacatgcgcttattgcggaaacggataagaatgttgagtaa

SEQ ID NO: 404262 - DNA, 540 bp, Salmonella enterica
atgccaggcgtgttactgtggttttttaaaggcgttatcgcgcttctgttagcgtttgctgtagggttaaccgtttactattatctggaaattcgtcccatagcccagaccgcattacagagcgcctctttctggttgtccgaatcgccgcagacgcgttttttgcgccgcgctgcggccaaaatacatcccaaatcttatactgccagattgctctatacccaagccggcgtggatgggcatttcaggaccgcgatctgggtgttctggttggacagcctgtaccgcgacgacgagctgtatgccatgatgctggcgcaagcgtattatggccgggattcgcagggtaacgcggtttacggtacgaaaaatgcggcgttaacgttatttcacgtaccagtgacagagatggcctgccagcaacaagtacaactgatttatatgtttaaagcgccgtcactttaccggcctggttcagccaggctggtagaaagcagcaagcattacatgacgctttgccaggaacaaatacaacaataa

SEQ ID NO: 404263 - DNA, 912 bp, Salmonella enterica
gtgaatacattagaacaaaccatcggcaatacgccgctggtcaaattacaacgtctggggccggataacggcagtgaaatctgggtcaagctggaaggcaataatccggcaggatcggtgaaagatcgcgcggcgctatcgatgattgtcgaggcggaaaagcgcggggaaattaaaccgggcgatgtcctgattgaagcgaccagcggcaacactggcattgcgctggcgatgatcgccgcgctgaaaggttatcgcatgaagctgttgatgccagacaacatgagtcaggagcgtcgggcggcaatgcgggcctatggcgcggaactgattctggtcactaaagagcagggaatggaaggggcgcgcgatttagcgctcgctatgtctgaacgaggcgagggcaaactgctcgatcagtttaataatcctgataatccctacgcccactacacgaccaccggcccggaaatctggcggcaaacgtcaggtcgcatcacccattttgtctccagcatgggcacgaccggcaccattaccggcgtgtcgcgttttctgcgcgagcaggaaaaaccggtcaccatcgttggcctacagccggaagagggcagcagtattccgggcattcgacgctggcctgcggaatatatgccgggcatttttaacgcctcgctggtagatgaggtgctggatattcatcagaatgatgccgaaaacaccatgcgtgaactggccgttcgtgaaggcattttctgcggcgtcagctctggcggcgcggtagcgggtgcgttacgcgtcgcacgagccacgcccggcgcgatagtggtggcgatcatctgcgatcgcggcgaccgttacttgtctaccggcgtgtttggtgaagagcatttcagccagggggcagggatttaa

SEQ ID NO: 404264 - DNA, 1098 bp, Salmonella enterica
atgagcattgagatcgccagaattaagaaatcgtttggtcgcactcaggtactgaatgatatctcgctggatattccttccggccagatggttgccttgttggggccgtcaggttccggcaaaacgacgctgctgcgcattattgccgggctggagcatcagtccagcggtcatattcgtttccacggtacggacgttagccgcctgcacgcgcgtgagcgtaaagtcggttttgtgtttcagcactatgcgctgtttcgccatatgacggtgtttgacaacatcgcttttggcctgacggtgctgccgcgacgcgaccgcccaactgcggcggcgattaaaacgaaagtgacgcaattgctggagatggtgcaactggcgcacctcgcggatcgcttccccgcccagctttccggcggacaaaaacagcgcgtggcgctggcgcgcgcgcttgccgtggaaccgcaaattctactgctggatgaaccctttggcgcgctggatgcccaggtacgtaaagagttacgtcgctggttgcgccagttacatgaagaactgaaattcaccagcgtctttgtcacccacgatcaggaagaggcgacggaagtggcggatcgggtggtggtgatgagtcagggcaatatcgaacaggctgatgcgccggatcgagtgtggcgtgaaccggcaacccgcttcgtactggagtttatgggcgaggtgaaccgcctgacaggcaccgtccgcggcgggcagtttcacgttggcgcgcatcgctggccgctgggttatacgcccgcgtaccaggggccggtcgatctgttcctgcgtccgtgggaggtggatattagccgccgcaccagcctggattctccgctaccagtacaggtcattgaggccagcccgaaaggtcactatacacagttagtggtacagccgctggggtggtatcacgatccgctgacggtggtgatggcgggtgaggatgttccggttcgcggcgagcgtttgtttgttggactgcaaaaagcgcgtctgtataacggcgaccagcgtattgaaacgcgtgaagaggaacttgctctggcgcaatcggcctga

SEQ ID NO: 404265 - DNA, 876 bp, Salmonella enterica
atggcggaagtgactcaattgaagcgatacgacgtcccccgcattaactggggaaaatggtttttgattggcgtcgggatgctggtttcggcgtttatcctgctggtgccgatgatttacatcttcgtgcaggcgttcagcaaagggttaatgccggtactgcaaaatctggccgatccggacatgctgcacgccatctggctgacggtgttgattgccttgatcgcagtgccggtgaatctggtgttcggcattctgctggcgtggctggtgacgcgctttaacttccccggacgtcagctactgctgaccctgctggatattccctttgccgtctcgccggtggtggccggtctggtttatctgctgttttatggttccaacggcccgttgggcggctggctggatgagcataatttgcaaatgatgttctcctggccggggatggtactggtcactatttttgtcacctgcccgtttgtggtgcgcgaactggtgccagtgatgctcagccagggcagtcaggaagatgaggcggcgattttactgggcgcatccggctggcaaatgtttcgccgcgtgacgttgccgaatattcgctgggcgctactctacggcgtggtgttaaccaacgcccgcgcgattggcgagtttggcgcggtgtcggtggtgtccggctcgattcgcggcgaaacgttatcgctaccgttacagattgaattactggagcaggactacaacaccgtcggctcctttaccgccgccgcattgttgacgctaatggcgattattaccctgtttttgaagagcatgttgcaatggcgtctggagaatcaggaaaaacgcgcgcaacaggaggaaaatcatgagcattga

SEQ ID NO: 404266 - DNA, 834 bp, Salmonella enterica
atgcttgccgtttcttcccgacgcgtgctgcccggctttacgttaagcctcggcaccagtttgctgtttgtctgcctgatcctgctgttgccgttgagcgcgctggtgatgcagctctcacagatgagctgggcgcaatactgggatgttgtgaccaacccacaggtggtggctgcctataaagtgacgctgctggcggcatttgtggcgtcgatttttaatggcgtgtttggtctgctgatggcgtggattttaacccgctaccgttttccggggcgcacgttgctggatgcgctgatggatctgccgtttgcgctgccgacagcggtggcggggttaacgctggcctcgctgttctcagtgaacggtttctacggtcagtttctagcgcagtttgatatcaaagtgacctatacctggctcggtattgcggtggcgatggcctttaccagcattccatttgtggtacgcaccgtccagccggtactggaagagctggggccggaatatgaagaagcggcacaaacgctgggggccacccggctgcaaagttttcgcaaagtcgtgctgcctgagctgtcgcctgcgctgattgccggcgtggcgctctcttttacccgtagccttggcgagtttggcgcggtgatttttatcgccggaaatatcgcctggaaaacagaagtgacctcgctgatgatttttgtgcgcttgcaggagtttgattacccggccgccagcgccattgcctcggtgatccttgcggcatccttgctgctgctgttctctatcaataccttgcaaagtcgctttggtcgacgtgtggtaggtcattaa

SEQ ID NO: 404267 - DNA, 1017 bp, Salmonella enterica
atggccgttaacttactgaaaaagagactcctgacgctggcagcaatgctgttactggcagggcaggcgcaggcaacggagctgctgaacagctcatacgatgtctcccgcgagctgtttgccgcccttaacccgccgtttgagcaacaatgggcgaaggataacggcggcgataagctgacgattaagcagtctcatgccgggtcatcaaaacaggcgctggcgattttgcagggactgaaggcagacgtcgtgacctacaatcaggtgaccgacgtacagattcttcatgataaaggcaaactgatccctgccgactggcaaagccgtctgccgaacaacagttcgccattctattccacgatgggcttcctggtgcgcaaggggaacccgaaaaatattcacgactggagcgatcttgtacgttccgacgtgaagctgattttccctaacccgaaaacctccggcaacgcccgctatacgtatctggcggcatggggcgcggcggataacgcggacggcggcgataaagccaaaaccgaacagtttatgacccagttcctgaaaaacgtcgaagtgtttgataccggcggtcgcggcgctacgactacctttgccgagcgtggtctgggcgatgtgctgattagttttgaatcggaagtgaacaacatccgcaaacaatatgaagcccagggatttgaagtggtgatcccgaaaacgaacattcttgctgaattcccggtcgcctgggtggataaaaacgtgcaggccaacggcacagaaaaagccgccaaagcttacctgaactggctgtatagcccgcaggcgcagaccatcattacccattactactaccgcgtgaataacccggaaatcatgggcaagcaagcagataaattcccgcagaccgaactgttccgcgtggaagacaagtttggttcctggccggaagtgatgaaaacgcactttgccagcggcggcgagctggacaaactgttggcggcggggcgtaagtaa

SEQ ID NO: 404268 - DNA, 792 bp, Salmonella enterica
atgggtaaactcacgggcaagacagcattgattacgggcgcatcgcagggcattggcgaagggatcgctcgcgtattcgcacgccacggcgcgaacttaatcttgctggatatctccgatgagattgaaaagctggcggatgagctgggcgggcgcgggcatcgctgcactgccgttaaggctgacgtcagagattttgcttcggtgcaggcggcggttgcgcgcgccaaagagactgaaggtagaattgatattttggtgaataacgctggcgtgtgccgtctgggcaacttcctcgatatgagtgaagaagatcgcgatttccacattgatattaatattaaaggtgtctggaacgtcaccaaagccgtcctgccggagatgattaaacgtaaagatggccgcattgtgatgatgtcttccgtcacgggagatatggtggcggacccgggtgaaacggcctatgcgctgtcaaaagccgccattgtcggtttaaccaaatcgctggcggtagagtatgcgcagtccggtattcgcgtgaatgccatttgccctggttatgtaagaacaccgatggcggaaagcattgcccgtcagtctaatcctgacgatccggaatcggtattaacggaaatggcaaaagccattccgctacgccgccttgccgatccgctggaagtaggggaactggcggcatttctggcttccgatgagtccagctatcttaccggaacgcaaaacgtcattgatggcggcagtaccctgcctgaaagcgtaagcgtaggcgtctga

SEQ ID NO: 404269 - DNA, 900 bp, Salmonella enterica
atgtctcaggttcaaagtggcattttgccggaacattgccgtgcggcaatttggattgaagccaatgtgaaaggcgacctggacgccctgcgcgcggccagcagaacatttgccgataaactggcgaccttcgaagtcaaatttccggacgcccatcttggggccgttgtggcgtttggcaacaatacctggcgtgccctgagtggcggcgtcggggcggaagaactgaaagattttattccttatggtaaagggctggcgccggccacgcagtatgacgtgctgatccatatcctttccctgcgccacgatgtgaatttttctgttgcccaggcggcgatggaagccttcggcgactgtatcgacgtgaaagaagaagttcacggcttccgttgggtggaagaacgcgatctgagcggctttgtcgacgggacagagaacccggcaggcgaagagacgcgccgtgaagtggcggtgatcaaagatggcgtggatgccggcggcagttatgtgttcgtgcagcgttgggaacacaatctcaagcaacttaaccggatgagtattcacgatcaggagatgatgatcgggcgtaccaaagaagccaatgaagagattgacggcgatgcgcgtccggcaacgtctcacctgagccgcgtcgatctcaaagaagatggcaaagggctgaagattgtacgccagagcctgccatacggcaccgccagcggtactcatggtctctatttctgcgcttactgcgcacgtctgcacaatatcgaacagcagcttttgagtatgttcggcgataccgacggtaaacgcgacgcgatgctgcgcttcaccaaaccggtgactggcggctactattttgcgccgtcgctggatcgcctgttagcgctataa

SEQ ID NO: 404270 - DNA, 576 bp, Salmonella enterica
atgaaatcgctgcgtttgactttactcgcactgccgctggcgctgaccggctgctcgacgctctcctcggtcaactggtctgccgcaaatccatggaactggtttggttcctcgacagaagtcactgagcaaggcgtgggagcgctgaccgccgccacgccgctggaagagccggctattgcagaggcattagatggcgattatcgcctgcgtagcggtatgaaaaccgataacggcaacgtggtgcgctttttcgaagcgatgaagggcgacaatgtcgcgatggtgatcaacggcgagcagggaaccgtgagccgtattgatgtgctggacagcgatatcccaaccgccgcggggggcaaaatcggtacgccgtttagcgacctttacagcaaagcttttggtcactgcgagccggtttccagcgatagccataccagcgtcgaatgtaaagccgagggaagtcagcatattagctatgttttctccggcgagtggagcggaccggaaggcttaatgcctcctgatgacgtcttaaaaaactgggacgtgcgcaaaattatctggcgtcgttaa

SEQ ID NO: 404271 - DNA, 450 bp, Salmonella enterica
atgaagagtactgagtttcatccagccgattatgatgtacacggacgtttacgcctgccgtttctgttctggtgcgtactgctacttcaggcgcgcgcctgggtactctttgtcattgccggttcatcccgtggacagggtaatactttgttaaactttttttatcccgaccatgacaatttttggctggggctgttgcccggcgttccggcggtagtggcgtttttactcagcgggcggcgtgaagcttttcctggtgtgtggcgctggttgcgcggactcctgatccttgctcaactggtgtcgttgtgctggctgccggtgatgtggctgggtggcgacccggtcaacggcgtcgggctggcgctgctgctggcggacatcgtcgcgctgatctggctgttaaccaatcaacgtttgcgtgcctgtttttcctttgagaaagaataa

SEQ ID NO: 404272 - DNA, 426 bp, Salmonella enterica
atggaaatacgcgtttttcgccaggaagatttcgaagaggtgattaccctctgggagcgttgcgacctgctgcgtccatggaacgatcctgaaatggatattgaacgcaaggtgaatcacgatgtcagcttgttcctcgttgcggaagttagcggcgaagtcgtcggtacggtaatgggcggttatgacgggcatcgcggctcggcgtattacctgggcgttcacccggagttccgcgggcgcggcattgcgaatgcgttgcttaaccggctggaaaaaaaactcatcgctcgcgggtgtccgaaaatccaaattatggtgcgtgatgataacgacgttgtgctgggcatgtatgaacgtctggggtatgagcattctgacgccctaagtttgggtaaacgcctgattgaagatgaagagtactga

SEQ ID NO: 404273 - DNA, 870 bp, Salmonella enterica
atgagcacttttaaactcctaaaaactctcacttcgcgccgccaggtactcaaaacaggtctggcggccctgacgctgtcaggtatgtcgcacgcaatagccaaagaagaaacgctaaaaaccagtaatggtcacagcaaacccaaaaccaaaaaaaccggcagtaaacggctggtgatgctcgaccccggacacggcggcatcgataccggcgcgattggccgcaacggttctcaggaaaaacacgtcgtgctggcaattgccaaaaacgtgcgcgctattttgcgaaatcacggaatcgatgcgcgtttaacccggacaggggatacctttattccgctgtacgatcgggtggaaatcgcccataagcacggcgcggatctgtttatgtccattcatgccgatggttttaccaacccgaaagcagcgggcgcttccgtttttgcgctttccaaccgcggggccagtagcgccatggcgaagtatctctccgagcgtgaaaaccgcgcggacgaagtggcgggtaaaaaagccactgaccgggatcatctattacaacaagttttgtttgatctggtgcaaaccgatacgattaaaaacagtctgacgctgggttcgcatattctcaagaaaatcaaacctatacataaattacacagccgcactaccgaacaagcggctttcgtggtgctaaaatcaccgtcaattccgtcggtgctggtcgaaacctcgtttattaccaatccggaagaagaacgcctgctgggcacgacggcgtttcgccagaaaatcgctacggcgatcgccaacggcatcatcagttattttcactggtttgataatcagaaagcacacacgaagaaacggtaa

SEQ ID NO: 404274 - DNA, 900 bp, Salmonella enterica
atgaaacccgatgcacatcacgtaaaacagtttctgctacgcctgcaggatgatatttgccaaaagttatccgctgtggatggcgcaaactttgtcgaagatagctggcgacgcgaagcgggcggcggcggacgcagccgggtattacgcaacggcgggattttcgaacaggcgggcgttaatttctctcacgttcacggcgatgcaatgcccgcgtccgccaccgcgcatcggccagaactcgccgggcgtagctttgaagcgatgggcgtatcgctggtggtgcatccgcacaatccgtatattcccaccagccatgctaacgtgcgcttttttattgccgaaaaaccgggcgccgatccggtgtggtggtttggcggcgggttcgatttaacgccctactacggctttgaagaggatgccgttcactggcaccgcaccgcccgcgacctgtgtcagccgtttggcgacgatgtgtatccgcgctataaaaagtggtgcgacgactactttttcctcaagcatcgtaacgagcagcgcggtatcggcggcctgttttttgacgatttgaatacgccggatttcgactactgcttcgcctttatgcaggcggtcggcaacggctacaccgaggcgtatttaccgattgtcgaacgacgcaaagcgatggtctggggagagcgggagcgtaattttcaactttatcgccgcgggcgctacgtggagttcaatctggtgtgggacagaggcaccctgtttggtctgcaaaccggcgggcgcactgaatctatcctgatgtcgatgccgccgctggtgcgctgggagtacgactggcagccagaagcgggtagcccggaagcggcgctgagcgagtttattcaggtacgcgactggatttaa

SEQ ID NO: 404275 - DNA, 672 bp, Salmonella enterica
atgaacgcccgcctcatctctgcgccctcattatcccctgaagagcaaaaaaacaggttagctgaattttttcgcgaatactggggaacgcaacaaataaacgattaccatacagatacaacgttccacgtgaaccataaaaaacagtattgcgatctacgatggtcagaaaaatatattgatgtcgattattggtgtagccgcgaaatacaccataaagagtggtctaagttcctgatcgcaataaccaccgcactgcataccccaataccaccttattaccttgattttaatcttaaagggcaccgaacaactctacgaaaaagacatcgccgcacagagagtaaaattggatgttttatctatccttataaagaagatccggatgggggatgggattatagtgttgactgtctgatgatttacgagtccgattttgagatactggccgctggaattaataagctatacccacgaaatcatgaggatgagtcctttgattacacaagctggaatgaatttacacttgctgaatgcgagaaaataatctcgcactggctgataattgcgcgcagcaacggagagtacgcttcctttattcaatatgttatagaatggatacaaccgcttctgcatcaatatgatagcatcatgattgaagggaatttatga

SEQ ID NO: 404276 - DNA, 1053 bp, Salmonella enterica
atgaaaaagacccgtacagcgaatttgcaccatctttatcatgaagcgttacccgaagacgttaaacttacgcccagagtcgaggtggacaatgttcatcagcgacggacgacggatgtctatgaacatgctctgactatcaccgcctggcagcagatctacgatcagttacacccgggtaaatttcatggcgagttcacggaaatcctgcttgatgagattcaggtgttccgtgaatacaccggcctggcgctgcgtcagtcgtgtctggtttggccaaactctttctggtttggtattccggcgacgcgcggcgaacagggatttatcggcgcgcaggggctcggcagcgccgagattgccacccgaccgggaggcaccgagtttgaactgagtacgccggatgattacaccattctgggcgtcgttatctcggaagatgttatttcccgtcaggccacgtttttgcataacccggaaagggtgctgcatatgctacgtaaccagttagcgctggaggtaaaagagcagcataaagcggcgctgtggggctttgtgcagcaggcgctggccaccttcagcgagagtcctgaaaccctgcatcaacctgcggtgcgtaaggtcttgagtgataatttgttgctggcgatgggcacgatgctggaagaggcgaagccgattcatagcgccgaaagcatcagccatcagggatatcgtaggctactgtcgcgggcgcgggaatatgtgctggaaaatatgtcggagccgctgacggtgctcgacttatgtaaccagctacacgtaagccgtcgcacgctgcaaaatgcgtttcacgccattttgggcattggccccaatgcgtggctgaaacgtattcgcttaaacgcagtacgccgggaactgattagcccgtggtcgcagagcgccacggtcaaagatgccgcgatgcagtggggattctggcatctggggcaatttgccaccgattatcagcaattatttgccgaaaaaccgtcgttgacgctgcatcaacggatgcggcaatgggcttga

SEQ ID NO: 404277 - DNA, 495 bp, Salmonella enterica
atgatcaatgccctgggattactggaagtggacggaatggtcgccgccgtcgatgcggcggatgccatgctgaaagcggccaacgtgcgtttgctcagtcatcaagtgctcgaccctggcaggctcactctggtggtggagggcgatctggcggcgtgtcgtgcggcgttggatgccggaagcgccgccgcgcagcgcacaggccgtgtgattagtcgcaaagaaattggtcgtccggaagaggacacccagtggctgattggcgggtttgcgcgtgcgacaacgccgactgagaaagcgccccaggtacccgcaacgcctgagttcgctgaggcgttattggcgctgctggcatcagtacgccagggaatgacggcgggagaggttgccgcgcattttggctggccgctggagcaggccagaaacgtgctggaacaactcttttctgacggagcgttgcgtaaacgcagtagtcgctatcgcatcaaaaattaa

SEQ ID NO: 404278 - DNA, 660 bp, Salmonella enterica
atgcctgcattagatttgattcgaccttcagtgactgccatgcgcgtgattgcctccgtgaatgacggctttgcgcgggaacttaaattaccgccacatatacgtagtctcggactcatcacggcagattctgatgatgtgacctatattgccgctgacgaagcgacaaaacaggcgatggtggaagtagtctatggccgctccctctatgccggggcggctcacgggccgtcgcctaccgccggtgaggtgttgattatgctgggcggaccgaacccggcggaagtgcgcgccggtctggatgcaatggtcgccagcattgaaaacggcgcggcgttccagtgggcgaacgatgcggaaaataccgcgttcctggcgcatgtggtttcgcgtaccggctcgtacctctcgtctaccgcaggtattgcgctgggcgatccaatggcctacctggtggcgccgccgctggaagcgacattcggcattgacgcggcgatgaaatccgctgacgttcaactggtgacttacgtgccgccgccgtcggaaaccaactattcggccgcgttcttaacgggaagccaggccgcgtgtaaagccgcctgcaacgcctttaccgacgccgtgctggatatcgcccgtaaccctgtccagcgtgcgtaa

SEQ ID NO: 404279 - DNA, 897 bp, Salmonella enterica
atggatcaaaaacagattgaagaaattgtacgtagcgtgatggcgtcaatgggacaggacgtaccgcagcccgccgcgccgtcaacgcaggaaggcgcaaagccgcagtgcgccgcgccgacggtgaccgaaagctgcgcgctggatttaggttccgcggaggcaaaagcctggattggcgtcgagaacccacatcgtgcggacgtgctgaccgaactgcgtcgcagtactgcggcacgcgtctgcacgggtcgtgccgggccgcgtccacgtacccaggcgctgttgcgtttcctggcggatcactcccgttcgaaagacaccgtgctcaaagaagtgccggaagagtgggtaaaagcgcaagggctgctggaagtgcgttcggagatcagcgacaaaaacctgtacctgacgcgcccggatatggggcgtcgtctgagcccggaagccattgacgcgctgaagtcgcagtgcgtgatgaacccggatgtgcaggtagtagtctccgatggcctctctacggatgcgatcaccgccaactatgaagagatcctgccgccgctgcttgccggtctgaagcaggccgggctgaacgtcggcacgccgttctttgtgcgctatggccgcgtgaagattgaagatcagattggcgaaattctcggcgcgaaggtcgtcatcctgctggtgggcgaacgtccggggctggggcagtcggaaagcctctcctgctacgccgtctattccccgcgcgtggcgaccaccgtcgaggccgacagaacctgtatttcaaacattcatcagggggggacgccgccagtagaagccgccgccgtgattgtggatttggccaaacggatgctggagcagaaagcgtccggcatcaacatgacccgttaa

SEQ ID NO: 404280 - DNA, 1362 bp, Salmonella enterica
atgaaactaaagaccacattgttcggcaatgtttatcagtttaaggatgtaaaagaggtactggctaaagccaacgaactgcgttcgggggatgtgctggccggggttgccgcggcaagttcgcaggagcgcgtagcggcaaaacaggtactgtcggaaatgacggtggcggatatccgcaacaatccggtgattgcctatgaagaggactgcgtgacgcgcctgattcaggacgacgtcaacgaaacggcctataaccggattaaaaactggagcatcagcgaactgcgtgaatacgtgctgagcgatgaaacctccgtggacgacatcgcgtttacccgcaaaggcctgacctccgaagtggtggcggcagtagcgaaaatctgctccaacgctgacctgatctacggcggcaagaaaatgccggtgatcaaaaaagccaataccaccatcggtattccgggcacctttagctgccgtttgcagccgaacgatacccgtgacgatgtacagagtatcgccgcgcaaatctacgaagggctttctttcggcgcaggcgatgcggtgatcggcgttaacccggtgaccgatgacgtggagaacctgacccgcgtgctcgacaccgtttacggcgttatcgataaattcaatattccgacccagggctgcgtgctggcgcacgtcaccacccagatcgaagcgattcgtcgcggcgcgccgggcggactgattttccagagcatttgcggcagcgagaagggcttaaaagagttcggcgtcgagctggccatgctcgacgaagcgcgggctgtgggggcggagttcaaccgcatcgccggggaaaactgcctgtactttgaaaccgggcaagggtctgcgctctccgcaggcgcgaactttggtgccgaccaggtgacgatggaagcgcgtaactacgggctggcgcgccactacgatccgttcctggtgaacaccgtggtgggctttatcgggccggagtatctctacaacgacaggcagattatccgcgccggtctcgaagatcactttatgggcaagctgagcggcatctcgatgggctgcgactgctgctataccaaccatgccgacgccgaccagaaccttaacgaaaacctgatgattctgctcgccactgccggctgtaactacatcatggggatgccgctcggcgacgacatcatgctcaactaccagaccaccgctttccacgataccgccaccgtccgtcagttgctgaatttacggccgtcgccggagtttgaacgctggctggaaacgatgggcattatggcaaacggtcgtctgaccaaacgggcgggcgatccgtcactgttcttctga

SEQ ID NO: 404281 - DNA, 1404 bp, Salmonella enterica
gtgaacactcgccagctactgagcgtcggtatcgatatcggcaccaccaccacgcaggtgatcttctcgcgcctggagttggttaaccgtgcggcggtgtcgcaggtgccgcgctacgaattcatcaaacgcgacattagctggcaaagcccggtcttctttacgcctgtggataagcagggcggtctgaaagaggccgaacttaaagcgctgattctggcccagtatcaggccgcaggcatcgcgcctgaatcggtggactcaggggctatcattatcaccggcgaaagcgccaaaacccgcaacgcccgtccggcggtcatggcgctctcgcagtcgctgggcgactttgtggtcgccagcgccgggccgcatctggaatcagtcattgccggtcacggcgccggagcgcaaagcttgtctgagcagcggatgtgccgggtgctgaatattgatatcggcggcggcacgtctaactacgcgctgtttgacgcgggaaaagtcagcggcaccgcctgccttaacgtcggtggtcgcctgctggaaaccgatgctcaggggcgcgtggtttatgcccatcagccggggcagatgattatcgatgaggtgttcggttcgggtactgatgctcgcgccttagctgccgcacagttgggacaggtggcgcggcggatggcggatctcatcgtcgaggttatcactggcgcgctctcgccgctggcgcaatcgctgatgcaaaccgggctgctgcccgccgatattacgccggaggtgatcaccctttccggtggggtaggtgaatgctaccgcaaccaacctgccgatccgttctgcttttctgatatcgggccgctgctggcgaccgcgctgcatgagcacccgcgtctgcgcgagatgaacgtgcagtttccggcgcaaaccgtgcgcgccacggtgattggcgcgggggcccatacgctctcgctttccggcagtactatctggctggaagacgtccaactgccgctgcgcaacctgccggtggcgatcccgcaggatgacgccgatctggtgaacgcctggcggcaggcgcttctccagcttgatctcgacccgcaaaccgacgcttacgtgctggcgcttcccgccacgctcccggtgcgttacgccgcattactcacggtcatcaacgcgctgacggcttttgtcgcgcgttatcccaatccacatcccctgctggtggtggccgagcaggattttggtaaagcgctgggcatgttattgcgcccacagttaccgcaacttccgctggcggtcatcgatgaggtggtcgtgcgggcgggagactatatcgacattggtacgcctctttttggcggatcggttgtgccggtgacggtgaaatcactcgcatttccttcctga

SEQ ID NO: 404282 - DNA, 1227 bp, Salmonella enterica
atgggaattaacgaaatcatcatgtacatcatgatgttctttatgctgattgccgccgtggacagaatcctgtcgcagttcggcgggtcggcgcgcttcctcggtaaattcggtaagagtattgaggggtctggcggccagtttgaagagggctttatggcgatgggcgcgctggggctggcgatggtcggtatgaccgcgctggcgccggtgctggcgcatgtactggggccggttattatcccggtatacgaaatgctgggcgcgaacccatccatgttcgcgggtacgctgctggcctgtgatatgggcggattcttcctcgccaaagagctggccggcggtgatgtcgcggcgtggctatactcagggttaatacttgggtcgatgatgggaccgaccattgtgttctccattccggtggcgctcggcattatcgaaccgtctgaccgccgctacctggcgcttggcgtactggcgggtatcgtcaccattcccattggctgcattgcggggggactgatcgccatgtactcaggtgtgcagatcaatggtcagccagtggagtttaccttcgcgctgatcctgatgaacatgatcccggtattgatcgtcgcggtgctggtagcgctggggctgaagttcatcccggaaaaaatgatcaacggtttccagattttcgccaaatttctggtagcgctgatcaccatcggtctggcagctgcggtggttaaattcctgttgggttgggagttgattccgggactcgacccgatctttatggcgccaggcgacaaacccggcgaagtgatgcgcgccattgaagtgatcggctctatctcctgcgtgctgcttggcgcgtatccgatggtgctgttactgacccgctggtttgaaaaaccgttgatgaatgtcggtaaactgctgaacgtcaataatattgcggcggcaggcatggtggcgaccctggcgaacaatatccccatgttcggcatgatgaagcagatggatacccgcggcaaagtgattaactgcgcatttgccgtctctgcggcgttcgcgctgggcgaccatttaggcttcgccgctgccaacatgaacgccatgatcttcccgatgattgtcggcaagctgatcggcggcgtgacggcgattggcgtggcgatgatgctggtgccgaaagatgacgccgcccaggtgaaaaccgaagcggaggcgcaatcgtga

SEQ ID NO: 404283 - DNA, 1188 bp, Salmonella enterica
atgcaagctgaactacagacggcgctgtttcaggcattcgacaccctgaatctgcaacgggtgaaaacgttcagcgtaccgccggtcacgctgtgcggacttggggcgctcggcgcctgcggccaggaagcgcaagcgcgaggcgtaagccatctgtttgtgatggtcgacagcttcctgcatcaggcgggaatgaccgcgccgctggcacgcagcctggcgatgaaaggcgtggcgatgacagtctggccgtgtccgccaggcgagccgtgcatcaccgatgtttgcgcggcggtggcgcaactgcgtgaggcggcgtgcgacggcgtagtggcctttggcggcggttcggtgctggacgcggcgaaagcggtcgccctgctggtgactaaccctgaccagacgctgagcgccatgaccgagcgcagtacattacgcccgcgtctgccgctgattgcggtgccgaccaccgccggaaccggttctgaaaccaccaacgtgacggtgattatcgacgcggtcagcgggcgcaagcaggtgctggcgcacgcgtcactaatgccggacgtagcgattcttgatgctgccgtgaccgaaggcgttccgccaaacgtgacggcgatgaccggtatcgatgcgttgactcatgcgattgaggcctacagcgcgctcaacgccacgccgtttaccgacagcctggcgattggcgcgatagcgatgattggcaaatcgctgccgaaagccgtgggttacggccacgatctggcggcgcgtgaaaatatgttgctggcctcctgtatggcgggaatggccttttccagcgctggtctggggctgtgtcatgcgatggcgcaccagccaggggcggcgctgcatattccgcacggccaggccaacgccatgctgctgccgacggtaatgggctttaaccggatggtttgccgcgagcgcttcagtcaaatcggtcgggcgttaaccaataagaaatcggacgatcgcgatgcaattgcggcggtgagcgagctgattgccgaagtggggcagagcaaacggctggctgatgctggcgccaaacccgaacactacagcgcgtgggcgcaagccgcgctggaggatatttgtctgcgcagtaacccacgcaccgccacacaggcacagattatcgacctgtacgcggctgccgggtaa

SEQ ID NO: 404284 - DNA, 840 bp, Salmonella enterica; identical to SEQ ID NO: 371782

SEQ ID NO: 404285 - DNA, 1404 bp, Salmonella enterica
atgaatcaacaggatattgaacaggtggtgaaagcggtgctgctgaaaatgaaagacagcagccagccggccagtactgttcatgagatgggcgtttttgcctccctggatgacgcagtggcggcagcaaaacgggcccagcaggggctgaagagcgtggcgatgcgccagcttgccattcataccattcgcgaagcgggcgaaaaacacgcccgagaattagcggaacttgccgtcagcgaaaccggcatgggacgcgttgacgataaatttgccaaaaacgtggcgcaggcgcgcggcacgccgggcgtcgagtgtttatctccgcaggtgctgaccggcgataacggcctgacgctgattgaaaatgcgccgtggggcgtggtggcctcggtcacgccgtccaccaatccggcggcgacggtgattaataacgccatcagcctgattgccgcaggcaacagcgtcgtgtttgccccgcatccggcggcgaaaaaggtctctcagcgggcaatcactctcctcaatcaggcggtggtcgccgccggtggcccggaaaatttgctggtcaccgtggcgaacccggatatcgaaaccgcccagcggttgttcaaatatcccggtattggcctgctggtggtgactggcggcgaagcggtggtggacgcggcgcgcaaacatactaataaacgcctgattgccgccggtgccggcaatcccccggtggtggtggatgagaccgccgacctgccgcgcgccgcacaatccatcgtcaaaggcgcatcgtttgataacaacatcatctgcgccgacgaaaaagtgctgattgtggtggatagtgtcgccgacgagctgatgcgtctgatggaaggtcagcacgcggtgaaactgaccgccgctcaggccgaacagctccagccggtgctgctgaagaatatcgatgaacgcggcaaaggtaccgtcagccgtgactgggtcggtcgtgacgcgggcaagattgccgcagccatcggcctgaacgtcccggatcaaacgcgcctgctgtttgtggaaacgccagctaaccatccgtttgccgtcactgaaatgatgatgccggtactgccggtggtgcgggtcgccaacgtcgaagaagccatcgccctggcggttcagcttgaaggcggttgccaccatacggcggcgatgcactcgcgcaatatcgacaacatgaaccagatggcgaacgccatcgacaccagcattttcgtcaaaaacgggccgtgcattgccgggcttggattgggcggagaaggctggaccaccatgactatcactacgccaaccggcgaaggcgtgaccagcgcacgtacctttgtgcggctgcgtcgatgcgtgctggtggatgcgtttcgcattgtataa

SEQ ID NO: 404286 - DNA, 288 bp, Salmonella enterica; identical to SEQ ID NO: 371780

SEQ ID NO: 404287 - DNA, 291 bp, Salmonella enterica; identical to SEQ ID NO: 371779

SEQ ID NO: 404288 - DNA, 1017 bp, Salmonella enterica
atgatcattgaacgcgcccgcgaactggcggtacgcgcccccgccagagtcgtctttcccgatgcgctggacgaacgcgtgctgaaagcggcgcattacctgcaacagtacggtctggctcgccccgttctggtcgccagtccgtttgcgctgcgtcagtttgccctgagtcatcgtatggcgatggatggcattcaggtcatcgacccacacagcaacctgagtatgcgccagcgttttgcgcaacgctggcttgcccgtgccggagaaaaaacgccgccggacgcagtggaaaagcttagcgacccgctgatgttcgctgccgccatggtgagcgccggtgaggctgatgtgtgtatcgcaggcaacctgtcgtcaacggcgaatgtgctgcgcgcagggctgcgggtgattggcctgcaacccgggtgcaaaacattgtcgtctattttcctgatgctgccgcagtatgccggcccggcattagggttcgccgattgcagcgtagtgccgcagccgacggcggcgcagctggcggatatcgctatcgccagcgccgacacctggcgggccattaccggcgaagagccgcgcgtggcgatgctgtcattttcaagcaacggcagcgcccgtcaccccaatgtcgccaacgtgcagcaggcgacagagctcgttcgcgaacgtgcgccgcaactgcttgtggacggtgaattgcagtttgacgccgctttcgtcccggaggtcgccgcgcaaaaagcgcctgacagcccgctgcaaggccgcgccaacgtgatgattttcccgtcgctggaggcgggcaatattggctacaaaatcgctcagcgtctgggaggctatcgcgctgttgggccgctaattcaggggcttgccgcgccgcttcacgacctctcccgaggctgtagcgtgcaggaaattatcgaactggcgttggtggcagccgtgccgcgccaggctgacgtgagccgcgaacgcagcttacacacactggttgaatga

SEQ ID NO: 404289 - DNA, 804 bp, Salmonella enterica
atgaacgatttcatcaccgaaacgtggctcagagcgaatcatacgctcagcgaaggatcggaaatccatctgcccgctgatgcacgactgacgcccgcggcccgggaactgctggaaagccgccgcctgcgcattaagtttctggatccgcaaggccggctgtttgtcgatgatgacgaacagcagccgcagccggtacatggcttaaccagtagcgatacgcatccacaggcctgctgtgaactgtgccgccagccggtggtgaaaaagcccgatacgctgacccatctgacggcggacaaaatggtcgccaaaagcgacccgcgcctcggctttcgcgccgcgctcgacagcgccatcgcgctaaccgtgtggctacaaatcgaactggcggaaccctggcagccgtggcttttcgatatccgctcgcggctgggcaacattatgcgcgccgacgctatagatgaaccgctggcggcgcagtctatcgtcgggctcaacgaggatgagctgcatcggctttcccaccagccgctgcgctatctcgaccacgatcacctggtgccggaggccagccacggtcgcgatgcggcgctgcttaatctcctgcgaaccaaagtccgtgaaacggaaaccctcgccgcacaagtgtttattacccgtagttttgaggtcttgcgcccggacattttacaggcgctgaaccgtctctccagcacggtttacgtgatgatgattttgagcgtggcgaaacatccgctgacggtcgcccaaattcaacaacggttgggagagaagccatga

SEQ ID NO: 404290 - DNA, 690 bp, Salmonella enterica
gtgaaaaaacttatcacagctaacgatattcgtgcggcccacgcccgcggcgaacaggcgatgtcggtagtgctgcgcgccagcattattaccccggaggctcgcgaagtggcggaactactgggcttcacgattaccgaatgcgacgagcccgtcccggcatccacatcggcgcaggcgtgtaaaagcgaaagccagcgcattcgggaagccatcatcgcgcagctcccggaagggcagtttactgaaagcctggtggcgcagttgatggaaaaagtgctgaaggaaaagcagtcgctggaactggggacgatgcagccgagctttacctccgtcacgggtaaaggcggcgtgaaagtcattgacggcagcagcgtgaaatttggccgcttcgacggtgccgaaccgcactgcgtcggcttaaccgatctggttacagagcaggatggcagcagcatggccgccgggtttatgcagtgggacaacgcctttttcccgtggacgctgaactacgacgaaatcgacatggtgctggagggcgaactgcatgtacgccatgaaggcgaaaccatgattgccaaagccggagatgtcatgttcatccctaaaggctccagcattgaatttggcacgccaacgtccgtgcgctttctgtacgtcgcctggcctgcgaactggcaatccgtatga

SEQ ID NO: 404291 - DNA, 480 bp, Salmonella enterica
atgaaacgtattgcttttgtcggcgcggtcggtgccggaaaaacaacgctttttaacgcgttacggggaaattattccctcgccagaaaaacgcaggccgtggaatttaatgatcatggcgatatcgatacgccgggtgaatattttagccatccccgttggtatcacgccttaattaccacgttgcaggatgtggacacgctgatttatgtccacgcggcaaacgataaagaaagtcgcttacctgccgggttattggatgttggaacccgtaaacgacatatcgccgttatcagcaaaacggacatgccggatgccgacgtcgccgctacgcggcagttgctttgcgagactggattccgggagccgattttcgagctcaacggccacgacccgcaaagcgtgcggcagttggtggattatctggcggctctcagtgaacaggaggaagaggcaggtgaaaaaacttatcacagctaa

SEQ ID NO: 404292 - DNA, 336 bp, Salmonella enterica
atgaataaagaacgcattattcaggaatttgtgccgggcaaacaggtcacgctggcgcatctcattgcgcaccctggtgaagaactggcgaaaaagatcggcgttcccgatgctggcgcgattggcattatgactttaacgccgggggaaacggcgatgatcgctggcgatttagcgatgaaggctgcggatgtacacatcggttttctcgatagatttagcggcgcgctggtgatttatggcaccgtcggcgcagtagaagaagcgctattacagacggtcagcgggctggggcgattattaaactttaccctgtgtgagttaacaaaaagttaa

SEQ ID NO: 404293 - DNA, 2280 bp, Salmonella enterica
atggatgagcagttaaaacaaagcgcccttgatttccacgaatttccggtacccggtaaaattcaggtttctccgactaagccccttgccacccaacgcgatctggcgttggcttactcgccaggcgtggcggcgccctgcctggaaatcgaaaaagatccgctggcagcctacaaatacaccgcgcgtggcaaccttgtcgcggtcatttccaacggtacagcggtgctggggttaggcaacattggcgcgctggccggcaagccggtcatggaaggcaaaggcgttctgtttaaaaaattcgccggcatcgatgtgtttgacattgaagtcgatgagcttgatccggacaaatttatcaatgtggtcgcagcgctggagccgacctttggcggcattaacctcgaagacattaaagcgccagaatgtttctatattgagcagaaactgcgcgagcgcatgaacatcccggttttccatgacgatcagcacggaacggcgatcattagtactgccgccattcttaatggcctgcgagtcgtagagaaaaatatttccgacgtgcggatggtcgtctccggcgcaggggcggcggcaatcgcttgtatgaacctgctggtcgcgttggggatgcaaaagcacaacatcgtggtgtgcgactctaagggcgttatttacaaaggccgtgagccgaatatggcggagaccaaagcggcctatgcggtagacgacagcggcaagcgcacgctggatgaagtcattgacggcgcggatattttcctcggctgttcaggcccgaaagtgctgactcaggagatggtgaagaaaatggcccgcgcgccaatgattctggcgctggctaacccggaaccggaaattctgccgccgctggcgaaagaagtgcgcccggacgccattatctgtaccggtcgttccgactatccgaaccaggtgaacaacgtattgtgcttcccgtttatcttccgcggcgcactggacgtcggcgcgacggcgatcaacgaagagatgaaactggcggcggtccgtgcgattgccgagctggcgcacgccgaacagagcgaagtggtggcctcggcctatggcgatcaggacctgagctttgggccggaatacattattccgaaaccgtttgacccgcgtctgattgtcaaaatcgctccggcggtcgcgaaagcggcaatggattccggcgtggcgacgcgcccgattgctgactttgatgcctatatcgataaactgaccgagtttgtctacaaaaccaacttgttcatgaagccgatcttctcgcaggcacgcaaagatccgaagcgcgtagtgctgccggaaggggaagaggcgcgcgtgctgcacgcaacccaggagttgatcaccctggggctggcgaaacccatcctgatcggacgtccgagcgtgatcgaaatgcgtatccagaaactggggctacagatcaaagcgggcgttgatttcgagatcgtgaataatgaatccgatccgcgcttcaaagagtactggagcgagtattaccagatcatgaagcgtcgcggggtaactcaggaacaggcgcagcgtgcgatgatcggcaaccatacggccattggcgcgatcatggtgcagcgtggggaagcggatgcgatgatctgcggcaccattggcgactaccatgagcatttcagcgtcgtgaaagccgtctttggctaccgtgacggcgtgcatacggcaggggcgatgaacgccttactgctgccaagcggcaacacttttatcgccgatacttatgttaacgaagatcccacgccggaacagttggcggagatcgccgtaatggcggcggaaaccgttcgccgctttggtattgagccgaaagtcgcgctgttgtcgcactctaactttggttcctcaaattcgctgtccgccagcaaaatgcgcgaaacccttgagcgggtacgcgaacgagcgcccgatctgatgattgacggtgagatgcacggtgatgcggcgttggtggaaagtattcgtaatgaccggatgccggatagcccgctgaagggagccgccaatattctggtgatgccgaatatggaagccgctcgcattagttacaacttactccgcgtctccagttccgaaggcgtcacggtcggcccagtcctgatgggcgtgtctaaaccggtacatgtattaacgccgatcgcctctgtacgccgtatcgtgaatatggtggcgttagcggtagttgaagcgcaaaccacgccgctttaa

SEQ ID NO: 404294 - DNA, 951 bp, Salmonella enterica
atgaaccagctagacggcatcaaacaattcactaccgtcgtcgccgacagcggcgacattgagtccatccgccactaccagccgcaggatgccacgacaaatccctctttactgttaaaagccgccgggcttgagcagtatggtcatttgattgaggatgcgattgcctgggggaaaaaacacggcggtacgcaggaacagcaggttgcggcagccagcgataaactggcggtcaattttggcgcggaaatactgaaaagtattcccggtcgcgtctccactgaagtcgacgcgcggttatcattcgataaagaaaaaagtatcgagaaagcgcgccatctggtggatctctaccagcagcagggtattgataaatcgcgcattctgatcaagctcgccgcaacctgggaaggtatccgcgccgccgggcagctcgaaaaagaaggcattaattgcaacctgacgttgttgttctcttttgcccaggcgcgcgcctgcgccgaagcgggcgtctatttgatctctccgttcgtgggccgaatttacgactggtatcaggcgcgtagtccgctggagccgtatgtcgtggaggaagatcccggcgtgaaatcggtacgcaatatctacgattactttaaacagcatcgctatgaaaccatcgtgatgggcgcaagtttccgccgtactgagcaaatcctcgcgctaaccggctgcgatcgactgactatctcccctaacctgcttaaagagctgaaagaaaaagaagaaccggtgatccgtaaactggtgccttcctcacagatgttccaccgtcctacgccaatgacggaagcggagttccgctgggaacataatcaggacgcgatggccgtagagaagctgtcggaaggtatccgtctttttgccgttgaccagcgcaaactggaagacctgcttgccgccaaactataa

SEQ ID NO: 404295 - DNA, 2001 bp, Salmonella enterica
atgtcccgtaaagaccttgccaatgcgattcgtgcgctgagcatggatgccgttcaaaaagccaattccgggcaccccggcgcgccgatggggatggcggatatcgctgaagtgctatggaacgattttcttaaacataaccccaccgatccgacctggtatgaccgtgatcgttttatcctttccaacggtcacgcctccatgctgctctatagtctgctgcatttaaccggttatgacctgccgctggaggagttaaaaaacttccgtcaactgcactctaaaacgcctggtcacccggagattggctatacgcccggcgttgaaaccaccaccgggccgctgggccaggggctggcgaatgccgtcgggctggcgattgctgagcgtacgttaggcgcacagttcaaccggccggaccatgagattgtcgaccactatacctatgtctttatgggcgacggctgtctgatggaggggatctcgcatgaggtgtgttcgctggctggtacgctgggactgggcaaactgatcggcttttatgatcacaacggcatctccattgatggcgaaaccgaaggctggtttaccgacgataccgccaaacgttttgaagcctaccactggcatgtcgtgcatgacattgacgggcacgatccggaggcggtgaaaaaagccattctcgaagctcagagcgtaaaagataaaccttcgctaattatctgtcggacggtgataggttttggctcgccgaataaagccgggaaggaggagtcgcacggcgcggcgctgggcgaagaagaggtggcgctgacccgccagaagctgggatggcaccatccggcgttcgagatcccaaaagaaatttaccgcgcgtgggatggccgtgaaaaaggcgagaaagcgcagcagcagtggcaggaaaagtttgcagcttatgagaaggcttatcctgagctggccgcggagtttacccgccggatgagcggcggactgccggaggcatgggaatccgccacgcaaaaatttattaacgacttgcaggctaatccggccaaaatcgccacccgtaaagcatcgcaaaatacgctcaatgcctacggtcccctgttgccggaactgttgggcggatcggcggatctggcgccgagcaacctgactatctggaaaggttcgacctcgttgaaagaggatccggcaggtaattacatccactatggcgtgcgcgaattcggcatgaccgccattgccaacggcatcgcccaccacggcggctttgtaccgtataccgccacgtttctgatgtttgtcgaatatgcgcgtaacgcggcgcgtatggcggccttaatgaaagcccggcagattatggtctatacccacgactccatcggtttgggcgaagatggcccgacgcaccaggccgtggaacaactggcgagcctgcgcttaacgccaaacttcagcacctggcgtccctgcgatcaggttgaggcggcggtcggctggaagctggccattgaacgtcaccacgggccgacggcgttgattctctcgcggcagaatctggcgcaggtggaacgcacgccggaacaggtgaaagcgattgcccgcggcggttatattctgaaagatagcggcggcaagccggatatcattctgatcgctaccggatcggaaatggaaattaccctacaggcggcggaaaaattgactggcgaggggcataacgttcgcgtggtgtcgttgccttcaacggatattttcgatgcgcaggacgaggcatatcgcgaatcagtgctaccggcacacgtaaccgcccgcgtcgcggtggaggccggtatagccgactactggtataaatatgttggcctaaaaggcgcaattatcggcatgacgggatacggtgaatccgctccggctgacaaactgttcccgtattttggctttaccgtggaaaatattgtagaaaaagcccgccgggtgctaaacatcaaaggctaa

SEQ ID NO: 404296 - DNA, 231 bp, Salmonella enterica
atgaaaataaataatggccccgtattatgcccccattgtggctgcctgagcgcttattatgaaatagatcggctggcggcgataagagaaaaagtgaataaagaaggcggatcagcggcgtgggattcaacattgcaggcgcataaaaaaaaggccttttgcctgatgtgccataaatccattgatgaggtcgtcatcgggcagtcagatgcgcctgagtctacgaagtaa

SEQ ID NO: 404297 - DNA, 1044 bp, Salmonella enterica
atgcgctaccgcgttattcttttttgtctgtttggcctgttgccggtccagctactgtgggctgcgccagcgcaacggactttttccgactggcaggtcacctgcaataaccaaaatttttgcgtagcgcgcaatactggcgaacatcatgggctggtgatgacattaagccgcagcgccggggcgcgtaccgatgcggtactgcgtatcgatcgtggcggtttggcgccgcccgacgctaaagaagccgcaattgcgcctcgcttattgctggatggcaaaccgctttcgttcaacagtccacactggcgcgtgtcgccctggcatctcatgaccggcgatcctgccaccatcaccacatttttacagacgattcaggatgcgcaggccatcaccttaaaaaacggcgttcagacgctttcgctggcgggattaaaagcggcattactgtttatcgacgcgcaacaaaaacgtgtgggcagcgaaaccgcctggattgaaaaaggaaacgaaccgccgctcagcgtgcccccggcaccggcattaaaggggatcgccgtgattaatccaacgcccgtaccgctgagtgaggaagaacgcgacgatctgctggactacgcagcatggcgggtaaacggcattcgttgttcgcttgacccgctgcgtcgcgagacgcaggtcagcgcgttgacggatgataaagcgttattgattgttaactgcgaagccggcgcctataacactattgatctcgcctgggtagtttcacgcaaaaaaacgctcgtctcgcgcgccgtacgtttgcggctgccgtttaatcgcggcgtcgaaagtaatgacatggagttgatgaacgccttctttgacgagaaaacgcgcgagctggtgacgttggcgaaagggcgggggttaaccgactgcggtatccagacgcgctggcgttatgatggcgatcgttttcgtctggtgcgttatgccgaagaaccgagctgcgatagctggcacgggccggatgcctggcctacgctgtggatcacgcgttga

SEQ ID NO: 404298 - DNA, 576 bp, Salmonella enterica
atgtcgcaaaccattacgcttattaaggataaaattctttctgataattattttactctgcgcaacattacctatgacctgacccgtcgtaatggcgaggttatccgtcacaagcgtgaggtttacgatcgcggaaatggcgcaaccattctgctttacaactcaactaaaaaaaccgtgcttctggttcgtcagtttcgcgtggcgacatgggtcaacggtaatcaagacggtatgttaattgaaacctgcgctggcctgcttgataacgacgagccggaggtctgtatccgtaaagaggccattgaagagacagggtatgacgttggcgaggtacgcaagatatttgagctgtatatgtcgccaggcggcgtcacggagctgattcatttcttcattgccgaatatcatgatagcgagcgcgccagcatcggcggcggcgtggaggatgaagagattgaggtgcttgaactgccgttttcccgggcgctggaaatggtgcgctcaggcgagattcgggacggtaagaccgtgttattgcttaactatttacagacgtctcatctaatggactga

SEQ ID NO: 404299 - DNA, 1299 bp, Salmonella enterica
atgaaatttactctcgttgcgacggttctactgacgttttccctttcagcttttgccgttgagtatcctgtattgaccaccgcgagccctgatcaggtggggtttgatagccaaaaacttcaccgacttgatggctggattcaaaatcaaattgatgccggatatcccagcatcaatcttctggtgataaaagataatcatattgttctacaaaaagcctggggctatgccaaaaaatatgacggttccacgctgttagcccatcccattcgggcgaccactaacacgatgtatgatctggcttcaaacacaaaaatgtatgccactaacttcgcattgcaaaaactagtgtatgaaggaaaaatagatgtcaatgatttggtatcaaaatatatccccggctttaaggatatgcctggggataaaataaaaggcaaaaataaactccgcattattgatattcttcatcacgtcgcgggctttcctgccgacccacaatatcctaataaaaacgtcgccggtaaattattctcacagagtaaaagcactactctggagatgattaaaaagacaccgctggaatatcaacctgggtcgaagcatatctacagcgacgtggattatatgattcttggttttatcattgaatcgataacggcaatgccattagatcgctacgtcgaaaccaccatttataaaccgctcggattaaaacataccgtctttaacccgatgatgaaaggcttcacgccgccgcaaatcgccgcaacggaactacatggcaacacgcgtgacggcgtgattcatttccccaatattcgcaccaatacactatggggccaggtgcatgatgaaaaagcctggtactcaatgggcggcgtttcaggacacgccggactgttttctgacacccatgatatggctgtgttaatgcaagtcatgctcaatgggggcggctacggtaacgtgaagctattcgacgacaaaacggttgcgcagtttactcgccgctcgccagaagacgctacctttggtctggggtggcgcgttaacggcaacgcctcaatgacccccacgttcggggtattagccagtccgcaaacgtatggacataccggatggaccggaacgctgacgtctatcgatccggttaatcatatggcgattgtgattttaggtaacaggccgcactcgccggtagcaaatcctaaagtgaatccgaatgtttttgtcagtggattattacctgcggcgacgtatggctggattgttgaccagatatatggttccttaaaataa

SEQ ID NO: 404300 - DNA, 1962 bp, Salmonella enterica
atgaatcgttttattatggccaatagccagcagtgtctgggatgccatgcctgcgaggtcgcctgcgtaatggctcacaatgatgagcgacatgttctgacgccacagcgctatcagccccgaattactgtcatcaaacatcagcgccagcgcagcgcggtcacatgtcaccattgcgaagatgcgccctgcgcccgtagctgtccgaacggcgcgatcgcgcatattaacgacagcgtgcaggtcaatgcgcagaagtgcatcggctgtaaatcctgcgtcgtcgcctgcccattcggcaccatgcagatggtattgacgcccgtcgcgccaaaccagttcaaagccagcgcgcataaatgcgatctgtgtcagggacgtgaacaggggccggcctgtgtggaaaattgcccggcggatgcgctgcaactggtcaccgaagactcgttgacccgtctggctaaaacgcgacggctgcgtaccgcccggcaggagattcgcccctggcataccgtggatacacaacacagtgggacagcaagcagcaaagtcgagcgtatgcaggcgacgccgccgcgcggcgaaccggataaactggcgattgaagcgcgtaaaaccacctttgaggaaatttatctgccgtttcgcgccgcgcaggccgagcgtgaagcgtcccgctgcctcacatgcggggaacacagtatctgcgaatggacctgtccgctgcataaccatattccccagtggatcgaactggtgaaagccggcgatattgatgcggcggtagagctttctcaccagaccaactgcctgccggaaattaccgggcgcgtttgtccgcaggaccggctatgtgaaggcgcgtgtacactccgcgatgagtatggcgcggttaccatcggcaacattgagcgctatatctccgatcgcgctctgagcaaaggctggcgtcccgacctgtcggacgtacagaagagcgataagcgcgtggcgattatcggcgcggggccggcaggtcttgcctgcgctgacgtgctggcgcgccatggcgtaagcgccaccgtctacgatcgccatccggaaatcggcggtttgctcacctttggtattccggctttcaaactggataaatctctgctggcgcgccgtcgggagatcttcagcgcgatggggattcgtttcgagcttaactgcgaagtagggaaagatatttctctggagacgctgctggagagttatgacgccgtctttgtcggggtaggaacctatcgttccatgaaggctgatttaccgaatgaagacgcgccgggggtatatgatgcgttgccattcctcatcgccaataccaaacaggtgatggggcttccggcgttgcctgacgagccgtttattgatactgcgggccttaacgtggttgtgctgggcggcggtgacaccgcaatggactgcgtacgtacggcgctgcgtcatggcgctgctaacgtcacctgcgcttatcgccgcgatgaggccaatatgccggggtcgaaaaaagaggtgaaaaacgcgcgggaagagggcgcgaactttgaatttaacgttcagccggttgagttggtgctggatacgcacgggcgcgccagcggtattcgctttttgcgtacgcggcttggcgaaccggatggtcaggggcgacgccgcccggtacctgtaccggacagcgagttcgtgatgccggcggatgcggtcattatggcgtttggttttcatccgcatggtatgtcgtggctcgaatcgcatggcgtgaaggtggataactggggacgtattgccgccagcgtcgagagcgagtttcgttaccagacgtccaacccgaaaattttcgccggcggcgatgcggtgcgcggcgccgatctggtggtgacggcgatggcagaaggccgacatgctgcgcaggggatactcgactggttagctaaataa

SEQ ID NO: 404301 - DNA, 1701 bp, Salmonella enterica
gtgacggttaaacgcccggtctcggccagtctggctaaggcttttttctatattgtgctgttgtctattctgtccaccggcagcgcattactgacgctgaccagcagtttacgggatgccgaagcgatcaatatcgccggttcgctacgaatgcagagctatcggctgggttacgatctgcaaagccgtagcccgcagattaatgcgcatcgtcaacttttccagcacgcgctcaactcgccggtactgcaaaatctcaacgcctggtatgtgccgcaggcggtgaaaactcgctacgcgcgcctgcacgccaactggctggagatgaatagccgcctacaggacggcgacattgcctggtatcagaccaatatcaacaattacgtcgatcaaattgatctcttcgttctggcattacagcattacgccgagcgtaaagtcatgctggtcgtcgccatatcgctggcgggcggtatcggcatatttacgctggtcttttttaccctacgacgtatccgccagcaggtcgttcgcccgctaaatcaactggtcaccgccagtcagcgtattgagcatggtcagttcgccccgctgccgctggataccagcttacccaatgagctgggattattggcgaaaacgtttagtcagatgtcgagcgagctgcataaactttaccgttcgctggaagcctcggtggaagaaaaaacgcacgatctgcacgaagcgcaccgccgcctggaggtgttataccagtgctcccaggcgctgaataccagccaaatcgacgtccactgttttcgccatattttgcaaattgtccgtgaacatgacgccgcctggtatctggagttaaccgtgggcgataactggcggattagcgaaggcgcgcaaagccccgacctgccgatgcaaatgctgccagtgacgatgcaggacacggtctatggcgaactccactggcaaagccccaacgttaatgcctctacgccgttgctgaacagcgtctccacgatgctggggcgtggtttgtactttaatcaggcgcaaaaacacttccagcaacttttgttaatggaagaacgcgcgacaattgcccgtgagctacacgattcgctggcgcaggtactttcttatttacgtattcagttaacgcttttgaagcgcgctattcctgaggataacgccggcgcgcaaagcatcatggcggatttttccagagcgctgaacgacgcctaccgtcagcttcgcgagctactcaccacgttccgtctgacgttacagcaggccgatttaccctccgcattgcatgagatgctggaagatttacagagtcagactccggccaaactcacgttggattgccgtttacccacgctggcgctggatgcgcaaatgcaggtgcatttattgcaaattgtgcgtgaagcggtcctgaacgccattaaacatgccaacgcgagcgaaatcgccgtgagctgcgtcaccgcgcctgacggcgatcataccgtttatattcgcgataatggcattggtatcggcgaaccgtatgagcctgccggacactatggtctgaatataatgcgtgagcgcgcggagcggcttggcggcacgctgaatttttcgcaaccctccggcggcggcacgctagtcagtatcagttttcgctcctccaacaaggaagagagtcagttaacgtaa

SEQ ID NO: 404302 - DNA, 3114 bp, Salmonella enterica
atggcgaatttttttatcgatcgccccatttttgcctgggtgctggctatcctgttgtgcctgacaggggcgttagccattttctctttacctgttgaacaatatcccgatctggcgccgcccaacgtacgtattaccgcgaattatccgggagcgtcggcgcaaacgctggaaaataccgtaacccaggttattgagcagaatatgacgggcctcgataatctgatgtacatgtcatcacaaagcagcggaaccggacaggcgaccatcaccctgagctttattgcgggaaccgatcctgatgaggcggttcagcaggtgcaaaaccagttacagtccgcgatgcgtaaactgccgcaggcggtacaggatcaaggcgtcacggtacgcaaaacgggcgataccaatattttgaccatcgctttcgtctctaccgacggttctatggacaagcaggatatcgccgactacgtcgccagtaatattcaggacccgctcagccgcgtcaacggtgtcggcgatattgacgcttacggttcacagtactctatgcgtatctggctcgatccggccaaattgaatagttttcagatgaccacgaaagacgtgaccgatgcaattgagtcgcagaatgcgcaaatcgccgtcgggcagcttggcggtacgccttcggtcgacaaacaggcgctgaacgccaccattaatgcgcagtcattgctgcaaacgccgcaacaatttcgcgatatcaccctgcgcgttaatcaggacggttccgaggtcaaactgggcgatgtcgccaccgtggagctgggggcggaaaaatatgactacctcagccgttttaacggcaatccggcttccggtcttggcgttaagctggcctccggcgcgaacgaaatggcgaccgcgaagctggtactggatcgcctcaacgagctggcgcagtacttccctcacggcctggaatacaagatcgcgtatgaaaccacctcctttgtcaaagcctcgattatcgatgtggtcaaaacgttgctggaagctatcgcgctggttttcctggtgatgtacctgttcctgcaaaactttcgcgccacgctcattccgacgatcgccgtgccggtagtattaatgggcaccttctccgtgctttacgcgttcggctacagtattaacacattaaccatgttcgcgatggtgctggcgatcgggctcctggtcgacgatgccatcgtggtggtggaaaacgtcgaacgtatcatgagcgaagaagggctcacgccgcgtgaagcgacgcgcaaatccatgggacaaatccagggggcgctggtcggtatcgcgatggtgctgtctgcggtattcgtgccgatggcgttctttggcggtaccaccggggcgatttatcgtcagttttctattactattgtctcggcaatggtgctgtcggtgctggtcgccatgatcctgacaccggcgctgtgcgcaacgttattaaaaccgctgcacaaaggcgagcagcacgggcaacgcggatttttcggctggtttaaccgtaccttcaatcgtaatgccgaacgttatgagaaaggcgtagcgaaaattttgcatcgcagcctgcgctggattctgatttatgttctgttgcttggcggcatggtgttcctgtttttgcgcctccccacctcctttctgccgcaggaagatcggggcatgttcactacgtctatccagctaccgagcggttctacgcaacagcagaccctgaaagtcgttgaaaaggttgaaaactattacttcacccatgagaaagacaacattatgtcggtcttctcgacggtcggttccggccctggcgggaacgggcaaaacgtcgcgcgcatgtttgttcgcttgaaagactgggacgcgcgcgatcccaccaccggctcctcgttcgccattattgagcgggcgacaaaagcatttaaccagattaaagaagctcgcgtcttcgccagcagcccgccggcaattagcggtctgggcagctccgccggttttgatatggaattacaggatcacgccggagcaggccatgacgcgctgatggccgcacgagatcaactcattgagctggccgggaaaaacagttccttgacccgcgtgcgccacaacggcctggacgacagcccgcaactgcaaattgatattgaccaacggaaagcgcaggcgctgggcgtatcgattgacgatatcaacgacaccctgcaaacagcctgggggtcgagctacgtcaacgacttcatggaccggggccgcgtgaagaaggtctatgttcaggccgcagcgaaatatcgtatgttgccggatgatattaatctttggtatgtccgtaacaaagatggcggcatggtccccttctccgccttcgccacctcgcgctgggaaaccggctcgccgcgtctggaacgctataacggctattcggcggtagaaattgtcggagaggccgcgccgggagtcagtaccgggactgcgatggatgtcatggagtcgttggtgcatcagctaccgggcggttttggcctggaatggacagccatgtcttaccaggaacggctctccggcgcgcaggcgcccgcgctgtacgctatttcgctattagtcgtcttcctgtgtctggcggcattgtatgaaagctggtcggtgcccttctcggtgatgctggttgtgccgctcggcgtcattggcgcgctactcgctacctggatgcgcgggctggaaaacgatgtttacttccaggtggggctgttgaccgttatcggcctctcggcgaaaaacgcgattctgattgtggaattcgccaacgaaatgaatcagaagggacacgcgctgttagacgccacgctgtacgccagccgccagcgcctgcgaccgatactgatgacttcgctggcgtttatctttggcgtattgccgatggccaccagcaccggggcaggctcgggtagccaacatgctgtcggaaccggcgtgatggggggaatgatctcagcaaccattctggctatcttctttgtacccctgtttttcgtgctgatacgtcgccgcttcccactgaagccgcgcccggaataa

SEQ ID NO: 404303 - DNA, 357 bp, Salmonella enterica
atgattaccctctatggcattaagaattgcgacacgatcaaaaaagcgcgccgttggctggaggagcatggcattgattatcgttttcacgattaccgtgtggatggcatagacctccctcttcttaatacctttattgccgaactcggctggcagcctctactgaatacgcgcggcacaacatggcgcaagctggatgaaggccaccgcagcgggattaccgatgccgactccgccgctgctctcatggttgaacagccggcaatcatcaaacgcccattgctctgcgcgcccgggaagcctatgctgcttggtttcagtgaatcccgttatcagcagttttttgatgaggtgtag

SEQ ID NO: 404304 - DNA, 1128 bp, Salmonella enterica
atgtcgtgcccggttattgagctgacacagcaacttattcgtcgcccctccctgagtccggatgacgcaggctgtcaggcattaatgattgaacgcctgcgtaaaatcggttttaccattgagcatatggattttggcgacacgcaaaatttttgggcatggcgtgggcgtggcgaaacgctggcgttcgccgggcatactgacgtcgtaccggctggcgatgtcgatcgctggatcaatccgccgtttgaacctacgattcgcgacggaatgttgttcggtcgcggcgcggcggatatgaaaggttcactggcggccatggtagtggctgctgaacgttttgttgcgcagcatcctcatcaccggggccgtctcgcatttttgattacctctgatgaagaagccagcgcaaaaaatggcaccgtaaaggtggttgaagcgctgatggcccgtaacgagcggctggattactgtctggtcggcgaaccttccagtactgaaattgtgggtgatgtcgtcaaaaacgggcgtcgcggttccctcacctgtaacctcactattcatggcgttcaggggcacgtcgcctatccgcatctggcggataaccctgttcatcgcgctgcgccttttcttaatgaactggtcgctatcgagtgggatcggggcaatgactttttcccggccaccagtatgcaggtagccaatatccaggcaggcaccggcagcaataatgtcattcccggcgaactgttcgtgcagtttaacttccgtttcagcacggaactgaccgatgagatgatcaaagagcgggtacatgcgctgcttgagaagcatcagctacgctataccgtagactggtggctttccggccagccgttcctgaccgcacgcggcaagctggtggacgcggtggtaaacgccattgagcactataatgaaattaaaccgcaattactgacgacgggcggtacgtccgacggacgttttatcgcccgtatgggagcgcaggtggtagaactggggccggtgaacgccaccattcataaaattaatgaatgtgtgaatgccgccgatctccagctactggcccgtatgtatcaacgcattatggaacagctcgtcgcctga

SEQ ID NO: 404305 - DNA, 201 bp, Salmonella enterica; identical to SEQ ID NO: 369891

SEQ ID NO: 404306 - DNA, 2019 bp, Salmonella enterica
atgtctgatatcgatgcgctacgggcgttaacgtcgcaaatgacacaggaaggtattcgccgtttactggtcatcagcggcgatgcggcgtggtgccgggaacgggccgaggcgatacgcgctgtattgcccggtgactggctgtgggtcgcgcctgacgcgcccgcccagccgcgctgtacgccacaggcgttacaaacgctgctgggccgtgaattccgtcatgcgatatttgatgcctggcagggctttgacgccgcagcgtttgccgctctgagcgggaccttgcaggccggaagctggctgcttctgctgatgccgccgtacgagacgtgggaaagcaggcctgataccgattcactgcgctggagcgactgcgcgcagcctatccctacaccgcagtttgcacagcatcttaaacggactctttcccgcgatccgcaaacgctgctttggcgacagcgccagccgttttgctggccatcttatcctttccgtggacgctggcgacccgccaccggcgagccgcagccggagcaggcggctatcttatcgcgtttacgtgaaatgccgcccggcgtggcgacggtgattgccccccgtgggcgcggcaaatcggcgctggccgggcaattcatctcccggatggcgggcacggctatcgtgaccgcaccggcgaaaacggcaacggatatcctggcagcgtttgccggtgagcggttctgctttatggcgccggatgcgttgctggcgagcggggcaagagccgactggctggtggttgacgaggcggcggcaatccccgcgccgctgctgctgcaactggtttcgcgctttccccgcatactactcaccaccaccgttcagggctacgaaggcaccggacgcggttttttacttaagttttgcgcccgttttccgcagcttcaccgcttcacgcttcgtcagcctgtccgctgggcgccagaatgcccgctggaaaatatcgtcagcgaggcgctgatattcgacgatgaagcgtttgcgcaggcgccatatggcgcaatagcaatctcggcgttttaccaacaggcctggggaaagacgcccgcgttgccgagggctgtgtatcagttactgtcgggggcgcactatcgtacttcgccgctggatctgcgccgaatgatggatgcgccaggacagcatttcttgcaggccacggcgaataaccgtgtggcgggcgccctctggctggtcgaagagggtgggttatccgcagaactcagtcacgctgtatggggcggtttccggcggccgcgtggaaatctggtggcgcagtcgctggcggcgcacggtagcgaccctttagccgcgacgctggtcgggcgtcgcgtaagccgtatcgcggtgcaccccgcccgccagcgcgaaggcatcggtcagcagttgattgcctgcgcgtgcgagcaggcggcgcagtgtgattatctttccgtcagcttcggctatacgccggagctgtggcgtttctggcaacgctgcggctttgtactggtacggatgggcaaccatcgggaggcgagcagcggttgctatacggcgatggcgttattgccgctgagcgacgcgggaaaacggctggcgcagcaggaacaccgacgtttgcgccgcgatgcggatatcctgacgcagtggaacggcgaggcgataccgctggcggcgttagatgaacaggcgcttaatgatgaagactggcgtgagctggccggttttgcgttcgcgcaccgcccgctactgacatcgttaggttgcctgcaccgtttactgcaatacagcgcattgccattaccggcgctgagagggcggctggaggaaaaagccagcgatgccgaactgtgcgcccggctacgcatttcaggccgtaaagctctgctggcgttgcagcgtgcgcaggcggcgcaggcgctgattgcgttggatgccggacgaacgcagcgtttacgcgacgtaatgcccggcggtggggagcatgccggatag

SEQ ID NO: 404307 - DNA, 864 bp, Salmonella enterica
atgcgctggcaagggcgtcgtgaaagtaacaatgtagaggacagacgtaatcggccaggcggcccctcgctgggtggcccaggctttcgtcttccgcgcggaaaaggcggcatcattctgttggtggtggtgttggtcgcagggtactatggggtggatttaaccggtctgttgaccggtcagccggtttcgcagcagcagtcgacgcgttcgataagccccaatgatgatgaagcggcaaaatttacctcggtgattctggcgacgaccgaagatacctgggggcaactctttcaaaaaatggggcgcggctatcagcagccaaaactggtgatgtaccgtggtatgacgcgcaccggctgtggtgcgggtcagtccgtgatggggccgttttactgcccggcggacggcaccgtctatatcgatctctcattttacgatgatatgaaaaataagctgggcgcggacggtgattttgctcagggttatgtcatcgcccacgaagtcggccaccacgtacaaaaactgttaggtattgagccgaaagtacgccagttgcagcaaaacgcgtcgcaaacggaggtgaatcgcctttcggtgcgcatggaactacaggcggattgctttgccggcgtgtggggacacagtatgcagcagcaaggcgtactggaggcgggcgatctggaagaggcgctcaatgccgcacaggctatcggcgacgatcgcttacagcaacagggacaggggcgcgtcgtgccggatagttttacccacggcacctcagaacagcgctacagctggtttaagcgtggatttgacagcggtgacccggcgcaatgtaatacgtttggcaaaaacttttga

SEQ ID NO: 404308 - DNA, 714 bp, Salmonella enterica
atgcaaaagcaagctgagttgtatcgtggtaaagcgaaaaccgtatacagcacggaaaacccggacctgttggtgctcgaattccgcaatgatacgtcagcaggggatggcgcgcgcattgaacagtttgatcgcaaaggcatggtaaataacaaattcaaccatttcattatgaccaaactggccgaggcgggcatcccgacccagatggaacgtttgctgtctgataccgagtgtctggtgaagaagctggagatggtgccggttgaatgtgtggtgcgcaaccgtgcggctgggtcgctggtcaagcgtctgggcgtggaagaaggcatggagcttaacccgccgatattcgatctgttcctgaaaaacgacgcgctgcacgacccgatggtgaatagttcctactgtgaaacgttcggttgggtaagtcaggaaaatctggcgcgtatgaaagagctaacctacaaagccaacgacgtactgaaaaaactgtttgatgacgcgggtcttatcctggtggatttcaaactggagtttggcctgtataaaggcgaagtggtgctgggcgatgagttttcgccggacggtagccgcctgtgggataaagagacgctggacaaaatggacaaagaccgcttccgccagagcctgggcggtctgattgaagcctatgaagccgtcgcgcatcgactgggcgtgaaattagattaa

SEQ ID NO: 404309 - DNA, 1035 bp, Salmonella enterica
atggcttactcagtacaaaagtcgcgcctggcgaaggttgcgggtgtttcgcttgttttgctgctcgctgcctgtagttccgattcgcgctacaagcgccaggtaagcggcgatgaatcctatctggatgccgcgccgcttgctgaacttcacgccccggcaggaatgatcctgccgataacgaccggcgactacgttattccggtcacaaaggggagcggcgcggttggtaaggcgttggatatccgtccgccagcgcagccgttagcgttagtgagcggcgcgcgtacccagttctctggcgataccgctacgctcttggtggaaaatggtcgtagcagcacgctgtggccgcaagtcgtcagcgtgattcaggcgaaaaattatccgattgaaaaacgtgacgatgccagccagaccctgacgaccgattgggtgaactggaaccgcctggatgaagacgaacagtatcgtggacgttatcaaatctcggtgaagccgcagggctatcagcaggcggtaacggtaaaactggttaatctggaacaggctggcaagccggtcgctgacgcggcgtcgctgcagcgctatagcacggaaatgatgaacgtcatttccgccggtctggataagaccgctacggatgcggcaaatgccgcgcagaaccgttccgccgcaacgatggatgtgcagagcgccgctgatgataccggtttacctatgctggtcgttcgcggtccgttcaacctcgtgtggcaacgcctcccggccgcgctggaaaaagtgggcatgaaagtcaccgacagcactcgctctcagggcagcatggcggtaacgtacaaaccgttgtctgacagcgactggcgggatctgggcgctagcgacccgggcctggcatccggagactataaattgcaggtcggcgatttagataaccgcagcagcttgcagtttatcgatcctaaggggcatactctgacgcaaagccagaacgacgcgctggttgccgtcttccaggcagcgttcaacaagtaa

SEQ ID NO: 404310 - DNA, 879 bp, Salmonella enterica; identical to SEQ ID NO: 369896

SEQ ID NO: 404311 - DNA, 573 bp, Salmonella enterica
ttgacaccgtcatcacaacactatttggttatcactgcgctgggcgccgacaggcccggtattgtgaataccattactcgccatgtcagcagttgcggctgtaatatcgaagacagccgactggcgatgctgggcgatgaattcacgtttattatgctgttgtccggcacgtggaacgcgattaccttgattgaatcgacattgccgttaaaaggcgcggagctggatctgctgattgtgatgaaacggacgtccgaccgtccccgcccggcaatgcccgcgacggtatgggttcaggttgaggtcgccgactccccgcatttaattgagcgattcaccgcgctgtttaatagtcatgaaatgaatattgcggagctggtctcccgcacgcagccggctgaaggtgataaagctgcgcaattatttattcaaatcaccgcacatagcccggcgtcgcaaaattccgcaaatattgagcaagcctttaaagcactatgtacagaactcaatgcgcaaggcagtataaacgtcgtcaattactcacaacatgatgaacaggatggagttaagtaa

SEQ ID NO: 404312 - DNA, 471 bp, Salmonella enterica; identical to SEQ ID NO: 369898

SEQ ID NO: 404313 - DNA, 1140 bp, Salmonella enterica
atgaaaattgttattgctcctgattcatttaaagaaagtttgtccgcaatggcggtcgctgaggcgatagaaaaggggttccgcgaaatttatcctgacgccgactacgttaaagtgcccatggcggatggcggggaaggaaccgtacaatcaatggtggaggccagcggcgggcgttatgtcgaccagtgggtacaaggcccgcttgggcaaccggtggccgcgcgctggggaatgctgggcgatagcgataccgccgtgattgaaatggcggcggcatccgggctgcatcacgtttcgcctgaattgcgcaacccgcttaataccaccagctacggcaccggcgagttaatcgtcgcggcgctggagcgtggcgtaaagcgtattattctgggaattggcggcagtgcgacgaatgacggcggcgcggggatgatgcaggcgcttggcgttatattgcgcgataaacaggggcgctcgctttctccgggcggcgaggcgctggcggcgctggcgtctatcgatttgtccggttgtcacccattgctgcgtaaggtatcgataaccgtggcgtgtgatgtcaacaatccgttgtgtggtccccagggcgcatcggccatttttggcccacaaaaaggggcgacagcggaaatggtgaacaccctggacgcggcgctggaaaactggggccgacatatttatcaggctacgggacgtgaggtgattaacgctcccggcgcgggtgcggcaggtggaatgggcgccgcgcttttaggattgctcaatgcggaattacgcgccggcgtagagattgttgtggaaacgctacagcttgagcaggcggttaaagatgccgatctggtgattaccggagaagggcggctggacagccaaagtatttgcggcaagacgccgattggcgtcgccagagtggcgaagcggtatcataaaccggttatcgcgctcgccggtgggctgcaacacgatcatcacgttgtgtatcagcagggtatcgatgcagcgctgtcgattttgtcgcatatcgttacgctgccggaagccttacacgaggcggaatataacctgagcctgtcggcgcgcaatgtggcggcgatatggcgtctggcgcggcaagcctga

SEQ ID NO: 404314 - DNA, 1269 bp, Salmonella enterica
atgacgtcgatatccaccctgggagccattgccgcattggttgtggccatcgtattaattttaagaaaagtgtcgccagcctacggcatgatggcgggcgcgctggtcggcggtttgattggcggcgccgatcttctgcaaaccgtgtcgctgatggtgtcaggcgcgcagggcatcgttaatgccgtattgcgtattctggccgcaggcgtactggcgggcgtattaattgagtccggggcggcgaatacgattgctgagacgattgtccgcaaagtgggggaaacccgggcattattggcattagccattgccacactatgtttgaccgccgtcggcgtatttattgatgtggcggtgattaccgtcgcgccgattgcgctgtcgattgcgcgtaatgcaggcctgccaaaaagcgctattctgctggcgatggttggcggcggcaaagcgggtaacgtgatgtcacccaacccgaacgctattgccgcctctgatgcgtttcatgttcctcttacctctattatgctggcgggcgtggttccgggcatcgttgggcttattatcgcctatctgttagcgaaacggctgaataataaaggcgcgggcgtcgccgatcatgaagtgactcaccatgatgactccgtcgccagacccggctttctggtggcgattagcgcgccgctggtcgctattttcctgctttctctccgtccgtttgccggcatttccattgacccgttaattgccctgcccgtagggggattggtcggtctgctgttgatgggacgcgcgcgccactgtaaccagtacatggtcgccggtctgatgcgtatggcgcctgtcgctattatgttgctgggaaccggtacgctggccggcattatcgctaattccgaacttaaagatgtcctgattcatggcctcaccgcttcgggattgccgtcctggctgttggcgcccgtgtctggcgccatgatgtcaatggcgacggcctcaaccacggcgggaacggcggtggcgtccggcgttttctctcccacgttacttgaacttggcgtttccgccctggcgggagccgctatgatccatgcgggcgccacggtgctggaccatctgccgcacggcagctttttccacgcgacgggcggcagcgtcaatatgcaaattcatgaacgtttaaagctaatgccgtatgaaacgctggtggggttagccattacctttatttctactctgatgttcggtttctttggttttgcaggataa

SEQ ID NO: 404315 - DNA, 1182 bp, Salmonella enterica
gtgttgagaaaacattacttgaaagggtataccgcgcggcaaattgtacagcgagccatgaaaattattccttactcggtaaacgtcatggatgagcatggcgtcattatcgcgtctggcgaaccttcgcggcttcgccagcgtcacgaaggggccattctggcgctgaaggaaaaccgtattgtagaaattgattccgctaccgccaatcagcttaaaggcgtgcgatccggcattaatcttcccatctcttttcatgaacagcttatcggcgtggtcggcattaccggcgagccggaggaggttcgcgcgtatgccgagctggttaaaatggcggcggagctggtgatcgagcatatggtgctgatcgaacagcgacagtgggataaacgctatcgcgaagagctgatcaaccaattgattttgcgagaaaattcaacagagtcgttgcgctccatggcggcctatctgggtattgatctggcggttcccagagtggtgctgattattgaactttcccagccggatcgcgaagcgctgcgcaatgtaatggattatttcgagaatcacgcgcgtaaccatttggtgacgtttaccgaatttaatgaattaatcattattaagcctatcacgttaaaagagggaaagtggaatacccgccaggaaatgggcgaattgcagatttttaaatcatgggctgcatcatcgggctttagccgtattttggttgggggttattttgccggcgagacgggattgcaccgatctttgctcactgcgagagccacgcaggcgatggcgaaaagacaaaagctgcgcagccagtacattttttatcatgaccatgcgcttcccgcgctgctaagcgggctgtctgaaagttggcaagtgcaggagttatcgcgtctgtggctgcaactggcgcaacatgacgcgaaaggcgtattgcaacagacgctgcggacctggtttgaacataattgtgacctgacgcaaacggccaaagcattgcatattcatgtgaatacattgcgctatcgcttacagcgctgtgaggatattacgcacataaaaatcaacgagttaaaaagtacgctttggctttatatcggtatggagctccaggccgaatctgtaccgtccgacaagttaccgctgccaggtcgaatcgaaatttgttga

SEQ ID NO: 404316 - DNA, 1068 bp, Salmonella enterica
atgctcgaaatgttaatgcaatggtatcgccgtcgcttcagcgacccggaggcgattgccttgctggtcattctggtggctggttttagcatcctctttttctttagcggcctgttagcgccgctgctggtcgctatcgtactggcctacctgctggagtggccgacggcgcgcctgcaggcgattggctgttcccggcgctgggcagcctccattgtccttatcctttttgtcggcattctgttattaatggcgtttgtggtgatgccgattgcctggcagcaaggtatttacctgattcgtgatatgcccggtatgctgaataaactgtccgatttcgccgcgaccttgccgcgacgctatccggcgctgatggatgcgggcattattgatgcgatggcggaaaacatgcgtacccggatgcttaacatgggcgattcggtggtgaagtattcgctggcgtcgttagtcgggctactgacgctggcggtatatctggtgctggtgccgctgatggtctttttcctggtaaaagataaagagcagatgctgaatgccgtgcgccgcgtgctgccgcgtaatcgcgggctggcggggcaggtgtggaatgagatgaatcagcagatcaccaactatatccgcggaaaagtgctggagatggtagtggtgggcgtggcgacctggctgggctttttgctgtttggcctcaactattcgctactgctggcggtactggtgggcttttcggtcctgatcccctatatcggcgcctttgtggtgacaattccggtggtgggcgtcgcgctgtttcagtttggtctggggacggaattctggagctgttttgccgtttatctgattattcaggcgctggatggcaatttgctggtaccggtacttttctccgaagcggtgaatttgcatccgctggtgattattctgtcagtggtgattttcggcggtctgtggggattctggggggtgtttttcgccattccattggcgacgctgattaaagccgttgtccatgcctggccggatggtcaggtgacggatgcctcatcctga

SEQ ID NO: 404317 - DNA, 1464 bp, Salmonella enterica
atgttcaggcagttgaaaaaaaacctggtggcaaccctcattgcagcattggctctcggtcaggtcgcgcccgcatttgccgaccctgccgacacgctgcccgatatgggaacctcggcaggaagcacgctttctatcggacaagagatgcaaatgggcgacttttatgtgcgccagctacgcggcagcgcgccgttaatcaacgatccgctgctggtgcaatacattaacgcgctgggtatgcgtctggtctcgcacgccgactccgtcaaaacgcccttccattttttcttgatcaataatgacgaaatcaacgccttcgcgttctttggcggcaatgtggtgctgcactcggcgctttttcgctacgcggataacgaaagccagctagcttcagtcatggcgcatgaaatctcccacgtgacgcagcgccacctggcgcgcgcgatggaagatcaaaagcgcagcgcgccgcttacctgggtgggcgcgctgggttccattttgctggccatggccagcccacaggccggtatggcggcgctaaccggtactctggcgggaacgcgccagggaatgataagtttcacccagcaaaatgagcaagaagccgaccgtattggtattcaggtactgcaacgcgccggatttgacccacaggcgatgccctctttcctcgaaaaactgctcgaccaggcgcgttactccacgcgtccgcctgaaattttgctcactcaccccttaccggaaagccgccttgcggatgcccgcaaccgtgccaaccagatgcgcccggtcgtggtgcaatcttccgccgacttttatttcgccaaagcgcgcgccctgggaatgtacaattccggacgtaatcagctcaccagcgacctgctggatcagtggtctaaaggcaacgtgcgtcagcaacatgcggcgcaatatggccgggcgttgcaggcgatggaagcgagcaagtacgatgaagcgcgcaaaacgttgcagccgctgttaagcgcagaaccgaacaatgcctggtatcttgacctcgccaccgatattgacctcgggcagaaaagagccaacgacgcgattaatcgcctgaaaaatgcccgcgatctgcgcgttaatcctgtgctgcagttaaacctcgccaatgcgtacctccagggaggccagccaaaagcggcggaaaccattctgaatcgctacacctttagccataaagatgacggtaacggctgggatctgcttgctcaggccgaagccgcgctgaacaaccgcgatcaggagctggcggcgcgcgctgaaagttatgcgctggcgggacgactggatcaggcaatttcactgctcagtagcgccagcgcccaggcaaaactgggtagccagcaacaggcgcgttacgatgcgcgtatcgaccagctgcgccagttacaggaacgcttcaagccatacacgaaaatgtaa

SEQ ID NO: 404318 - DNA, 360 bp, Salmonella enterica; identical to SEQ ID NO: 369904

SEQ ID NO: 404319 - DNA, 726 bp, Salmonella enterica
atgtcatcctgggttgaggtatctctgaacacaccggcacagctctctttgccactttatcttcctgacgacgaaactttcgcaagtttctggccgggggataacgcctctctactggccgcgttacaaaacgtgttgcgccaggaacatagtggatatatctacctttgggcgcgtgaaggcgcgggccgcagccatttgctgcacgccgcctgcgctgaattgtcgcagcgtggagatgcggtaggctacgtcccactcgataaacgtacctggttcgtgccggaagtgctcgacggtatggaacacctctcgctggtgtgtattgataacattgagtgtgtcgctggcgatgaactgtgggagatggcgatctttgatctctataaccgcattctggagtccggtaagacgcggttattgatcaccggcgatcgtccgccaagacagttaaatctgggcttgcccgatctcgcttcccgtctggattgggggcaaatctataaactccagcctctttccgatgaagacaaacttcaggcgctacagttgcgtgcccggttacgggggtttgaactgccggaagatgttgggcggtttttactcaaacgtcttgatcgcgaaatgcgcacgctgtttatgacgctggatcagctcgatcatgcgtcgatcactgcccagcgaaaactgacgatcccgtttgtcaaagagattctgaaactgtaa

SEQ ID NO: 404320 - DNA, 1290 bp, Salmonella enterica
atgacgcgccgtgctatcggggtgagtgaaagaccgccgcttttacagacaatcccgcttagtttacagcaccttttcgccatgtttggcgcgaccgtgctggtgccagttctgtttcatatcaatcccgcgacggtgctgctgtttaacggtatcggaacgttgctgtatctctttatctgcaaaggtaaaattcctgcctacctcggatcgagctttgcctttatttccccggtattactgttgttgccgctgggttatgaagtggcgctgggcggttttattatgtgcggcgtgttgttctgtctggtctctttcatcgttaaaaaagcgggcaccggctggctggatgtgatgttcccgcctgcggcaatgggcgcaatcgttgccgtcatcggtctggagctggctggcgtcgcggcggggatggccggattgctgcctgcgcaagggcagtcgccggacacgaaaacaattatcatctccatggtcacgctggcggtgacggtgttcggctccgtactgtttcgcggtttcctggcgatcattccgattttgatcggcgtgctggcgggctatgcgctgtcattcgcgctgggagtggtcgataccacgccgattgcccaggcgcactggtttgcgctgccgaccttctatacgccgcgttttgaatggttcgcgatcctgacgattctgcccgcggcgttggtcgtgatcgccgagcatgtcggtcatctggtggtgacggcgaatatcgtcaaaaaagatttagtgcgcgatcccggtttgcaccgctcgatgttcgctaacggactgtcaacgatcgtctccggcttcttcggctccacgccgaataccacctatggggaaaatattggcgtcatggcgatcacccgcgtctacagtacctgggttatcggcggcgcggcgattttcgccattctgctttcctgcgtcggcaaactggcggcggcgattcagattatcccgttacccgtgatgggcggcgtctcgctgctgttgtacggcgttatcggcgcgtcggggattcgcgtattgatcgaatcaaaagtcgactacaacaaagcgcaaaacttgatcctcacctcggtgattttgatcatcggcgtgagcggcgcgaaagtgcatatcggcgcggcagaattgaaagggatggcgctggcgaccatcgtcgggatttgcctgagcctgatttttaaactgattagcctgttgcgtccggaagaagtggtactggaggcaaatgatgcggagcccccgcatcagtaa

SEQ ID NO: 404321 - DNA, 627 bp, Salmonella enterica; identical to SEQ ID NO: 369907

SEQ ID NO: 404322 - DNA, 1038 bp, Salmonella enterica
gtgaccgataagacctctcttagctataaagatgccggcgtcgatattgatgcgggtaacgctctggttgatcgaatcaaaggcgtagtgaagaaaactcgccgcccggaggttatgggcggtctgggcggtttcggtgcgctgtgcgcgttgccgcaaaaatatcgtgaaccggtactggtttccggcactgacggcgtaggcaccaaacttcgcctggcgatggacttaaagcgccacgacgctatcggtattgatctggtggcaatgtgcgtaaacgatctggtcgttcagggcgcggaaccgctgtttttcctcgattactatgccacgggtaaactggatgtcgataccgccgccagcgtgatcaacggtattgccgaaggctgcctgcaatccggctgcgcgctggtcggcggcgagacggcggaaatgccgggcatgtatcacggcgaagattacgatgtggcgggtttctgcgtcggcgtagtcgaaaaatcagaaatcatcgacggctcccgggttgccgaaggcgacgtgctgattgcactcggctccagcggcccgcactcgaatggatattcgctggtgcggaaaattattgacgttagcggctgcgacccacaaaccactctgctggaagggaagccgctggccgatcatctgcttgaaccgacccgtatctacgtaaaatcggttctggaactgattgaaaacgtcgatgtacacgctatcgcccacctcaccggcgggggcttttgggaaaatattccgcgcgttctgccggagaatacccaggcggtaattaatgagtcgtcctggcagtggcccgccatctttacctggctgcaaaccgccggtaatgtcagccgacatgaaatgtaccgtacctttaactgcggcgtcggcatggtgattgcgctctccgctccggaggcggacaaagcgcttgctctgctaaacgagaaaggtgaaaacgcatggaaaatcggtatcatcaaagcctctgattccgaacagcgtgtggttattgaataa

SEQ ID NO: 404323 - DNA, 639 bp, Salmonella enterica
atgaatattgtggtgctgatttccggcaatggaagcaatttacaggcgattatcgatgcctgcgaagcgaagaaaattaaaggcaccctcagggcagtattcagcaataaggccgacgcgttcggccttgaacgcgccagagaagccggtattccggcgcaagcgctgactgccgatcggtttgacagccgcgacgccttcgatcgcgagttgattcgcaagatagacgcgtatgcgcccgatgtggtcgtgctggccggttttatgcgtattctgagtccgatgtttgtcgcgcattactacgggcgtctgctgaacattcacccttccctgctgccaaaatatccggggttgcatacccatcgccaggcgctggaaaacggcgatgaggagcacggtacttcggtacatttcgtgacagacgaactcgacggcggcccggtcattctccaggcgaaggtgccggtttttgccaacgacagcgaagatgatatcaccgcacgcgtacagactcaggaacatgcgatttatccgctggtgattagctggtttgcgcaggggcgtctaaagatgcgcgataacgccgcctggctggacgggcgtcgtctgccgccgcaaggttatgcgtctgacgaataa

SEQ ID NO: 404324 - DNA, 2067 bp, Salmonella enterica
atgggtcaggaaaagctatatatcgagaaagaactgagctggttagcatttaacgaacgcgtgttacaggaagcggcggacaaatccaacccgttgattgagcggatgcggttcctgggaatctattctaataacctcgacgagttctacaaagtgcgtttcgctgaactgaaacgacgcattattatcagcgaagaacagggttcaaattctcattcacgccatttgttaggcaaaattcagtctcgcgtgttgaaagcagaccaggagttcgacggcctgtacaacgaattactgctggaaatggcgcgtaatcaaatctttctgatcaacgagcgtcagctctcggtgaaccaacaaagctggttgcgccactattttaagcactatttgcgccagcatattaccccgattctcattaaccgggagacggatcttgttcagtttttaaaagatgattacacctatctggcggtggagattatccgcggcgacaccatcaactatgcgctgctggagataccgtccgacaaagtcccacgcttcgttaatctgccgccggagacaccgcgcagacgcaagccgatgatcctgctggataatattctgcgctactgcctggatgacatttttaaagggttcttcgactatgacgcgcttaatgcctattcgatgaaaatgacccgcgatgccgaatatgacctggtgcatgagatggaatccagtctgatggagctgatgtcttccagcctgaagcagcgcctgaccgctgagcctgtgcgctttgtctatcaacgcgatatgcccgccgcgctggtcgacgtgctgcgggaaaaactgacgatctcccggtatgactcaatcgtacccggcgggcgctaccacaattttaaagactttattaattttccgaatgtcggtaaagccaacctggtcaataaaccgttaccgcggttacgccatctttggtttgataaagagaagtttcgtaacggtttcgacgcgattcgtgaacgtgatgtgctgctctattatccttatcacacctttgaacatgtgctggaactgctgcgtcaggcgtcgtttgacccaagcgtgctggcgatcaaaatcaatatttatcgcgtagcgaaagactcgcgcattattgactcgatgatccatgccgcccataacggcaaaaaagtcaccgtggtggtggagttgcaggcgcgcttcgatgaagaggcgaatattcactgggccaagcggttaaccgaagcgggcgtccatgttattttctctgcgcccgggctgaaaattcacgccaaactctttctcatctcacgaaaagagggtgatgacgtggtgcgttatgcgcatatcggcaccggtaacttcaacgaaaaaacggcgcggctgtataccgattattcgctgctgaccgccgatgcgcgcattaccaatgaagtgcgtcgggtctttaattttattgaaaacccctatcgcccggtcactttcgattatttgatggtttctccacaaaactcacggcgtctgctgtatgagatgatcgatcgtgaaatcgccaatgcccagcaaggcttaccgtcagggattaccttaaagcttaacaacctggtcgataaagggttggtcgacaggctatacgccgcgtcgggttcgggcgtccaggtcaatctgctggtgcgcggtatgtgttcgcttattccgcaactggaaggcataagcgataatattcgtgcgattagcattgtggatcgctatctggaacacgatcgggtttatattttcgaaaacggcggtgataagcaagtttggctctcttcagctgactggatgacgcgtaatattgactaccgtatcgaagtcgctacgcctatcctcgacccgcggcttaaacaacgcgtcctggatatcattgacattctgtttagcgacacggtaaaagcgcgttttatcgataaagaactcagcaaccgctacgtaccgcgcggcaatcgccgtaaagtccaggcgcagctggcaatttatgactacatcaaatcactcgagcaaccagactaa

SEQ ID NO: 404325 - DNA, 1542 bp, Salmonella enterica
atgccaatttacgataaatcccctcgcccgcaggagttcgctgcggtcgatctcggctcaaacagctttcatatggtcattgcccgcgtggttgacggcgcaatgcagattatcgggcgcttaaaacagcgcgtccatctggcggacgggctgggcgcagataacaaactcagcgaagaagccatggaacgggggcttagctgtctgtcgctgtttgctgaacgcttacaaggtttctccccttccagcgtctgtatcgtaggcacccatacgttacgtcaggcgcaaaatgccgctgattttctcaaacgtgcggaaaaggttattccctacccgatagagattatttccggtaacgaagaagcgcgcctgatttttatgggcgtagaacatacgcagccggaaaaaggccgcaagctggtgatcgatatcggcggcgggtcaacagagctggtcattggcgaaaacttcgaacccaggctggttgaaagccgtcgtatgggctgcgtgagcttcgcgcagctctactttcccggcggcgttatcaataaagaaaacttccagcgcgcccgaatggcggcagcgcaaaaactggaaaccttaacctggcagtatcgtattcagggttggaacgtagcgatgggcgcttccggtacgattaaggccgctcatgaagttctcctggcgctgggtgagaaagatggcttcattacgccggagcgcctcgataaactgaagtcagaagtgttgaagcaccgctcctttaatgcgctcagcctgccgggtctgtctgaagaacgcaaagcggtctttgtgccgggcctggcgattctgtgcggcgtttttgatgctctggctatccgcgagcttcgcctttccgacggcgcgttgcgcgaaggcgtactgtatgaaatggaaggccgcttccgccatcaggatgttcgcagccgtaccgcaaaaagtctggccaatcaatacaacattgacagagaacaggccagacgcgtgctggaaaccaccatgcagatgtacgagcagtggcaggcccagcagccaaaactggcgcatccacagcttgaagcgttgctccgctgggcggcaatgctgcatgaggttggactgaatattaatcacagcggtttacatcgccattcggcttatattctgcaacacagcgatttgcccggctttaatcaggagcagcaaatgatgatggcgacgctggtgcgttaccatcgtaaagccataaaactggatgatatgccccgctttacgctgtttaagaaaaaacagtatctgccgttaattcagctacttcgtctgggcgtattactgaacaaccagcggcaggcgaccactacgccgccgacgctgcgactaacgaccgatgacagccactggacgttatgttttccgcatgactggttcagccagaatgcgctggtactgcttgatctggaaaaagaacagcagtactgggaagcggtaactggctggcgtctcaatattgaggaagaaagctcgccggagatcgccgcgtaa

SEQ ID NO: 404326 - DNA, 2214 bp, Salmonella enterica
atgaaactaaataaaacttatataaatatcagagataaatggtggggactaccgctcatccttccttcgattttactacctgttttaagtagcgcaaatacttatgcgcttaccagcactggaaatgtggttcttttttacctgccgttagcttttatgcttagcctgatgctctttttcggctgggcagcactgccgggcattgtgcttgctatcttctggcgcagatacccgcagacagggctgtatgaaaccctttctgtgacgatgcactttatcattactatcgtgctaagctggggcggctatcgtgtcttttccccccggcgaaacaatgtttctcacggcgacgcccacctgttgtttcaacgaatattctggcaggtattttgttcagcaacattatttctggtcatctaccagtttgccgcttttgttggcatgtacgaaagcaaagccagcctgatgggggtaatgccctttaatatcaacacgctgattaattaccaggcgttactggtcggtaaccttgtcggcgtgccattgtgctattttattattcgtactctccgtaatccgctgcacctgcgggggtattatcagcaattaaagctacagattgatagcaaggccactaaaaaagagatcgttatttggctggccgtattgactacactaatgtttatactgtgtatgccattgactgataatagttcaatatttagtaccaactatacgctttcgttattattgccggtcatgctgtggggcgcgatgcgctatggctataagtttatttcaattatctgggccgtcgtgctaattacgtcgattcattattatcagcgttatatgccctggtattcaggttatgatacgcaattagcgattacctcttcgagctatctggttttttcttttattgttaattatatgtctgtactggccacgcgtcagcgcgtagtgagtggtcgcgcacggcggctggcctatcttgacccggttgtacatcttcccaatttacgtgcgttaaaccgcgcgctccaaaatgcgccctggtctacgatctgttttttacacgtgccgggcctggagctattgggtaaaaattatggcgtcatgctacgcatccagtataagcaaaagctctctcattggattacgccgatgctggcctcaaatgagtgcgtctaccagatgtcagggcacgacctggtgctgcgtcttaatacagagtcgcatcagcagcgtattgaagcgctggataaacatattaagcagtttcggtttatctgggatggactgccgctacagccgcctgtcggcgtgagctactgctgcgtgcgttctccggttagccacctttatcttctgctgggcgaattaagcaccagttccgatctttcgttgacgactaacgcgccggaggatttacagcggcgcggcgcaatgcacctgcagcgcgatttgaagggcagaattgcgatgatgaatcgcctgcaacaggcgttggagcacgatcattttttcctgatggcacagcctattttcggtgttcgtggggacgtttaccatgaaattttactgcgactcagggatgacaacggcgacgttatcaacccggacaattttttacccgtggcgcatgagtttggtttgtcttccgctatcgatctctgggtgattgaaaacacgctgcggtttatggcggccagccgggaatatatgcccgcgcatcgttttgccattaatctgtcgccaacatcggtatgccgcgctcgtttccctgcagaagttaagcagttgcttacgcaatatcaggttgaaccctggcaactggtttttgaggtaacggaaagcaactctctcaccaatgctgagcaggcgcagttgacgctgggacagctacagcagtttggctgtcagatagcgattgatgatttcggtactggctacgccagctatgcgcggctgaaaaacgttgacgccgatattcttaaaattgatggcagttttattcgcaatatagtgtcaaacagtctcgattatcagattgtggcttctatttgtcatttagcgcgaatgaaaaatatgcaggtcgtcgcggagtatgtcgagagcgaagaaatacgaagcgtcgtgctctcgttggggatcgactatcttcagggatatttaattggcgagccgcagctattatctgagattcagtaa

SEQ ID NO: 404327 - DNA, 192 bp, Salmonella enterica
gtgagtcaggccaacagtatgcgaaaacgacatcgatttaacactcgcatgacccgtatcgtactgcttatcagttttctcttcttctttggacgtttcgtctactcttctatcggcgcctggcagcaccatcaggataaaaaagaagcgcaacaatcatcgctttctgtcaccacgccgggacaacgttaa

SEQ ID NO: 404328 - DNA, 321 bp, Salmonella enterica
atgagagatattgagaaagaaattatcgattttatcgatcaggaatataacactaaaaagtactttctctgtgggccaaagcgaaccatcacgcttgataccagtattagggatgatctaaaactcgtttttgaagatagtgaagaacttctacaagagtacttcgagcgttggaatatagattcagaaggatttgacatactcaactatctgaacccagagtactttggaagtaaagagcctgatccgcgtaagccactaacagttggtatgctcgttgaaagtgctaagctggacgttgattatatagttgaagaataa

SEQ ID NO: 404329 - DNA, 291 bp, Salmonella enterica
atgacaaaagacattgtcctgaatgcgcttctgatggccgtgtggcgacgtcatccccaaaaacaggtgctggttcagtctgatcaggatagtcagtacacccgctatgaatggctgaaatcgcacggactggaggtcagtatgagccgtcgtggcaactgtcatgacaatgcggttgcagaaagctttttccagctactgaagcgtgaacggataaagaaaaagatctaccaacgactcagaagtgtccaggttattcgtggcgattcagcccaaataaggggtatttaa

SEQ ID NO: 404330 - DNA, 204 bp, Salmonella enterica
atgataaagacccgttataccgaaaacagattgcatttgtacttaaacaggatgaaaccagtacccacgttaggggcagaaagacaaagacctctgatttatcattgtactaatgctctgtccatgcaagtaagcctgagcagactgataacggtaattataaaagtaacactggtcgccaataagcctttaaagcgaatgtga

SEQ ID NO: 404331 - DNA, 576 bp, Salmonella enterica
atgaggttatacatttttgttcccttgctgttattgtctgtttatgtattttttgtgaacgggggggcggctgtatttagtatggtaatgagcatttctcttattaaaatggcttacaaccataattatggttttataaattctgttgttctggttgtttcttttgtttttaccggtgtaacagcgttctataagttttctgattatgatgttaacggttcaactgatatttatacaacagctattaagcagggggatcagacgaatattaatgactgtagccagttacagggaaatgactatggacgttttgaaaaagtgaaagagagtatgaaaaataattgtgcacttcaggaccttaatgatattcatcacattgcaaccggtatgatatctacaatgtattctgctctctataatgaattctcgctggcatccgtatttatagaggaaccaaaaagaaagaaccggtgtctgagttcgattgacgcgtttttaaaagtgtgtcctgagcaaaaaatacatttcaatcaaaaaaatctgcaaatgcttcgcgactttgaacttaaacagtga

SEQ ID NO: 404332 - DNA, 942 bp, Salmonella enterica
atgaagaagaaaaacagcacacccacgccacatgatgcggcattccggcagtttctggcacagccagagatagcccgcgactttatggaactccatcttccggccgaactgcgcgccatctgtgacctcagtacgctgaagctcgagtcaggctcttttgtcgaagatgaccttcgccagtatttcagcgatgtgctttacagcctggaaacggctgaaggaaccggatatgtgcatgttctgatagaacatcagagctcgccggatgttcacatggcctttcgcatgacccgctatgccgtcgccgcgatgcaacgccatctcgatgctggccataaaaaactgccgctggtgataccggtattgttttatgtggggaaacgcagcccgtatccctactccacccgatggctggatgaatttgataaccccgaactggcgggtaaagtctatggcggggcttatccactggttgatgtgaccgttattccggatgatgaaataatgaatcatcgcagcatggcggcactgacgttactgcaaaagcacatccatcagcgtgacatcgccacgctgaccgatcgtctggccacgctgttgatggcggattacctctcttcaccccaggtgattgcgctgatacactatctactgcaggcaggtgagtcagctgactccgaagcctttgttcgcgaactggcacagcgtgtgccgcaacacggagacgcactcatgaccatcgcacaacagcttgaacagaaaggtattgagaaaggacgccttgaaggtatccagatcggcgaagagaaaggccgtaatgaaggcaaactcgaaggaaaactcgaagtcgctcgtaccatgctgcaaaatggactcgaccgcagtaccgtcatgaagatgaccggtctggatgcggaagatctggagcaaatccgccattaa

SEQ ID NO: 404333 - DNA, 459 bp, Salmonella enterica
atgaaaactatagctatgttgttagcttgctcaattccactggctcacgctggaacggcaggtgactttaagatacctataacggttacagaagatccatgtttactcaccacccctaccgtcactaattcagatattaaagttagcgagttgaaaactggtcacaagggtgaagttgaactctcatttagtggatgtaccgctggtgagacagttgatattcaggctacagcaacaagtgataacagtagtgctattgatgtgttcttagcaaaagacacggttgaccagggaacttcaattaacaacactgtcactctcgctgggttaaatattgaagcaagcggaacgaccacaagcaaactttattataatattaaagcagtggataaaaccaagccaagtgcattagtaggcaaatccaatgttaatattgcacttacttatacatatcaataa

SEQ ID NO: 404334 - DNA, 696 bp, Salmonella enterica
atgaaaagaacattccttataataatttcactatgttgtgttattttcaatgcgtctgctattcaactttattcaagccgcgttatttataatgaaggacaaaaggaagtattgttcaggattaaaaatgaaagcgacacatcaccttatttagtgcaatcatgggtatctaaatttaatagcgaagacgtctctgatgatttcatcatcattccgccattaatcaaccttacaccagaatccgtgaataatctgagaattatcttctcttcaaatcataatttaccggcaagatatgagtctatatatagacttaacatcctctctatacctgctgtggaagatactgatactacgaaagttaccctgactacgaaactatcattaaaattaatctacagaccggtaggtttaacatataacgaagcaaaagaggcacacaaaaaacttagtgcaaaaaaaaatggaaactcaataatcattgagaatcctacgccatattttgtaaacctaaaagaagtatcacttaatactggcaatatcgacagagaacaattcctgaaaattagtactatagaaccctttgggacagtagcatttgaatgcaagtcactaaatgcacatacaattaacatcttagctattgatgactatggtgcaacacacaagtcacagatcacatttgatggtatataa

SEQ ID NO: 404335 - DNA, 2478 bp, Salmonella enterica
atgactatggtgcaacacacaagtcacagatcacatttgatggtatataaaaagacattagcaaaattaaaggtctatgttttacttttttttcactctgagaactgtctttctggagagtattactacaatctaaatcttttaaatggtatcaattaccagtccataggcgtaaacgataacagaatgaatgccggactgaatattgatggcatttataatgttagaatcaatgttaatgataaaagcttagggtatataaatattgcattcaaaaacattaacaatcacttttcacctgaactatctgatgagttgatcgagaaaattggatttaacagagacgttttagaaacccttaaaaaaaacaagatacaggatttatttggtcttactaatttttttccagacattatctttaatacattcatcggaaaaggaaagctagtaatcagagttcctgagtcttatttgagatacaaagatgagacttttccggaagaatgggattatggcatgacttctctttactcatcctatgattttagtggttaccacaataatgatgaagttaacagtaaatctaaattccagtatttaaatttatacaacgggttgaacattgggaaatggcagttaagaaataaaacatactacactcgcgagaatagtaaatccaggatttattccgacaaaacatggctatcacgtgactttggtgctataaattcacgagtaactgttggtcagacaatgtcatctggattttttaacccgacattccggattgatggtatcaaatttgaatccatccctgatatgcgcccgtcattcctgaacagctacatgccagacattcagggtaatgctttaactaatgctacagtaaagatttatcagggtgataatctcgtttatcaaacatttgttaatcctgggccattcaccctgacagatataccaacaacaggtaacagtgacctcaaagtacagattattgaggaaaatggaattgtgcacgaggattttgtccctgtttcttcttctgacacactccgcagaaaaaatgtcctcgactacagtatcagtgcgggaaaacagaacgtaaaaagagctgaacttatgaaaaatcatgttattacagcagaaatgttgtatggcgtcacaagtatcagcacgttattaacagggttaacttattctgaaaattatcgtagtgcaagtctggggggaggctttaatctgggtaacacaggcgtatcaagtattataggcactaattcacaaaatagtttttataaaaaggaagggaacgctattgaactgcggcactataaaaaaatatcaaccctgtcaactcagatagacttccgtcataaatatttctcaggtaactatagtgaaattgatgatgaattaaccctttcatctttacgaaataaaaagtcattaacatctttatctattaatcaacctactgatcattatggaaatttcaggctttctgtttatctgagtagatttcagcaaaaaaatcataacaaaacaacttattctataaactggaataagtatttatatggcgttttctatacgttgtcgacatcacgctcagaatatatgaatgacaactacagaaatgaaaacatattctctattaacttatcaataccttttgatagtgaatcaaaaaattacataccttccagcgtaggttataactacacatccggtaaaaattataattccaatacattttcagttgataaaaacctttttcataacaaggcaaaacttaacgcaacgcatagtgaaaataagttttcgaaagacatcaacacttccaacatgatttccggaatttatatatccgactacacaaaattatatgcaggcttcgctaatcaaagcaatggatataaacaaaaaagctggaaagtttctggttctcttatcgcccacccctatggaattacactttctccatactcaatttctgaacgtggcgcatcgacgatcgtttcaatacccggagcatccggggtatcactaataaataacattagttcaactgatttctttgggaatgtgttcgttaataatcttcacccctataagaaaaacaatattaacattaactcacgcaacctcccttcaaatatagaagtgcagaacattgaaagcaaacttattcccgcagatggtgccataacctatacagaattttcagcaaccgttggaaacagagctatccttaaattactatttaacggaaaatcgctaccattcggttcaactgttacagaagatccgttagcatttgctaatgccagtggaatcatctatataactggattagagaacagtcaaagattacatattaaaatgcctgatgggaataaatgtagtatgatatttgatatatcggaatcaaagaatagaaatgaaatttatttttacaatggaatttgtaattga

SEQ ID NO: 404336 - DNA, 228 bp, Salmonella enterica
atgcctgtatccattgtttcaccttccgccggagctgtaaagccccacaagcataagcgcatcagtcgcgccgagctatccgcatcagagattaaacccgaattaaaagcgttcgggcggcatattgccaggcgtatctgcaagcggcgcggggtgcatattcccgcgatgacaaatgatgctttcggccaggtgcttcgcaccctgaaactgaaacgcggactgtaa

SEQ ID NO: 404337 - DNA, 768 bp, Salmonella enterica
atgaagaacgatacgcttaacgccctcatcgtgcgccacggtgaaaatctgctgcaccgttccggctggcctgaaaccgtgggtgtgacacaggttgctccggacgagcttcccggctggctgtccgtctgcggtgtgctcagtgcagacgagatcctgacgctgacaacccgtctttgccagaccgagatggggggacgggcacacctgctgacggccagtgcgcaacggctggcagggacacccgcccggctgcatctgtacccggcacagtcttatccccggcccgaagccctgcctgactgtacgtgtatcagtctgccgtatgcccgggaatggctgacaaaaaccgaatgcgacgacctgctggctttcctgaaagatttcactgaccgggtatgcgaaatagttcgccaggatgcgcaccgccttgcagcggctatggtgccgtctgccaggccgcgactgatggaaaaacgtttcggagactggcgactggttgcggacgaatatgaccacgaaaactggctggacagtgaggacggggcactgctggatcaggtactggacggggtactggtccgggatgcgcggttttgtccggtcctgctcaccctggtgaatgagtcccgggaagaaatcgaagcagccggggtgatgaccgatcttctgcgtttcccgggggaactggtccgacgctggtttgaccgccgcgtgctgcgggatgtgctgaacgaggtccgcaacactgacccgatcggggattaa

SEQ ID NO: 404338 - DNA, 348 bp, Salmonella enterica
atggaattaaatctgaatacctggcttgctggcctgagcgtcgacgtcggtggtactgaaatgatggtgtattacctggtttccgcgactgacctggcgcaggccgaagcgggcgttctggaaatggggcgcacctggtggccatcgctgcaacgcgaggatgacaggcatcggtgggaatatgcagcaggcgtggtctggttcaacagcatcattctgctcgatgacgtggaaaacagcattctgcgcgggctgaagttccttgatgcgtggaacgtgaccggtacaactgatgcgccggtactgcgcgacgagtgggaaaatgactggcgggatattacccgctga

SEQ ID NO: 404339 - DNA, 150 bp, Salmonella enterica; identical to SEQ ID NO: 400459

SEQ ID NO: 404340 - DNA, 267 bp, Salmonella enterica
gtgataccggtattgttttatgtggggaaacgcagtccctacccctactccacccgatggctggatgaatttgataaccccgaactggcgggtaaagtctatggcggggcttatccactggttgatgtgaccgttattccggatgatgaaataatgaatcatcgcagcatggcggcactgacgttgctgcaaaagcatatccatcagcgtgacatcgccacgctgaccgatcgtctggtcacgctgttgctggaaaggaaccggtaa

SEQ ID NO: 404341 - DNA, 186 bp, Salmonella enterica
atgatttgtttcatacgggaaaaactgttgatttatctgccgttcaacgtcgagaacgggagggtttccagtgaaagcggctcattttctgagcgcgcagcactggtttttatcctggttattgcgttcatcctgacgggaagcgagaaactccgccacgacggttcggcgttcataaccacttga

SEQ ID NO: 404342 - DNA, 201 bp, Salmonella enterica
atgtcagtgctaaaccttggtgcgggccttggggcctttatcgctcccgccattacggcattgttctattcatcacttggcgcaggtggtatccttggcatctatgccggtttgtatatcctcaacggtgtgcttacacctttcctcaaaacgccagaagagctgggccagcaggctgaactgaaaggtaaggtcgcataa

SEQ ID NO: 404343 - DNA, 1173 bp, Salmonella enterica
atggaacatttatcagaagtaggtaaaagagtagagagattgctttactcaagtgtgataataattttagctagtttctttttttattttttatcctcagcaattacattagataataatggtttaaagaaaaccatgcttacaggttttgttgatggaattaatgaaaacagagaatctctcgatgttgcaaaagtacttcaggaaaaatataagcagtatgtggatgataataaaaagaaaacagatgcacagaaaaaagaggaagaggacaagaaaagacttgaaataaagaatattaacaaaagcagagtcaaactaggcttgcctgaaataaatattgagaaaaaacttgaagaaaaaccaagttcgtatgacgaccttgatgttaaaaatataaatttaattagaagtaaattagggcttaaaaattcattgtctattgaaggggcaaaggatgtatataacgaattttatttttcattagtttacagaaatctttatggggacaaggacttaataaatacctatctaagtaaagtagacttaccaataaatgaagtattaatagatgccaaaaatagaatcaagatttttgataatggttcagttaaagtcttcgatgtagatactccaatacagatacctttttctttaggtgatatgaaatcaaaggtttcattatataacattgaaagtgctgggataatattcatgccagtactgctagttatatggattggttctctctcaatgacaagaattagagaggtttactatataaaaaaggtgaaggatatcgccaagtcataccctcacatcttgaatatttattattttgtcgacagggatatgcttgaaagccagaaggaaatagatgatttcaaccgaatgagaattggagatcctgcaataataaaacaaaacagatcaatttctgtaatatgctttttatttagagtgggtgtgctgttgacacttttattattaatgactgctcctttttatataggtgcactcagaattttcaatagtctaaacatctttaacttaatgatattgtttgtgtgtggttttataaatatcattcaatcaatgtcattgctagttgctgagttttctatttttagaaaaatattctttactgaaggccaagctaatgaatatatttaa

SEQ ID NO: 404344 - DNA, 345 bp, Salmonella enterica
atgaatatatttaaagtatctttatttatacttttttttgttgcgtttaatgcaagttcttatacggttttcagttcctatggttcatgcaaagtatggaatgaatataccaaaaatgagagggataataaagatagcttgtttccgtcaagtttatggacttctgctttgatggggtggcttgcggggtttactacggcagtaaacatgagtgctgatgaggaaaattttccaaatatagatcttgcgacaatgaaagaatatattgtgaattattgtgaaaaaaatccaacaggtaatgcatatgacgcagtttttgaaataaggaaaaagttgaagaaataa

SEQ ID NO: 404345 - DNA, 426 bp, Salmonella enterica
atgttcggattctttagaaagaaaagacctgaaactgagcccgggcaaggttcctcaatcacggcaaaacagtttattgcactgacgctgagtgatgaaaagctgtctatgccagtctatcttccggggatccgtaacgaagatgattgtgagaatattgggctaggtcctctcatttatatctggaatgtggatcgtgctgctggcacattcagcctctctgttaacggtaaagcgattggccacctccttgagccatttgtgcccagagataaccctgcgtatgttgaaatccgtgatgaggcaatgaaggttatcgctgaagtatctactcagtccgtgctgacaaccatagagaaaactggtctcatgcctgatattttgtttgcttaccatgctgagaacgcacagcaggagccaagctga

SEQ ID NO: 404346 - DNA, 138 bp, Salmonella enterica
atggagttctttagttctataccctcagatgaagcgggaaatctggcgacgtctattttgctgttcagtgatgttctcgccatgaaaggcgtggatgaagtatttggctattttttgggtagggataatgttgtatga

SEQ ID NO: 404347 - DNA, 480 bp, Salmonella enterica
atgattgtcagtggaacggctaacacagttatgagaaataaaagaaaagtttttattgttcatggaagaaataatgaagctaagcaggaggttagtaggtttattactgatttggggctcgaacctattattcttcatgaacaagcaagttcaggcatgacgataatagagaaaatagaacgatattcaaatgatgctgacttcgcattggttttgtatactgcttgtgatttaggtcgttctattgatgaacctaaccctcctcataaccgtgctcggcagaatgtagtatttgagcacggatatttaatggctaaattaggtagggaaaatgtttgcgctttagttaaagataacattgaaacacctaatgatattagcggggttgtttatgtcccattagatcctcatggtgcttggaaaatgagtgtctcaaaagagcttcgcacatgtggatattctattaaatcaatgtattaa

SEQ ID NO: 404348 - DNA, 393 bp, Salmonella enterica
atggtgattagccgatacggacaaataacgtttaaacattttcaagacaatccaacatgggctgctgcggctggatatgactttaattattttgattgtctgtcagtcgcatgtatagcaactaccaatgttgctaacaacataatcgatgaatccttggattttccagactatcaggtcagagagttgcctgcattttttgtgaaagtatctgttgctacagccctgttatttattttgttattcgcatatccattgcttgccgtatttgtttatgtgagatgcaaacactcacaaaaggaatacagcggagagcataccgatattaccagccaaaatatgcgtgtgtggttgaggagatgccaagagaaatgggggagacgtcatggctaa

SEQ ID NO: 404349 - DNA, 405 bp, Salmonella enterica
atggattattcacagttaagtgattttgaaattaacaagcgagtatgtgaggctttagatatggaggagcatttcttcatacctgatgacgaagcagatttcgattctgagatccccactgacgaaagaggtcctatttggcagacgcaaaaaagggatattaatggcttccgtgcttcaaacggaaattgcttcaatccttgcaataatcctgaatacgcatggccgattatcactgaaaacaacatcagcataattttagacaatccctcaatgccgtgcgccacagacaacgcaagggacttgtttgatgatgccggaccgaatgttggtgtcgcatatgacaatccactccgcgccgccatgattgtctttctcatgatgcaggacgctaataatgcttag

SEQ ID NO: 404350 - DNA, 822 bp, Salmonella enterica
atgaccaaagaaattgtgaccttcaagggatttaacaaagaccttcagtgccgtgactttcagtttgaaattggcaagaccttccatcacgatggaaaagtagaggcttgctgttctggatttcacgcctgtgaatgccctttcgatgttttcagttattatccgcctgcagaaagtcgctatgcggaaacaatatcttttggtgttatagaccgtgaagaaataggtgacactaaaatagctagtgccagtatcacaattaaggctgagctaacgcttccacagttcattcagcgtggtattgagtggatttggagcaagattgataaatcgctggaacagcagatcatgactggcaaccggtcagcagcaaccaacactggctaccggtcagcagcaaccaacactggctaccagtcagcagcaaccaacactggcgaccagtcagcagcaaccaacactggcgactggtcagcagcaaccaacactggcaaccggtcagcagcaaccaacactggcgactggtcagcagcaaccaacactggcaaccggtcagcagcaaccaacactggcgactggtcagcagcaaccaacactggcaaccggtcagcagcagaagtgtctggatcgcaatccgtagcggcatcactcggaatagaaggaaaagccagggcatctgaaggcggagcaattgtactttgctatcgcgatgaagatggcgagttaattcatatccgcgccagcaaggttggcgagaacggtattatgccggatacctggtatcaactggatgaagatggtgagtttgtagagtgtgagtga

SEQ ID NO: 404351 - DNA, 294 bp, Salmonella enterica
atgagctacgagaacgaaagtcaagtaaccaaatggttaaaagaaaatacaaaactctcttggacccgtactggaagcgacactccagcagttaaacttgatagactatatacaaatcgaagcgaaggttatgaaatccgcgatgtaatacttcgattttttaaagataacaatgtcgggcataaggatgaacattataaaattatatatgacggcattattaattacaaaaaaggtcatcgtgtagaaacatcagacttacttgaacatttaaaaacctacttgaaaaaataa

SEQ ID NO: 404352 - DNA, 141 bp, Salmonella enterica; identical to SEQ ID NO: 381289

SEQ ID NO: 404353 - DNA, 1071 bp, Salmonella enterica
atgatggctaatagatatgtagatgtaggcgaagattcacaatttggcggatttggagaagttaggttattacacgacaactttcttggaaggaaaatcttatgtaaatcaatgtccaacccagataataatgaccaactttacaatgaaattatcgctttatctaaggcaagatctcgtcatgtagtagagatatatgatgttttatttgatcaaaataggaatgtcagtggcattattatagagtatcttgatggcagagatttctctaaattctatttagaatatgagaataatccagaagaatttctaaaaatcttattccaaatagccagtggtctctatgatcttcacaaagctggaattacccatagggacatgaagttagaaaacattaaagcctccaacgccggagttgttaaaatttttgatttcggcatatcagcaataacagatgactatatcacgaaaaataatcgcgggacattgatttatgcggccccagaattatattatgaaaatgcaaggattagtagggaaatggatatctatgcatttgggataattgcctggaatcttgttaccacccaaaataattttgacagagcattgttagatattcctccacattctaaacatcaatatcaatccatagctcatgtttgtaaaaataaattaccagaagaaataataaatttaattgatgcaacattatgtccaaacccagctaatcgccccacaatagaggaaatagtacctttattggcaaaatacttagtaatacacaagcataaagggattttcacggaaaacgcaagaaatgtatatgaattatcatctacccaaaaaggtgttaaattaaaaatagctccgctgggagagatagatatatattatgacggcctcgaatttaaaataacctacgttgatggcgaggttttcatcaataatatgagaccaaaggtaaacacagtcttacctaattcttgtctattgacatttggtgccccccatttacgcaacagacggtttatgactttttcatcttcacatccagaggtggtattatga

SEQ ID NO: 404354 - DNA, 1110 bp, Salmonella enterica
atgaccaaagtttcgtttgaaaatgacacattactaattggcagataccatataattcgctatttagccgcaggcggtatgcaagaagtatatttatgtcatgatactgttctaaatagagaagtagttttaaaaacgccaaaagcagggactaaggatagaagatttaaacgaggcgctgaaatgggtgccagaataaatcattccaatgttgcatctactttagattactatgaagatgagaatttaacatttttgatagaggaattcatttctgggcaagatctttccaaacgaatgtctactgaatttcattatttagacccacatacatgtgcccatgtaataaagaatcttgcaaaagcactacatgaagctcataaagtaggaatctgccatagagatttaaaacccagcaatataatggtatcaaatgattttaatctatctatggtcaagttaacagattttggtattgctaaactagctgaaagcgaaatcgaatctgaaatagagctttttgagaaagatgaaagtaccttaacaacatctcaaactctattaggagcagtaccttacatggcccctgaatgttgggatgactggaaaggcgcaggtaaggaaatggatatttggtcattagggtgtattgcttaccatttattatcaggtcaacttccttttggttctggtcggagagcaattagagaagttgctagattccaggataataatacaaaacttttaaaaccgcaaaatattgggctccacgcatcttctgcaattttagaaaaagaattatgggctttgatcacaaattgtattgttgctgaccctcaaaaacggcctaccgctgagaatattctagatgcattcgattctatttgttattcgaatgagccacgtcgtttcggtacaatttatgattttggtgtgccttatcgagaaacaggccatataattgacaacggtagacaaacggggatgttatttttccactcttcagagttttacggtaactcgttacctcagcaggggaaaaaagttacctattcagtatatcccggattaccacacgatagatgctctacaattctattattgaaataa

SEQ ID NO: 404355 - DNA, 471 bp, Salmonella enterica
atgtcagcatttagcaggtgctggcgaagctctatcagttgtcgctttacagcgaaaagctctgtgtacgtaagcttgctgtctttgcttttggtgtcgatatgtacagcaattctatttaaattttgtactatgattgtcagtgaattccaagcattcaaatttatgggaggtatggcttgtgtatttttttcaagtgcaagtaaacggagccacttacctttactaacctctcctcttttagaattaattattttcagttctttttcattgaaacggacactcacacaatatgtacgattgtttaatgaagtatttaaaggcgttgttgtatcactatcatttgaaaaaatatgtgatttagaagattttcttgatattttcataaattcccttttacaaaatatacaacatatatatatcatttattttgattgtcaaatgcctcatttactgaaggtttttatataa

SEQ ID NO: 404356 - DNA, 1176 bp, Salmonella enterica
atgaagggtatgcagaagatcaaaaggggtaagagcttcgctggtgtcgttcaatatgcattgaaaccgggagcacatcataaaagtgatcccatcatcattggcgggaacatgttaggtaattcagcccttgaactgatcgctgaattcgatagcactacgcatcttcgccaggatgtcgcaaaatcagtttggcacaactcgcttcgcttacctgatggtgaatcattatcgaatgaccaatgggcaaagatagctgacgactatatgaagaggatggggttcaatgagacccatctccgctgctatgttctacatgacgattctgccggccagcacatacatatcattgcaagcaggatagacctctatgctggtaagctataccttggcagaaacgaaaacctcatcagcacccggatcattagtgaactcgaaatcgctcacggtctgacagtgaccaagacagcaccatccctcttaaatacacaaccgaagcggaaaagaatctctcgaaacgaacagatgctttcagaacggactggccttccctcccctaagaaagctctccaacagatacttgataaaagtttggcagatacacctgaccttttaacttttatcaagaggctggaagaagcagaagtcggctggacggcgaatgtcgcaagcacaggtaaaatgaacggcttctcattctcttaccgcgatatagctttcaaggcttcgcagttaggtaagggttactcttgggctaatcttcaaaagcaacttaactacaatcctgaccacttagaagctatacgagcgaccaaaaaggctatccctgctcctgctcctgctcctgctcctgctcctgctcctgctcctgctcctgctcctgcaaaagatgttgcaacaacggatattccaagggaaagcataagtgaaaaaattgtcgaactggaactacggctcagagaagacaaacggaatgaaatcgtagaaaagattcttcaaaaaaatgccgtcaaaaagcaaaagcatctcaggctcatcggctggattccatttatcagaaggttcatagagcttctgcgaagctatggtaagagcattcttcataagacccctacaagcttctcaaaagtctattcaacacatcatctaaaacctgcaagaaaaattcgtttatag

SEQ ID NO: 404357 - DNA, 387 bp, Salmonella enterica
atgaataaatttattgtaacctcctttttcattgcaatatttttaatttctggctgttcaacatcagggaaccagaaccttaaaaaggatacgccacaaagtctccagtcaaaaatcattaaaaacaagacaactaagacagaattactcactatgttaggtgagcctgatacaagaactacactcgacagtggcaatgagcaatggagatactttatgtataacaatcagttcaatgcctcaactttcattccggtcgttgggcttctaactggcggttcacagactcagtctaaaactcttgaaatagattttaaaggcgaaattgtcagtaaatggacattctctactgataataataatacaaaatctggcattcttcagtaa

SEQ ID NO: 404358 - DNA, 264 bp, Salmonella enterica
atgaaaatatcttcggtccttgctgttattatttccgtatttcttcttactgcatgtagtagtgagccttcccaagatgatatttttaaagctatgcgaaaatggactggaagctatctgacctcagtaaaaaaagtagattgcacaaaagaatctgataaaagctataagtgcaatgtagtgatggatattaatggttcgaagcaagctgggacagttaaattaataaaatcagatgatggctggcaagtaggaagttattaa

SEQ ID NO: 404359 - DNA, 429 bp, Salmonella enterica
atggacaaaaacaaaataaacccagagtttactctggaagagcaacttatcattataattgataaatatatatcaaaacgataccagcccggagataaaagtttctcataccaactatatctactttttgttggctatcatttaaagtatttctatcctaaaagaatttattccaaatcggatcgtaatatagacaatgtgatgaccatgttcagttcggtatacaaaggtctgacaagtaatcttttgcagaagttaaacaataaagaggcagttcttagggagctaaattctctcgttaactatattgataacaatcaagaaaaagcagaggaaatttatgctgttgtaaaaacacagtatgaagtgaaggttatcgagaaagagttaacccatgagattgttagagtaaggaatgttagattataa

SEQ ID NO: 404360 - DNA, 603 bp, Salmonella enterica
atgcagccggagcggcagaagcatcagccacacaggcagcctcatccgcagcatctgcggagagcagcgcaggtacggcgaccacaaaagccggggaggcatcagccagcgcggcgtcggctgacacagccagaacggcggcagccgcatcggcagccgcagcgaaaacatctgaagcgaatgcagatgtctcccgtactgccgccggcgattcagctgctgccgcagccgccagcgcgacggcggcgcagacatcagcagcgcgcgccggagcatccgaaaccgccgcgaagacgtcagaaacgcaggcggcttccagtgccggtgatgcaggtgcgtcagccactgcggcggcagcgtcggaaaaggcggcagccgcatcggcagccgcagcaaaaatatctgagacaaacgctgcaacgtcagcaagtacagcagcggccagcgcaacagccgcctcgtcatcagcatcggaggcatccaatcacgccgccgcatctgataccagcgcatcactggcggcgcaaagcagtactgctgccggagcagcagccaccagagcagaagatgccgcaaaacgggcagaagacatcgcggacgtga

SEQ ID NO: 404361 - DNA, 1149 bp, Salmonella enterica
ttgactaaatcggttctttcattttttactggtgtcgggttactcgatatgggtttccgatcagccgattttgacatcgtctggcataatgaaatcaacaccgatttcatcactggttttaagcatggtcatagcaaactgtatggagttaatccacaagacatcaatcttttcgagggctccatagaaacaataagtaaatcaattgtcagagaaaatgtctcgtctggattaatagataataatgattttggtatcattggcggccctccatgcccagatttctctaatgcaggtaaaaacttaggtaaggatggtgaaaatgggaaacttacaggtatctttgtagatatcataaatgattttcaccctaaatttttcacattggaaaatgttaaaggtttaattcagaaaagcacacacagaaaatatcttgctgacttgttatataaactatctaaagaatattgctttgatattaaggtcctaaactcattagattatggcattcctcaagatcgagaaaggctatttgttgttggtttcaaaaaaagcttcatttttgacaaactgggttatgcaagcttgattgaaattgagaaaattaatttacaactaataattgagctaaagaaagaaaaaagctcaagtttagaaaagtttaactggtttagctggcctgtaaatcctctttatacaaatgcaaggggaagatttccttggccccaaagaacaccttatggcggaaatccaaccaaacctgatgatttacctaatagcttgcttgtacaagatgtcgttttcacctcatctatagaaaaccttccaaatcaaaacgacgtttttaaagcgtatagcgataaattcaatataattgatgagggcgatataacaggcaagagttttaaacggttacacagatggcgattcagccctactgcagcttatggtaacaatgaggttcatttacacccctataaaccaagacggttgtcagtacgtgaagtcatgcggatacaatctgtgccggataaatttgagttacctgataacatgactctttcaagcaaatttaagactatcagtaacggtgtgcctgttgttcttgcaaaagaaatagcacaaagtatatctaacttcattgagtaa

SEQ ID NO: 404362 - DNA, 186 bp, Salmonella enterica
atgtttcagaattcaggcgaagtgattatgtacttcggttgttttttattttccttaccatttactcttgttttaattagaaaagtgctttttttgttgggctacaatataattttcttcatagccacaaagcaggtgtcgcttttggattgctacttatatatggacttatcatcgcatacatag

SEQ ID NO: 404363 - DNA, 510 bp, Salmonella enterica
atgatgatccccatggtgctgggcagcatgggaatgaagcggattgtagtgcagatagttaaccgttttggctatcgtcgggttctggtggcgactacgctcggactggcattggttagcctgttgtttatgtcggtcgcgctgctcggctggtattatctcctgccgctggtactgcttttgcagggaatggtgaactcggcgcgcttttcttccatgaacaccttaacgctaaaagaccttcccgatacgctggccagcagcggcaatagcttattatcgatgattatgcagctctcgatgagtatcggcgtcactattgccggaatgctgctgggtatgtttggccaacagcatatcgggatagacagtagcgccacacatcacgtctttatgtacacctggttatgtatggcggttattatcgcgctaccagcgataatttttgcccgcgtgccgaacgatacacagcaaaacatggtcatttcacggcgtaaaaggagcctgtaa

SEQ ID NO: 404364 - DNA, 528 bp, Salmonella enterica
atgcgttctttagtcatgtcaaatctgtctgttccgactcgctgtctcattgaatggcaactcctgacgctcgtgcgcccttctgaggcttccggtgctcggtgggcggagatcgatctctatgcaaagctctggactattccagccgaacggatgaaagcgaagcgcgagcatattgtaccgctatctcctcaggcattagagattctggaagtcatgaagccaatcagtgctcatcgtgaacatgtttttccgagtcggaatgacccaaagcaaccaatgaatagccagacggcaaatgctgctttaaaaaggattggatatggaggtaaattagtagcacatggtttgcgcgcaatagcgagtactgcaatgaatgaagcaggtttgaattcagatgtgattgaagcagcacttgctcacattgagaaaaatgaggtccggagagcatacaatcgctcaacttaccttgaaagaagaaaggaacttatgagttggtggggtaatttcatagtgaatagcaagtaa

SEQ ID NO: 404365 - DNA, 432 bp, Salmonella enterica
atgacaattgcaatgttgctcacgcttcatcttatctgtgttgcgctctccgtcagtttgtttgtcgctcgttactggtggcgctattgcggccatgcgttggccgccgcgcgctggacacgaatcgtgcctcccgtcatagataccctgttactctggacacgaatcgtgcctcccgtcatagataccctgttactgcttagcggtattgggttaatcgttaaaacgcacatcctgccattcacggagtcgggctcatggctgactgaaaaactgtttggcgttatcatctacatcgttttgggttttattgcgcttgattatcgtcaggcgcgcagccagcaggcgcgttttatcgctttcccgctggcgctggtggtgctgtacatcatcattaaactcgccaccacaaaaataccgttactggggtaa

SEQ ID NO: 404366 - DNA, 396 bp, Salmonella enterica
atgggaagaaattacactccagcggagcagcgagcaatacagaagcgcctgacggaactggtacgaaaacacggtcgtatgacgtttggagagctacggaagatgacggggctaaccatttttaccgcccgtcactacctggaaaaggcggaaagttgcggagaactgtatcaggccgggagaagcggtattttcccttcggaacaggctttccggctttggaaacagaaacgtgaagatgccagaatcacccgctttctcaaaacgccggaaggggtggtgagctcctacgaccggacccgaaacgttatctgtacggagtgccggaacagcgtgacgatgcaacgggtactggcattttatcgggggaatcacctggaggttaaatcagcatga

SEQ ID NO: 404367 - DNA, 552 bp, Salmonella enterica
atgaccattcaactcgccgtagaatcccttgtcattgttacttactctaatgcccctgtaataacaactgagttattggcaaaactatacgaaacggaagaaaagcatatacgacaaaacttcaaacgtaacgaatgtcgttttattgcaggaaaacacttctttaaagtaagtggtagtgagcttgatgatttgcgaacctctcaaagaggtttacaaatttcacccaaaacccgctccctaatcctatggacagaacgcggagcagctcgccacgcaaaaatgctcgaaaccgatcaggcatgggaggtattcgagaagctggaggattgctacttcagccaaaagaatccttcagtgcgagtttcacgccagaaaagttacgacacgcgagttctctgttatcagcaaagcggcgtcactgtttccacaatcccgttgcgggatgatgacattgtcatttcccttgagtcatggctggaactggcgagagccaacggttggtttgttattcgcaaagatcaactggtggaaaaactgatgcagctttag

SEQ ID NO: 404368 - DNA, 795 bp, Salmonella enterica
atgttcatgcacccgcattgccttttcactggtgctcatggcggtaaattccgcctcgctcatggtagtgaaaggactgtcagccggtggccggatggcgtcataaatcgctttccgcgtcgcctcttcgcctttctgaacgaacgcatcattccagtcaccgaacaccggcggcagggcaacaacaccctcacaggcgtctgcggccgcagcggcttttgtctggccggcgccgttaaggtcacggtcggcggcgaggacaatctgacaggccgggtgtttctgacgggcaaggctcgccagagaaaagaggttcacggaggacagcgccaccatgactgtttcgctggtcaggtgatgtacggtgagtgccgtcgcataaccctccgcaatccacaggcgttttcctgcctgtttttttcctccgatgacatgacatgtccctttgacctgaccgcctttcagggtgcgtttgagaccgtcagcattgataagctgaaggttaaccagtgcgccggtatcgtcagacagcgggacaaccacatccccggcgcggaacgtcacgccgccggttttatgcatgactgtcagtaccggacattcccggtcggggaaccccttgcgggtgaggtaggcgttgtcggtggccgggcgcgttttctccagcagtctgacggccagcgcggccgccgctttgcggtcggcatcggtttcagcctctgcggctgccatcacttccggggcaaccggcgacagattgccggtcacggcgttcaccttcccggcagcttctga

SEQ ID NO: 404369 - DNA, 321 bp, Salmonella enterica
atgaaaacgcctctgccgcccgtattgcgtgccgccctctatcgccgcgccgtggcctgtgcctggctgaccctgtgcgagcgtcagcaccgctaccctcacctcaccctcgacgcgctggaaagcgccatcgctaccgatctggagggcttctacctgcgccagcacggcgaggaaaaaggccgccagattgcctgtgcactgctggaagatttaatggaagccggaccactcaaaaccgcgccgtcgctgtcctttctcgggctggccgtgatggatgagctttgcgcccgtcatatcaccgcgccggtactgcactga

SEQ ID NO: 404370 - DNA, 228 bp, Salmonella enterica
atgaaacataccacactcagcgttaaagaactcgaatgcctggagcatcttagcaatgtcggccactttgtcagcgcgatgatgcaggagcaggactgcacctctctgcgccgcgacccggcgcaacagtcgcagcttacctccgtgatttacctgatgaccgcccagctcgacggcgtggtcgagcgctgcaaccagcgctggctgaccggggagggcaatgtatga

SEQ ID NO: 404371 - DNA, 552 bp, Salmonella enterica
atgatgatgcccgttccgcaaaaagcccctttttctggcttgcttcccttcgtcgtttccaggtatagttttcccgctgtcgcaaaatcgacagccgggatttgcagcccgtgtaactcaatggcgacaccagacgcgccatgcgtctttttttacgtcgtagctcagacacacccatttttcgggctgtggtgtttacaccgtggcttctgtcagataatggtggttcgggcggggcagccttcgggctggccggtatccattgaggccggtactgcaaaccctgttcgggccaccacccatgagatttgcagctccggtggtggcgataaccgctactcaatggaggttgcccttatggctacgatcctcaccccgtctcacccgcaatttgtcttcgtgtttgccgctgttcgtcgcgcagaccgtaaaccccgtatctgtatgctccgcgccgttgccggtgacgagcacgccgcacgcctttccctcgttcgcgattacgtcctctcgtttgccggtcgtctgccagtggcggaggtgcgcgcatga

SEQ ID NO: 404372 - DNA, 267 bp, Salmonella enterica
atgcacaccgctttttcttccccgtcttctgcccctgccgcgccgctgatgccggtctctgacaccgttcaggagcgctttattcgcctgcccgaagtgatgcatctgtgcgggctgtcccgctccacgatttacgacctcatcagccgggaggctttcccgaaacaaatctccctcggcgggaaaaacgtggcgtgggcgcagtcggaaatcaccgggtggatggctgaccgtatcgctgaacgcaaccggggatatgacgcatga

SEQ ID NO: 404373 - DNA, 615 bp, Salmonella enterica
atgaaaaatagagggtcaagtataatccattcacttcatctatggattcaaattgctgcgcaaattgtaaccattgttgctgctattgtcgttgggctctgggggtattattcagctatttatgtaaacaaggaaaaggaagtaacagattacaccctggaagaattaaaacagaaaacgactcaaacgccacatattcaggctaaggtggaaccgatagtcgtcaaggaggatagtggattaattttattacaggtaaaggtaagcttgtcgaaccttggtaccaaagaaagcagagttacacttgacgataattcattggctttgatccctgttgagttttccgaaggtaagccaatctttcaaaagccaataaatattctttcaagtcgctatgcaggtaatcttcatcgaatcccccttcaatttgtcgatataggtgctggagaaagttatgaacttacctttgtgcatggcataaacacgacaggcacttacctgattcattttttggctcttaacggtataacaccctcaaaagatgagctctctaccacttacggaattccgtataaatattccgtcggagcagatgagtacattgttgtaaaataa

SEQ ID NO: 404374 - DNA, 189 bp, Salmonella enterica
atgaaagaagggtattactggattcagcataacggtgttgttcaggtggcatactatacgaacgacacagttgatgatctggaatcaggacggcttattgtcggtgtctggcatctgacaaggggcgatgatatctgccataacggtgaagcagaagtactgtcggggccgttacaaccaccagcttag

SEQ ID NO: 404375 - DNA, 150 bp, Salmonella enterica
atggaaaacaatttctggcttaaattctgcaatagaattgcgcagcttttcaaaatcacgaatatcgccaatatgagattccataagatcattaagatgcaagctggttactggatggtgagaatcatcctcatgaggcacattatctga

SEQ ID NO: 404376 - DNA, 126 bp, Salmonella enterica
atgaataatagcattctcatcatctttagtaatttcaccatctggcctataaaatttcaggccattacggtcaaaagggatatgactgccagtaaccatgattgcaggtactttattggaaattga

SEQ ID NO: 404377 - DNA, 183 bp, Salmonella enterica
atggtaaagcgttactacaactcatcatggagtctaaaaaaatcaacagtgagaatcttatctcgctgttacaaaatgcacaaaaagaacagcaatggctcgaagataaagaaccatgatctactcctgaaaaatatttatgagttgcaaggaattggttttactcgctttaatgtgttgtga

SEQ ID NO: 404378 - DNA, 738 bp, Salmonella enterica
atgaccgataccaccgccattcccgactacctgaaacccgcgatggaacgccttgaggttactcggtcagcgcatcttgccagtgccagtcgtatggatgaaaccacggcggccatcagccaggtaaaagcacaaaaaaacgaactggagcaggaaaacggcaatgattccggtgcatggcgtactgcctttcgtgccggaggtgcagttattaccgacgagctgaaacaacgccatctggcgcgcgtggcatgtcgggaactggtgcaggaatgtgacaatatggctgaagtgctgtcttttgagctggacaaccttaagggagcctgcgaccggacggccagaacgtatcgtcaggcacatcacagcgtcctcagccagtacgcagagcatgaattaaatgctgccctgcgtgacacctgtagtgcgctggtcagggcaatgaaactcaatatactggtccttaataatccgcttgctaatacgaccgggcacgagggatatatcgaaccggaaaaggttgtgatgcagcaggtgaaagcgtggcttgaacaggccgtgaagggctacagtatccgtgtgaccaatgagccggtgctgtttaaaacagggctgtcggcctccacgctgccgcatatggagcatgatgttgcggccacgcccgttcagcgtaaggtctggcaggaaaaaatgagggcgcgtgaagccagcctgaaagcaagggggttactgtcatga

SEQ ID NO: 404379 - DNA, 711 bp, Salmonella enterica
atgcacacccacaccctaaaacgcgtacttgggttcactatcgtcattctgctgttactggcgctgtttatctggggaatcggtctggagacgctgaaagcgcgtcaggtcgatctgctgtatctcggacaacggcatttgatgctggtatttacgtccatgttttttgctttactggtcggtatcccgagtgggattttactcagccgtcctgcggcaaagggatttgctgaatatgtcatgcaaatctttaatgttggtaataccttgccgccgctggccgtcctggccttagcgatggtgattatcgggatcggcgatacgcccgccattgtcgcgctatttctggcctcccttctgcctatcgtccgcaatacctatgcgggcctctgttccgttcccgcctcactgattgaagcggcgaacgggattgggatgacaaaatggcagcggcttcgccaggtagagctacctaatgcgtggccagtgatgctgtccggtattcgcatcgcgaccgccatcaatgtcggcaccgcgccgctggcctttctgatcggcgccagcagctacggcgagctgattttcccgggaatttatctcaacgattttccgacgttgatcctcggcgcaacggccacggcgttattcgcgctgattcttgacactctgcttgcctggtttgggcgacgccttagccctcataccgtctga

SEQ ID NO: 404380 - DNA, 393 bp, Salmonella enterica
  misc_feature (369)..(378): n is a, c, g, or t
atgaacgatacactttctaatacccagcaatcacgtgagacaatagaatgtgatgttcttattgtgggagcaggacccgccggattatctgcagctcttaaacttaaattacaggcaaatgacgcaggaaaagaactgtccattatcgtccttgataaaggagctgagcctggttctcatattctcagtggggcagtcatggatccccgagcgctgaatgaactaattcctgattggcaggaaagaggcgcacccattaaacagcctgttactcaggataaattactgttactgacgaatgaaaaatgtattaatttgccggatgcattgattcctgataattttcgcaaccatggaaactttatcgtnnnnnnnnnncgtaagcctcggtaa

SEQ ID NO: 404381 - DNA, 243 bp, Salmonella enterica
atgaaagaagggtattactggattcagcataacggtgttgttcaggtggcatactatacgaacgacacagttgatgatctggaatcaggacggcttattgtcggtgtctggcatctgacaagaggcgatgatatctgccataacggtgaagcagaagtaatatcacccgtgaataataagattatccttgctattgacttccttcatttccagcatagcttacgcttcatcatcattgaataa

SEQ ID NO: 404382 - DNA, 528 bp, Salmonella enterica; identical to SEQ ID NO: 404364

SEQ ID NO: 404383 - DNA, 15639 bp, Salmonella enterica
gtgtctggtcataagggcttaacgccgaccttgacgccttcaattgttggtacggcggaagagaatgctaaggttgacatttatgtagataataaactggttgccagcgttgatgtcgataaagatggaaactggagttatgaatttaaagataatgaattatctgagggcgaaaatagtataaaagtcgttgccgtagataaagcaggtaataaaaacgaaacgacggatagtatcataaccgacaccattgctccggaaaagccgacgattgagctggatgatagtagtgattccggcattaaaaatgacaacattacaaatagcaccctgccaacatttattggtgtggcggaacccggttctacagtctctatttatcttggacttaaacatcttggtgaggtcattgttgctaaagatgggacatggagctatacgcttactacgccgctcaaggatggcgaatacaatataacagcaactgctactgatattgccgggcatacctcagcgacggcaaatctgccttttactattgatacacgtatcagctatttcagcgctgagattgaaacgactgatgatagcggtattgtcggagataacgttactaacaatactcgcccaacctttacaggtaaaactgagccaaatgctattatcagtgtcataaatagtgagactggcgaagaggttatttttaaagcgaatgacaagggcgaatggacgttcaatttcacttccgactcagtggaaggggttaacaatcttacgttcaccgttgaagatgtcgctggcaacaaaaaggatttttcctttagttacgttatcgatactgttgcccctgtacctccgacggtttctttggaggattttgttgttttaccgaatggtataattttatcagggaatgatttaccggctttagtcggtacggcagagccaaagtctaccatcttattgatgcgagatggtaaattatatgacagcattgaggttgactcaaacgggacctggaattatcagtttagtaataaatttcttcagggcgcctatgatattgaaatcatttctcaagatgccgccggtaataaatcctctactgttaaatattcttttactattcaaactgaagttgtacctccaaaagcggaactcgatgccagtgatgattccggtgcaaaaggcgactggattaccaataaacataatgctctgacattactgggaacagctgataggtttgctaccgtaaatatccttatcgatggtaaaacgataggcgtgacgactgcggatgcagacggtaactggaattttgatatttcccgaaatctgtctgacaatgtttataagattacggttgaatccatcgatcctttaggaagaacgtcatctgtagattatcagcttaccattgatagctttacgccgatccctactgttatgttgcatgatagcgctgattctggcgttaaaggcgatatgattactaaaattaatacgccgttgtttaccgggatggctgaagctaatgctaaggtttccatctatgttgacggtgtgttaagtggcgaggctattgctggcgatgatggtgtatggaattttcaatttaccacagcgttatccgatggctcgcatgacgtaacggtaaaagtagaagatattgccggtaatactgcctcctcatcagcgtataatttccaaatcgtaacgcaaacgcaaaaaccaacaatagagttggtcaacgatacgggggttgataatacagaccatattattaatgaaaagaatcctgcactgacaggaaccgctgcaccctattcaacggttaaactctatattgatggcgcactgatcgctgaggtcagaacaaataaagatggcagatgggagtataccctgaaagccgatcaaggtttggttgatggcgatcatagaataaccgcttcagttgaagatatcgctggcaacattgcccattcggatcctttcttaattagcgtcgatactgctatttcaataccgatagtttcattgagcccggattcagattcgggaattgcagatgataatttaacgaatatcgttaaacctaccttgcacctaaaagatattgatccggacattatcagtgttcaggtatgggatgccatgtctgatacgcagatcggtgttgccacgcaacaacctgatggttcatgggcctatacctttacttcagatttaacggaaggcttgcatcaggtttatgtcaaggttgaggacattgcgggtaataaagcgaacagtgcggtattcgattttactatcgataccacagtatcaacgccggtgatttccctgctttctaaggatgatacgggggttacaggcgataacctgaccaatatcaataagccaggttttgctatttccggtgttgatgctgatgcgcatcgggtcgtcgtacaggtgatgcacaatggcgtgagcgaagagatcgaactttcccacctcaatggtagttggttatttataccagggaatacgtgggcggatggcagctacacgttaacggtgaaagtagaagataaggcaggaaataccaactactcagcgccgctgacggtcgttatcgatacccaaatcgccattgatggggtggaactggtcaacgatagcggcgtgaaaggcgataatatgaccaacgacgaccgtccccactttcgtgtgacggtacctacggatgtcaatgaagtccgtctgagcattgacggtggtaattcgtgggttcaggcaactccgggcgtggcaggaagctgggagtatatctggccgacagacctggcagatggtcaatacacgctaacggtggaagcgactgataaagcaggcaatacagtgacgaagaccatcgatttcgcggtggataccacgctgtcagtgccggtcatcgtactggatagcgcggacgacaccggcatccagggcgataacatgacgaatagcacccagccgacatttgccctgcagcatattgatgatgatgccgttcgcgttacggtcagcgtggagcatggcggcgtcaccaccacatttgacgccacgaaaggcacaggcggatggagctttacgccgacaggggcgtgggcggatggtgattataccctgagtgtgtcagtcgaagataaagcggggaacaccagccattctgcatcgttgacggtgacggtggacacgcaaatcgccattaataacattgaactggtcaatgacagcggtattcccaacgataatctgactaataacgtgcgtccgcacttccaggtgacggtaccgacggatgtcaacgtggtgcgcctgagcattgacggcggcaagacgtggttcaacgctacccagagcgcgacgccgggcgcctgggattatatctggccggatgatgtggccgacggaggctataccctgacggtagaagcgaccgacaaggcgggaaacaagacgacgcaggaacttgatttcaccatcgataccactctgtctgtgccgaccctctcgctggacagcgcagatgacagcggcatcgcgggcgataatatcaccaatgttaaaacgccgggctttaccctcaacaatattgataccgatgtcagccgggtgatagtggaggtaatgcacaatggcattaaacaggaggtgccactggttcagaccggcggacagtggcgctttgcgccgaccagcgactgggcggacggcgactatatcctgacggtgaaggtagaagatagggccggaaatgtgaagcagtccgcgccgttgacggtgacagtggacacgcatatcgccattgaccgtattgaactggttaacgacagcggtatccccggcgataatctgaccaatgaagcgcgcccgcactttcaggtgacagtaccggcggatgttaacggtgtaagactgagtattgatggcggcaaaacgtggtttgacgccacgcagagcgcgacgtcgggcgtctgggattacacctggctgacgaatgtggctaacggccctcacaccctgatggtggaagcgtccgacaaggcgggaaacaaaacgacgcagaaactggacttcaccatcgataccattctgtcagaaccgacgattaccctggacagcgcggatgatagcgccgctggcgataacatcaccaacgttaagatgccaggctttaccctcggtaatatcgacgccgacgtgaccaaagtggtggtgacggtggcgcatgatggtaagaaccaacagatagagttgattaagaacggcggtgtgtggcgctttacgccgggcgcagcctggaccgatggcgactatacgctgacggtaaaggtagaagataaggcgggtaatacaaattattctgcgccgctgacggtgactatcgatacgcaaacgtctattgatcgcattgagcttcttaatgacacgggtattgtcggggataacctgaccaatgaagcacgtccacagtttcatattacggtaccgacggacgtgaactctgtgcaactgagtcttgatggcggcatcaactgggttaacgcaacgctgacgtctgacggcgtttgggagtatatatggccgacagatctggtcgaaaatacgtataccctgacagtgaaagcaaccgatgttgcaggcaacacggcgacggaaacgctcaattttatcattgataccacattgtcgacaccgaccatcacgctggatagcgcagatgatagcggcaccgccaacgataataagactaacgttaaaacgccgggttttattatcggcggtattgattctgacgtgactcaggtcgtcgtgcaggtgatgcgcgatggtcacagcgaggaggtggagctgacgcagactaacgggcagtggcgttttgtacccggcagcgcgtggactgatggcgactatacgctgacggtaacggtgaaagatgaggcgggtaatattcgccactcagcgccgttgacggtcaccatcgatacgcaaatcaccattgaccatattgaactggtcaatgacagcggtattcccgacgataatctgactaataatgtgcgtccgcacttccaggtgacggtaccgacggatgtcaacgtggtgcgcctgagcattgacggcggcaagacgtggttcaacgctacccagagcgcgacgccgggcgtctgggattatacctggctggctgatgtgggagagggtaagcataccctgacagtggaggcgaccgacaaggcgggaaacaaaacgacgcagcaactggacttcatcatcgataccctactgtcagaaccgactatcgtgctggacagcacggacgacagcggaacaaaaggcgataacctgaccaacgtaaataagccgacgtttttactgggcaatattgacgcagacgcgcggtatgtcacggttgaggtacagcatggcggcacgaaagaggtgctgacggccaccaaagacgcgaccggcaactggagcgtaacaccgaccggcacatgggcagatggcgactatacgctgacagtgagggtggaagatgaggcggggaacgaaaaacactcagcgccgctgacggtcgttatcgatacccaaatcgccattgatggggtggaactggtcaacgatagcggcgtgaaaggcgataatatgaccaacgacgaccgtccccactttcgtgtgacggtacctacggatgtcaatgaagtccgtctgagcattgacggtggtaattcgtgggttcaggcaactccgggcgtggcaggaagctgggagtatatctggccgacagacctggcagatggtcaatacacgctaacggtggaagcgactgataaagcaggcaatacagtgacgaagaccatcgatttcgcggtggataccacgctgtcagtgccggtcatcgtactggatagcgcggacgacaccggcatccagggcgataacatgacgaatagcacccagccgacatttgccctgcagcatattgatgatgatgccgttcgcgttacggtcagcgtggagcatggcggcgtcaccaccacatttgacgccacgaaaggcacaggcggatggagctttacgccgacaggggcgtgggcggatggtgattataccctgagtgtgtcagtcgaagataaagcggggaacaccagccattctgcatcgttgacggtgacggtggacacgcaaatcgccattaataacattgaactggtcaatgacagcggtattcccaacgataatctgactaataacgtgcgtccgcacttccaggtgacggtaccgacggatgtcaacgtggtgcgcctgagcattgacggcggcaagacgtggttcaacgctacccagagcgcgacgccgggcgtctgggattatacctggctggctgatgtgggagaggggaagcataccctgacagtggaggcgaccgacaaggcgggaaaccagacgacgcagaaactggacttcatcatcgataccatgctgtcagaaccgactatcgtgctggacagcacggacgacagcggaacaaaaggcgataacctgaccaacgcgaataagccgacatttatactgggcaatattgacgcagacgcgcggtatgtcacggttgaggtgcagtatggcggcacgaaagaagtgctgacggccaccaaaggcgcgaccggcatctggagcgtgacaccgaccggcacatgggcagatggcgactatacgctgacggtgagggtggaggatgatgcggggaacgtaaaatactcagcgccgctgacggtcacggttgatacccaaatcaccattgatgttattgaactggttaatgataacggtattcccggcgacaacctgaccaatgacgttcgtccacacttccgcgtcacggtgccaggggatgtcaacgaggtacgtctgagtatcgacggcggtaatacgtgggttcgtgcaacacagggcacggcagggatctgggattacacctggccgaaagatgtgaccgacgggctacataccctgacggtagaagcgaccgataaggcgggaaataagacgacgcagacgctcgattttaccattgatacccggctgtcaacgcctaccatcactatggatagcagggacgatacaggtgccattggcgatcatattacgagcgtcaaaagaccgggctttaccattggcaatattgactccgatgcgcaatcggtcattttgcggatcacacagggcggcaatagccaggaagtgacactaacccaggttggaggacagtggcgctttacgccagatgctgactgggcggacggtagctatacactgacggtagaggtaacggataacgcaggaaacgttcgtcagtccacgccgctgatagtgacggtagatacgcaaaccagcattactgatattacattggtcaatgatcatggcgtgcctgatgacaatctaactaacagcacccgtccgcagtttgagatcacggtgccggcggatgtgaattctgtgcaactgagcattgatgggggcgcaaactgggtgagcgcggcgcagggtattgaaggcgtctggggctatacctggccaacggatatgggcgatggaaaacacaccctaaccgtcatggtcaccgacagagcgggcaatacggcgacgcaaacgcttgaatttttcatcgacacccggttgtcgacgccgactattgcgctggatagcacggatgataccggtacgcctggcgatgatatgaccaatcgcacccgaccgacctttattctgcagaatatcgattcggatgttatcaacgttacagtcagcgtcacgcataatggaacgacaacctcgtttaccgcgacacagggggctggaggctggagctttacaccgccagcgccgtggggcgatggtgattatacgctgacggtgacagtggaggatcgggcgggaaatacgcgtccgtctacgccgctgacggtgacagtggatacgcaaatagccattgatcatattgaattagtcaacgatagcggcgtccctggcgataatgtgacaaaacatgtgcgtccgcagttccagatctcggtaccggatgatgtggaaaaggttcttctgagtattgacggcggcacgacctgggttaccgcaatcaagagttcgacggctggcatttgggattacacctggccgacggatatgccagagggacagcataccctgaccgtggaagtgactgacggtgcgggtaataagatgacggagacgctcaatttcactatcgacatcacgttgatgacgccaaccattgagctggcgcccgatcaggataccggacagaataagaacgataatctgaccagcgtcactcagccagtatttgtgttggggagtatcgataaagatgttcgacacgtggaattgagtattgagcataacggcacgtttaaaacggtggtactcaccgaatcagccgacggctggcgctatcgaccggattctgctttggcggacggtagctacacattcaccgtgacggtaacagatgtggcaggcaaccagcaaacatccgcgcctttaaaggtgacgatagacggtacgttgactacgccggtgattgaactggcagctggcgaagatagcggtactgttggcgatcgcctcaccaatcacgatcggcctgtgttcgacatacgccaggttgattctgacgttacgcgcgtgatggtcaaagtaacttacaacggtaaaacgcacgaggaagcggcggtattcaccaatggtcaatggcgctttacgccttctgcgagctgggctgatggctcatatcagttagccgttgtggtggaagatctggcggggaatgtaaaagagtctgcgccgtttgaggtgcgtattgacaccacgacaaccattaacaatatcgtattgcttaatgatactggcgtgcagaatgatcaattaacgaatgttgccaaaccgtcattcagaattgacgttcccggtgatgtcgtccaggtacgcgtaaccctggatggtggcgctaactggaatgtgatacgcaaaaatgccgacggacagtggatttttgacagcccgaatactctggttgacggcacatatacccttcgcgtagaggccacggatgaggcaggtaatattgcgaataaagatttagtatttaatatcgatactaatatacaggttccgactattgctttagacgcaggacaagataccggagcgaatacagccgataatatcactaatatttcacgacccacctttacgattggtaatgttgaccccgatgttatcaaagtcgtggtgacgattgatggtcatgattataacgcgactaaggttggggctggttggcaatttacgccaggcaatgccattccggatggttcttataatattaccgttacggttgaagataaggccggaaataccgcgacatcgaaaccattacctgttgtgatagatacgacggctgaaattgaaagcgtcacgttggttacagatagcggtgatagcgatgtagataacattaccaaagtcgacaagccgcagtttagtattgttaccgctgatgatattacccatgtgcgcgttaaaatcgataacgccgctaattggattgaactcacaaaaggaggggatggccgctggatatttaatgtcggttcggcattacctgatgggcaacacactctcttggttgatgtgactgatatcgccggcaacgttgcgcaagaaacgctgcagtttacgattgatacgactctgcgagagccgacaattgtactcgatcccacccatgatactggtgatgatactaatgataatcttaccaggattaacaaaccggtgtttattatcggtaatgtcgataatgatgtatcacacattgtggttcatattgatggtcgggattacaccattgaaaaaacaggggggaatttaacctttacgccggatcaaccgctgtctgacggtcagcatacgatctctgttaccgtaacggatattgctggtaataccaaaacatcggccgaactgaagattgaaatcgacacgcaggttcagattgacagtgttacgttaacaacagatagcggcgtcaacgatcacgataatgtcaccaatgctacccgtccctcttttgaaattgcaacgcctgatgatgtgacatcggtgctggtttctttcgatggcgtaaactggacgcccatcagtaaaaatgcggccgggcagtgggaatttactgcaggtagcgcattgcctgatggtcattatactctccatgtccaggcgacggatcgggcagggaatacggcaaattccacgctgggcttcaccgtggatacgcagattgacggcctgagcgtcgtgatgctggacgacgccggaaaggattctacggatggtattacgaatattacctctccacgttttgaaatttcagccagagaaccgctgcagagcgtgacggtaattttaaacgggaaatccagcacactgactcagggggcaggtaataaatggctgtttacccctgatacaccgttagtggatggaacttacaaaatagaaatagtggctgaagatatcgcaggtaataaaattagcaaagaggtatcattcacaatagacactattgtttctgatcccagtattgatttgctggatgcggatgatactggcgaaagcgctgttgataatattacgagtgtcactaaaccacgtttcgttattggcaatgtacccgccgatattgatactgttgtaatcagaattaacggcgtttcttatccggttacggcaaatggcaataacctctgggaattccaagttcccgttgcgttaaacgatggcgtatatgaagccgttgttgtcttcagagatattgccggaaatacttctgaaactaagctgccctttaccattgataccacgacaagcgtcagtgtcagaatggagccagcgtctgataccggaaattccaatagcgataaccttacgaataagcaaaatcccaaattcgaaggtactgcagagcccaatgcgaaactggtgattaccattgttgacgataagtcaggtcgggaggttttaaaacaaacgattacggttggcgctgatggcaactggagtgtgacgccgaatatactgccggatggcatgtataccatcaacgtcgtcgcaacagatgtcgcgggaaatactgcgcaaacgcaggaaagattcactatcgatacggttacgatcgatcccaccattcgcctttcggatccatctattgatgatcagcatgaagcaaccagcctgcgtcctgagttcaaagggtttgccgaagcgttctcgacgattatgattcagtgggatgggaaagtggtcggctccgcaaacgccaatgcgaatggcgaatggagttggacgccgccatcagtattagcgccaggctcctatgttgtgagcattgttgccaaagataaagcgggtaatgaatcgtcgcaggtcgactttcctgtagtaatacctgttattgatgtcacgcctccaaccataaagctcagcgaggagagcgatagtggtgccttaggagactttaccacgaataataaaacgccgaccctgattgggagcacgttacctaatacgattgtgagtatttatgtggatggcgtgaaggtcggcgaggcgacagcggatacagcgggtcgatatactttccagttatcggaaatgaaagatggccattatgtcgtccaggtgggtatcgtcaaccctcgcgataatagcgaactgcgttctaccgccgttgatctcactatcgataccgaggttgctgaactggtatggaatatatctggaatgcatgagggcggatatatcaacacggtgacgccggagattggcggcaccagtgagccaaacagcaaaatcactatctttgtgaatggcgttgaaaaagcgattgcttatacgacaggcgcaggacactggggcgtagtattacccgctttgggtaatgacggtaattatgaattaacgtttaaagttgaagacgttgccggcaatatcagagagtttggtccgcagaatgtgatactggatacggtaatttcgccgttaaccgtggtattacgcgaagctgatgacagtggcaaagttggcgactggatcaccaataaatctcatgtcaccatcgatggtactgccgaagccggaagtactttaaccatcaggaatccgcagggagtggttattgctaccctggtggtaggcaatgatggtcgatggagcgcagaattagatctgcgtgaaggtagtaatgcctttgtcgtggtatcggaagataaagcgggcaacagccaacaaaaagagattctgatagaacatgatacgcagattgaaatcagcgatatttcattaagtcgggatactaatagcggtgataaatatgatctgattaccaataataagtctccggtactggttgccatgaccgatcccggcgcgacggtacaggtttatattaatggtgtgttacaaggcacagtagaggcgagttcgtcaggtaatattagctataccatgccggcaaatagcgccgacggcgagtatcaggtgcaatttgttgctacggatactgctggtaaccgggttgagtctgcgattacaaccgtgacaatcgattctcaaattgctgtctttgacattgatgaagattcattaccggccctctctaataaccgggcgttgtcagtctcaggtgtcggggaggctggttctcaggtcagcatctttgtcgatggtaaattagtcaacgttgttatggttgaggctgatggcacatggcgcgcgccgatactgctgcaagatgatggtacgtttaatattcatttcagcattactgacgttgctggcaacactgaagtgagcaaggattatagcgtggatgtcgattcatcaaccgacttcccaacgctcaaccttgaagatgcgagcaactctggttcacttgacgatctgattactagtcacaacaagcctgtgttagttggcaccgcagaagcgggagccacaatccatatttatgtggatgaaaagatcgtggcaaatgttcttgtgcttgaagatggaacctggtcctatcagtttgataatgcgttaaaagatggtgaatattctatccgagtggttgccgaagacccggcaggtaatacagcagaatcgcctcgcttactcgtcacgatagataccagtacgtttatcgataatcctgttatgatggcaggttctgataacggtattttcagtaatgatagtataacgagtcaaacccggcctgcgtttagtatttatggagaaatgaaccagagtgttcagattttcattgatggggtgttagtcgatacgatcacggtgaccgacagaaatcaagtttatcgacctgagtcaccgttgggcgatggttcccatagcatttattatgttatcaccgataaagcaggcaacacggctacctcgaaaacgctaaactttactatcgataccttaaatacgacgcctgtcgctattgattctatcggcggacaaacgttagcagagatgaccggtagtgatggcaaaatatatataacggacacgacacgtaacttattgtttagtggcagtgccgagcccaatagcaaaatagaaatcatcattaatggcttaaatgtgggggaagtttgggttaatgacaaaggccactggcagatgccggtgaacccgctttatttcacagaaggccagctggatatcactgttaaatctacggaccgtgctggtaacgtaaatcaggaaaagtattccatttgggtcgatacgcatatccaggtatttaccagcgagcttgatgacaataaatcatcatcgaaaacggactggtggagtaatagctccactattaccatgagaggtatgggggaaattggcgctacggtatcattaatcgtggcaggggtcacgctggcaaccgctgtcgttgcggctaatgggcagtgggagttatcgaccgatcagcttccggaagggaaatacgatatcacgttgagtattgaggataacgcaggcaaccgtaaggaagaggtacatgaaatatttattgatcgaacgccgccaaacgctccggtcgtaacttattcagatattgtcaacgatctaattattatgcaggggacggcggaagccaaatctcagctaataataaccgatagtaatgggaatacttatacgttaaccgttcctgataatggtaaatggagtatggcgatcccgtatccatcggaagggaagtttaccattacgagtgtggatgcgattggtaaccggagtgatgatgtccctctcgatatcatgaaagaggttcccgttatttcattatctccagactcagacagtggtacggtgggcgataatattacgcgagataagcaacctacctttattatcgggaatctggaaagcgatgttgtggtcgttcaggtcgatatcaatgggaccgtatataatgctgaaaaaaatgccgatggcgtttggttctttacgccaggtacaccgttagctgatggttcctatacgatatcggtaatcgcaagcgatgccgcgggtaatcagaaaaactcgttacccattaccgttacgatcgacagtacgctgaccgtgccggagattgcgctggcagcaggtgaagacaatggcgcttcagacagcgataacgtgacgaatcacacccagcctaagttcacgctgcagcatattgatgctgatgtgaccggggtgaccgtaaacgtgacgcataatggcgtgacagacatctatcaggcgacgcaaggcgcggatggctggaccttcacgccgccagccgcctggaatgacggtacctacacgctgagcgtgacggtggtggatcgcgcggggaactcacagcaatctgcttcgctagcggtgacggttgactcaacggtgacggtaacagcggatagccagcataacgatgcgagcgatgacgccacggcaacagcggttactccaccggagtctgaaacagtgaatgccgaaagcgctacgcatcttcgtacagtgccgtctgtggcggaagaaagcgtggtgaaggagacagcctatagtattacattgttaaacgctgactctggggatgaaatagatcgttcaattagtcagacaccttcttttgaaatatcagtacctgagaatattgttaatgtcagtgttatgtttgaaggagaagagtttactctgccgataactaaccagaaagcaatattcgaagttccgctatctttggaagatggtgaatatactatggacgtgaaattcattgataaggacgatgatttcctgattaaggagaaaacattctcagtcgatcactcctcggcggatattgtgaacgcaatgaatgcaagaggaaaggccgaggatgatattaatgattccccttccacgagttctgtagggcacaacaataacggcgctattgatgttttcgccgttaatgaagttacgctacctgtagataatcaagaagaacacgcataa

SEQ ID NO: 404384 - DNA, 156 bp, Salmonella enterica; identical to SEQ ID NO: 374614

SEQ ID NO: 404385 - DNA, 651 bp, Salmonella enterica
atggccgctgatatctgcatttttcgcagtaagacgaccgtccggcgtcagggaaaatgccggaggattccctccactggtaatggtcggcgcgctcaggtatttcaggaacacctcgttcatgattatctggtcgccctgcatgacaaatccgggggtctcgtttccgtttgccgggttaatataagcaatgcgatccgccgccaccaggaactggcttatcttcccgtcaggcgtgtcttccatgctcagtccaagtccggccacaaaatatttgccgtctttggtctgctctattttgacgccccacatggcattccatttattattagcgtcctgccattccttcgaaaactgctgcagtttgctggcgttatcctccgtcagatctactttttccagcagctccttacccaggtgactttcagttatctgccctttgaaaaaatccagatagcctgcggcatcgttgctggcctgcccggtcgcctccacgaatgcggatttaccgacctgatttaccgcccggatataaaaatagtaatctctgccgggcctgatattcacgctggccgctatccagtacagcgccgttcccagatatcgtgcggcgttttccacctgatggatatccgtaatctgcgcgtctga

SEQ ID NO: 404386 - DNA, 267 bp, Salmonella enterica
atgggtggcaaaatacctaactaccaaatcgtttatagagacgagacactcaattatttcaagcctggaggatatgttttctttcaaaggcttaaggagtatggcggtggttattggttaggaaaaatttacgaggatgggttcgagtttgtgcttgaaaggccaacctcattaagtgagggaattaagcatttacttgttttaaaaagcgttgaagatgggtatctggaatttgtagatgatatcgacaacttcaaacttcaatga

SEQ ID NO: 404387 - DNA, 1044 bp, Salmonella enterica
atgtctgataaagaaagcaaagaaccaacgggaaagtccaaaggtggtgtggcaagggctaatgctctttctgcagaagaaaggtctgctattgcaagaaaagccgcagcggctaggtggggtggcgatggtgaggtggaaattgctaaaagatctggcgacattgtcattggagacttaaagatacaatgcgccgtgcttgaggatgggacaagggttctgtcagagagagctatcactaaagccttcggcgggaagcgtggaggctcccactggaagaggatgaaagagaatccagatggcgcctatcttcctgttttcttgtcagctaaaaacattaagccattcattaataatgaattatccgaaggtctatcccggcgccgtcttttcaaaataaataaaggagcggcgccagcttacggcattgaagcatctttgctcccaaagatatgcaatgtttatttgaagatgagagatcagggtgatgcccttcagtcatctcagatacctatttctgttcaggcagacattatcatgcgcggtcttgcagaggttggtattgtagcgctggtagacgaagctactggacatatcgatgaaaagagacaagatgaatatcgaattctctttcaagagttcatcaaagagcaggtcagagaatatgagaaggaatttccgaagcagttcacggatggcctttatcgactttacggacttacgcagaaaaaagcaggtcggcaccctcagtttttcggtaagtttacgaggaagtatatctacgagccattagcatcaagtaaaggcgccatccttgagatgctagatgaaaaaaaccctgtcgtttatgcgaatggcggtagaagatataagatgtttcagttcctaaccgatagcatcggtgttccgatgtttagggcgcacctttggcaggtagttggcatcctttcaagctcaagaaataaagctgagtttgacagagcattcaaaagagcctttccatcgcccgggactcaatttgagttgctagatgaagatgagtaa

SEQ ID NO: 404388 - DNA, 585 bp, Salmonella enterica
atggaatttaagatgagtgataaagcacagactattaaaatttataatcttcgctcagacacacatgaatttattggtgcaggtgatgcctatatcccacctcacaccggattacctgcaaactgtacgacgaaaccagcacctgaaacagaagacggttttgtcgctatttttgatttagaaaatggcaagtggactgtttgtgaggatcatcgaggcgaggtcgtgtatgatattaaaaccggaaatgaaatttttattacatcattaggcgcttacccggcagaaactacgacaacacctccagcaaatagttggcaaaaatgggatggggaagcatggatagatgatgctgtagcgaagcattccgcaacagttagtgaggctgcatatataaaaaagaaccaacaaaataaagccaatagtattatcgatactttacaggatgcaattgattataagatggcaactgataacgaaaaagaattactggttgaatggaaaaaataccgagtattgctaaatcgcattaatccagaagatgccctaaacattgactggccagtagaaccagccagccagtaa

SEQ ID NO: 404389 - DNA, 765 bp, Salmonella enterica
gtgtctgtgtccaaacctgactcagttgctgattttcccacctatccggatggcagcaagctgtacagctatggatatctgtttgttgagaaaatcggtgaagtctggtttcagcactattacgcgcatatgggcgctaacgcaaagcgtcaggactggagaactgtaccgaataccagccgcccgtggattgttgactacaacacagcaaataaaccatcagccggtgatgtcggtgcattgccgattacagggggacggcttaacggtccgctgggtattggtactgacaatgcgctgggcggtaattcgattgtgctcggtgataacgacacaggaattaagcaaaacggagatggcgtgctggatatttacgcgaactccgcacatgtactccgctttatcagtagcctcgtggagagcatggtttccctgaaagtaaacggaaacgctgtagccacgggcgaagtgcaggcaggaaatggttcatcgcgcatgactaataacggggatattttcggttcggtctggaacggctggctaagtatacatctgaataataatctcgtcgcagatgttcagttaggggcgggtacttcagtttccacgtgggataaggcagggtcatggcctaatacccccggatatgtagttacctccgtctggaaagatgcaaacggcattaatatcgacggtattgattatgcacctttacaaaaaagagtcgggaatcagtggtataccgtacaaggggggacggcataa

SEQ ID NO: 404390 - DNA, 216 bp, Salmonella enterica
atgactaacaaagcaatacaaaaagctgttgccattgcaggaagccagcaaaaactcgcctctttgtgtggagttaagcagccaactgtatggcgttggttacatggtggcggcattgacgctaagtatgtggcagcaatcgtaaaagctacaggaggaagaattaaagccagagaacttcgtcctgatttagccgacttactggcagcaagttaa

SEQ ID NO: 404391 - DNA, 207 bp, Salmonella enterica
gtggttaagtttatgctcgtcgcactcaaatgcgttggcgttggatggattcttctgacgttttttattgttctgcatagctacattcgtcttgtgaatgacggtaaagacccatggtacacgttgtttggcgctgcatttgtctgggtgattatcggtgttatgcctgtcgctgtagcaaaaatggcgtggcgttttgttagttga

SEQ ID NO: 404392 - DNA, 219 bp, Salmonella enterica
atgtcagacatctaccaaatcacgctaaccacccaaacaggcgaaaccttcacgggcaagatgtcacgacgtcagcctgagctggtgaacggctttgtgccgctagcgaccgagacggacgagtggctgtacttcgctcctgccgatgtgaagcgtgtgcagtttacgccggtaccggcagagcaaaccgaacagccagaagaacaaacaacggagtaa

SEQ ID NO: 404393 - DNA, 603 bp, Salmonella enterica
atgagcaaaccggactgggaggccatcgagacggcgtaccgggccggagtgatgtccctccgagaaatagcatcacagcacggtatcagcgaaggcgctatccgtaagcgtgccaagcgtgacgactggtcgcgcgacctgaatgcgaaggtgaaagaacgcgctgacgatctggtacgcaaagcagaggtacgcaaacaggtacgcactgaaacgactttgtcagagcgcgtacttatagaggctaccgctgaggtcattgctacggtacgcatggagcatcgcagtgacataaaacgcgccaggcagataaccaatgccctgtttgatgagttgggcgccgagtgcgcggatgtagcagcgctggagaaactcggagagttgatgctcaaccctgacgacaagggccaggacaaactcaatgagatttaccacaagataatcagcatgccggagcgtgttaagtcggtgaaggctctcagtgaagcattgaagaacctcattggtctcgaacgccaggcctacgatatcgacggcccggaaggcgacaactctgttaagcaactctctgacctgatggattcattgtctcagggggcgtga

SEQ ID NO: 404394 - DNA, 1473 bp, Salmonella enterica
atgaaacctgagcacctcaagctgctgtccaataaagactggcggctgaacaatctttactggatcaccgacaaagaggggaagccgactcgcttcaggatgacgcctgagcagcgggagtacttcgaagggattcatacccgtaatatcatcctgaaagctcgacagctcggcttcaccaccgaggtgtgcatcatccagctcgacgcggctctgttcgagtcggcgaagtgcgcgctaattgcccacacgctgaatgacgcaaaacgcctgttccgcgaaaaggtgaagtatgcatacgacaagctgccggaagagataaaggcggccaacccagccagcaatgactcttctggtgaactcgtctttaagaagggcgggtcgctctacgtcagcacgtcatttcgtggcggtacgctgcgttacctgcatgtctccgagttcgggaagatatgcgccaagtatccagacaaagcccgtgagatcgtcactggtgcgtttgaggcggtatcgaccggatgctttgctactatcgagagcacggcagagggtcgggcgggttacttcttcgattactgccagacggcagaaaaggcgttactgcagggcaagccattgtctgcgctggattggaagtttttcttcttctcctggtggaagaatccgcagtacgcaatcgacccggttgaatcactgccagtgcgcctggttgattacttcgctgagatggaagcgaagcacggcgtagtcgtcaacgaacgccagaaagcctggtactacgccaaagagaaaacactcggcgacgacatgaagcgcgaatacccgactataccggcggaggcattccagcagtcggtcgagggggcttactacgccaaacaattccgctggctctataccaataaacggatcgggaaaatcccggataactcgcacctcccggtccacacgttctgggatatcggtgttggcgactccacggctatctggtttgttcgcgaagttggtgaggagttccacatcatcgactactacgaaaactccggcgaaggcctccggcactacatgaaggtgctgaaagaccgcggctatgagtacggcgagcactgggggccgcacgatatcgagaaccgcgagtttgctgctgatgcgaagtcgcgcaaagaactggcgcgcgaaggttacgagattgacggccagatgtactccctgaatttcaaagtagtgccaaaagcaggcattgatacaggcatcgagtcggcgcgtgaaatcctcccacgctgtgtattcgacgaggaaaaatgctctgagggtatcactcaccttgagggctaccggaaagagtgggacgacaagcgcggctgctggaaagataaaccccttcatgacgccacctcgcacggtgctgacagcttccgttacttcgcagtgacgaagaacaaccgcaagcagatcggcacagtattcttctaa

SEQ ID NO: 404395 - DNA, 1470 bp, Salmonella enterica
gtgagcgaacaagataactgccttcagatggctgtgaacagcctcgccactgaaatgaggcgagcgaattacctgaatgccatcggtctaggcggtgggaacacgaagcgcccgacgctttaccaggagtttggctacccgcgcacgatcaccttcaacgacttctacaacatgtaccgccgcaacgccgctggcttcgctgtggtgcatcgcctgctggatggttgctggcaggattatccggtcattgttgacggtgatgaagctcaggaggcagagaaaacaaacgcctgggaaaagaaagttaccaagttcatgaagaagctgtggccgaaggtgaaggatgctgaccgccgcaatatggttgggcgctactcagcgcttctgctgcaggtcaaagacaatcggaactgggatcaggaagtcgacactgctttagtaaaacgactcggtgagtcagcgctggtaaagcttatcccagtatgggagccgcagttaactgtcgccgaatgggataacgaccgtcagtctgaaacattcggccagccgaagatgttcaacttcaacgagcagccggttggtgatgagccttttgtcggtccgatgcgcggagaaccggtgcacccgagccgcgtcatcctgttctgcgaaggatctgaagacgacaacgtcctatccggaatcccgctgctggaggctggtttcaacaaaggactcgatatcgagaagatttccggaggtggagctgagggcttcctgaagaacgccagccgtcagattgccgtcgaattcagcaaagaaaccgacatgaacacgctggctgaccaggctaagaaggctggctatgccgatcttggcgaagcgatgggcgataaggtcaataagctgaaccgtggtaccgatgcagcagccgtgatgcaggccggacagatgcacgttctgagcgttacgcccggcgacccggggccgacctgggaagtcaccgcgaacgaactggccgcctccgtgcaaatccctttcaccatcctgttcggtcagcagacagggcgactggcgagcgatgaggacaaaactgactgggctatccgtcgcaacacgcgtcgcaatggcttcctgacagaccggatcactgcgctgctggaacgcttctggacgcttgggattatcgacccaccgacaaaaggcgaggtcaccatctcgtggagcgatctgttggctcctggcgagaaagagaaaatcgagaacgcttcgaaactggccgacattgtacagaaaacatctggcttttatggtggagaacctccatttactgccaatgagctgcgcgaaattgttggccttgacccgcttcctgagccaaaagaaccaccgaaaccggatgagaaggtgactaccgatgatccactggccgatgacaccagaacagacggcaaaggtggggctgccgatagttccgcgcagcaaggttga

SEQ ID NO: 404396 - DNA, 900 bp, Salmonella enterica
atgttccgcgatattgagaaccggtatctcggaataaagcgcacgttgcgcgatgtgcttgatacgtggatgacgggtacggcgcgtgaagctaacgcgcagaactggcatttcttgtgccacgttaacggagaagacccgacgctgtatcaggtcaacgctggcaaattcatctatgacatgtcagcgcagcagttagctgatttgctcaacatcgtgcagacaattctggatgactatctgcttgaaggcggtgagcgcgacctgtgggcgttttattatgtctctcaggcagcacagagaggaactttagaagcctttaacaacctgtctcagcagtccgacgtttacgccagccagacaacgttacagcagcttctgtcgagttctgcatatcagaaccagatagcgtcagcatatctcagtacgtacagcgactggaaactggagagcgaccgggcgcgtggcgaccttgctaatatcatcgctgatgcagtagcaaggggtgtaaatccgcgcgagacggcgcaggtaatcagcaagcggctcgacgtcagtatgtcccgcgccaagaatatggcgcagactgagcaggttggcgcgttgcggcaggcgcagtggaacgaaacggactgggctgctgaccgattaggtctgaataccggccttctgtggctgtcagcgctcaagcctacgacgcgcacctggcacgccagccgtcacggcaaagtctacaccactgaagaggtgcgtgacttctatgctgagaacggcaaccggtacaactgctattgcagccagatcccggtgctgcttaacgacgacggcagcatattcaatcaggggctggcagataagctggcgaaagagcgcaagcagtggaaaaccgatatcaattaa

SEQ ID NO: 404397 - DNA, 510 bp, Salmonella enterica
atgaacattacacctcaggaagtgggttcgtttttcctgccgctgattgtaccgatcttaacaggtgtcgctgctgcgtggtttacagcgcgatttgcgttaaatcggttttaccatgaaaagtggtgggagaaaaaacatacagcatatagtcaactaattgacgacttgattgagattgaaaaaatatattctcaggcatatggtttttttgaggctacatataacctcggcaaaggacaagaaagaccaaaagactatgtcgagtggaatcaacttaatcggctccatgtaaatgtccggcggcatcacgctctagctcagatatcacttagtaaaaattcggaaggcctattatgtggattttttgagcagcaagatttgcttgaggactatcttattaggggggcaatgcctgagttcgaggcctaccaccaaatgattgtattaactgacaagctgattaagtcaatagttatagatgctggaaaagaattaaagtttaagtag

SEQ ID NO: 404398 - DNA, 1386 bp, Salmonella enterica
atgaaacgcaaccgcgttaacgtgctgaccgtcgtcaactccgcttcaaacatcaccactgaaaccattgacggcaagccacatatcgtggttcgcggcatcacgcctgtcgtggacgatatcgtgatgaaccggaagttgtacccggcagcagaaatcgaaaaggcctataacacgcttgagcgtaacccgatgccgctgggccatccgaaagtggacggcaagcatgtgtcggcgcgcgatgtccaggccgtgaacgagtaccacgtcggggcctggctgcagaacgtcagccacaaagacggcaaggtgatgggcgatatgtacgtcaaccgccagtacgccgagtctagcgagaagggcaagcgcctgattaaccgccttgatgagatgctggccggcaccaactccgacccgatccaaatttccaccggcctgctgtattccggcattgccgccaacggcgagtcgaagggcaaaaagtacaacgagatcgccaccaacatgatgtttgaccatgtggcggtgctgcttgatgagcccggcgccggtacaccggaggatggcgtgggcatcttcgttaactcagaaggtgatgagcagcagatcgaagttgcccgccttgctgatggtatcgattgcacccgcgacagcttgctcaacaagactaaattcttcttcaccaacgcctctaacttctcattcgacgacatctcccgcgccatcagcgacaagctacgcgagggtgacgccgaagataagtggctttggcctgaaacggtgtggccggacagcttcatctaccgcaatgacaccaaatacctgaagcagaagtacctcatcgatgatgacggcaaggccgtgttcgtcggcgaacctgtagaagtcgtgcgcaaacccactgagtacgagattaaaaccaacggagagaacgatccgatgaaagaactgattatcaatgcgctgcaagccgctggtaagccgactgaaggcaagtccgacgccgagctgatggacgcatacaaccagatgaaggccgaagaagccaccgccaagaaaaaaggcgatgaagaaatcgacccggaaaccggcaagcccaagaaaaaagagcaggccaccaataacgaagagatgccagcctgggcgcagaaactcgccgatcgcgtggatgtcgttttcaacagcctgaacgcaaatgccgacaaagagaaaggcgaaaagcgcgcggcagtgaagctggcgatgaacatgagcgatgaagaagtcgcagatctggacggtaaggccctcgacgctatgtacgccaagtgccagacctccttcggcctgaacggtgcattccgccaggcaaccaacacccaatcagtcagcgaaatgccggagtaa

SEQ ID NO: 404399 - DNA, 429 bp, Salmonella enterica
atggctaaagacggaaaacacgtaattcacgccggtggcgtattccctaatccgctgctcaatcgtgaaggcagcgctactgcggtcaagcctggaaccctgggcttcttcgatgctggcgtcttcaaggtgtcggtagatggtagcgaaacagcgattatctatgtcgctgacttcgactatctgcgctgcaagacggtagatgacacgtttgctgtagacgatctgctggttggcatccacccactgccgggaatgttcctgaacgtccgcgctgccgccggtacctacaaaaaaggcgacgctctttcaatcgtcaacggccaggtgaagaagttggctactggtgaatcagatcgctgctattgcgacgaagagcgctcaatcaccgccgctgctggcgacctcattcgcgtagtgattaagtaa

SEQ ID NO: 404400 - DNA, 1095 bp, Salmonella enterica
atgcttgtttattctaaatcgctgggcgaaaagaccggcaacctggccgtgaaccagtaccagtttggtatgctgacgcaggagcgtaatgccgcgttgaaccatcagggcattaacgtaatgcaggaaatggctgatcgcctgaatgcagtcaatcagctgaatggcatcaacgccgttcgctcccctgctgacttgtacaaggcctttgaccagaccgtgctgcgtcaatttcagccgaacactgagttcaccctttttaacgacctgatgccgctgtctcgctcggtgcgtatcaaccagacagtgtacgaatacgccaaggcaggcggacgcatgtgggctcacacctctatgtcaggccagatcggcgcggcgttggatgcggtgcaataccagtacgacggcacgatggttccggtgcacgataccggattcaagttccactggcgtgagcctcgcctgaacaatccggatgcattcgacatcatctctgatgctcagttcgagtccaccaacgaagtccgtcgccagtatgtggattacatctacaacggctatcgcgacgcggaaggtaactacatcaagtttgatgagaagacctggaagggcctgaagaacgatgagcgagttgcgatggttgatctgggtgcatctggtctgaatatcgactttaccagcgcctccgccacggcagagcagatccgcaatgcggcgattaagcttcgcgacactctcaagctgaccaacaatcagtacgcagagcagacctggtatgtgtcgagcgccatcatttcaaacctggagcgctatttcagcgacaactaccagtctgacaccatcctgcaagagcttctgaaactgtccggtattgccgcgattaaagaagatgctcagctgacaggtaaccagatcctgattgttccgctgaccgctggcgtgattgctccaattgtaggccaggcgttcggcactgttgccgacccgcgtccgttctacaacagcgattacatctggcgcacttggggcgctgctggcctgatggttaagaccgacatcaacagcaaaaaatccgtcatctacgcgcacagctaa

SEQ ID NO: 404401 - DNA, 228 bp, Salmonella enterica
atggcactggttaaagtgattagcgataaccttttctccggtgccaatctccagaaactggaggttggtgcaacggtggaagtaagcgaagacaccgcgaaaaagtggaaagccgctggtctggtggaaatcgtatccggtggtgatcgcaagtttgaagtctccacttctggcgataatcctgcagagcaggcagacaacaccgctaaatcgaaaaaggcgaaataa

SEQ ID NO: 404402 - DNA, 381 bp, Salmonella enterica
atggcaaccccgcttacgccagaagaaattaaaggcttcctcgctgagttggggtacgccatacctgatgccttgcttacgccgatcctctgcgtggtgaacaagattatcccgtgcctagatggtgccgggtacgacgactgcaccgcaaagctgatcctgatgtacgccgccgcgctaatggcgacgtcgtccggcgcgcgccgcatcaaatcgcaatctgcaccatctggctcgtcgcggtcgtttgattatggcactgacagcatcacatggctgcgtgactcgctggcgaaactcgatactagcggatgcaccggtgagttgccaatcagcgctggtagtggcgtcggcatgtttctcgtcgtcggaggttgctga

SEQ ID NO: 404403 - DNA, 276 bp, Salmonella enterica
atgatggatgcaaaagatcttttagcgctgtttaaccgtctttacgaaaccgacccagtagcggctgctgaactggtagaccatcgcgttgtttgcaatgaatcattcctttcgagtgatgcaccgtttgtctgctctaagcgcggagatggcgttatcacaatgggcgtggttggatttgtgaatggtatggcaagacccggaactggatatgtcgctgctgtttacgacgactgcaaacttacaggattcactgtcgtaggtgctgaacaatga

SEQ ID NO: 404404 - DNA, 171 bp, Salmonella enterica
atgagctggattccagtaactgagcgactgcctcgcgcattctctcgcgtgtgggtgcaaacagacaccggaaagcaggttaccggctatgtcaaatcgagcggagagtggttcatcaattgcgaagcggttcgtgtcagtggcgcgaaggtgcttaggtggaaggagtga

SEQ ID NO: 404405 - DNA, 357 bp, Salmonella enterica
atgtcggcaacagctaactggagttacaccgccaaggcaacaatctggcgcaaacaggctggcagtaatgacgaatatggcgatccgattagtggatatgccgcgccggaagccatcatggttgactacgaaggcggcctgagcaagcgcatcgcgagcatcggcgaggaaatcgtagtcaagaacacggtctggtctgagtactcacttgctgctgccggtgattaccttctgattggcgagtctaccagcgccgacccggtagccgctggcgctgatgaggtgcgacaggttatccgctatgccgacacctttgaccgggttgcagatgattacgccttgattaccggagtctga

SEQ ID NO: 404406 - DNA, 426 bp, Salmonella enterica
atgggcgcgaaagttaccggagtacagcaggccgtatcaaacatgaacaagctgattgacgatattcaggggcggaaagccgttcgcggaatgcagtctgcactgctgattctcggtgtcgcatcggcaaaagaggttccggtagataccgctacattggttaacagccagtttagggagatttatttcaacggaacgctgctcactgggcgcattggttactctgcgaattacgctgtttatgttcatgatgcgcctggtaaatatctgaatacgcaaacagaccgacctgtaggccgtggagaaactcccggctcaagaggcgttatatgggggccgggtggcaaccctaaattcctctactggcctgcgcaggataatgaagccgatatgttcaaggcgttcaagaaggagatggagctatga

SEQ ID NO: 404407 - DNA, 384 bp, Salmonella enterica
atgacgccgcagatgtacgaacgcgtccgcaacatgttcggcgatgccgggttgacggatgggttcactgttcagcagttgatgtatgacgaccccagcaatctatctactcctgtaatggtgttccgtcccaacggcggcacagcaatccgtaacgatctcggatccgaatatcacgttctcgttgatgtgatcggtgctaaagataagcgcagagatgccgccgcggcagtgcagaacattatcgattacgtccaagccaacccaaccgcagacgagtgcgtcggcagaatcgagaacatgggtaatgttcctgcgccagtgctaacagacgaggggcgcatcgtgttcagactccagttcgcgtgcctctacggcgactaa

SEQ ID NO: 404408 - DNA, 759 bp, Salmonella enterica
atggctaattgccaaaactcaaacgaacgcgtctttggttctgccacagtgctggaactggcgtatggctgcccggatgttcgcccggatgaagatggctggctggcgctgggtgccgggaccagcaaggggctggcattctcgcctaactccgtttcttccgatgccgacgacactggcggctgggtagagaacatcatcaccaacgccgatggtactgtctctttcgaaggtgaagtacgtaagcacgataagctcgatcagttcggctacggcaacctggtgaaatacttcgctgatgaagtcggtgctaaacgccagccttcgttatgggcgcgtttgactatcgggccgatcgagttcagcggctacatggtcatcaccgacctgaccccggcagatggcggtagtaacgacatcatcacgttctccgttgagttcaaagtgtctgacggtacaactgttaaagttgagaacctcgacgctccggcgctggcgttcactaccgatctgaccgcgaccaaatccgtcaccaccggttcagctcttactctgaacgttgtcgttactggtggcgtatcaccgtacacctacgtctggaagaaagacggcaccacggtatccgggcaaacctcagcgacgttcaccaaagcaagtgcagcatctggtgatgctggcgtgtacacctgcgtagtaaccgactcggcaaccactccagcaagcattacatctaccgcctgtaccgttacggtcagctag

SEQ ID NO: 404409 - DNA, 690 bp, Salmonella enterica
atggcgcttccagaaattggcgagattggcattagcgatagccgggaaggcggtgcggattacttgctacgaccgtcatttgaggcaatgtcacgcctcggaactccagacgaaatcgtacagacatttgccattctgcacggtagcgaggcaacagacctcattatcaaactcggcggaaatattccactgtggctctcatcgacagtccatcgcatatctgaccgggtgctaactgcggctatgcgagtgcttcaggcgtgttgtgacgatgacctgacaccaatgattggtgagtggaaaggctggagtagatacattgtctatcgcccgggccagatgccaaagcaggacatcattatcctcgctcagcagcttctacagcacggcgtttctggcaaggctaaagtccgcaaactccagcgccatgagacgaatgagaccaccgcagaattccgtgtcgtcgactacatcgttgcagcacaaacccattttggaatgagcgccgccgaagcctcacaactgacgatgacaaaattccagatgctgctcgcggcaaaatacccggatcagaaaggcttcaccaaggaagagtacgagcaaatatctgatgacttcattaagcggcaggaagcgcggcgggcgagagcaaagaaaaacaacaggcatgatgcgctgcggagatcgtaa

SEQ ID NO: 404410 - DNA, 2514 bp, Salmonella enterica
atggcacaagaagaaaatgtcggcagcatcgtctacacaatagatgctgatgttgctccgctattaaaaggcggacagcaggccaatgcggtgcttactgaaatagaggcatctattgacgccagcatagcccagttcaaaaagatggacacgcaggtttctgcgacagcgcaagcggtgaccacggctacccgtagctttggtggattccagaacgcattacgacagggcggctatcaggttcaggacttcatagttcaggtacaaggtggtcagtctgcgcttgtcgcgcttagccagcagggctctcaattgctaggaatattcggcgcgggcggcgcggttgcaggtgcactgctaaccattggtacggttattgtcggatcgctgattgctggcatggacaatgccaccatgtcgactaaggcgctaacagaagcacagaagcgactggctgatatcttccaggtatcggcaaacggagtggtcgttctctccgacaaattcgcaaaactggcagagacaagcgaaaacgcagctcgcgcccagttaacgatggctcttattgacgctaacaatgtcattaaggcatcggttaaaagtgtcaccgagcttggtgatgcgctgggtacatggaaagcgcctctttcctctgctattagccagatggacacgctgacagctaaaggcgtcaatgttagcgaagcgctgaaggatttgggcggtacatatcaggggaacattgtcggcctgaaccagttaaatcaggccgtaaataatatctctgaatcgttcggaatcagtgctgatgacgctcttaaactggttcaggcgctggcagcagttagacagaatgctaaccctgatagtattgcagcgctgcgcgatgtcaccgtcgatcttagccagaagtacggttatgcaaataaagcgctatctgaatttaccggagaggttggcaagtattcgttaaaagcagatcaggcggcagagtctaccagactggcaactgaaatgttacaggggcacaaggtagcttcagaggcagacactgaggcgatcgctcaaaacactcagcgcctgcaaaactacatccagatgataaaggatgaaggcgctactatcgcaatgactgcccgccagaaagctctgtatcgcgcagaacagatgggtgccagcgaggaagataagaaggcgataaacacctctttcgataagatagaggcttataaggccgaacaaaaggcacaaaaagaatcagctaccgccattaagaagtcaaactccacagccgccagccaggcgaaaagagctgaaagccaacaagagtcaatcgcacaaaaacttgagcagttgcgccaaaagtctgaactatccgcagactcaacgcaagagcttagccgtgagcaatccatcctttccgctcaattatcgcttggttcgacggcaactaaagaacagatcgcgctagctggtcaatatgccgccaaggcgtacgacaatgcagcggcgataaaggcgcagcagaaagctgagaaagagcgacaggatactgagaagtcctataagcaggtgcaaagcagtgcgtcacctgtggccgccatagacaaccaattccagaagcagatcgccgatctaaatgcatatgctgcgttatacccgcaaaaaatagaagaggttgaagcgctaagggcgtcaatagaggataaatatcgtcagcagcgcgaagcggcaatgtggcaagagttttctcagatgaatgccggaactaaggctgttgcggctgcgatggattctctcggttcaacagccagtaatgctattacaggggtgataactggctcgacagaactcgatgacgccctccgttctatcggcatgacagtcctgaacagtgtagtaaattcgttcgttcagatgggtatcgactgggccaagtcggcaatcatggggcagacggctaccactacagcggtggccgcatcaacagcagctcagactgccggcatagcaacaacaacagcggcgtcaaccacggcagcagtagcgacagcatccgcatggacaccggcagcaatcctgtcgtcagtggcatcatttggtggtgcagtggctataggtgttggtgcgctggcaggtattacggcgctatcaggtaagcgtaaaaacggagggccggtttctgcgggaggcttgtatcaggttggtgagggaggtgctccggagatattcaaagccagcaacgggaatcaatacatgatccccggcgataacggttctgttatctctaaccgtgcgatgaatcgcggcggtggtggaggtggcggcaacgtcccgatcgtcaacaactatgtcatcaaccagtccaccaacgctcaggccacaacgacatcaagcactgacggtaacggcaacgtaactatccagaccatcgtttctgatattgaagaaggcggtgctatcagccaggcaataagccgtaactttgccaccaaccgccgcgcaacggagtaa

SEQ ID NO: 404411 - DNA, 504 bp, Salmonella enterica
atgtctgcaattccatatcctgactggcttcctctttcgcagaaggccagcaaagccatgtcgtttcaggtgccgttccgagaagaccagccagccgtcggatccccgatatacgaaatcctgaccacggatattgccacaacatggacgttaacgtggattttcacgcgagcgcaggagagggcgtttcagcaatggttgctcagtcctaactacctgaacaaaggcatcaactggttcacgatgctggtcgatttgggcggaagcggtctgcaacagcaggagctgcacttcaccagtgacggattcccgaaacagtcgtcaattgatggaggcgcggtaacgtggaccggaactgtcattgctcgccaactctataactcagacgacgactacgacgacattatcgttgagctgccaccgccgtggtacacgttcctcgacattatcgtaacgggttatccggacgaccgtgatccggagagtttgccgaggttgccataa

SEQ ID NO: 404412 - DNA, 471 bp, Salmonella enterica
atgccaacattacgcgagttcaagagcaagcgcccggcgcgaaagctctacgatactgtgacgttttaccactcaactttcggctatatccgtctcgtcggtaatgagatggagccgcaagtgctgggtggtgaaacttaccaaccggtgcgcctcgacgtcacacaaagccagcagagcaatacaccggtcatcaacaccacgctgaagtttgcgtggctggctgtcgatttcaaacaggcgctgaagaggtgggttggcgcgtcacgtattgaggctattcaggctacttacgccagattcgattctgctgatcgcgacacacctctcaagccgtacatgctctatgtgtctaacgtctatatggacgccagcgacgtaacggtgacgatcagcatcaagaacccgataaagggcaacgttgccgtcctctacgatatcgacctgtttccgggacttcgaaatgtctga

SEQ ID NO: 404413 - DNA, 2493 bp, Salmonella enterica
atgccggtgattcacgttcaaaggatgccgggagcgccacggcagacgggcattgtgccggaaggaacgaacctctttaaatggttgcaatgcgccgacttaccaggtgatttcaaagtttcagtgaatgggcgatttatcggagaagatgaggaaatatcacggaaattagctgaaaatgacgtggtaaatatcttctgtcagccagcgggttttgtcggtgatttattcgaagcgattctgaaacctgtacagcaaattttctccttccttctgccaaagccatcaatccccagcgtgggagacagcaacgccaagacttcacccaacaacagcctcaaggcacaaaccaatacagcgcgtaacggtgaggcgaggcctgataacttcgggcaaatacgctctttccctgacttaattcaggaatcagcgttcgagtatatcgacaacattaaatacgtcactgaatggatggatttcggcctgggcaactacgaggtgagttcggttcgctattcagagtcaaacctaggatcgctggctggcgcgtcatacgctatctatcagcctggtgagactataggcacgatgtatatgccgtatgcgttcgatgatgtagacggacaggaagtgtatggtaagaacgaactcgatgaggatgagccgccagtcgtcattgaagaggccacgaccagcaccgtaacgtcgactacattcgttaatggtgaactggtagtgcaaataccgaaagacgacgatttcgactattttgttgatctggcatttccacatgccgtgtcgttcgacctgaatatcacctataacacgacatccggaccggtaactgagatggtaacgctggccggcaacctcatagacgcagaggaaacaaacgacggactgacgccaccagtcgaatactggtacacattcaatatcaacagcatcaattataacggttctccgatcacaacgctggacggcgttaccatcggctctgacctgtttactattcgcgataaccagccactggtgtcaggcccgtatttctcgcctgtggatggggatcagttgtggatacacacacaggctgcgttgaacgacgacaataccgccaattttactattcagtggtacaaactggatgatgataacaatcaggtgcccggtacggttgaatcagtggatatcacgtcaaccaaccctaacgacggctacgatacgcgatacctgacaactaaagtcaccccggcagcgggaaccggtcgatacgccgttagtgtgtggcgtaacgacaactccagcgacgagaacacactcaaacttgaagaggtccactcagtcgtcacgagaaccaacgttgtctacccggacgactgtatcgttaaggttcaggtcagggcgacggagaacgccaccggcagccgtgacaggaagtacaacgcgttgatcacccgatacgtgatcggctacgaccgcacgacaaaggcggtgcgttacgatgtttcgccgtcccgttcgttcgccgacagtgttctgcataactggctaataaccggagagcagccagagaacactatcgatattgctggactgtacgcgatagcggactcactgcctgacgcgcggcttgggtacttcgactacacgtttgatgatgaggatatctctctcggcgaacgtatccagaaaatatgcgacgccgcccgggtgacgtgctattgggatgacggcgtattgtcgttcgtccgtgacgaaaagcgcaattacccggcgacggtattcaacacccgcaatatgtcggcagacggttacaagttgtcatacgacatgacactaccgggaagttttgacggcgttgatgtgcagtacaaagaccctgacaccaacaaacaggttcacatctactaccgcatcaccgatacgggaattgagaacaacgtaccgtcgaagcccaaaaaattcgatatgacgtatgttcgcaacagataccaggcagaggacagggccattctggaatgtatgcgcctgatgtactcgcgtaggagcatggaaattaaggctctggctgacggggaatgggtgaatgtcggtgacatgattcaggtcatcgatatctacgattcaaaccagcagaacggctatatcacgcagcgaatcggcaacacgttttacaccagcgagcggttgcaacttaatggcggagaatacgttgtcatcactgacgacttagggagtgtatctaatcgactcccagtaacgcagacaggcgacaaatcgtttacctgcgcactgcctgacagtttcgtactcaacctgttcgacggcgtaacggtacagtctcagtcacgctatgcgatagcacttgaggaagagttagacacaacgctatgggtaattagccagaaacagccagcaaacgacggcaccacatcactgactatgtcagagtacagcgacgatatttacacgtacaccgtcccggcatcctga

SEQ ID NO: 404414 - DNA, 702 bp, Salmonella enterica
gtggatgccgccgatgctgatgacgaggcggctgttgcgcttgccgctgctgtatttgctgacgttgctgcgtttgtctcagatgtttttgcttcggctgccgatgcggctgccgcctttttcgacgctgccgccgcagtggctgacgcacctgcatcaccggcactggaagccgcctgcgtttctgacgtcttcgcagcggtttcggatgcgccggcacgctctgctgatgcctgcgccgccgtcgcgctggcggctgcggcagcagctgaatctccggcggcagttcgggagacatcagcattcgcttcagatgttttcgctgcggccgccgatgcggctaccgccgttctggccgtgtcagccgattcagcgctgactgatgcctcaccggcttttgtggtcgccgtaactgcgctgctctccgcagacgctgcggatgaggctgcctgtgtggctgatgcttctgccgctccggctgcactcccagctgtcgtggcgctttccgctgcctggcctgctgatgtctgcgcctgttcagatgcctggcctgcagcggtggcattcctcaatgcctccgatgcctggcgggcaacttcttccaccatcgcctcaaaacgccgcagcgcctccgggcggacgtcgtcttccgtcatggcccccagaaaatcattcagggtgcccggctttgaatcatcgtag

SEQ ID NO: 404415 - DNA, 966 bp, Salmonella enterica
atggtggggatgactgattggccgatgcacaggatttggcatctttttggtggtaagaataagaaaagtattaaaaagatacttgctatcgcggggttagatgcgagtgagcatatttcagatatacatcatgttggttttcctgacgaggagtatattcctgtttcaggagaggaacataaggttcactggcttataaataaattatttccatatattttattaaaaaacactcagcacagggaagtttacgctgattactttaaaacggcctgtgaaggttttaaaaatatagcacttatcgatgtaggatggatgggtaatattcaatcagtatttgctcgttctttaggtgcgcaatgggcagaaaaacaaatacatgggttttatttggcaacttttgctggcgccaatgataaccgatctatttataataagatgtttggttggctaaccaactatggccatccccacgataagtgtgatcttttcttatcaggaggggtggaaataatggagttcgctatggctgataatactgggtcaacaattggctataaaaaaacggataatggaataattcctgtacgtgaagatagcagtggttctgaaattgagtatttaaaaaaagcagcaagattgcaatcagggattatttctttttttgagtacgtcaaaccgctcatacaaaaaggaaattatgcagcacttagtagtgttgtattgtcagaacctttttttgaattgatagccagaccctcaagcgctcaactggacgccttatcttccctcacacattcagagtccgcgggatctaacgcagaaagaatcgtgctagccaagaaactgcctttaaaggataaactttttcccggagaaaattatatcaaagagttgaatgccagttattggaaagaaggctttaaaaggatcaacagaaaaaaattttgggcaaaatataactaa

SEQ ID NO: 404416 - DNA, 678 bp, Salmonella enterica
atgaacactcaatacctccagtatgtacgtgagcagctaatggtagcgacagccgatttaagcggggagactaaagggcagcttttggcctggctggagaacgcgcaattcgacacgaaaaactatccccgaaaaaaacagcgtatctgggacgaggaaacagaaagctggataacgttaaataacccgccaatccccggcaagcagtcgctggcgaaaggaagcgctatcccgctggtgaagcctgtggaatattccactgcctcatggcgccgggcggttctttcactcgatgaacactacaaggcgtggttgttgtggaattacagtgagaatacctgctgggaacaccaggtcgaaataacacagtggggctggagtgcgtttgcggcgcaactcgacggaaagaagatggccggtaaaacacaggaacgactccgggcattaatctggctggcggcacaggatgtcaaatctgaattagccgggcgtgaggtttatcaatataaagagttagcgggactggtaggcgttagcgaaaagaactggtcagaaaccttcaccagacactggctgaccatgcgcgcgatatttctgcgtcttgatcaggcgtctcttttgagtgtatcggagtcgcgttcggaacaggtggctttcaacctatacgcacttaattga

SEQ ID NO: 404417 - DNA, 432 bp, Salmonella enterica
atgaaaatatcaagaaaatcttctaaatcacatattttttcaaatgatagtgatacaacaacgcctttaaatacttcattaaacaatcgtacatattgtgtgagtgtccgtttcaatgaaaaagaactgaaaataattaattctaaaagaggagaggttagtaaaggtaagtggctccgtttacttgcacttgaaaaaaatacacaagccatacctcccataaatttgaatgcttggaattcactgacaatcatagtacaaaatttaaatagaattgctgtacatatcgacaccaaaagcaaagacagcaagcttacgtacacagagcttttcgctgtaaagcgacaactgatagagcttcgccagcacctgctaaatgctgacatatggagcaaaccctatgaagggtatgcagaagatcaaaaggggtaa

SEQ ID NO: 404418 - DNA, 264 bp, Salmonella enterica; identical to SEQ ID NO: 390900

SEQ ID NO: 404419 - DNA, 924 bp, Salmonella enterica
atgccattcttgaaaaataagcgcattggaatttatgagcattctagtgcgggtcgtgatctctataagacgttattcaaaatgttgggtgctacagttgttagtttagcaaggagcgacgaatttgttcctattgatactgaagctgtaagtgaagatgatagaaataaagcaatcacatgggcaaaaaaatatcagttagatgctatattttcaactgatggtgatggagatcgccctctgatagctgacgaatatggaaattggttaagaggagatatattaggccttctgtgctctctcgaattagctgctgatgcagtcgctattcctgtaagctgcaacagtacaatctcatctggtaacttttttaaacatgtggaacgaacaaagattggttcaccctatgtgattgcagcatttgctaaattatctgcaaactataattgtatagctggttttgaagcgaatggtggctttctgctaggtagcgatgtttatattaatcagcatttacttaaggcattaccaacacgtgatgctttattacctgccattatgcttctgtttggtagcaaggacaaaagtattagtgagcttgttaaaaaacttcctgctcgctatacctattcaaacagattacaggatataagtgttaaaacaagtatgtctctaataaatcttggtctgacagatcaagaggattttttgcagtatattggttttaataaacatcatatattacattctgatgttactgatggctttagaatcactatcgataacaataatattattcatttacgaccttcaggcaatgcccctgagttgcgttgctatgcggaggctgactcgcaagaggaagcatgtaatattgttgaaactgttctctctaatatcaaaagcaaactgggtagagcttaa

SEQ ID NO: 404420 - DNA, 204 bp, Salmonella enterica
atgaaaagtcgcaattttatatctctgaaatttttactcaaacacgaagacatttgcgatttagataatgttcttcatttggaaaagctaataggacaacattctccacgagatatcacagaagtcgtttctacatctaattggtatgaaatggcacctgaaattactgtctttgacattttatcaatatcatcagtggcataa

SEQ ID NO: 404421 - DNA, 894 bp, Salmonella enterica
atggaccagatggcagaaaacacaccagaagttgaaatcgaaaccgatacatcagagcagattcctgatgatgtcgaactggctgaagaagtcgaaacagaagatggcagtgagtcctccggcaatgatgcagaggaagatactgaaactgatgacgacgaatcagaacaggaattctactttggtgacgaaaagctggattcgccaaccagcgaagatggcgcagagcatggactggtaaaacacctgcgcaagacgattaaagagaaagaccgcgagctgaaagagttgatgcgtcagtctcagaaacccgtcgagcagcagccggtaatcactcaaccaccgcgaatgccaaaactggatgatgaggacatcggtttcgatgaagaaatctatcagcaacgtatggctaagtgggcagaggaaaacggcaaataccaggagcaagtacgagagcggaaacgagaggaagaggcgcgtaccgcaacgcttcagcagaaagcagccaattacatgcagagagtaaaagcactgaaagtggctggctaccaggatgcagagcaggctgtacgcgaagatgttcctgttcatattcaggacatgatccttcttgagtcagagaagccggaaatcgttgttctggcactcggtcgcaacgctgaactgcgcaagcaactggcagaagctaccaaccccgtagcaattggtcgtctgctggaacgtatcgaatcgaaggccagaatcatgccaaaagcaaaaaccacggcagccacaaccccgacagttaaggggagcaacggcgcagtaatcaacaacctcgacaaactgaaagccaaggcgctggaaactggtgactggacgccgtatttcgccgctaaaaaggcaaaaaaataa

SEQ ID NO: 404422 - DNA, 858 bp, Salmonella enterica
atgaagaaggcggcaattttaattgatgcaggttttttcatgcaacgggtgcactctacgcatcgtaaacactttgctgagcatgagctgactgcacaatgcatcatgaaagtaatatggtctatggttctttcccaccttaatggaaagcgtcaatctcaagagcgtagagaaccacttgagctttatagaatttacttctactactgtcctccgctcgacattcaaacacgcctccctcttccagacccaggcaataagacgccaggtcgtaagaacttcaaactcgaaaaatcatatattctgagaaccgagctgcatgaagagttaagaaaaactcgaaaaacagccttaaggctcggtcatcttgttgataataagcgctggcagttgactacattctcccttgacgctttgatgaaaggaacgaaacaatgggatcaactgacaaatgatgatttttactatgacatcaagcaaaaacaggttgatatcaaactagggatggatatcacgactttagcttatgaaaaacttgttgatgtgattgtccttgttgctggcgactcagacttcgtgcctgccgccaaacacgccaggattaaaggtattgatttcattcttgatccactaagacagaacgttactccatcactgtcagaacacattgacggggttcagtcatacagcttgatatctggccttgccgatgctttacatgttgagccaaacccagcccctgactggtgggaagatcgcaaaaaaggtaagcccagaggaaagagaaatggcagtaaacgcgagtatggaagcactcaaactgacgcagcaaagaagcatcaaagaaataagcgttaa

SEQ ID NO: 404423 - DNA, 390 bp, Salmonella enterica
atgtttttgaagaaagacacgcttacttatggtgatgcatcagtagatctgtacgaactttcaggactgcaacgcgtcgagtatctggaatacatacagcaacgcaccgcgcaatatgaccgggagacggaggaatcaacagaagcagaacgcagggtcgcgtttttgcgaatggggattgatattaatgcctggctggtatcccgctcattacagaatggcgatcagacgcgggatacagggaaaaccagcgataatatcgccgccctttggtcgtatgaggcgttgggaaaaggggccgatatggtgctgtccctgagcggaatgactccccctgattctgacagtgaagaagaaggtgcggaggctgattcgccggaaaagtcctga

SEQ ID NO: 404424 - DNA, 375 bp, Salmonella enterica
atggaaacaaaagaagagaatgtagcccgcctgcaggtactcgccgtacaactcggacgggaagcggatatttccggcagcgccgccgaaatcagacaacgtgtcgctgagtgggaggaagaggcgggcggtatgtcggataaagaagatgatgaaacgacggctgaagtctcacgggacgagccggaatctgcaaaaagtaatacttatttttcggaatttgtccttatcagggcggtccgcactcttcatattgatgcgctggcagcggacagcgatcgggttctggatactgttccggcgggggattcggcgcgtattccggcgatatatgttgatgagctcgcgggagacggactgattgttgcgttatga

SEQ ID NO: 404425 - DNA, 447 bp, Salmonella enterica
atgtttgttggcctgttgctcgtctcgctaattgttgccggtctgctggcaaatcactaccgaaataatgccatcgcctacaaagagcagcgcgacaccgttactcataggctgacgctggcgaacgcgacaattaccgacatgactaagcgccagcgtgacgttgccgccctcgatgaaaaatacacgaaggaattagctgatgcacagaccaggaatactgatttgcagcgccgccttgctgctggtggccgggtgcgcgtcgaagggcgatgttcagtgcccacccggaccgaaaccgccagcaccagccgcgtgggcaatgctgccaccgtcgaactctctccaggtgctggacaaaacgttctcaatatccgcgccggaatcatcagcgaccaggaaaaactgaagtatttgcaggagtacgttcgcacgcagtgtgaatag

SEQ ID NO: 404426 - DNA, 747 bp, Salmonella enterica
atgacgcgcatgcagctcatcaggaccctgggttcctggagacctgatgccagtgaataccgcaatgtaaccaacgtttatcgcatttcattaaagtcccttgcccgacgctatctcgagttacatgacgaaatcgctgatctggatgtcatgattgcggcaattgtcgacgagttggcacctgagctgattaaacgtaatgctatcggatacgaaagcgcttcacagttgctgatcactgccggagacaatcctcaacggttaagatcagaatcaggatttgcggcactgtgtggtgtcagcccggtccccgtttcttctggaaaaacgaaccgttaccgacttaatcgtggtggagatcgtgctgcaaatagtgcacttcacatcatcgccatcggacgcttacgaactgacgcaaaaacaaaggaatatgtcgccaggcgtgtaatgcagtggcagaatcgttcttcagttcactcaaaaaagagcgcatcaggaagcggatatacaaaacccgggacatggcccgggcggatattttcgattatattgaagtgttctacaaccgggcccggcgccacagtcatctcggcggcgtcagcccggaggccttcgaaaaggcctcgcagtgaggacagaaactgtctaccggagcgtggtcactccacatttaaagaaacgagctttggtaaacatacctgtaatgactccataaaatggcgcgtcaaacgacacctaatcaattaa

SEQ ID NO: 404427 - DNA, 543 bp, Salmonella enterica
atgagtgaggtagttaaagtagtagcagatgctgcaagctcttcagagtttacgtttaaggactacatgtatgcggctggtgcctgtatatcagtagtttcagcggttgtggcgttggtgagtgcccggtggacatttaaacgcgatcttaattcattgggtgattcggaagttaaaattttcgagctcatttcaaaagctgagtcagaactcgtcaaatttaacgtgagattaaaggaaaaaatcgaaagtgaaggtaatgaatttatctttaaagaatcatacagagtagaacttgactgtctttcagaaaatttactgaatgtttatgacgtcgcatgtcaacgttaccttgataaaaaactagataaaaaaaggttcaaaaaaacctatggaacaagaataggacgattattttctaatagtctatataaaccgtatttaggtgttgataactggatttgcccctatatttccagacatctgttatcacttaacccattacaagcccgctgccgcagatattcccgtggcgagcgataa

SEQ ID NO: 404428 - DNA, 201 bp, Salmonella enterica
atggcaaacccaaaaccaggtaaacaaaacaacaaaccacaaagttcttgttctaatagaaaacaatgcattcaaaaagaaataaataatggtcgtccaattaatatctgtccaagtttaaaaagagaacaaaaaatttcttttgattctgctgacaaacttgccgaggaaattgcagcactgagagataaaaaatcatga

SEQ ID NO: 404429 - DNA, 339 bp, Salmonella enterica
atgggtgttaacgaaagtattctgcatcaccagatcacacacggcattttcgataatgcagcacagatggtgcaaggaatcgcgcagcttgccgttgataaagggtttacctctctgtcagaaaagcagcgcgcagtcattgagccgttcctgacgcagcactgttctggtgtcactgatcctggagcccatcaccatgactgtggtcgggctctgacgggggaggcgcttcttacagcctatgaggagtctgaagacagcgaaaacctggagtgcgaaagctgtcgcagcgaaaagggctattacgcgcaccagagggacaagctcgaaaaacaataa

SEQ ID NO: 404430 - DNA, 975 bp, Salmonella enterica
atgaacgtctatacaaaaccttttgtctcgccccatgatctcatacataaccaccttacgccaaaaggtataatcttttcagccccctatggggtagccgaagctgaagaatatttaagtcgtattaactggtatagatttaaatcctatttacatccttttctagtaactggaacaaaaaaatacatccctggaaccaccttttcacagggagtggagctctattatttcgattgtgagttgcgagagttatgtaataaatatattttgcgtattgaagttaaagccaagactatactagatcagattattacctcatttacaaatgatccattttggtatctgtgtgacgattactttaaggatacagagaatttgccaagattaagacaaaaaattgctggtgatttatcttattcaagaatggaatttgcaaaatattataaagctaattatattagtcctaaagaatcttggcgcacatcccctccattttggctggcaatggaattgatgagttttgatacatttgttaagtttgcaaatgccgtagattctaataaatttatgtactctggaaagaataaacttggtgatgcggcaaaacagatgagcgcaaaaaattatcgcgagatgatttcttggctattggctataaaagaacttcgaaacagagcatcccataacgcaagaacatggaatagcaattaccgcttaccatccgggtttgttgataataaaaatgcattagttactgactcatatttgactattccaccagttaaaaagaataaaatatatttgatattagccacaataaagctaattactgataatctaattaaacagcgaaatcagttttctactgaattacaagagttgcttaaaaagtatcacaatcatagctatatcctatcaggtatgggatttccagcaaattggacttcagatcctttgtggaatccgaaaaattaa

SEQ ID NO: 404431 - DNA, 1500 bp, Salmonella enterica
atggacccaattaccgctgaaatattaagaataggcataagtgaatcagccaaacttatctttcaaaaagttctttcaaaaaattggatgaaagaatatacaggaggacgctctattgtagagcagttattatcactggatattcagagtgattacatcgtgaaacatatatctagagctatgaaaatgaggacaatacatagttctgaaaatgatgtaatgcttaattcaatatatcatccattgactatacatagagaaggtaaaaatatcaaggtggatgataaattccttttatctgataacaacataacaaatataatagggtttgctgggcaagggaaaagtacgattctgagaaaaatccttttagagtccataaagaatggagataaaataccattcttcatggagttgcgtaaaatagaggcaaaaggaatagaaaattctctcttgtctattattgaagagttgggaatcaaaacagataaaaaatcacttaattcattgttaagtagcggaaatatattgctattacttgatggttttgatgaaatatcatcaaaaatgagaatggatattcttagtgaaataatttcattaaatcgtcgtcacggcgtccaaataataacaaccagcagaggtggtacagaaatatgtacagaatctaacataataaattatacagtaaataaaataaaaagatcagacattatgtctatgcttaaaaagttgagtgagtcacaagaagttgaagaagacacgctacaacaaatatttcatatgttaaaaggaaacaccagcctggtcgagacaatgaactgtccattgcttgtcacgctgttttatatttgttatccacatttggactcaatccctgatagtgcaacagaattctactctaaattattcactacattatattttaggcacgataaagtaaagaactacaaacgagaaaggaaaagtgatattcctcccccggaagcattcaacgttttttgtgccctttgtttcaaatccatttatgataacaagcaagattttactgagctttcattatttgaatatacaaaacaatcacttgcgttgtgcggagccaatgaggcaaggccggaagatatagcatatgactttgtggatatcacatgtttaatccaaagggatggttatgatagatatgtcttcctccataaatcgatacaggaatatcatgctgctgagtatgttaagtcactatcgttagaaaagaagagacaatttatgggtgctattcttgaaagtatccaaaatgaaccgaaattatcagcaacagcaagatatctatatgaaatagataaagaaaatacatatgagttaatatgtaaacctttatgtgaaagatatggaatagataaatataaagataacgaagaattttatgttgaaaagttatacactgaactcatggaaggagttgtttatcagttgcatagttttccagataatgtaaaaaaataa

SEQ ID NO: 404432 - DNA, 786 bp, Salmonella enterica
ttgggacagcgccttgcgcggatcgtcagcaccggcaacggtgtagaggcctgctttccggccgcccttcatgaacgatttgaagtagggattgacgctttgcagcgtccacaatttcccctcgccgtctgtgccaggtatcagcaggtcgcccgctttgaaaacccggttggccgggtcagcctcgcgcagcgccttggcttccttggctgtcttggcgatcttgatcccgtgcgcggcagtttccggcgaaacactgtccggcacgacgcgcaggcctaccgggttggcgatgcctttggctttgcaataggcattgtcagcggtcgcggccggggcctcgttccacaacgcttgcgcggcggcggcggtcgctccgtgctcggactggcgggccgcatcgcgtgccttgcgctgctcggtcgcctcggcggcctgccgcgcacggtcggcggcactgagttccggcgtcttgccttcgggcttccaatgcacgacttcgccggtcttgtagttctggatgaagccgcccggcgtgcgcccggcttcgtggtaggcgtatgcgccactggtggcaccgcctcggtcgccctcgacgggcacgcgctgcatcttcccgtccgtgatgatctcgcccttgagctgcaagcccgcatccttcaatgcgtccttgaactgctcgatggcgggcttgggttccgatacagtgacgacgttggccttgtccacgctccaccgggcaaggcccgatgtggctacgtccacgccctcgggcgcgtaccatga

SEQ ID NO: 404433 - DNA, 339 bp, Salmonella enterica
atgcagaacggcgcgggtcggtgctcggtcggcatcgaggccgacgcgctgcgcacgttctacggcggattgctcggcggcttcgtcggtcgcgccaaatccccaagccttgcggccgtcatcgagctgcacatagacggcgttctggcctgcatgattggcggcattctccggcacgacgcggcggctctgcacggtgtaagcgggcgactcttggccgggcgtgtacggcgcactctgctgctcggcctgccgggccagcttggccgcttcgtgctgctggatagcggtgcggagtgtcgcaggctggctttcgtcgtcgttcgatatgaactgtga

SEQ ID NO: 404434 - DNA, 405 bp, Salmonella enterica
gtggtaggtgatttcgtagaagtcgcccagctcgccagacgcgaagccgatacgggcggaatagccgttacgctcggcctcggctttcatcatctgccagctttccagcggcgaataaccttccacggcattttcgtgatcgcgttgcagctcggccgcaacctcgggcgcgatttccggcacgggctgacgctcgacggtttgcgtttgcgtctgcatctgctcctgctcgaagtccatcacatagccgcttatgcgttcggcgtcggacgcggcccggaagatctcttttggatcttccttcaaggctttaatccacgaacctacataggctgcgtgctggcccggatcgtggccgatttcgaggcgctcgcccaacatcagcgaggcaatttccgctcgtaa

SEQ ID NO: 404435 - DNA, 897 bp, Salmonella enterica
atgatcggcctcgacatgatgatggcgtgcgcgccgaacgtggccccggccacgatagagaaggtcattcaggtggagagcggcggcaaccccttggcgctcaatgtgaacgtcaagtgggtgatcgagcgtgacgagaagggcaacccgatcatggtcacggccgcagacggccagaccaagccgaagcgccgcaaggtcgtcttcaaaagccctatcgccatcaagaccgcgcaggacgccgtgaccgttgcctacatggccatcgacgcggggcactccgtcgatatgggctacatgcaggtcaacagtaccaaccttaaatcgctcggctacaccgtcgaagacatgttcgacacttgcaagaacctcgcagccggtgcgcgagttctgaccgcgttctacagcaacgcgctgccgaaatatccgaacgaacaggccgcactccgggcggcactgtccgcctacaacacgggcgatttcaacaagggttttttgaacggctacttggcccgctacggcgtcggccaacaggtcgccgtgagcgttcccgcgctcaatccgtacacggccccgactgccgtgtttgtacgtcaaccgagaaaggaagaagccatgagcaccaaagaagaagcgagcagcacccagcaggtcgcggaagcgaaaaccgccttggccccgcgtgtcgatcccgtcgtgagcaagtcgcccgaagacagcggcacgcccggcgtgcaggtcgagcacacggcggccgaagcggaagccaacggcgcattcaaagaaacggccatgtccgaagccgaggcgtgggcctcgaacgcggacttgtccgctgacccggaaggaaccgccatcgtcgtgaacggcaaggccgtgcggaaggggggtaactaa

SEQ ID NO: 404436 - DNA, 567 bp, Salmonella enterica
atgaaaggtcgccgcttcggaatcgccgccttgtgcgcggccgcagtgatcggcgttgcgatcacgaccggctatcacgcaggcctgcgcctcaacttcacggactcggccccgcatgggctttggcttgtgcagaccgccgaagcggccagcatcaagcgtggcgagctggtcgaggtgtgcccgcccgcctcgccgattgttcgcctcatgggtgaacggggctacctcgcgcccggtgactgcgaggattccggcgtaaccccgctactcaagccggtgtcggcggtagcgggtgacgccatccagttcgagccgggccatcccgtgaccgtcaacggcgtggccctgccgaacaccgccgctatgcccgcgctgccgggctggcctgccgggcgctacatcgtgcagcccggcgaggtctggctgttttccagctacagcgcgggcagcttcgacagccgctactttggccccgttgtgctggccagcgtgcgcggcattgcccgcccggtcgccgtgatcggcgacccggcggccatcactacgggagtaaccaaacaatga

SEQ ID NO: 404437 - DNA, 1959 bp, Salmonella enterica
atgagcgataaaaattcgtcggcgggtaagctgcggcttatcggcggcgtttacttagtgctgttcatcatcggtctgaacagcatatgtacgcaatttattgcgtaccgggttggctaccatccggcacttgggccgtcactgttcgggcagctttatatgcccttcgactggtggcgatggctgttcaagttctacgactcagcgcccaattcctacaactatgcctttgtgattttcgcgctcggcgtgctggtcggcctgctgacctatgttctctggatcggcttcaagacgcgcagctcgcgcaagcatgaagacgttcacggaacggcgcacttcgccacgctggacgaggtacgcgaaaccggcctgctaccccgtgagggcaaacaagggcagggcgtctactgcggggcctatgacgaccccgaaaccggcaccacgtactacctgcggcacgacggcccggagcatgtttgcgcccttgccccgacacgttcgggtaagggtgtgggccttgtcattcccaccctgttgagctggccccattcggtgttcgtgcttgaccgtaagggcgaaaactacgccatgacttcgggctggcgtcagaagcacgccaacaacgtgatcctgcgctttgacccagcgaagccgggcaccggctgcgcatggaacccattgggcgaaatccagttccgcacgcgctttcaggtcagtgacgcgcaaaacatcgcgctgatggtcatcgactccgatggcaaaggcatcgagtccgaccacttccgtagtgccgcgtttgagctgctggtagggctgatcctgcacgcgctctacaagggcgaacaggtaggccgcacgccctgcttgcaggacattggccacatgctgaccggcgtgggcgacttcgccgcgccggacacggccaacgaccttgtagacgacccggacggcgacccgaaagcactggccggactgttcgatgaaatgcgcgaggtgtccatcaatgacggcgacccggcgaaccgggaagcgcagcttgtcattaccggcgtcggcacccgcatggccaacaccccggcccgcgagctgggcagcatcatttcgacggcgaacaacgcccttgcgctgtaccgcgaccctatcgttggcgagaacacttcgcgcaacgacttcaagattgccgacctgatggatcacgaccggccggtgtcgctctatctcatttcgacgccgaagacgtccaagcgccttgtgccgcttacccgcctgttgttgaccatgatcgtgctcacgatggccgacgaaatggagtttgacgacggccgggccaagacggcgcacaagcaccgcttgctgctgatgctggacgagttcccgacgctcggcaaaatcgaagtgttcgaggaagccttggcctacatcgccggttacggcatgaaagcctacctcatcacgcaggacgtgcagcagctctacaaggcttattcaaactacgaaagcatcatttccaactgccacgtccgcatcgcctacgcgcccaacaaggtcgagacagccgaatggatgtcgaagatgacgggcaccaccaccgtcgtcaaagagcaggtgacgacttcgggcaagcggttcggtgccgtcctcgacaacgtttcgcgcagctatcaggaagtgcagcgcccgctgatgacgcccgacgaaatcatgcgcctgcccggcccgaccaaggacgccagcggggagaagatcaccgcgccgggcgaaatgcttgtgttcgtcgctggccagccggtaatccgcggccgccaaatcctctacttttttgacccggttttctccaagcggtcgaagctcaagcccgtaccgactgacgttgtgcgcgtggcccagcaatccaagcccaccccggccgccgccgggccgtccaacaacagcaacgggggctttgtcgtccaatga

SEQ ID NO: 404438 - DNA, 2697 bp, Salmonella enterica
atgattgcccaccgcatcgagcgcaagccgcatcagtcatcgaacccggccaagctggtcaggtacatggttgcggctaagggcggcatcgacccgacgagctgggaacgcacggccgactacattctggacaccgcgaacgacaccaccaagggcgagaaggtcgccagctaccgcgttaccaactgcggcacggacgaccccgccgacgcggcaatcctgatcttggccacacagggggccaacaccaggtcgaagacggaaaagacctatcaccttgtctattccttcccgcccggtgagcggcccgacattgaagtgctgcacgccattgaggacgagctttgcgaagccatcggcttcggcgaccaccaacgagtgtcggccgtccatatcgacaccgatcacctgcatgtgcatgtcgccatcaacaaggttcacccgacagggctgcaaaacatcgaaccgtactacgacaagcgcaggctgatggaggcgtgcgaacgcctcgaattgaagtacgacctacagcgaaccaaccacggactagaggacaaacaacatgagcacaccagagaacgaagcgaccgaatccagcttgatcgaggtcagcgaccagagcagcgcgatagtagatttcgacgatatttacgagagtcctacgatctctcgtttgccgatgaaccagaggccaaaaccctcaacggtctgcgaacgctgtccggctgccgtatggttcgcgcttccgaaagaacttcggtgctattgccgggtgatacacgcggtgatctacagcaacgaggaaaagaacgcgctgacggcctgcgacggccgggacatggcgatagaacagctattggccaaacaggaagcggcggacgcggccgggtaagcggcaaagccgccgacgcagaggcccacagtggcatcgagacgctgaccgggtacgcggcccgcgagctggccccggcgatgcgacaggcgacgagctggcaggagctgcacgacgcagcggccgagcacggcctagaggttcgccagcgcggcgctggccttgtcatcggcgagccagatttaggcatttgggcgaaggccagcaacgtcggccgcgacctttcgatgaaggccctaaccgaccgtcttggcccgttccagccttccgaacggcaggccgaggtaaaggcgaaccgcaagcggtacgagccacgaccccggcggccggataacccgacgacagcgggcttgttcaaccagtaccagcgcgagcgacaggcggccattctggcccgccgtcagggcctcgaccagatcaagcgcgagagtgcggctttcaatgcgcaggtgaggcagtggagccagacagagcggatgcttttgaaggtcgcgggcaaagggccgaccaaacgcctgatgtacggcacgatcaaacagcaggcggacgcctcgcgccagaagaaccggcagagcgcagacgctcgccgtcaggcgctgttcaagcagacgacgatgcccacttgggccgactggctgacgcagcaggccgagcgcggcaacgccgaggcgttggccgtgctgcgcgaccgcgaggaacggacacgccgctggaacggggagctactgaccgccgaccgggccgacaaggccaaagctgtcgttctcgacaagctcaagcccaaggcccggaaagacgggacgatggcgtacagcaccatcgacggcggcatggtgatcgaccggaagacgcacgttcaggcgcagaaagccacgaccggcgcggcactggtagcgctcgaactggcatccaagcggttcgagggccaagccctcatcgtggaaggcacagacgagttccggcttgaagtcgcccagctcgccggtatgcacggcctcaaggtcacgttcaccgatccggcgatggagcagatgcgccgcgagacggccgagcacaaggaaatggagaaggcctttcaggccgaaatcaaggcatcgagccgcgacgacttcgccgaactggtggacttcggcaaagcgccgttcgagcacgtcaagggcaaccgcaagagctacttcgtcacgctgcgcgacgggaacggcgaagaccgaaccctatggggcgtcgatcttgaaagggcggtggcaaatagcggtgcgaccgtgggcgaccgcgtgcgtgtcaatcacatgggcagcgagagcgtgacgctaccggacggccggacggtggagcgcaacgaatggcgcatggagatagcaccaaaaggaagccagacagccaagccgaaaccgaaccgtccaacccctgcgccgaacgacatggatgcggcgtttctggccgaaactggcctgtccggcaaggcgacgggaaaccggacaggcggcaagcccgcgcagcccgtggattctggcccggcggtgcaaaaatggattgaagaacgcaacaaaaatagagacaaaatatcgtctatagactatcatcggctttggcaatccaccgacgcaggcagggccacatatcaaggtcgcaggcgcatggaagacggtagcgaagtgctgttgttgaagcgcggcgatgaaatgttggtcaagccatccaccccccgcgtagtcgccaaggcggcgacatggaaactaggtcgcgtcgtccaattggacggacgtggacgattcactgacaggagtaacgaggtcgaactatga

SEQ ID NO: 404439 - DNA, 369 bp, Salmonella enterica
atgacagatgaggcaccaaagaaaggcccacacgggggccgcccaagagggcaacacattaaggtttgggtgaacaacgacgaaaaggccgagctggccgaccgggccgctcaggccggtttatcgttgtccgcttatatgaaggttgccggacttaacgcgccgatccgggcacgctccgacttgtcggccgtgaccgaccttgtgcgcgtgaatggcgaccttggccgggtggccgggctgctgaaattgtggcttgcggagaagcgcgggcagggtgcccgcccggtggacgtggaagccatgatgaaggactttcgcgccctacaggaagaactccgctcgatcatgatccgggtggccagatga

SEQ ID NO: 404440 - DNA, 384 bp, Salmonella enterica; identical to SEQ ID NO: 304918

SEQ ID NO: 404441 - DNA, 756 bp, Salmonella enterica; identical to SEQ ID NO: 365900

SEQ ID NO: 404442 - DNA, 456 bp, Salmonella enterica; identical to SEQ ID NO: 365901

SEQ ID NO: 404443 - DNA, 369 bp, Salmonella enterica; identical to SEQ ID NO: 284558

SEQ ID NO: 404444 - DNA, 291 bp, Salmonella enterica; identical to SEQ ID NO: 284559

SEQ ID NO: 404445 - DNA, 312 bp, Salmonella enterica; identical to SEQ ID NO: 365904

SEQ ID NO: 404446 - DNA, 327 bp, Salmonella enterica; identical to SEQ ID NO: 18048

SEQ ID NO: 404447 - DNA, 444 bp, Salmonella enterica; identical to SEQ ID NO: 365906

SEQ ID NO: 404448 - DNA, 1242 bp, Salmonella enterica; identical to SEQ ID NO: 365896

SEQ ID NO: 404449 - DNA, 261 bp, Salmonella enterica; identical to SEQ ID NO: 18051

SEQ ID NO: 404450 - DNA, 984 bp, Salmonella enterica
atggacgaaattacatccgatccgaagtctcccagcatcgcatcaaatcgtgcagaacacgataagcgcataacggaaaaattgcggcgcgaactcgggccgcaaatatgcgagctgctggaagactcgacagtgatcgaaatcatgctcaaccccgacggtacgttgtgggttgaacggctcggggcaccaatggaaaagattggtacgctcccggcctctcgggccgaatcgctcatgggtacggtggcctcgacgctgcgcacccaaatcacggccctgaatccgattctcgaatgcgaactgccgttggatggttcgcgctttgaggcgttgattcctccggttgtggccgggcctaccttcacgatccgtaagaaggcgtcgaagattttcacgctcgataactatgtggagtcgggcatcatgacgcaggcgcagtgcgaggccatcgaggccgctgtacgcaaccgccgcaacgttctggtcgttggtggcaccggcaccggcaaaaccaccctcacaaacggcatcatcgactacatggcgaaggcctgcccgcaagaccgtatcgtcatcatcgaagatacgggcgagctgcaatgcgccgccacgaacgtcgtcattctccgggcagtcgatcacgtcgatatgacccggctactcaaggcaaccatgcgtctgcggcccgaccgtattctggtcggtgaagtccgcgacggcgcagcgttggccttgctcaaggcttggaacactggccaccccggcggggccgccactgttcacgcaaattcggcacctgcgggccttatccgcatggaacagcttgtggctgaggccacgcaggcgccgatgcacgcgctgatcgctgaggctgtggacttgatcgtctcgattgagaaaacagcaggcgggaggcggatcaaggaagtcgtcacggtcgaagggcacgacggcactcaatacctcactaaacccatatag

SEQ ID NO: 404451 - DNA, 492 bp, Salmonella enterica; identical to SEQ ID NO: 365893

SEQ ID NO: 404452 - DNA, 315 bp, Salmonella enterica; identical to SEQ ID NO: 18025

SEQ ID NO: 404453 - DNA, 2508 bp, Salmonella enterica
atgcttgcgttagcacccttccgtagcaaggccgctggcttgcccgatctgctcaactatgccgccctcgttgatgagggcgttgtattgggcaaagacggctcgctgatggctggtttcttcttccgtggtgacgacgcagcatccgccaccacgtcagaacgcaactacctgaccgcgttggtcaaccagtacctggcccggttcggttcgggctgggctgtatggactgacgcttcgcgcttggcctcgccgggctatccagcccctgagcagtcgcactttcctgaaccgattaccgccttgattgacgcagagcgtcgggcggccttcgtcaaggaaaatacgctgtttgaaagcgagtacgcgctagtcctgcaatacctgccgccgacgcggcgggattccaagctgggcgaactggtctacgacgatgacggcgtagacgacagcaacccggccgaccggctgttgctggacttcaagaaaaagctcgatgacctgcaagacggcctcggcgatctgatgcacatgcgccgcatgggcaccatcacggtcggcgagggcgacgatgcctaccagagcgatgagctgtgcaattacctgcactacgtgctgaccaatgagcctatcgcgctgcgcatccctgattgcccgatgtatctggatgcgtggctgggctatcccgagctgtggccgggcgacacgccgaagctgggcaacaagttcatttcgtgcgtggctatcgaaggcttccccggcaactccttccccggcatcctcgacatgctcgacggcctgccaatgtcctatcggtggtcgtcgcggttcatcttccttgaacagcacgaagccgtcgccgcgctcaaccgctaccgcttgaagtggcaacagaagattcgcggattctggtcgcaagtcttcaagtcgcagaagggcatgattaacaccgacgccctgaaaatggcgcaggaaacggaggtggccatcaacgacgccaagtcgggattggtcgcttacggctactacacgccggtcgtggtgctgatgcacgaagaccgcaatttcctgtccgaacaggcccgctacgtcaagcgcgagcttgaacgcaagggcttcgcggcccgtatcgagacggtcaacgcgctggaagcgtggcttggctcgctgcccggccagacctacccgaacgtgcgccgtcctttggtgcataccctcaacctcgccgatctgctgccactggccagcgtctggcccggcctgcgcgaaaacccgtgcgatctgtacccggccgggtcgccgccgctcatgcacacggtaacgaccggcgcaacgccgtttcgtctcaacctgcacgtcggcgacgttggccataccctgattttcggcccgaccggggccggtaaatcgaccttgctggccaccctgcaagcgcagttccggcgctatcgcagccgtcgccgccgcgatggcagcacggcaccggcaaccgtgacggcgttcgacaaggggcgttcgctgtatgcgctgtgcaaggcgactggcggcgttcactacgacattggcaacgatgaggccgacaccccggcgctgacgccgttggtggacattgatagcgagtcagaagccctgtgggccgaagaatggattgcgacttgctacgagttgcaggccaaaaagccgcctacgccgcagcaaaaggccgagattcaccgggccatgaacctgctgcgcgaggcaccccgcgagttccgttcgctcaccgattacgtcacgacggtacaggatgccgaagtgcgggacgcgctgacgcactacaccatttcggggtcgatgggccacctgctcgacggcaaggaagacggtctgaaattcagcaattacacggtgttcgagattgacgacctcatgaaaatgggcgacgcgaacgccattccggtgctgctctacctgttccgccggttcgagcgttccttgaatggccagcccgccatgctgtcgcttgatgaggcgtgggtgatgctgggccatccggtgttccgcgagaagctgcgcgaatggctcaaagagctgcgtaagaaaaactgcctcgtcatcatggctacgcaaagcctctcggatgcggtcaagtccgggctgctcgatgtgctgctggaacagtgcccgacgaagatccttttgccgaacaaggaagccgaccttcatggcaccaaagagacacccggcccggccgacctctacgccatgttcggcctgaacagcaaggaaatcggcatcctgaaaaatgggcagtacaagcggcagtattactacaagtcgccgctcggccgtcgcgtgttcgagctgggcttggggcctcttaccaaggcctttgtagcggtatccgacaaggaagacttggcggaggtgcggaacctgatcgccgatcatggcgatgactggccgcttttttggttgcaacacaaaggagttgattatgaacagtatctttcgcgcaaagctgcgtaa

SEQ ID NO: 404454 - DNA, 789 bp, Salmonella enterica; identical to SEQ ID NO: 365890

SEQ ID NO: 404455 - DNA, 204 bp, Salmonella enterica; identical to SEQ ID NO: 18022

SEQ ID NO: 404456 - DNA, 1719 bp, Salmonella enterica
atggcacggcgcgagcaacatcagttcttgttgtgggtcgtgctgctgctgctcgcgtcgttcgcctttgcgagtaatgcgtcagcggcagacctgcacgaccccagcggctcatttaccggccttctcgatctggtgaaaaacagtgcggcgcagtgggatggcaagctgcgaggctatgccaaaacgctgttctggctgctggcatccatccagttcgtatggacgttcatgcctttggtgttccggcaggccgatttcggcgagattgtcggcgagctgatccgtttcattttggtgattggcttcttctacgcgctgctgctgttctcggcagattgggccgacaaggtggtggacagcttccgaacggcgggcgcgtcggcggccgggctgggtacgtcccaaatccggccgggcgacattttcggtacgtctatcgagctggccaacactatcggcgacgtggaaacgtggaacccgctaacggccactatggtcgcgctggccgggcttctggtgctgctgtgcttcgccttcattgcggcgttcatgggcctgaccatcatcgaatcctatgtggtcatcaatgcgtcggtgctgtttatgggcttcggtgcctcgcagtggacacgcgaatatgcgttggccatcgtgcgttacgccgtttccgttggtgccaagctgttcgtcctgaccttgatcgtcggcttgattgtggactcggccaagacatggcaggcggcctacaaccacgacgacgcgagcatgtggacgatggtggggctggctctggtctgcgcctatctggccaagactatccccgagctggtcgcgggcatgattagtggcacctcgatgggcggcggttcggccatcggtggcatggcagcggccggtgcagccggtgcagcggctgctattgcaaccatcgccacggccggggcggccgctccggcggcggccggtgctcttggcgcggccggtagtggtggtgcagccggtgcaggtgcagcgggtgccggtggcattggtggcggcggtctggctgctgcgatcaattccagctttgccggtggcagtgcgcccgcagcggccgcaactggcggcagcggggcagcttccggcctcggtgcaagcactggcggccaagcggcggccaagggcgcgtcatcggcaggtgcccgagtgggcggcagcgccgcgccacaatcgccggggccagcgccgcagcagccgagcagcggtgtgcagcaggccgccaagcaggccgggaaggccgcgcagggtggtgacgacgacaagggccagcaaacggcggcaggggcgcaaacgcctccggccggtaatgcggacgcctcggcgtccagctcggcccctagcgcctctgcgcagtcgccagcggcccaagctggcgaagggcagggcgaagccaagagcggcgtttctggccatcaaatcgcgtcgggcattacccgtggtgcgggcatcctctccgcgattgccgttcccggcatggaaggcgcggcaggcctgtcgctgggtgccggtgcgccgcagccggtgcccggctccggtgctgacgctgatggctcgatggctcccagctcggccccgtccagtgcagaaccgcagaacgtcattcgcccggcagaaccgtcgccagcatcgccaagcgatgcaggcccggccaagccagacaccaaagggggggagtaa

SEQ ID NO: 404457 - DNA, 306 bp, Salmonella enterica; identical to SEQ ID NO: 365876

SEQ ID NO: 404458 - DNA, 699 bp, Salmonella enterica; identical to SEQ ID NO: 365877

SEQ ID NO: 404459 - DNA, 939 bp, Salmonella enterica; identical to SEQ ID NO: 365878

SEQ ID NO: 404460 - DNA, 459 bp, Salmonella enterica
atggcacgatttcacctgctcgcgccgctcgcggcggcgcttctcctgagcgcctgcgcaacatcgcggcctaccatgtcctacgtcgaaccgaccgtgacggccagcgatgcgcagacgctcgcaagcgatacggtcgcctatctggctgatccgcttcctcctgcgcgaaccaccattgtgctcgatcctcctgccgcgaaggatcacgacgcactgacggcggccatgctgcccgcgctccgtgcgcggggctacggcgtgacgttggttgatccgcagaccggcaaggccggtggtgcgggtgtgcctctgcgctacatcgcatcgccgctcgatagcggcgtgctgctgcgtctgcaatatcagggcatcgaggccagccggtactacccgcgcggctctaatggccagctcctgccgggtgccccgttcacggttcgagggggtgcgcaatga

SEQ ID NO: 404461 - DNA, 1461 bp, Salmonella enterica; identical to SEQ ID NO: 365880

SEQ ID NO: 404462 - DNA, 471 bp, Salmonella enterica; identical to SEQ ID NO: 365881

SEQ ID NO: 404463 - DNA, 249 bp, Salmonella enterica; identical to SEQ ID NO: 365882

SEQ ID NO: 404464 - DNA, 630 bp, Salmonella enterica; identical to SEQ ID NO: 365883

SEQ ID NO: 404465 - DNA, 615 bp, Salmonella enterica; identical to SEQ ID NO: 365884

SEQ ID NO: 404466 - DNA, 432 bp, Salmonella enterica; identical to SEQ ID NO: 365885

SEQ ID NO: 404467 - DNA, 339 bp, Salmonella enterica
atgaacgtagagaaacgccagcgcatcgagcgccgcatcgcacgcgaggccatcaaaggactactcgccgagggctacaagatttccgtctttgacggcgaggaaaccgtactgaccaagagcgtcgatccggccgccatcgaaaaggccatgttcagcacggacgaggatcagtttcacgtcgagcgcgacggcggcgagaagccggaaaccggctgggtgctgttcgtctacggcaacgacggttgggacgtgatcgccgacaacaccgtgaacctcgaaccggcgttgaagggtgcgaccgagctggccgacaagatcgccgacgaagaagcgtaa

SEQ ID NO: 404468 - DNA, 678 bp, Salmonella enterica
atgaacggtgattggctgataccggcgctttgcctgatgggcagcgtggtcgggattgttttcttggtgtcaatgattaggcgggatggcacggcggggcgcagcttatatgtcttcatgggcttggcactcggccttgtcgcccttgtgtatatcgtcgctgactcccggcaaaagaccgctccggcggccgaagggcagcaagtcgcgcccggtacgcagtcgccggaactgatcggtaaggtcgtccgcgttctcgatggcgacacattcgagctgctggtagatcaacggcccgtccgcatccgcgtgaccggcattgatgccccggaaaaagatcagccatttggccagcggtcgcggcagtctttggcgggcatggttgatggcaaccctgtcgcggtgctcgtaaaaggcaaagaccgctacggccgcacactcggcacggtctacgccaagatatgcgccccttctgtcccgtgccacaccgttcatgtcaacgccgaacaggtaaaggcgggcatggcatgggcttaccgtttccacggtcaagccgtcgatccggcaatgctgaaactcgaaacgcaggcccgtagcgagcgagtcggcctgtggtcagcaccgaacgcagtggagccgtggaagtggcggcaccaaatggagagcgcggccaaatga

SEQ ID NO: 404469 - DNA, 231 bp, Salmonella enterica; identical to SEQ ID NO: 283291

SEQ ID NO: 404470 - DNA, 726 bp, Salmonella enterica; identical to SEQ ID NO: 18006

SEQ ID NO: 404471 - DNA, 318 bp, Salmonella enterica; identical to SEQ ID NO: 18005

SEQ ID NO: 404472 - DNA, 450 bp, Salmonella enterica
gtgagcaaacaacattggaaacagcttaacaacatcagatattcgctctaccggatggaacgaccatcactatcgccccgcttttcagccgctttgctcgcagccatcgcaacggcgctcgttgcgggtatggtgctgttgtggggagcttataccgcgtgcctgatcggggcaggagtgggtatcgcggtctaccagttcgcgccgctatcgaagtcgtgggctgagacactggataaccaattgacggcctatgatccggtagacgtgcaggcctatgcagaactgcaaaacgtgacccgttcacttggcaggctcgatcttggcgaggtattccgatggttggacagagaacgccaagcccttagttacagtcggacagcggcatcacaaggcccacaatgtaaattcatcaacaggcaagtccgccaaaagcgtgacggtgattag

SEQ ID NO: 404473 - DNA, 708 bp, Salmonella enterica
atgttcgacaatctgcgccgccggttggcatggcgtgccgagctgcgcgagcttgaccagaaacaggccccggccactctggccaagcccgacgccagtaatcccggccgtcttctttggtgcctgccggttcccggcaagaccgatgttttcatggctttggaaaagggcgagcacgccgatcacgacaggttcgtggtgccggtgaacgccgtggcgttcaatcggctatggctggccggtggcctcaattcaagggagcggccggacggctgtttgttgcgccgggacatgcccgccgatagtaaataccgtcacgcggccgcctgctttgccgaggggccgcagtcgcccgttccgctggccagcgtatcgctggaacgcggtcgggacggcacccaatcggtcagcttcggcgacggcgtgacgcgcacgttttggctgcttgccaacaacgtcgccgcgtttcccgtcctgatcgcaggtgaggccgccgccaagcagctcgcgcagctcgccgggacggacggcagcaccttgcgcgtgtccgaggctttccgacaggtcgaaaaggccccggccagcccacagaagccggtcagcaccaaaaaggaaggggtagggcaggggcaggcgaacaatgcgcctcagcgggccgcacagggccacagaaggccgtcccgaggtggcggcataggtatcgactga

SEQ ID NO: 404474 - DNA, 2016 bp, Salmonella enterica
atgactacattggtaatcgtggaatcaccgaacaaagtaagcaaaatcagcacgattctcggcgacggctacaaggtcatggccagcgttggccatgtgcgtgacctgccgccgaaagagctgggcatcgaaccgccgtctttcgagctgacctatcaaccgaccgagcgcgggcaaggcgtgttggccaaactcaaggccgccgtcgcacaggccgaccgcgtgttgctggccaccgaccccgaccgcgaaggcgaggcgatttcgtggcatcttgccgacgcgctacgcctcaagaatcccgagcgcgtgacgttcacggccatcaccaaggaaaaaatccttgcggccttcgctgcgccgcgcccgctcgacatgcagcgcgtacacgcacaggaagcccgccgggcgctcgaccgcatcattggctaccgcgtcagcccggcattgtccgatgccaccgggcagcgccttggcgcggggcgcgtgcagtctccggccgttcgccttgtcgttgaccgcgaacgggccattgccgcattcaaggtcactcagcactacggcgcagagctgattttcgagaatgacgacagcaccaaatggaaagcacagtgggacacgaaaccgcatttgccagagggcgaaagctacctgctggattccgcgctggccaagctcgccgccgccgttcgcaacgtatcggtcgccgaatacgaggacagcgagaagggccgggcacctgccgcgccgttcaccacctcgacgttgcaacaggccgccggtcagcgtctcaaattgaagcccaagcgcacgatggagctggcccaacgcctttatgagcaaggcgcgatcacctaccaccgcaccgacgccccgaacatggacgacgaaggccgggcagacattgccgcctatgcgcaaggcgcaggtctgccgctggccgagaagccgcgcaagtggaaggcgaaggagggcgcacaggagggccacgaagctatcaggccgacccatgccgccgatcttgaatgcggggagaacgacgacgagcgggcactgtaccgactcatctggcaacgtgcggtcgcgtcccagctcgccgatgcgacctatgccgtccgtaccgtgcgcctcaatggtgacgccgagggcacaccggtatcgttcaaggcgaccggccgcaccctgctggcgccgggttggctggccgtctacgccgacgatgccgaggacgaggacagcgaaccagacgaagccgccaacaatccgattccggcgctcgccgtgggcgcggagctggtagcggctgacggccgcgtactcagcaagaagaccaagccgcctgtccggttcaaggaacctacccttgtcgccgaaatggaacgcctaggcatcggccgcccgagcacctacgccgcgatcctcgacaacatcacgacccgcgaatacatcgtggccgacaagaaaggctatttgcagccgtcgtctatcggcgaagtagtgcgcgatggtctggtagaccgcttcgcgtttatcgacctcgactacacccgaggccttgaggaacagctcgaccagatcgcagaagggcaggccgactaccttagcgttgtgtcggccgcttgggccgcgctcgatgacgagctgggcaagctggaatcggccgacctgccagttgcgcatccgtgcccgacgtgcagcaagccgctgcgccggatcaaggggcaacacgggttcttttgggcctgctcagatcgggaatgcaagaccacgctgccggacgccaaaggcaagcccggcgagcgcaaggccccgccgccgccgaccggcattgcgtgcccgaaatgcggcaaggagctggcccaccgtgtcgggacgagcaagcccgtcaaacgcggcatgaagcaccggccgtatgacttctatagctgcaccggctttccgaaatgcgatgcgaagtacaacaccggcccggacggcaagcccgtgttcggtgatgacgagaaggccgcaggctga

SEQ ID NO: 404475 - DNA, 792 bp, Salmonella enterica
gtggccaccgagctgcgcgagcgtcacccgtcgcggccgctgttgatcgccgccgacaatgaccacaacgcgccgaaggagctggacgccaacggcaagcccaaggtcaacgtcggactggtgaaggccacagaaaccgcagagaagcacggcggcggcgtcatggccccgcagttcaacgacggcgagaagggttccgactggaacgacctcgccgggagccgtggcgacgaagctgcccgccggatgctcgccgagcaaatggcggtagccaagcgtgatgccgccataactgccgagcggttaaccacccttgcgcgtacccgcgacatggaagcccgcaacgacccgacgacgagcgccgacgatgcggccgtagcaacagagcgcgggcacgcggccgaagtgctggccggtgcgcaatccgcactcagtgaggtgcgcagcatggccgccgatggcgtgaccggcaacaccaaaggggcaacccgttcggccgctgccgtcaaagccgggatagaccggaagaccgaggcgatgcacgaccgcgccaaagaggaacgcgaggaagtgctaaaccacggccagaccggcccgctcgatggcgtcaccgctggcgtgtcgtggaaaaagttacccgagcaagccaagcaggcgctcatcgaggacgtgaagaacggcaaggacgtgaccttgccgaaggacgccccggccaagctcaaacagatggcaggccttgaaccgacccctgcgccgcgctcgcgcagccgtgggattgatgcaggcctttga

SEQ ID NO: 404476 - DNA, 1026 bp, Salmonella enterica; identical to SEQ ID NO: 86353

SEQ ID NO: 404477 - DNA, 714 bp, Salmonella enterica; identical to SEQ ID NO: 86354

SEQ ID NO: 404478 - DNA, 357 bp, Salmonella enterica; identical to SEQ ID NO: 86355

SEQ ID NO: 404479 - DNA, 456 bp, Salmonella enterica; identical to SEQ ID NO: 86356

SEQ ID NO: 404480 - DNA, 216 bp, Salmonella enterica; identical to SEQ ID NO: 86357

SEQ ID NO: 404481 - DNA, 219 bp, Salmonella enterica; identical to SEQ ID NO: 86358

SEQ ID NO: 404482 - DNA, 711 bp, Salmonella enterica; identical to SEQ ID NO: 86359

SEQ ID NO: 404483 - DNA, 306 bp, Salmonella enterica; identical to SEQ ID NO: 86360

SEQ ID NO: 404484 - DNA, 711 bp, Salmonella enterica; identical to SEQ ID NO: 86361

SEQ ID NO: 404485 - DNA, 321 bp, Salmonella enterica; identical to SEQ ID NO: 101610

SEQ ID NO: 404486 - DNA, 342 bp, Salmonella enterica
atgatattcgctaaatttcagtcactgacccataagatagacacaatggttattcgtgacattaaacgggagatgccgttgaaatactggtcattcaaagtggcggaatggatcgccagaatcggaatgattggctttgtttgtacctttcttacgtatttcggactcggcctcctcatgcagcactcaggccaaaacctgccggaatcgtttactgatggatgcgctcaagccatcgttgcattgatagctattgccctggtcggtttcctggtcagaggcgggttgtacgtcgatctggaaaaaagaatcctggataagtggcagggctacgttcagtga

SEQ ID NO: 404487 - DNA, 234 bp, Salmonella enterica; identical to SEQ ID NO: 86424

SEQ ID NO: 404488 - DNA, 648 bp, Salmonella enterica
atgaccgctgttattgcactggctaacgggaaaggtggggtgaaaaagtcctcgatgtcacgggctatcgccaccgagtatacaaaggcaggatggggggttcttgggctggatatggatatcgatcaggggtctttcctggactgggggcaacgtaggttgcggaatggttttgaacctccggtgacaattcagggatgcgggacggtttcacaggcgaagaaacagattgaatccgggcaatgggatttgattgtcatcgacagtgctgcgtatgcgacgaaatcgttactcagcctgattgatattgtcgatttgctggtactgccgacagggtttagcgtggacgatctacgaacgaccgttacgaccgtaaacgcgctgcgtaacaaagggcattcgacagataaaatggcggtggtgtttgcgggggtaagtgaaagtgagagtgaatatcgcgcggcgctggaatacctgcaaccctgcggcgttcctgtcattccgggcgctattccttttctgacatcgttcagccaggcgcaggataaagggcttgctcttacggagtcgccttttcctggcccacggcaaaaagctgatgatgttgtgcagggtgtgatcgaccgactgacaacgcttacgcagtag

SEQ ID NO: 404489 - DNA, 648 bp, Salmonella enterica; identical to SEQ ID NO: 86349

SEQ ID NO: 404490 - DNA, 453 bp, Salmonella enterica; identical to SEQ ID NO: 86350

SEQ ID NO: 404491 - DNA, 567 bp, Salmonella enterica; identical to SEQ ID NO: 86351

SEQ ID NO: 404492 - DNA, 303 bp, Salmonella enterica
atgctttacatcaggatgacgatcagtcttattgccgccgcctgcgttcgcgccactttcagtgcgctgaatagccgatgtacgattacccttcgcccactccttaacgagcaaaccacgatcgatatgttcggtatcgaaccatgttttaaggaactggataatagtccccagttcaggaatttttctgtcaactgggaatacatttttgatggcattaactgctttgtgaatatcatgctcaatagcttttttgaacgcttcaacattctcggcggcaagcagcaggttctggacatatga

SEQ ID NO: 404493 - DNA, 243 bp, Salmonella enterica
atggcaatgcgctgtcctcgctgccgtgcaatagcaaaaaccagaaccagcgttgagctgagtttgcttgtacggcgcagctatcaccagtgtcaaaatatgttgtgcgggtactgtttcaccagcatgacggaaatagacggttcactaaatcagactcagccagcgcccggcgcgatggtgccacaagaagcttttccccgaagtcaccacggtgaagatcagctatcgctggcactataa

SEQ ID NO: 404494 - DNA, 1119 bp, Salmonella enterica
atggacacgacagaaaacagatattcgccgcgcccggcgttcagtattgagattgaaggtaagcagcttacagcgctggataaccggctgctctccctttccctgacagataaccggggctttgaagcggacacgctggatctgactctagatgatgcagacgggcaggtagcattaccatcacgcggcgcaaagatatcggtggcgctgggctgggataatgatccattggtttttaagggcgtgtatacggttgacgagatcggacacgctggcccgcctgaccagctaacgatcagtgccagaagcgcagatttccgcgatactttcaacgtgaagcgggaatatagctggcacgatattaccgtgggggatgtggtcgccagcattgccagccgctacgatctgcgtgcgggtgtcagtgaagaactggcgaagattgagatagaccacgccgatcagacgagtgaatcagatatcagtttcttaacgcgcatggccgaaatgctgggcgcggtggcaaccattaaaaacggtatgcttctgtttatcacgccaggtaagggagtgacgcagagcggcaagccgctgccggtgatcgagatagtccggtcaagcggtgataaacatcgctttaacgtagctgaccgcgacgcgtacacgggcgtaactgcatactggcttgatctcaactttggtaaaaaaccatccactaccgtgaagaaaacaacccgcaggcggcgaaccagccaggccaaaaagaaagagcctgcatccagcaaaaaagagggtgattatctggccggggccgaaggtaacgtttttgttatccgtaaaaccttcaagacggaaaaggcggcgaagcgtgccgctgcggctaagtggcgggagttgcagcgtggagcggcgacgttcagcatcaccctggcgcgtggccgcgcagatttgtacccggaacagcccgccagcgtctatggctttaagtccacgatcgacagtgggaactggacgataacgcggtgcgttcacgatattggcgggggagggtttaccacgtcgctggaactggaagtaaaaatcgacgactggacagcggagagtgacgattcaacgtcttaa

SEQ ID NO: 404495 - DNA, 1194 bp, Salmonella enterica
atggccactaactaccatcacggtgtaaccgtcacggaaaccaccgacctaagcacgatgatcaccgacattgattcggcggtgatcggcgttgtctgcaccgctgatgatgcggacgaaacagcgttcccgctggatacacctgtactgatcacccgcgtggctaacatgctgggcaaggcaggtaaaaccggcaccctgtttaccaccctgaaagcgatttcagaccagaccagcccgcaaaccattgtgatccgcgttgctgatgctgcaaatatcgaaccgccagaaggcggcacagcacagacacaggatcaactggttattggcggcaccgatgcaaacggacgctttaccggcatgtacgcgctgctgtctgccgaaatgcgcgtaggcgtgcgcccgcgtgtgctggccgttcccggtcttgatacggaagcggtggccgcacaactcggcgtcattgccgaaaagctgcgcgcgtttgcttacgtggcagcgaacggctgcaacaccatcgccgaagtgaaggaataccgcgagcaattctcccagcgtgaaatgatggttatctggcctaatttcatctgctacgacaccaacgccggggctaatgccaccgtgcccgttggtgcccatgcagttgggatgcgcgccaaaatcgacgcaacgcagggctggcataaaaccatttccaacgtgcccgttaataacgttctggggatggatcgggatatctatttcacgttgcagggcaccgataccgacgcagacgaactgaacgcagcaggcgttaccacgctgatcaagcaggacggctaccgcatctggggatcgcgcacctgcgacgcggaaacgtatatcttcgaaagctatacccgaaccgcgcagatcgttgcggataccgtcgccgaagcccatttcgcctatgttgataaaccgcttaccccgtcgctggtaaaggacattgtggacggtatcaataagaagctgacctcatacgtgacggctggcaagctgctgggtgcccgctgctggtatgacccggaaccgaatacctcggaaaccctgcgcaatggtcaactgaccattaagtacaactacacccctgttccaccgctggaaaatctcagtctggtacaggagttcaccgacgaatatttcgctacgttttccagcgcagtgaataactaa

SEQ ID NO: 404496 - DNA, 516 bp, Salmonella enterica
atggcactacctaagaaacttaaatatttcaatatgttctttgacggggataactatttcggcatggttccagaaatcacccccgccaaactcacaaaaaaaaccgaagattaccaggcgggcggtatgccgggttcggttgcggtggatctgggcttcgacgctggcgccctggatatggatattacgctgggcggtatggatgccgggctaatgaaaaaatggggcgttaccactgcggacggaatgcaggtgcgctttgctggctcttaccaggacgacgcgaccggcgacgccgtaccgtgcgaaatccagacgcgtgggcgcttcactgaactggatcccggttcggcaaaggttggggatgatacttcgcataagtacaccctgaaaaacacctattacaagctgaccatcaatagcgaagaaattatcgaaattgatgtgctcaacatgatctacaaagttgccggtgtggatgtgctggaaaaacaccgcgctaacatcggcctataa

SEQ ID NO: 404497 - DNA, 336 bp, Salmonella enterica
atgagcaagaccaaagaaaacaccgttattcttaccgcccctattacgcgcggtaagaccaaaatcaccgaagtggcgatcacttccgtgcttaaacaggctggatcactgcgcggcctaaaagcctatgacgtgctgacgtccaactatgacgcgctggttattctgctgccccgcgttaccgctccggcattaaccgccgatgagattgcccgaatggacacctgggatttttgccagttagccaacgcggtggttgattttttgcaaccctcttcggatctgaccgcgacggatacgggcaacgaatcatccgatgcccctgcgaacgcatag

SEQ ID NO: 404498 - DNA, 2928 bp, Salmonella enterica
atggcagaccgcaatttaaatatcagggtggcattcagcgccctgaataatatgtcccgccctgtcaacgcggcgcgccagagtgccgccgcgttggcgtctcaaatcaatcagaccaaaaccagcattaaagggcttgagcgtcaggcaaccagctttgatcgcctcaccgcagctaataaaaaaaccactgaacaactggcccaggcgaaagaacaggcccggcaaatggcggcggcttatggcccgttacgccagcgcagcgccgaacaggttgccgctctcaatcagcaacgtgcagctattcgccagttaacccagcagcagaaaggcgagcagacgcagcttaaccagttgcgcgccagcttctacagcgaaggcattgcgatcagcagcgccagcctggcgacggaacagatcaaccagcgcaccgcgcaatacaaccgccagcttgccgaacagcagcgacggcttgacgctgttaaccaggcgcaggcccgttacagccgcgccaaagaaaccggcgaaaagatgatgagcgggggaatgaaaaccgccgccgtgggtgcggcaaccctcgcacctgtcgccgctgcggtgaaatcctacagcagccttgaagacgcgatgaagggcgtagccaaacaggtaaatggcttgcgtgacgacagcggcaaccgtaccccgcagtatgaagaaatgcagcgggcgatcatggatgccagcgaaaagctgccaatggctaacggtgctgttgactatgccgccctggtcgaaggcggcgcgcgcatgggcgtagcaaacagcgatgatccgtggaaaaaacaaaaagccgatctgctggctttcgccagcatggcggcaaaagcttcggtagcctttgaactgcccgccgatcagctttctgaaagcctgggtaaaattgccgggctgtataaaatccctacccagaatattgaacaattgggcgacgccataaactacctggacgataacgcgaagtcgaaaggctccgatattatcgacgtactccagcgcgttggcgggcttgccagccaactggattacaagcaagccgccgcgctgggttccacctttctgacgctcggcacccctgccgaagttgccgccagcgccaccaatgcaatggtgcgcgaactatcaatcgctacggttcagggcaaaaactttatgcagggtctggacgccctcggcctcagtgccgaaaaagtccagaagagcatgtcagtggacgcgatgggcacaatcatttcagtgctggaagcgtctaaaaaactggccccggatcagcaggtagccaaccttacccagattttcggcaaagagttcggcgatgatgcgcagaaacttgcgaacaacctgcccgaactacgccgccagatagaactgacgcagggcgcagccgctaaaggttccatgaatcgggaatctgatatcaataaagcttccctttctgctcagtggcaattgaccaaaaccggcgcggttaacgcattcagttcagcaggggaaacgctccgcgatccgctgatggatatcatgcttaccgtcagtaaggtggttggcagcgtccgccgctgggttgaggcaaacccggcgctggttggctcaataatgaaagtcaccgcagccataggcgcgttactggttgtcgtaggtggtctgatgctgtccatcggcgcagtgctgggcccgatggcacttgttcgcctcagcttcaccacgctggcaggggaaggaggaatagcgcggctgactggcggagtaatgcgcctgggtggtgcgttccagtggcttgccggttcgcctatgcaggcattattaagcgccggtcgcatggtattcggcccgcttatcacgctactggctggcatttctgcgcccgtctgggggttgatcgcgctctttgctgcggcagcagtggccgtcattaaattctggcaaccgattaaggcatttttcagcgggttctttaccggcctgatggctggccttcaaccaatcacgcaggcatttaacgccgtatttgcaccactggccccgatttttgacagcatcgggaacgcgatcagcggggtctgggagtggtttaccaaactgctggaaccgatccagttttccagtgaagcgctggcatcctgcaccagtgcaggggaaacattcggcaagatggtagggggtgcaatcagcgcgctgacgcttcccattcaggccgtagccaaagggctgggctggattctggaaaagctgggcgccattcccgacgcagcgaaagcagcgcagcaggttgcgcagcaaatgacgccggaagcggtcaacaatctggcagaccgggttaacgccttttccggtgacgtgcaggcagtcgcgaaggaaagtaaaaaagccgaagagaaaaagaaaaccgatgagcagaaaaaacaggacaacctgattaactcgctcaaaggcccggccaacatcgtgccgaagatgaacagtagcctggacaagatcgccacccataccacggagaagaaagacgggcccggcgaaatcgtcttcaagaataagcaaccctatatcccgatccgtggcggatattcggaaccgcttaagcaggcgcagcgccagttaccatcccttaccgattgggtgacgcagcaggccggatcgctgatctcttctgttacgccgtggcaggttgagaagcccgccgcacgggagcccgtttcggcgtcgccgtctgcggcttccgtcgctgcgctcatgcctgcgccgggtggcgatgtgtataaccttaactttgactttagcggccagaaactggacgaagaaaccattatcaggcgggtgcgcgaagaactggcgttagcaaagcagcaggccgaccggcgcaagcgctcccaactgaccgatcacgtctaa

SEQ ID NO: 404499 - DNA, 450 bp, Salmonella enterica
atgatgatgattctggggatgttccccttttcactgcaaaccacgccttaccagagtgcgaataaaaccaattcctggcggcacgtcaaaaacgatcgcgtggggaaatccccgcgctatcagttcatcggcgcagatgaagaaccgttcgtactcagcggcacgctgtaccccgaaataagcggcggtgatgtgtcgcttgtcatgctggaaactatggccttttccgggcgcccgtggcccctgatagaaggcacgggcaggatctacggcatgtatataattgagcagatcacacaaaaccggatggagttttttaaggacgggaaggcaaagaaaattgattttacgctcaacctgaagcgggtaagcgaggacatacgggaaaaactggccgaaacgaccactgacgatctcttctctcttgtgaaaactaacctttcgatataa

SEQ ID NO: 404500 - DNA, 615 bp, Salmonella enterica
atgagtaatgacctgttaccacccagcgccagccgaatggagcgagtcgccgcgcgcgtctgcgcgtcgttgggggaagtgcccgtgccattgcgtcagttgtggaacccgtggacgtgtcgggccgagctgctgccctatctggcgtgggccttctccgttgatcgctgggatgaggcctggccgatcagcacgaaacgaaaggctgtggccgatgcgttctatctgcataagtacaaaggtacaacgggtgccatgcgccgggttgtggagccgttcggcttcttcatccgggttaacgagtggtggaacattgataccgcaccgggcaccttcacgctggatattggcgtggaagaccagggcattagtgaagaaacctatcaagagcttgaacgcctgatcgccgatgtgaagccgtgcagccgtcatatgctgggaatgtctcttcacctgcaaacaaccggcgatctgtatatcggcgcgggcagttattccggcgatacgttgaccgtgtacccgtatttccctgaaaccatagccgtgggcggtgatgattacaccggggcggcaatccatttaattgacaccgtggagatcgcaagtggcgactaa

SEQ ID NO: 404501 - DNA, 912 bp, Salmonella enterica
atgagcggcacgatcgatttatcgcagctaccgccgcccgtggtggttgaaccgctggacttcgaaacgcttttcgcgcagcgcaaggccgcgtttattgcgatgtacccggaagacgaacaggaagagatcgcccgcacgcttgagcttgaatcggagccgatcaccatgctgttggaagagaattgctatcgcgaattgctgttgcgccagcgggtgaatgaagcagcccgcgcggtgatgctggcttattccacggatagcgatttggataatctggcgatcaatttcaacgttgaacgtctgaccattcaggaagaagacgacagcgttaccccgccaattgaagccgtgatggagtcagacgcggatttacgcacgcgtacccagcaggcttttgaaggtctgagcgtggccgggccaacggatgcatatgagttttggggtcgttcggctgacgggcgcgtagccgatatttcggcggtcagtcctacgcctgcctgcgtcaccatttcggtactgtcgcgcgagggtgacggaacggccagcgatgatctgctttccgtggtcgctgccgccctgaacgatgaagaggtgcgcccggtggctgacagggtaacggtacagtctgcggagatcgtgtcgtatcagattgatgcgacgctttacatctaccctgggccggaagccgaacccgtccggcaggcatcggaacagcagttacaggcgtatattgccgcgcagaatcgcttagggcgcgatatccgtctttctgctatctacgccgccttgcacgttgaaggcgtccagcgcgttgaactggcgcagcctgttgcggatatcgtgctgagtgactaccaggcatcgcactgcaccgaatacaccataacggtgggtggttacgatgagtaa

SEQ ID NO: 404502 - DNA, 363 bp, Salmonella enterica
atgagtacagtccgttacagcggcatgaatgccagttcaggccatgccatcaccgacaacgagcatatagcgcagtctatcggcgatattctgttaacgccgatcggttcccgtgtaatgcgccgcgcttacggttcgcagcttttcaacctgatagatcagccggtcgataacgccataacgaagctgcgcgttatgtctgccatctacagcgccctgtatttatgggaaccgcggatctctctgaccagtatcaccctgagcgcgccgggtgccggtcggctggttgccactatccaggccaaccgcaccgacaatcagacgccatttaacgccgatattacattgaggggccaggcatga

SEQ ID NO: 404503 - DNA, 630 bp, Salmonella enterica
atgaatttaaacgaactctatcgccttatctgcaatctcgcccgcattggcaccgtgctggaagtggatacggaaaagtaccttgcgcgcgtcgaaacaggcgagaacaaaaccgactggatccgctgggcagtgccgcgcgccggtgaagccgtgacgtggtgggcgccgacagtgggcgaacaggtttatattttgtgcccatgcggtgagatggaaacggcattcattgccggaagcctttacagcgacgccgcaccgccgccagatgctggcgctaccacctgcgtgatcttgcacccggatggcgcccgtatctcatatgacccggaggccagcgcgctggttgtcagcggggtgaaaacggcaagcgtcaccgcgtcggaatccattaccgccaccgtgccggtggtaacggtcaaggcagatacgcgcgttaccctggacacgccggaagtggtctgcaccaacaagctgatcaccgccacgctggaagtacaaaacggcggggaaatgaagggcaatattacccattcaggcggatcgctttcgtctaatggtgtcgttgtccattcgcacaaacatagtggcgttcagtccggtggtagtaatacaggtggcccggtatga

SEQ ID NO: 404504 - DNA, 645 bp, Salmonella enterica
atggcaggacaacaaaccgatcccctcttccagcagttagacgactggctagccagtgtggccgcgcagctttcgccggggcaccgtcgcaagctgacgcgcgacgttgcgatcgggctgcgtaagcgtcagcaaaagcgtatcgccagccagaagaaccccagcggcgaaagctatcaggcccgccgccgcaaaatccttcgcacccagggcgggataaagttcatatggaatgatgaagccagggagttacgcaactggcgaaccacgggcaggggtgagcaccgcgcaatcaccggctatgacgttgatcgcggtgccctgcgcacgttctataagcgcgatatccagcgctatattgaaatcaatctcaagcagtccaggcagaaccgcaccagaaaggatccgatgttccgcaaactgcgcaccgcacgctttcttaaggcttacggtacgggcggcatggcagtggttggctttcaggggcataccgccgaaatcgccagcgttcaccagtacggtgaagttgataacgtggtgccgggtgcccgtgcgcgctatccggtgcgtgaactcctgggcatgaccgagggggatttagactggctggccgatactattgtcgccttcatgcaagagatttga

SEQ ID NO: 404505 - DNA, 495 bp, Salmonella enterica
atgcttaaacccgatttgctgcgccagatgataagccagcatgtgccctggctgcgcgagaatcccgataatctggcggtttacctgcgtaaaggccgtatggtcagcaccggccagcgtgctgctgcgtttgagtatcgctatacgctggaagtgctggtgatggattaccctgaatcgctggatactatcagcgtgccagtgctggcatgggcgcgcttatatcagcctgatctgttgtttaacccggacaggcagcagaacggcataacattcgaagccgatatcctgagtaacagcacgatggacgtgctgatccagattcaggctgatgaagcagtgatcgtcacccgtgaagatggcgagatcgtcacccgtcaccgtgctgaccctgcaccggggccagaaattggcgcgtggtcactggtatttgttgatgaggttagcggcgaaacatggcaggacaacaaaccgatcccctcttccagcagttag

SEQ ID NO: 404506 - DNA, 531 bp, Salmonella enterica
atggggttgtcacgctggaaagtgatcgtttgtcttgtgctggccgctgctgctgtttggggttttagccactggcgttacagcgccggttatggtgatgccgatcagcactggcgtgaagagtgggcgcaacgtgatgcacgcgacgccgccgcgcaggcgcaaaggcaggctgaggccagggcagaagaacaacgccgacaaggtgaaattgatgcgatcagaaaacaagctagccagcagcttgctggcgtgcaggctgatgccgatcgtgcccgtgctgcttctcgtgggctgcacgacagggccgacaaacttgccaggcaactggcagaccgtgaacgcgcctgcggtgccggaactcccggcagaagcgaggcagaaaccagcggcgccgtactgctcgccgacctgttccgccgcgctgacgatcgagcggggcaactggcaaaagatgctgatgaagcaagagccagaggattagcctgtgaggctgcatatgatgcggttaagtcagggagggataagtaa

SEQ ID NO: 404507 - DNA, 441 bp, Salmonella enterica
gtggagatgagcaataacggcatcaacatgctgaaaggctttgaagggtgcaggctggccgcttatcaggattctgtaggcgtctggacgatcggttatggatggactcaacccgttaacggcgtgccggttggcaagggcatgaccattacgcaggaaactgccgatagcctgttgcgtagcggtctggtgcagtatgaaaaaggcgttacagggctggttaaagtcaccattaatcaaaatcagttcgatgcgctggttgattttgcctacaacctgggcgtaaaggcgctggaaggttccactctgctgaaaaagctgaatgctggcgattacgccggggctgcggctgagtttccaaaatggaataaagcaggcggcaaggtgttgccggggctggttaagcgtcgggaagccgagcgcacgttatttctggcctga

SEQ ID NO: 404508 - DNA, 336 bp, Salmonella enterica
atgcacgacacaccaccgggattactcgaacaaacaatgaaatggatcgctacttatctgccgacactgtttgcggctggtgcggcgctgagtatttcggcgctaatgagcctctacgatgggcagtctttgcttaaaaccgccaccggatcgctggtatgtgggattgtcacgcttgctgtggccggttcgctggaatatctggggcttccgtccaacgcagtcacattcgtgggcgcctcaatcggatttatgggcgcggataaagtccgcaacaaagttaccgggtttatcgaaaaccgaatcggagggatgaaaggtggagatgagcaataa

SEQ ID NO: 404509 - DNA, 201 bp, Salmonella enterica; identical to SEQ ID NO: 15003

SEQ ID NO: 404510 - DNA, 489 bp, Salmonella enterica
atgagtctggtagccactgagccagtacggccaccatccgatccagtgcctgatgatggcggcgcgaaggttgaaagcctgccattctggccggtcatttcgctggctgaactacgccgcgcgatgcgtcttgatgggcaggtgacaaccgatcgcctgatgtcgcgaacggtggaagcggtggcccatgttaatgatcagcttttcctgtggcgccaggtgcagattgatgtgggctatgagtcattggcagaaatcccggccagtccggtgaatggcacttccgtgaaggtatggcgctataaaaacgccgtgtattcactcactaaggcgctgttgattgaaggctaccgcgatattgacaccaccagtaaaggcgaagaccacgcggcggcattgagcacgcagattgatacgctgtggcgggatgtgcgctggtcaatccgtgatatccaggacgaaagccggggtctggcggagttggtgtaa

SEQ ID NO: 404511 - DNA, 849 bp, Salmonella enterica
atgttgacacctgctcaacaacattttaaccgcgtgatggctgaacgccgccacgccagccgtgagccgtcgcagcttgaaatgacggcctacgaaaccatgcttcaccgcctgcgactggataaagcccgtttaagccgtgtccagtcccagaaggctaaagcggatttaaaacgcgaactgctgccggactaccagccgtggatcgaaggcgtacttacggcagattccggccagtctgacgacgtgttaaccaccgtcatgatctggtgctgtgactgcggaaacatcgccgaagccctgcgcattggtcagtatgtcttgcgccataagttgccgatgccggatcagtatcgccgcaccactgccaccgtactggtggaagaaatttgcgatcccgtcctggctgcattcaaagctaacccagctgttgcgccggtcgccgctgacctgctggaagcgttacggggcttaaccctgaacgaagatatgccggatgaggtgcgctcaaagctgcttaaggcgctggggtatacgctgcgcctgactgacaacgttgaatcgcttaccgctgcggttgaatacctgcgccaggcggcagtgttgaacccgaaaaaagcaggcgtaacccgtgatattgagcttctgcaacgtgcgcttaagaagtccgggcaacctgctgacggtgacggcgcagacggcaagccagaagcaaacagcaccgaaacccagacggcaacgccgctagcccagccaaaagcgaagcgggaaaccaaaaagcccgccgctaaaagcaagccggcagcgaagaaaagaaccacgacagcccgccagaaggcggcgtcataa

SEQ ID NO: 404512 - DNA, 1047 bp, Salmonella enterica
atgcgtaattctacccgtgaattgtttgatgcgtatcttgagcgacaggccgaactcaatcacatcaacaaatcccacgtaacaaaggcgttcagcattgatccgagcgttgagcagacgcttgaagacaaggtgcagcagtcttccgaaatgttgaagaagattaatatctacggcgttaacgatcagtctggtgaaaaaatcggtctgggtgtgagcgggccgatctccagcaccaacaattccaccaccgatcgccgccagcctgtttccgtcacggcgctggattcgaacaaatacacctgtaataaggtgaacgcggatactttcgcctcttatgcgcagcttgatgcctgggctaaattcccggatttccagcagcgactgagcaatcagatcatccagcgtatcgcgcttgatcgcatcatgatcggctttaacggaaccagctacgcggataagtccgaccgcaacgccaacccgcttttgcaggattgtggtatcggctggctgcaacagtaccgcgcaaacgcgccgcaacgtgtcatgaaagatatcaccgtgaccagccgcgacgattccaaccaggtgatcgccaaaggtgattacggtaactacgactcgctggtttatgacgcggttaactcactgatggacgaatggtacaaagattcgcccaatctggtggtgatcactggtcgcaacctgacggttagccgttcgttcccgatcatcaatgccgtaagcaccaataacccgaactccgaagcgctggccggtcagttgatcgcgtcgcgtaagacgatcggcaacctgccttcgtttatcgcgcctttcttccctgatggcagcatgtttatcacttcgtgggaaaacctgtcgatttactggcaggaaggtgcgcaccgccgccgcattgtggaagagccggaatataaccgcgtctctacctacagttcgtcaaatgatgcctatgttgttgaagattacggcttcggctgtctgatcgaaggtattaccgccgccgaaccagcaccggcaccataa

SEQ ID NO: 404513 - DNA, 846 bp, Salmonella enterica
atgccaatgacaaattttttccgcgccgcagtagagggcgcaacctgtgatggccgcgtgctggaacgtcagcacatcaccgaaatggccgaacagtacgatccccaggtctatggcgcccgcgtcaatctggagcacattttaggctggtcgccgacaagcgatttccgcgcgtatggtgatgtggtcgagactaaaaccgaagagattgccgaaggcccgttaaagggcaagctggcgcttctggtgaaggtggacgccacggatgaactggtcgaactgaagaagaaacgccagaaaatctaccatagcgttgaggtgcatccgtcctttgcagacaccggcaaagcctaccttatggggctggcctgtactgataacccggcgagcctgggcaccgaaatgatgaagttttgcacccagaacgccagcgccaacccattggccgcgcgtcactacgcacctgaatgcttcttcactgaaaccctggaatcgtcacttgaatttgcacaggaagagccgccagcgtccgacaccgggaagaatttcttttcccgtatcaaggaaatgctgaccggaacccgccagcacttcgatcgtgaaaatggcgatatccgccaggcggttgaactggtagcggaaagccagggtgaattgctggacaagatggaaaaactgagcgcagggcagcttaagaacaagcagaccgccgaagcggtggagaagttgcgctcagagttcgacgagatgaaagcgcagctttctacccaggacgccagcaaataccgccgcccggaagcgaccggcgcaactgaaaaatctaacgcccagcttgctgactgctga

SEQ ID NO: 404514 - DNA, 1713 bp, Salmonella enterica
atgaatacagccgaagacctcagcacaaaagccaaaagcctctactggcaggcgtttagcatcactcagatttctaaggaaatcggggtgagcattaacacgatctacagttggcgccgccgctatgaatgggataaagccacccccatgcagcgggtgcaggatcgcacgcacgttcgttacctgcgcctggtggaaaaggacgacaaaaccccgaaggacttcaaagaaattgacctgctggcgcgccagcttgaccgctttgaacggcatgagcgacgcgaccaggagaaagaaaagaaggcgaagaccccgaaaaaccatttcaccgaagaacagataacccagcttcgcgccctggtctttgattcgctatacgagcatcaaaaacgctggttcaaacagtggaaccggcgtaaccgctttatcctcaaatcgcgccaaattggtgccacctggtactttgcccgcgaagcgctgttgcgtgcgctggaaaccggaaataaccagatattcctgtcagccagccgcgcccaggcgttccagttcaagcggttcattcagaagctggcaagggaaataggagtagaacttaagggcggcgatgcgattgagttaagcaacggtgcgatcctgtactttctcggcacctccgccgcgacggcccagagttataccggcgatctatacctggatgaagccttctggatcagcaacttcatcaacctgcgcaaagtcgccgcaggcatggcgacgcagaaagggctacgccgcacctacttttcaacgccatccagtgaagagcatgaagcctatcccttctggactggcgatcagttcaataaacaccgtccccgtgccgatcgggtggatatcgacaccagttataaggcactgaaaaacggcaagctatgcggggataacatctggcgccagatagtcacgctggaagacgccgtgaagctcggcttcgatctggttgataccgatgaaatccgtaacgaaaactcccccgacgaatacgccaacctgtacggctgcacgttcgttaaagccggggaacgcgccttcgactacaacgcaattttgggctgcggcgttgatggctacatgccggacgcgtggccggactggaacccgtttgcaccccgcccgctgggtaatcgccctgtctgggttagctatgaccccaacggcagcagcggtaaaggcgacagcgccgggctggttgtgctggccccgccagccgtgccgggtggtaagttccgcgcggtagagcgccaccagttacgcggtatggagtacgaagagcaggccaaatttattaaagagatcaccacccgctacaacgtgcagcacattgctatcgacggcacggggatcggcgatgcggtttatcaactggtgatcaagttcttcccgcaggcggttaaatacaactattcaccggttcttaagcggtcgatggtgctcaaaatgttgatggtcattcgtgccgggcgctttgagttcgacgccggaatgatggatctcgcacagtcgtttatgaccgtgcgtaaagtcaccgctggcggcgttattacctaccagtccgatcgcgcccgtggcagcaatcacggcgatctggcatgggcaactatgcagggcatttacaacgaaccgatcggcgcggaagtgaccggcgataacggcagttttgtggaggagttttaa

SEQ ID NO: 404515 - DNA, 1050 bp, Salmonella enterica
ttgagcggcaaaaagaaattcagggcgccaactgctgcgccagccagcacggccagcaacgcagccaccccgctggaaagcgtggaatctttcagctttggcgacccgatcgcagtcaacgatcgcgcgtctcttatggagtgcctcgaatgccataacaatggccgctggtatgaaccacctatcagcccctacgggctggcgcgcatgttcgacgttgccgcctatcaccagtcaccgctgatatttaaacgcaatgttatcgccagttgctacataccacacccgctattgacccggcaggagttcaccgcctgggtgcaagattatttaattttcggtaactgttacatggaatgccgccgcaaccgactaggccagccgattgaactgcggcacagccaggcgaaatatacgcggcgcggcatagacccggctcaattctggtttgttccgcgctacgttgacgatcacgcgttcgaaccgggcagcgtctgccaaatcaagaaccccagcccgcaccaggagatctacggcgcgccggaatatctggccacgctacaaagcgccatgctgaacggcgaagcaacggtgttccgccgcaactactacattaacggcagtcatgcgggtgtgatcgtctacctcactgacccggtggcgaataataacgatgtggaaaagcttaagaagtcgctgaaagatgcacgcggcaacggtgcttttaaaaacctgtttgtctacgcggcgggcgggaaaaaagacggcctgcaaattatgccgttcagccaggtggcggcgaaggatgagtttactggcatcaaagacgccacccgcgacgacctgttagccgcgcaccgcgtgccgcccgttctgatgggggtaatgccgaataactccggtggcttcggcgacgtagagaaagcggcgaaggtgttttccatcaacgaactggctccgatacaagaaagcctgaaagagttaaacgactggctggggatcgacgtggtgcgcttcaacccttacgcactgttgcaggcagcaatctga

SEQ ID NO: 404516 - DNA, 1113 bp, Salmonella enterica
gtgtttaacggttctaatttgcgattggctcgtttgtatcacgagttatcactggagcaagtagctgagcgggtcgataagacccgccagtacattcagcggctggaatccggctcggctgtgcctactcctgagcttgcgaataaattagctgccgtattgctggtcacgcctgaatttttcgcagtacaagagcaatctccagtgaatgaagagatcgttcacttccgcaagcgtagttcaacacgtatggctactaagtgggcgacgctcgctaaagctgaattgtatcgccgtctcattgaagtttttgatgagtacttgaatttaccgccagtaagatttcctgaactgagagtaaatactcaagaggacatagaaagagccgctgagaaatgccgggctgattggggattaggttttgggccgatcgacaacatgactcgtcttgctgaaaagctgggagcatttgttacttctttcgattctgtctctgatgatgtggatgcgctttctgttcctttaagtcggccattcattgtaagaaatacggctaaaaaatcgccttgccgtcagcgttttgatattgctcacgaagttgcacatttgattttgcacgaaggtatttcaacgggggatcgggtaactgaatctcaagctaaccgttttgcatcagcattgcttctaccccgatcggcgatggcaaaatattttcctcgcccaattggcggtcgtatcgactggcaggggctaagtcagtttaaactgacgtggaaagttagtaaggcagcaacaatttatagagcacatcagctttctcttttaaccgatgcccaatataaaacggcattcttcggtttaaagcgcaagggggaagccattgatgaaaaagaagattatttgattcctaatgaaaagccagagctatttcataaggcaatgaagtttctcttaacggatctgtcagttgatgttgagtcattagccaagcgtttgtgtattactccagctatgttagcggagttagcgaacgataattcgttagattttgccccagaaatcgctaccgaaaatgttgtttctttatctgcttatcgaatgaaatctgcataa

SEQ ID NO: 404517 - DNA, 594 bp, Salmonella enterica
atgcaaaattacccattaccttggacgtttcatccgcagttaaccgaagaacgcttatctatcattgcggaggcactccttaaagtgcaggaagacacacatgagcttttgtcttcttcgcttgatgataattatacccgcgcaacatgcacttttggacgccagaagaatcgaatcgtcaaactgtgcatgtcaaaaaaatacgactggttggggctttctaatcccaataacgattacacaatcactattggcggtatcccaatccgttcttttagcgatgatccgactaatccgaaaaaggctaacttcttccgaaagaatagtgttgatcagttattcgcatcagaagatacaatccctacgatttggcgcttcgttgtagagaaaccagagttcgaaggtgaaggtgggcgagtgcattttgcgggttataatgcgctggaagaaatgctctctttatggacgtatggcgaagaacgggtaactgtgctgcattctacagacgataccccgccagcacctgttaagattgagctggatgatatcagcgcttctgttcctgaaaaggaaaagaaaagcgataacggataa

SEQ ID NO: 404518 - DNA, 1893 bp, Salmonella enterica
atggctaaggcatggaaagacgttattgcctctcaacagtaccaggcattggcaccagaacagaaggcacaggctcaggagcaatacttcaatgaagtggttgcacctcaggcaggcgatcaggctgagcaggctaaacaggctttctatgctgcgtatccggtgccgacaactcagcaacaatcatcacagcaggaagaaccacagcatcctgagcaatccctgatgcaacgggctggtgacttcctcactggcggccagtcagcaggacagattgcagagcaggctgggcgtgggatcgtaaatatcccgtttgatgtattgcagggcggagccagcctgattaatgctatcagccagggtttaggcggcccgaaagtgctggatgacgtatatcgcccagttgatcgcccaacagacccttacgcacaggcgggcgaaacaattggtggatatcttgttcccggcgctggcgtggcggggaatatggctatcggttcagtcgctgaggccgctaatcagcaaggtgattttgctggtaacgttgcaaagaacgccgccatcaaccttggcgctcagggagctttatctgctgtagcaaaagggattgggcggggagtgacagcacttagaggtgatatttctccagatgtagcaaagactatcgccaatgctgaatcaatgggcataacgccaatgacatcagacctgattaagcctggtaatgctttgacgagaggtattcagcaaagtggagaaggagccattcttggaactggagcaaagagggaggctcagcaagccgcaagaagtgacgctgtctcaaattacctgaataagtttggcgagtataatgctgatgatgttgtaaaatcacttaccagcacactcaaaggccgcagggaatttgccggaaaagtgctggaagatatcactcagaaaatgggttcaactccagttccaacatctaatgcagttactgccatcgatgatagcttggctaagcttaatcgtcttggaacatcagccgataagaatctggtaagtaccttggaaaatcttaaagcagagttatcaaatccaagcatagattttgacctgttgaagcagcatagaactgcattcagatcaaatgtgcaaggtgatgcaacggtgtttcctaaccaagctaaggcgataacaaattcgattgagaatgccatgagccgcgacctaaagagtgctgttggtaaaacacttggtgctcaggatgcagctagatatatcaaggctaattctgattattcaaatatctataacaaggttttgaataaaagaatagctactaagcttaatgatgctaccaaccaggcaacgccagagttaattaatagtgtggtctacagtagaaatgcgtcagacataaagcgtatatggcctgcccttgatagcaaaggtaaggatgccatgagagctgcatacattagcaagatcgcagaaaaggcgagcgactctccagctaaattcatcacagaggttaacaagctgaagagacaggctggcggtgagatttataacaccgtattcaatggacagcacatgaaagagttaaatgctcttcatgacgttcttagggaaactgcaagggctgatactgctggagtcgtcacccagacaggccagtctcttgctaataacatcaggctaggggctggccttttctctggaggcacgtcaataggtggtgaggctggatttggattgatgatgcgcctgtatgagtcaaagccagcccgtaatatgcttcttcgccttgcaaacaccaaacctggaacacctgcatatgagcgagctctgaatcaggcagttacggctgtaaggccgctactggctaaccaggcaacacagcagtga

SEQ ID NO: 404519 - DNA, 270 bp, Salmonella enterica
atggacgaatcaagaaagcagtttgagataatggctgcaaaagaattatgcatattaccggaaatggttgaaaaagacaggactggaaatggatataactataagccactaaacctttggtggaagatttggagggccagtcgtgacgctatcaagataaagctcgatgacaaagtgatggttgaggatgagttcgacaaaggccacaactgcgcaatcgactattgcgctgatgccatccgcgctgctggaatcaaagtgaaggagtga

SEQ ID NO: 404520 - DNA, 1881 bp, Salmonella enterica
atgacgccaagtgaacttagcgacctgctatgggcgcaggttgacagggtggctccgcacctgttgccaaacggcaagaaagacgggcatgaatgggttgctggtaacgtcaacggcgacaaggggaacagtctgaaggttaaccttagtggcaagaaaaaatgggctgatttcgctgagggagacggcggtgacatgcttgatttgtggatggcgtgtcgtggaattaacctgcatcaggccatgcaggaagcgaaggcatttctcggcatcagggaggacgatcaccatttcgacgccagatgtgagaagagattctccagacctgaccgcaagaaaatcgcccgctacgttaccagaaccgaatcacatctcgagtacctgcaatcgcgtggcatatcgcctgaagtcgcgaagcgatacgaggttgtcagcggaaaggtctggaatggcgaacgtgaactgaatgccctggtgcttccgtacaaacgcgatggcgagctgctgcaggtcaagcgaatcagtactgaacgtccggacgggaagaaagtcatcatggcagagggtgactgtgaaccttgcctgttcgggtggcaggctctcgatgctggcgtgagggcggttgtactttgcgaaggcgaaattgattgcatgagctatgcgcaatacggaataccggcgctatctgtcccgttcggtggcgggaaaggcgccaagcaacagtggattgagttcgaataccacaacctcgacaggtttgaagaaatattcatttctatggacgttgacgatgtcgggcgtgaagcagcaagggaaatcgcaagccgacttggtgagcatcgctgccgtctggttacactgccacacaaagatatcaacgaatgcctgatgaacggcgtcaccgaggatgaaatctggcagtacatcggggcagcgtcatatttcgacccggaagaactctacagcgctcgtgagttttaccaggatacagtcaatgctttctacggcaaacagcagtatctgtttaacccaccgtgggaaacgctggcttacaacttccagttccgtgaggcggagttaactcttgtcaatggcgtgaacggtcatggaaaaacggaggttgtcgggcatatggcacttgaggccatgaggcagggggtaaaaacatgcgtcgcatcacttgaactgaagcccggggttttgcttaaacgcctgaccaggcagtcaacatgctgcaaaacgccaccagtactggaaatcgaatcagcatttaagttttacgatgaccggctctggttatttggcctgacaggtacagccaaggctgaacgcctgattgaaattttcacatacgccagacggcgatacggcatccagttattcattatcgacagcctcatgaaatgcgggattggcgatgacgattacaacgggcaaaaggcgtttgttgacgcgctgtgcgacttcaagaataaaactaactctcacattattctcgtcactcactccagaaagggagacagcgaggagaaacctaccggaaagatggacgtaaaaggctcaggagcgattacagacctgacagataacctgtttatcatctggcgcaataaagctcgcgagagagcgttacagcgcgtttatgctggggagcagattaacgagaaagaccagcaacttcttgctgcgcccgcatctgttttaatgcttgagaagcagcgaaacggggaagggtgggaaggtggtgtgccgctatttcttgacgagcagtctcaccagttcctgcaaatggaaggtgcgtcaccatacaactatatcgctaacatgccgaagtcggagtatgacgaagtgtggaggcaggagaatgttacggagtattaa

SEQ ID NO: 404521 - DNA, 309 bp, Salmonella enterica
atggaatttaaaggaacaaaaggtgggtggggaatcatgatggatgacgatgaaattaaaatcatccaatcaagctcatttgaaaatggtgctggttggcgctcatacgtcgccatctgtaatgaagttcagtgcagtgaagatgcacacctgatagcagcagcacctgatttactcgaggctcttcaattggctgaaaaagctatggctgaaggtcgaaacgttacttatccggagtggtacggggtaatcaataaagctcgcgcagccatcagcaaggctcttgggaggagtgatggaaataaataa

SEQ ID NO: 404522 - DNA, 135 bp, Salmonella enterica
atgaagcataaaattttcattggtcgtgttggaaagtcaaaaaccacaaactatgatgccttaaaatcgttaactactcgtttgaaaagggtggttaagatagaagatttgcaagagtttgaaattaagaaataa

SEQ ID NO: 404523 - DNA, 183 bp, Salmonella enterica
atggttgctaaaaaaagccgtccagttggtgtagggattgttattcctaaagttctggtctatggaaagtctattatatcttacgatcctcatgctgagactagtgaagaaaaggaagaaaagagttttattgactcttttaataccgaaaataaaaaaccacgctgtttagatttcgattaa

SEQ ID NO: 404524 - DNA, 387 bp, Salmonella enterica
atgaatcaatcatcggtatggatttttatactctttataattttttgtttagcctttgctctttataactcgcaaaagaaaaaaaagcgcaatatgaaatatagtacaggccagaaaactctaaacacgtccggcgtgattcttaagtacgagttagagcctaatatgagaagtgcgttaatgttgccagctagcgcagaaatcataactataaaaggtattggtgattctgtttatatttgggctatcgttcccgaaaatcagataaacgttaaacgtatttttaatgttatacctacaggtggaagtgtacctgaaaatacaacttatattggtacagcctaccctgaaaaccacgtgttccacattttcgaggaaaaccagtag

SEQ ID NO: 404525 - DNA, 324 bp, Salmonella enterica
atgagtaaggaaaaatttatcactgattggttttatgtcccttgcgcttcttcaaaagaacttgagcgtacaggtttctttggtttaggtgagcctaaagttaaaaccacttatgttaataacgtaccggatctcgaacagtacgccgctaatctagcggaaagttacaacaagctcgatcaagctggttatgacgttgttaatgttgtacctgttgccattggtacaagtgaccagtgctatcaaactaataagaactatgttggtgatgttggttacagcattacacggggtgcggtagttgtcggtaaactgcggcaatag

SEQ ID NO: 404526 - DNA, 567 bp, Salmonella enterica
atgaaaaataaattaaaatataaattgctgcatattaagttattagatgttgtattaagttgcactgtgatcctcgcaagctgttattactcaattgcttctttgtttggtgtttttaatccttttatctggattgcggcctctatttttgattcgctgacaggaaagaaaggctctttccctcaatcaattcatgagtatagcgcgtggtgggataggttagagttttcgtttcctgaaataatgcagttttttatggctggtttgttcttatgtgtaattgtatacgctacattccatgcaactgttacgataactggatatatctctgaactcttagagcggaattatattaaatatatttttggcgctcgttttttacgattgtatgagaaaatgcaaaagcgtaaaggtaaagttattgctcggcagaagtacaaagcaagcgaaaaaaatgctctaaatgatgctacgtttgagcactattcaaagtggaaaacctattataaaagtgagttgagtttcgatgaatggaaaattaaagttatgaatggtaaaaataactaa

SEQ ID NO: 404527 - DNA, 468 bp, Salmonella enterica
atgaataaaatatcaaacatatttttgggttttgggtttttcttttttggctgttgccttgtcactatctttactggcgcagcccttaatggtggtctttttgctgtggcaacggctgtttgttttgcggctagtgcggaacacccaaaagatatggcatatccaattattgtaattttcatattggcctttactggatgggtggctcacgcgataattacatttaaatatgaaacagtaacagccaccgaagcaaacacaaataaagatgtacttgaagtagataacatgcttcaacaagtatttgatcaagctttatctaacctgcgacagaataaagaaaagagagtgtgtcttaatggttttctctacaatgttcttgaggatggtagtttgaaaggcgtttatgacatgcaaccagcaggtgataataaattacgcacctgcaaccaaaataatagggagtaa

SEQ ID NO: 404528 - DNA, 711 bp, Salmonella enterica
atgatatcttatattgatgcactaaaagagcttgagtcattagttaaacaagctaatggtgcagatataaaacttcttgaaaaggcagccagtcttattaaacggtcagaggcattacaggaagaagcatatgctctaatcgctgaagcctatcagacggctagtcaaaataatttagagttagaagatagtattcatagtcaattcgtttttatgaataattatgatgagtttgaaaaggaaggatatgaaaaagggaaaaatagagaaaaagaattacaaaatattagtcgtctagaaccgtcaggttttactgaaactaataaagctttacacgactgtgcaggggagatagttaaaaaggctaaggcaatgtttaaatcagaacctgtaatagctcaagtgtggtcatatcgttggggtggttacgacatgatttcatgtgaccttttttcacaagatcgtacagtcagtatgcctgtaactatttctgccgttgaaaggcaaatgcttgagtatcttgacgagccggaggtttttgatatggctgaggccgttcatctcgcagggctgattacaaaagcccttgatgcaaaggttattgttggtttaggacgaaatgaagttaaccctgatgtactaacaaaaccgttagagaaagatcataccaacggcgaaatcaatctatggaaagaggattacacggcgtaa

SEQ ID NO: 404529 - DNA, 285 bp, Salmonella enterica
atgaccagaaaaagggaaattgaatactcaggacagtttcagaaagatgtgaagaaagctcagaagcgtaataaggatatggcaaagctaaaaacccttattacgctcttaattgaagataagctaccgttaccagcaatatataaagatcacccgttacaaggtgattataaaggttacagggatgcacatatcgagcctgattggttattgatttacaaaatttcagatacaaaacttcgttttgaacgtacaggcacacattcagatctgtttaaagggtag

SEQ ID NO: 404530 - DNA, 261 bp, Salmonella enterica
atggccgcaaacgcttttgttcgtgctcgcatcgatgaagcactgaaaaacgaagccgctgatgtgctggcgggtatggggttaaccgtgtcagaccttgtaaggataacccttacaaaagtagctgttgaaaaggcgctgccgtttgatatgcgcatacctaacagaacgacggcggcgaccatcgcagccagtgaaaaaggcgttgatgtacaccgcgcagacgatgctaacgacctgtttgaaaaattgggtatttaa

SEQ ID NO: 404531 - DNA, 216 bp, Salmonella enterica
atgtcggataagaaaggtattcttacaatagattttaagagctttgccgatgcgctaaagataacagaaggtgaattagcctaccttttagaaaacgatcaggtttacaaaaatatccctttgcctaaaccaataaatgtaggttggaacagaaagcgtaaatttaatttcaaggatgtttctaattttctcgaactgcttaataagacgaaatga

SEQ ID NO: 404532 - DNA, 237 bp, Salmonella enterica
atgagtaacaaacgcagaaccataaacaaagggattattatatctaatataatccttgttcttactggtttagcccttcttgcaaatggttttaccgctggatatgcgtttttaatcatctcttttatttggttactagttacttggggtacgggaacactatttattgtgtccaataccacacaagcaattttatttaaatatgacgatagcgataataaagaggataaaaaataa

SEQ ID NO: 404533 - DNA, 306 bp, Salmonella enterica
atgaagaaatcaactgagcaaaacgaaaatgggtattttgtacgcaacaactggctcttatacgtatttgctgcattaatgcttgtatgtagtcaatggatggtagcaacactggaaatgggctttcagcttcctgatatgcttatttatgctggagcctgtatccttctcgtttatgccggttttttaaatattcaggctggtacaacaacagccattctttttcaaatagctgttatagcgtgtgttctattctctttgttgtggatggtttttaaaaacatttggcctgcatttattctttaa

SEQ ID NO: 404534 - DNA, 405 bp, Salmonella enterica
gtgaataagacaaaattaattgcttatgctgttttttttctggttagctacatggctatttatagctatgtatatcagcagaacgttgattacttatcacctccggcatggcgcgtttttacagccatagctgtagctgtagctgttttagcaagcttagcgccagccttcgcattcaagggttctacagcacttaggcaagatggggaaatcaacatttgctacttctgtcctatgttcacattgatgttgatagctctgtgtttcataggtaaatctttatacttttggtcattcgagctggatcacattgctattaagttcgctgcgaccgtttatttaaccgcatcgcctatatttagcttaatgttctattatgtccaaatagataaagattttgtttaa

SEQ ID NO: 404535 - DNA, 447 bp, Salmonella enterica
atgagcaaggaaattaaaattacgcttccatcgattaacgtgcaaaggatggagatttttaaaaagggaatagatgaatcaatatccgctttacgggaaaatgctaaggcagccccctaccctaaagctaaatctgttgattattcaacactagatgaacgctattttctgacagtagaacaaggctggatcgtaccaccacacaatttagttaatgcgtggtttgaacagtttaaatcaacattccctgaatatggttcagatagcagccttgccgctttgttaggcaatcattcaaatggtgcaagccgacgcataagagaatacaggaacggtgaaaaacctattccttatggaatctggcgtaagttcctagttttaactggtcgagtaccgcaagaaatcattccggtatttggtgtattcgatacagaaggaaatgattaa

SEQ ID NO: 404536 - DNA, 402 bp, Salmonella enterica
atgctgaatgatgccattgtatctggaataaatctggctacagagatcctatctaaaccatttggtattatcggtttggtgttaataatttcttttatcgtgtggcggtgctacatggagccagattttatagcttgggtatttgtaggtgtaatagtattccctcttctgtatttactttttttctcatggactgatactgagaataaaaaagaagaatggaataaatgggctagcgaacattgtaaaataattgaaaagagggatggttcaacttctcttgaatcggggattggcataaccaccagtggtaaggcggctacgggtgtttttactaattcaactcctgatcaaacagcctataaatgcgatgatggtgtaatttattggaaaaataactaa

SEQ ID NO: 404537 - DNA, 204 bp, Salmonella enterica
atggataagttagatttcttgtttaaattccggcgcgcaagcactgatgaaacgcttgaaaaaatggttgagcatatggatttaaaagtaagccaaagcgattatgcagcatttcaatcagcggcagatcatagacgtgctgaactagcttgtaataaagttttcgataaagtgcctaaatcagcttggaaatttgtacgttaa

SEQ ID NO: 404538 - DNA, 306 bp, Salmonella enterica
atgaaaataaaacaaaatttaaccgcgatattcatccttataagttgctcaagctatgcttctaccactattactaacctgaatactcaaatgcagctacagcagttacagcgccagcaaacgcaacaaaaccttaagcatcatgatagtgttactcatggtggcggttatccggtttatgatgctacagccattgagcaagccaaacgagaaatgtataagcaatggaaacgagaaaatcaatctgaaattaattatgaagattggtttaaaacatattttaaggagtctagtaatggaaaataa

SEQ ID NO: 404539 - DNA, 234 bp, Salmonella enterica
atggaaaataaaataacaataaataaattaatgtggaattgtggcctttttatctttgttttttgctcttttatttttttattagcaagcatccctttaaacacgaacatgaacgaaacagcttataatattagaggtataatcatcgtgcttttaatcgtttcaaatgttctatcaggggctattttcttgggtaatttattaacctatatagaacaacaaaaaaaactttga

SEQ ID NO: 404540 - DNA, 243 bp, Salmonella enterica
atgaagaaaattatcgttcaggttaacggtatggtgtatgacagcagcaaccctaattgtaagtgtatcttgtctaacagtcagaatactttgtatgcctttattcaggtgctcgacggtgatgttacaaagcgctattggggtctgtacgatcatgatgctcaagaggactcgataaaagaaatcatgctatggggcggagagtggcctactctgccagaacctgaaacaacaacactttga

SEQ ID NO: 404541 - DNA, 213 bp, Salmonella enterica
atgccacatggtaaagttatttttaacaaaaaagggcgttgggactggcttgatagaggatgtgatattagcgaggaagaactgaaacagggtgaatggtttgttgctaatatgtattacccgcctgacttcaattacgatccatcaatgcacgaacaccaaattaaaggtttcctgtcaaaacctgatgaactggtacgatatgagagatag

SEQ ID NO: 404542 - DNA, 354 bp, Salmonella enterica
atgagcaaacttacagataatttagaccttgctgattttgggaatactccgcagcgtggcactaagacactacaagcagctactgagatcggagacaagaacgagttaactgtacaagaaatggatattcttattgaggctgactattacaaaaaaaatggagaatttaaatcatctaatgaaattctaaaaattagactggatgagatattttccgtaatgggatttgtagctgaattttcttcacgctggaaatcaatcatggaagatgaaaccgcaaaacaagattttattaacacttacagaaagggcgttgcagggttaatacaaagagagtggtttgggaagaaatga

SEQ ID NO: 404543 - DNA, 255 bp, Salmonella enterica
atggataaatattttaatgttaaaactgttcaggttacacaaagccttagtgattttggtttgaagttagggagcgatggtagactggttcgccttgatggaagtcgtattaaatcgaacgcggcttttaaagagtggctttataagcttaaagctggcgaacgcttaccaagagggcgctattttaaaaataaacgcccaggaaaaccgctaatgattcttgatgaatttcattccatgtttgctgataaataa

SEQ ID NO: 404544 - DNA, 261 bp, Salmonella enterica
atgaagtttgcaacagttttatttttagtgttattaacggcattagccttgaatcttataaatcatgtcttaaatagaaggctgtacagaaaattatacgaaaaagcagtaaaggaaggtgtagaggaagaatttcttagattagttagctactatgcctataaagctaatcgtgttccttctgcaaaaatggatgttctataccgtattgcgcttagtgatgctttacattcaaagatgaaacaggctggagatgaataa

SEQ ID NO: 404545 - DNA, 156 bp, Salmonella enterica
atgagcaacttagagcagtatttgaaccgtatattttcttacagcaataaaccattaacgccaacgcaattaaaagaaacagtagagttagcagcaaggaaaaataatctaacaacagatgatgtacaaaaaaatattaaaagaaatattaagtaa

SEQ ID NO: 404546 - DNA, 990 bp, Salmonella enterica; identical to SEQ ID NO: 40712

SEQ ID NO: 404547 - DNA, 669 bp, Salmonella enterica
atgacaaggatgaccgcacccccggacaacatcggcgttcccgcgcggcccaagattggccgctgggttcagaccgagcgcagagcgcacgaagcatgggcgggactcattgcccgcaagccaaccgcagccgcattgctgcaccacctcgtggcgcagatgggccaccagaacgccgtggtgatcggccaaaagaccttggccaagctgctgggtgtgagtgaacgaaccgtgcgccgcgccgtggcggatctggttgaagaacgctggattcaggttgtccggcttggccgtggcaaggaggccgcctacgtggtcaatgaccgcgtggcgtggggtcagcctcgcgaccagttgcgcctgtcggtgttcagcgccgccgtggtggccgacttcgacgaccaggaagaagctctgctaggccacggcgacctgcgccgcatcccgaccctataccccggcgagcagcagctaccaaccggccccggcgaggagccgcccagtcagcccgacattccgggcatggaaccagacctgcccgccttgaccgaaacggaggaatgggaacggcgtgggcagcagcgcctgccgatgcccgatgagccgtgttttctggacgatggcgagccgttggagccgccgacacgggtcacgctgccgcgccggtag

SEQ ID NO: 404548 - DNA, 828 bp, Salmonella enterica
ttggacagaccccggtcaccagctatgtccgcacccccggtcaccagctatgtccgcacccccccccgtaagtcgttgatttacaagccttttgaaaatcgcccttctctcattctcttggtgcttgttttggcgctttcagcggggcacccctgcggggttcccccacgccttcggcgcggctccccctccggcataaagtgcccccccagcgggggggcgcatcggttccccccgactgcgcggccttcggccttgtccagcggggcgctgcccctctggactccccacactcgccgccgtgaggctcggggggcaggcgggcgggcttcgcccttcgactgcccccactcgcataggctgggtcgtttcagtcgcgtcaaggccaagccgctgcgcggtcgctgcgcgagccttgacccgccttccacttggcgtccaaccggcaagcgaagcgcgcaggccgaaggccgaaggcttttccctcctgaaaaaattaaaacttggtggagcaaggccgaaggccgcgcagttggagccggtgggtatgtgggcgaaggctggggagccggtgggcaatccctgtgggcaagctcgtgggcaggcgcagcctgtccatcagcttgtccagcagggttgtccacgggccgagcgaagcgagccagccggtggccgcttgcggccatcgtccacatatccacgggctggcaagggagcgaagcgaccgcgcagggcgaagcccggagagcaagcccgaagggcgctgcaaccggcgcagccggtcacgactttgcgaagcaaagtctagtgagtacactcaagtattga

SEQ ID NO: 404549 - DNA, 459 bp, Salmonella enterica
atgggggacgaaaagagcttagcgcacacccgatggaactgtaaatatcacatagttttcgcgcccaaataccgaagacaagcgttctatggagagaagcgtagggcagtaggcagcatattaagaaaattgtgtgaatggaaaaacgtacgaattctggaagcggaatgttgtgcagatcatattcacatgcttctggagatcccgccgaagatgagtgtgtcgagcttcatgggatatctgaagggtaaaagtagtctgatgctttacgagcagtttggggatctaaaattcaaatacaggaacagggagttctggtgcagagggtactatgtcgatacggtgggtaagatcacggcgaagatacaggactacataaagcaccagcttgaagaggataaaatgggtgagcaactatcgatcccttatccgggcagcccgtttacgggccgtaagtaa

SEQ ID NO: 404550 - DNA, 459 bp, Salmonella enterica
atgatcgattatgacgatcatctgcaaaaatattacaacgaaggtaaggcgcgcattaaaggtattgaggcgacggcgaatttcgataccggaccgttaacgcatacggtcagttacgattacgttgatgcgcgtaatgcgattaccgatacgccattaccgcggcgttccaaacagatggcaaaatatcaacttgactgggacgtttacgattttgactggggggtgacatatcaataccttggttcccgctatgattcggattactccgcttacccataccggacagtaaaaatgggcggcgtcagtttatgggatcttacggttgcatatccggtcacctcacatctgacagttcgtggtaaaatagccaacctgttcgacaaagattacgagacagtttatggctaccaaactgcaggacgagaatacaccttgtctggcagctacaccttctga

SEQ ID NO: 404551 - DNA, 651 bp, Salmonella enterica
gtggccgtactcgcccttcagtatcccggcggtttccttcgcgatggttttgtagcgctcgccggtcagcacgttgagcaccgcctgggtgccgacaatctgcgaggtcggggtcaccagcgggataaagccgaggtcctcgcgcacgcgggggatttccgccagcacctggtcgagtttgtccgcagcgttctgctgcttcagctggctttcgaggttggtcagcatcccgcccggcacctgggccaccagaatacggctgtcgtagcctttcagctggccttcaaaggcgtgatactttttgcgcacctcgcggaagtacgcggcgatgttttccagcttcaggatatccagcccggtgtcgtgttccgtgccgacaagcgttgccaccagcgcctcggtggccgggtggccgtaggtggcgctcatcgaggaaatcgccgtgtcaacgccgtcgatgcccgcttcaatggctttcagcagcgccatctccgccatcccggtggtggcatgacagtgcaggtgcaggcgcacctcaaaacgttttttgatttcgctgaccaggtcatacgccgccactggcgtcaggataccggacatgtccttaatcgcaatggaatcgacgccggtttccagcagttgctctgttaa

SEQ ID NO: 404552 - DNA, 684 bp, Salmonella enterica; identical to SEQ ID NO: 372847

SEQ ID NO: 404553 - DNA, 336 bp, Salmonella enterica
atgagtcacaccggcagaatgccggaggtgaagaatcgaatgttcacccttcacccattattcaccacctatcactctgaaataaaaggagaaaacagaaaggtgaacagtgtgaacagttctttcgaaaaaaaattttttatgtggataaaagatgcactggtttggatccgagctacggatccaaacttactgattaaaaatgatttaactttccgatttattgatgggctgaaaatagattggtcagaaaaacagtgggggcacaaaagggggcatatttcattgttgtattttattatttgttttttatcattaacttattttgatgtttga

SEQ ID NO: 404554 - DNA, 243 bp, Salmonella enterica
atgttatcaaaaaaaattattttaatttcgacgatcaccctgtgcttttctattgttggatgcaaagaggaagctaaaacaacaaaatggtatagggatcaccctgacgaattaaaactagcttatgaaaagtgccaaaagagtggtgacgcttctgataattgcaagaatgcaaatgaagcccactatcaaatcaagcagctaaacgcaccaactccagacttaaataatttagaggagtaa

SEQ ID NO: 404555 - DNA, 1074 bp, Salmonella enterica
atgagtggcggtctttttgttggggttgagaaatacctgataggaggaattacagacgccacaaagagattgatgatgtcgtactcttctatgatgatggggttggcagcagcgtcagctaccatctacatcatgtggcgtggataccagactttggctggtaagctatctacgcctatggaagacacgatgtgggacatcatgaggatggcgatcatcctgtccttcgtggctaatttaggcggctacctcgatggcgttattgatgccataaacggaataaaggaggttttttctggtagtgataatatatggcagttattagacaccctatggaataaggctaaagtgttagggaaaacgctacatgacatggataattctacatatgtaaaagatgagggaatgactgctcaattttgtgtatggcttggaatattcgcacttatgattctagcgggctttgtttcaatggttgccgaagtaatgattctactattaggaataactgcacctattttcatattctgccttatgtatggtttcctccgccccatgttcaataactggttgcaaaatatatttgcaggaatattaacaattctatttaccgctctctcattgagaattgtagtgaattacttgaatctcgttcttaataaggcgacgaaggtagcagacagttcaacaattgttgaacttggtgctcaagtctgccttgcaggtattttcgctgcaatactggtgtatatttccgctaaggtagccgcagctctggccggggcaagcgctaccgtatccatgcaggggctggccgctgtaggtatcggtgcggctgcttttggtgccgggaagctagccgggggtgcagttaaagaaaccaaacgttccgcccaggacaacattcagggctggaaggatgcgaatgcaggtaagcccggcaagcccggaggtgagttaggctataacgcatctaaagcgcggaagtacgcgattgagcagatgatagcccggaacgaagcgcggaggctggcacagtcgagagaatccgcggttaagaagttcaacagctag

SEQ ID NO: 404556 - DNA, 315 bp, Salmonella enterica; identical to SEQ ID NO: 159348

SEQ ID NO: 404557 - DNA, 264 bp, Salmonella enterica; identical to SEQ ID NO: 27074

SEQ ID NO: 404558 - DNA, 1059 bp, Salmonella enterica; identical to SEQ ID NO: 159346

SEQ ID NO: 404559 - DNA, 1785 bp, Salmonella enterica
atgaagctattacgcctaaaaatctctgatccgtccggcttccgtagtctgccctgtggttttgaacactattttagaaccgaatgggatttacaggaagaattgaatcaacatgaaggctttgcgccttttgtgtgtgctggtcccaacggcagtggtaaatccaatctgcttgaagcattagcagctatcttctttcagttggaaattttgcgggtccgtcgaagttttttgcctgaggtattgcaaagtaccgatcatgatttatcaccaatctcatttgagctggattatctaattcgagtaccagaagagtttcgaatctctggcggacaagaatgggcaaaagtctccgtgtggaaaaacaacggggaatctgtgcgtttccattgggtaaatcagagtgactttgacacaaatgctgatgaagttttcaagggaagccatgccgatattctattgcctcagtatgtgttgggctactcgtctggcgagaatgaaattctcagtctaccgtttttcaaaatgcgctttgtacagttcgacgagtactggaatgccttgactcgacaactgagctactctggccatccggagtcgaggttggcctatcttgacagtggtttcagccaagctattttactttgtaatctgctttttcaaaacgaaactgcgcttcaacctttccgtgaggatgttggtatagaggcgttgcgggagtttcgtattattatccgtcgcagtattcctcttgcgccggagcagttgacctcgtttgccagcgaggataaaaaccagcaccaatcacttgatgacattttgaatagtaaccctgctctgcatgtggatatggatgaagaaagtggtcaaagttaccatttaaacctgatgcagctgctggaaggggatgacaaatcctccttggtagtcagcgcgcttaaacgctgcgctagcttgtattacgaggacgagtgtaacgacactctaattctggactactgggttaatgatgctactcgacaggcttttcgcgagaattttaatggttcggcactggctctattccaggcgttccaagtattgctgacactcaatttgtataaggtgagtgataatctcaaaactgatctgtatcgctcaacaagtcactatgtcagtgaaacggtaccaacgttggcgtccgacgaacgaattatgcgcttcaagtttgtgcgttttactaaacaaggagtggaagagccaatgatgctcaaggaactctcggacggtgaacaccaattgcttcatagcctaggtctatgtttactgtttagagaaaccaacagcctgtttctgttagacgaaccggagactcatttcaacccacattggcgtgccagttttatcacccggatgcgccaatgtttatgtaacactgagaatgtggagcaggaaatgttgatcactactcatacacctttccttatctcagatagtaaacccgaaaaagtactggttttttctaaggataaatatagcggtgcggtcacaataagcatacctaaatacaacacacttggtgcatcaatcaataaaattactatgaataccttcggcaaacgtgaaactatcggtggccatgcgcaagcagtactggatgatttacgcagacgttttaacgaaggcattgaagacaaggaaactctgatcacagaaattgatgaacaattgggtgactcggtggaaaaagtattactcctcaaggctatttttgatagcgacaatccaacgaatgacgaggtttag

SEQ ID NO: 404560 - DNA, 1566 bp, Salmonella enterica
atgaatagaatgacaattccccttggtgacatattaactcaatccggtcaccaccgtgcaggcaatcgagagcttccggtcctatcaataaccatgaaaaatggtttggttgaccaatcagacaaattcaagaagcggattgccagttcagacacgtctaaatatcgtattgtatacaagaatgaacttgttgttgggtttcctattgacgagggagttcttggattccagacaaaatatccggtaggaatcgttagcccagcttatggtatctggaaactcaaggatgaatcggtatgccatatcccttaccttgagcgttatctgcgctcctccgaggcaaggcgactctatgcatctcgtatgcaaggggttgttgcacgtagacgtagcttgacgaagtctgattttcttagtttggaagtaccttttcctcccatcaatgatcaggctcgtatagctaatttattggccaaggtagaagggctaattgaacagcgtaaacaacttttgcaatacctggatgacctactaaagagcgtattcgtcgatatgtttagtgatccggtaaaaaatgcaaaaggatgggaactaacaacaataggtgagttagctgtcgatgtaagatacgggacaagtgtatcagcgcaaggtggaaaatataaatacatacggatgaataacattactccggatggttactgggattttgagaatcttaaatatatcgatgtagataataaggatctggataaatattctcttcagaaaggagatctcgttttcaaccggaccaattcaaaagaattggttggtaaaacggcggtttacgatcgagatgaaactgttattattgctggctatctcattcgtgttaggttcgatcaacaaactaacccttggtttgtatgggggcacctgaactcaaagtttggaaaagcaaaattatttaatctttgtcgtaatattattggtatggctaacattaatgcccaagagttaagggccatccctattcttaagcctccactggagttacaaaataaattcgctactattgtagagaaagcgcatgctattaaatttcgctatcagcaaagtcttgctgatcttgagaccctgtatgatgttgttagccaaaaggctttcaagggggaattagaactttcgcgtgtgcctattccgacacagatatttttcccggtatcaggtgaagaacctgaacacggggatgccgtacaacatatagcagtgggtaattatctgcccgtaactaatagcttaccatccgcgttggataatgcagaggctcgcaagtcactgatcgaggaatggctagaggcctatatagcgcaattgggcaactcatcgttttcagtacatgagttcatgatgacggcgcaggcacggctggcggaattatatccggacgttgattctaagtttggtgaaagtgactatgagcatatcaaagcttgggtgttcaaagctctggctattggtacactgaagcaggtattcaatgacgctgacaattgcattgaacttaaggcggttttggtatga

SEQ ID NO: 404561 - DNA, 1674 bp, Salmonella enterica
atgctacaaaacaaccctgaccttcaaagcgcgatcaaacgcctctgggataaattctggagtagcggcattagcaatccgctcacagccattgaacagattacctacctgttgtttatgaaacggctagatgaactcgatcataaaaggcaagacgaaggtgaaacgagtggtgagaaatacatttctaagtttgctggtacttggattccaccagaggaaagaaaccgccctgttgcggaacaacaccctatagataaacgcacgcttcgctggagcgagttcaagaaattgcagcccgaagagatgctgcaacatgtgcgagacaaagttttcccttttctgaaagatctgaatggtgctgaatctaacttcactcatcacatgaaaaacgcagtattcattatcccaaagtcagcattgttggtggaggcagtgaaggccattgacgaaatcttcgagatgatgaaaagggattctcaagaaaaaggccaagcttttcaagacattcaaggagatgtatatgaattcctgctgtcggaaatcgccaccgcaggcaagaacggccaatttcgcacaccacgccacattattaaattgatggcagatctggtccagccgcaactgggacaacgtattgccgaccctgcctgcggtacgggggggtttctgttaggtgcctaccagtacatccttactcagttgtctttatctcaaaacttaaaaagagataattcaaaaggatctactcatgatgaagatgggttctttcgcacttctgtgactgccgctctgaccaaaaaggcccggattcttttgcaagagagtctgtatggttatgacattgacgctactatggtgcgtttaggcctaatgaacttaatgatgcatggaattgatgagccgcatattgattatcaggacacactaagcaagagctatagtgaagaaaccaaatatgacatagtgctagcaaacccgccttttactggcagtatagacaggggggatattaatgagaatttgaaactctcaaccactaaaaccgaacttttgtttgttgagaacatctatcgtttgctgaaaaagggcggtaccgcctgtgtgattgtgcctcaaggagtattgtttggctcgggcaaggcattcaaagaactacggcaaactttagttgagcgctgcgacctcaaggctgtcattactctgcccagtggagtgtttaaaccctacgctggagtaagtactgccattttattgttctccaaagttttcgggccgggggataaaatttccaaacctgctaccgattatgtctggttttatgagatgtcttccgatggttactcattggatgacaaacgaaataagcttgaaggctacggcgacctgcaagacatcattcaaaaataccattcccgtgatgaggcgtctgacacagatcgtacagctaagtgttttatggtgccaagaatagatattgaagcggagaattacgatctttcgctgtctcgctataaggaagaaatatttgaagaagtgcagtacgaacagcctgaagctattctggaacgactaattcaagcagaagtggggaatgtggataagaaagtgcttaataaagtacaaagtggcatcttgtacgagctactagagttaaaggggatgatagtatga

SEQ ID NO: 404562 - DNA, 126 bp, Salmonella enterica
atgtatcaatgccttccggtaataaatgagcataattcattgaaaaattatttagatgaaaagttcattgtttttattttagagatacaactgcagacattacttcataaaaaaatacattattaa

SEQ ID NO: 404563 - DNA, 318 bp, Salmonella enterica
atgagcgaggcgatggagaaaaaccggcggagcgtactgcggactgccgggcggacatggctcaccatcctgatggtgtcagcgctgctgatcggcacgagcgggagcattctgtggtggcaggggcagcagataaccgacaattacacgcatcttcgtcagcaggaagataccctggcgaaaatgaccgcccggacgtggggagtgcgctatcaggagagcagcgacggccggaggtttcttatcctgccgccggggatgcaaaccgaagccatcccctacgacgggacgacatggatccgcctgaaacaggagtag

SEQ ID NO: 404564 - DNA, 273 bp, Salmonella enterica
atgattaccccacaggacgcagaaaaacggacccgcgaaattgtcgcggagtacatcagtgaatgtggttgtgaaaaccccaggcatatccggctggtattaaccaaattaatcagcatggccgcgcaggctattgtggcgaccaacggaaaggcggctgccctgcaggtactggtgaacacactcacccacacggcagagcacgatgtgccgtaccggatggaaaccactgcagaaggcggcctgcacatcaccgttagccggaagcactga

SEQ ID NO: 404565 - DNA, 417 bp, Salmonella enterica
atgaataacaaagatgttaacgctgtgctttcccggttaatgtcactattccaagcagagaatgatagtgagttggcaagagcgcttaacgtcaataggcagacacttgcaagttggaggaagcgtgattctgtgccttatgcaatttgcataaacatcgcagaagaaaagggggtttctttagattggttgctaacaggtagaaaacaaggtttatcaaaagaagtagacgtaactccgacgcaagtgcagtttagccaagctgaccttactatgcttgagcttttaaagcagctagaccccgaggttcgtaacgatcttctgcgaggcgctgcggaaaaacagcgagtgctcgagatggaaaaacaactgaaggaattatccgcaacgattgagcggttaaaaaatgtgggttaa

SEQ ID NO: 404566 - DNA, 894 bp, Salmonella enterica; identical to SEQ ID NO: 11987

SEQ ID NO: 404567 - DNA, 438 bp, Salmonella enterica; identical to SEQ ID NO: 11986

SEQ ID NO: 404568 - DNA, 768 bp, Salmonella enterica; identical to SEQ ID NO: 263786

SEQ ID NO: 404569 - DNA, 216 bp, Salmonella enterica; identical to SEQ ID NO: 7238

SEQ ID NO: 404570 - DNA, 402 bp, Salmonella enterica; identical to SEQ ID NO: 7239

SEQ ID NO: 404571 - DNA, 729 bp, Salmonella enterica
atgacgcacacactgaatccggtcatcactgtcactgtgtccggtcctgtgggcagcggtaaaagttacgtactggcgcggatagaagagatggtgaaacaggaactcggaaacagcgtcattgtcgatgctgctgacgtggagaatgagcgccgtatgaatggcgaagatctgacgacctggcagaagccacggggtggcacagtgatcaggctggaggaatacacgggacagggcctgttgtcatacggcgaggagcgtatctgtcggacgaatgagctgctggatgttatatgccccacgggccggcaaccctggatactgcccgatgcactgcataccaccattgcggcactgatgacagtttacgatcaggagctgctcatgaaggagttacgtaaactcaccggtcagccaacagaatgttgttcgtctccgaagtacggcaaacaggaacacatcccgattaaccagcctccccggttcttcgacgaataccttctgacaccggaaaataaagctgagcatgaagagatcaaagcggcgttgttccgggaaatcaggaagattgctgaaatgcagttggggggcgggctggacagagtgatggcgagaggagaatgggcatcgctgtttgaaagagtttccccggaattacttcccctcgcactggctatcgggattatgcagacagcggataaacctcacttacgttcattaaacacgtaa

SEQ ID NO: 404572 - DNA, 324 bp, Salmonella enterica; identical to SEQ ID NO: 142299

SEQ ID NO: 404573 - DNA, 174 bp, Salmonella enterica; identical to SEQ ID NO: 125650

SEQ ID NO: 404574 - DNA, 282 bp, Salmonella enterica; identical to SEQ ID NO: 125651

SEQ ID NO: 404575 - DNA, 294 bp, Salmonella enterica
atgataaatctttacgatcctgtacaccccggtgaattcatcagggaaatgttcatggaaccgttcgaaatacctgccgcagagttagctgataagcttgaagtatcacaatctgcattaagtagattgctcaatggaaaaactgatcttagttatgagatggctcttcgactatctaaagttataggccgctctgcagagtcgtgggttaatatgcaggctcagtacagcctctcgaaaagtcgtaaaactttatccgagacgctagaacaccttcatccgatgtttccataa

SEQ ID NO: 404576 - DNA, 192 bp, Salmonella enterica; identical to SEQ ID NO: 194004

SEQ ID NO: 404577 - DNA, 249 bp, Salmonella enterica; identical to SEQ ID NO: 125654

SEQ ID NO: 404578 - DNA, 216 bp, Salmonella enterica
atgacagagctggaaaagcagttgctgagcgcattagagcagctacagcaggactactcgcaaaggctggacgaatgggagagcgccttcgcggaatggcggagcatgtgtgggcttatgcaacgggagaacgcgatgctgaacgagcgcgtgtcggacttgagcacgcaggtgctgagtttaagcgagcagctgcgccgcttgtccgggaactga

SEQ ID NO: 404579 - DNA, 852 bp, Salmonella enterica
atgttcattaatatacaccacacaaataattcacagatattgcaaaatgctcaggtcaaaaataaaataaaacgtgttgatcgtctgctcggtaatgaatctcttcatcacgacatccccctgattttcataaacattatttccatgctgacgagcaagctgtcactgtgtgtcatcgccgttgactggagtggatacccctctcaggagtatcacgtactccgcgccagcctgatttgcgatggacgttcgattccattgctgagttggatagttccttcggaaaaacagcaaaatgctaagatacagcaagcctttcttaatactctttccgaagcggtaaacccaaaagcaagggtaatcatcgtcgcggatgcagggtttcagaatgcctggtttcggcacgtaaaatcactcggctcggattttattggccggatacgaggcaataaacaactacatctggcaagaaaaggggaatgctggttcaggcgtcaggaattacaggccagtaacaaacctgaatatctggggccggggacgctttcccgggcggaatacgcccgttgcgatggtcatttttatttgcacaaaaaagagccgaaaggccggagaaataaacgttcgcgttgtggtatagccagaccatcacagataaaagatgccaggtcggcggcaaaagaaccatggttaatattcagcagcacagatgactttaaaccgcgagaaatcatgaagttatacaaccaccgaatgcagattgagcaaaacttcagggatgaaaaagtgagcgttttgggttcggtctgcgagccagttgcagctgttcggcaggaagaatgctggtactga

SEQ ID NO: 404580 - DNA, 1704 bp, Salmonella enterica
atgaaattaattcttaagcaatacttggcttcattaaaagaacgagcagagttagatgctatactgccagatttgttgagcagtatggggatgaatgtgtttatttcgccaacccgtggagtgaaagagtatggagtagatatagcggctgtaggccaaataaatggtgaagagacaaaagtctatttattttctgttaaatctggaaaccttactcgtgagacatggaatggaaacgcagatcaggctcttagaccttcgttagatgagattcaagattcatttataccaagtcgtttaccgcccgaacatagagataaaaaaatagttatttgcttatgctttggtggagatgttagctcagggatcaggcaagaggtgtctgggtatgaaacacgaaatactcaaggtaatatttcttttgaagagtggaatggtgataaaatatctgagcttatccagcagcatttgttgaaagaagaattactacctagttccagccagaccttattaagaaaatctttggctttacttgaagaaccagagacttctagcaattacttctttctattgattaatgatgttctgaaaaacgctacagattcagattctgttgcctcatcgataacacggataaatgtttgtctatgggttttatttgcttggtgtcgtgatggcgggaatttagaatcagcatatctttcatcagaacgagcattgctgttagcttgggataaagtaaaagaacactataccggaaagaataggccttcaaagtcatttgatagcattttagatacctaccagcaaattactgattgctatattgaacgttgtttaattccgtatgttgaatttaaatatgctttatctcatgctgttcgctccccgtgctctattgatataaactttaagctttttgatgtgctaggtcgtttatccgtcaagggacactggattttagatttgttgtctaagaattatgcagagaacccaccaattgatggagagagcaaagaacaagaaaggttatgtatacatctcaggaaaataacaaagtcaattcgtctattagttatcaacaatccggttctgctctcaccgcaaaaagattctcaggcgatagatattgggttagctctaatgttactctcaaataattcagagctcgatgagtttgtgaaaagttggctatcggaaatggttaatagatgtatattctcttttgagatcaatggaatgtatccaattatatatgaaacttacgaaaaactgattgaacataggaataaagataaaactgacaagatttataagaataaggttactgaggctagtattttatatcctctgttaacagtcttttgctctctgtataaattagactctttaagcaaagatttggaagagtttgctactgaaaaactggcacatagcacgctacagtattggtatccaaatcaatacagtgaacaatatatgtactcgaactcagatacacatggctcagcgtcaacagatttcccgatgaatggcgaattagcaataaaacacattgcacaagagtgtaataatgcagattcgtttaagagaatgtcagccgtgattaaagggtatgcaccattagttcttacagcgtgtcgctgttaccgatacccagttcctttccattatattgaaggttggttggtcgaccccacatag

SEQ ID NO: 404581 - DNA, 1725 bp, Salmonella enterica
atgtcgttagaagaaacaagaggccagttgctgaatgcaagtgaaacggcagaagatctgcttgctctagtttgtgatttatatgctcaagaattacataccgaagaaagaagtttagcattagcgctagctgaactccacaacactggtgtgattgatatcctcaaaatggtaaaaggtattgataaaaaatcctacggtagtaatttttttactattctgcaaacgtttgaagaagcgctacctttgatagatgcaagaattgaggatgttctacattgtctggttcaattggtgcaacaggtcgggagaggggcaactattggtacaatctataaagcctatgagcgttactgtagtgtgaaagcatctcgctctagagatagtgttgagtttatccttgcacaaagtgatttgaatgcatatgccccttttctttcaagctcgctccttgcttacgacgcagatagtgtcataacagctatccagatgacagaaagactcatttctaatagaaatgcaatgatcagaaatcaaggctattttactttgggacagttagatattgatgagacaaaggctaacttaatttgggagcaaattagaaacaatggtgttagcgagagtgataatgattgttgtgcgtcgatattgatgtctgcactccaatttgggaaaaggtttccatcttactggccgcaaatagaagagtttttaattgcttttgttaagagagaatctacagaggttcttcagataatttcaagtattgttgcatttcaatcggagattcttccagatagtattctgtatatcatgcttaagaaattaactaatgtgtcctgtgatcataaaggtattataagtaatattgattatatattggtcatgttagctgagaaaagtaagtactcgcttgctgtggaattattggagtcaactttaatagcaggtgttacatttaaatcgctggactatttttctaatgaattaataaataagcatcaagaactacttaatcacatcattacaaaatggcttctgggtggagaaaaacaattttgtcatggtattttagatttacttcatgatgctacgggtgaggaaattgaactaaaggcggaattggatttattggataatgatataaagcaagtttttattagtcgtaaggctataggatggttatttacacggccagttgaaactgcaaaatttattctttctattgcagatgtggcttcggaaaacacaattgaaaagcttgagggtattttgtacttccctttgcttttaagttaccctggagaacttaaacgcttctttcaatcatgcattgatagcggcatccaggaacatctatgtgagcgattgcttgcaaagtataaactccatcagactggtattgaaaaagtatctgaacttaatgaactaaaagcacccagcgaaaatttaagcatttattggaaaaatgttgacagaagtatgcaaaaagctatcgaagaagcatcggaattttctttatttagaatgttctcgaaacctaaaactttattatacgggaacagttctatttattatatacatcaaggtgatggggaatccatacgacaggaaatgcaaatgcagactttttctcactctactgaaatgccaaggttggatgctttagatcccgtgttactagattattttttgataacatgtcgtagtgagagaatgtaa

SEQ ID NO: 404582 - DNA, 201 bp, Salmonella enterica; identical to SEQ ID NO: 112108

SEQ ID NO: 404583 - DNA, 798 bp, Salmonella enterica
atgtcaaataattttcttcaaaatataacacctgccgaattagccgcgctggtaaacttgaagccattcgatgaggatgtttttgtacaaagtctatatgccgatataaataatgcaattaagcatattgagaagactgcggataaatattattcagatgatgaagataagatcactaatttactggttttatttctcaaaggtgttgggtacaacgcatctgaacaaacaaaatctaatggttccgtcgatattacagttcaggatcgtgatcagagctttacttggctcgctgaagcaaaaagagggaattcgtataatggtgtctttgaaggcatgttacagttagtaacaagatatatttctgatgagaaacatgcaggtttctttatttaccatcagaaacttgattcattaagttactttaaaaattggttcagctaccttagctctggtgattttgaaaaatataaggctatttctgataggcttgatgagtgccgatatcattttaaaaagagccccatagcaaatgcgtttaccggtgatgaatgttattttgactacaatatagtttcaaaaaagggaaaagaagtaaaggttagaaattttattttaagtttgcactataaccctgctgataaaagtggacgagagaataaatccttgaaggtcggacaagcgaaaatttatgtcaatgaagtgtgtgacaagtggtttcgtgagcaagaacctcctgaagatattgataaattcatgaattcactacaattagtattccctgaactatttgaataa

SEQ ID NO: 404584 - DNA, 483 bp, Salmonella enterica
atggcaacgactctgacaaagggtgacatcgtacttttcgctctgagaaagccagcaattgcatcaaatgcgtcacttaccgatgtcgagcctcagtcagtagaggacgccattcaagacctcgaaaatatgatgtatgagtggcagattaatcctggcgatatcggctacctgtttgcggcagatggcgaagaacctttacctgatgacgattcaggattgcctcgaaaatacatgcaggctgtgggttatcagctgatgttgcgcatcctttcagattacaaccttgaaccttccgccggagttctgactaacgcacagcgctcatacgacgcgcttctcaccgatacgctgatagtcccatcgatgcgccggcgcggtgactttccagttgggcagggcaacaagtacgacgtatacacagcagatcgctattaccctggcgacttaccgccaattgatggtgatgtgccaaatccatag

SEQ ID NO: 404585 - DNA, 495 bp, Salmonella enterica
atggcagcgcccaaagataacaagtttgccgaggggaatagcggcaaacctactcagtacaaacctgagtatgcagcgcaagcagagaagctttgtttgctgggcgctacagatgatgagttggctgatttctttagtgtgcatcgctcaaccatctatcgctggaaacttgagcatgaagagttttgcaactccataaaggccgccaaggaaattgctgatgagcgcgttgtaagaagcctctatcaaaaggcaactggctataactacgtcgagcagcaagctttcaaggtaaaggtggacagggacaaagaagagatcgagatcgctgacgttgaacgtcatgctccagcagataccacggccgccatcttctggttgaagaaccgacagaaagataagtggcgcgacaagcaagaacacgagctaactggtaaagacggcggagccatccagattgaaacctcacctatgagcactctattcggaaaatga

SEQ ID NO: 404586 - DNA, 468 bp, Salmonella enterica
atgagcaggttaaccgcaattatcattgctgtagtcgtttgcatcatcgtgtcgcttggctgggctgttaatcactaccgcaacaacgccaccgaatacaagaagcagcgcgatgagaaaactcaggcgctgaatctggctaacgccaccatcaccgatatggtgacccggcagcgagatgttgctgcgctcgatgctaaatacacgaaggagttagctgatgcgaaagctgaaaatgatgctcttcggcgcaagcttgataatggtggcagggtgctcgtcaaaggaaaatgccctgtgccatcctcagccgaaacctccagcgcctccggcatgggcaatgatgccaccgtcgaactctctccagttgctggacgaaacgttctcggtatccgggacggaatcatcagcgaccaagcagcactgagaacgcttcaggagtacatcaggacgcaatgcctgaaataa

SEQ ID NO: 404587 - DNA, 756 bp, Salmonella enterica
gtggaacgtgccgttctgcgtgtcgagcacgccgttacgaaagccaatcaggcggcgggagggggcttcctgctgcggaataatcagcttcagggtgtccaccacggaggccactttcccggaggagaacggcgcgcgcagacgctgaaacagcccggccacatcccgggcaaagtcctgtggtggcagtaccttccagacaccattttcatagcgggacagaagctggccgttggcatcgaccgcgagcgcctcgccgtaatgctcatagatacgcatggccttttcgctggtactcatggcggaaaactccgcttcgctcatggtgtcgaacgggctttcagccggtggccggatggcatcgtaaatggccttacgggtggcctccccgccgtactgcgtgaaggcatcattccagtcaccgaagaccggcggcagggcaacaacaccttcacacgcatctgcggctgcggcggcttttttctggccgtcaccgctgaggtcacggtcagcagcaaggacaatctgacaggccggatgcttctgccgggcaaggctggccagagaaaggaggttcacggaagaaagcgccaccatcaccgtttcaccggtcaggtgatgcacggtaagtgcggtcgcgtatccctccgctatccacagacgttttccggcctgattctgtccttcaaggatgtgacaggtgcccctgacctgtccgcctttcagggtgcgcttacggccgtcagcactgattaa

SEQ ID NO: 404588 - DNA, 267 bp, Salmonella enterica; identical to SEQ ID NO: 399770

SEQ ID NO: 404589 - DNA, 483 bp, Salmonella enterica
atgcattgcccggacaagcgcctcacaggtttcattcagggcgtgttccagctcatgctctgcatacagactcagaaggtgatgatgtgccttccggtaggcggtggccgtgctgtcacacgcccctttcaggcgttcacgttcgaaattcagcaccacggccagattgtcatattcctgtaccagctcccggcgtgccacgcgctcaatgtggcgctgtttcagctcgtcgctcaggacaccaccggctgcacgaaaggccgtgcgccagtcgtcagcgtcgtttccgtcggcctgcgccagcgcatttttttcctgctctgcccgttcaatggccgtgacggtctcatccatcaggcgggcgttctcaagatgggcggctctggccttttccagttgtgccagcgcgggttgcagatattcagggatggtgttgtcagacattttccggctcctcgtcacttcaggttgagaaaattgtga

SEQ ID NO: 404590 - DNA, 390 bp, Salmonella enterica
ttgatcacgcaaggggcgattatggttggaaccgctatagcaagcttttttgggatgttggcaatctcgacaatttacggcttagcgcatgcttttattgcgaaatctctatcagaaaaaataagccaggcttgggcgcatagatcagctcgtttcatgattctagtgatcatagcaatacaagggatatctgcatttatcctctatggttcaagcttatacctgttgtatcaaggcgcgacatttacgccttacaccagtgattacggaactctatacgatggtagtgaagacatctctatggcttggattgtctttggtttatctatggccgtgtctgttgtagcagacatcattaaggtaattctcgtcttaaccttcgctgactaa

SEQ ID NO: 404591 - DNA, 891 bp, Salmonella enterica
atgggcgtcgttaagttagctgattacaggcataaccctgtacaacatcaggaggcatccagtatggggtatgtctctatacaccgccagtttatggacagcaggctctataaggactctcaggcagtacatctttggcttcacttaatcctcaaggctaatcacgaatctactgtcgtcaatacggatatcggtccgataactgttgagcgcggtcagatgataactggacgcccgtcgctggtcagagaaacattcatccccgacaacaaagttcggagcttattacggacttttgagtcgaaaggtatgcttaatatttgctcgatggggaagaaatttagcctgtttacaatcgttaaatatgacgattttcaggcaaaaaattgtccaacggttgtccaacagttgtccaacgcaaacaccagtaatggtgcggctctcagcggagattgtccaacggttgtccaacagttgtccataaacaataatataaataatatctctaatactgacgtattagagagtgctacagcagacaaaaagtctgacaagaaaaaaccttccgtcagctgtcaggatgttgtcgatgcttaccacgaaatccttcctgaagcgccaagaatccgcgcactgaatgacaagcgtaaaaaccagatccgaacgttctggcgcaaagccggagtgataacccgccagcttgacgggcatgggttcacgatgcaggactggagaaattatttgagctacgtaggcgaaaattgccgatggatgttcgaagagcgcccaaaccatcaacgcggaaccgtctggcacaaaaagggatttgatttcctgcttaacgataatacctacctgaaagttcgtgagggtgaacacgatgaccgataa

SEQ ID NO: 404592 - DNA, 468 bp, Salmonella enterica
atgagcagagtaaccgcgattatctccgctctgattatctgcatcatcgtctgcctgtcatgggctgttaatcattaccgtgataacgccatgacctacaaagagcagcgagataaaaaagtcagtgagctgaagcaggcgaccgccaccattactgacatgcagcaacgccagcgtgctgctgattcactcgatgctaaatacacgaaggagttagctgatgcgaaagctgaaaatgatgctcttcggcgcaagcttgataatggtggtcgggtgctcgtcaaaggcaaatgttctgtgccatcctcagccgaaaccgccagcaccagccgcgtgggcaatgctgccaccgtcgaactctctccaggtgctggacaaaacgttctcaatatccgcgccggaatcatcagcgaccaggaaaaactgaagtatttgcaggagtacatcaggacgcaatacctgaaataa

SEQ ID NO: 404593 - DNA, 1317 bp, Salmonella enterica
gtggaaaaatccggtgacgacgcgctgacgctctcaggtgccaacagctacagcggcggcacgctcatcagcgacggcacgctggtcgccaccaacgttgaggcgctgggtaccggcaacgtcaccgacaacgccacgctggagatgaacaccggcggcgattttgacaacgccatcagcggcagcggccaggtggtgaaatccggcgacgagacgctcacgctctccggcgccaattcttacaccggcggcaccaccatcagcggcggcacgctggtcgccagcaacgttgaggcgctgggcagcggcgacgtcactaacgacgccgtgctggaactgaacaccggcggtgacttcatcaatagcatcggcggtacgggccgtgtggaaaaatccggcgacgagacgctcacgctttccggcagcaatacttacaccggcggcactcttatcagcggcggcacgctgattgccagcaacgttgaggcgctgggtaccggcgacgtcaccgacaacgccacgctggcgctgaacgctggcggtgacttcatcaataacatcggcggtacgggccgtgtggaaaaatccggcgacgacgtgctgacgctctcaggcgccaacagctacagcggcggcacgcttatcagcggcggcacgctggtcgccagcaacgttgaggcgctgggcactggcgacgtcaccgacaacgccacgctggagctgaacaccggcggtgactttaccaacaacatcggcggtacgggccgcgtggaaaaatccggcgacggcacgctcacgctttccggcagcaatacttataccggcggcacccttatcagcgacggtacgctggtcgccagcaacgttgaggcgctgggcagcggcgatatcgacaattacgccagcctgcaactgaacgccagcggccagttcgttacggcaaatctcaccactcacgataacgccaccaccgcaattggcgcaggcagcgcattgcgggcaaatacgctaacgcaggaggcgaacagcaccctggccgtacacctgaccgacagcaacagcggcgccatcgtcaccgccgaccgcgccaacctgggcggcacgctggatattaccggcatcggcaacgtggcaaaatcctggacccgcgacgcgtacgcctacacgctgattgacacggacagcgccatcgatagcgactttgcgcaattcaccgtagccggtatggacgccaaacaggtggattttctcaccgtcgatgggcgcgtgaacgccgacgacgacacccgctatgacgtaaccgcctcgttgtcctag

SEQ ID NO: 404594 - DNA, 576 bp, Salmonella enterica
atggctgtttctctcgttaaaggcggtaatgtttctctgactaaagaagccccgagcatgaatgttgctctggttggcctgggctgggatgcacgcgttactgatggtcaggcatttgatctggatgcatcagtattccttgttggcgaaaacggtaaagtgctgtccgattcgcatttcgtattttataacaacaccaccagcccggatggcgcagtacagcatcagggtgacaaccgtaccggtgaaggcgacggtgacgatgagcaggtcaaaattgatctgacaaaagtggccgcagacgttaagaagctcgtattcgcagtcaccattcatgaagcagacagccgtaagcaaaatttcggcatggtcagtaacagctttatgcgtgtggtgaacaacgataatggcgccgagattgcacgctttgacctgtcagaagatgcctcaactgaaaccgcaatgattttcggtgaactgtatcgccatggcgcggaatggaagtttaaggctgtaggacagggctttgctggtggcctggctgcgctggcaacccagcacggcatcaacatctga

SEQ ID NO: 404595 - DNA, 1242 bp, Salmonella enterica
atgcaattacaatcaggacagaacattccgcttcacacagatacactgactctccggcttgattatccccccagtcctggatttcacagtacccctgagacttgcctgtttatgctgaatgctgagggaaaagtgacaggcgatgccgattttatcttttacaacaatctcagtgctgcgggtggcagtgtgaaactcaaccccggtcaccagcacgcagtcgttcattttgcgcttgaccagatcccggatacgattcagaagattgcaatcactatggtgatagatggcagtgatacgataagcggcctcgcgcaactgaaactttctgctgaaagtcaggccaccttttttgtcgatctcaatggccgcacagaaaaggcagtaattatgggggaagtttaccgataccagggcaactggaagctcagggcgcttgggcagggatttaatggcgggcttgagccactggcagttagctatggtgtggacgtggaacctgcagcagaagttgtaccgcaaccagccaggatcagccttgaaaagaaactcgaaggtaaagcgcctgcgcttatcagcctggctaagaaagccagtatttcgctggcaaaacacaaactggataccgttgaagcacgagtcgcttttgttctcgatgcctcaggctctatgaccggccagtttaaaaaagggcatgtacaggccgttcttgaccgtatagctgtcctgtctgtccagttcgacgatgacggcacgatggatgtatggggctttgctgagcgtcacaagaaatatcctgacgtcacactggacaatcttgacggatacattgctgccattcagaacacaggtaaacgatctgcctgggaaatccttcccggccttggcgggacgaacaatgagccgccagtcatgaatgaggttatcgattatttcaaggacagcaccttacctgtttttgttgtgtgcattacagatggcgggatcagcaaaacacgagaaattaaagaggccatccgccgctcagccaactatcctgtcttctggaagttcgttggactgggcggatcaaattatgggattctggagaggctggacacctttagcgaccgtcgggtagacaacagcaacttttttgcgatcgataattttgcccacataaaggacgaagagttgtatgaaaaacttctcgaagagttcaaagactggcttggactggcaaaaaaggaaggcattatctga

SEQ ID NO: 404596 - DNA, 648 bp, Salmonella enterica; identical to SEQ ID NO: 94122

SEQ ID NO: 404597 - DNA, 2073 bp, Salmonella enterica
atgaactcattccccattgaacaaggtgagcaactcagggttggcactgtcgattttgtttcacccaacgagattagggcactattagatatcgactcgcctgattctgtcgctttgaatgcaggaacacctagaaattttcctagagtaaacagctatgtattagtctcatgtgacaatggttacttagttgggcaaatagagtggcttgcagttgagcattcgccttatcccaaacaaagggatatccaagattttggtttagtaaatctgccattccctcgaaaaaaaataagtttaaatccggtagggaatcttaaacgtttttcaaaagatggtactgattattttatatttcaacgcggttctgaatcatttccttctattggttcagctattttactaccaacagatttacagcttagatcaattgtcgagtctggtaataatagacgggtgattattgggcaaagcccacttgctaacaatgctaatgtggctgtagatcccgacagattatttggtcgtcatatagcagtacttggtaatacgggtagtggtaagtcttgttctgttgcagggttaatccagtggtcactcgaggctgcaatggaatcagaaataaaaccaaacgcaagatttattatattagacccaaatggcgagtatacacgtgctttggggccaactacaaaatttaaaggcagagtgtttaaggttgaagcagaagatggtgaaaaccaattacaggtaccttcatggttttggaatagttcagaatgggcatcattcacgcaagcaagtcctaaagcacaacttccattactaaagcgctctttgagagcaatgagaaatgaagagtttgatttacaaacgaatttagatgtagaagttaaaaagtacttaggtactattttagtttctttaaaagcggataaatctaaaggtgcagcagcacttaatgatttcccaggtgctaaaaatcttttggcaaaaattaacacttggcgtcagagtcttgaagaatataaagaaaggttagttactacacatccagagctagataaattaatcgtctctattcaagatttttgtgtgcaaagagagggtagatatccagattacaatgctaaagttagcgcagttgataacatcatagatggaatgttatcttcatttcagagccttggtggtaatgagtgtgaactccttccgaaaaatgaggacatccccgtcccttttgacggaggtaatttagtttcctatttagaggcattagcccaggaaaatggcagtgagcaatatgtcgaatatttagtggctaggatacgcacaatgcttgctgatacgagaatgaaacctataaccaatgactcagagcaccgagttgacttagccaattggttagaaacttatattggaaaggatggaaccggcgatgatgatagctgtgtttcaattattgatctttctttagtaccaacagaaattactcatcttgtgacagctgttatttcaaggattgtgtttgaatcattgcaacgttataggcggctatataataaatctttacctacggtacttgtcgctgaagaagcacatacatttattaaacggtatcgtgatgactctgaaaatcaggatgtcgcagccgtttgctgccaagtgtttgagaaaatcgcacgagaaggcagaaagtttggtcttggtatggtgatttcctcacaacgaccatcagagttatcacctacggttttgtctcaatgtaatacttttcttttgcatcgaattagtaacgacaaagatcaggagcaagttcataaaatggtacctgataatttgcgaggattactccgtgaactaccttcattaccatcccaacatgcaatactgatgggctgggcatctgaacttcctgtcctagttaaaatgaaaaatttgacgaaagagcagcaacctcattctgatgaccctgacttctgggatgtttggacaagaaagtatgcggatgggaagttggtcgagagaactgtcgattgggaagctgttgtaaaggaatggcaacaaaagtga

SEQ ID NO: 404598 - DNA, 822 bp, Salmonella enterica; identical to SEQ ID NO: 21714

SEQ ID NO: 404599 - DNA, 819 bp, Salmonella enterica
atgagcactaatcttgcttttcgttatgcaagtgttgaaactttttttaaaatgattgaaaaccaagaattatggtttaccgatcttcggaatatgaatgatccggaagaatactcggctggctatgaaatagtcaagagaataataaatgaggaatttccagattgcattagactattagaagaagtatcacctaataagatagacgaaaattgtaagatattaatttgttgtttctgttctgatggagatcgttccaacatgtggagcgagtatggtgataatggaaaaggcgttgctattggttatgatgagaatattataacccaatgtcatatttttgctcggtttgaagaacattttcaacctattagtggtagagttgtttttcatcctgttatctattcagaagaactgtttcgagaatatgtaagaaagaaattgcttgcttatattaatcgctccaatctcgccatcgaatttaggcataacttacttcatgcacatcttatcagactatgctcattatataagagagaaaactttaaaagtgaaaatgaagtccgaggacttattgaagtaaataaacatgcatacccaccatacagtattgaaaaacgtaatactaattttggcattgcgtattatcataaggtgaaatttacctataacaatattacggcaattagagagattgtgttggggcctttatttgaacaatctgatgaacagtttcggtcaaaattagatgatctagggttaaaggacataaaaatcagacgttccatatgtacctacaatgatgcggttaagctgtaa

SEQ ID NO: 404600 - DNA, 150 bp, Salmonella enterica; identical to SEQ ID NO: 17050

SEQ ID NO: 404601 - DNA, 1017 bp, Salmonella enterica
atgattatcggaattgtcggctgtggggggattgcccgtgcccatgtcaacgcactttgtctcaatccgctagtaactggtctggccctgtacgatgtgagtccggacaacgcccgacagctcagcgaaataagctccctgccggtaacaaactgccaggatctggagcagcttgccggagtcagtcaagggttcattatctgcacaccaaaccatctccacgttagcgtggcagaagaagtgcttcgctacaaacagctcccgtttgtgtgtgaaaaacccctctcaacagatctcaactctgcacgatatctacaggagattgctccaaaaggcagtatcgtgtcttttaactaccgatataaccccgtcatcgacatgataatgcgtctgagaaatgagaggaaattaggtgaactgcatttcttctcagcagaatttaataaaaattctgcactgacccgccatcacctgacctggcgagactccgcacaacagagcaaaagcagcggtgctctgggcgatctatcctgtcatctgcttgatttattttgttttataggggaaagcccggtagtggttcatgggatcaaaacggtaaaggggacacgggtgggtacaaaatcagatggtcaggttgaagtggatgataacggctatgtaatgggcagttcagaaaagggagcttatttcagagttcatgccagtaaatcggaaacagatcagaatttgggactgcatatacagcttgtatttgaaaatggtgaaatcagatattcaacccaccatgaaaatcgcctgctcctgattctatttaatgatacgaatacggaaacaattggcttcgacgctctgaaacgcttgcctgatccaccacgggagcttccattctggtctgattcgtttattcatcttcatgacgactggtgtgctcttattaaatatggtcactcgtctcctaagctggcggacctgtcatccggccttcatatacaggaaataattgaggcattctga

SEQ ID NO: 404602 - DNA, 828 bp, Salmonella enterica
atgactattttaaataaaaactggcccgtcgaattcccgttcccgacagtaatccgcactgtggtgtgcagcgatcttgatgaaacttatattccttcggacagtgataaaaaaaaactggggggggtcgttcagctggagtcctatattacatcccatgctgaaaaaaaggggattctcgctggctggatcacgggaacaaatctggattcagcctggcgaaaatccaggggatatatctcgcgaagccctcactttatatgttgcagtctcggcaccgaattttactgggtgaaaaatggccgtctcatcccctctgaaacctgggcagaaagaataagccgttcaggctacagccgtcagaatgtcaactgtctggttaagattctgatggaaaaagagatcccccttctgaaacaaccagaggattatcagggcccctttaaagtgagctattactaccctgagagcccatctattgccagcgattttgccaccattcaggaactggctgacgaacgacgaattcgtgttgtgtttacccgctgtaacccggcggctggcgatccccctggctgttatgacgttgaatttatccccctctgttgtggcaaggatcaggctgtgtcttttctgatggaagaaaccggactgccgaaagaagccattattgcctttggtgacagtgcgaatgattttgccatgtttgcacaggccggaagtggctatctggtgggtaatgccgacccgtttgcagtcagccagtacggaaacagactggacagtgcttactgccacgggatactgagcgttcttaaggagctatag

SEQ ID NO: 404603 - DNA, 123 bp, Salmonella enterica
atgtattctgatgggtctctgtcggaagtattatgttatgtgacaggtcagacagtaaaagatggtaacgggctgcaagaaggcagcgtttttttgcattattttcaaaatgttgaagtttga

SEQ ID NO: 404604 - DNA, 291 bp, Salmonella enterica; identical to SEQ ID NO: 374228

SEQ ID NO: 404605 - DNA, 1020 bp, Salmonella enterica
atgaaatatatccctgtcggcgttgatattgcaaaacatcttatgcaggtgcatttcgttgatgaacataccggagagattatcgataagcaggttaagcgtgagaaattccttgaatatttcagcaaccgtgaaccctgccttatcggcatggaggcctgtgggggttctcatcactgggcgcgtgagcttcagaaactgggacataaggtcagattactcaaaggccggttcgtcaaagcattcgtgatgggaaataaaaacgatgtgatggacgcccgagccatctggctggcggttcagcagccggtaaaatccgtcgccgttaaaagcgaggagcaacaggccacgctggggttacaccgaatgcgccagcaactggtgaagttcaggacagcacaaataaacgcgcttcatggtctcttgctggaatttggtgaaacgacgcacaaggggcgtgctgctttggcgaaggaggtgccggaagccctggagcgtctgaaggagcggctaccgctctacctgataaacatgctggatgaacaatatcagcgaattactgaacttgatgaacatcttgaccacattgagaagcaactgcaggcggtagccagacagaatgaaacctgtcagcggttactgaacatcccaggcgtggggccgttaatcgccaccgctgccgttgccacgatgggagacgcctccgcctttaagtcgggacgggaattcgccgcgtttatcggtctggtgcccagacagacaggctcaggaggaaaaatccgcctgctgggaataagcaaacgtggtgataaatatctgcgaaccctgtttattcatggtgcaagggcggcagcattactgaccaaagaacctggtccatggataaccgaactgaaaaagcgtcgtccggccagcgtggcaatcgtcgcaatggcaaacaagctggcgcgaacggtgtgggcaatagccgctcacggacgtaaatacgacaaaaatcatgtcagtatcaggcctgattaa

SEQ ID NO: 404606 - DNA, 513 bp, Salmonella enterica
atgaaagaaataaaattaacgccagaaatggtgctttctgttgttgattacaatccatcatcaggcgactttcactggagatggaggcaggggagagagaggaccactttgacatggaactctcgttttgctttcaagaaatgctcatcaataaattctgatgggtatttaatgattatgattaatggtaaagcataccctgctcacagactggcatggttgattgtttatggcaccatgccagatggttttattgatcacatcaacagggtaagaacagataaccggatatcaaatcttcgtcttgtcactcattccgaaaatatgcaaaacaggaaaattcagaagaataataaatctggataccgtggcgtgtcttgggatgttaagtacgggaaatggagagcaagaattaatgcgtctggaaagtgtattaaccttggataccatgacactgccgaacttgccgctgcggcttttgaggcagccagaatgaaatatcataccgtttaa

SEQ ID NO: 404607 - DNA, 411 bp, Salmonella enterica; identical to SEQ ID NO: 20714

SEQ ID NO: 404608 - DNA, 342 bp, Salmonella enterica; identical to SEQ ID NO: 20713

SEQ ID NO: 404609 - DNA, 1155 bp, Salmonella enterica
atggcaatatttcatatgagcgcccaaagaataagccgctcaaagggacatagtagcgtagctgcggcggcgtatcgccacggtgaaaaaatgacagatgagcatacaggagagatccacgactacagcaaaaaaaagggagtttctgacagcgtggtattaataccagagggggcagataaaagatttttaaaacctgaatatttatttaacaccatcgaaaaacatgaaaaacgaaaagatgcgcaactcgcactcgaagtaaatatttcgctcccaacagaaatgacagacgaacaaaaaaaggcgctggcgatagatttctgcaatgaaaactttgttaaaaaaggaatgattgcggatatagcttttcataagctcgatagcgacaacccacattttcacgtaatgctaacgacaagaaagctaaccccggacggctccgggttcgggcaaaaagtcagagaatggaacagcaaagaccagctgcaggaatggcgtaagagctgggcagacacagcgaacgatcacatgcaggccgctggcatcgatgcgcgtattgatcaccgttcactgaaagaccaaaaagcagagcttgacgctatcccctcccccaccgtggagcaacaggcgcaggctatcagcttagacagaccgccaaccatacacagggggcacagcggcaacagggagcgtttagaacgctttgacgcgcttcaagaagtgaaagcgtcacaagaagctaaagcacttaaccacattgaaataaacacgcttaagccctcgcctccggctcctgcttcctcccctaccgcatctttaccagatgctaaacagggaggcaaaaaagcaggttcagcagcggctacagtttcaggatctaatatcaatctcgcagatgaaacaacagacaaaaatctacatctaacagaagcgcagcgcgaagagttagaagacgcagaaaataaagaagcagcagcgaagaaaaaagcatacctcagcggcggcgctggcgttcctgaaatcagcgaaacaaataaaatacagtctaatactgattttaaaaataagctcaggaaggttaaaacggcgataaataaagaagacgaagaagaagagaacaactacaaaataaatagaccaaaactaaaataa

SEQ ID NO: 404610 - DNA, 1722 bp, Salmonella enterica
atgctttcagaagaaagattaagcgcaatacgcgcgaaagtcaatagagcgcaaagctcaacaaataaaaaaagcgtaacgctttcaagcgtttcagaaaacggatcacgcattactgagcgtaaaaaagaaagtttcaacgtagcgaatagtttcattattcgcggcaagattgaagaaaatgaaacgctaacaaaacgcggcgaacgttctttgaactgcgctcaacagcgttatattgtagttgtcaacggtaaagcacatactgtatttactcaccgctgccgctctcgtcattgtgcaaactgtcaacgtatacgcgcgttcgtatggcaaaaaagatttgaagaaatattgccacgtctcggacaagaacataaaaacgcaaaatatttatttgtgacatttacagttaaaaatccaaaactcaaaaacttacatactgttttattatgtatgacgcgagcatttgcgaaaatgtttcgtcgtgatgcgttcaaaaaacattttgccggatgtattagatctacagaaatcactcgcggtttctccggttctgatgaagcgcacccacactttcatgcgcttgtcgtcgcgcttccatcgtatttcaaagatgaaaactttaaggataccagcgtgtgggctgaaaactggggcgagtgcttaaaagaagaatacgaaaaagcaggattagaatataacgaagaagattatgttaatggattacctcgcattgatgttagaaaagctaaatatgacactggaaaaaagaaaaaaaatggcgaaaaaatactaaaagatattacatctaaaaatataatggaaacgggcgaaaaaataataaactacgtattaaaatatacagtaaaaggcgatgatctactacgtggcggcagagctgacgagtggttttgggagttcgacaagcaaataaaaggtattcgcgttattgcttcaacgggaacagtaaaaaaattattagctgaacaagagaaagagaagtttgattattataaagagcaagcaaagattgaagaactattaaaagaagatgaaaactttaaagctgataaagctgtattctcaaagcaaaatgaaaactatgattattatttagaaagcaaaaaagataagtttcaatatatcattgaagcgattgaagctaaagcgtataactatcaatgctattataaagcgttattatctgaccatcttttagcgtttagaagcggtattgatggcatcattgaaaactttcgaaaaataaataaaacaaaaacgagagaagattttgaaatattggaagcagcagagcaagagctggtaaaaatacaatgcgaaagaatagagcgcttgcgttttatttgtgatgctcttgtaagggttggtttatataagaaaatgtctgattttgtgtatatgaatatacatacaaatgaaaaaaccgttattgtaaaaaataacattgtagatattttgaaggcagcagaagaaaaacttttaaacgattttaagcaaagtttcatgagacttgagaacgcgaaaacgcaagatatatttaatgctatagtggataaagtaaatgaaaaatcagcgctgattaaacttgtaagaaatgagattttggcggcgggtgcgtatgcttatgatgctgataatatggaatatatagatcttgaaactaacgagcgtttagaagttatagcgaccatagaataa

SEQ ID NO: 404611 - DNA, 456 bp, Salmonella enterica
atgtattatttaatatgtggtctatttatagctatattttttattgcttgtttgctttccgttatatatgcagctgaaatatatcagtggcagcattacaacgcttacaagtttaaacgctggttgaaaagtggaagtataaaaaaagatgaggagcaagaaaaaataaaaagggaagtaaagaaaatgactatagataatattttaagactcctcaagaaatacaaaatagattttgacgctaacgagttagtgaaaaatgattttaatattaaaatgaaatattacaaacttatattagccgagaaagaaagactgaaagaaaataaaagattagatgaagagttaaaacaaaaaataaaaatagaaactgatacgtttgacgctgaaaagtttcagaaagaagcagaagaacgatttaaaatattcatgaaaaatcgtaataaaaataaataa

SEQ ID NO: 404612 - DNA, 1179 bp, Salmonella enterica
atgtcatatcagtttatacatattgaagattacgggataaatatatctaaaaaaaggagtaataacggaacgagtgaaaaatacaaaaaagaaacaaaaggaagatccgttagtcaaataatatcagaagcaaaaagagacaatgggttttgttctcatgttgaaaagccagaagaaccgattattttatatggtaagagtttagatgaagttgaaaaactcgctatggaataccatagtaaaacaaagataatagataaaaacgggaaagagaaaaaattaagatctgatgctaatgttttactcgctggtgttatttctttaaatcgtgaaaatatggaaatatgggaagattataaaaatgactcgatagcttatttgaaaaataagtatggtaaaaagcttatatcagttattgaacacactgacgaggaacatcctcacatacatttttattgtattcaggatataggtaaaaagtttgatttgatacacgacggaaaaaaagcattatttgaaaacagagacaagaaaaaacacgatcagaatatagcttatttaaatgctatgagagaaatgcaagaaaggttctggaaagtagttagtgcaaattatggtttgtcaaaagatggtccgaaaaggcaaagattaagccgtaaagattactttaagcagaaaagagagataaaactgattaaacaagcaaaagaacaagcaaaaacagaaggttataagtttgctatagatgattttgagagtaaaaactggttaaacaagatcgcaacttcttttactattaaaaacagcaccttacaggaagctactgccagaggtgatagatataaaaaaggactttccagcacaaaaaagaaacttaaaaatatagaaagtgatttagaagaaacagaaaaagaactatcttcactaaaagataactttaaagaaagagtgaataatcaaacatcattacttaaagataaaaataataaactaactgttgagaatgagaatataaaaaaacaaaatgagcagttagagcatgaaaataaaaacctaaaaaccattttggaagaatcttttccactctacgagcttttgaaaaataaatatggtgatcgctttgatgaatggaaagaaagtttatttaatactgtaaaaacgaaaatgaagtttaaatag

SEQ ID NO: 404613 - DNA, 147 bp, Salmonella enterica
gtggccgaaggcgacgtgctgctgattctggaagccatgaagatggaaaccgaaatccgcgccgcgcaggccggcaccgtccgcggtatcgcggtgaagtccggggacgcggtttccgtcggcgacaccctgatgacgctggcgtaa

SEQ ID NO: 404614 - DNA, 459 bp, Salmonella enterica
atgagcagattaacctcgattatctccgctctggttatctgcatcatcgtctgcctgtcatgggctgttaatcattatcgtgataacgccatcacctacaaagtccagcgcgacactgttactcaaaagctggcgctggcgaacgcgacaattaccgatatgcaaacgcgccagcgtgatgtagcagaacttgacgccagatacacaaaggagcttgctgatgctaacgcgactatcgaaagtctccgtgctgatgtttctgctggtcgtaagcgcctgcaagtcgccgccacctgtgcaaagtcaacgaccggagccagcggcatgggcgatggagaaagcccaagacttacagcagatgctgaactcaattattaccgtctccgaagtggaatcgacaggataaccgcgcaggttaactacctgcaggagtacatcaggacgcaatgcctgaaataa

SEQ ID NO: 404615 - DNA, 204 bp, Salmonella enterica
gtgaaaagtgaggaagagtactttgcggagcttcacccgcaggtggtggaggttctgggaacggcagttatgcaggtactggtagagcagcgcgaaccttcgcgtgaagccctgattgagatgattcaggtactgtggcaggaagaggatgtggacttggctgtagaactggctattgatgttctgaggctgccgaaagagtag

SEQ ID NO: 404616 - DNA, 672 bp, Salmonella enterica
atggctgaatttacgaaagagcagttgatcgaagaagttaactacaaccttgagcattgtttctgttctgataaaacaaagcgccttatggaaatcgcactggcagcgctgacagaaacacagttaccgcagccagcggtgttatcagtgccagatgaaataccgaaactgaaagatgggatgggctttaagtatgtgaaagatggcgtccgatattccttaaattatgccaacggatggaatcaatgccgcgccgctatgcttcaggccgaacctgtaagtaatagtgatgagttaccgctggactatctgcaaggacacaaagacggcctggagtgggctgcacaattggcagaagcaaataatccgcaaacaggtgactggttgtacgacgacccaatcgatcttgccagggcgattcgcaaaggtccggatatgcctactgttcagggtggcaactctccggtaactccggatggttggataagctgtagtgagcgaatgccggataagttaattccggtaatggtcatgtatgaagacggtgagatgtggtctgcaatgtggaatggcaatcgctgggatgatggcaccgaatatccggatccgcactcagttacgcactggcgtgaaatgccagcagcaccgaagcaggaggttaaccgtggctaa

SEQ ID NO: 404617 - DNA, 375 bp, Salmonella enterica
atggcaatgaacaaaaaagaaaaagaacaacttgaaaacgctattcgccttatggctgtaaacagagcactaagatggtctgactatggagcagacagagatgtcggcttaccacatggcaccaaccagtatgttaacggttggtctatcaacacatattcctgccgtgtatataaatcatggtcatccgctgtaactcatggtgacggatgggttgaaaatgaagaaagaccccgctccgcatcacagagagggattgcgcaatacagcacagaagaaaaggcactcaaagcattaaggcattgcatggaaatgaagtttgcagaagcactatacgaaatagacaaacaaattctagccatcaacgaggagtaa

SEQ ID NO: 404618 - DNA, 1197 bp, Salmonella enterica; identical to SEQ ID NO: 381236

SEQ ID NO: 404619 - DNA, 147 bp, Salmonella enterica
gtggccgaaggcgatgtgctgctgattctggaagccatgaagatggaaaccgaaattcgcgccgcgcaggccgggacggtacgcggtatcgcggtgaagtccggcgatgcggtctccgtcggcgacaccctgatgacgctggcgtaa

SEQ ID NO: 404620 - DNA, 255 bp, Salmonella enterica; identical to SEQ ID NO: 379364

SEQ ID NO: 404621 - DNA, 1101 bp, Salmonella enterica
atgaagaaagatgtcgaaaaaataacgtgggaggaattactctttgagtacttccttgagaaaaatcttaaacctgatactgaacacagctaccgcaaagttgtccgtctgtttgataagttcctgggcggtgattcctggcccggcgatgtcacaccgagagacattcagcgatggcgacgtcatatgcttaaagatcaggggcgttcagtaaacacctggaataacagagtgtcacatctccgaccgctcctggcgcttgggatcaagaaaaagtggttaccacagacggaaaatccgcttgatggcacttcagtgcccggggcatcaaaacagaaaaaaacgctcactgataaagagatggtcaggatttaccgtacagttcaggcttttgctgaagctgaggccaataagatggtgatctgtgacaggcggcgcaatgcgatgtaccctgcatggtactggctgatcgtgctggatacgctgcgcttcacggggatgcgttttaaccagctgaaacatatcaggctgaaggatattcatgaggatgaggcggtgattacccttcagctggaagggagtaaaacccgacgtgaatggcgtgtgccgattgtggaatcgttacgactttcactgaaacatcttattgagtgcgcccgtgtcaatggtgcgtcggataatgactatctctttgatgtctgcctgtacagcgagcattacagtcccgggaaataccagtactgtgccaaaagagcgcatcagtcggtcaaatcttttttccgcagactgagccgtgaatgtggtttttttgtctcgtcacacagattcagacacacactggcaacaaagctgatggcggcaccggagcgtaatctgcacatggtcaaatccattctggggcacaggagtgttgccaccaccatggagtatattgatttttcggtggaagttgctgctgaggcactggaggctgaactcggtttatccacggatgaggcgacaaaaagacggattaaagaggcgaaaaaacgccgtgaggccagtaccgggaaaaaggaaaaacaggaaagttctggaggggaactttctgacaaggaataa

SEQ ID NO: 404622 - DNA, 1530 bp, Salmonella enterica
atgtttaagcggttcagacgtatgctgcccggcacaaagggcacggagcctggcgtggtcgcgccggtgataccggcagggttttatgcgccgctcacggcagaggcactgttatcaccagagcacagggagctgaggctcaggcaggtctgggataacaatccgatgccccgtgatgtatacgacaggatgtgccttgaaccactcagccggctgctgctgaacacccagaacgtcccggcaacacgggaaggacggtggtcccgtgccggtggatttggtgatctgacggtactgtacaccacgtatgccgttcgtctggcaagagggtacatgtttccaccggatgcgaccccggaagaccaggcggctcaggccgcagtctggcatgcggtgattttctggtcagcgctgttttaccacctgcccctgctggcgcaccttgagggggaactgctgagtgggcggggctggcagccagggatttctgtgcctgacgaacctttccgtttccggttcaggaagacggcgccgcagggtacggaagcgcaacaacttgcggccctgactgccggcacgctgttaccggacggcgcaacggcctggcttgtgacggcgccgggcgcactgcagaatctggccggggcgctctggcatcagcatcccgggatggcgctgattcgtgatgtgctgcaggaagcggcaaggcagacagagagtccgctgaatacctgcgctgtcactgcgccggttactgcggaggcttcagcagacatccgtcctgctgacccggtggtgaccggcagcacggacagtgtggtggcagtcactgaggtgcagccggcagaggaggtgaagactgagagcgtgcagacagagactgaaggtggtggtgagtccgccggggcgtcagaggtgccgtccgcacagcaggaactgacggttcagacagcgccagtggtgacggcagatgatgaagcggtcagtgctgctcctgcggatcaggacacagcaatgctgctgagtcttttttcagcagatgagtccgaaactgctgaacctgaaaacagtattaaatcgtcagccgatcgggacggccaaagtgacgtaccggcagtacagggagaacaaaccagcgttatttatccggagggcgaagcagatacggaagaggtggattttattacctggctgaaatcggggttgtcatcggggatgattgaaataaatacaccttccgcgagagtgcattgtattgcggggtatgtttttttgtgtgtcccggatattttttatctgtatcagaaaatgacgggaagccgtcgtgaccgcaggagtgttcaggcgttgtttgaacgttcccgtattcacaaaatccgggaaggtgagcgttttttcagcctgcatctgtatagtgtacctgacagaacagggagttataaagctgtaagcggatatctggttaaaagccgttatctgtgtggttataacgcagtgcccggggacagtgaatacattgcttttccataa

SEQ ID NO: 404623 - DNA, 219 bp, Salmonella enterica
atgacagcaacaacagacaccacaccgcataaataccggattgaagccaccatcctgaagcctggtggtgcaccggtatcctgggtgcgttttcagaacacaccgatgactgagcctgaatgcgtcaggctgttttcaaaagaaaaagaggccggtaaatcgttcagtgtgaaagtgaacgtcaccgcattctcatgcagcagagttcagccggaataa

SEQ ID NO: 404624 - DNA, 498 bp, Salmonella enterica
atggagggggctacgcaggaaccgccgaaagcacgctgttttatatttgttttattgaatataagaggaggccataaaacggcccccttgtttttatcagaaagagtaacggaagctggcgttcaccgcgttatccacgttgtacttaccaaatgccgatttctcaaactccagaccaaagcggagattatcgcgaatttctgcattcagaccaacattcatgagcatacgtccgtctttctcgcctttgatgcgtttttcaccagaggcatcgcgcggaacggtttcactgtttgccagaatgtcaaactggtaaccgaggccggcacgggcagtgactttccagtccttaccagagaaggttttaccgacatcgataccggtacggccaatcagcgggttgaagtcctttctggtgtgagaaccttaaggaaatcgtccgcagccccattaccgtcttatatcactggcgctgacatgtattatccggggagttaa

SEQ ID NO: 404625 - DNA, 1014 bp, Salmonella enterica
atggatgagaagctaaaacatgcggatttatcgtctttgccagagcaggtgagggttgccgctagggagcttgttgacctgaagtttcgtatcgatatggcagcaagaggcggtacgtcagggataccacttgacctgcatgggaggatgacaggaggagaatgggggccgcattgcgggctggaatttttctgcagcatcattccttttttcccgcgagattttgaaacctgttcagtaactgaaatgttggttcctaccttacataccttcggctgcaactggcgttggtggcccgatcgttattgtagcgacaaagatgaacactatatacggcgtcacattttttctgattacgggctgaaaagtacgagctataccttcattcctcagttgggattgttctgcccgagtgaaggtaaaaatcgtgttaacttctgccgccatcacggtatcgaatatatccccgcacaggtttattcccatgattacccagaagcaaatcgaatctctgtgtacgttcaggatactgccggagggctggatgtgtgggccgttcttgataatcgctatgttcagaaggttactcactatgcctttgcgctcccacttttgtgcgcttatggggtagagttcccaggtaagtggccagcaggatggccatcgatatcggacctcctggctaatcaactgtgttgcactgatgacacaacctttcataaacccgtgatcgatatgcaagctgtcagggatacgctggatcgtgatgagaacagcagagaggatggggagatgtatgtcaaaaccaatgtggttgagctgccgctggccgggctggttcgcttcattctgatcgcaatgttactgagtttaggtgcgttgttcatccacgaggtactggatgagggaagcctgtccaggattgcactgggaataagcactttcacggctggcgtggttgcttcgttttttatcccagcgttccgtatcaagaaaaaatatcttcgcaaatag

SEQ ID NO: 404626 - DNA, 174 bp, Salmonella enterica
atgaaacgcaacgcaacgcaacgcaacgcaacgcaacgcaacgcaacgcaacgcaacgcaacgcaacaatatgcctgtataaaaattccgcgtcaagtacctccgtgcattctggaggtgcgttatgaatacacaaccccaatttcaactgaaaaaagaaactcttttctctga

SEQ ID NO: 404627 - DNA, 2037 bp, Salmonella enterica
atgaatacacaaccccaatttcaactgaaaaaagaaactcttttctctgaaactgaaaccacaaacagtaaacagcttgcgattttaaaggctaactttccacagtgttttgataaaaatggagcgttcattcaggaaaaattgcttgaaatcgtcaaatcatcggatgttgaactctccaaagaatcatacagcctgaactggcttggtaaatcctatgcccgtctgttagctaacttgccgccgaagacattactctccgaagataaagaccataaccaacgtgaagagaacaaaaacagtcagaatctgttaatcaaaggggataacctcgaagtattgaagcatatggttaatgcttactctgaaaaggtgaagatgatttacattgatccaccatacaatacaggtaaggatggattcgcctataacgatgatcgcaagtttacacctgaacagctttctgatctggcaggtatcgatcttgatgaggctaaacgtatacttgaatttaccacgaatggttcaagcagccatagcgcatggttaacgttcatttatcctcgtttatatattgctcgtgagcttctacgtgaagatggtgtgatatttatttcgattgacgaaaatgaattaaatcaacttaaaactatttgtgatgaaatttttggcgaagcaaatttcatagaaaatattgtatggaataaacgtatccctaaaaatgataagggtattggtaatatccatgagtacatccttgcttatgcgaagaataacgaaataagtaaagaatttttaatgcggaaagatggtattgatgatgtatatcagtttattgaaaagttaaaaaaggagaaggtgccattagataaagcagagcagcaactcaaaaaattctacagctccaacggatatgatcgtggaattactctttacaactgtttgaacgaagattataggccatggggtaaaattaatatgagctggcctaatgcagattcatttggacccacgtatgaagtattgcaccctttgactaataaccctgtcaaaatcccagacagaggctggcgttggaaagaaggcacttttaatcatattgcaaaaagaatagatggaaagtatgcagatatcaaaaaactacatgatggtagcgttatttgtggtggaatttggtttgccagtacagaaaacacccaacccagttcggttaaatttttagatgaagttgaagagtttttactaagatcaattatttcaactaaaagtgatggtggtgttgaggttgaaaatctttttggtgggaaaggatatttctcctacccgaagccaacaagtttaataaaaacactatttggttcagtaaaaaccgaagataaagacatttatcttgacttttttgctggctctggaactacagctcatggtattctggagttaaatattgaagacggcaggaaaagaaacttcatctgtgttcaattagatgaagaaacagataaaaagaaacaagcctataaagaagggtataaatccatcttcaatataacaaaagacagaattattaaggcaggaaaaaagctgaaaaaagataatcctaattataatggagatttgggatttaaaatatttgaaacagttcataattttcgagtgaaagatgagtctgaacttacgctttctaatcttagtttctttgacgatgctgtattgacaccagagcagtatgacactctattgacgacatggtgcgtgtatgatggcagcttgctaacaacaccaattgaagatattgaccttaatggctacaaagcacacttgtgcgatggtcggctatatctaattgcgcctaatttcacaagtgaggctttgaaagctttacttcaaaagctggatgcagacaaagactttgcccctaacaaagttgtattttatggcagcaacttcgaaagtgcgaaacagatggaactcaatgaagcactaaaaagttatgctaataaaaaatctattgatttagatttggtggtaaggaactaa

SEQ ID NO: 404628 - DNA, 2916 bp, Salmonella enterica
atgtctaaagggttcacattcgaaaaaaatttacctcatcaaaaggctggcgttgattcggtaatgaatgtctttgtatccgccatacctcatcagacggatcatgttgcaattcgcctgttagctaatccagaactgaatctatctgaacaacaatactacaacaacataaaaaatgttcaggagttcaatggtattgagcactcaaaagataattacgatgctaaaagcaacgtaattgatgtttctatggagacaggtacaggtaaaacttatacttacaccaaaacaatttttgacctgaacaaatcatttggtattaacaagtttatcatcattgttcctaccctatcgatcaaagccggaaccgttaactttttaaaaagcgatgctataaaagaacactttcgagatgattacgagcgtgaactaaagacttacgttgttgaaagtcagaaacgttcgggtaaaaatacaaaatcgtatatgcctcaagctatccatgattttgttgaagcaagtaatttcaataagaaatatatacacattcttgtgatcaattcagggatgattaactctaagtctttaactgacacttatgatgttggcttgcttaataatcagtttgataccccattttctgcacttagtgcgataaaaccattcattatcattgatgagcctcataaatttcctactggtaaaaagacatgggaacatattcaaaaatttaatgcccaatatatcatccgctatggtgcaacctttagtgaaggctataagaacttagtttatcgtcttacagccgtagatgccttcaatgaagatcttgttaaaggtattgatgcatacattgaggatatagttggtgatggtaatgccaacctcaagttggtcaaatctgacggaaaagaagctacatttgaactgaacgaaaataataataaaaaaatttttaagttagccaaaggtgaatcactatctaagacgcatagtgcgatccatgatttaactcttgatgctttaaataagaatacagcagtgttgagtaatggtattgagctaaaaattggtagttcgataaacccctattcttacgatcagacacttgctgataacatgatacgtaaagctgtcaaagaacactttaagttagaaaaagagtatctgacacaaaggccacgcataaaacctcttactcttttcttcattgatgacattgaaggctatcgtgatggtaatgatattgcaggaagcctgaaaactaagttcgaagaatacgttttggcagaagcaaatgaactgttaaaaacagaaaaagatgagttttacagaaactaccttgaaaaaactgttaaggatatatcttctgttcatggtggttatttttcaaaagataatagtgataaagatgataaaattgagcaggaaatcaacgaaatccttcatgataaagagcttctattgtctttagaaaatcctcgccgtttcattttctctaaatggacgttgcgtgagggatgggataacccaaatgtctttcagatttgtaagctccgttcgagcggtagcaccacatctaaacttcaggaagtagggcgtggtttacgtcttccggtgaatgaatacatgtgtcgtgtgaaagaccgcaattttaccctcaactattatgttgattttacagaaaaagattttgtcgattctcttgtcaaagagatcaacgatagttctttcaaagagactgttccaggtaagtttactcaggaacttaaggataaaatcctgtctcaatatccggagctttcctccagaacactcttgaatgaaatttttgatgatgagatcattgatgataatgataacttcaaagattcagatgcctatagccgcttaaaagccagatatccggcagcatttcctgcaggagtgaaaccaggcaaaataaaaaaagcctctgatggaaaaagacgcactaaaatgcgtgttggtaagttcagtgagctgaaagaactatgggacttgatcaatcaaaaggtcgtgattgagtataaaataaaaagtgaacgtgagtttttatcccttttcagagcgtttatgctggaagaagcagacagatttaccaaatccggtgctcatactcgtattgaaagaatttatatccataatgatacggcaatgtcgaaaagcattctcagtgttgatgaggataattttcacaaaataaacacaatgagctatcgtgaattccttgataaattatcacagactatttttgtcaaacatgacaccatgcataaggttttttgtgatataaaagacatcataaatataactgaataccttaacattcagacaatcagaaaaattaaatctggtttcagcaagtatttgcttaataactcgttcagtaaattcagccttgggtataatgtaatatcaggaactgtccatcccacgaaattcaccaatgcagacggcggttatcttgctgatgtattgtcaagtgatcttggcgttttacaggataatacaagccctccactggactcttatctttttgaagaagtattttatgattcagaacttgaaaaactcaatatgacagagggtgaggtcaggtcagtcattgtcttcacaaagatccccaaaaattcaataaaaattcctgtagcgggaggatacacttactcccctgacttcgcttatgttgtaaacacgtcaaagggtgattatctgaaccttattattgaaaccaaaaatgttgatggcaaacgtgaactcagacatgaagaacgcgataaaataaaacatgcacagaaactcttcgaacaaatcagtaaatccataaagataactttcatgacccagttttcaggtgataaaattcacgacctgataaaaaaactgactcagtaa

SEQ ID NO: 404629 - DNA, 186 bp, Salmonella enterica
atgaacagtacccggaaagagaaatacagtgctttctgtagtttactcaacgaaacgcttaaatatgaattacgtcttatactccctccgggagatcaggccgtaattcctctgcttgaatctccacgaggagaaataagccgggataccattgagaaatgcgcgacatactcacacctgatgtga

SEQ ID NO: 404630 - DNA, 249 bp, Salmonella enterica
atgaatacagttgccaccactcgtaacagcaacaaaagaagcaccaacgtttacctgacggcctcactggttgataaagcccggagtatggacatgaacctgtcggcaacactggataaccttctggcacaggctatcgaggccaaaactgtagagcgggaagaagaaaaacaggatatgcacactatgaataaatttatggcaaaagcaggaatgttgacggatgacgatttctttgggagtctgtga

SEQ ID NO: 404631 - DNA, 324 bp, Salmonella enterica
atgccaaagcaatttgatgtataccgcaatccatcggtcagaacgaataaactctggccgttctaccttattctccagaatgattattttgacgatttaaccacaaggatagtcgtgcctctggtatcaaaaaatgatattgagcttaaaaagaaaaggataacgccattagttaaaatagagacatcggatttctatgtgttcaccccggcgctcacgttcctggatgcaaaaaaaataaacagcaaagattttatatgtaatatttcttcatccagaaatgaaattatcgctgcacttgatgccatcgttacgaatacgtga

SEQ ID NO: 404632 - DNA, 1155 bp, Salmonella enterica
atgtcaaagaatatttctgccaaaaacagtaatctttctgctgcaaaaaaagccaaaaatgacgaattttacacccaataccatgatattgaaaaagagatgaatgcctatcttgatttcaataaagacgtatttcgtggcaaaaccattctcttaccatgtgatgaccccgagtggagcaatttcacactttattttgcacaaaactttgaacgacttggattaaagaagctcatcagtaccagctacgctcatcaatccaaacagttaaacacagcttatcagccatcattatttgaaagcgaaagtgaacaatacgacagtgataaaagccagaaacatggcaaaatttacacgctaaccgaagacagtaatcacgatggtgtaattgattttaaagatattaaatggcaatacctgcagggtgatggcgattttcgtagtgatgaaatcaaagctctacgcgatgaaagcgacataattatcaccaatccgcctttttcgctgtttcgcgaatttatggcatggattatggaaggtaaaaagcagtttgccgttatcggtaatatgaatgctattacttataaagagatttttccacttatcaaaggaaataaaatttggttgggtgctactgggaatggtaatgatatggtttttgctgtaccacaaggtgctgatgtgagggaagctgataagaaaaaagcggagcgtctaggatatataggtgattatactcgtttgggtaactcttgttggtttaccaatattgaacacggcagacggcatcaatctttacagctaatgtctatggcggataatttaaaatacaacaaacaaattatcaatgaccctaacgcttatcaggcatatgacaattatgatgctattgaagtgcccagaactaacggtattcctagcgattatgcaggagttatgggcgtgccaattagctttttggataaatattgtcctgaacagtttgaaattatttggcaagcaagtggtaatacacgagcatcaactcccgaagagatactggagattttaaattattctcaacattctgaagataggggtgggtgtacagttattaacggcaaacgtacttatggacgcattcttattaaacacatcaatccacaaaataaataa

SEQ ID NO: 404633 - DNA, 1173 bp, Salmonella enterica
atgaaaacacaattagatacatcaatcaccgttgaacaattgtgcgatggatttgtttataatgaactggagggaaaaggcttgtttggtttatcaggaaagcttaccattcagcccgaatatcaacgcaattatatttatgcagacggtaagaaagatgtggcagttatccagtcagtattaaaaggttatccgctcggtttgatttattttaatcaacctgacaaagatacagaagatacatttgaagtactggatggtcagcagcgcattaccagtattgggcggtttgttaccggaaaattcgccattatagatgataaaggcacgccatactatttccatagtttaccgcaagaccaacaagagaaaatcaaacaaaccactttgctgatttacaaatgtaagggtacagaaagcgaaattaaagaatggtttaaaacgattaatattactggcgtccctttaaatgaacaagaattattgaatgcggtgtattcgggcaaatttgttacactggcaaaagcagaattcagtaattctgctaattcaaatgtgcaaaaatggagtgcttacatcaaaggtaatgttaaacgccaggaaattttagaatgtgcgttaaactgggtcagtaaaggaaatatcagcgaatacatgaatgcccatcgtaatgatgacaatatcaaggaattaaaaacctatttcaatagcgtgattgactgggttaacaccacatttaccgaggtaaaaaaagaaatgtgcggactggaatgggggcgtttatacgaaacctataaagacaaaccatacaatccaggtgaattagccacgcaaatcaataaattatatcaggatgatagtgtaaaaaacattaaaggcatctgggaatatgtgttaggtggtcaatctgataaacgtttattaaacattcgcttttttgatgaaaaaattaaaaaacaagcctacaaaaggcaaacagataaagcggagcaacaaggtatttcaaactgccccctttgcgccagttcagataatgccaataaaacaaaaatctgggctttgaaagaaatggaagccgaccatgtttccgcatggagtaaggggggtgaaagtaagcctgataattgcgaaatgctttgcgttacgcataatcgttcaaaaggaaataaataa

SEQ ID NO: 404634 - DNA, 207 bp, Salmonella enterica
atgaacaatgaaacagaaaaagcaatgtggagttgcaaaacatctgataccccatggactttcagctctctgctgaaaaaacttttggctgttgagttgtcaaattccataaaattgacaaattcaccagaaaaaaatgatgaattacctgcctttttagactctcgcccctattgggaatatcaacaatgggaagaacaaaaataa

SEQ ID NO: 404635 - DNA, 681 bp, Salmonella enterica
atgactgatgagaaaaagactgaacctggcgtgttaaaaagctccctgacaattaatattcacacttattacgctattcggttgtggaacggtcgcaagcctgagactggtgctgataagtcggaacgtcggcgcaggatcattggcatgcccggggttatttcccgtgcgggtatcgcaacaaaagattctgagaacaataatccgtgggcggatgaatttttgttcagccttgaggaaaagctgaatcactcaaagcaaaagattaatgacctggttgagcagttaaatgatgttttacgggatgtgccaggggatatttgtatttctgaaatatcatcaaccagtccagtaaatattggtgtgcacagtcgttcacctcttggttacaaatgtgtatggctgcttgtcgggtacgatgaactggtgcttaaagcctttcaggctttccactatggactgattgcccgatcacgtcgtgatgaaatacttaatgccggagggcatgctgtacgtcagatttgtgctcttgcccagggatataaaactgtacctgcaacgaggggtgatatttcttctggctcacaaaaaggaaaagatgcgatcagccgctatggcatgcctgatcctgacatccttaccgggaagaaacggtcctccttttctgcaccgctgaaataa

SEQ ID NO: 404636 - DNA, 315 bp, Salmonella enterica
gtgaacaagattgactatcaggcactgcgtgaggcggcagaagcaataaaaatagcagccacaccacaaaaattgctggcatttcgtatgaaagtcacacctcaggttgtgctggcgctgctggatgagctggaaaccaaagaagaacagcgagctaacttgcagggaccagaaggattgattaaagcagtgcgcttctatgaacaggttaagcgtgaaaatccgccagtcgaaaccggagtatggaaagacgctgttgactgggtgctcaaagaggcttgccaggctgtaaacattggcatcaaaggagagtga

SEQ ID NO: 404637 - DNA, 258 bp, Salmonella enterica
atgagtaatgcagcaagactccagctgggtttttctccgttttcaaaaactatcgtgctggcaaaaatgcgtaatcttgacgacggaaccagtcttcgtgtcggtaatgatcccggtcgcgatgtaaccaatgaggcggctcagcttgtctggcatctggtcatggcagaaggtggtgaaattatgtgggaaatggacgatggctcccgcatggtgctgaaggctgaaagtcaggaggcaaccagtgagcaagattaa

SEQ ID NO: 404638 - DNA, 249 bp, Salmonella enterica
atgaagatgacagaactggttcccggagtgctgacaagtccgggcgtccctcccaccagtcagcgtaaggcggttgaactggtcaatcgcttccgtcgtggagagcggaattatcatgaactgaaggaaagaggatttggttatttcaagattgatgttggtcctgactggcggttactgagccggaataaagggctgacctgggccctgttgagtcatgaacgatacaacaacatgagactgaagtga

SEQ ID NO: 404639 - DNA, 531 bp, Salmonella enterica
atggcgagtacagaagaggggttgctcacgctcttgttgtccgttgagcatttgaaaaacactgcgatagaacaacagaaagcggttgcagacacgctggcggtcgcaagggaaacactgcgggggtatcgggatatttctgacagtgttgtaaaacaggttagcgatgaagtcagaaaaggggtacagaaaacggacattgcggggctgatgggtgagcgcatgacccaggattttcagcgtcttgaagagactgtggcaaagatgagagccaacgcggaggcgcttaacaaggacattgcgacaattcatcacaatgttgttaaagaatacaacacgctcaataaatacagtctgaaatggtttatcggtgttacggtcagttttctggtcatgttctcgttgcttggctggtttaccaaaacgttgatcgacaggaactacaccgcgacggaggtcgtgtatcagaaaattgttgatattgaaaagaaactggacaaaccagcaacagggaagagccggaaaaactga

SEQ ID NO: 404640 - DNA, 381 bp, Salmonella enterica
atggcgggggcgatgaggtctgtactatctgacatgtttcgtgaggcaattgtggaaggaagaataacaacgaatccggttgagccaacccgagcacctgaaattaaggttgccagggaacgcctgcaactggaaacatataacgccacgcggacggcggcagaatatctgcctgtgtggtttcctcttgcgatggatctcgcgctggttactggccaacgccgtgaggatatagttaacatgaagtttagtgatatcgttgatggtcgcctacacgtaacccagataaagacaggaatgaagatagcattccccctatccctgacccttcaggcgccagggttacgtccgggacggttatcgatcgctgccgactggtaa

SEQ ID NO: 404641 - DNA, 126 bp, Salmonella enterica
atggactctatcgcgctacagggtttgataaagaaattcatggttattataaacagtcaggagaagggttttatagaaaacaaaaatcattttcaccattttcaacggaagcacctaatacgataa

SEQ ID NO: 404642 - DNA, 333 bp, Salmonella enterica
atgctggtaattttaggagagtctgcaaaaaccgtattacttgcccctgaagatttcgaagccggagatacgctaaagcctgaagcccaaaaagccgtggacagtgcagcccttgtgatatatcaaaaccgcgttattaaaaatacatttggcgagcagaaaaaccaaaggacgtattcatggcttgaccgcgaatttgtacggggactgcaaccgatgctacaggatattgttaaagaccggatagcgagaggatgtacaaccgaagaggcaaccacctccgcccagcaagccgtgaaggcggttacttcggcattaagctgtatcagctag

SEQ ID NO: 404643 - DNA, 198 bp, Salmonella enterica
atgttcaaaaatcatgctgctttagctattgctctctctttgcttactgaaaaagataagactgacaagagcgtttttttcggggcgctacttcctttgtacgccgaaatcgaacaggcgttggcatcaggagatccggtaacgttttttaccccaccaccgatggaaattgacgatagcatcattaaagatgtctag

SEQ ID NO: 404644 - DNA, 516 bp, Salmonella enterica
atgaacacattcagaaaaggacttgatttattgctgggcgctatctgttgcctggtgctggcgataatggttggcatcgcctgctggcaggtggtgagccgctacattctgggcgttcccagcacccttaccgaagagatgctgcgatttctcctggtgtgggtatcaatgctgggcatggcttttgtcgccggtcagaaacagcatattagcctgactctcttactggataaggtgtcgccgacgattcgcggctggtgggatattatcctgcaggtcatttttatcgcgttttccatttgggtattgattatcggcggcttaaagatttctgcgatttctatgctgcaaatctctcctgcgctgggcattccgatgggaaaaatttattacgcgctcccctgcgcgggcgtactgatcatcctctatgggctgctgaatatcgttgacgccctgaaagctatccattccgccacggataccactgagcacactctggagaaatcacatgattga

SEQ ID NO: 404645 - DNA, 147 bp, Salmonella enterica
atggaactcagaagaatatctgtaaataatttgttcggaattttaaactatgatattgatttagggaactcagaaacaattattattaccggaccaaatgctgtctcttatacacatctgacgctgccgacgaagaggatagtgtag

SEQ ID NO: 404646 - DNA, 519 bp, Salmonella enterica
atgagcaacatcgacaaacgtgcgcttcgtgaagtggcggagaaggctacgccggggaattggcaccgcgcgtcatcacggttcaatggcatcacggtaacgccgttttctctttgcgatgaagaggtgatgttggcccatgctgtcgagaaacgtgacgctgagtttatcgccgccgctaatcccgccaccatgctggcgctgctggatgagaatcttcagctccaacgggaaaaagacgcaatagaggccgtggcacttgcgctgcgtgatgatatgcgacaggcgcgggagcaactggaagcaggatggaagcagaacgctacggacgttcaaatcaaggccagactttgccgggagagcaatagcctgcatgacaggctgcgtgaagcagagaagcgcatagcagaactggaggcgcgggaggtcagcgtttctgagattcgcaagaataaattcatcgagaaaactgaggatgaacttgatggagaccactacactatctgtaaaaatggatga

SEQ ID NO: 404647 - DNA, 1083 bp, Salmonella enterica
atgtcaaataccgctgaaatatacaaattccctgcgccgataccgacgcaacaggagtgccgtatggctgatctggaaaatggctatttacgtttagctaatcagatccaggacgccttgtgtatcgttgaactatcggggcgtgagttccgtgttttgaatgcgattatccggctgacttatggctggtcgaaaaaatcagatcgtattgccaacagcctcattgcagataagacaacactgaaggtaaagcacgtatccgaagcggtgctgagtcttgcctatcgtaacatcattatcctgcgccgtattggtcaaacaagatacatagggattaacacaaacctggataaatgggcttattccaagccacattgctcaaaatgtccggtgtcttttcctgatgatgaaattgccacatggattatttctgtacccgaaaccagggatagttatccccgaaaaggggaaagggcatccccgaaaacggggatagttatccctgaaaacagggatagcgttttaccccattcagccatccctgaaaacggggatagttatccccgaaaagagggaagggcatccccgaaaacggggatagttatccctgaaaacagggatagcgttttaccccattcagccatccctgaaaacggggatagttatccccgaaaagagggaagggcatccccgaaaacagggaacaccaaagacattattccaaagacaaatataaaagatctaaccccctttaatccccctaagggaaaagtgaagtttgatccgttgagtattcctgttcccgaatggctgaatgctgcgtcgtggaacgaatgggtcacataccgccagcaatccggaaagcccataaaaaccgaactgacggtaacaaaagctttcaggcttctgaaggagtgcctggatgaaggccacgatccggtaaacgtcatcaacacaagcattgccaacggctaccagggcttattcaaaccgaagttcgctctcaacgaccgaagaactggcagagatgtgaaccgcatttctgccccagacaaaactattcctaccggattcagggggtaa

SEQ ID NO: 404648 - DNA, 696 bp, Salmonella enterica
atgctgatgacgaggcggctgttgcgctggccgctgctgtacttgctgacgttgcagcgtttgtctcagatatttttgctgcggctgccgatgcggctgccgccttttccgacgctgccgccgcagtggctgacgcacctgcatcaccggcactggaagccgcctgcgtttctgacgtcttcgcggcggtttcggatgctccggcgcgcgctgctgatgtctgcgccgccgtcgcgctggcggctgcggcagcagctgaatcgccggcggcagtacgggagacatctgcattcgcttcagatgttttcgctgcggctgccgatgcggctgccgccgttctggctgtgtcagccgacgccgcgctggctgatgcctccccggcttttgtggtcgccgtacctgcgctgctctccgcagatgctgcggatgaggctgcctgtgtggctgatgcttctgccgctccggctgcattcactgctgccgtggcgctttccgctgcctgacctgctgatgtctgcgcctgttcagatgcctgccctgcggcggtggcattccgcgatgcctccgatgcctggcgggcaacttcttccaccatcgcctcaaaacgtcgcagcgcctccgggcggacgtcgtcttccgtcatggcccccagaaaatcattcagggtgcccggttttgaatcatcgtagaccgtaa

SEQ ID NO: 404649 - DNA, 696 bp, Salmonella enterica
atgctgatgacgaggcggctgttgcgctggccgctgctgtacttgctgacgttgcagcgtttgtctcagatatttttgctgcggctgccgatgcggctgccgccttttccgacgctgccgccgcagtggctgacgcacctgcatcaccggcactggaagccgcctgcgtttctgacgtcttcgcggcggtttcggatgctccggcgcgctctgctgatgtctgcgccgccgtcgcgctggcggctgcggcagcagctgaatcgccggcggcagtacgggaggcatctgcattcgcttcagatgttttcgctgcggctgccgatgcggctgccgccgttctggctgtgtcagccgacgccgcgctggctgatgcctccccggcttttgtggtcgccgtacctgcgctgctctccgcagatgctgcggatgaggctgcctgtgtggctgatgcttctgccgctccggctgcattcactgctgccgtggcgctttccgatgcctgacctgctgatgtctgcgcctgttcagatgcctgccctgcggcggtggcattccgcgatgcctccgatgcctggcgggcaacttcttccaccatcgcctcaaaacgtcgcagcgcctccgggcggacgtcgtcttccgtcatggcccccagaaaatcattcagggtgcccggttttgaatcatcgtagaccgtaa

SEQ ID NO: 404650 - DNA, 696 bp, Salmonella enterica; identical to SEQ ID NO: 376469

SEQ ID NO: 404651 - DNA, 381 bp, Salmonella enterica
atgggcggcctgcgcattggcgccgacctgaaaactatcagcatgtggaacatcaagcaggaaggcctgcgtgcgaagttgcaccgggaaatcatcgatcgggactatcacctgagcgcggccatgtactgcgaaactgcggcgctggaccagtttttctggattttcgtcaacaaagacgagaactaccactgggtcgccatcattgaggcgtctaccgagttgctggaacttggcatgctggaataccgcaaaacaatgcgagagatagcaaacggcttcgacactggtgaatggtcagcgcctatcacagaagactacaccgacgaactgaacgattttgatgtgcgccgccttgaagcgttgcgcgtacaggcataa

SEQ ID NO: 404652 - DNA, 153 bp, Salmonella enterica
atgaatatggaagaaattgtgacgcttagtgtaaagcataacgtctcggatctacacctgtgtaacgcctggcctgcgcgatggcgcaaacaaggacgcatggagaacgcgccttttaccgcgcctgatgtcgacaggcttctgcttgattga

SEQ ID NO: 404653 - DNA, 360 bp, Salmonella enterica
atggctctgactgatactaaagtccgttcggcaaaacctgaagataatgcaaacccgctatctgatggtgacggcctgtttttactggtacatgctaatggctccaaatattggcgatttcgttttcgctttggtggcaagcagcatgtgatggcgtttggcgtttatcccgaagtttcactggcggatgccaggaagaaaagggaggaggccaggaagctggttgctgctggtatcgatcctcgagcacataaacgtgctgtgaaagaagaacaggcgaaagagattattactttcaagaaggtcgcccgagattggctcgcgaccaaccagaaatggtcggaagatcacgctgagtga

SEQ ID NO: 404654 - DNA, 651 bp, Salmonella enterica
gtggcgctatacaatatctctgagaaaatactgactacccttgaaaaaacatctttcaccatcgaaaggctgcaggaacgctatgatcttcaggaggctatcaagaagaatattgatattgttgcgccgggctgccttgtcatatccgaagaattctctgattgggaggatagtcggcggaggattgatttattagcgattgacaagcaggccaatttggttgtcattgaactgaaacgtgatgaaatcggcgcgcatatggaactgcaggcgctaaggtatgcggcaatgatttcaacgatgagttttgcgaaagcatgcgaatattatcaggcatatctttggaagcatgggatcgatgagaatgcaaaagagaagttactggattttgtagagttagaagaaaacgaactcgctgattttggtaaagatattcgcatcgttctggcatcagcggatttcagtaaagaattaacgacaaccgcaatatggctaagagataaaggtgtcgatattcgctgtgttcgcttaacgccttacaactttaagggtgaagtgctgattaatgctgaacaaataataccagtccctgaactggaagaatatcaggtcagattcagagagaaacgcacggaacaaacttttcactga

SEQ ID NO: 404655 - DNA, 402 bp, Salmonella enterica
atgcttttaattcaacctggatttggacttagcatcaaaaaaggccacatgtttggcgagaaagagtcacaacgaaaaatggtgtctatccggttgccatttatcagtatttattggctaaacagggaggcaacaaattattggtatacatgcgccagagcagcatttaacgaccctgactggtttgtagaaaaccatcacgctgttcgtcaggcaaagagaaaggccgacacgacatacatgaaggcgtatcgaaaagcatggaaagaacaccgcgatcgataccaacaagacatggaaaagcttgaatcagaaaacatggagttaagacgaaagctcggtgaagcaaaacgagacattgatgcttacaagcgactttttaatggtgaaagccatgcttag

SEQ ID NO: 404656 - DNA, 834 bp, Salmonella enterica
atgataaatgtcgttagtttctcaggtggcaggacgtcagcatatttgctctggctaatggagcaaaagcgacgggcaggtgaagacgtgcattacgttttcatggatacaggggcagagcaccctaaaacatatgagttcatccgaaatatcgtcagtaactggaaaatagacttacattgccttcgtgtaatacctaatccagaaatggggaaggccagtagttatgaagagataggtgtcaatgatattggtccagatcttataccgtggaaaaggatgttaaataaatacggacatccatatatcggcggtgcgttctgtaccgacagaatgaagtctgttccattcaccaaatattgtcaggaaaagtttgggaaaggaaattacatcacatggcttggcattcgcacagatgaaccaaacaggcttaaaagggctaatggttttcggtacctggctgatataagcgattttgaaaaacaggatgtgcttgattggtggagtgggcagaagtttgatcttggcatacaggagcatcttggtaattgtgttttctgtataaaaaaaagtatgcaaaaggttgcgctggcagccatggatgagccagaacttgcagatgcatttatcaacatccttgatacagaaataaaaacaggaaaggaaccggttatgtatcgaggtaataatacacttaaatcactgattgccttgtttagtgatatatcaagagatgagttagcctcaagaatgacatcaatgcgacagtatgattcaggttcgtgttctgaatcatgtgaagcattttcatgtcagcttggatttaatttttag

SEQ ID NO: 404657 - DNA, 1137 bp, Salmonella enterica
atgttccctacctacttcactaggttttcaaataagggcatatcaagatacgttcaacatttttctcctttcgatacttcaggcataacagatgcatttaatataccagactttagttctacattacgctttcatttcagtaaaattggctacacccttaaagaaacgcctaaaacatttattttaggtcaggtaataaatcttctaaaaggattaaataattgtaaactattatgcgacagaaaaatttataatttcattaacaaaataaccccacataatcgaacggaaagtataatcaaaagccaccttcctgaactattaaactcccctcacaaagatacgattgcatcttatttaggaaaacttaatgacattggcgatgtagttataccttctaaaatactcaccattgaaaatatactaccagaaatctctgataatgaaataaaaaataaagaatccaagaaagaggatgcaatattaaaagtgcaacaactgtacaataataagatactccttcgcgggaaaaatttcacatgtgaacattgtactgcttcactttggtttgcacttgaggacttttctcgaataaattattgtaacgaatgtggcaatagcatcaacatcccaataacaacttccaataaaagcactggagatcactttaaaataaaccacttagtttcccgcgcagtggatcaaggacaattagcaacactattattaatacattatttgtatagtcaaagcacaagtattccatacatagcgaactatgagatttatgatgactcaaagttattatctgacatcgatgtatgcgtgaaattaggtaacaaacttggactttgcgaatgtaaatcaaaacaatcatttagtgaaaaacaaatcgatgaattagtctttattgcaaataaaataaattgtgattttattttactgtcatgtcttttaagtaaaaatgatgatgggatatctcgcaacatagactacatcaaaaagaaaaacattaacatcccagttttcatcataactgatgaagagctattttcaccgacacctaaacgtttatactcctactttgaggttaaccatcgaacgaataagttccatagcggcccaatattaatatga

SEQ ID NO: 404658 - DNA, 471 bp, Salmonella enterica; identical to SEQ ID NO: 399147

SEQ ID NO: 404659 - DNA, 633 bp, Salmonella enterica
atgtcaaataccgctgaaatatacaaattccctgcgccggtaccgacgcaacaggagtgccgtatggctgatctggaaaatggctatttacgtttagctaatcagatccaggacgccttgtgtatcgttgaactatcggggcgtgagttccgtgttttgaatgcgattatccggctgacgtatggctggtcgaaaaaatcagatcgtattgccaacagcctcattgcagataagacaacactgaaggtaaagcacgtatccgaagcggtgctgagtcttgcctatcgtaacatcattatcctgcgccgtattggtcaaacaagatacatagggattaacacaaacctggataaatgggcttattccaagccacattgctcaaaatgtccggtgtcttttcctgatgatgaaattgccacatggattatttctgtacctgaaaccagggatagttatccccgaaaaggggaaagggcatccccgaaaacggggatagttatccctgaaaacagggatagcgttttaccccattcagccatccctgaaaacggggatagttatccccgaaaagagggaagggcatccccgaaaacggggatagttatccccgaaaacggggatagttatccctga

SEQ ID NO: 404660 - DNA, 345 bp, Salmonella enterica
atgattgagattggtaatgatggtttatttcgtgatagtgttgcatattatttatatggagatgaatatgctgctaagaaactcaagttaagagctaatataaataattcacccatatcaaattgttcaaaaaataccatttcattgcttgcggaagaattaatatcaaaagcattaggggatgatgactttaatattaatgagctatttagtaagatcccagttatgataaagaaagataatcgctatgtgtctattaccaaagaggattttgcaagccagaatggtgggtatactttagaagttgttatagagatcgagggttattcttcaaaagatcactaa

SEQ ID NO: 404661 - DNA, 402 bp, Salmonella enterica; identical to SEQ ID NO: 399376

SEQ ID NO: 404662 - DNA, 303 bp, Salmonella enterica; identical to SEQ ID NO: 376631

SEQ ID NO: 404663 - DNA, 339 bp, Salmonella enterica; identical to SEQ ID NO: 401978

SEQ ID NO: 404664 - DNA, 213 bp, Salmonella enterica; identical to SEQ ID NO: 149130

SEQ ID NO: 404665 - DNA, 366 bp, Salmonella enterica; identical to SEQ ID NO: 25155

SEQ ID NO: 404666 - DNA, 1539 bp, Salmonella enterica; identical to SEQ ID NO: 149142

SEQ ID NO: 404667 - DNA, 1647 bp, Salmonella enterica; identical to SEQ ID NO: 149129

SEQ ID NO: 404668 - DNA, 399 bp, Salmonella enterica; identical to SEQ ID NO: 149128

SEQ ID NO: 404669 - DNA, 354 bp, Salmonella enterica; identical to SEQ ID NO: 149127

SEQ ID NO: 404670 - DNA, 318 bp, Salmonella enterica; identical to SEQ ID NO: 149126

SEQ ID NO: 404671 - DNA, 222 bp, Salmonella enterica; identical to SEQ ID NO: 149125

SEQ ID NO: 404672 - DNA, 1137 bp, Salmonella enterica; identical to SEQ ID NO: 149124

SEQ ID NO: 404673 - DNA, 1401 bp, Salmonella enterica
atgaaaacgtcagcttgcatcaatcacctcgctgatctttcccttggagatcatgaagaacgaggtgcccgctatctcgatcttctgcccagccttccagccgttgggcaggtcggccttgaccttggcgcgatagccgatgcgcaccgctgcacggtcctcaatggcgatgcagtcgagaattgtctgttctctttccgcaaacaattcaacaccctgttccgccaacgcgcgaaatgcctcaatcccatgcgtctcgttcgtcacttctccgttcgatctgttgataaaccgaacgtcgcccgacaggcagtcgagcatcgcctgaacattcatcgtgttgtaggcgtcgatataccgggcaacaatcgtcgggacagtatccatcctgtcagttcctcactactaatcctaaagccgctatcgtatgctatttttgtgacggtcgtggcaatcgctttgaccggctgcgccaccaatcggatgccgcaattcagctatgacgccagcgttccgccgctgccgaccgtgcaggcggcagcagtcgacaacacgccccggccgctgcatgtgcccccggcatggaccgtggcgcggggcggtacggctgccggcacgccgaccggccgcgtcgagaacgccaatgcagccgcccgcgtcgagccgcgccgcgaaggctactacaacgccatccagatatatccgtggtcggaaggcgcgctctatcaggtctatgccgcagtcgggcagatcacgacgatcgcgctggagccgggcgagagcctgaccggcgcggggccaatcgcggcgggcgacaccgcccgctggatcatcggcgacacggaatccggttcgggcgcgaaccgccgcgtccatatcctcgtgaagccgacgcgacccgacatcgccaccaaccttgtcgtcaccaccgaccggcgcacctacatgatcgagctgcgcgcccgggaatcgctctacatgcccgccgtcgcctgggcctatcccgcgacgcccggccagcgccgcaccgttccgacagccccgatcatccccgccgaggcggcgcggaactatcgctacgccttgcaggtgcagggcgatagcccgccatggcggcccgtctccgtcttcgacgatggccgccgcgtctatgtcgtcttcccggccgggatcgtgcagggcgagatgccgcccatcttcgtgcttggcgcgaacggcgagccgcagatcgtcaacagccgagtccaccagaacgtcctgatcgtggaccgcctgttcggcgcggccgagctgcgccttggctctggcagccgccagcaggtcgtcaggatcgtccgcaccaacccgacgcaggccgccgacgcgcagcccgccagcgcgaccggaggctccccgtcatga

SEQ ID NO: 404674 - DNA, 690 bp, Salmonella enterica; identical to SEQ ID NO: 149121

SEQ ID NO: 404675 - DNA, 1356 bp, Salmonella enterica; identical to SEQ ID NO: 149120

SEQ ID NO: 404676 - DNA, 267 bp, Salmonella enterica; identical to SEQ ID NO: 149119

SEQ ID NO: 404677 - DNA, 777 bp, Salmonella enterica; identical to SEQ ID NO: 149118

SEQ ID NO: 404678 - DNA, 2493 bp, Salmonella enterica; identical to SEQ ID NO: 149117

SEQ ID NO: 404679 - DNA, 282 bp, Salmonella enterica; identical to SEQ ID NO: 149116

SEQ ID NO: 404680 - DNA, 333 bp, Salmonella enterica; identical to SEQ ID NO: 149115

SEQ ID NO: 404681 - DNA, 996 bp, Salmonella enterica; identical to SEQ ID NO: 149114

SEQ ID NO: 404682 - DNA, 771 bp, Salmonella enterica; identical to SEQ ID NO: 149113

SEQ ID NO: 404683 - DNA, 474 bp, Salmonella enterica; identical to SEQ ID NO: 149112

SEQ ID NO: 404684 - DNA, 1989 bp, Salmonella enterica; identical to SEQ ID NO: 149111

SEQ ID NO: 404685 - DNA, 507 bp, Salmonella enterica; identical to SEQ ID NO: 149110

SEQ ID NO: 404686 - DNA, 1263 bp, Salmonella enterica; identical to SEQ ID NO: 149109

SEQ ID NO: 404687 - DNA, 312 bp, Salmonella enterica
atgaatcttatacggcgcgtttcagcgatatataaagaacaggagttacctgagtatcgtggcaatcccttaattgaagcacttcctgaagcgcttacggaagatgaagtacttctggaaatgagttatttccccgaaattgacgaaaaaatccgctggactgccccggcgaatgttagagagcagtatgtcgaacgtataaagaaattccgttgccctcaaaccaatcttatcattactatggaaatgagcgtcctgatattgagccagaaagtggatattttaaatcccaggctgaaactattacgatag

SEQ ID NO: 404688 - DNA, 546 bp, Salmonella enterica
atggatattattaggaattcagtctggctctctcaaggcactgatttgcttgcagagggactttaccgtgttttggattttgacagaaaggtcgatttgttaattttgtttaaaataaaatcagaaagaacgggtaagccaatccctttctcattttcaatgtttaaatattatattgaatcaaatagcataacttgtaaagattatatatatccttcatatatgttagtagatgagaaagaattaacagataaagacagaggaaggcgagatgaaaattacaatatcattaaagatcttgtagatgacagaatgtttctgttcgactatgcattacataaaaagtcgcaccttttaatggattactcaagaaataaaaaaatatcacaatatactatcagaacgcttctggcgttgtattggcgacatgggcaggatatttatgcattgctacccgcattctcgaactgtggcgccgctgggaaaagtagaatcaaacatgaaattaaacttgggaattccaaaaaaaaacagagcattacctaa

SEQ ID NO: 404689 - DNA, 237 bp, Salmonella enterica
atgacacagggctggcgggaggataaatgcccgtctgtccgcgccgggaaaaaaccgcgcgccggtggcgctgaaaggggccgcgctcacgcgccgcccctttcattacgcggacgttctgatgggggcttctgtcttttcagacctgtcatttgcctgttactgatgatgttgttgttcctgctactgctactgctactgctactgctactgttcttcttttttctgctgctctga

SEQ ID NO: 404690 - DNA, 258 bp, Salmonella enterica
ttgacgtttcgcgggaacctgctgctgtattccctgtggtatgaacttcacccgtttgagaaccttcgccgcaaggggcatcactgccacggcctgacgcacctgtcctgggcagaacgcaaaattttttaccggtttttgggtaaaaaattttgtgggctgttcatttaccctggacagtcagtgcggcaggttgtggctgtctatgcccccggcgacagggactcatacgggtgtgtggcacccggcaggcaatga

SEQ ID NO: 404691 - DNA, 963 bp, Salmonella enterica; identical to SEQ ID NO: 105123

SEQ ID NO: 404692 - DNA, 354 bp, Salmonella enterica; identical to SEQ ID NO: 105124

SEQ ID NO: 404693 - DNA, 510 bp, Salmonella enterica; identical to SEQ ID NO: 15243

SEQ ID NO: 404694 - DNA, 396 bp, Salmonella enterica; identical to SEQ ID NO: 7539

SEQ ID NO: 404695 - DNA, 186 bp, Salmonella enterica
atgaaaaagttatcttttaaagaaaaactggaaatagtgagaaacatcataagagagtcattatcaggtaatgcggcttttgctttactggtgtattcattattgcactccctccccattaaaacctttgctgatttatttgtgacgatactgttatttatagcgattatcgctgttgtgatatag

SEQ ID NO: 404696 - DNA, 342 bp, Salmonella enterica; identical to SEQ ID NO: 75636

SEQ ID NO: 404697 - DNA, 462 bp, Salmonella enterica; identical to SEQ ID NO: 5776

SEQ ID NO: 404698 - DNA, 414 bp, Salmonella enterica; identical to SEQ ID NO: 39186

SEQ ID NO: 404699 - DNA, 363 bp, Salmonella enterica; identical to SEQ ID NO: 75657

SEQ ID NO: 404700 - DNA, 228 bp, Salmonella enterica; identical to SEQ ID NO: 7544

SEQ ID NO: 404701 - DNA, 648 bp, Salmonella enterica; identical to SEQ ID NO: 7545

SEQ ID NO: 404702 - DNA, 297 bp, Salmonella enterica; identical to SEQ ID NO: 5319

SEQ ID NO: 404703 - DNA, 855 bp, Salmonella enterica
gtgtccgcatggattgatcgctatgaggttttattacagcgccggaatctgtcggttaatacctacaagattcgcagtaatcaattagcgaccgtacgcgaaaaaatgggagaaataatactggcagaagtaacaacccggcacattgccaagtttcttgagtcgtggataaccgagggaaaaaacactatggcgggagcaatgagatcagttctatctgacatgttcagagaggctattgtcgaagggcatattgtgaaaaacccggtggaagcaacccggataccagagattaaggtggccagggaacgcctgcaactggaaacgtataacgccacacgagcggcagcagagcatatgcctgcatggttccctctcgcgatggatttagcgctcgttactggtcaacgtagggaggatatcgtaaatatgaaatttagtgatgtttttgacaaccgcttatacgtcactcagattaaaaccggaatgaaaatagccattcccctctccctgacacttcgggcgacggggttacgtctgggaacggtaatcgatcgctgccgacttgtaagccgcactgatttcatgatcagtgccggaatcaggaaaaatagcccgaccgggaatattcatccggatggattgacaaagacatttgtaaaagcaagaaaagcctccggtgttaacttcagcaataatccaccgacatttcacgagatccgaagtctggccgggcggctgtacaaaaacgagcacggcgaggtgttcgcccaaaaactcctgggccacacatcagagaacaccacgaaactctatctcgatgaacgcgataataaagcttacgtgatgctctga

SEQ ID NO: 404704 - DNA, 471 bp, Salmonella enterica; identical to SEQ ID NO: 399147

SEQ ID NO: 404705 - DNA, 147 bp, Salmonella enterica
atggatcgttaccagcagcacggtatgtctccattgactcaagagcagaaaccggccgcaaaagtggtcaacgacaatacgccgcaggcggcgaaagagccggattatctggatatcccagccttcctgcgtaagcaagccgattaa

SEQ ID NO: 404706 - DNA, 279 bp, Salmonella enterica
atggacaaaaaactgaaggaaacgatccggtggtacagagaattagacttttcaggtatgaaagaagatgtaagacaagagattctaagcctttacgaaaatcacgatgctaaaccgagtaaaacagcaaaattagaaatctctgtaagcattattctgataggacaagctttcaaagatgagagcctgataaggttaggtttgcaagcagcgctagcgggaagtaaatcagaactcattgaaatacttaaaaaaacaagcgataagttaaaagaatga

SEQ ID NO: 404707 - DNA, 309 bp, Salmonella enterica
atggcacaattcaaaagaacaacgatggcgattactgcagaacgcaaaatcaaaatggaacgactagctattgacgccagtcaagaagccggttcatcgatagcttggacagatattgttaattatctaattgataattatgcaaaagatgctgcaaaagatgtaatcagcaacataaaaagaaaggctttggaagcggagaatcatactcgtttctatgagtcgcacgaagacgccgaaaaaaaacgccacgatagagtaaacaaggcgttagaagacaatgaaaaaaatggaatgtacaaaaaataa

SEQ ID NO: 404708 - DNA, 1116 bp, Salmonella enterica
atgttctatgattggctgagtattgaacaagattttggttaccaactcccaattctgggggatgtcgcttatcagcgtatccatcttgaaacaggggagggtagctcgctttctcaaccagtattccagcataaaggttcgttttgcgatgtagtttctgtttcagtccgcggctctgttcttcgcatgaaaggtaatccttcgcgatgggggcggattgaaaatctttttggtctgcataccgttgatgcatgcgtttcggtttttaattccatcctgtctaccttgggtttgccgaattttactaaatgcacgaagattttcttgtctcaggctaaagagaatgaaaaagtaaaattaatttctgatggtgcgctaatacgtgagcttcatataacatctaacatttctgtaggtaaagggaatgaagatagctatatatcagcgatttctacccaaccttatagaaatagtgttcctcgtttacattcaaatggtaaatcagttgattggttgtcaaaaaaagggaatgtaaacttaatatacccaaccgtttataataaagcccatgaactagacttgcattcttcattgaaaataaaaaataaattcggcgttgattctaaagaatataaatatttattgaatgttatcaagtactgctctgaaaatggaattgttcgatttgaacagaaattaaagtctcgttatctacaaaaaaacaatctcatatattggggtatttctgatttttcatcgctaactaatttgcataatgattttcttaatattgacgaaaaaatttcggtgaatgctatggactttgaaactattagtgaacatttgctttcacagggggtggttgataccacacgtaaagccaatatcacagccatgtatgctttacagtggtttcatggtcagatctttgacttatccaaaaggcaagtaaaagagcaccgtgcaagattaagaaagattggtatcgatatagctcaaaaatgtaatgtatctaaattttctccagttatattaaaagaaactcgtgaaattcatgtgtctcagtgtgttattccagagtggtatgttaaaccaaatcatttacgtgtagcttga

SEQ ID NO: 404709 - DNA, 276 bp, Salmonella enterica
atgattaaaattgaaattaaaccttcacaggcagttgcagatactcgtagcggagtatctaaatcgacaggtaaggcttatacgatctctgaacaatcagcgtatatttttcttggtggtgattatcctcagatgttcaagattaaccttgagaatggacagccgccatatcctgctgggctttatactcttcatgagtccagtatttatgtaggcgattttcagaaactgcgcattggtaaaattttgttgttaccttatcaggaatcaaagtag

SEQ ID NO: 404710 - DNA, 213 bp, Salmonella enterica
atggattctatagctggaaatttaattggtgagatttgtaataacgcaaccaatgaatgccagtcagttacgttggctctgaattttcctgctacaagcattgattacagcattgcagcacaatattggggcgtggcattcacaagtattatatttctttatcttttctctcactgcataggcttgatactcaagtttgtgcgtaattcgtaa

SEQ ID NO: 404711 - DNA, 219 bp, Salmonella enterica
atgaaaaaattatttagtctgggtgcaatcctttctatggctgttgctgcgccttcaattgctgctgaaggttcaggcgtagatttaagtcagctaactgactcaattgactttagcactgtgctggtcgctattatggcagtggctgcatcactggttgctttgtatgctggtattgcgggcgttcgttgggttattcgtactgttaaagctgcgtaa

SEQ ID NO: 404712 - DNA, 1458 bp, Salmonella enterica
atgtgcctgggcggtaataaaagggttgtctctgtagctttggttttgttgacgttatctgcgtgttttattcctttccagaaagtttattcaaatccattacttttagctcgcgctgttttaccaacggttcttggtcgtgttatagcctcaagagcaatgaagactgccgcaaatgatgcggtatatctggcattagttaaaaatacttcatctgcggttagtaagtctgttttatctaaagcatctggtgttgctggtactggcttttttcgtagtgcatcgggcgcgttaacatggggtggcgttggttatacagccggttccattacggctgattattatgcggggaaaggtgattatctcatagcgacatcggggacgcccgttggtaatggtaaatatcaggtaacgtttggcaataatgtttatacaattgattatatgccaacggaagataatccgtttattgtaagcccggatagtctggacagtaatagctcggtggttgttaatgaattgagttccggctatcggtggtggcaaaatacatacggaaatcagggtaaaccaccttacattgttggttccgtttctggtgttgcacatgcttactttaatcagcaggcacagaataacgcgctaacctgtcgcgcgccggataagacgtcatgtagctataaactcaatattgtgtcaatcacagagggtacaggaggtgccgcttcatctgtaaaatactcatatcagtcatcatatattaatagtgatggtgaaacgataacgaatacttttactccagttcagggaatcgctgttttttataataaaaattttaatccggatgatgaagtcgttttcgctgactataaagtagcaaccgataatgatggcttttctgtcatggaatcgttaaaagatattcctatggatctggataagctggcctctatgataaacaatttattaatggatgcagcggctcaacctgattatgagggcatacctgtatcatctagcaatccggttacggctgatgaaattaaagcaaattatcctaatcatggaagtttaaatgattttgattatatgtatcccgctcaaagctcaccttctggtgacgtaaatatagaagcgccgggctataatcagggaagcaatacagacaacaatgaattgccatcatttgaatatccggacactccggaaccaacgctcgaagaacctccaacagcgaacgaaatattacagcctatagctgatttatttcctcagctaagcaatgttgatatcggagggcgaaatgtatcatgtccggttgctgagttttcaatctttgatagtgaattcaggattgatcagcaatgtgtttttatagagcagaacagggcgctgataagtcttatttgcagtattgtttgggtacttatggctatcagaattttgttgtctgcatga

SEQ ID NO: 404713 - DNA, 288 bp, Salmonella enterica
atgtttggattactgactgctgcattaaatggattgctggcatttgtttttcgcactgtcgttgttaaatttgtcttattctttggcttgatgtttattgttcatgagtttattcctgtaatggtttcatggatgtcattaaattatgatatcccgtctttattccagctacttcctgattcaatgtggttttattttaatctggttaatttcgctcagggattgatgatgattttaaacgcctggcttgtaaaatttatgattcgcagaattccgtttgtcgggtga

SEQ ID NO: 404714 - DNA, 1056 bp, Salmonella enterica
atgcctatttcagcttatgttggttcactgggtagcggtaaatcttatgaagttgttgccagtgttattgttcctgcgtgtttatctggtcgccgtgtagttactaatatatacggtattgaccagcaaaaaatccatgaatactgtcaaaatttatcatcgaaaacgaaaaaatccacacttggggagattttatatgtaactaacgagcaggtaatcgatgaaaatttctttccctacaaagattcacttcctgcggatactttttgtcagtatggtgatttggttgttgtcgatgagtcatggcgtatctgggagtctgacaaggctatctgtgaaaaacatcgttcattcatcgcggaacatcgtcatttcactgattcctctactggtatttgttgtgatttggttgtaataaatcaggaagtatcttccttacctcgctttataaaggcaagacttgataccacgttcagaatgcagaaacatatcgctttaggtatgaaaaaccgataccgagttgatgtgtttaatggagttaagctttataaagctaacagagttaccagttatcagaggaagtatgatccagctattttccctttatataaatcatatgaaactggtagcgggaaagaattaactgttgatggacgttccagtattcttcaaaagaaaagtgtctttatcattgccggagctttgctggttatttttatcataagcgtatcatttttatattccttttttactggaggtcagattccagttaaaaaggaatctgatattcaaattacgacttcctcaacgcactcagtcagtgggtctgcaccattggtggcaaactctcagcaagccagagaaaagccaaagctatctactacatggaaaatatctggaaaactaaaaagagaagggcgcagttacattgtaattactaacaacgcaggaattattcgtattgttcctgcatcttcgtttagttatcacggaattcaaaccactggcattgttgatgatgaattaataactttctattcaggtggcgaaaaatga

SEQ ID NO: 404715 - DNA, 1191 bp, Salmonella enterica
atgagaatattatattgcttttttattatgctgattagctttaactcgattgcggatacagaacttgaaataaaaaaactttcattaccggaggcgatttctttaatttatacggaggtatttaaggttccttatatggtttctccagaactggcaaatgatagccgctttgtttcttttaaaataactaaggatgttgacgaaagagagtttattgaacgttattttgggaatatgaatattaaaatttacaccaaaaaaggaatagattatataacaacagtcattcccaaagaaaagccacctgttatgcgtgtttttgtatatgaaccacagaatagaacagtaggttatctttccgatattctttctggttacgtctctggtcgatttggtaactcagggattattaccacggatatcacgaataaatcatcatccggggcatcgaataaccttagtcgtagcggtgactcactggtttactacggctcagagcaagatattgaaatgattaaaaaaatacttccaagtattgactcaacacctgatgaggtggtcgtgtcaggctatgtttttgaagtacaaacggggcagtatgatgggtctggattcttacttgcagcgaaggtcatttcagaaaagtttaatatttcacttggttcaaatgtaagtgcaacgaacgacttcattaacattagaacagggtcaatagatgccatatattcgctattaaaaactgacaacagattttctgttgtttcatctccaagattgagagtaaaaaacaacactgaggcttcattctctgttggtgctgaggttcctgttctgggtagtgttactgttaacggagataatgcaacacagtctgttgaataccgtaactccggagtactgttcaaagtgcagccttcgataaaagtgaaatcgatagatttgaatattcagcagcagttgtccaattttgtcgcaacagatactggagtaaataattcgccaacacttcttaagcgtgatgtttcaaccaacgtggtgatgagcgatggtgacattattttgattggtggtcttgctgaacagaaagactctaaatcgtcgtctggctggtctgtttttggttcacgtgctaaggaaaatacgaagacggatatcgtggttatgttgcaggttcgtaaggttccacgataa

SEQ ID NO: 404716 - DNA, 279 bp, Salmonella enterica; identical to SEQ ID NO: 404706

SEQ ID NO: 404717 - DNA, 309 bp, Salmonella enterica
atggcacaattcaaaagaacaacgatggcgattactgcagaacgcaaaatcaaaatggaacgactagctattgacgccagtcaagaagccggttcatcgatagcttggacagatattgttaattatctaattgataattatgcaaaagatgctgcaaaagatgtaatcagcaacataaaaagaaaggcattggaagcggagaatcatactcgtttctatgagtcgcacgaagacgccgaaaaaaaacgccacgatagagtaaacaaggcgttagaagacaatgaaaaaaatggaatgtacaaaaaataa

SEQ ID NO: 404718 - DNA, 1116 bp, Salmonella enterica; identical to SEQ ID NO: 404708

SEQ ID NO: 404719 - DNA, 276 bp, Salmonella enterica; identical to SEQ ID NO: 404709

SEQ ID NO: 404720 - DNA, 213 bp, Salmonella enterica; identical to SEQ ID NO: 404710

SEQ ID NO: 404721 - DNA, 219 bp, Salmonella enterica; identical to SEQ ID NO: 404711

SEQ ID NO: 404722 - DNA, 1458 bp, Salmonella enterica; identical to SEQ ID NO: 404712

SEQ ID NO: 404723 - DNA, 288 bp, Salmonella enterica; identical to SEQ ID NO: 404713

SEQ ID NO: 404724 - DNA, 1056 bp, Salmonella enterica; identical to SEQ ID NO: 404714

SEQ ID NO: 404725 - DNA, 1191 bp, Salmonella enterica; identical to SEQ ID NO: 404715

SEQ ID NO: 404726 - DNA, 855 bp, Salmonella enterica
atgaccaacgacatcacaatcacttctcaaccaggcgctaccgtcggcaccgcggcggcaatattcagtccggaaggcatgaatcaactggtgcgctttgcagagttgatggcgcagagcaaggccacagttccgcaacacctttctggcaaacctgctgactgcctagcggtaaccatgcaggcagcgcagtggggaatgaacccgttcgctgtggcacaaaagacgcacatcgttaacggaactcttggttatgaggctcaacttgttaatgccgtagttcaaagatctggagctatcaaaggtaggttccattacgaatacaaaggtgaaggatcttctcttgagtgtcgtgtaggggctgtaattcgtggagaacaggaaataacctggaacgaatggctgtgtatttccagtgttacaaccaaaaattcacctctgtggaaaacgaatccgaaacaacagttcggataccttcaggttaaaaactgggcaagggctcacactccaggggcgattttgggcgtctacacccctgatgaactgcaggagacaccggtgcgagttgagcgcgacatcacgccacctgcggcaacggctcagggcatgaacagcctgatcaactcaaaacctgagcagaagcaggaagatcgtcagcagcataaagacgatcgcggtcctgaagagattctgcacgcattttctggcgcggcgatgaactacaacacccaggcagacctggacaaagcgtacaaatatgttgctcagaaactggcaggtgatgatgacctgctggcaaaagcaactgacgtttacaccatccgctgcgacgaactgaacaaagtaccgatgtaa

SEQ ID NO: 404727 - DNA, 243 bp, Salmonella enterica
atgagcaaacaaacaggtgggcaggcattcccaaggcagcaatgggaatacgacgggcagaatagcgttctgcaatatcaggaagaaggaatgacactgcgtgactacttcgcggctaaggccatgcaggcaatgattagcaatccacagatgatcgataacgattctgattctgccgttaattatgcagcaagcgccgcatataagttttctgacgcaatgttgaaggcgcgggaggagtga

SEQ ID NO: 404728 - DNA, 1002 bp, Salmonella enterica
atgtcacacctgacgacctcagaggatttacacagtgccatttcttcgccggaattggcgtctggtcacatgctctgcgtttggccgggtggcctgataacaaaccgatatggacaggaagttgcccatgccagcctttctccgcgactggcaaaggctctgggtttgatgacgacaggcatttgtggcctgcgtttggttggcttatcaagcagtgcagacctgagcgcgtctttggcgaacaggttgcaggaggtcgtgcggatccatggttcgaccttgtacaaaatgacgtggaaagaatggggtacaccttcgggattacgccgttcccggctgcgggtatcggggcgcctaacgagcgagagcgggcctactgggtggccgacgccaacctgcaatacgaatccgcaaccagaaacgagacgcggcctacaaaatctggccggagcggtgaaattatccggttgtcagactcccatcgcgaacgatgcaacgggatcaacccattgctacagcggaaagaatcaggacgggtcaccgaaaatatgcatgaagcttccaggctcagtgattctggcagcatggcctacgccagtagtgggagatgcgacgggtggaccgagacctgcagacaaaaagcgcggtccggcaccggggttgcaatcagcgagtgcgttggtgggctggcccacgccgacaacgagcaacactcgatcgccatcagtggaagcggccatgaatatgtatcgacaggacggcagcaagacccagcagcgtttgcaggacttcgcggggattaccgggcccttgaggttaacggtttttggcgagatgcggactggctcttatgtcgagatggcaaatggcgtccagttgaacccggcacattcccgctggttgatggggctgccgcgcgcctgggacgagtcgagcccggggtggcaagagtggcaagcagcaaccgagtcggcagacttaagggttacggtaacgccataa

SEQ ID NO: 404729 - DNA, 258 bp, Salmonella enterica
atgagcatcgcaacaatgatgaataccggtttagctcttattgggtgggtatacatcatgtttaaagccggtgaatggtttgtcagtatcgcctttaagcaatgggtatccagaaagaagcaggaaaagagacagaaggctgttaatgagctgtatgacgcattcaacctttctgagattgagcctggtgggtctgttcgactggaaacaaaaggcgacctgacaatactgatgtttcgcaaggagacagcccaatga

SEQ ID NO: 404730 - DNA, 183 bp, Salmonella enterica
atgagcatggcagattttagcgcaacaaaacgaaactcatcgcttcaggattggggtgaagccctcgaatgcctggctgaactgaacggtaaagatttcgatatcactgaaatggaaattgaagccgcatacgaggcgcaaaagcgcgttgatgagttcttttatgaagaatggggtgattga

SEQ ID NO: 404731 - DNA, 216 bp, Salmonella enterica
atgaagaatggggtgattgatatgaccgtgttaagaatcaaatgggcaggattttgccctaaatgcgacagtgacgaactggacgtgcacaccgataaaggtacttcacaatttctctacgctggcgatggcgtagtttgctcagaatgtggcaagaaaggcgaaattgattgcgatgatgaccacgctttcgctgtttgggattgggaggactaa

SEQ ID NO: 404732 - DNA, 579 bp, Salmonella enterica
atgtgcggacctgttgcagttggtgtaggaatgcttgccatgtcagcaatgcaggcctatagccagaaccagcaagctaagtatcaatctgccgttgctgatcagaatgcggatattgctcagcagcaggcgcaagactctataaacagggggaatgcgcaggccgctgaagttcgccgacgtaaccgccaggcagcaggcacccaggctgctacgatgggtgccactggcgctgatctctcaaccggcaatgctctggatatcttcggtgatacggcacaatttggagagcttgatgctcttactaccattaataatgcccaacgtgaagcctacggatttcaagttcaaggaatgaatgctcaggccgagtcgagagcggcacgcgcgaatgggcgtaatgctgtaggtatgacacttttgaccgccccgctaaaagcctatggcgcttatcagatggccggtggcacctggaatccattcaaaacatcagttgcatctggcggaggtactaccccgatgttatccaacaagggttttattaatagcagctcacagttcaaattagggggctactga

SEQ ID NO: 404733 - DNA, 444 bp, Salmonella enterica
atgattaagccgttgaacgttatcacagccactattttggctatattaccaataatttcatttgcaaaagatatccaatacgacattccacttgatagtgaaatggcaaaatcactaaagccatctcttgccggtgctcctgacaacgtatcaagaagcttaagagtaaagtacatatcagcatctgatgatgatataaccgtcctagtaagagttggggctatcgatacaacaaaactagcaaatgaatcaaatttgccaagtcaatctcaaaatgcgttaacaaaaagcatgattgttaacaaatattgttcaccatttggtaatggcgatctgttcttcgatactctaagacaaaggaatgccacactgcattaccaatttgaagcagtaagcgacgtaacattcctctcgttcaatgttagtaaatctgattgtgattaa

SEQ ID NO: 404734 - DNA, 450 bp, Salmonella enterica
atgttaaaaaatatgataaacagattaattggcagtaaggaagttagcaatcaaatccaaccgcttatctttaaggataatatttcagcttttgagtatgcttgtcagtatcttgataccagtctttcaccagacaaaccgatgcctgccattatcattcctggccctagcggtgaacagcctgttttgttggattccggtagacaaagagcaatgctaaaggtgtgctcagatgatggtggttttttcgtaattgccgactcatctaatagtaaaggtccgaaattaaagattggtgattttgttgcttggttacctgtggattacgctgaagagataaaagataaatttgatgacccgcgttctgccatggttggctttgttttggggactcttgaaccagttttaacgccttcaggatggaaagggaaagaaagattcagcaaatag

SEQ ID NO: 404735 - DNA, 477 bp, Salmonella enterica
atgggaaataaaatagttcgctccgaattgattaaagaagcaattattgaagatcctttggtacgtcttcccatagatgagtttgaagagtacaaactcatctgtttggatgagggaaaaatacctgccccacctgaacctgaacagcatgagtacgtttcttacatagacacaatcggaagggataagtacttcaggaaaccaaccgaagcgagagctgaggaactttttcatgctcatgtgtggcaagagggttgttgctggggagagggtgacgatttattaattcaatgggcctgcacaagtaatagttacgttgtgtattcctattttgttgatattgatgatgatcatcatatctatataattgattattgtaaggataaagctcacgacctgattgaagacaagcaacaggtatccatatggactgagcaagctaaacagtatcgattacaacatattaagcccgcctag

SEQ ID NO: 404736 - DNA, 615 bp, Salmonella enterica
atgttagacggtgcgccctggttcgtagcatcagatgttatcaaggctctccaacttacaaacgccacaatgtccatgaaagctctcgatgatgatgaacgatctaagttgaacttaggtcgtcaggggactgcaaacatcatctctgaatccggtctctacacccttattctccgttgccgtgatgcggtaactcctggcactatcccctatcgtttccgcaaatgggtaactggcgaagttcttccgcaaattcgccgcaccggccgctacgttcgtgaagaattatccccggcagataaagcgcaaaaggttgtggccagcttcatgcccgccattctggaagcgatgaagacggaagagaaacaggaatacagcgcgccactcaagccgaactatcttgaacacatccattcacctgaaggtgttcttggcctgacagagcgatcaatgctgatggatctgctgcggaagatggacgccgacgggcataatgttgaaggcgctttttctgaggttacggcgatgatgaactacattgtcggtgccagtaaatgcctgcgcgatatccagactcacgcacagtacatcaacagcatggctggtaagttctga

SEQ ID NO: 404737 - DNA, 489 bp, Salmonella enterica
atgatcagagtattcatgaaagcatactggaaacagttgcttatcgtggcgatgcttgctgctctggtgatcggcggcagggttgcctggaatgaacacggtgaccggctgtacgccgccggatatgcgaaagcgcaggcagatcagaaacaggctgatgataaggccaggtcacaacgtgatcaggagaaaacacaaattgaacgtgaagcacaatcccgtatcgatgtggcgcgtgctgatgctgagcatgctaattccgctgctgacggcctgcgctccgagcttgacaaaaccaagcgactcgccgaacactataccggatctttccccactggcacgccagccagcaaggtcatcggtgtgctcgccgacatgcttgaagaaagcaaccgatcttacatcgcagcagcagaagaggctgaacgatatcggtctgcaggactcacatgcgagcgacagtacgactccctgaaagcggggcactga

SEQ ID NO: 404738 - DNA, 213 bp, Salmonella enterica
atgtcatatatgccgggtgcggctacgccttacccggcctacacatcatctttatccataaactggcgcgtaggcctgataagcgaagcgccatcaggcactgtatatgctacacgcccctttctgttaataatcgaactgacggtagtaacgacgaatatccagactgtggccggtatatttctcaaagtgcgccgccagtcggtcaactaa

SEQ ID NO: 404739 - DNA, 1461 bp, Salmonella enterica
atgaaagataatgaaattttttatggcgaattttcaatacatgctgattgcgactccgtcggcaagctaacgctcgcaaaagaaaatacgaatatcgaactcacagtaaagtcaaaaaatataatacaagaaatcccaaatataattaccgggaagttagaccagctcaagaaagctacttgcgtagactgcatcatcactagctcaggcacatcaaataattcacttggtgatagcgccaattatttaactatatttccacatcatgtccttattggagatgatcatttagatccaaatgcttcccacataaaatcatttagttttcacacacaagatacgcgaagcttattccaagacaatcaagattttggcaaaatttatccacaggagaaaattgtagattttataaacaaagaatatcacgataaaatcaaattacatgagtatccaaatgtattctttcactcagggcgcttagatattataaattgtgaaacatctactggttgctttagagtttataataaaacaacgattcatggacttggcaccaatggtaaattccttacaaataccgtcagaattgagtatatttttcaatcacctacgacatttaacaattgcgtaagcagtctcttgagccatttaagacttttgacaattcttgcaggaagagagcaatccgttgtggacttccaagtacacgtagcatcaaacacctcaccaattgataaaacatattctgtacactcttcttatttgaattgccataatgaaaacgctaatagttattctcttaataattttccaattgagccatccagagatgtaagtacgttcatcgaaatttataaagcatggatgtcaaaagaatcagagctactaacatcgagaattagatataacaatggaataattaagcataactcttacgatgtagatcgattagtatcagctgcaaatatatttgatattcttccagataactacaaacccactaaaaagatgattagcgaagacctcaacgccgcgaagtctgaatgcaaaagaatattcaaatccttacctgagtcggttgaaaaatcgatcatgctcggggcacttggaaggcttggctcaccaacattaacggatatcatcctccaccgagcaaatataattttagagagatgcgggtggttattcccagagcttgacttagtggttaaaacggccgtaaaagtaaggaattacttcgtccacggaacagcaagctacccaccttataaaatcgaaagtacaattccatttctgactgatgttctggaattcattttcatttcttctgatttgatagagtgcggatggaatattgacgcatgggcaaacaattattatagcttaaatcaccctttcaacaaccttagacataaatataaaaatgagcttcaaaatttaaaactcgcaattcagaaatga

SEQ ID NO: 404740 - DNA, 183 bp, Salmonella enterica
atgtcctcggacgattacagatacaaaaaagcccgcgaaggcttatgccatgcgggctttccgtacttcaccggacgtatccggatcaatatttggtggagctggcgggagttgaaccagcgtccgaaatgttacaactatttgtttttattgaaatcatgctcgctaataaaatccgcgtag

SEQ ID NO: 404741 - DNA, 432 bp, Salmonella enterica; identical to SEQ ID NO: 204348

SEQ ID NO: 404742 - DNA, 2652 bp, Salmonella enterica; identical to SEQ ID NO: 204349

SEQ ID NO: 404743 - DNA, 1311 bp, Salmonella enterica; identical to SEQ ID NO: 246032

SEQ ID NO: 404744 - DNA, 831 bp, Salmonella enterica; identical to SEQ ID NO: 204351

SEQ ID NO: 404745 - DNA, 1335 bp, Salmonella enterica; identical to SEQ ID NO: 246034

SEQ ID NO: 404746 - DNA, 399 bp, Salmonella enterica; identical to SEQ ID NO: 204353

SEQ ID NO: 404747 - DNA, 276 bp, Salmonella enterica; identical to SEQ ID NO: 204354

SEQ ID NO: 404748 - DNA, 1977 bp, Salmonella enterica; identical to SEQ ID NO: 204355

SEQ ID NO: 404749 - DNA, 147 bp, Salmonella enterica; identical to SEQ ID NO: 147100

SEQ ID NO: 404750 - DNA, 267 bp, Salmonella enterica; identical to SEQ ID NO: 204357

SEQ ID NO: 404751 - DNA, 714 bp, Salmonella enterica; identical to SEQ ID NO: 204358

SEQ ID NO: 404752 - DNA, 201 bp, Salmonella enterica; identical to SEQ ID NO: 204359

SEQ ID NO: 404753 - DNA, 831 bp, Salmonella enterica
atgcgttatacccgaaccagcactgcaactgatgtcactgatacactcagacaataccaggctgacttgctgacaggtccttgctggatgtcggtatggccactgatagagcggctactgagtcgtgagaatgaaatgcagtcggtctggcagaatattgcccgtcaggcgctaacctggcagcaatgctattgtcttctggagcaaatcatactggcgggccgtttcagtagacctgatatcgtttcccgattgaaagaggattatcgccagcttgaagaactgaaccggactatcagtaaggaggccggtgaactggcacagaagatattggtccgagatgcgatcctgaaccggaacgcattcacacttgagagaaccacgcacatcgtggaactgatggagatggctgaagataatgatgggctttaccgttattatcttcatgaaacactcgatggcctgacctgtcgttatgacggaaaatactggccgggactccctggcgtcctgcaggttatagcaagggagcacccggaaattggatgtctatcagaaagcgatcgggccatcattaacgggcgcggcaaaatgctccccgattatctccgcgaattattcagtagcatcgagaacgtcaggcagggtccatggggtctgccgaaagaatttacgttgacggacagtagcctggctacgctggccactgtaacactggatcatactgaagtgttctccgctgatacggtaaaagtacgccggagtgaattcagcaaaagaggagagcggggagcatggccatttaagccactgaaggcagtcgatatgtag

SEQ ID NO: 404754 - DNA, 2688 bp, Salmonella enterica
atgacggtaggatcacgctggtttaaatttgattttcataaccataccccggcctcagatgactacaaagtcccagatctccagccccgggaatggctgctggcttacatgcggcaacaggtcgactgtgttgtcatcagtgaccataacagtggggcatggattgacgtgttgaaagcggaactggcgaacatgtcccgggacgccagttccggtgaactggcagacttccggccgctgactttgtttcccggtgtggagctcacggccaccggcaacgttcatatcctcgccgtgttgcacacccagagcaccagtgccgaggtggaacggctactggcacagtgcaacaacaactgtcctatttcgcgtgaaacccccaaccatcatcttgtgcttcagctgggacccgcgggcattatcagtaatatccgtcgtaacccggaagctatttgtatcctcgcacacattgatgcggcgaaaggcgttctgacaagccttactaatcagggggaactgacggccgcttttcagtcaaatcctcatgcagtggagatcagacaccgggaggaggagattacgaacgggactcaccggcgtttaattgcggatttgccatggcttcggggatcagatgcgcaccaccctgaacaagcgggagtgcgcacctgctggctgaagatgtccgagcctgattttgacggtctcaggcacgcattactcgatccggaaaactgcgtgctgtttgatgataatccaccggaggcaccagcttcacatttgcgcagcctgacattcaggacccgtctttgccagccggcagatcagtatggagcctccgttgagtttagcccgttttacaatgcggtgattggctcccggggcagtggtaaatccacgcttatcgaaagtattcgtctggccatgcgaaaaaccgaagggctgactgtgtctcaacgcaacaagttgaaccagtttagtcagatggggatgggcatggatgcggattctttcatcgaatgtgtgttccgcaaagaaggcacagattttaggctcagctggcgacccgatggtcgtaatgaattgcatattttcagcgaaggtcagtgggtgcaggacaatcactggtcaccagatcgttttcccctctcaatatacagccagaaaatgctctacgaactggcgtcagacacaggggcattcctgcgcgtctgtgacgagagtcaggtagtcaacaaacgcgcctggaaagagcgctgggatcaactggaaagggaatacctgaatgagcaaataacgctgcgtggtcacctggccagccagacgatcgcagataaactgcagggggagttgtctgatgctgaacgggccgtcagtcagttgcggtcgagcgcttactatccggtttgcacccgcctggccacggctcgggctgaactgtctgcagcaacgcttcctctggagcatcatgaacagcatgtcgctggtctgagggcgcaggagaaagagccagtacaagtcccggagctccaggtggagccgtctgcgacactgacagcatttatgaggcgtctttctgacgtacagcaaaagtatgaccagcgtcttgacacactgttgtcggactatgccgcggaactcagtaccattaggcaggacccccctcttctcgcactggaagaggcggtgcgtaaccaggaggaaactgtacaacgtgaggccatggtgctacgagaacagggactcaatccgaatgtcctcgatgagctgatgacgcgctgtgagtcgctgaagtcggaactgagaaattacgccgatcttgacgggacgatcgcggcctcagcagcgagatccacaggattactggctgaaatgcgtaaccaccggatggtattgacggaaaagcggaaggcgtttctgtcctctctgtctctcagcgcgctggatattaaaattctgccgctctgtgccccacacgaagacaccgtatctggttatcaggcggtaaccgggatcggcaactttgccgatcgtatctatgatgatggtgacgggagcgggctgcttcatagcttcatcagcttgcgcccgtacagtccgctaccgtcggcaacggaaaacaaatatcttgcgctggatacgcttaaagctctgcatcttgccatccatcgcgaggagccgggagcagggtcagagctccacggagctttcagaaatcgccttaaaggtctgaatgatgcgcaactggatgccctgcaatgctggtatccggatgatgggatccacattcggtaccagacgcccggaggagggatggaagatatttcctctgcctcaccgggacaaaaaggggcgagcatgttgcagttcctgctgtcatatggcaccgatcccctcctgctggatcaaccagaagacgacctggactgcctgatgctgagcatgagcgtgatccctgccatcatggcaaacaagaaacgccgacagctgattatcgtgtcgcattctgccccaatagtggtcaatggtgatgcggaatacgttatcagtatgcaacacgaccgctctggcctgcacccggggctttgtggagcgcttcaggagacgccggtgaaggaactgatttgccgacaaatggagggaggggaaaaagcatttcgttcccgctatgagcggatactcagctga

SEQ ID NO: 404755 - DNA, 1830 bp, Salmonella enterica
atgcgtatcgaccgacgtctgagcagggatgtactcaccgagcgtcagctttattttattgaatgctggtccaacttctgccataaaaacagcccggatactgaccgggtcggatacagcaatccactcagcaccatccgcgaactgctatttctttacgaaatggaagatcgtttcagtgccgataaaaaaagactccgggtggccactgaactgctcgagttactcgagaccgatcaagttctcaggagagaagcatttgaggacatccccgctcaactggtgactcttctggacagagatttgctggttgaccccactcgcagcccggtggaaaagcgtcctcgtcttatctgtagcctatgtgtacaactggcggatatcaccgaggccagttatatcactgaggctcttgagatgcttgaacaggaactgtttgcatggccccctctggatgaacaccatgcacgggatatttactcactgacaaacggagtgatgagtgtactcctcacccggggtatgacactgacggaatgttacctgctgtacatcaatattttcaggaatgtgagtactgaaccgaacgctttccgggccgcctttcactcgttccggcagaaactggtaacgcctactcgggacgtgactgttcggatgtttattaccagtgagaaactgcacaccctacttaacacgcaaggacccacactgcagttcaacggatgtgtgttcatgccacttgatgaagcccgacaacgcttctccctctcagtcgatataccggtttgctcaatgtctgacacatctgcccgtaacatggccggtcagatgcttcgtgaatccctggatgtcattgcctacatggtaggtaagggagatatcaccgtccagaaacagttcatgataatcagggatgaagacgaaacagaagtgccgcgcttcgataatgaaatcgaggcaaacgcggaccggttaacggacgaggagtttgcgcgctttatggtggcgatgaaccgactgttcacggatacaccggatgtgtcccgtaaaaaaatcagctccgcatttcggtttttccgtaacggcattgaaagccaagttcaggagagtcgtttcaccgcttactggtcggcgcttgaatcattaacgctaggagttgcccctggcacaccatcacatgaacagcatgtcatcggtgttgtggctccctgtatggtgctggactatgttgttaagcaactgttttctctaagaaaagttctgcgcttcattctgcgagagccagggcaccccttgcgcacaccggagatcgcttcacttccgctggggcaactctatgcccttcttaaagatgcggaccgggtccgtgaacttcagacagatttacagcactttccctatgtcatgtatcgggtgcgtaagcttgccgggatctgtgcgtcacccgagaaaatggcggataaactggggcaacatgccgagaaagtcacccgacatcttcaccgcctgtatctgctgagaaataccatcgtgcacaatgcaggtaccagcccgcacattgacctgctgacggtgaaccttgaacactatctgcgggcaacaatcagcgcgttgtttaatattgtggtgatccacccaaccgtcagcaccgctgaggaggcatttacccggtgccagtttaccagtgagtcagttttcagggaactgaacccccttcacgggatcacggaaaagaaagtatacacagccattgataatcagttgaaaaacgggacgctttcccgtagcgatgctcgtttgatagcatggctcaatgcccaccactga

SEQ ID NO: 404756 - DNA, 330 bp, Salmonella enterica
atgaaacaagacaatacacataacgctatactgtatgcacttcgaccgatgcctggaaaagcattcacctctgagctggacagaaaatttgccgcagcgacgatgtatattgatttgtctccgggtgaaaaaagcagaacggccgagatcagtggtgagataaattactatgatcacgagcgatacgtgaatgctcgcctggtaggagacagtatcaggacaataccgattgcaccaaagaccatcccgcttacactgaataaaccattctcaatcaatctgccacaaggtattcactattcagtcatgctgacggacagccagccttaa

SEQ ID NO: 404757 - DNA, 132 bp, Salmonella enterica; identical to SEQ ID NO: 133020

SEQ ID NO: 404758 - DNA, 936 bp, Salmonella enterica; identical to SEQ ID NO: 204362

SEQ ID NO: 404759 - DNA, 828 bp, Salmonella enterica; identical to SEQ ID NO: 204363

SEQ ID NO: 404760 - DNA, 285 bp, Salmonella enterica; identical to SEQ ID NO: 204364

SEQ ID NO: 404761 - DNA, 696 bp, Salmonella enterica; identical to SEQ ID NO: 204365

SEQ ID NO: 404762 - DNA, 624 bp, Salmonella enterica; identical to SEQ ID NO: 204366

SEQ ID NO: 404763 - DNA, 678 bp, Salmonella enterica; identical to SEQ ID NO: 204367

SEQ ID NO: 404764 - DNA, 765 bp, Salmonella enterica; identical to SEQ ID NO: 204368

SEQ ID NO: 404765 - DNA, 411 bp, Salmonella enterica; identical to SEQ ID NO: 146942

SEQ ID NO: 404766 - DNA, 1719 bp, Salmonella enterica
atggcagatttgaagaaaaaagaggtaagccgtagtcgaatggcggagtttcctgccggaacgccgcttcgttcaggggatgagtttccgactgaggatatcatctgtgaggcactagaaaacaaaagctttgaacgtctgaataactgcctggttatcgccagctcagatgaacatgatatgcgttttatcaatgaggagacgctgaatatttatttcagggatgatgtctggaccaatcgctatgtcagaacccatattggtgaaacgttaagaaccgttaatttttcaggcatacgggatcctgaactgcgtcttgaagccaaaatcatctcagccagcctgctctggattgtcggcaggaccgcgaagacgcagtcactgatccggaaatgtgcaaacattgtggcgggagcccgtattattgagtctatggggtatcgcagtctgtttcagcttcgttttccgcttgtccggaatgctttcattgtaaagatgaaggaggaggatgagcacggcaggaagcgttctgaaagaacattacgtaattactttatggacctggcggatatctcgctgacaggtcatacccgtcttcgaaaatacggttactttcctgatattagcttcgacagttacaacagtgtggatgattcaaaccagacatattgtatgcctttcagtcttatgatgtctgtctgggaagggctgattactgaactggatgctgaaatcagtgatttcgattttgacgggttttcccggctgtgcgctatcataaacggtttttatgattcgccttactatacgtcgatgctggaagcccgtaaaagagggacagcaaaaagcataccggattaccgggccgcgtattactacaatattgttgccggggaaattcgggcgcttttcgcgacacttggccccgggatgcagggctggttctcggtacataaaaataagcgctggagatctgattttattggcgttgatcacataaagctgaacacctggcattttgagctgacgttaaaagtcatgaatgtgatacaggccatgtcggggatgagacacagcgaagtgcttggcgtgatgcacggttcactgatttatgatggtgatatcctgggacttcgttcggtgttgcataagttcgccccggaaggtggaagtcacgaagactgggttgtttgtcgctatgtggaaaagccttttcagcatttacgcagaattaatcaaatcatgacaggcctggacgggaagacgctggacaatgttccattgtctttaaatatcaggtcgtggttctcggagcaaaaactctcttttatggggacgcagcgccagactgagtgggcaaagaaatttgtgaaaagacaccatctgttcatccgacgtgaccatattgatgagttcaggcttttaaatccaaacatacgtgatgatgaacgcgttgcgatggagattcgggagggggctttctggccattgcgaacccatcagtttcgccgttcacttgctgtacacctcaggcgtcttgatctgatttctactaatgatcttatccggcagtttaagcacttaatcagaggcatgacggagtggtatatgtccggtgcactcaacgcttcgcattttagccgggcgatccctcaggcattcgctgccgagattgaaagggttgataccgaactctcagcttccagggctgtttcttaa

SEQ ID NO: 404767 - DNA, 357 bp, Salmonella enterica
atgagcacgatttctacggatttaattgcacggatctacgcagcctccgaattgccgttgagcaacgacgagctttatcgcgaagtgcagcgtgaaactggcatgtcggatgccgaattgcacgaactgaaagaatttgggtcagataaaaccagaaccagcggcgtcaaacacaaagtacgctggtttcagcagactcttcggcaggccggagtcatcgaacgcgttccagaaaaacggggcgtctggagatactcctcggtgctaaaattaagtgaagatagagttgaaaataaatcacagctaatgacttcagtattattagacataacccggctccgctcatattcatgttaa

SEQ ID NO: 404768 - DNA, 477 bp, Salmonella enterica; identical to SEQ ID NO: 32316

SEQ ID NO: 404769 - DNA, 276 bp, Salmonella enterica; identical to SEQ ID NO: 376170

SEQ ID NO: 404770 - DNA, 1086 bp, Salmonella enterica
ttgccgacggtagcgccacataccggattaccgtcaaactgtaccgatattgcccctcctgatattccggccagtcatattgctgtatttgaccctgaaaccgaaacgtggagtctaaacgaagaccatcacggcgaaacagtgtacgacacgcaaaccagcaacccgatttatatttcaaaacccggcccgttaccggagaacaccaccacacaggcccccacatcaccaatagataaatttgaaaacggtcagtgggtggctgaccttgcgaccgcactcggtcagaaatacgctgagattaatgtgtggcctaatgcacaggaaaacggtaactatccgttcacactgaatgatcaccactgggactgcggtaaagcgtcgcaggaccgactgtcgccagtaacggcggtggcaaaacagggaacgctaccaccaggattcttctggacggatgcagataacatcgatgtgccaatgagcgcagacgaactgattaaactcgaagccgctatgcaacgaaacatggtactggtgggttttaaaatccacgaacgccagcggcagatgaaggacgaagtgaacagtctcaccaacgcacgggctgtactgggttacgtgttggctggccggaaaaccgttaaggaatgtattatgagctgcttcacaaccccggccattcttgaaatgcctggccactacctttggcgtgtacatgaatcttttgaattttacctcagcgacgacaacagcgacgtaatcagcgtaccagccggatttgtaactgatctcgccaccgtgccatgcatcttctggtcagtcatgccgccagacggcaaatacgctaaagcggcaataatccacgactacctttacgacaatgcgctgcgcacgaaaaaagaagccaatttgatattcctggacggaatgccgtgcttggcgcgccgaagtggaaacggattgagatgtatctggcggtcaggtgatttggcaggggaatgtatgggaaagaacgtaaatactgtgaatgatttgccacagatgacgagattaaacggctggaagcatgggaactctacagcgtaa

SEQ ID NO: 404771 - DNA, 579 bp, Salmonella enterica
atgctgacgcatggctatgcggatgtcatcatgggaattctggaaattaagaatgagatgatcgaaagttatcttattgataatttatctgattttgtttgtgtttgtggtgaaaaaagtccattggttgggcttgaaaaaatttctttatataatttttatgctgccagacatgctgtctatcattcagatatgttctcttctttcaccgctgatagcattgatttattcaagagcagtacgccttatgcggggcgcagggaaataggttattatagtgattcactatttggagttatcggtgttgttgaaaaaagcgatatggttgcgattttgccaggaaagattgctacttattttagagatgtgcggcgttataatataaaaatactacgtatgcctgatgaaatgatttttcgtacgttacccgtttatgcttatctggctacaaacagcacccattataaaaatgtcaaaaaactgatatcaacatttcagtcgacctttctttttagccaggaaaagcagcctgacgctttggttgaaggaagcacatccttatgcgatttgtcggcttaa

SEQ ID NO: 404772 - DNA, 171 bp, Salmonella enterica; identical to SEQ ID NO: 377295

SEQ ID NO: 404773 - DNA, 339 bp, Salmonella enterica
  misc_feature (180)..(189): n is a, c, g, or t
atggcatatctcatggttaatccaaagagttcctggaaaatacgttttttaggtcacgttttacaaggccgggaagtatggctgaatgaaggtaacctgtcactgggggagaaaggatgcgatatttgtattccgcttactataaatgaaaaaattattctgagagaacaggcagataannnnnnnnnngatttaatccaaataagccgctaccatccagtggggttttgcaggttgcgggagtggctatcgcgtttggtaaacaggattgtgaacttgctgattatcaaatacccgtttccagatcagggtactggtggttggctggcgtattcttga

SEQ ID NO: 404774 - DNA, 963 bp, Salmonella enterica; identical to SEQ ID NO: 372422

SEQ ID NO: 404775 - DNA, 738 bp, Staphylococcus aureus
gtgattcagattcagacagcgactcagaatcagatagcgattcagaatcagacagcgactcagattcagatagcgattcagattcagatagcgattcagattcagatagcgattcggattcagacagtgattcagattcagacagcgactcagaatcagatagcgactcagaatcagatagtgagtcagattcagacagtgactcggactcagacagtgattcagactcagatagcgattcagactcagatagcgattcagactcagacagcgattcagattcagacagcgactcagattcagacagcgactcagactcagacagcgactcagattcagatagcgattcagactcagacagcgactcagactcagacagcgactcagactcagatagcgactcagattcagatagcgattcagactcagacagcgactcagattcagatagcgattcggactcagacagcgattcagattcagacagcgactcagactcggatagcgattcagattcagatagcgattcggattcagacagtgattcagattcagacagcgactcagactcggatagcgactcagactcagacagcgattcagactcagatagcgactcagactcggatagcgactcggattcagatagcgactcagactcagatagtgactccgattcaagagttacaccaccaaataatgaacagaaagcaccatcaaatcctaaaggtgaagtaa

SEQ ID NO: 404776 - DNA, 762 bp, Staphylococcus aureus
atggcttatatttcattaaactatcattcaccaacaattggtatgcatcaaaatttgacagtcattttaccggaagatcaaagcttctttaatagcgatacaactgttaaaccattaaaaactttaatgttgttacatggattatcaagtgatgaaacgacatatatgagatatacaagcatagaaaggtatgcgaatgaacacaaattagctgtgattatgcccaatgtggatcatagcgcatatgctaacatggcatatggtcatagctattatgattatattttggaagtgtatgattatgttcatcaaatatttccactttccaaaaagcgtgatgacaattttatagcaggtcactctatgggaggatatggcacaattaaatttgcattaacacaaggggataaatttgccaaagctgtaccattatctgctgtgtttgaagcgcaaaatttaatggatctagagtggaatgatttttcaaaagaggccataattggcaatctttcaagtgttaaaggaactgaacatgatccgtattacttgctagacaaagctgtagctgaagataaacaaattccaaaattgctcattatgtgtggtaaacaagactttttatatcaagacaacttagattttatcgattatttatcacgcataaatgttccttatcaatttgaagatggaccaggagatcatgattatgcatattgggatcaagcgattaagcgtgctataacatggatggtgaatgattaa

SEQ ID NO: 404777 - DNA, 456 bp, Staphylococcus aureus
atgtcgaccaataaaaacgattatgagcatatgttgttttattttgcatataaaacctttattactaccgctgatgaaattatagagaagtatggtatgagtcgtcagcatcatcgttttttgttttttatcaataaattacctggtattactattaaatcattactagaaatattagaaatttctaaacaaggatcacatgcaacacttcaaaaattaaaagagcaaggtctcattattgaaaaagttttagagactgatcgacgtgtcaaaaaattatattcgacggataaaggcgatcaactcattgctgaattgaacaaggcgcaagatgaattattgcaaaatatatatcaacaagtcggttcggattggtatgatgtgatggaagcattggctaaagggcgacctggctttgattttattaagcatttgaaagatgaaaaagaaagctag

SEQ ID NO: 404778 - DNA, 1425 bp, Staphylococcus aureus
atgttatcagttaaaaaagccacaaaatttgcagttgctaaccttattatcgtgtcaacggtttttagttctgtcacacctgcaattgcgcaatccgataaaagttctaaagatgaaagtttcgcggttggtaatactaaaaatccaaaaaatgttatctttttagttggcgatggcatgggtccatcatttaacacagcttatcgttattataaaaatgatccgcatgctaaagaaatgacccctactgcttttgattcatatttaaaaggcacaaatcgtacatattcaaatgacccaaaacagaatattactgattctgcagctggcggaacagcctttagttctggtcataagacatataatggtgccatcggtgttgacagtaacaagcagaaagtaaagacggtgcttgaacgtgcaaaagaaaaaggtaagtcgactggtcttgtttcaacagctgaattaacagatgcaacaccagcagcatatgctgcacacgtgacttctagagatgataaaaacgaaatcgctaaacaattttataaagataaaatcaacggaaagcataaagttgatgttttattaggcggcggcgctaaatatttcggtaaaagtaatggcaatttagataaaaaattcaaaaaagatggttacgaccttgccacgaacagtaaggagttatcaaaatctgataaagataaagttcttggtttgtttgcagataaaaatatgccacttgcaatagatgcttctaaagacgaaccatcattagctgatatgcaacaaagtgcacttagtaagcttgagcgcaataaaaaaggattctttttaatggtcgaaggtgcttctatagataaatcagcgcattccaacgatattacaggcgttatgtctgaaatggaaggttttgaaaaagcattcgatgacgccattcaatatgctaagaaacataaagatacacttgtcgttgcaacagcagatcactctactggtggtctaacaattggtaaagataaaggatacgaatggaatcctcaaccgattaaatctatgaaacactctggatcatatatgacagaaaaaatggctaaaggtgaagaccctgaaaaagttattaatgaaggttatggatttgaattttcacaagatgatatgaaaaaggttaaaaaagagaataaaaagctaaaaagactacttaaaaaagaaaaagacgaaaaatccgcagaagtagaaacgcaaacaaaagccctacaacacgctattcagaagccagtaaatgataaatcttatacagggtggacttccgatggacatacaggcgaggatgttaatacctacgcttacggacctagatcagaatcatttagtggtaatatcgaaaatacagaaagcgcaaaaataatatttgatatattcaagtaa

SEQ ID NO: 404779 - DNA, 201 bp, Staphylococcus aureus
atgatactagtaatgttatctccattattaatcatattctttatagtgttgtctattttagaagagcgtaaacgtacgaagaaaaagcaactcgagaaagaaaaagcaaatacactaaatcaaaatacaaatgacacggaaagttcaaatcaagagccgtcattgcagcaggataaagaacaaaaagataacaaaggataa

SEQ ID NO: 404780 - DNA, 666 bp, Staphylococcus aureus
atgaaaatattaattgttgaagatgattttgttatagcagagagtttagcatctgaacttaaaaaatggaattacggtgttattgtcgttgaacaatttgatgatatactgtctatctttaaccaaaatcaacctcagcttgtattgctagatattaatttgccaacgttaaatggttttcattggtgtcaagaaatccgaaaaacatctaatgtgccaattatatttattagttcccgtattgataatatggaccaaattatggcaatacaaatggggggagatgattttatcgaaaagccatttaacttgtcattaacgattgccaaaattcaagcattattgagacgaacttatgacttgtcagtagctaatgattcattgacggttaaaggttgtacattaatattagatgaagcaaaagtcgtgtatcaagaacaaaacatacagctatctttgactgaattacaaatattaaagttattatttcaaaatgaagataaatatgtaagtagaactgctttaattgaaaaatgttgggaatcagaaaacttcatagatgataacacattagctgttaacatgacgcgcctgcgtaaaaaattaaatactattggcgttaatgattttatcattacaaagaaaaatgtcggatataaagtatag

SEQ ID NO: 404781 - DNA, 888 bp, Staphylococcus aureus
atgacctttcttaaaagtattactcaggaaatagcaatagtcatagttatttttgctttgtttggcttaatgttttacctgtatcatttgccattagaagcatatttactagcacttggcgttattttattattattactcatattcataggtattaaatatttaagttttgtaaaaactataagccaacaacaacaaattgaaaacttagaaaatgcgttgtatcagcttaaaaatgaacaaattgaatataaaaatgatgtagagagctactttttaacatgggtacatcaaatgaaaacacccattactgcagcacaactgttacttgaaagagatgagcctaatgttgttaatcgtgttcgtcaagaggttattcaaattgataactatacaagtttagcacttagttatttaaagttattaaatgaaacttctgatatttctgtcactaaaatttcgattaataatatcattcgcccaattattatgaaatattcaatacagtttattgatcaaaaaacaaaaatccattatgaaccttgtcatcacgaagtattaactgacgttagatggacctctttaatgatagaacaattaataaataatgcacttaagtatgcgagaggtaaagatatatggattgaatttgatgagcaatccaatcaattacacgtaaaagataatggtatcggtattagtgaagcggacttgcctaaaatatttgataagggctattcaggttataatggccagcgccaaagtaactcaagtgggattggtttatttatcgtaaaacaaatttcaacacacacaaaccatcctgtttcagtcgtatctaaacaaaatgagggtacaacatttacgattcaatttccagatgaataa

SEQ ID NO: 404782 - DNA, 756 bp, Staphylococcus aureus
atgttgctagaagtgaaacatgtaaaaaaggtttatggtaaaggtttgaatgctacgacagcacttaatcaaatgaatttatcagttggagctggtgaatttgttgcaattatgggtgagtctgggtcagggaagtctacactactaaatttaattgcttcttttgatggactaactgaaggtgacattattgtggatggcgcacatttaaataatatgaaaaataaaagtaaagcattgtatcgtcaacaaatggtaggttttgtttttcaagattttaatcttttaccaacaatgacgaataaagaaaatataatgatgccattaattttagctggtgctaaacgaaaagatatagaacaaagggtacatcagttggcagtacaattacatttagagggattcttaaacaagtatccttctgaaatctctgggggtcagaagcaacgcattgccattgcacgtgcattagttactaagccgacgattttactagccgatgaacctacaggtgcacttgattcaaaaacatcaaaggcattgatgatgttatttcaagagattcatcaattggaacagacaattttaatggtaactcattcaaatatcgatgcgtcttatgcagagcgagtcatttttattaaagatgggcgtctatatcatgaaatatatcgtggtgaagaaagtcaattagcttttcaacaacgaataacagatagcttagcacttgtgaatggaggaagtgtcaatatatga

SEQ ID NO: 404783 - DNA, 2001 bp, Staphylococcus aureus
atgaagttaagattgttatggcacatagtgcgacgtcaatttattacgcagcgacttgtaatcattccattcattttagcggtaagtgtactattcatgattgaatatacgcttgtgtcaattgggttaaatagctacataaaacagaagaatgacttcctagtaccatttattatcatagctaatttttttatggcgcttttaacttttatttttattttctatgcaaatcactttatgatgtcacaaagacgaaaagagtttagcatttttatgacattgggcatgaccaagaaaagtatgcgtttaattgtagtgatggaaactatcttacaatttgtgataatttcagtcgttagtattgccggcggatacttacttggtgcgatatttttcttgtttatacagaaaataatgggcagtgaagttgcgacgttaaggtattatccatttgactctgtagcgatgtttattactttgattatcattgctgtattaatgggcatgctacttatattcaacttgtttagtattaattttcaacggccgataacttatcaacatcgttccgattctagtgtcatatcacgatggttgcgttacgttttaattgttataggaagcgcagcactatatttaggttactttattgcattacaacaagatacgacgtttggtgccttttttaaaatatggattgtcataggattagttattatcggtacttatgcattttttgtaggtataagtgaaataattattagtatattgcagcaggtatcaaaagtttactatcatccacggtatttttttgtggtagttgggatgcgtgtacgtcttaaaatgaatgcagtcagtcttgcaacaatcactttgctgtgtacatttttgattgtaacgctcacaatgacattaacaacctatcgtgatatgaatcataccattacgaaattgattacgaatgattatgatttgtcatttagcgacaattctaagtcacaaatagaacgtcaacaaacaattgagaatattaaacgtgatatacagggttcggttaatgcaaaagacttcaaagtatatgaaacgacattatttagagcttctttagaaaagaatcgtgcttattacaagttaaaacaggctagtgatgatattccaatagacttcattggtaatgaaggcgcgatattttcaagacaatcagtaatgattacagcttttactgcacaagattataatcgatatcaccaaaacaaattacacttagacaatcaaagtataggtatgattacgaatgtacctatttttaaaaagcagtctaaggtcggtcttaataatgaagtctttaaagtgaaacaacttgacgcacatgcgttaaatttgatgatgattcaagatagtatggttttaattgttaaagataacaatcaattacaaaaagtaaaaggattttatgcacatgaacaaaagaattcgacaatatcgataaactttaatgtatttggaaagacgaaattaacaacatcacaaatacaaaagctatcgaaaaaatacgatgcgtcaataaattctaaatcagaaatgctaatggtttgggatcgtttgacaggtggactaatatttgtaggtggcgtagtatcaattgtacttgtcattggaatatttctaatgatgtattataaacaagtctcagaagcctatgcaaatcagcacaattatgacattatgaaaaaacttggtttagataatggaagaatagcaaagataacacgaaatcaaatgactttcttgttcgcaataccaataacagtagcactgattcacacattaatttctagtaacattgtatatacgttactaaatatgataggtattaataaccatcatatatttttaacaagttacgtactagctgtcattataatttcgtttctatatatggcgatgtacaaaataacttcctatatttatgctaaagttattcatcaacaacgcaattaa

SEQ ID NO: 404784 - DNA, 498 bp, Staphylococcus aureus
atgaataatagaaatgtgtatgatatcgaagtaagtgattataaaggcttaacttataaattagaagcatttagaggtaaagtgattttagttgttaatactgcaacagaatgtatatatagcgaacaattgaaaaaactagagactttatttcaaaaatataaggatcgtgggtttgtagtgttgagttttccgaataataattttgacaatcgacaaccaggttctaatgaagaaatcttgaaaattagtcgtgagaaatttggtgtaacatttccagtgttagctaaaatatctgtgaacgggaacgatgaacatccgttatttacgcatttaaagaatgaacaaccaggaatctttgggtccccaataaaatggaatttcacaaaatttataatcgatcgacaaggaaatgttgtaaatcgattcttgccaatggaagatccattggatatatcgacaaatatagaaatattattgcaagaatcttcatcttaa

SEQ ID NO: 404785 - DNA, 1881 bp, Staphylococcus aureus
ttgaaattaaatacatctaatagtccatttacagaaaaacaagtcacagagattaacaatctgctgcaaacattaacagagagccaacaacagtggcttagtggttttttactagctaatagtaacgatacgacaagtgatagtaatcaacaacaattagagacagaagtgtggcaacaatcacaaatatcagaagaacaagcaacttcaacaacgtatatgttacaaaataaagagccacatatcgaagctaatcagcggcatgttacagtgctatatggttctgaatcaggtaatgccatgcgtttagctgaaattttttcagaacgtttaagtgatatcggacatcaagttgttttgatgtcaatggatgaatatgatacgacaaacatcgcgcagttagaagatttatttattattacgtctactcatggtgaaggagaaccgcctgataatgcatgggatttctttgaatttttagaagacgataacgcacctaatttaaatcatgtgagatattcagtactagctttaggtgatcaaacatatgaatttttctgtcaagccggtaaagatgtagatgttttactagaaaatctaggcgctgagcgtatatgtaagcgtgtagattgtgatattgattatgaagaagacgcagaaaagtggatggcagacatcattaatattattgataccacatcagaaggtattcaaagtgaatcggtgataagtgaatcaattaagtctgccaaagaaaagaaatattctaaatcaaatccataccaagcagaagtattagcgaatatcaatttaaatggtaccgattcaaataaagaaacacgacatatagaatttttacttgatgattttagtgaatcatatgaaccaggagattgtatagtagcattaccgcaaaacgaccctgaattggttgaaaaactaatattcatgttaggttgggatccgcaatctccggtgccaattaatgatcatggtgatacagttcctattgttgaagcactaacatcacattttgaatttactaaattaacattgccattattgaaaaatgcagatatctattttgacaatgaagaattatctgaacgtattcaagatgagtcatgggcgcgtgaatatgttataaatcgggactttatagatttaataacagattttccaactatagaattacaacctgagaatatgtatcaaatccttagaaaattaccaccaagagagtattcgatttctagtagttttatggcaacgccagatgaagtgcatattaccgttggtacggttcgttatcaagcacatggacgtgagagaaaaggtgtatgctcggttcattttgctgagcgaattaaaccaggcgatatagtaccaatttatttgaagaaaaatccgaacttcaaatttccgatgaagcaagatataccggttattatgattggaccaggtactggaattgctccttttagagcatatttacaagaacgtgaagaacttggtatgactggaaaaacatggttgttctttggtgatcaacaccgtagttctgactttttatatgaagaagaaatagaagaatggcttgaaaatggaaacttaacacgcgtagatttagcattttcaagagaccaagaacacaaagaatatgtacagcatcgtataatggaagaaagtaaacgtttcaatgaatggattgagcaaggcgcagcaatctatatttgtggcgatgaaaaatgtatggcgaaagatgtccatcaagccattaaagatgtattggtaaaagaacgtcatatttctcaagaagaagcagagttattattgcgacaaatgaaacaacaacaacgctatcaacgtgatgtttattag

SEQ ID NO: 404786 - DNA, 606 bp, Staphylococcus aureus
atgaatatgccattaatgatagatttaacaaataaaaatgtcgtcatagttggtggaggcgtcgttgcaagtcgtcgggcacaaacattaaatcaatacgttgaacatatgacggtcatcagtccgacaatcactgaaaaacttcaaaatatggtagataacggtgtcgtcatatggaaagaaaaagaatttgaaccaagcgatattgtagacgcgtatctagttattgcagcaaccaatgagccacgtgtcaatgaagcggtaaaaaaagccttacctgagcatgccctttttaataatgttggagatgcatcaaatggcaatgttgtatttccaagtgcactacaccgcgacaagctaactatcagtgtatcaactgatggtgcgagtcctaagttgacaaaatcaattatggcagagcttgaggcgttatatccaccatcatacagttcgtatatcgactttttatatacttgccgacagaaaataaaagtacttgatataacatataacgaaaagcaacagttactgtcacaaattgtgtcacaagaatatttaaatcatgacaaacaagctcaatttttagcgtggttggatgtaagataa

SEQ ID NO: 404787 - DNA, 1371 bp, Staphylococcus aureus
atgaatagtgataatatgtggttaacagtaatggggctcattattattatttcaattgtaggtttactcattgccaaaaagataaatccagttgtaggtatgacaatcataccttgcttaggggcaatgattttaggatatagtgtgacagatttggttggattttttgctaaagggttagatcaagtcatcaacgttgttattatgtttatctttgccattattttctttggcatcatgaacgatagtggtttattcaagccgcttgtcaaacgcttaatattaatgacacgaggcaatgtcgtcattgtctgtgcaatgacagctttaattggcacaatagcccaattagatggggccggtgcggtaacatttttgctttctattcctgcattattacctttatataaagcgttaaatatgaataaatatttattgattttactattagcattaagcgcggcgattatgaacatggtaccttggggaggtccaatggctcgtgtagctgcagtgttaaaagccaaaagtgtcaatgaattatggtatggattaatacctattcaaataataggtttcattcttgttatgttgtttgcggtatatcttggatttaaagaacagaaacgtatcaaaaaagcaatagagagaaatgaattaccgcaaacacaagatatagatgtacataaattagttgaagtatatgaacgagatcaagatgtaaggtttcctgtaaaaggacgtgcaagaacaaaatcatggataaaatgggtgaatacagctttaactttagctgttattctatcgatgttaataaatattgcgccacctgaatttgcattcatgataggtgtttcgttggcacttgttattaattttaaatcagtggatgaacaaatggaacgattaagagcgcatgcgccgaatgcattaatgatggctgcagtgattattgcagcaggtatgtttttaggtgtactaaatgaaaccggtatgcttaaagcgattgcgaccaatttaatcaaagtgattcctgcagaagtaggaccatacttgcatattattgtaggtttacttggcgtaccattagatttactaactagcacagacgcttattattttgctgtgttaccgattgtcgaacaaacagcagggcaatttggtgtaccgtctgtatcaacagcttattcaatggtcatagggaatattataggtacatttgtcagcccattttcaccagccttatggttggcaattggtttagcagaggcaaacatgggcacgtatattaagtatgcattcttttggatttggggattcgctatcgttatgttagtaattgcaatgttgatgggcattgtgacgatttaa

SEQ ID NO: 404788 - DNA, 1851 bp, Staphylococcus aureus
atgaatcaaatcgaagaagcattaacgggtttgatttctaaagatcctgctattgttaacgaaaatgctaacaaagatagtgatacattttcaacaatgagagatttaacagcaggtatcgtttctaaatcttacgcattaaatcatttattaccaaagcacgttgcagatgcacatcaaagaggggacatacattttcacgacttagattatcatccattccaaccgttaactaactgttgtttaatagatgctaaaaatatgctacataatggatttgaaataggcaacgcgaatgtaacttcaccaaaatcaatacaaactgcatcagcgcagcttgtacaaattatagccaatgtttctagcagtcaatatggtggctgtacggttgaccgcgttgacgaattacttagtacatatgcacgacataatgaagaacaacataggaatatcgcaaagcaatttgtcaaagaatctgaaattgatcgttatgttgatcaacaagtcactaaagacatcaatgatgcgattgaaagtttagaatatgaaattaataccttatatacatctaatggacagacaccttttgtaacattaggattcggcttaggtacagatcatttaagtcgcaaaattcaacaagctatcttaaatactcgtatcaaaggcttaggaaaagaccgcacgacagcgattttcccgaaacttgtattttcaattaaaaaaggaaccaactttagtccgcaagatccgaactatgacattaaacaactagcattaaagtgttcaacgaaacgtatgtatccagatattttaaattatgacaaactcgtagaaatattaggtgatttcaaagcgccaatgggttgtcgttcatttttaccaagttggaaagatgcggaaggtcattttgaaaataatggtcgttgtaatcttggtgttgttacacttaatttacctagaatggcattagaatctgccggtaatatgacgaaattctgggaaatcttttatgaacgtatcgatgtgttacatgatgcattactttatcgtataaatcgtttgaaagatgctgtaccgaataacgcaccgattttatataaaagtggcgcatttaactataaattaaaagaaacagatgatgttgctgagttatttaaaaataaacgtgcaacgatttcaatgggctatatagggttgtatgaaacagctactgttttctatggtccagactgggaaacatctcaagaagcaaaagcatttacgcttgaaattcttaaagaaatgaaacgttatcaaacgaaatggacagaattatatgacatttggttcagtatttacagtacgccgagtgaatcgctaacggatcgtttttgtcgtttagaccaagagagatttggagatattaaagacattacagataaaggatattatcaaaactctttccattatgatgtacgtaaagatgttacaccttttgaaaagttagattttgaaaaagattatccttattatgcgagtggtggtttcattcactattgtgagtatccgaaattgcaacacaatttgaaagcactagaagcggtatgggactactcttatgacaaagttggttacttaggtacaaatattccgattgatcattgttatgaatgtgattacgatggagattttgaagcaactgaaaaaggatttaaatgcccgaactgtggcaatgataatcctaaaacagttgatgtcgttaaacgaacatgtggttacctaggcaatccagttcaacgtccagtaattaaaggccgtcataaagaaatttgcgcacgagtaaaacatatgaaagcgcctaaagaatga

SEQ ID NO: 404789 - DNA, 537 bp, Staphylococcus aureus
atgatacttttagacattaaacaaggacaaggttatattgctaaaatagaatcaaatagctttgttgacggtgaaggagtaagatgcagtgtttatgtatcaggatgtccatttaattgtgttggatgttataacaaagcctcacaaaagttcagatatggcgagaaatacactgatgaaatattagcagaaatattagatgattgcgatcatgattatatatctgggctaagtctattaggtggcgaaccattttgtaatttggatattacattaaatcttgtcaaagcatttcgagcacgttttggaaatacaaagacaatttgggtatggactggatttttatatgaatatttagcaaatgattgtacagaacgtcgagagttattatcatacattgacgttttagtagatggtctatttatacaacacttattcaaacctgatttaccatataaaggttctttaaatcaacgcattatagatgtacaacaatcactctcgcatgcgcgtatgattgaatatatagttagttga

SEQ ID NO: 404790 - DNA, 1623 bp, Staphylococcus aureus
ttgaaaaaagagaaagttatggactggacgacctttatagggacagtagctgtacttctttttgcagttatacctatgatggcttttccaaaagcaagtgaagatatcatcactggtattaatagtgccatttctgattcaattggttcgatatatttatttatggggctggcgattttttgctttgtaatgtatatcgcatttggtaaatatggtaatgtcacacttggtaaagcaagtgataaaccagaatttaatacatttacatgggcggcaatgctgttttgtgcaggcataggctctgatattttatactggggcgttattgaatgggctttttactatcaagttccaccaaatggcgcgaaaagtatgagtgatgaagcactccaatatgcgacgcaatatggtatgttccactgggggccaattgcttgggctatttatgttctaccagcattaccaattggttatttagtatttgttaaaaaacaaccggtgtataaaattagtcaagcttgtcgtccgattttaaaaggtcaaacagataaatttgtaggtaaagttgtagatatcttatttatctttggattgctaggtggtgcggcaacatcactagcgttaggtgtgccattaatttctgcaggcatagaaagattaactggtttagatggtaaaaatatgattttacgttcggccattttattaacaatcacggttatatttgccattagttcatatacaggattgaaaaaaggtattcaaaagttaagtgatatcaacgtttggctatcctttgtacttttagcctttatatttattattggaccgactgtttttattatggaaacgacagtgacagggttcggaaatatgttgagagatttctttcatatggcaacatggttagaaccattcggtggtattaaaggtcgaaaagaaacgaatttcccacaagactggacaatattctactggtcatggtggttagtatatgcgccatttatcggtttatttatcgctagaatttcaaaaggtcgacgccttaaagaagtcgtgctaggaacaattatttatggaacgcttggatgcgtattattctttggtatttttggtaactatgctgtgtatttacaaatttctggacagtttaatgtaacacaatatttaaatacacatggtacagaggcaaccattattgaagtggtgcatcatttaccattcccatcattgatgattgtactattcttagtatctgctttcttattcttagcaacaacatttgattcgggttcatatattttagcggcagcatctcagaaaaaagtggtaggcgaaccattacgtgccaatcgtttattctgggcatttgcattgtgcttattgccattttcattgatgctagttggtggtgaacgtgcattagaagtattgaaaactgcttcaatactggcaagtgtgccattaattgttatttttattttcatgatgatatcatttttaatcattttagggcgcgatagaattaaacttgaaacgcgtgctgaaaaattaaaagaagttgaacgtcgttcattgcgaatcgttcaagtatcagaagaagaacaagacgataatttataa

SEQ ID NO: 404791 - DNA, 687 bp, Staphylococcus aureus
atgactaatcaatttaaaaataaacagtccaaattacatgacagtttagaatccatcacaaaaaacttatatgcgacacctacttcggaactgccttttgataatcgatttctatttaaatcttttattttaaaacgtgaaacaggtaatattgttatctatcattccggacacttaggtgactcccaacaagacattgcatcattaggtggtgtttcaaaagtattgatgaatcatgatcatgaatctataggaggttctaatcaagttgaagccccttactttatacatgaaaatgatgtggctgcactgaaacataagatttctgttcaaaaacaatttagtaatcgtgtaatgttggataaggatttagaagttattcccgcgcctggacatacaccagggacgacactatttttatgggatgatggtcatcaccgttacttatttactggagattttatatgttttgaagggaagagatggcgtacagttatattaggttcaagtgatagagaaaaatctattcaaagtttagagatggttaaagaattagattttgatgtacttgtaccttgggttactatcaaagatgaaccgttagtttattttgtagaaaatgaatatgaaaaacgtgaacaaatacaaaatattattgatagagtacgtgagggcgagaatagctaa

SEQ ID NO: 404792 - DNA, 564 bp, Staphylococcus aureus
atgactcgttctcagaacaaacagcaacaattagaacaagcaaaagatattgtaattaattcaattggacagacaatggatttgtatggcactaatagaagtgtaggaaacttatatggcacaatggtgtttgaaggcagtatgacgcttgatgaaatgcgtcatcaattgcaaatgagcaaaccaagtatgagtgctggcgttaagaaattgcaggaatttgatattgttaaacaacaatttacgagaggaagccgcaaacaacattttatcgccgagaaagactttttcatctttttccgaaactttttcactaaaaaattccagcgtgaaattgacatcaatgtcgaagcagtaaaagatgctcaagctattatcaattcattacttgaaagcagtgatttaactgaagctgaaacacaagaggcacaaaaaattaaagctcagcttgatcatacacatgtttattacgaatggttagaacagttaaccgaagcgattgaaagcggtgaaattttcaaatatttcccaattccagaacagccttctgattctgaaaattaa

SEQ ID NO: 404793 - DNA, 1491 bp, Staphylococcus aureus
atggaacttttaaaacatttatctcagcgtcaatatattgatggtgagtgggttgaaagcgcgaataaaaatacaagagatattatcaatccttacaatcaagaagtgatatttacggtttctgaagggacaaaagaggatgcagaacgtgcaatcttagctgcaagacgtgcgtttgagtctggtgaatggtcgcaagaaactgctgaaacaagaggtaaaaaagtacgtgccatcgcggacaagattaaagaacatcgcgaagcgttagcacgattagaaacattagatactggaaaaacgttagaagaatcatatgcagatatggatgatattcataatgtgtttatgtattttgctggattagcagataaagacggtggcgaaatgattgattcaccaattccagatacagaaagcaaaattgttaaagaaccagtaggtgtagttacacaaattacaccttggaattatccgttattacaagcatcatggaaaattgcgccagcgcttgctacgggttgttcactagttatgaaaccaagtgaaattacaccattaacaacaatacgtgtttttgaattaatggaagaagttggtttccctaaaggaacaattaatcttattctaggtgcaggttctgaagttggtgacgtaatgtcaggtcataaagaggttgaccttgtatcatttacaggtggcattgagactggtaagcatattatgaaaaatgctgctaataatgttacgaatattgccttggaacttggcggtaaaaatccaaacattatctttgatgatgctgattttgaattggcagtagaccaagcgttaaatggtggatatttccatgcaggtcaagtttgttcagcaggatcaagaatattagtacaaaacagtattaaagacaaatttgagcaagcacttattgatcgcgtgaaaaaaatcaaattaggtaatggttttgatgctgatactgaaatgggaccagtgatttcaacagaacatcgtaataagatcgaatcttatatggatgtagctaaagcagaaggcgcaacaattgctgttggtggtaaacgtccagatagagatgatttaaaagatggtctattcttcgagccaacagtcattacaaattgtgatacgtcaatgcgtattgtacaagaagaggttttcggacctgtcgttactgtagaaggctttgaaactgaacaagaagcgattcaattagcgaatgattctatatatggtttagcaggtgctgtattttctaaagatattggaaaagcacaacgcgttgctaacaagttgaaacttggaacggtgtggattaatgatttccatccatattttgcacaagcgccatggggtggatacaaacaatcaggtatcggtagagaattaggcaaagaaggcttagaagagtaccttgtttcaaaacacattttaacaaatacaaatccacaattagtgaattggtttagcaaataa

SEQ ID NO: 404794 - DNA, 1710 bp, Staphylococcus aureus
atgagtaacaaaaacaaatcatatgattatgtcatcattggaggaggcagtgcaggttctgtactaggtaatcgtctgagtgaagataaagataaagaagtcttagtattagaagcgggtcgcagtgattatttttgggatttatttatccaaatgcctgctgcgttaatgttcccttcaggcaataaattttacgattggatttattcaacagatgaagaaccacatatgggcggtcgtaaagtagcacatgcccgaggtaaagttttaggtggatcaagttcgattaatggcatgatttatcaacgtggtaatccaatggactatgaaggctgggcagaaccagaaggtatggaaacttgggattttgcgcactgtttaccgtattttaaaaaattagaaaaaacatacggtgcagcgccttatgataaatttagaggccatgatggaccaattaagttaaaacgagggccagcaacgaatcctttattccagtcattctttgatgcaggtgttgaagcaggctatcataaaacacctgatgtgaatggatttagacaagaaggttttggaccgttcgatagtcaagtacatcgtggtcgccgaatgtcagcttcaagagcatatttacatccagcgatgaagcgtaaaaacttaaccgttgaaacacgtgcctttgtaactgaaattcattatgaaggtagaagagcaactggtgttacgtataagaaaaatggcaaactacataccatcgatgctaatgaagtcattttgtctggtggggcattcaatacgccacaattactacaattatctggtatcggtgattcagagttcctaaaatcaaaaggcattgagccacgtgttcatttacctggtgtgggtgaaaactttgaagatcacttagaggtatacattcaacataaatgtaaggaacctgtatcattacagccaagcttagatatcaagcgcatgccatttattggtttacaatggattttcacacgtacaggtgcagcagcatctaaccattttgaaggtggcggatttgtacgttcaaataacgaagttgattatcctaacttaatgttccatttcttaccaatagctgtaagatatgatggtcaaaaggcagcggtcgcacatggttatcaagttcacgtaggaccaatgtattcaaactctcgtggtagcttgaaaatcaaatctaaagatccattcgaaaaaccaagtatccgctttaattatttatcaacagaagaagataaaaaagaatgggtagaagcaattcgtgtagcaagaaatatcttatctcaaaaagcaatggatccattcaatggtggagaaatttcaccaggaccagaagtgcaaacagacgaagaaattcttgattgggttcgtagagatggtgaaacagcattacacccatcttgtagtgctaaaatgggtcctgcttcagatccaatggcagtagttgacccgttaacaatgaaagtccacggtatggaaaatttacgtgtagttgatgcatcagctatgccacgtacgacaaatggcaatatacacgcacctgttttaatgttagctgaaaaagcagcagacattatacgtggcagaaagcctttagagccacaatatattgattattataagcatggtgttcatgatgaaaatgaaggtgcaatcgaagtaaaaccatacgctaaataa

SEQ ID NO: 404795 - DNA, 213 bp, Staphylococcus aureus
atgagcttttacgaatatatacaaacatttaaagatgataaaacaccattaggcgaattagcgatttggattaaagaagatgattcattcccaaaacaagagaagctaacagaaaacattttgtcttattttcatcaaatgtccaatatagatcatgagtttttagaaattgtaaaaagatcactttctctgtatgatcaattaaaatcgtaa

SEQ ID NO: 404796 - DNA, 444 bp, Staphylococcus aureus
atgaaaatttatgatgaatatagaagttatgtaatagaagaactggatgattgtctcacaatacaaaaaaataatgacactgcatattacgatgtgctagaagcgataaatgatttatcaaatgattcattatgtgtgttaaatcatttatatattaacgaaggacaagaagaaacattcgagcaaaaatttttgcgacgtaataagcatttaaaaaacgttgatggatttaaagcattaaggtttttaagacctagaacagctggtagacactatatcattattacgctgtgggaaaataggcaagcattttatcattggcaaaattcagctgagtacaagcatacacacaagcatcgtggcacttcgaaaggtgcagatgtaaaaataattaatcgtgaattatcatacaatattcgtattgaattagctgatatggtctag

SEQ ID NO: 404797 - DNA, 1620 bp, Staphylococcus aureus
atgtatgaaaggaagttagttatgcaaaagtcagctctattcgcgcctgaaaaatataacattatttcggaaatcgaaaaatatagccacataccagataaaaaggcaattttatatcataatactgaaggcgaagatatatcagtcacttaccaacagctcattgaacagtctaataaagtaggtaatgttttagcatcgcacggtttatctaaaggcgataaagtactcattatgatgccacgatctattgcgacgtatgaattatatattgctgctttaaaattaggtgttgcaatcattccatgttctgaaatgctaagaactaaagatttacaataccgtatcacacatggtgaaattaatgcagttattgcactagagccattcacagttgaatttgaaaaaattaaagaatatgatgcgttaactaaatttgttattgccggtcaaaaagatggatggatttcacttgaagctgaaaaagaaaacgcaagtaacaaactagaaatggcagatacgacgcgtgatgatatggcgattctgtcatatacatctggtacaactggcaatcctaaagccgttacacattgtcatggatggggatttgcacatttacaaatggcaccaaaacattggttatgtattaatgaagatgacttagtttgggcaacagcagcaccaggttggcaaaaatgggtatggagtcctttcttatctgtattaggttcaggtgcaactgcttttgtatttaatggaaggttcagtcctgaaacatacttagaattgcttcaaaaatatcaaattaatgttttatgttgtacaccgacagaatatcgtatgatggctaaattacagaacttaaatgattatgacttaacgcatttacatagtgccgtttctgcaggtgagccactaaatcgagaagtagttgaacaattcaagaaatactttaatttaactgtaagagatggatatggccagactgaaagtaccttgcttataggctttttaaaagatacaccacagaggattggatcaatgggtaaaggcattccgggtagttcggtcactgtagtagatgatgaggggaatagcgtacctgctaatacgaaagggaatattgcagtaccacttgatttgccagcacttttcaaagggtattataaagagccagaacgtacggcgaaagcgcaaacaggtaaatactacatcactggtgacttagctcatgtagatgatgatggttatttctggtttgaaggacgtcgagatgacattattattagttcaggctatacgattgggccttttgaagttgaagatgcgttaacgaatcatccagccgttaaagaatgtgctgtagtagcaaaacctcatgatatacgaggaaatattgttaaagcattcgttattttacaggaccatactgcgggtgatgatacgttagttaaagaactacaacaatttgttaaaaatgaagttgcaccatataaatatccgagagagattgaattcgttgacgacttaccaaaaacaaactcaggtaaaattcgtcgtgttgaactacgagatgctgaaatagaaaaatggcaacaacaaaaagatagcaatcaataa

SEQ ID NO: 404798 - DNA, 1497 bp, Staphylococcus aureus
atggctaagtctaatagtaaagacatcgttttaattggagccggtgtacttagcacaacatttggttcaatgttaaaagaaattgagccagactggaatatccacgtttacgaacgcttggatcgtcctgcaatcgaaagttcaaacgaaagaaataatgctggtacgggtcatgcagcattatgtgagttgaactacacagttttacaacctgatggttctatcgacatcgaaaaagcgaaagtgattaacgaagagtttgagatttcaaaacaattctggggtcacttagtgaaaagcggtagcatcgagaacccaagagaatttatcaatccattaccacacatcagttatgttagaggtaaaaacaatgttaaattcttaaaagatcgttacgaagcgatgaaagctttccctatgttcgataatatcgaatatactgaagacatcgaagtaatgaaaaaatggattccattgatgatgaaaggccgtgaagataaccctggtatcatggcggcaagtaaaattgacgaaggtacagatgtaaacttcggtgaattaacacgtaaaatggctaaaagcattgaagcacatccaaatgctacagtgcaatttaaccatgaagttgttgattttgaacaattatcaaatggtcaatgggaagttactgttaaaaatcgcctaactggtgagaaattcaaacaagtaactgactacgtattcatcggtgctggcggtggagcaattccattattacaaaaaacaggtatccctgaaagtaaacatttgggtggattccctatcagtggtcaattcttagcttgtacaaacccacaagttattgaacaacacgatgccaaagtttatggtaaagagccacctggtacaccaccaatgactgtacctcatttagatacgcgttacattgatggtcaaagaacattattatttggaccatttgctaatgttggacctaaattcttgaaaaatggttctaacttagatttattcaagtctgttaaaacatacaacattacaactttattagcagcagcagttaaaaacttacctttaattaaatactcatttgaccaagtaattatgacaaaagaaggttgtatgaaccacttacgtactttctatccagaagcacgtaatgaagattggcaattatacactgctggtaaacgtgtacaagttatcaaagatacacctgaacacggtaaaggattcatccaattcggtacagaagtggttaactcacaagaccacactgtaattgcattattaggtgaatcaccaggggcttcaacttcagtttcagttgcgttagaagtattagaacgtaacttccctgaatacaaaactgaatgggcacctaaaattaagaaaatgattccatcatacggtgaatcattaattgaagacgaaaaattaatgagaaaaatccgtaaacaaacttcaaaagacttagaattaggttactacgaaaactaa

SEQ ID NO: 404799 - DNA, 891 bp, Staphylococcus aureus
atgaataaagagcaattagaaaaaatgaaaaatggaaaaggctttattgccgcattagaccaaagtggtggtagtacaccaaaagcacttaaagaatatggtgtaaacgaagatcaatatagcaatgaagacgaaatgttccaacttgttcacgatatgcgtacacgtgtggtaacttcaccttcattctcaccagataaaattttgggtgctattcttttcgaacaaacaatggatcgcgaagtagaaagcaaatacactgcagattacttagctgataaaggtgttgttccgttcttaaaagtagacaaaggtcttgctgaagagcaaaatggtgttcaattaatgaaaccaatcgacaacttagacaatttattagaccgtgcaaacgaacgtcacatttttggtacaaaaatgcgttctaacattttagaattaaatgagcaaggtatcaaagacgttgttgaacaacaatttgaagttgctaaacaaattattgctaaaggtttagttccaattatcgaaccagaagttaatattaatgcaaaagacaaagctgaaattgaaaaagtattaaaagctgaacttaaaaaaggtttagatagcttaaatgctgatcaattagtaatgttgaaattaacaattcctactgaaccaaacttatacaaagagttagctgaacatcctaatgttgttcgtgtcgttgtattatcaggtggttacagcagagaaaaagcaaatgaattacttaaagataacgctgaacttatcgcaagtttctcacgtgcattagctagtgatttaagagctgatcaatctaaagaagaattcgataaagctttaggtgatgctgtagaatcaatctacgacgcatctgtaaacaaaaactaa

SEQ ID NO: 404800 - DNA, 417 bp, Staphylococcus aureus
atgcgtttaaaagtattgttccatttcattgctgctattttcatatcattcatgttgctatggatgaccatgttgtttgacttaataagcaatcaatcacatttaaaagctttattattgaatttagattttctaattccttctgacaatacaccatatattctagaaataatatgtcacttactaattggtagcgtcatttattttgtatttgtgttgctgtttcatacttctaaaaggctttactatctatgttatatccctttatttttcttatttatagcattgtatccctttttagtatttattgcgcaacgtccaatttttcaatttagtgtgacagaattaatcggttggattattacacatattttctttatgtcattaatggcgttagtcatacctagaataaaataa

SEQ ID NO: 404801 - DNA, 1338 bp, Staphylococcus aureus
atgagtaaagcacatcaattaattcaagaggatgaacattattttgcgaaatcaggacgtattaaatattatccgttagtgattgatcatggatatggagcaacattggttgatattgaggggaagacatatatcgatttgttatcgagtgcgagttctcaaaacgtaggtcatgcacctagagaagtaacagaagcgataaaggcacaagttgataaatttattcattatacaccagcatatatgtatcatgaaccgttggtacgtttagctaagaagctttgtgagattgcacctggagattttgaaaaaagagtgaccttcggattaaccggatcagacgcaaatgatggcatcattaaatttgccagagcatatacagggcgtccttatatcattagtttcactaatgcatatcatggttcaacttttggctcattgtctatgtcagctattagtttaaatatgcgcaaacattatggtccgttattgaatggtttttatcatattccgtttccagataaatatcgtggtatgtacgagcagccacaagctaattcagtagaagaatatttagcacccttaaaagaaatgtttgcgaagtatgtacctgctgacgaagtagcatgtattgttattgaaacgatacaaggcgatggtggacttttagaaccagttccagggtattttgaagcgttagaaaagatttgtcgtgaacatggtattttaatcgctgtcgatgatattcaacaaggttttgggagaacaggtacatggagttcagtctcgcattttaattttacgcctgatttaatcactttcggaaaatccttagcaggtggtatgcctatgtcagcaattgttggacgcaaagagattatgaattgtttagaagcaccagcacatttatttacaacaggtgctaatccagttagttgtgaagctgcattagccacaattcaaatgattgaagatcagtcgcttcttcaggctagtgcggaaaaaggggaatatgttaggaaacgaatggatcaatgggtatctaaatacaatagtgtaggcgatgttagaggtaaaggtctgagcattggtattgatattgtttccgacaaaaaactcaaaacacgtgatgccagtgcggcacttaaaatttgtaattactgctttgagcatggcgtagttattatagctgtagcaggaaatgtgttgcgattccaaccgccattggtaataacatatgagcaattagacacggcgttaaacactatagaagatgcactgactgctttggaagcaggtaacttagatcaatatgacatatctggacaaggttggtaa

SEQ ID NO: 404802 - DNA, 1449 bp, Staphylococcus aureus
atgggaagttttttcaataaaatagcacgaaaagaggatccggctatctatcaaaataaagatggtcatttaaagcgtacacttcgggtgcgtgatttcttagctttaggtgtaggaacaattgtatcgacatctatctttacgctacctggcattgttgctgcagaacatgcaggaccggccgttgcgttatcattcttactcgctgctattgttgctggtttagttgcatttacttatgcagaaatggctgccgctatgccatttgcaggttcagcctattcttgggtcaatgtattatttggtgaattttttggatgggttgccggttgggctctattagctgaatattttatcgccgtagcctttgttgcatcaggattctcagcgaatttacgcggacttgtgaaaccaattggcatcgaattacctgcagcattatcaaatccatttggtacaaatggcggttttatcgatattattgctgctatcgttattttattaactgcattattactatcacgtggtatgtcggaagcagctcgtatggaaaatattttagttattttaaaagtattagctattattttatttgtcatcgtaggtttaacagcaataaatgttagtaactatgtgccatttattccagaacacaaagtaactgctacaggtgactttggtggatggcaaggcatatatgctggtgtttcaatgattttcttagcgtatatcggtttcgattctatcgcagcaaactcagcagaagcacttgatcctcaaaagacaatgcctagaggtattcttggttctttaagcgttgctatcgtattatttattgctgtagcacttgtgttagttggtatgttccattactcacaatacgcaaacaatgctgaacctgttggttgggctttacgtcaaagtggtcatggtgttgtagcagctattgttcaagctatctctgttatcggtatgtttacagcattaattggtatgatgttagcaggctcacgtttactttattcatttggacgtgacggcttattaccttcatggttaagccacttaaacgacaaacatttacctaatcgcgcactagttatacttactattattggtgttttaattggttctatgttcccattcgcatttttagcacaattaatttcagcaggtacacttgttgcatttatgttcgtttcattagcaatgtatcgtttgagaaagcgtgaaggtaaagatctaccaattcctgcatttaaattacctttatatcctgtgttaccagcaattacatttgttttagtattgctagtattctggggattaggattcgaagcgaaattatacactttaatttggtttattgttggtatcatcctatatttaagttatggacttagacattctaagaaaaatgacgtagctgaataccacccaccaaaataa

SEQ ID NO: 404803 - DNA, 960 bp, Staphylococcus aureus
atgaaaacatttggtaaaaaggttgtattaatcggagatggatctgtaggatcaagctatgcctttgcaatggttacgcaaggtgttgctgatgaatttgtaattattgacattgcaaaagacaaagtaaaagcagatgttcaagatttaaaccatggtacagtccacagtccttcaccagttgatgtgaaagcaggtgaatacgaagactgtaaagatgcagatttagttgttattacagctggtgcacctcaaaagccaggtgaaacacgtttacaattagttgaaaaaaatactaagattatgaagagcatcgttaagagtgttatggatagtggctttgatggatatttcttaatcgcggcaaaccctgtagacattttaacaagatttgtaaaagaatatactggattaccagcagagcgtgttatcggttcaggtactgtattggacagtgcacgtttacaatatttaattagccaagaacttggtgttgcaccttcaagtgttgacgctagtattattggcgagcatggtgatactgaacttgcagtttggtcacaagcaaatgtagcaggtatttcagtatatgacacattaaaagaacaaactggtagcgaagctaaagcggaagaaatttatgtgaatacacgtgacgctgcttatgaaattatccaagctaaagggtcaacatactatggtattgcattagcattgatgcgcatttcaaaagccattttaaataatgaaaataatgtcttaaatgtttctatacaattagatggtcaatatggtggtcacaaaggcgtttacctaggtgtaccaacattagttaaccaacatggcgcagttaaaatttatgaaatgccattaagtgccgaagaacaagcgttgttcgataaatctgttaaaacattagaagatacatttgattcaattaaatatttattagaagactaa

SEQ ID NO: 404804 - DNA, 705 bp, Staphylococcus aureus
atgacgaatgtcttgtatcaacatggtacattaggtacgttaatggctggcttactagaaggcacagctacaattaatgaattgttagaacatgggaatttagggattgcaacgttaacagggtctgatggcgaagtaatatttttagacggaaaggcatatcatgctaacgagcataaagaatttatagaattaaaaggcgatgagaaagtaccgtatgcatcgattactaattttaaagcgagtaagacatttccattgcaacaattatcacaagatgatgtatttgcacaaattaaaaatgaaatgttaagtgagaatttattttcggctgttaaaatttatggcacatttaaacatatgcatgtacgaatgatgcctgctcagcaaccgccatatacacgtttgattgattcagcacgcagacaacctgaggaaaaaagacaagatattcgtggtgccattgttggattttttacaccagaattatttcatggcgtagggtctgctggttttcatatacattttgcggatgatgaaagagcttatggtggacatgttcttgactttgaagtggatgacgttgtcgttgagatacaaaactttgaaacattccaacaacatttcccggtaaataacgagacgtttgttaaagcgaaaatagactataaagatgtggcagaagaaattagagaagctgaatag

SEQ ID NO: 404805 - DNA, 861 bp, Staphylococcus aureus
atgttatcagttgcgattatcggcccaggcgctgtcggtacaactattgcctatgaattacaacaatcattgcctcatacaacgcttatcgggagacacgccaaaacaataacatattatactgtaccacatgcacctgcacaagatattgttgtgaaaggttatgaagatgtcacaaacacatttgatgttattattattgcagtcaaaacacatcaacttgatgcagttattcctcatttaactcatcttgcacatgaggacacgctcatcattttagcccaaaatggttatggtcaactcgaacatatttcatttaaaaacgtatgccaagcagttgtctatataagtggtcaaaagaaaggcgatgttgttacgcacttcagagattatcaattacgtatacaagataatgcattaactcgacaatttagagatttggtccaagacagtcaaatcgacattgtattagaagcaaatattcaacaagctatttggtataaattgttagttaacttgggcattaattctatcacagcactcggtagacagaccgttgcaatcatgcataatcctgaaatacgtacactgtgtagacagctattactagatggttgtcgtgttgcacaggcagaggggttaaacttttcagaacaaactgtcgatactattatgactatatatcaaggttatcccgacgaaatgggaacgagcatgtattacgacattgcgcatcagcaacctcttgaagtcgaagcgattcaaggctttatttatcgacgtgcacgtgaacacaatcttgacaccccatatcttgatactatttatagctttttacgcgcgtatcaacaaaatatgtaa

SEQ ID NO: 404806 - DNA, 819 bp, Staphylococcus aureus
ttgaaaacagtaagtcaattaatagatatgaaacaaaagcaaactaaaatttctatggtaacagcttatgattttccaagtgctaaacaagtggaagcagcgggtattgatatgattcttgttggggattcacttggtatgactgtattaggttatgaaagtaccgtacaagtgacgttagcagatatgattcatcacggtcgtgcagtaagaagaggcgcaccaaatacatttgtagttgttgatatgccgattggtgcagtaggcatctctatgacacaagacttaaatcatgctctaaagctttatcaggagacgaatgcaaatgcaattaaagcagaaggagcgcatattacaccatttattgaaaaagcaacggcaattggtattcctgttgttgcacatttaggattaacacctcaaagtgttggcgttatggggtataaattacaaggtgcaacgaaagaagcagcggagcaacttattttagacgcgaaaaatgtagaacaagctggtgcagttgcgttagtacttgaagcaattccaaatgatttagcagaagaaattagcaagcacttaacaattccagtcattggtattggtgcaggaaaaggtacagatggtcaagtattggtttatcacgatatgttaaattatggtgttgaacataaagcgaaatttgtgaagcaatttgctgattttagtgttggtgtggatggtttaaaacaatacgatcaagaagttaaatctggtgcatttccatcagaagaatatacgtataaaaagaaaattatgaatgaggttaataacaatgactaa

SEQ ID NO: 404807 - DNA, 852 bp, Staphylococcus aureus
atgactaagctgattactacggtaaaagagatgcaacacattgttaaagcagccaaacgctcaggcacaacgattggttttatcccaacaatgggtgccttacatgatggacatttaacgatggtacgcgaatcagttagtacaaatgatattacaattgtgagtgtatttgttaatccattacaatttggtccaaacgaagatttcgatgcttatccgagacaaattgataaagatttagaattagtatcagaagtaggagcggacattgtttttcatcctgcagtagaagatatgtatccaggtgaattaggtattgatgtcaaagtaggcccattagctgatgtgttagaaggagcgaagcgtccagggcattttgatggggtggtaacagtagttaataagctatttaatattgttatgccggattatgcttattttggtaaaaaagatgcccagcaattggctattgtcgagcaaatggtaaaagacttcaatcatgccgttgaaattattggtattgatatcgttcgagaagcagatggtttggcgaaaagttcaagaaatgtttatttaacggagcaagaacgacaagaagcggtacatttaagtaaaagtttgctattagcacaagcgttgtatcaagacggtgaacgtcaaagtaaagtaattatagacagggttactgaatatcttgaatcacatataagtggacgcattgaagaagttgctgtttatagttatcctcaattagtagaacaacacgaaataactggacgcatatttatctcgttagctgttaaattttcaaaagcgcgtttaatagataatataataattggagctgaataa

SEQ ID NO: 404808 - DNA, 384 bp, Staphylococcus aureus
gtgataagaacaatgatgaatgctaaaattcatagagcaagagtgactgagtcaaatttaaattatgtaggtagcattacgattgattcagatatattggaagcggtagacatcttgccaaatgaaaaagtagccatcgtgaataataataatggtgcacgttttgaaacatacgtaatagctggtgaaagaggtagtggtaaaatttgtttaaacggtgcagcgtcaagacttgttgaagtaggcgatgtagtcataatcatgacttatgcacagttgaatgaagaagaaattaaaaaccatgcacctaaagtagcagtaatgaatgaagataatgtcattattgaaatgattcatgaaaaagaaaatacgatagtgttataa

SEQ ID NO: 404809 - DNA, 1683 bp, Staphylococcus aureus
atgaaccaacatttactaggaaatccaaaattaactgtaactcatgtcaatgaagttaaagccggtattaaccacatcgttgtcgacagtgttcaatatggaaatcaagaaatgattatggaaaaagatgtcactgtggaaatgcgcgatggcgaaaaattatatattaatattttcagaccaaataaagatggcaaattccctgtagttatgtctgcagatacttacggtaaagataataagcctaaaatcacaaatatgggtgccctttggccaacattaggtaccattccgacatctagttttacacctgaagaatcaccagacccaggattttgggtgccaaatgattatgttgtagttaaagttgcattacgcggtagtgacaaatccaaaggcgtcttatctccatggtcaaaaagagaagcggaagattattacgaagtgattgaatgggcagcaaatcagtcatggagtaatggaaatatcgggacaaatggtgtttcttatcttgcggtgactcaatggtgggtcgcatcattaaatccaccacatttaaaagcaatgattccttgggaaggcttaaatgatatgtatagagaagtagcctttcacggaggtataccagatactggcttttatcgtttctggactcaaggtatttttgcgagatggacagataatccaaatatcgaagatttgattcaagcacaacaagaacatcctctgttcgatgatttttggaaacagcgtcaagtgccattatcacaaattaaaacacctctactaacatgtgctagttggtctacacaaggtttgcacaaccgtggctcttttgaaggatttaaacaagctgcatctgaagaaaaatggctatatgtgcatggacgtaaagagtgggaaagttactacgctagagaaaatctcgaacgccaaaaatcattctttgatttttaccttaaagaagaaaataacgattggaaagatacgcctcatgtcatttatgaagttagagatcaattttataaaggcgaattcaaatcagcgtcagcgttccctttacctaacgcagaatatacaccattgtatttgaatgctgaaaatcacacattgaatcatgcaaagattagtagcgcgcatgtcgcacaatatgactctgaagataaacaacaagatgtaagttttaaatatacgtttgacaaagatactgagttagttggaaacatgaacttaaaactatgggtaagcactaaagactcagatgatatggatttatttgcaggtattaaaaagttagatcgtcgtggtaatgaagttaacttccctgattttaatcatattgaaaatggtcaagtagctactggttggttacgcgtatcacatcgtgaattagatcaagaaaaatcctcaatcgcgcaaccttggcataaacatgaaacagaattaaagttgtcacaagatgagattgtacctgttgaaatcgaattgttaccttcaggcacgctatttaaacaaggcgaaacattggaagttgttgtaaagggtagtgaaattgtaattggtaatagtactcctggcatgaaaacacgttatgaacatgaagaaaccgtaaataaaggcatgcacatgatttatactggtggtaaatatgattcacaattaatcattcctatcgttaattga

SEQ ID NO: 404810 - DNA, 588 bp, Staphylococcus aureus
atgactatagatcgacgtattagaaaatcacaagttgcaatgagaaatgcatttattgaacttttacatcaacaccaattagaagagattactgtgcaacaaattgcagatttagctgatgttaaccgtagtacattttatacgcattattatgataagtatgatttgcttgaaaaattagaggaccagcagttggaggaaataagagacttcattcatgatgagaagttaaatggagcagttaagttatccacggataacatacatcaaattatgaccgttttaatagaaatgatagaaaaagacatcgcattttatcaattgatgtttcgtatgggtaaagattcaaatatccacgaaaaactttatgatttaattatgtgtcatttacaacgttataaaaatgaaaatgatcaaattaatggtataccattttcttatttcatgagttatgtttcaggtgcgggattgtcttttataagacattgggtagaagatccaaaccgtatagacaaagttgacttaataaggcattttaatacgattgtcaatcaagggccagcaacgataattaaaaatatacaataa

SEQ ID NO: 404811 - DNA, 450 bp, Staphylococcus aureus
atgacagcattattcccttatatcgcttttgaaaattcaaaagaagcccttgcatattacgaagaagtatttggtgcaactgacgttaaacgtttagaagttggcgaagaacaagcgtcacattttggtatgactaaggaagaagcgcaagaagcaactatgcatgctgaatttgaagtgcttggcgtaaaagtgttatgttctgattcttttggtcgcgctgacaaaattaataatggcatatcattattaattgattatgatgttaacaataaggaagatgctgataaagttgaagcattctatgagcaaattaaagatcattcttcaattgaaatagaattaccgtttgctgaccaattctggggtggcaaaatgggcgtctttaccgataaatacggtgttcgttggatgttacatggtcaagactatactgcaatccaacaataa

SEQ ID NO: 404812 - DNA, 723 bp, Staphylococcus aureus
atgattaatgctgaacctattatcagtaaaatgaaaaatcaaaaaattaattatgacaaggtgttgaagaaattaatcgggcagtgggaaagagaagcaatcagacctaaaatcttattgcatagttgttgtgcaccttgtagtacatatacattagagtttttaacacaatatgcagacattgcaatttatttcgcgaattcaaatattcatccgaaaaatgagtacttacgacgtgctaaagtgcaagaacaatttgtggaagattttaatcgcaagactggtgcgaatgtgaagtatattgaagcaccttatgaaccgcataagtttgtgaaaatggtgaaggataaagaattagctgatgaaaaagaaggcggcttacgttgtaccgcttgttttgaaatgcgtttggatattgtagcgaaagcagctgtagaacatggctatgattattttggcagtgcaatcacattatcacctaaaaagaacgcacaattaatcaatgaacttggtatggatgtccaaaaaatatacgatgtgaactatttgccaagtgattttaagaaaagtaaaggttatgagcgttccatagaaatgtgtaatgactataatatctttaggcagtgttattgtggatgtgtctttgcagcgatgcaacaaggtattgattttaaaacagttaataaagaagcgaaagcatttttagaacaatatccagattaa

SEQ ID NO: 404813 - DNA, 276 bp, Staphylococcus aureus
atgactaaagaaacagataataaaaaaacagtagcgacttctgacaacaaagacacacagcaacaaaatcaacctgaagaagatgaacgtcaaggtttgaatggttatcgtaaaacagatcttgatttagaaatcgagcaagagctacgtgaaatgatgaaaacaggagaaaatgaaacgaaaaatgactataaaaagtttaaagtgttttcacttatttcaacacttgtcattgtcattttagcaattataagatttgttcataaaatgatgtaa

SEQ ID NO: 404814 - DNA, 1065 bp, Staphylococcus aureus
atgtacaaattaattaaacctttcttattcaaaatcgaacccgaaaaagcacacggactaactatcgatgcattaaaaacgttacaaaagtttccggttttattcccagtcgtcgataaactatttacttataagaatccaacgttatcacaaacgatacaaggtaatacgtacgacaatccaattggcttagcagctggtttcgacaaatcttgcgaagtaccaaaagcattggaacaccttggattcggtgctttagaattaggtggtatcacacctaaacctcaaccgggtaaccctcaaccacgcatgtttagattattagaagatgacgccttgataaatcgaatgggcttcaataatattggtatgaacaaagcactaagtcatttgcgtaaaaatgcttatcaagtacctgttggtatcaatgttggtgtgaataaaatgacaccttatgaagcgcgttatcaagattatataaaggttattgatacgtttaaacacgacgtttcatttttcacagtcaacatcagttctccaaatactgaaaatcttcaaaacttccatgataaagatgaattttcaatgttatgccaagctttaacagcatttaaaaaacaacatgatgtaacagtgccaatttatttaaaactaacgtctgatatggatttcgatggcttaaaagcactattaccagcgattactgagacatttgacggtatcatcttagcaaacacaacgcgacaacgagatggtttaacttctgctaataaagtcgaagaaggcggtttgagtggtcgtccattatttgaacgtaatttaaaattgattaagtatgcttatcagcaaacaaatggtgaatttttaattataggtacaggcggcgtattcagtactgaagatgcaatcaaaatgatgcgtcacggtgcgtcacttattcaaatttattcatcacttgttattgaaggcccaggtttaactaagaaaatgaacaaaggcatcgcacgttacttaaaagatcatcattttgacaatgtcagtgatattataggactagatgcctaa

SEQ ID NO: 404815 - DNA, 867 bp, Staphylococcus aureus
atgaatgaacaatggttagagcatttacctttaaaagatattaaagagatttcaccagtgagtggtggtgatgtaaacgaagcatatcgagtcgaaacagatacggatacatttttcttacttgtccaacgtggacgtaaagaatcattttatgctgcagaaattgcaggtttaaatgaatttgaacgtgcaggtatcacggcacctagagtaattgcaagtggcgaggttaacggtgatgcgtatttagtgatgacgtatttagaagaaggggcttcagggagtcaacgccaattagggcaactcgtagctcaattacacagtcagcaacaagaagaaggcaaatttggcttctcattaccttatgaaggtggcgatatttcttttgataatcattggcaagacgattggtgtaccatttttgtcgacaaacgcttggaccatttgaaagatgagttgctaaatagagggctatgggatgccaacgatatcaaagtatatgacaaagtgcgacgtcaaattgtggcggaattagaaaagcatcaaagtaaaccgtctttattacatggtgacctatggggtggtaattatatgttcttacaagatggtcgtccggcgttatttgatccagcgccattatatggtgacagagaattcgatatcggtattacaacggtatttggtggttttacgagcgaattttatgatgcgtataataaacattatccactcgcaaaaggtgcatcctatagacttgaattttatcgtttatatttattgatggtccatttattgaaatttggtgagatgtaccgtgatagtgttgcgcattctatggataagattttacaagatacaacaagttag

SEQ ID NO: 404816 - DNA, 279 bp, Staphylococcus aureus
atgatgagtacagttcaaagtgatatttttaagaccaatagtgcatcatcatctattaaaagcgctgttgaaacatgtaataatgtgtcgaaaccggataaagatgaaagtacaacagtaagtggaaataataatgctcatagtgtgatagatgatttgatgagtaagaatcaatctgttgctgaagcaatacgaactgcgagcgataatatacaaaaagttggtgaggcttttgaccaaactgacgtaatgattggtaatgaaattggtaaaaattaa

SEQ ID NO: 404817 - DNA, 372 bp, Staphylococcus aureus
atgatgtcgaataaactggatgaaatcaataaaaaaatcacagcgaaacatgagcaaatggatgacttatatgatgaaaagcgagaggttaaagcattgatagatgaaagtgatgcgcttaatcattcgatagatcaattatatcaacatttaggtgagcgttattatagtagcaatatggctagtcgtatggaacagttccgcgatgaatttcattttgcgaaacgacgttcaacggaagcgttatacgagcagcaacagcaaattcaacatggcattcgtaaagtggaagaagagatgattgacttggaaatgcgaaggaatgttgaaattgagacggtgacaaaggaggaaaataaatggaaacaatag

SEQ ID NO: 404818 - DNA, 297 bp, Staphylococcus aureus
atggaaacaataggaagcattatttatttaaaagaaggttcgcaaaagttaatgattattaatagaggaccaattgtagaaattgaaaatcaaaagtatatgtttgactattctgcatgtaaatatccgattggtgttgtagaagatgaaatttattattttaacgaggaaaatatagattcagttatttttaaaggttattctgatcaagatgaggttagatttcaagagttgtttgaaaatatgaaacaaaatttggatagtgaaatacaacgtggagaagttacacaacaataa

SEQ ID NO: 404819 - DNA, 1107 bp, Staphylococcus aureus
atgcaacatcataaagtggctattatcggtgccggtgctgcaggtataggtatggccattaccttaaaagatttcggtataacagatgtcattattttagaaaaaggaacagtaggacattcatttaaacattggccgaaatcgacccgtacgatcacgccatcatttacgtctaatggatttggcatgcctgatatgaatgcaatttccatggatacttcaccagcatttacatttaatgaagaacatatttccggagaaacatatgctgaatatttacaagtggttgccaaccattacgagctgaatatctttgaaaatacagttgtcacaaatatatctgtagatgatgcatattatacgattgcaacgacaacagagatatatcacgcggattatatctttgtcgcaacaggtgattataatttccctaaaaagccatttaaatatggtattcattatagtgaaattgaagactttgataactttaataaggggcaatatgtggttatcggaggtaatgaaagtggctttgatgctgcatatcaacttgcaaaaaatggctctgacatcgcactttatactagcacaaccggtttaaatgatccggatgctgatcctagtgttagattgtcaccttatacacgtcagcgactaggtaatgtcattaagcaaggtgctcgcatcgaaatgaatgtacattatacagttaaagatattgattttaacaatggacagtatcatatcagttttgatagcggacaaagtgtgcttacacctcatgaaccaatactagcaactggctttgatgcaacaaaaaatccaatcgttcaacaattatttgtgacaacaaatcaagatattaaattaacaacacatgatgaatcgacacgttatccgaatatttttatgattggtgcaacagttgaaaatgataatgccaaattatgctatatctataaatttagagcgcgatttgcagtacttgcacatcttttaacacagcgggaaggcttaccagctaaacaagatgtcattgaaaattatcaaaaaaatcaaatgtatttagatgattattcatgttgtgaagtgtcatgcacatgttag

SEQ ID NO: 404820 - DNA, 1341 bp, Staphylococcus aureus
atgttagaagtgaaatatgatatgagaactgggcattatacgcccatacctaatgaacctcattatttggttattagtcatgcggataaacttaccgcaacagaaaaagcgaaattaagattattaatcataaaacagaaattagatatttcattggcagaaagtgtagtttcttcgcctatagcgagtgaacatgtgatagaacaattgacactatttcaacatgagcgacgacatttaagacctaaaataagtgcgacatttttagcctggttgttgatatttttaatgtttgcattgccaatcggtatcgcttatcaattttcagattggtttcaaaatcagtatgtgtcagcatggatagaatatttaactcaaacaacattgctcaatcacgatatattacagcatatattatttggtgattatggtgtgctatcacttggaacatattcgctcgtatgggcattgccggttgtaatattgattagtttatcaactgctataattgatcaaacaggactcaaatcatggatgatatgggcaattgaaccgtcaatgttatggataggattacaaggtaatgatatcgtgccactattagaagggtttggatgtaatgcagcagctatttcacaagcagcacaccaatgccatacctgcacgaagacacagtgtatgagtttaataagctttggtagttcttgtagttatcaaataggtgcgacattatctatttttagtgtagctggaaagtcatggctatttatgccgtacttaatattagtacttttaggtggcatcttacataataggatatggttgaaaaagaatgatcaacaacttagcgttccgctaccttatgataggcaattacatatgccaaatatacgtcaaatgttgctacaaatgtggcaaaatatacaaatgtttatcgttcaagcgctacctatttttatcacaatctgtcttattgttagtattttatcactaacgccaattttgaatgttttatcacaaatatttacacctatattatcgttattaggcatctcgtcagaattgtcaccagggattttattttcaatgattcgaaaagacggcatgctcttgtttaatttgcatcagggcgccttattacaaggaatgacagcaacacagttactactacttgtgttttttagttcaacatttacagcgtgctcggtcacaatgacgatgcttttgaaacatttaggtggtcagtcagcactaaaattaattggaaagcaaatggtgacatcattgtctttagttattggtgtaggcatcattgttaaaatagtaatgctgattatttaa

SEQ ID NO: 404821 - DNA, 891 bp, Staphylococcus aureus
atgaaaatagttattataggtgggtttttaggtggcggtaaaacgactgtcttaaatcatttgctcgctgaatcattaaaggaatcgctgaaaccagcagtcatcatgaatgaatttgggaaaatgagtgttgatggtgccttagtatctgaagacatacctttaagtgaactgacagaggggtgtatctgttgtgcaatgaaagcagatgtatcagaacagttacatcaattatatttaaaagagcaaccagacattgtatttattgaatgtagtgggattgcagaaccggtctctgtcttagatgcttgtttaacgcctattttagctccgtttacaacaattacacatatgattggtgtaatagacgcaagcatgtataaacacattaaatcattccctaaagacatccaaggcttattttatgagcaattagcatattgttctgtcttatttgttaataaaatagattcagcagatgttgaaacaacgagcaaactattgaaagatttagaagttattaacccagaggccgatatacaagtcggtatgcatggcagcgtcactttgccaatatcagttagacaaatgacagcaacttctgacaataaacataagtctttacatcaaatgattaatcatcaatttgtgcaatcaccagtcaaatgtactaaagcagagtttataaaacgtttagcatgccttccgtctcatatttataggttgaaagggtttatgacatttgaagacaccgcacatacgtatctcattcaatttacacaaggacaatatgaattaacacctgtagcattttcaaaaaaagtgccagaatatttggtgcttatcggaaagggtatttcaaaagaagactatcaatgtttggaacagtag

SEQ ID NO: 404822 - DNA, 834 bp, Staphylococcus aureus
atggaaactttagaattacaaggcgctaaattacgataccaccaagtcggacaaggacccgtgctcatctttattcctggtgcaaacggtaccggagacatttttctgcctcttgcagaacagttaaaagaccattttactgttgtagccgttgatcgtcgtgattatggagaaagcgagttaactgaaccactccctgattccgcttcaaaccctgacagtgattatcgtgtcaaacgcgacgcacaggacattgccgaacttgcaaagtcattaagtgatgaacctgtctatatattaggttcaagttcaggttcaatcgttgcgatgcatgtgttaaaagattaccctgaagtcgttaaaaagattgcatttcacgaaccaccaattaatacatttttaccagacagtacttattggaaagataaaaatgatgacattgtgcatcaaattttaacagaaggcttagaaaaaggcatgaaaacatttggcgaaacattaaatatcgcaccaattgatgcaaaaatgatgtctcaacctgctgatactgaagaaggacgtatagaacagtacaaacgtacgatgttctggtcagaatttgaaattagacaatatacgacgcattcagatattactttggatgatttcacaaaatacagcgataaaatcaccctactaaatgggacagattctagaggctccttcccacaagatgttaacttttatataaataaagaaactggcatacctattgtagatattccaggcggtcacttaggttatattcaaaaacctgaaggctttgctgatgtattattaaatatgtggggttaa

SEQ ID NO: 404823 - DNA, 1011 bp, Staphylococcus aureus
atgaaaagtattacgtttgaagaacattatgtcattgaagatattcaaaaagaaacgatgaatgcgatatcagcagatcctaaaggtgtaccgatgaaagtaatgttagaaggccttgaaaaaaagacaggttttacaaatgccgacgaattatcacatcatgatgaacgtatccaatttatgaataatcaagacgttcaaattcaagtcttatcttatggaaatggttctccttcaaatttggttggtcagaaagccattgaattatgtcaaaaagcaaatgatcaattggcaaactatattgcacaatatcccaatcgctttgtaggctttgcaactttacctatcaatgagcctgaagccgcagcgcgagaattcgaacgttgcatcaatgatttaggattcaaaggtgcgctcattatgggacgtgcacaagatggttttcttgatcaagacaaatatgacattattttcaaaacagctgaaaatttagacgtaccgatttatctacatcccgcgccagttaacagtgacatttatcaatcatactataaaggaaattatcctgaagtaactgcggcaacatttgcttgttttggttatggttggcacattgatgtcggcattcatgcaatacatctagtattatctggtatttttgatcgttatccaaagttaaatatgattattggacattggggtgagtttatcccattcttcttagaacgtatggatgaagctttattcgctgaacatttgaaccaccctgtaagctattactttaaaaataatttttatatcacaccgagtggcatgttaacgaagccacagtttgatttagtcaagaaagaagtaggtattgatagaattctttatgctgctgattatccatatattgagcctgaaaaattaggtgtatttttagatgaactgggtttaacagatgaagaaaaagagaaaataagttatacaaatggtgctaaattattaggtttatcacctaacaattaa

SEQ ID NO: 404824 - DNA, 705 bp, Staphylococcus aureus
atgactaaaattgtgttaatcacaggaggcaataaagggttaggctatgcaagtgcagaggcacttaaagcattgggttacaaagtttatataggttctcggaatgatgtaagaggacaacaagcatcacaaaaattaggtgttcattatgtacaattagatgttacaagtgactactcagtcaaaaatgcttataacatgattgctgaaaaagaaggccgtcttgatatcctcattaacaatgcaggtatatctggtcaattttcagcaccttccaaattgacacctcgtgacgttgaagaagtatatcaaacgaatgtattcggtatcgtacgaatgatgaatacattcgtccctctcttagaaaaatctgaacaacctgttgtcgtcaacgtatcaagtggtttaggttcatttggaatggttacaaaccccgaaacagctgaatctaaagtgaattcattagcttattgttcgtctaaatcggcagtaacaatgctaacgctacaatacgctaaaggattacctaacatgcaaatcaatgctgctgatccaggcgctacaaatactgatttagttggtgattttagtaataattccaaacacgtttctgaaggaatcaagccaatcattcaattagcaacgattggtgcagatggcccaacaggtacatttattaatggcgatggagagatgccttggtag

SEQ ID NO: 404825 - DNA, 558 bp, Staphylococcus aureus
atgcgaaaagatgcaaaagagaataggcaacgaattgaagaaatagcgcacaaactttttgatgaagaaggcgttgaaaacattagtatgaatcgtattgctaaagaactaggtatcggtatggggacattgtatcgacatttcaaagataaaagcgatttatgctactacgtcatacaaagagaccttgatatttttatcactcattttaagcaaattaaagatgactatcattctaattatgaggttatgcaagtgtcgttagattatcttttacaatttaaaatcgataataaggcactactgcaatgtattgaagcaggcaacaataaattacgtttttaccaaagcgcattttatcaagaattatttgatttttattatgacttatttaaaagcgatgacgacacttacacgaagttcaaaacagatatgctgttgcaatcattatcaactagtgtatttgccttccaaatagagcatcgccatatttcaattgaagcgtacagaaattatttattaaacatttatttagatgaggtgggacgtaatgactaa

SEQ ID NO: 404826 - DNA, 300 bp, Staphylococcus aureus
atgtctttaaataaagagcaaagacgcatcacagctgaagagttgcaagcacatttcgaagcatctaccttatcggttcaaatgattgctgaaaaactgaatgtcactacagaagatgtggaaaaagtattagctatgacagcgccactaggcatttttagtcatcaattacaacgatttattcatttagtatgggatgtcagagatgtaataaacgacaatattaaaggaaatggacaaacaccagaaccatatacgtatttaaaaggtgaaaaagaggactattggtttttaagataa

SEQ ID NO: 404827 - DNA, 822 bp, Staphylococcus aureus
atgaaagatattttagtaataggcgcaacagggaagcaaggtaatgcagttgtaaaacagttgttagaggatggatggtatgtaagtgcattaactagaaataagaataatcgtaaactttcagacataggacatccgcatttatcaatcgttgaaggtgatctgagtgataatgttagtttgcaatcagcgatgaaaggtaagtatggcttatacagtattcagccaatcgttaaagatgatgttagcgaagaattaagacaaggtatgaagataattgaaatagctgagcaagaaaatattcaacatattgtgtatagtactgcgggaggggttaatcgaaatcgaactggcccacactttgaagtactagcaaaaatagaaaatagattaatggaatctaatataaatgcaacagttatcaaaccatcattctttatggataattttttacgcattgctaaagtcgaagatgaacgtattacattaccagaatttattaatccgaatataaaattcacaatgatttcttctattgatatagctaaaattgcatcgtatatttttgcacatccacaaagctttacgcatcaatcaatagagattggttccgatgaagttacattaagtgaagcagcaacaatttttagtgaagtgacaggtaaatctactgttatagaaggagaatttgttagtggtgttgcagaaaagcaatggttggaagaaaaaggttatgaagtagactttgaattaatggctgaaataaatccaacaagattatcattaagtgattggcttaaagtccaaaactataataagtaa

SEQ ID NO: 404828 - DNA, 378 bp, Staphylococcus aureus
atgattcaatcaatgtggtttaatttgcatgtgcaagatttagaaaagagcgcacagttttataaagcgttaggatttaaaataaatagaaacccacaaatgttagataaaatggtcggcattcaaataggtcaaacaaccgtaattttaatagaaaacaagcattttcaaaatgtaagtcagcaaagccttaatactgaaccaaatgaagtgatgatttctctaggtgtgaacacaaatgaagaagttgaccagttggtgaataaagtgaaagaagcgggtggcacagtcgttcaagaaccaacagtaagccaagggttttatggagcaatgttcaaagatcttgatggacaccattttaattttttggtctgctaa

SEQ ID NO: 404829 - DNA, 231 bp, Staphylococcus aureus
atgaaaattttagatagaattaatgaacttgcaaataaagaaaaagtacaaccacttactgtagctgaaaaacaagaacaacatgcattgcgtcaagactacttaagcatgatccgaggacaagtattaacaacattttccacaataaaagtggttgatccaatcggtcaggatgtcacaccagataaagtttatgatcttcgccaacaatacggttatattcaaaattaa

SEQ ID NO: 404830 - DNA, 321 bp, Staphylococcus aureus
gtgagcgagacagatgaacctcaggggtttgaacgcacgcataatatattaaatattaatcagagtagtctgggtgtagtgacatacattacaaataaattaaagtcgacgttgaagcaacacataataattgctcgtggtaaaaagcgaatcgactatcgactgtcgtataacttttacactacgtattatgataatgtagaaatcaagaaaatcgactgtgaatatacctatgctatgcccattgcaattttaataagacacacgatgtcattcgacaatgctcatttctttgctcagttacgtcatcctgtcttataa

SEQ ID NO: 404831 - DNA, 588 bp, Staphylococcus aureus
atgttaggtagtgaacaaatgatggaaagtaaatccatagatccaagaatcgttagaaccaaacaattgcttgtcgatgcttttcttaaaatttctagagaaaagaaattatctcaaattacagttaaagatatcactgatattgctacgctaaatcgtgcaacattttacgctcatttcactgataaagaagacctcctagactacacattatctgtaaccattttaaaagacttgaatgataatttgagcatttctaatgtcattaatgaaaaggttctgcgtaatattttcatttcaattgcgagttatatcaaagatgctgcaaagtcttgcgaattaaatagtgaagcattttgcaacaaagcacatcaacgtattaataatgaattagaagatatttttgcgattatgttagaaaacagctatccggagcatcaacgagatatcattgtaaatagtgcgagttttttagcagctggtatctcaggcttagcattacattggtttaacacgagtcaagagacagccgatgtgtttatcgatcgcaaccttccatttttaattcatcatatagcacatttttaa

SEQ ID NO: 404832 - DNA, 1056 bp, Staphylococcus aureus
atgacatcaattaaaacaattacacccaaagattttatatttagagttttatcaggtgtcgccataggtattgttgcgggtttagttcctaatgcgatacttggagaaatttttaaatactttatggattatcatccgatttttaaaacgttattaggcgttgtcgttgcaattcaatttacagtacctgctttgattggtgcattggttgccatgaaatttgacctatcgccattagcaattgctgttgtggcaagtgcagcatatgtaggaagcggtgcagcgcagtttaaaaatggtgcttggatgattacgggtattggtgatttaattaatacaatgattacagcagcgattgcagtgttattcattttacttattcaacatcgcgtaggtagtatggcattgattgtattcccaacagttgttggcggtatttcaggtgcaattggtgttttaatattgccgtatacgaaaatgattacaacagccatcggtaatatggttaatggttttacagaattacaaccgattgtcatgagtattttgatttcaatggtatttagtcttattattatttcgccactatcaactgtggccattgcctttgcgataggtattacaggtttagcagctggatcagcgtcaattggtatctccgcgactgaagcagtattgataattggtacaagtaaagtgaatcgtttaggggtgccgttatccgtcttctttggaggcgttaaaatgatgatacctaatatggtgaaatatccaattcttatgttaccaatattaacgacagccattgtatcaggtttggtatcagcattagtaggtattcatggaacgaaagagtcagctggatttggttttataggaatggtaggaccgattaatgcatttaaatttatggaggttgattctgcttggttgagtgtcttactaattgtagtagcgttctttgttgtaccatttgtaacagcttggcttgcagatatcatttatcgtaaagtgtttcgtttatatactaatgatatttttaaattcatgggataa

SEQ ID NO: 404833 - DNA, 702 bp, Staphylococcus aureus
atgaaaaagacaattatggcatcatcattagcagtggcattaggtgtaacaggttacgcagcaggtacaggacatcaagcacacgctgctgaagtaaacgttgatcaagcacacttagttgacttagcgcataatcaccaagatcaattaaatgcagctccaatcaaagatggtgcatatgacatccactttgtaaaagatggtttccaatataacttcacttcaaatggtactacatggtcatggagctatgaagcagctaatggtcaaactgctggtttctcaaacgttgcaggtgcagactacactacttcatacaaccaaggttcaaatgtacaatcagtaagctacaatgcacaatcaagtaactcaaacgttgaagctgtttcagctccaacttaccataactacagcacttcaactacttcaagttcagtgagattaagcaatggtaatactgcaggtgctactggttcatcagcagctcaaatcatggctcaacgtactggtgtttcagcttctacatgggctgcaatcatcgctcgtgaatcaaatggtcaagtaaatgcttacaacccatcaggtgcttcaggtttattccaaactatgccaggttggggtccaacaaacactgttgaccaacaaatcaacgcagctgttaaagcatacaaagcacaaggtttaggtgcttggggattctaa

SEQ ID NO: 404834 - DNA, 489 bp, Staphylococcus aureus
atggctataaacataattgaatataataggtcttataaggaagagctaatcgagtttattttatcgattcaaaaaaatgaatttaatataaaaattgatagagatgatcaacctgatttggagaacatcgaacataactatttgaataatggagggcaattttggcttgcaataaacaatcatcaaaatattgttggtactataggtttgattagactagataataatatgtctgcacttaaaaaaatgtttgttgataaaggttataggaatttaaaaataggtaaaaaacttttagataaagttataatgacatgtaaagaacaaaatatcgatggtatttatttaggaacaattgataaatttattagtgcacagtatttttattctaataatggcttccgtgaaattaagcgaggagatttaccaagtagttttcctaaattagatgtagataataggttttattacagaaatttaaaagattaa

SEQ ID NO: 404835 - DNA, 1812 bp, Staphylococcus aureus
atggatacaaaagactttaaacgtttagaaaaaatgtattccccgcgatacttacctggattagatggattgagggcattcgcagttataggaatcattatttatcacttgaatgcacaatggttaagtgggggctttttaggagtagatacattcttcgttatttcaggttatttaataacaagtttgttgataagtgagtattatcggacgcaaaaaatcgatttgctagagttttggaagcgacgattgaaacgactcattccggcagtgttatttttaatctgtgtcgtgcttacgttcacactgatatttaaaccggaattgattatacaaatgaaacgagatgctattgcagctatattctatgtttcaaactggtggtacatttcacagaatgtagattattttaaccaatttgctattgaaccactcaaacatttatggtctttagccattgaagaacaattttacttgcttttcccattggttatcacgttcttattacatagatttaaaccgagaaatattattcaaacgctatttattgtatcgttgatttctttaggacttatgatagtgattcatttcatcactggagataattcacgtgtgtattttgggacagatacacgactgcaaactttattgcttggttgtatattagcatttatttggcctccgtttgctttgaaaaaagatatttctaaaaagattgtcgtatcattagatattatagggatatctggttttgcggttctaatgactttgttctttatagttggagaccaagatcaatggatctataatggaggattttacattatatcatttgcaactttattcattattgcaattgcggtacatccttctagtttatttgctaaatttttaagtatgaaacctttactaattataggtaaacgatcatatagcttatacttatggcattatcctatcattgtttttgtgaacagttattacgtacaaggacaaataccggtatacgtttatattatagaaattttgttaacagcgttaatggctgaaatttcgtatcgctttattgaaacacctatacgtaaaaaaggatttaaagcttttgcatttttacctaaaaagaaggggcaatttgctagaacagtgttagttatcctattattggttccgtctatcgttgtgctcagtggacagtttgatgcacttggcaaacaacatgaagccgagaagaaagagaagaagacggaatttaaaacaacgaagaaaaaagtcgttaaaaaagataagcaagaggataagcagacagcgaatagcaaagaggatattaaaaagtcatcaccactattaattggtgactcggtcatggtggatattggtaatgtctttactaagaaaataccaaatgcacaaattgatggtaaagttggacggcaactcgttgatgctacaccaattgtgaaatcgcaatataaagactatgctaaaaaaggtcaaaaagttgtagtagagcttggtacaaatggggcatttacgaaagatcaattaaatgaactattggatagttttggaaaagcagacatatatttagtttctattagagtacctagagattatgaaggtagaataaataaattaatttatgaggcagctgaaaagcgctctaatgtacatctagtcgattggtataaagcttctgcaggtcatccggaatactttgcatatgacggtattcacttagaatatgcaggtagtaaagcgctgactgatttgattgtaaaaacgatggaaacacatgctacaaataagaaataa

SEQ ID NO: 404836 - DNA, 768 bp, Staphylococcus aureus
atgaaaaaaatcgttacagctacaatcgctacagcaggacttgccactatcgcatttgcaggacatgatgcacaagccgcagaacaaaataacaatggatataattctaatgacgctcaatcatacagctatacgtatacaattgatgcacaaggtaattatcattacacttggacaggaaattggaatccaagtcaattaacgcaaaacaacacatactactacaacaactacaatacttatagttataacaatgcatcttacaataactactataatcattcatatcaatacaataactatacaaacaatagtcaaacagcaacaaataactattatactggtggttcaggtgcaagttatagcacaacaagtaataatgttcatgtgactacaactgcagcgccatcttcaaatggtcgttcaatttctaatggttatgcatcaggaagtaacttatatacttcaggacaatgtacttattatgtatttgatcgtgttggtgggaaaattggttcaacatggggtaacgcaagtaattgggctaacgcagctgcatcatctggctatacagtgaacaatacaccaaaagttggtgctatcatgcaaacaacacaaggctattacggtcatgttgcttacgttgaaggcgttaacagcaacggttctgttcgtgtttcagaaatgaactatggacatggtgctggtgtggttacgtctcgtacaatttcagcaaaccaagcaggttcatataatttcattcattaa

SEQ ID NO: 404837 - DNA, 498 bp, Staphylococcus aureus
atgaaaaccatgaaaaaatatattaaaacagcatttttttgtagtatgtattggttaattgttcaactaaatatagcaaatttaggtacaagaattcctgataagtattttcgtcagaagtacataatatttaaatcatttaactttgagaagcatggaaaattttggaacaaatggttttacgtaagaaaatggaaacataagattttagatggtcatcagcttaatcaaaatatatatgatcagcgtcatttaatgacaatcaatactgatgaaattgaaaaaatgattatagagacaaagagggcagagttgattcattggatatcgatacttccagtcatcatattcaataaaggccctcgtttagtaaagtatataaatattttctatgcaatgatagctaatgttccaatcattattgtgcaacgctataatcgaccgagattaacgcagttactacgcatattaaaacgaagaggtgaacgtcatgactaa

SEQ ID NO: 404838 - DNA, 1494 bp, Staphylococcus aureus
atgactaaacatatcatcgttattggtggtggcttaggtgggatttctgcagcaattcgaatggcacaaagtggctattcggtctcattatatgaacaaaataatcatataggaggcaaagtgaatcgtcatgaatcagatggctttggctttgatttaggtccatctattttaacgatgccttatatttttgaaaaattattcgaatatagcaagaagcaaatgtcagactacgttacaatcaagcgattgccacatcaatggcgtagcttttttccagatggaacgactatcgatttgtatgaaggtattaaagaaacaggtcagcataatgcgatattgtcgaaacaggatatagaggaactgcaaaattatttgaattatacaagacgaatcgatcgtattactgaaaaagggtatttcaactatggtttagatacactatctcaaattattaaatttcatgggccattaaatgctcttattaattatgattatgtacatactatgcaacaggccatagacaagcgtatctcgaatccatacttgcgacaaatgttaggctattttatcaaatatgtaggttcttcatcatacgatgcgccagctgtattatctatgttattccatatgcaacaagagcaaggcctttggtatgtagaaggtggaatccatcatttagccaatgccttggaaaagctagcgcgtgaagaaggtgtcacaattcatacaggtgcacgtgtggacaatattaaaacatatcaaagacgtgtgacgggtgtcagattagatacaggtgagtttgtaaaggcagattatattatttcaaatatggaagtcatacctacttataaatatttaattcaccttgatactcaacgattaaacaaattagagagggaatttgagccggcaagctcaggatatgtgatgcatttaggtgttgcttgccaatacccgcaattagcacatcataatttcttttttacggaaaatgcttatctcaattatcaacaagtttttcatgaaaaggtattgccagatgatccgaccatttatctagtaaatacgaataaaactgatcacacacaagcgccagtaggttatgaaaatatcaaagtcttaccacatattccatatattcaagatcagccttttaccactgaagattatgcgaagtttagggataaaattttggataaattagaaaaaatgggacttactgatttaagaaaacacattatttatgaagatgtttggacaccggaggatattgaaaaaaattatcgttctaatcgtggtgcaatatatggtgttgtagcagataaaaagaaaaacaaaggatttaaatttcctaaagaaagtcagtattttgaaaacttgtactttgtaggtggatcagtaaatcctggtggtggcatgccaatggttacattaagtgggcaacaagtcgcagacaaaataaacgcgcgagaagcgaagaataggaagtga

SEQ ID NO: 404839 - DNA, 1128 bp, Staphylococcus aureus
atgaaatggttatcacgaatattaacagtaatagtgaccatgtctatggcgtgtggtgcattgatatttaatcgtagacatcagctaaaggcgaaaacgctgaacttcaatcataaagcattaacaattattattccggctagaaacgaagaaaaaagaataggtcatttactacattcgataatacaacagcaagttccagtagatgtcattgttatgaatgacggatcgacagatgaaacagcacgtgtagcacgttcatatggtgcgactgtagtagatgttgttgatgatactgacggcaaatggtatgggaaatcacatgcttgttatcaaggtgtgacgcatgcatgtacgaatcgcattgcctttgtagatgctgatgtaactttcttaaggaaagatgctgttgaaacgttgattaatcagtatcaattacaaggtgaaaaaggattgttaagcgtacagccttatcatataacaaagcgtttctacgaagggttttcagcgatatttaatttaatgacagtcgttggtatgaatgtattttctaccttagacgacggtcggactaaccagcatgcatttggaccggtgacattaacaaataaagaagattattatgcaactggaggtcataaaagtgcaaaccgtcatattattgaaggatttgctttaggaagtgcatatacttcacaatcattgcccgtaacagtttatgaagggtttccatttgttgcatttcgcatgtatcaagaaggatttcagtcattacaagaaggatggacaaagcatttgtcaactggggcaggtggcacaaagcctaagatcatgacagcaattgtgttgtggttgtttggttctatagcgagtattttagggctatgtcttagtttaaaatatcgccaaatgtctgtaagaaaaatggtagcactttacttgagctatactacacaatttatttatctgcatcgaagggtcggccaattttctaatttattaatggtatgtcatccattgttatttatgttttttactaaaattttcatccaatcttggaaacaaacgcatcgttatggtgtagttgaatggaaaggtcgtcaatattctatatctaaagaacaataa

SEQ ID NO: 404840 - DNA, 864 bp, Staphylococcus aureus
atgacaatgatggatatgaattttaaatattgtcataaaatcatgaagaaacattcaaaaagcttttcttacgcttttgacttgttaccagaagatcaaagaaaagcggtttgggcaatttatgctgtgtgtcgtaaaattgatgacagtatagatgtttatggcgatattcaatttttaaatcaaataaaagaagatatacaatctattgaaaaatacccatatgaacatcatcactttcaaagtgatcgtagaatcatgatggcgcttcagcatgttgcacaacataaaaatatcgcctttcaatctttttataatctcattgatactgtatataaagatcaacattttacaatgtttgaaacggacgctgaattattcggatattgttatggtgttgctggtacagtaggtgaagtattgacgccgattttaagtgatcatgaaacacatcagacatacgatgtcgcaagaagacttggtgaatcgttgcaattgattaatatattaagagatgtcggtgaagattttgacaatgaacggatatattttagtaagcaacgattaaagcaatatgaagttgatattgctgaagtgtaccaaaatggtgttaataatcattatattgacttatgggaatattatgcagctatcgcagaaaaagattttcaagatgttatggatcaaatcaaagtatttagtattgaagcacaaccaatcatagaattagcagcacgtatatatattgaaatactggacgaagtgagacaggctaactatacattacatgaacgtgtttttgtggataagaggaaaaaggcaaagttgtttcatgaaataaatagtaaatatcatagaatatag

SEQ ID NO: 404841 - DNA, 1509 bp, Staphylococcus aureus
atgaagattgcagtaattggtgcaggtgtcacaggattagcagcggcagcccgtattgcttctcaaggtcatgaagtgacgatatttgaaaaaaataataatgtaggcgggcgtatgaatcaattaaagaaagacggctttacatttgatatgggtcccacaattgtcatgatgccagatgtttataaagatgtttttacagcgtgtggtaaaaattatgaagattatattgaattgagacaattacgttatatttacgatgtgtattttgaccacgatgatcgtataacggtgcctacagatttagctgaattacagcaaatgctagaaagtatagaacctggttcaacgcatggttttatgtcctttttaacggatgtttataaaaaatatgaaattgcacgtcgctatttcttagaaagaacgtatcgcaaaccgagtgacttttataatatgacgtcacttgtgcaaggtgctaagttaaaaacgttaaatcatgcagatcagctaattgaacattatattgataacgaaaagatacaaaagcttttagcgtttcaaacgttatacataggaattgatccaaaacgaggcccgtcactatattcaattattcctatgattgaaatgatgtttggtgtgcattttattaaaggcggtatgtatggcatggctcaagggctagcgcaattaaataaagacttaggcgttaatattgaactaaatgctgaaattgagcaaattattattgatcctaaattcaaacgggccgatgcgataaaagtgaatggtgacataagaaaatttgataaaattttatgtacggctgatttccctagtgttgcggaatcattaatgccagattttgcacctattaaaaagtatccaccacataaaattgcagacttagattactcttgttcagcatttttaatgtatatcggtatagatattgatgtgacagatcaagtgagacttcataatgttattttttcagatgactttagaggcaatattgaagaaatatttgagggacgtttatcatatgatccttctatttatgtgtatgtaccagcggtcgctgataaatcacttgcgccagaaggcaaaactggtatttatgtgctaatgccgacgccggaacttaaaacaggtagcggaatcgattggtcagatgaagctttgacgcaacaaataaaggaaattatttatcgtaaattagcaacgattgaagtatttgaagatataaaatcgcatattgtttcagaaacaatctttacgccaaatgattttgagcaaacgtatcatgcgaaatttggttcggcattcggtttaatgccaactttagcgcaaagtaattattatcgtccacaaaatgtatcgcgagattataaagatttatattttgcaggtgcaagtacgcatccaggtgcaggcgttcctattgtcttaacgagtgcgaaaataactgtagatgaaatgattaaagatattgagcggggcgtataa

SEQ ID NO: 404842 - DNA, 1155 bp, Staphylococcus aureus
atgatctctaacaaattagcaaatatccctgatagttatttcgggaaaacgatgggacgtaaaatcgaacatggaccattgccattaattaatatggcagttggaatccctgatgggcccacgccacaaggtattattgatcattttcaaaaagcactaactattcctgaaaatcaaaaatatggtgcttttcatggtaaagaagcgttcaagcaagctattgtagatttttatcaaagacaatataatgtgacgttagataaagaagatgaagtatgcattttatatggtacaaaaaatggattagtggcagtaccaacatgtgttatcaatccaggagactatgtattactacctgatccaggctacacggattatttagcaggtgtacttttagctgatggcaagccagtcccgcttaatttagaaccgccacattatttgccagattggtccaaagttgattcacaaataatagataaaacaaaactcatttatttaacgtatccaaataatccaactggatcgacagctacgaaagaagtttttgatgaagcgatagctaaatttaaaggtacagacactaaaatcgtgcatgattttgcttatggtgctttcggtttcgacgctaaaaatcctagtatacttgcttcggaaaatgggaaagatgttgcgattgaaatttattccttgtctaaaggttataacatgtcaggttttagagtcggttttgcagttggtaataaagatatgattcaagctttgaaaaagtaccaaacgcacacaaatgctgggatgtttggtgcattacaagatgccgcaatatatgctttgaatcattatgatgattttttagaagaacaaagcaatgtatttaaaacacgtcgtgaccgattcgaagccatgcttgcaaaagctgatttgccatttgttcatgctaaaggtggcatatatgtatggttggaaacaccgcctggttatgacagcgagcaatttgagcaatttttagtgcaagagaagtcaatacttgttgctccagggaaaccatttggagagaatggtaatcgttatgtgagaatttcattggcgttagatgaccagaaattagacgaagctgcaataagattaacagaactagcatatttatatgaataa

SEQ ID NO: 404843 - DNA, 1029 bp, Staphylococcus aureus
atgaataataaagttaagggtgatgttaaaatgacaaaaattaaaatcatgagtgtacgtgatgaagatatgccttatatcaaggcgtgggcagagaaacatcatgttgaggtagatattactaaagaagcattaactgatgacaatgttgaaggtgtcgctggttatgatggcttatcgctatcacaacaaataccattatcagagcatgtttataaacgattaaatgaactaggtattaaacaaatcgcacaacgtagtgctggatttgatacatatgatttggagttagcaaacaagtataactttattgtgtcaaatgtgccgtcatactctccgaattcaattgcggagtttgctgtgaaccaggctattaatgtggttcgtcattttaatcaaattcaaacgaaagtgcgggagcatgattttagatgggaacctactattttatcgaaatccattaaagatttaaaagtagctgttattggtacaggtcgaattggccgtgtagtagccgatatatttgccaatggttatcaaagtgatgtggtcgcatacgacccgtttcctaatgctaaaattgcaacgtatgtcgattacaaagatacgattgaggaagcggttgaaggtgctgatatcgtgacattacatgtacctgcaacgaaatataatcattatctatttaatgctgaattatttaaacattttaaaaagggcgcagtatttgtcaattgtgcgagaggttctttagtagatactaaggcgttattagacgcattagacaatggtgtgattaaaggtgcagcacttgatacgtatgaatttgaacgcaaacttttcccaagtgatcaaaggggcaaaacactgaacgatccattgttagaatcgttgattgacagggaagatgtcatattaacaccacatattgcgttttatactgaagctgcagttaaaaatctaattgtcgatgcattagatgcaacattagatgtattgcagactggagatactaggttacgagtaaattaa

SEQ ID NO: 404844 - DNA, 207 bp, Staphylococcus aureus
atgtcacaagaaattttaaatgttgaaggtatgagctgtggtcactgcaaaagtgctgttgaatctgcattaaataatattgacggtgtcacttcagctgacgttaaccttgaaaatggtcaagtaagtgttcaatatgatgacagtaaagttgctgtatctcaaatgaaagacgcaattgaagatcaaggttacgatgtcgtttaa

SEQ ID NO: 404845 - DNA, 2409 bp, Staphylococcus aureus
gtggctaatacgaaaaaaacaacattagatatcactggtatgacttgtgccgcatgttcaaatcgtatcgaaaagaaactgaataaacttgatgacgttaatgcccaagtgaatttaactacagagaaagcaactgttgagtataaccctgatcaacatgatgtccaagaatttattaatacgattcaacatttaggttacggtgtcgctgtagaaactgtcgaattagacattacaggtatgacttgtgctgcatgctcaagccgtattgaaaaagtgttaaataaaatggacggcgttcaaaatgcaacggtcaatttaacaacagagcaagctaaagttgactattatcctgaagaaacagatgctgataaacttgtcactcgcattcaaaaattaggttatgacgcgtctattaaagataacaataaagatcaaacgtcacgcaaagctgaagcgctacaacataaattgattaagcttatcatatcagcagtattatctttaccactattaatgttaatgtttgtacatcttttcaatatgcatataccagcactatttacgaatccatggttccaatttattttagctacacctgtacaatttattattggatggcaattttatgtaggtgcttataaaaacttaagaaatggtggcgccaatatggatgtacttgttgctgttggtacaagtgcagcatatttttacagtatttatgaaatggttcgttggctaaatggctcaacaacgcaaccgcatttatactttgaaacaagcgccgtactaattaccttaatcttattcggtaagtatttagaagctagagcgaagtctcaaacaaccaatgcgcttggcgaattattaagtttacaagctaaagaagcacgcattttaaaagatggtaatgaagtgatgattcctctaaatgaagtacatgttggagatacacttatcgttaaaccaggtgaaaagatacctgttgatggcaaaattattaaaggtatgactgccatcgacgaatctatgttaacaggtgaatctatccctgttgagaagaatgttgatgatactgtaattggttcaacgatgaacaaaaacggtactattactatgacagcaacaaaagttggcggggacactgcgttggcaaatattattaaagttgtcgaagaagctcaaagttctaaagcgccgattcaacgattggcagatattatttctggttatttcgttcctatcgttgttggtatcgcactattaacatttatcgtgtggattactttagttacaccaggtacatttgaacctgcacttgttgcgagtatttccgttctcgtcattgcttgtccatgcgcattgggacttgctacaccaacttctattatggtaggtactggtcgcgctgctgaaaatggtattttatttaaaggtggcgagtttgttgaacgcacacatcaaattgataccatcgttttagataagacgggtaccattacaaatggtcgtccagtcgtgacagattatcatggtgacaatcaaacgctacaactacttgctactgctgaaaaagattctgaacacccattggcagaagccattgtcaattatgcaaaagaaaagcaattaatattaactgagacaacaacatttaaagcagtacctggccatggtattgaagcaacgattgatcatcaccatatattggttggtaaccgtaaattaatggctgacaatgatattagcttgcctaagcatatttctgatgatttaacacattatgaacgagatggtaaaactgctatgctcattgctgttaattattcattaactggtatcatcgcagtggcagatactgtcaaagatcatgccaaagatgctataaaacaattgcatgatatgggcattgaagttgccatgttaactggcgataataaaaacactgctcaagccattgcaaaacaagtaggcatagatactgttattgcagatattttaccagaagaaaaagctgcacaaattgcgaaactacagcaacaaggtaagaaggttgcgatggttggtgacggtgtaaatgatgcacctgcattagttaaagctgatatcggtatcgccattggtacaggtacagaagttgccattgaagcagctgatattactattcttggtggcgacttgatgcttattcctaaagccatttatgcaagtaaagcaaccattcgtaatattcgtcaaaatctattttgggcattcggctataatattgccggtatccctatagctgcattgggcttacttgcgccatgggttgctggtgctgcaatggcactaagttcagtaagtgttgtcacaaacgcacttagattgaaaaagatgcgattagaaccacgccgtaaagatgcctag

SEQ ID NO: 404846 - DNA, 192 bp, Staphylococcus aureus
atgagaatattaattacaggcacagttgctatcttaatcattctaggtttggtcaaaacgatacaagattacgaaatgacaaacgacacgagtcgtcagttgtcagacaacaaagatgatgataaagtcatccatcttaataattttaaaaatttacatgcgaaagaatttaacccatctgatttcttttaa

SEQ ID NO: 404847 - DNA, 600 bp, Staphylococcus aureus
atgactgaaaaagaaaaaatgttagcagaaaaatggtacgatgcaaactttgatcaatacttaatcaatgaacgtgcacgagcgaaagatatttgctttgaattaaatcatacaagaccgagtgctacaaataaaagaaaggaattaattgatcaattatttcaaacaacaacagacaatgtaagtatttcgattccttttgatacagattatggttggaacgttaaactaggaaaaaatgtctatgtaaacaccaattgttactttatggatggtggacagattacaattggcgataatgtttttataggacctaattgtggattctacacagcgacacatccacttaatttccatcatagaaatgaaggttttgaaaaagccggacccattcatattggcagtaatacttggtttggcggtcatgtagccgtgttaccaggggtgacgattggagaaggcagtgtgattggtgctggtagtgttgtcactaaagatattccgccacacagcttagcggttggaaacccttgtaaagtcgttcgtaaaattgataatgacctaccatccgaaacattaaatgacgaaacgataaagtag

SEQ ID NO: 404848 - DNA, 1545 bp, Staphylococcus aureus
atggtagtagaatttaaaaatgaacctggttacgatttttcagtccaagaaaatgtggatatgtttaagaaagcattgaaagacgtggaaaaagaattaggtcaagacataccattagtgattaatggagagaagattttcaaagatgacaaaattaaatcaatcaatcctgcagacacatcacaagtgattgcaaatgcatcaaaggcaacaaaacaagatgttgaagatgcgtttaaagcagcaaacgaagcttataaatcttggaaaacatggtcagcaaatgatcgtgcagagcttatgttacgtgtttcggcaattattcgtcgtcgaaaagcggaaattgcagcaattatggtttatgaagcaggtaagccatgggatgaagcagttggtgatgcagctgaaggtattgattttattgaatactatgcacgttcaatgatggacttggctcaaggtaagccagtacttgatcgtgaaggtgaacacaataaatatttctataaatcaattggtacaggtgttacaattccgccgtggaacttcccgtttgcgattatggctggtacaactttagcaccagttgtggcaggtaatacagtgttattgaaacctgctgaggatacaccttatatcgcttataaattaatggaaattttagaagaagcaggattaccaaaaggcgtagttaactttgttcctggtgatccgaaagaaattggtgattacttagttgatcataaagatacgcatttcgttacatttacaggatcacgtgcgacaggtactagaatttatgaacgtagtgccgttgttcaagaaggtcaaaacttcttgaaacgtgttatcgctgaaatgggtggtaaagatgccattgtagttgatgaaaatattgatacagatatggcagcagaagctattgtaacgtcagcatttggtttttctggtcaaaaatgttcagcatgttcacgtgcaattgtgcataaagacgtttatgacgaagtattagagaaatcaatcaaattaacaaaagaattaacgttgggcaatactgtagacaatacgtatatgggcccagttattaataaaaaacaatttgataagattaaaaattatattgagattggtaaagaagaaggtaaattagaacaaggtggcggcactgatgattcaaaaggttactttgtagaaccaacaatcatttcaggacttaaatctaaagatagaatcatgcaagaagaaatttttggtccagttgttggctttgtgaaagttaacgattttgatgaagcaattgaggttgcaaatgatacagattacggtttaactggtgcagtgattacaaataatcgcgagcattggattaaagcggtaaacgaatttgatgtaggcaatttataccttaacagaggctgtacttcagcagttgttggataccatccatttggtggtttcaaaatgtcaggtacggacgctaaaacaggtagtccagactacttattacacttcttagaacaaaaggttgtttcagaaatgttctaa

SEQ ID NO: 404849 - DNA, 549 bp, Staphylococcus aureus
atgaaagagactgatttacgagttataaagacaaaaaaagcattgtcgagtagcttgctacaattgttagaacagcaattattccaaacgattactgtcaatcaaatttgcgacaacgcactcgtacaccgtacaacattttataaacatttttatgataaatatgatcttctagagtacttgttcaatcaattgactaaagactactttgctagagatatcagtgaccgtcttaatcatccattccaaacgatgagtgatacgattaataataaagaggatttgagagaaatcgcagaattccaagaagaagacgctgaatttaataaagtattaaaaaatgtctgcattaaaattatgcataacgatatcaaaaataatagagaccgtatcgatattgacagcgacatcccagataatctcatattttatatttatgactcgttgattgaaggttttatacattggataaaagatgaaaaaattgattggcctggcgaagatattgataacattttccatagattaatcaatattaagattaaatag

SEQ ID NO: 404850 - DNA, 2490 bp, Staphylococcus aureus
ttggcaaaatttttatataagatggggacattcatcgcaaaacataaatggtccgcggtcattgcatggatagtgattgtagctgcaatattgataccacttgctacaaatgcaccgaaatttgacaatgatattaaaatgacaggattagagtcgttagatacgaataaaaagattgaaaaacattttaatcaagatagtgaaaaggcacaaatacgtgttgtctttaagacgactaaagatgatggtattgtgcaaccgaacattactaaagatattaagaaaacgttagatgatattaaaaaagatgacaagcacattgataaaatatcagatccttatgaaaataagcaaattagtaaagataaaacaactgcatttgcagatatcacatatgacgttagtcaaacatctttaaaagatggctctagagataatgttaaaagtcatttgaaagacttacgtgacaatcataatgtacaaacagagttaactggtacaggaatgacatctacagaagtaggcggtaattctgaactagttggtattattgttgcatttgttgtactgttaatcacattcggttcagtcattgctgcaggattaccaattataagtgcattgattggtctagcctctggtgtaggtattatcagtttgttaacttatgcattcgatataccaaatgtcacactgacattagccgtaatgattggactagcagttggtatcgattatgcattatttattttattcagatatcgacaagttatgaaaactgaaacagattacattaaaggcattggtcttgcaataggaacagcaggtagtgcagttgtttttgctggtgtaacagttgtaattgcagtatgtggtttatcattagtaggcattgacttcttagcggtaatgggatttgcttcggcaattagtgttgtttttgcagtacttagcgctttaactttattacctgcattaataagcattttccataaacgcattaaagtgaataaattacagtctaaattcaaaaaagatattgatacgccatggtctaaatttattacaggaaatgcacttgcggcagtattactaggtttaatcatattagtagcagctgcaataccagttagtcatatgcgacttggtattccagatgacggtgttaaaccagcagattctacacagaaaaaagcttacgatattatctcggataaatttggtgaaggatttaatggccaaataccgatgttgataaatgtgaaagataaaaaggatgatccacaaggattacaacaagatttacagtctgtatataaagatattaaagataagaaaaatgtagatatcgttacgccaccacaaatgagtaaagataatgattacgctttgatggtcgtgatacctaagcaagggcctaatgcagagagtacaaatgatttagtgcatgatttacgagattatcataaagatgcacaagataaatatgggttcaaaacggagatttcgggacaaagtgtcattaatattgatatgtctaaaaagttaaatgaggcgatacctttatttgcctcagtcattgttgtattagcatttttcttattaatgattgtcttccgttcaattctaataccattaaaagcagttttaggattcgtcttgtcattaatggcaacattaggatttacaacattagtaatgcaagatggttttatgaaaggtctgtttggtattgaaacgacaggaccaatgctagcatttttaccggttattactataggtatcttatttggattagcgatggattatgaagtcttccttatgtcgcgaattcatgaagaatatagtaaaacaggggataatgattattctatcaaagtaggattgaaagaaagcggtcctgttattgtagcagctgcattaattatgtttagtgtcttctttgcgtttgtattccaagaagatgtcatgattaaatcaatgggtatggcattagcgtttggtgtactctttgatgccttcgtagtcagaatgatgttaattcctgcattaacgaaattgtttggaaaaggttcgtggtatttaccagcatggttgaatcgcattattccacgagttgatattgaaggacatgcacttgaaaaatataaaacggttgaatcacaggaatctgaagctaaagatagtaaggaaacatacgacacaacctttaaagtatatccacaaggtgcaacaaatgtatcgaaacatcaagatgcacatgggcaagatgatgcacattcaatagtactagatgataaaacgatggcattgtaccaagaagtgaaacagcaatcagcaagttcattgttcttatatgatgctttaatagattatcaaaacaagcatcaactaaattcaaaacaacaagcaacgaatatagaacagttgaataaaaatattgaaaagctcaatcaattgttagaaaaaaatctacgaaataaatcataa

SEQ ID NO: 404851 - DNA, 228 bp, Staphylococcus aureus
atgttaaacattaaaaatggtgaaatgaataaggcttataaaataaagcgaatggatattgctaatgagaatatgttgtatcgtctaagtgcctttgggttaacagatgacgctatcataacgattaaacaaaaatgtttatttaaagggccatgtattattgaagtaaacggacaacagttaagtattagacattgcgatgcttgttctattgcattagaagaatag

SEQ ID NO: 404852 - DNA, 1995 bp, Staphylococcus aureus
atggaaaattattgtattttaggaaatcctaatgttggtaaaacatctttgtttaacgctttaactggttcgtatgaatatataggcaactggagtggcgtaacggtagagaaaaaagtagggaaacttaaagaaaatgtaggacaattaattgatttaccaggtacatatgatttatcgccgatttctaaagatgaaactgtagtgacagactatttattaaacgattcattttcaggaatcattaacattgttgatgcgagtcaactaaaaagaaatatgcaattaacagtacaattgttagaacttaatcaaccaatatacatcggattaaatatgattgatgtagctacaaagcgcgggataaaaatcgattatcataaattgatgaaaaagttaaaaacacctatttttccagttgtggcacgtacaggcaaaggaacaaaatatttacttggcgaaataaagcatctaggggaagggtatcaaccgcattttaaaatcaattatggtgagaagattgaagagacaattaaaaatatgtgtcaaataataatgacagagacatctcatgataagtatcaagctaggtttattgcgattcaattcttattaaataacatgcaaattgcaaacgaacttaattcagaggttgtaaataaattgtcgagtttacgtgatcaagttgctgaacaagtaggggctgtatctgttcgtcgagagatggagcgtatacgcaatcattatattgagacgttattgcaagacgtggtaacgtatccagatgaagataagcaatatttcagctctagaatagacaagatattaacacataaatatatagggatgcctatctttctagcaattatgtggttgatctttcaaactacatttacatggattggcacacctttgtcggatcaactcgatgcatttataggtggtacatttacagatagtgtgaagacgattatgaattatcttggtgttataccatttttacaagatttaattacagatggcattattgctggtgtaggatcagtattagtctttgtaccacaaattgttgtgctctttttctttatatctttattagaagattcgggttatatggcacgtattgcggttttaatggatcgtattatggaatcgttcggtttaagcgggaagtcttttataccaatgattatcggatttggttgtaatgtaccgagtattatggctgcgcgcagtattgaaaatgaaaaagagcgtttaacaacgatattaattgcaccattcatgtcatgctctgctagactgccagtgtatgcgttgttcgtaggtatctttttcaaagagaatcaatctttagtagtattaagcctgtatgttttaggtattattatggcatttttagtcagtacagtacttactaagacgattttaaaaaatgataatgcaatctttattgtggaattgccaacataccgtgtgccttccattaaaacgttgtggcgtagtacttgggaaaaggctaagggctttgttcgtaaagcaggtacatttatttttggcggctcagtagtcatttggctattaagttatgtaggaccacatggtatcaatgtgaatatcaatcaaagttttttacatatggttggtagtttctttggtatgttagtgcaaccgctcggatttggaacatggcaagcaggtgctacgttagtgccaggatttttagcaaaagaagttatcgtaagttcgatggcgattatctattcatcaggtgatgcaggccttgttaatgtgattcaaaatcaattcacaccgctatctgcgtatgcatttatgatatttatactattgtatattccttgtgtttctacagtagcagcaatccgtaaagagacttattcatggaaatggacggcacttgcagttgcctatcctctagtcactgcatatgtcttaacattcattttttatcaagtcggacatttatttgtttaa

SEQ ID NO: 404853 - DNA, 171 bp, Staphylococcus aureus
gtgtcagtcattattaacattttaatttttttagcaattttcggatatgccttatatacactagtaaaatttttcaagcgttcaaaacaaggaaaatgtggtacatgtgacattaatcgtgattgttgtggaacagaacagcacacagcgaatcattttccagggaaataa

SEQ ID NO: 404854 - DNA, 2106 bp, Staphylococcus aureus
atgaataacggttttttcaatagcgactttgattcaatttttcgaagaatgatgaaagatatgcaaggttcaaatcaagtcggaaacaaaaagtactatattaatggtaaagaagtttcacctgaagaactagcgcaactcacacaacaaggtggcaatcactctgctgaacaaagtgcgcaagcttttcaacaagcagcacaaagacaacaagggcaacaaggtggcaacggcaattatttagaacaaattggtcgtaaccttacgcaagaagcacgtgacggtttattagatccagtcattggtcgtgataaagaaattcaagaaactgctgaagttttaagtagacgaactaaaaacaatcctatattagttggagaagctggtgttggtaaaactgcgattgttgaaggtttagcacaggcaatcgttgaaggaaatgtaccagcagcaatcaaagacaaagaaattatttctgtagacatttcatcattagaagctggaacgcaatatcgtggtgcttttgaagaaaatattcaaaaattaatcgaaggtgttaaatcttcacaaaatgccgtactattctttgatgaaatccatcaaattatcggttcaggtgccacaggaagtgattcaggtagcaaagggttatctgatattttgaaacctgcattaagtcgtggtgagatttctattattggtgcaacaacacaagatgaatatcgaaacaatattcttaaagatgctgcattaacgcgcagatttaatgaagtgcttgttaatgaaccaagcgctaaagatactgttgaaattttaaaaggtattcgcgaaaaattcgaagaacaccatcaagtaaaattaccagatgacgtattaaaagcatgtgttgacttatcaattcaatatattccacaacgattattaccagataaagcaatcgatgtgttagatattacagcagcacatttatctgcgcaaagtccagctgtcgataaagttgaaactgaaaaacgaatttctgaattagaaaatgataaacgtaaagcagtaagtgctgaagaatataaaaaagctgacgacattcaaaatgaaatcaaatcattacaagataaattagaaaatagtaatggtgaacatactgctgttgctacagttcatgatatttcagatactattcaacgattaactggtattccagtttctcaaatggatgataacgatattgaacgtttaaaaaatatttctaatcgtttaagaagtaaaatcataggtcaagatcaagctgtagaaatggtttcacgtgcaattcgccgtaatcgtgctgggtttgatgacggcaaccgtccaattggcagtttcctatttgttggccctactggtgttggtaaaacagagcttgctaaacaattagcaattgatttatttggtaataaagatgcactgattcgacttgatatgagtgaatatagtgacacaacagctgtttcaaaaatgattggtacaactgctggttatgttggttatgatgacaattcaaatacgttaactgaaaaagtacgccgtaatccatactcagtcattctatttgatgaaatcgaaaaagcaaatccacaaattttaacattgttattacaagtaatggatgatggtaatttgactgatggtcaaggtaatgtcatcaactttaaaaatacaattattatttgtacatcaaatgctggctttggcaatggcaatgacgctgaagaaaaagatattatgcacgaaatgaaaaaattcttccgccctgaattccttaaccgcttcaacggcatcgttgaattcttacatttagataaagatgcattgcaagatatcgtcaacttattattagacgatgtacaagttacattagacaaaaaaggtattacgatggacgtttctcaagatgcgaaagattggttaattgaagaaggctatgatgaagaattaggtgcacgtccattaagacgtattgttgaacagcaagtacgtgacaaaattacagattactatttagatcatacagacgttaaacatgtggatatagatgttgaggataacgaattagtcgtaaaaggtaaataa

SEQ ID NO: 404855 - DNA, 522 bp, Staphylococcus aureus
atggagtataagagttactatgattcgcctgtaggacgattggaacttttgagtgatggggtaagtctgaccgctgttttgtttgaaaatcaacaaggtgatggtactagggaagaaaatacgtctttagcgatatttagagaggcgacacagtggttagacgcgtattttaaaggtgacaatcctgaaatcacaatacctttaaagccaacaggtagtcattttcaacagtgtgtttggaatgaattaagacaggttccttatgggactctaacaacgtatggtgctattgccaaaaaagtaggcaagctgcttaacaagccaaaaatgtcagcccaagcggttggaggtgcagtcggaagtaatccattatctattatcgtgccatgtcatcgtgttgtcggtaaaacgggtagcttaacagggttcggtggaacgattaataataaaattaagctgttagagttggagaatatcgatatgtcaaagctttatgtaccaaaacatagcacgaagccgtaa

SEQ ID NO: 404856 - DNA, 1167 bp, Staphylococcus aureus
atgacaataggtatcgataaaataaacttttacgttccaaagtactatgtagacatggctaaattagcagaagcacgccaagtagacccaaacaaatttttaattggaattggtcaaactgaaatggctgttagtcctgtaaaccaagacatcgtttcaatgggcgctaacgctgctaaggacattataacagacgaagacaaaaagaaaattggtatggtaattgtggcaactgaatcagcagttgatgctgctaaagcagccgctgttcaaattcacaacttattaggtattcaaccttttgcacgctgctttgaaatgaaagaagcttgttatgctgcaacaccagcaattcaattagctaaagattatttagcaactagaccgaatgaaaaagtattagttattgctacagatacagcacgttatggattgaattcaggcggcgagccaacacaaggtgctggcgcagttgcgatggttattgcacataatccaagcattttggcattaaatgaagatgctgttgcttacactgaagacgtttatgatttctggcgtccaactggacataaatatccattagttgatggtgcattatctaaagatgcttatatccgctcattccaacaaagctggaatgaatacgcaaaacgtcaaggtaagtcgctagctgacttcgcatctctatgcttccatgttccatttacaaaaatgggtaaaaaggcattagagtcaatcattgataacgctgatgaaacaactcaagagcgtttacgttcaggatatgaagatgctgtagattataaccgttatgtcggtaatatttatactggatcattatatttaagcctaatatcattacttgaaaatcgagatttacaagctggtgaaacaatcggtttattcagttatggctcaggttcagttggtgaattttatagtgcgacattagttgaaggctacaaagatcatttagatcaagctgcacataaagcattattaaataaccgtactgaagtatctgttgatgcatatgaaacattcttcaaacgttttgatgacgttgaatttgacgaagaacaagatgctgttcatgaagatcgtcatattttctacttatcaaatattgaaaataacgttcgtgaatatcacagaccagagtag

SEQ ID NO: 404857 - DNA, 1278 bp, Staphylococcus aureus
atgcaaaatttagataagaattttcgacatttatctcgtaaagaaaagttacaacaattggttgataagcaatggttatcagaagaacaattcgacattttactgaatcatccattaatcgatgaagaagtagccaatagtttaattgaaaatgtcatcgcgcaaggtgcattacccgttggattattaccgaatatcattgtggacgataaggcatatgttgtacctatgatggtggaagagccttcagttgtcgctgcagctagttatggtgcaaagctagtgaatcagactggcggatttaaaacggtatcttctgaacgtattatgataggtcaaatcgtctttgatggcgttgacgatactgaaaaattatcagcagacattaaagctttagaaaagcaaattcataaaattgcggatgaggcatatccttctattaaagcgcgtggtggtggttaccaacgtatagcgattgatacatttcctgagcaacagttactatctttaaaagtatttgttgatacgaaagatgctatgggcgctaatatgcttaatacgattttagaggccataactgcatttttaaaaaatgaatttccgcaaagcgacattttaatgagtattttatccaatcatgcaacagcgtccgttgttaaagttcaaggcgaaattgatgttaaagatttagcaaggggcgagagaactggagaagaggttgccaaacgaatggaacgtgcttctgtattggcccaagtagatattcatcgtgcagcaacacataataaaggtgttatgaatggcatacatgctgttgttttagcaacaggaaatgatacgcgtggtgcagaagcaagtgcgcatgcatacgcgagtcgtgacggacagtatcgtggtattgctacatggcgttacgatcaagatcgtcaacgattgattggtacaattgaagtgcctatgacattggcaatcgttggcggtggtacaaaagtattaccaattgctaaagcttcattagagctactaaatgtagagtcagcacaagaattaggtcatgtagttgctgccgttggtttagcgcaaaactttgcagcatgtcgcgcgcttgtgtcagaaggtattcaacaaggtcatatgagtttacaatataaatcattagctatcgttgtaggggcaaaaggtgatgaaattgctaaagtagctgaagctttgaaaaaagaaccccgtgcaaatacacaagcagcggaacatattttacaagaaattagacaacaatag

SEQ ID NO: 404858 - DNA, 258 bp, Staphylococcus aureus
atggagattataatagagatttatatgtatttaagagatggaattaaagagcattttattttgaaaaaggttagaaaaaaatttaaaaaattaaatgagattaacagcgatatacaaaatatgtatgcagaaaatcaggggctcttagaaacagataaaacaataattgacaaggtcttaagcactgacgttacaaatagccatgatattaatgaattatatttatttcttaaaaactatttggataagacgcaatga

SEQ ID NO: 404859 - DNA, 432 bp, Staphylococcus aureus
atggaatataaaaagatactaattcgtttattaattgcttttgcagtacttttctcagcagatttcacttatcaatccgtcgaacaaacgcatcaatcgcatgccgcagttaattattatagtaaaaaccaatgtacatggtgggcatttaaacgtcgcgcacaagtcggtaaacctgtttctaatagatggggcaatgctaaaaattggtattacaatgcacgtaaatcaaaatatgcgactggtcgtacaccaagaaaatttgctgtcatgcaatcaactgcaggatattatggacatgtcgcagttgttgaacaagtatataaaaacggtagtattaaagtttcagaatacaacttttatcgcccattaaaatacaatacacgtgtactaagcaaaaaggcagcacgtaactttaactatatttactaa

SEQ ID NO: 404860 - DNA, 219 bp, Staphylococcus aureus
ttgagcttttacgaatttatgcaaagttttcttggtgatgacacaccattaggtgaattggttgattggattaatcaagatagcaatttccctagagaagtgaagagccatagtgaaatattgtcatattttcgaacaaatccatgtcctgaaagcatctcagtacctgtaattaaacgggcactatcagttttcaaccaattcacaaatgtacaatga

SEQ ID NO: 404861 - DNA, 864 bp, Staphylococcus aureus
atgaaatattttattgaagtcgttaagcaaggaggcatgactaatgcttccaaatcattatatattgcacaacctacaattagtaaagcaattaaagatattgaaaatgaaatgggcacgcccttatttgatagaagtaaaagacatttaattcttaccgatgcaggtcaaattttttatgagaaaagtaaagaaattgttgcactgtatgattatttaccatctgaaatggaacgcttgaatggactggaaacaggacatataaacatgggcatgtcggcagtcatgaatatgaagattcttatcaatattcttggtgcattccatcaacaatatccaaatgttacatataatttgatagaaaatggcggtaaaacaattgaacagcaaattatcaatgatgaagtagatataggcgtgaccactttgccagtcgatcatcatattttcgattatactaccctagataaggaagatttgcgacttatcgtgagcagagagcatcgactcgcaaaatatgaaactgttaaactcgaagatttagcaggtgaagacttcattttatttaataaagacttttacttgaatgataaaattattgaaaatgctaaaaacgttggctttgttccgaatactgtagcgcaaatttcacaatggcatgttatagaagatttagttacgaatgaattaggtattagtattttaccaacatcaatttcagagcaactaaatggagatgtgaagctgctacgcattgaagatgctcatgtacattgggaattaggtgttgtttggaagaaggataaacaattaagtcatgccacaacgaaatggatagaatttttgaaagaccgtttaggctaa

SEQ ID NO: 404862 - DNA, 396 bp, Staphylococcus aureus
atgcacaaagtccaattaataatcaaactactactacaactaggaatcatcattgtgattacttatattggcacagaaattcaaaagatttttcatcttcccttagccggcagtattgttggtctatttttattttatttactattacaatttaagattgtaccgctaacttgggtagaagacggtgcaaactttttattaaagacgatggtctttttcttcataccgtcagttgtaggtattatggatgttgcttccgaaattacgctaaattatatactctttttcgcagtcattatcataggaacatgtatcgttgcattatcttcaggttatattgctgaaaaaatgtctgttaaacataaacatcgtaaaggtgtagacgcttatgaatga

SEQ ID NO: 404863 - DNA, 690 bp, Staphylococcus aureus
atgaatgattacgtgcaagccttattaatgattttgttgactgtcgttttatattatttcgctaaaaggttacaacaaaaatatccgaacccatttttgaatccagcattaattgcatctttaggaattatttttgtcttacttatctttggaattagttataacgggtatatgaaaggtggcagttggatcaaccatattttaaacgcaacggtcgtatgtttagcgtacccactttataaaaatagagagaaaattaaagacaatgtctctatcatttttgcaagtgtattaactggcgtcatgctgaatttcatgttagtgttcttaacacttaaagcatttggctattctaaagacgtcattgtaacgttattgccccgatctataacagccgcagtaggtatcgaagtgtcacatgaactaggtggtacagatacgatgaccgtactttttattatcacaacgggtttaatcggtagtattttaggttcgatgttattaagatttggaagatttgaatcttctatcgccaaaggattaacgtatgggaatgcgtcacatgcatttggcacagctaaagcactagaaatggatattgaatccggtgcatttagttcaattgggatgattttaactgcagttattagttcagtgttaatacctgttctaattttattattctattaa

SEQ ID NO: 404864 - DNA, 1740 bp, Staphylococcus aureus
atggcaaaaataaaagcaaatgaagcattagttaaagcattacaagcatgggatatagatcacttgtatggtattccaggagactcaatcgacgcagtagtcgatagtttacgtacagtgagagatcaatttaaattttatcatgtacgtcatgaagaagtagcaagcttagcggctgctggttacacaaaattaactggtaaaatcggtgtggcattaagtatcggtggccctggtttaattcatttattaaatggtatgtatgatgccaaaatggataatgtaccgcaattaatattatctggacaaacgaatagtacagcacttggaacgaaagcattccaagaaacaaatttacaaaaattatgtgaagatgtagccgtttataatcaccaaattgaaaaaggtgacaatgtgtttgaaatcgttaacgaagcaattcgtacggcatatgaacaaaaaggtgtagctgttgttatttgtcctaacgacttattaactgaaaaaattaaagatacaacgaataaaccagtagatacatcaagaccaacagtagtatcaccaaaatataaagacatcaaaaaagcggttaaactaattaataaaagtaaaaagcctgtcatgttaattggtgtaggtgcgaaacatgcgaaagatgagctacgtgaatttattgaaatggctaaaattcctgtcattcattcattaccagctaaaacaatcttgccggatgatcatccatatagtatcggtaacttaggtaaaatcggtaccaaaacatcttatcaaacaatgcaggaagcggatttattaattatggttggtacaaactatccatatgtggattacttacctaagaaaaatattaaagccattcaaattgacacaaatcctaaaaatatcggacatcgtttcaatattaatgtaggaattgttggagatagtaaaattgcgttgcatcagttaactgaaaatattaaacatgttgctgaaagaccattcttaaacaaaacgttagaacgtaaagcggtttgggataaatggatggaacaagataaaaataataatagtaaaccattacgtccagaacgattaatggcatcaatcaataaatttattaaagatgatgcagtgatttcagcagatgtaggtacagcaacagtttggtcaactcgatacttaaaccttggtgtaaataacaagttcatcatttcaagttggttaggtacaatgggttgcggtcttccaggtgcaattgcatcaaaaattgcatatccaaatagacaagccatcgcaattgctggtgacggtgcattccaaatggtaatgcaagacttcgctacagcagtacaatatgatttacctttaactgtatttgtacttaataacaaacagttagcatttattaaatatgaacaacaagcagctggtgaattagaatatgcagttgatttttctgatatggatcatgcaaaatttgctgaggcagcaggtggtaaaggttatacaattaagagtgctagcgaagtagatgctatagtcgaagaggcattagcacaagatgtaccaacgattgtagatgtatatgttgatcctaatgctgcgccattaccaggtaaaattgtaaatgaagaagcgcttggttatggtaagtgggcatttagatcaattactgaagataaacatttagatttagatcaaattccaccaatttcagtggcagcaaaacgtttcttataa

SEQ ID NO: 404865 - DNA, 2100 bp, Staphylococcus aureus
atggaagcggaaattgagataggggatgtttatatgtttaagaaattgtttggacaattgcaacgtatcggtaaagcattaatgttacctgttgcgattttaccagcagctggtattttattagcgtttggtaacgcaatgcacaacgaacaattagtagaaattgcaccatggttaaaaaacgatatcattgtaatgatttcgtcggtcatggaagcagcaggacaagttgtatttgataacttgccattattatttgcagttggtacagcacttggattagcaggaggagacggtgttgcagcattagcagcgctagtaggttacttaattatgaatgcaacaatggggaaagtgttgcacattacaattgatgacattttctcatatgccaaaggggcaaaagaattaagtcaagcagcgaaagaaccagcacatgctttagtattaggtattccaacgttacaaacgggtgtgtttggtggtattatcatgggtgctttagccgcatggtgttacaacaaattttataatattacactaccaccatttttaggattctttgcaggtaaacgatttgtaccgattgtgacatcggtcgtagcaatcgcaacaggtgtgcttttaagctttgcgtggccaccaattcaagatggattaaatagtttatcgaatttcttattaaataaaaatttaacattaacaacgtttatattcggtattattgaacgctcattaattccatttggtttacatcatattttctattcaccgttctggtttgaattcggaagttatacaaatcacgcaggtgaattggttcgtggtgaccaacgtatttggatggcacaattgaaagatggcgtaccatttactgctggtgcatttactactggtaaatatccatttatgatgtttggtttaccagcggcggcatttgctatttataaaaatgcacgaccagaacgtaaaaaagtcgtgggtggtttaatgttatcagcaggattaactgcatttttaactggtatcactgagccattagaattttcattcttatttgtagcaccagtactttatggaattcacgtattattagctggtacatcattcttagtaatgcatttattaggcgttaaaattggtatgacattctcaggtggtttcatagattatattttatatggtttattaaactgggatcgttcacacgcattattagttattccagtcggtattgtatatgctatcgtgtattacttcttattcgactttgcaattcgtaagtttaaattgaaaacaccaggtcgtgaagatgaagaaactgaaattcgtaactctagtgtcgcaaaattaccatttgatgtcttagatgcaatgggtggaaaagaaaacattaaacatttagatgcatgtattacacgtctacgcgtagaagtggttgataaatcaaaagtagatgtagcaggtattaaagctttaggcgcatcaggtgtattagaagttggaaacaatatgcaagctatctttggtccaaaatcagatcaaattaaacatgatatggccaagattatgagtggtgaaattacgaaaccaagtgaaacgacagtgactgaagaaatgtcagatgaaccagttcacgtagaagcacttggaacaacagacatctatgcaccaggtatcggtcaaatcattccattatcagaagtacctgatcaagtgttcgctggtaaaatgatgggtgatggtgttggctttatccctgaaaaaggtgaaattgtagcaccgtttgatggtacagtgaaaacaatcttccctacgaaacatgcgataggattagaatctgaaagtggcgtcgaagtacttattcatattggtatcgatacagtgaaactgaatggtgaaggattcgaaagtctgattaacgttgatgaaaaagtaacacaaggtcaaccattaatgaaagtgaatttagcatacttgaaagcacacgcaccaagcatcgttacaccaatgattattacaaatcttgaaaataaagaacttgtcattgaagatgtacaagatgctgatccaggtaagctaattatgacagtcaaataa

SEQ ID NO: 404866 - DNA, 411 bp, Staphylococcus aureus
atgacaacagaaggtctattagttgcagagaaagaaatcgaagtgaatggttacgacattgatgcgatgggtgtcgttagtaatatcgtttatattagatggttcgaagatttgagaacagcgtttattaatcagcacatgaattactcaacaatgatcaatcaaggcatttcacctatacttatgaaaacggaagcagagtataaagtacctgtcacaatacatgacaaaccagtaggtcgtatttacttagttaaagcaagcaagatgaaatgggtgtttcagtttgaaattgtgtccgcacatggcgtgcattgtattggtacacagacaggcggtttttacagattgagtgataagaagataacctctgtgccacaagtgtttcaagacattttagcaacaaaataa

SEQ ID NO: 404867 - DNA, 345 bp, Staphylococcus aureus
atggttaagcaattaaatagtgtcgaagcattccgtgaatttattcatcaatatccgttagcagttgtacatgtcatgcgcgatcagtgtagcgtgtgtcatgccgttttaccacaaattgaagacttgatgcaatcatatcccaatgtgccattagctgtgattaatcaaagtcaggtggaagctattgctggagaattaaatattttcactgtacctgtggatttaatttttatgaatggaaaagaaatgcatcgtcaagggcgttttatcgatatgcaacgttttgaacatcatcttaagcaaatgaatgatagtgtaaataacgatgtcgatgagcattaa

SEQ ID NO: 404868 - DNA, 969 bp, Staphylococcus aureus
atgcgtaaaaaatggtctacacttgcgtttggatttttagttgcagcatacgcacatattagaattaaagaaaaacgcagtgtgaaaagttatatgttagaacaaggtatacgattatctagagctaagcgtcgttttatgtataaagaagaagcgatgaaagcattagaaaaaatggcgccacagacagcaggcgaatatgagggaaccaattatcagtttaagatgccagtaaaagtggataagcacttcggttcaaccgtttataccgttaacgataaacaagataagcatcaacgcgttgtattatatgcacatggaggcgcatggttccaagacccactcaaaattcatttcgaatttattgatgaacttgcagaaacactcaatgctaaagtcatcatgccagtatatccgaagattccgcatcaagattatcaagcgacgtatgtgctttttgaaaagttgtaccatgatttattgaatcaagtagcagattctaaacaaatcgttgtaatgggtgactctgcgggcggtcaaattgctttatcatttgctcaattgttaaaagaaaaacatattgtgcaaccaggacatattgtattaatttcaccagttttagatgcaacgatgcagcatcctgaaattcctgactacttaaagaaagacccaatggtaggtgtggatggcagtgtgttcttagctgaacaatgggcaggggacacacctttagataactacaaagtatcaccaattaatggtgacttagatggtttaggtcgtattacattaactgttggtacaaaagaagtactgtacccagatgctttgaacttatcgcaattgttgagtgcgaaaggtatcgaacatgactttatacctggatattaccaattccatatttatccagtatttccgataccagagcgacgacgctttttataccaagtgaaaaatattattaactaa

SEQ ID NO: 404869 - DNA, 963 bp, Staphylococcus aureus
atgttgttggtgttaagttttaaaggggtgagatacttggcgaataatcattcagctttgcgtttaaaaggaattatacttgccattgtcggtgcttgtttatggggattaggtggtactgtttctgatttcttgttcaaatataagaatattaatgtcgattggtacgtcactgctcgacttgtagtcagtggtgttttcttacttattatgtacaaaatgatgcaacccaaacgttcaatatttagcgtattccaagatcgacgtatgttaggcaaattacttatcttcagtatactgggcatgttagtagtacaatatgcttatatggcatctattaatacaggtaatgctgcgattgcaacattactacaatacattgcgccagtttatattattatttggtttgtcataagaggcgttgcaaaactaacattatttgatgtgcttgctattatcatgacactattaggaacatttttattattaacaaatggttcattttctaatttagtcgtcaatcctgcaagtttattctggggtattttagctggtgtagcactcgctttttacacaatttatccttcagacctacttaaccgcttcggttcgattctaattgtcgggtgggcaatgcttatttctggtgttgcgatgaatttacgccatccaatttggcacattgatatcactaaatgggacatatcaattatattatttttaatctttggtattatcggtggtaccgcactcgcattttatttctttatcgacagtttacaatacatatcagcgaaagaaacaacattattcggaactgttgaacctgtcgtagccgttatcgcaagcagtctatggttacatgtggcattcaaaccatttcaaatcgtaggcatcattcttattatgattttaattttattactatcacttaaaagacaacctgaaacattagatgaataa

SEQ ID NO: 404870 - DNA, 204 bp, Staphylococcus aureus
gtgcaattgagtcattccgttaaagttgcaatttctatctatttagcacttatctttataacgttcacttcttatttagtcattattttatatacgagtatgactggacatgatgtatcacatttcgtgttagatagtcagcattctcatcatggatctcttacgcaaaaacatttgagtcttcctgaaatctcatttaaatag

SEQ ID NO: 404871 - DNA, 1044 bp, Staphylococcus aureus
atggatattctgttaggtgtaggcacattagtcttggttttagtgatcatgacgctatttttaaagtatgcaccgtacggtaaacaaggactacaagcattatccggtgcagcttgtgcgacatttctaccacaagcattcttaagttatgctattggtggcgtatttgatattaaatttctacaagatattggggatttagcaggaagtttaagcggtatcgcagtaggtattctaacgtgcttaaacttaggcgttgcaccagtatttgcggtcattgttggtttagtattacatgactttaaattattaccagcattcatcgcagcttatggcgtagcttttttaattaaatggattgaaaagaaagttccagaaggcttggacttaattgtggtgatcttatttgcaccagcaattgctttcggacttgcatcaatcattacacctggtgtgctagcaacattaaaacaaataggtagtgctgtcactgcggtaggtgataacaatccatatgcattagcggtcattttaggactagtgattcctgttacaggtatgacaccgctaagttcaatggtattaacaagtttattaggactgacaggtgttcctatggctattggagcactaacatgtacaggtagctcatttgttaaccttattttattccgaaaattaaacattggtggaccgtcaaaagcatttgcagtttgtattgagccattgacgcaaattgatttaatagcgcaatatccagtacaactatatggtacaaatgcactgattggggtcgtcaacgcatgtatcgtgacatttagcggactagtaataggtgtcaaaggtatggcaacaccaattgcaggcgccatcgtattgtttggctttaataatgcagtgacatcaattgtaacaatcgcaacagtgattattgtcagcattgtcttagcctatattattggaacactaattaataagtttaatttaatgaatatcaactttaaaatgccgagcaaaaagaatcatattaaggagagtgtttaa

SEQ ID NO: 404872 - DNA, 681 bp, Staphylococcus aureus
atggcaaagagctatgattatcaaagtgctttcgatattatcggaccagttatgatgggcccttcaagttctcatacggctggtgcagtaaagattgggaattcagcacgcgcaatattgggagatattcctaaaaatattgaaatacattattatgaatcatttgctcaaacacaccaaggacatggtacagatgtcgctattgtgggtggagcaatgggatattcaacatttgataaccgaattaaatcttcattagaaattgcagctgatgatggtattaaaatagatatcatcgaagaagaaggcgatagtattggtcaacatccaaactgtgcttatatcaaatcatctcgtaatgatggtcgctacattgaaattatcggtatttcaatcggtggtggtacaattaaaattaaaggtattcatataaatggactagaagtagatttaaatcatggattaccaattttagttgttgacggaaatatgactaaagcacaagtaaatcatttcatcaatgatatcaacgatatgaaattagactgtaaagatgaatttattaagatagatgaagataaatgcttggttgtaataccattaaataaagcaatctcagaatcaacattaaatacaattaaagagaaatacagtgacgtaaacgtttcctatataaattag

SEQ ID NO: 404873 - DNA, 900 bp, Staphylococcus aureus
atgtttgattcaattagagagactatagattatgccgtagaaaataatatgtcatttgcggatatcatggttaaagaagaaatggaattaagcggtaaatcacgtgatgaagtgcgagcgcaaatgaaacaaaatttagatgtcatgcgagacgcagtaatcaaagggacgacaggtgatggggttgaaagtgtaacgggctacactggtcatgatgctgctaaactacgtgattataatgaaacacatcatgctttgtctggatatgaaatgattgacgcagtcaaaggtgccattgcaacaaatgaagtcaatgctgcgatgggtattatttgtgcaacgccaacagctggttcctcgggtaccattcccggtgcactttttaaattagaaaaaacacatgatttaacagaagagcaaatgattgatttcttattcacttcagcattgtttgggcgtgtcgtagcaaacaatgcaagtgtagctggtgcaacaggtggctgccaagctgaagttggttcagcatctgcaatggccgcagctgcagcagtagctatattcggaggatcaccagaagcatccgggcacgctatggcattagcgataagtaatttattaggtttagtttgtgatccagtagccggacttgttgaaattccttgtgttatgagaaatgcaattggttcgggtaacgctttaatttcagcagatttagcattagcaggtattgaaagtagaatccctgttgatgaagttattgaagcaatggataaggttggtcgtaaccttcctgcatcattacgtgaaactggattgggtggactagcaggcacaccaactggcgaagcaattaaacgtaaaatctttggcacagctgaagatatggttaaaaataattaa

SEQ ID NO: 404874 - DNA, 171 bp, Staphylococcus aureus
atgctaagactatcaatcatctttatagcattcatcattaacacaacgattacatatggatatacgactgagggaacgtgggtcaatctattatttaaatctttatcgctcagcatgattatcgttttcatgttctactatattcgttttgttattgagaaaaagcgttaa

SEQ ID NO: 404875 - DNA, 492 bp, Staphylococcus aureus
atgattagatacgctaaaaaagaggatttaaacgctatattagcgatatacaatgatgccattatcaatactacagctgtttatacttatgaaccacaaaccatagacgaacgtgtcgcatggtttgaaacgaaacaacgtaagcatgagcctatctttgtatttgaggaaaatggaagtgtcttagggtttgcgacgttcggttcatttagaccttggccagcatacctatatacaatcgaacattctatttatgtcgatgcttcagctagaggaaaaggtattgctagtcaattactacaccatttaattgtggaagcaaaagctaaaggttatcgtgcgctagttgcaggcattgatgcttccaacaaagcgagtattcagttgcatcaaaagtttgcttttaagcatgccggcacactgaccaatgtaggttttaaatttaatagatggttagatttagcattttacgaattagatttacaagactag

SEQ ID NO: 404876 - DNA, 621 bp, Staphylococcus aureus
atgaaaaaatggacaaatcgattaatgacaatcgctggtgtggtacttatcctagtggcagcatatttgtttgctaaaccacatatcgataattatcttcacgataaagataaagatgaaaagattgaacaatatgataaaaatgtaaaagaacagacgagtaaagataaaaagcagcaagctaaacctcaaattccgaaagataaatcgaaagtggcaggctatattgaaattccagatgctgatattaaagaaccagtatatccaggaccagcaacacctgaacaattaaatagaggtgtaagctttgcagaagaaaatgaatcactagatgatcaaaatatttcaattgcaggacacactttcattgaccgtccgaactatcaatttacaaatcttaaagcagccaaaaaaggtagtatggtgtactttaaagttggtaatgaaacacgtaagtataaaatgacaagtataagagatgttaagcctacagatgtaggagttctagatgaacaaaaaggtaaagataaacaattaacattaattacttgtgatgattacaatgaaaagacaggcgtttgggaaaaacgtaaaatctttgtagctacagaagtcaaataa

SEQ ID NO: 404877 - DNA, 723 bp, Staphylococcus aureus
ttgaaattagaatttaaaaaaagtatttccaataaaattatttacacgcttgttgtgctattcacattccttttcttacttgggtattttttaccaataggtatagacaaagttaaaagtttaagctatagccagtttttcttcagttcatatactgttgcaacgcaattagggttcttactattttcatttgttattgcatattttattaataaagagtattcgaataaaaatatcctgttttataaattgattggcgataatatctttaccttcttctataaaaaggtagcagtgttattttttgaatgtttagtgttcataattctaagtatcactattatttcaattatatattcggatttctcacattacttactattaataatcttattttcactcgttatcttacaatatatcttagttgttggaacgattagtatggtttcacctaacattttaatcagcttaggtatcagcattgtatattggattggttcagtcatcttagttgccattaataaaaatatatttggtatcgttgctccatttgaggcgagcaatacgatgtatcgtgccgtagaaaaaatattgaataacgagtcaacatttatgtgtcctactgaaattataaatatagtatcattcttcgttcttctatttatagttaatactattgtcttattactaagtagaaagagatggttgaaaatcggtatgtag

SEQ ID NO: 404878 - DNA, 636 bp, Staphylococcus aureus
atgaaactaaataactattctttaaaagttaaaaacaaacaactagttgacaattgtgatttaaatttctatcttggtcagatcaatcacattgttggtaaaaatggtgtaggaaaatctttattagctaaagatttcttactaaataatagtggaaatatccctaagtccatttctcaaaatgtaaccttaatatcaagttcatcaaatattcctaatgatataacaaaagattttttattatcattgttaaaatcaaaatttgaaaacaatcgacaaacattcgataagatttataacatactaaacatcgaagcaataccgtctaacgtactactaaaaaacttgagtgatggtcaaaaacaaaagcttaaattattaagtttcttattggaagatcatgatttaatcatattagatgaagttacaaacgctttagacaagaaaacagttaatgaaatttatgaatttttaaatgattttattcaaagccatcaaactaaaactattatcaatattacacataatttatccgatttaagtgctttgccgggtaaatactttatttttaaagaccttcaaatagaagagtaccaatcaaaagaagaagtcataaatgattacattaatttataa

SEQ ID NO: 404879 - DNA, 801 bp, Staphylococcus aureus
atggttaaggctattgcggtagatatggacgggacgtttttagattcaaaaaagacatatgataaacttagatttgaagcgatttttactgaacttagaaatagagatattacatttattgctgcgagtggcaatcaatatgcgaagttgaagtctattttcggggatagagatatgtattttatttctgaaaatggtgcagttatttataatggcaatgagttatataattataaaagctttaatcgtcaggtgtttcaacaggttgtcgattacttaaatatgaagcaaagtattgatcaactcgtcatctgtggtttgaaaagcgcgtatattttaaaacatacttctgaagcgtttaaagaagatacgagattttattatcatcagttaaaagaaattgacagtctacagcaattacctgaggatgattatgtcaaaatagcatttaatattaatcgtgagacgcatccgaatgttgacgaagaagtagcaacgcaattcagcaatgatattaaacttgtctcaagtgggaacgatagcattgatattattatgccaaacatgactaaagggcaggcattaaaacgattgttagataaatgggaaatgtctccttcagagctcatggccttcggagatgcgaataatgataaagatatgttagcgttcgctaagcatagttatgtgatggaaaatagtcatgatgaagaattgttcaatattgcctctgctgtcgctccaagtaatgataagcagggtgtattaacgattatcgaacaagaagtgttgaaaaagtag

SEQ ID NO: 404880 - DNA, 993 bp, Staphylococcus aureus
atgacaaaaattatgttctttggtacgcgtgattatgagaaagagatggcattaaattgggggaaaaagaataatgtcgaagtaactacttctaaagagctattatcaagtgctacagtcgatcaattaaaagattacgatggcgtaactacaatgcaatttggtaagttagaaaatgacgtttatcctaaattagaatcttacggtattaaacaaattgcacaacgtactgctggatttgatatgtatgatttagatttagctaaaaaacacaatattgtgatatctaacgttcctagttattcacctgaaacaattgcagagtattctgtttctatcgccctacaattagtgcgtcgcttcccagatattgaacgccgtgtacaagcacatgattttacttggcaagcagaaatcatgtctaaaccagttaaaaatatgactgttgcaattattggtacgggtcgtatcggtgctgctacagctaaaatatatgcaggatttggtgctacaattacagcttatgacgcctatcctaataaagatttagactttttaacttataaagatagtgttaaagaagctattaaagatgccgatattatttctttacatgttccagcgaacaaagaaagctatcatttattcgataaagcaatgtttgatcatgtgaaaaaaggtgcaatcttagttaacgcagcacgtggtgcagtcatcaatacacctgatttaatcgctgcagtgaacgatggtactttgttaggtgctgcgattgatacttatgaaaatgaagcagcatacttcacaaatgactggactaataaagacattgacgataaaacattattagagttaatcgaacatgaaagaattttagtaacaccacatattgctttcttctctgatgaagcagtacaaaaccttgttgaaggtggtttaaacgcagcattatctgtcattaacactggtacatgtgaaacacgtttaaattaa

SEQ ID NO: 404881 - DNA, 672 bp, Staphylococcus aureus
atgagcaatatgaatcaaacaattatggatgcatttcatttcagacatgcgactaagcaattcgatccacaaaagaaagtttcgaaagaagattttgaaacaatattagagtcaggtagattgtctccaagttctcttgggttagaaccttggaagtttgtcgtgattcaagatcaagcgttacgtgatgaattaaaagcgcacagttggggcgcagcaaaacaattagatacagcgagccattttgtgctaatttttgcgcgtaaaaatgtaacgtcaagatcaccgtatgtacaacatatgttaagagatattaaaaaatatgaggcacaaacgattccagctgttgaacaaaaattcgatgcattccaagcagatttccatatttctgataatgatcaagccttgtatgactggtcaagtaaacaaacgtatattgcattaggcaatatgatgacgacagccgcattgttaggtattgattcatgtccgatggaaggttttagtctggatacagtgacagacattttagcaaataaagggatcttagatactgagcaatttggtttatcagtgatggtcgcatttggctacagacaacaagagccaccgaaaaataaaacacgccaagcttatgaagatgttattgaatgggttggaccaaaagaataa

SEQ ID NO: 404882 - DNA, 807 bp, Staphylococcus aureus
atggcatttcacgataaaacagcaacacaagtgacaaacattgtactgaacgtaagagacttagacttaatgacaacattttacaaaaacattttaggactatccgttaaaagttctgacgataatacaaccgtattatctgttgggactggtggccatactctaacgttacatttattagaagacggccgtcagacttccccacgtgaagcagggctttttcatatagcatttttattaccaactactgaggatctagctaacttcttatatttcgtggcacaaaaaaatatgggcatcggcgctggtgatcatttagtaagtgaagctttatatttcaacgaccccgaaggtaatggtattgaagtctatcgcgatagaccttcatcttcatgggaatggcaaaatggcaaagttaaaatggatactttagaagttgatagccaaaccttattaacacatcgtactgatgaaggttggcaaggaatgccagcaaaaggcatgattggacacttacatttaaaaacacatgatttagacgcagcatatcaatgttacattgaacaattaggattccaacatgtgtctgattttccacgtgcgctatttatgtcaacgaatcattatcaccatcatattgctgctaatacttggcaatccaatcaagcaagacaaaacaattcacaaagttatggattaacacatgttgatatttatcaacccgacgcctcaacacatacatttacggcaccagaagggtttgacatcacagttcattcaaatactgaccttgttccagaaaaataa

SEQ ID NO: 404883 - DNA, 285 bp, Staphylococcus aureus
atgagtaaccttgaaatcaaacaaggcgagaacaaattctatattggtgatgatgaaaataatgctttagctgaaatcacataccgttttgtggataataatgaaattaacattgatcatacaggcgtatctgatgaacttggtggtcaaggtgttggcaaaaaactacttaaagcagttgttgaacacgctcgagaaaataatttgaaaattattgcctcatgttcatttgccaaacatatgttagaaaaagaagattcatatcaagatgtatatcttggttaa

SEQ ID NO: 404884 - DNA, 435 bp, Staphylococcus aureus
atggatcgaacgaaacaatctctcaatgtttttgtcggaatgaatagggcgttagacacattagagcaaattacaaaagaagacgtaaagcgatatggcttaaatattactgaatttgcagtgctcgagttgctttataataaaggtccgcaaccaattcaacgtattagagaccgcgtattaattgcaagtagcagcatttcatatgttgtaagtcaattagaggacaaaggttggattacacgtgaaaaggataaagatgataaacgtgtatatatggcttgtttaactgaaaaaggtcaaagtcaaatggcagatattttccctaagcatgctgagacattaacaaaagcgtttgatgtgttaacaaaggatgaattaacaatcttacaacaagcgtttaagaaactaagtgcacaatctacagaagtgtaa

SEQ ID NO: 404885 - DNA, 969 bp, Staphylococcus aureus
atgataaataatcatgaattactaggtattcaccatgttactgcaatgacagatgatgcagaacgtaattataaattttttacagaagtactaggcatgcgtttagttaaaaagacagtcaatcaagatgatatttatacgtatcatactttttttgcagatgatgtaggttcggcaggtacagacatgacgttctttgattttccaaatattacaaaagggcaggcaggaacaaattccattacaagaccgtcttttagagtgcctaacgatgacgcattaacatattatgaacagcgctttgatgagtttggtgttaaacacgaaggtattcaagaattatttggtaaaaaagtgttgccatttgaagaagtcgatggccaagtgtatcaattaatttcagatgagttaaatgaaggggtagcacctggtgtaccttggaagaatggaccggttccagtagataaagcgatttatggattaggccccattgaaattaaagtaagttattttgacgactttaaaaatattttagagactgtttacggtatgacaactattgcgcatgaagataatgtcgcattacttgaagttggcgaaggaggcaatggtggccaggtaatcttaataaaagatgataaagggccagcagcacgtcaaggttatggtgaggtacatcatgtgtcatttcgtgtgaaagatcatgatgcaatagaagcgtgggcaacgaaatataaagaggtaggtattaataactcaggcatcgttaatcgtttctattttgaagcattatatgcacgtgtggggcatattttaatagaaatttcaacagatggaccaggatttatggaagatgaaccttatgaaacattaggcgaagggttatccttaccaccatttttagaaaataaaagagaatatattgaatcggaagttagaccttttaatacgaagcgtcaacatggttaa

SEQ ID NO: 404886 - DNA, 594 bp, Staphylococcus aureus
atggaacatatttttagagaaggacaaaatggtgcgccaacactaatattattgcatggtacaggtggtgatgagttcgatttattaccgttaggcgaagcattgaatgaaaattatcacttgttaagtattagaggacaagtttcagaaaatgggatgaaccgttatttcaaacgtcttggtgaaggtgtttatgatgaagaagatttggcatttcgtggacaagaattgttgacgttcattaaagaagctgctgaacgttatgattttgatattgaaaaagcagtacttgttggattttcaaatggatcaaatatagcgattaacttaatgttgcgttcagaagcaccatttaaaaaagcattgttatatgcaccgttatacccagttgaagtaacgtcaacaaaggatttatcagatgtcagtgtgttgctttctatggggaaacatgatccaattgtgccattagctgcaagtgaacaagtcattaacttgtttaatacacgtggggcacaagtcgaagaagtttgggtgaagggccatgaaattacagaaactggattaacggctggtcaacaaatacttgggaaataa

SEQ ID NO: 404887 - DNA, 1080 bp, Staphylococcus aureus
atgcgtatcttaaaagagtccattattgtggcatttgcctttgttggtgttgtcgttggtgccggctttgctactggtcaagaaattttccagtttttcacaagtcatggcgcatatagcatttcaggcattattgtaacaggactattgattactttaggtggaatggttgtcatgcatacaggtcatcatctaaagtccagaaatcattctgattcaattaactatttcttatacccctctattgcaagaggttttgatattattttaacaatgtttatgttgtctttagctattattatgactgcaggtggtgcgtcaaccattcatcaaagtttcaacttaccgtattggctgagcgcactcatattagtcgcctttattttagcaacactgtttctaaaattcgatcgtttaattgctgtgcttggcggtgttaccccatttttaattgcgattgtcattatgattgcggtctactatttcacaacaagtcatcttgattttactgccgctaataatgatgctcagattcataagcagaaatcattatcacctggatggtggtttgatgcgattaactatgcaagcttgcaaattgctgctgccttcagcttcttatcagtgatgggtagtaaagttaaatatcgtgactcaacgttatacgggggcttgattggcggtttaatcattacatttttactcatgatgattaatctaggtttaatttctcaattcgataaaattaaacacgtagatctacctacattaaaattagcgacacaaatgtctccgtcaattggtattattatgtctgtcattatgatacttgtcatctacaatactgttgttggattaatgtatgcatttgcgtcacgtttcagcgttccattcagcagacgttacttcatcattattattacaatggctgtcatcacttatattagtacatttatcggtttcatttcattaattggaaaagtattccctattatgggattgttcggtttcatcttactcatacctgtactctataaaggtttaattaagcgtattaccggcaaatctcatatcgattaa

SEQ ID NO: 404888 - DNA, 1965 bp, Staphylococcus aureus
atgactcaaattactgaaaaagaattaaaaaagaagtatttagatttactatcccaaaattttgatactccagaaaaacttgcaactgaaattatcaatttagaatcaattttagaattacctaaaggtacggaacatttcgtcagcgatttacatggtgaatatgaagctttccaacacgtattacgcaacggttctgggaacgtgcgagcgaaaatcaatgatattttcaaagagagactttcaactaaggagcttaatgacttaactgctcttgtctactatccagaagacaaattaaaattgtttaaaagtgatttccaaaattgcggtcaacttaatgtctggtatatcacaacaatcgaacatttaattgagttaattaaatattgttcttcaaaatatacgcgttcaaaactgcgtaaagcattgccaaaacaatacgtttatattattgaggaactactgtataaaagtaatgaatatcaaaataaaaaatcatattacgaaacacttgttaaccaagtaattgaacttaaacaggcagatgatttaattattggactcgcttattccgtacaacgcttagtcgtcgatcatttacacgttgtcggtgatatttatgatcgtggaccacaaccagataaaattatggatacactgattaattatcattccctagatattcaatggggtaatcatgatgtgctttgggttggagcctatgctgggtcaaaagtatgcttagcaaacttacttcgaatttgtgcacgttatgataatttagatattatcgaagacgcttatggcattaatttaagaccactgcttactttagctgaaaaatactatgacgcagataatcctgcttttaagcctaaaaaaagacctgacaaacacgaacgtttaactcaacgtgaagaaagtcaaattactaaaattcatcaagctattgcgatgattcaattcaagttagaaataccaattattaaacgtcgtccaaatttcgaaatggaagaacgtcttgtgcttgaaaaggttaattatgatacaaatgaaattacagtttatggtaatacatacccattgaaagacacatgtttccaaactgtcaatcgtgataatccagcagaattactacctgaagaagaagaagtcatgaataaactattattgtcattccaacaatctgaaaaattacgtcgtcatatgtctttcttgatgcgtaaaggctctctttacttaccatataatggcaatttactcattcatggttgtattccagttgatgaaaatggtgagatggaatcatttgaaattgatggtcatacttacagcggccaagaattattagatgtgtttgagtatcatgtccgtaaatcatttgatgaaaaagaaaatactgatgacttatcgacggatttagtttggtatttatggactgggaaatattcgtcactatttggtaaacgtgccatgactacgtttgagcgatactttattgcagataaagcttctcataaagaagaaaagaatccgtactatcatcttcgtgaagatgtgaatatggttcgtaaaatgctcagtgatttcggattaaatccagatgaaggacgcattattaatggtcacacaccagtgaaagaaatcaatggcgaagatcctatcaaggctgatggaaagatgcttgtcattgatggtggcttttcaaaagcttatcagtcaacaactggcattgcaggctatacactattgtataattcattcggtatgcaactcgttgcacaccaacaatttaacgctaaagaaaaaatactttccgaaggtatcgatgaactttctataaagcgcgtcgtagataaagaattacaacgtaagaagattcgtgataccaatattggtaaagatcttcaagctcaaatagatattttgaaaatgttaatgcatgatcgttacttagactaa

SEQ ID NO: 404889 - DNA, 771 bp, Staphylococcus aureus
atgggaactttaattaaacaagaatgtttcaaattatttaaaaagaaatcaacttttatcgcacctattgtctttattctactaatggttgctcaaggttatattactacaaaatacaatgaaatttttacgccacaggaatctttcacatctgcttataatggtttttcatggtttgcatttttattaattattcaagcaagtacaatcatttcaatggaatttcattacggtacgattaaaaatttactctatcgtgaatattcaagaacaactatgattgttagcaaaatcatcacattatttattatttctttaatttattttgttattacaattattgcttcaattgttattgggtctttattctttaatgatttaaatatatttgaaagtagcggtaatcaattatctttattgaatcaattattattagttagtttaggcacatttgttggcgtttggttagttttaagcttaacgttgctattatcatctgcaacaaattcaacgggagtagccattgctgtaggtattgttttttattttgcaagttctattttagcagttattcaaacggcacttttagaaaaaatagactggctaaagtggaatcctattaatatgatgaatattatgcttcaaacagttgaaaaaggctttagtaagtcgacaaaattagaacttcatgaattgtttattggtaatattgcttatatttctattttcttaatacttgtagtatttattttcaagaagaaaaatatttag

SEQ ID NO: 404890 - DNA, 696 bp, Staphylococcus aureus
atggatgttttaacaatagaacatttaacaaagaagataggcaacaaaacgattctcgaagatgtatcatttaagctgaaacgcggacaaatagttggtctcgttggagcgaatggtgcaggtaaaacaactttaatgaaagttatattaggttactctagtttccaaagcgggaattttaatgttattaacagcaaggacagcaaaagcaatatcggcgcattgattgaaaatccaggaatatatccttttatgtctggatatgaaaacttgaagttattgaatgaatcaaaaaacactcaagatatcgataaaattgtctcacaacttcatatggatgaatacattcataaaaaagctaaaacgtattctcttggtatgaaacaaaaattaggaattgctatagcatttttaaataaacctcaattcattatcttagatgaaccaatgaatggcttagatccaaaagctgtgcgagatgtacgtgaattgattgtccaaaaagcgcaagaaggtgttactttcttaatttcgagtcatattttaagtgaattagttaaaatcacaaactctatccttattattaacaaaggtaaaattgttacagaaacatcggaagaagaacttaaacaatttaaagataatgatttagaaaatgtattactagaaatcatagaaagggaggaccaagcataa

SEQ ID NO: 404891 - DNA, 465 bp, Staphylococcus aureus
gtggatatgaagagagaagttattttaaaattacaacaatttattatagaaagagaaaatgccgataaaagaagacagtataaaaaggaaaatgaggaactagatttatctctaacacaatttcatatcatagagttgattgataataatgataaagtgaataataaatttttgtctgaaatgttaaatgtatcaaaaccagcaattactaaatcgataaaaaaacttttagcgaaagacttagtagttgaatcgcacaatgaatttaacaaaagagaagttaattattcattaacacaaaaaggaaaaaaattatcttatatacatgatgaattacatgaaaaatcggtaaaaaaatatgaagaggtacttaaagtctttgatgatgatgaaatggcagttattatagagtttttaaaccgtagtatagaagaattaaaaaaagaagatggtttaaatgattaa

SEQ ID NO: 404892 - DNA, 1164 bp, Staphylococcus aureus
atgattaatagtaatatcagattatatattctaggatttttagcatttttcgcatcattgattcaaaacatatacacgcctattattccgagactatatgacgattttcaagtaccactattttggataaatgcgacagttggcggttttatatttatcgttgcagttatgcaaattgtacttggtagaagtatagattctcgtgattcgaaaaaagtacttttaacgggattgggaatagtaatcatatctagctttatttgtgcagtgacacataactttatattatttgctatatcaaggttatttcaagcaattggttgcggaattattcctctcgtgactttaactttattagccaaactaagtacagataatggtagagctcaagctatggcgaactatcaaatatttttatcatgtgcaccagctttggcaccaatcttagggagtactttaggtgcaagatgggattatattggtatttttagttttttgctcgttatatctatcgtattatttttgattatcttttttattgatattccaaatgttgaaaaagggattgtaaaattaactgaaaaaattgaagaaaaatatttgaccgataaagtgtttattactttagtgacattgggatttttaatattttttacgtacttttcaatattagtttatttaccaacattattaaataatacctatgatataggcgttggaatatcaggagttttgtttttacctattactgttagtgttatattaggaagtttattttataagcgattttcaaaaaaatataatgaaataatgatacttcgtgttactataactggatttgctatatttacgttattgtttggatggttaaacgaatcaaatgtaattatattatcagtaattatatttatattaggtacttgtgttggtattgtgccagctttgctgtctactataatttctaaaaggtttgaacatataaaagggaaagtgctaggtgtatttaattttgtgagatatattggaatgactgtcggtgcattattaattggtatcatttctcagccgttggtagccttttacttcacaactataactatcatgttaatagtaatatttctttatataaagatagttgactttcagctaaagtatgccaaataa

SEQ ID NO: 404893 - DNA, 612 bp, Staphylococcus aureus
atggaacaaattatcactgaatttattagccgttttgggtatgcagccatttttatattaattttattagaaaatgtactacctatcgtaccatcggaaattattctgacatttgctggtcttatgtctgttaaatcacatttatcaattttaactttatttattattgcaactatcgcatcgtttatagggctgttaattttatattatatctgccgtttgatttcagaagaacgtctatatcgttttattgatcgacacggtaagtggattaaattgaaaagtaaggatttaaagcgagcaaatgattggtttaaaaagtatggcgtatgggctgtatttatctgtcgtttcatacctgtattacgtgtattgattaccattccagctggtgtaaaccgcatgaatgttgtgacatttaccgttatttcattaataggtactacaatctggaatttcggtttaattttactaggacgcactttgagcgatagctttggtatgttgatgactggtcttcatacatattcacgtattatgtatgttgtcatcattatcgcagtcatttactttgctatacgttacattggcaaacgtaagagagtaaaataa

SEQ ID NO: 404894 - DNA, 1278 bp, Staphylococcus aureus
atgaaggaaaaacgaactaacgtaaggtggatgttcgcgcttgcgttcttctttattggggttattgcgtatatggatagagcaaacatttcatatatcgctaagcaaatgatggatgatttagggatgacaaaaccacaatttggtttattggcatcattcttctctctaggttatgcattaatgcaagtaccatcggggatgttggctgaaaaattcggtccacgtaagatgattacaattgcattagtttggtggagtgcatttacaatcttaacgggtatgattaagaaccacggtttaatttatttagtgagattcttatttggtgtaggtgaggcgccaatgtacccttctaatgctgtgtttaattcattttggttctctaaaaatgaaaaaggtagagcatcaagtgcattattagcaggatcatatttcggacctgtattagcaccaatagttacaattgctattgttaacgcatttaactggcaagcagtattttacatttttggtgcagtaggtattttaatggctgtattatgggcgattattgccaaagacttacctgagcaacatagaatggttaatgaagcggagaaacgtttcattatggaaaatcgtgatatcgtagctactgaaaagtcatcaccaccatggaatgatttctttaaacgttttagcttctatgcaattgcaattcaatactttgttgtacaatttatcattacattattcttaatttggttaccgacgtatttaacagaagtattccacgttaactttaaagaaatgagcattagttcattaccttggttattaatgttcttcttaatcttatcagcaggtgcaatttctgaccgtgtattaggattaggtcgttcaaaattcgtagctagaggtgtaattgcaattgcaggatttattgtgtttgcagtttcaattatctttgctgtacgcacaggaaatttatatgtaagtattttctggttatcactaggtcttggtggtatcggtatttcaatgggtatgagttgggctgcagcaactgacttaggacgtaacttctctggtacagtatcagggtggatgaacttatggggtaatataggtgcattaatcagtccgctattagcaggtctattcgtagaacatttgggttggacaatgacattccaattgttaatcgttccagcagtaatcgctgtgattatgtggttctatgtgaaaccagatcaacctttaattgttagtgatgataaagcaatagaaaaataa

SEQ ID NO: 404895 - DNA, 1824 bp, Staphylococcus aureus
atgattattcctgcaataatcggttacttatgtggtaatttccaatttggattattagttgcaaccggaacactagcccatatttatgtttttaaaggtccgtcgcgatctaagctgcgaactgtaataatttgtaatttagcgtttgcaatatgtatgatgcttggtacgctaacagccaaaacgccactcgtttttggaatgacattattaattgttacggttataccattttatatatttactgccttaaaaatagctggaccgtcatcgacattcttcattgtgacattcagtctacccattaacttacctatagctcccgaagaagcattatatagaggctttgcgattttagtaggcggtatacttgccactatgatggtgttaatcacgatcgtattttctaaaaacaaagctgaagaacaagcaattcaaaatgattttaaactcatatctaagttgttacacacttataatgataaatctgcttttttacaagtagcaaaaacagcggtggatagttttaaagcatctgataaattattaatcacttctacttcaagtaacgataaattaagtagacgtttccaaaaattattattattacacacatctgcccaagggatttattctgaactgttagagttgaacgctaaacaaattcgaccattgccagatgagttaattgaaatgatggatcatatcattgcacaactagataatagtgaggaaaatgtaagatattggcgaaaagaagtgacagtaacagaggaatttcaaaatttattcaaccatatattgaaaattgatgaaatggtgcatgcaaatgaagcgcgtattgcgtatgaagcagacatgcgaaaacctttatatagtaaacgcatttatcaaaatttaacattagactctattgtttttagaaatacattgagatatacagcgattatgatgatagcgatatttattgcgttaatgtttgattttgaaaaagcatactggataccgttatctgcacatacaatattactaggaacatcaactatacatgcaatcgagagaggtatggcacgaggtttaggtactattttaggtgtgttagtactttcagtcatattgttgttttcaataccaacacctgttgcagtaattttaatgggcattgcagcattgtttactgaagcattggtgggagcaaattatgcgattgcagtagtttttattacaatacaagttattttaatgaacggattagcatcacagaatttaacaattaacattgcgtttccaagagttattgacgttgcaatgggtattgtgattgcaatcataggtttatttgtccttggacaacgtaccgcatccgcattgcttcctaatgtaatggctgaagttgttcgtaaagaagcaacgctctttcattatttattttctgaaaatcaatataaagatgatgtgtatcagaaaaacacggctatgaacctatctgtgaaattaaataacatgacgcaagtttataatgcagctaatggtgaattatttagtgataagacattgattcaaaattattatcctagcttattcgcattagaagaaattagctttatgttaaatagagccatggctaatgaagatagacttacaataaatgaacaattaatgggcgagtatttagcaatatttgaaaacatcgctaagcatttcgaattaaatacagaattagaaataaagatattaccagatttaccacagtataattatattcaatcagcaatgatgaatattcaacacaatggttttcgtgagagagacaagaacgtttaa

SEQ ID NO: 404896 - DNA, 417 bp, Staphylococcus aureus
atgccctttacaatgaaaggttaccccgaaaaatggaaagaatttgaagtaattaaacggcaaaaagcgatagaaattgcgaatgcaatgttaaaagaaggatatcttgaaaaagatgttgttcctattgcggcgaaaaaagcgaaagattggtatcgagcgttatcgaaagaagaaatcaaagcattagaagaagagaacttcgtacaattccatacagcaacaatggaaaaaacagaggtggatagtgaatatgcaacaactgataatgaagaacatattcaagaacaatcaaatcaagataaatcgtactttgatagcgaatcaattggcaaccaaagtggtggcgttcgacaaagagaaccgcttatggatggtccacatccaaaagttgtggaatcatttaaagacgtataa

SEQ ID NO: 404897 - DNA, 693 bp, Staphylococcus aureus
atgtatgtagatcgaaaaccatcactatatttagaggatttgcgacatgattttaaaaatagtttaagtaaatttgaaaatggtgatgaagcatttgatacgttattaggtttcgtagagttagatcatatttattcgtcagcactaaaggaaataagcactaaactgagtattttagatgacaatttcaatcacatttataaacacaatcctatacatcatatggagcgacgtgtgaaagaaatgcgtagtttaatagaaaagcttaatcgtaaaggattacagattagcgcagaaactgccaaagaacatatactggatattgccggaattcgcgtagtatgtaattacttagatgatatttatttgattgaagagatgttgcttaaacaagaagacgtacaattgataaaacgtaaagattatattcagcaccctaaagaaaatggttaccgcagtttacatatcgttgtatctattccagtctttttagcagaacgcgttgaggtattgcctgttgaaattcaaattagaacgataggtatggatatgtgggcaagtttagaacataaaatacgttataaaaacaatgcagagacggaaaagtatcgagatttactgaaagaatgtgcgacagagattactgaagttgaagataaattacaacaaattcattctgaaataacagagtag

SEQ ID NO: 404898 - DNA, 765 bp, Staphylococcus aureus
atgtctaactattcgactggagaactcgcaaaattatgcaatgtgacaacacgaacgattcaatattatgatcgcaaaggtattttgaaaccacaaggatttacagaaggaaagcgtcgtgtgtatacagaacaacagcgacaaacattagagttaatcttattgcttaaagatttaggttgtgcgttaagcgatatagatatgttgctaaaaggtgaaggtactttgaagacgctcaatactttactaactatgaaaccacaagaaattaaccaacaagttaaacagcaacaagcggtattaaacaaaattaaaaatgttcaatattacgtaaatgaagcgtcgacgtctccaatcacacacttaaaagacatagagcatgtcatgagtaaatcagctgaaatgaaaagtattcgtcgtaacatttggattagtgctggtattataggaataattcaatattctagcattataagtgcaattttgatgaaaaataaatggccgtttttaattgctttaccatttatgattggttatggcattggtgttactttttattaccaacaaaaggttgcctatttatgtcctaactgccagcatatattctcaccatctttgtgggcagttatcaaagcgaaacatacagcgacaacacgtcgattcgaatgtccaaactgtcatgaaacgcattattgcattgaagtacctaaagcgcatatgagtacagaacaattagaaatatcccacatacaacataacaattaa

SEQ ID NO: 404899 - DNA, 681 bp, Staphylococcus aureus
atgatgtatggatatccagagaaatggttggaaggtatgacaactggagaaggtatcgcggcagaattacgcttaggcattgtgaatggtcacatagctgaaggtacgttactcactgaaaatcaaatggcaaagcaatttaatgtgagtcgttcgccaattcgagatgcatttaaattattgcaacaaaatcaactcatccaattagaaagaatgggtgcacatgtgttgccgtttggggaacaagaaaagaaagaaatgtatgatttgcgactgatgttagagtcatttgcattttcaagagttaaaaatcaagagcgactacccatcgtaaaagaaatgaagaaacaacttgaaatgatgaaagtggcagtaaaatttgaggatgcagaatcatttacgaagcatgactttgaatttcatgaaacattaatcaaagcatctaatcatcaatatttaaactcattttggagtcatttaaaaccagtaatgatggcactcgttttaacatccatgcgacaacgtatgcaacagaacccgcaagattttgaacgcatacatcataatcatcaagtgtttattgatgcagtggaacaatacgacagtcaaattttgaaagaagcgtttcatttaaatttcgacgatgttggtaaagatattgaaggattttggttgaattaa

SEQ ID NO: 404900 - DNA, 1554 bp, Staphylococcus aureus
atgaaatatatgattggtgtcgacattggaacgacgagtaccaagtcagtcttatatgatgaaaatggaacttttatcatgaaacatcaaataggctatgatttacacacaccaaacgttgatgtctcagaagaaaacccagatgaattatttgatgcagtactaatgactattaaatatgttatgagagaatccaaagttaataaagacgacattaagtttgtgtcatttagtgcgcaaatgcatagcttgattgcgatggatcagcaacatcaaagattaacaaataatattacttgggcagataaccgcgctgcaaaatatgcaacagtaataaatgaagtgcatgatggcaatgcgatttaccagcgaacaggcacaccgattcatcctatgtcgccattagcgaagattttttggatgaaacatgaatggcaagatgtatttcaacgtactgctaagtttgcagatattaaaacatacattttctatcatttatttgatacatatatcattgattattcaatggcttccgcaacagggatgtttaatttagaaacattagattgggatgttgaggcattagaactgctgggtatttccaaggaaatgttgccggaattagttccaacaacgtatgtgatgaaaggtatgaaagaacgttatgcaacattaatggggcttaataaagatacaccgtttgttattggtgcgagtgatggggtcctttctaatttaggtgtcaatagtgttggtaaaggagaagttgctgtcacaatcggtacatctggggcgattcgtactgtgatagataaaccgcgtactgattacaaaggtagaatattttgttatgtcttaacagaggaccactacgtcatcggaggtcctgtaaataatggtggtgtcgtattgagatggttgcgcgacgagttgctagcgagtgaagtcgaaactgcgaaacgtctcggtgttgatccttatgatgtcttaactcaaattgcaaagcgtgttaaaccaggtgcagatggtttaatattccatccctatttagcaggagaacgtgcgccgctttggaacgcaaatgcaagaggttcattcttcggtttaactttatctcataaaaaagaacatatgattcgcgctgcattagaaggtgttctttacaatttgtataccgtctatcttgcgcttattgaagtaatgaatgaaacacctaagatgataaaagcaacaggtggttttgcgaaaagtgaagtatggcgtcaaatgatgtcagatatatttgacacagagttagtggttcctgaaagttatgaaagttcatgcttaggtgcctgcgtgctcggacttaaagctgtaggtgacattgaagatttttcaatcgtttcatcgatggtcggtgccacaaacaatcatacgccgattgaagaaaatgtcactgtttaccaagagatcgtatccatttttatcaatttaagtcgttctttaacagagaattatgaacaaattgcagattttcaacgccaacatatcgctgaaaataaaacacaataa

SEQ ID NO: 404901 - DNA, 1359 bp, Staphylococcus aureus
atgtttaacgaaatatggccgttaatcagtgttgttttaggtatcgttattttattagtattaattattgggtttaaattaaatacatttatttcattaattatcacatcgatgattacagcgttaatgctaggtataccattgactaaaattatggagacgattgagaaaggaatgggcagtacgctcggccacattgcactgatattcggtttaggtgccatacttgggaaattgcttgctgatggtggtggtgcaactcgaatcgcagacacgttgattcaaaaatttggtcaaaaacatgtacaatgggcaatgcttgttgcagcatttatcgtcggtattgcattgttctttgaagtaggtttagtcttactgattccattagtatttacagtagcaaaacgcgcaaatgtttcagtgttaaaactaggactacctatggtaacagctttatcagtgacacatggctttttaccaccacatccaggaccggtagtcatcgcaaaagaattaaaggcaaatgttggagatgtattactgtatggtatgattattgccattccagttacactcattgcagggcctatatttaacaaagttgcacaaaaaatgattccgtctgcgtatacacgagaaggcgatatttcagcgttaggtgcacaaaaagaatttacggatcaagagatgccaggatttggtatgagtttattaacagcaacattaccagtcatattaatgttagtgtctacgataacgcaacttgtaactgggcatgacaaacctacaaatctatttgaatctatcatttatatgataggaacagcagggacagccatgctaatagcagtattatttgcaatcgttacgatgggattaatgagaaagcgtaagatgaatcatattatggaatcagtgacgaatgcgatttatccaatcggaatgatgttattgattattggcggtggcggtacatttaaacaagtattaattgacggcggtgtcggaaatacaattgctaaaatgtttgaaggtacagagatgtctccgattttactagcatggattgttgcagctgtgctacgtatcgcattaggttcggctacagtagctgcgatttcaactacaggtattgtcttaccattattacaatcatcagatgtaaatgttgcattagttgtacttgcgataggtgcaggtagtgtgattttgtctcatgtaaatgacgcaggattttggatgtttaaagaatattttggtttaactgtaaaagaaacattcttaacatggtcattattagaaacgattatttccgtttcaggtatcatcttcattttattcattagcttatttgtttaa

SEQ ID NO: 404902 - DNA, 3057 bp, Staphylococcus aureus
gtgaaaaacaatcttaggtacggcattagaaaacataaattgggagcagcatcagtattcttaggaacaatgatcgttgttgggatgggacaagacaaagaagctgcagcatcagaacaaaagacaactacagtagaagaaaatgggaattcagctactgataataaaacaagtgaaacacaaacaactgcaactaacgttaatcatatagaagaaactcaatcatataacgcaacagtaacagaacaaccgtcaaacgcaacacaagtaacaactgaagaagcaccaaaagcagtacaagcaccacaaactgcacaaccagcaaatatagaaacagttaaagaagaggtagttaaggaagaagcgaaacctcaagttaaggaaacaacacaatctcaagacaatagcggagatcaaagacaagtagatttaacacctaaaaaggctacacaaaatcaagtcgcagaaacacaagttgaagtggcacagccaagaacggcatcagaaagtaagccacgtgtgacaagatcagcagatgtagcggaagctaaggaagctagtaacgcgaaagtggaaacgggtacagatgtaacaagtaaagttacagtagaaattggttctattgaggggcataacaatacaaataaagtagaacctcatgcaggacaacgagcggtactaaaatataagttgaaatttgagaatggtttacatcaaggtgactactttgactttactttatcaaataatgtaaatacgcatggcgtatcaactgctagaaaagtaccagaaattaaaaatggttcagtcgtaatggcgacaggtgaagttttagaaggtggaaagattagatatacatttacaaatgatattgaagataaggttgatgtaacggctgaactagaaattaatttatttattgatcctaaaactgtacaaactaatggaaatcaaactataacttcaacactaaatgaagaacaaacttcaaaggaattagatgttaaatataaagatggtattgggaattattatgccaatttaaatggatcgattgagacatttaataaagcgaataatagattttcgcatgttgcatttattaaacctaataatggtaaaacgacaagtgtgactgttactggaactttaatgaaaggtagtaatcagaatggaaatcaaccaaaagttaggatatttgaatacttgggtaataatgaagacatagcgaagagtgtatatgcaaatacgacagatacttctaaatttaaagaagtcacaagtaatatgagtgggaatttgaatttacaaaataatggaagctattcattgaatatagaaaatctagataaaacttatgttgttcactatgatggagagtatttaaatggtactgatgaagttgattttagaacacaaatggtaggacatccagagcaactttataagtattattatgatagaggatataccttaacttgggataatggtttagttttatacagtaataaagcgaacggaaatgggaaaaatggtccgattattcaaaataataaatttgaatataaagaagatacaattaaagaaactcttacaggtcaatatgataagaatttagtaactactgttgaagaggaatatgattcatcaactcttgacattgattaccacacagctatagatggtggaggtggatatgttgatggatacattgaaacaatagaagaaacggattcatcagctattgatatcgattaccatactgctgtggatagcgaagcaggtcacgttggaggatacactgagtcctctgaggaatcaaatccaattgactttgaagaatctacacatgaaaattcaaaacatcacgctgatgttgttgaatatgaagaagatacaaacccaggtggtggtcaggttactactgagtctaacttagttgaatttgacgaagagtctacaaaaggtattgtaactggcgcagtgagcgatcatacaacagttgaagatacgaaagaatatacaactgaaagtaatctgattgaattagtggatgaattacctgaagagcatggtcaagcacaaggaccagtcgaggaaattactgaaaacaatcatcatatttctcattctggtttaggaactgaaaatggtcacgggaattatgacgtgattgaagaaatcgaagaaaatagccacgttgatattaagagtgaattaggttatgaaggtggccaaaatagcggtaaccagtcattcgaggaagacacagaagaagacaaacctaaatatgaacaaggtggcaatatcgtagatatcgattttgatagtgtacctcaaattcatggtcaaaataaaggtaatcagtcattcgaggaagatacagaaaaagacaaacctaagtatgaacatggcggtaacatcattgatatcgacttcgacagtgtgccacatattcacggattcaataagcacactgaaattattgaagaagatacaaataaagataaaccaagttatcaattcggtggacacaatagtgttgactttgaagaagatacacttccaaaagtaagcggccaaaatgaaggtcaacaaacgattgaagaagatacaacacctccaatcgtgccaccaacgccaccgacaccagaagtaccaagtgagccggaaacaccaacgccaccaacaccagaagtaccaagtgagccggaaacaccaacaccaccgacaccagaagtgccgagtgagccagaaactccaacaccgccaacaccagaggtaccagctgaacctggtaaaccagtaccacctgccaaagaagaacctaaaaagccttctaaaccagtggaacaaggtaaagtagtaacacctgttattgaaatcaatgaaaaggttaaagcagtggcaccaactaaaaaaccacaatctaagaaatctgaactacctgaaacaggtggagaagaatcaacaaacaaaggtatgttgttcggcggattattcagcattctaggtttagcattattacgcagaaataaaaagaatcacaaagcataa

SEQ ID NO: 404903 - DNA, 2823 bp, Staphylococcus aureus
gtgaaaagcaatcttagatacggcataagaaaacacaaattgggagcggcctcagtattcttaggaacaatgatcgttgttggaatgggacaagaaaaagaagctgcagcatcggaacaaaacaatactacagtagaggaaagtgggagttcagctactgaaagtaaagcaagcgaaacacaaacaactacaaataacgttaatacaatagatgaaacacaatcatacagcgcgacatcaactgagcaaccatcacaatcaacacaagtaacaacagaagaagcaccgaaaactgtgcaagcaccaaaagtagaaacttcgcgagttgatttgccatcggaaaaagttgctgataaggaaactacaggaactcaagttgacatagctcaaccaagtaacgtctcagaaattaaaccaagaatgaaaagatcaactgacgttacagcagttgcagagaaagaagtagtggaagaaactaaagcgacaggtacagatgtaacaaataaagtggaagtagaagaaggtagtgaaattgtaggacataaacaagatacgaatgttgtaaatcctcataacgcagaaagagtaaccttgaaatataaatggaaatttggagaaggaattaaggcgggagattattttgatttcacattaagcgataatgttgaaactcatggtatctcaacactgcgtaaagttccggagataaaaagtacagatggtcaagttatggcgacaggagaaataattggagaaagaaaagttagatatacgtttaaagaatatgtacaagaaaagaaagatttaactgctgaattatctttaaatctatttattgatcctacaacagtgacgcaaaaaggtaaccaaaatgttgaagttaaattgggtgagactacggttagcaaaatatttaatattcaatatttaggtggagttagagataattggggagtaacagctaatggtcgaattgatactttaaataaagtagatgggaaatttagtcattttgcgtacatgaaacctaacaaccagtcgttaagctctgtgacagtaactggtcaagtaactaaaggaaataaaccaggggttaataatccaacagttaaggtatataaacacattggttcagacgatttagctgaaagcgtatatgcaaagcttgatgatgtcagcaaatttgaagatgtgactgataatatgagtttagattttgatactaatggtggttattctttaaactttaataatttagaccaaagtaaaaattatgtaataaaatatgaagggtattatgattcaaatgctagcaacttagaatttcaaacacacctttttggatattataactattattatacaagtaatttaacttggaaaaatggcgttgcattttactctaataacgctcaaggcgacggcaaagataaactaaaggaacctattatagaacatagtactcctatcgaacttgaatttaaatcagagccgccagtggagaagcatgaattgactggtacaatcgaagaaagtaatgattctaagccaattgattttgaatatcatacagctgttgaaggtgcagaaggtcatgcagaaggtaccattgaaactgaagaagattctattcatgtagactttgaagaatcgacacatgaaaattcaaaacatcatgctgatgttgttgaatatgaagaagatacaaacccaggtggtggtcaggttactactgagtctaacctagttgaatttgacgaagattctacaaaaggtattgtaactggtgctgttagcgatcatacaacaattgaagatacgaaagaatatacgactgaaagtaatctgattgaactagtagatgaactacctgaagaacatggtcaagcgcaaggaccaatcgaggaaattactgaaaacaatcatcatatttctcattctggtttaggaactgaaaatggtcacgggaattatgacgtgattgaagaaatcgaagaaaatagccacgtggatattaagagtgaattaggttacgaaggtggccaaaatagcggtaatcagtcatttgaggaagacacagaagaagataaaccgaaatatgaacaaggtggcaatatcgtagatatcgatttcgatagtgtacctcaaattcatggtcaaaataatggtaaccaatcattcgaagaagatacagagaaagacaaacctaagtatgaacaaggtggtaatatcattgatatcgacttcgacagtgtgccacatattcacggattcaataagcacactgaaattattgaagaagatacaaataaagataaaccaaattatcaattcggtggacacaatagtgttgactttgaagaagatacacttccacaagtaagtggtcataatgaaggtcaacaaacgattgaagaagatacaacacctccaatcgtgccaccaacgccaccgacaccagaagtaccaagcgagccggaaacaccaacaccaccgacaccagaagtaccaagcgagccggaaacaccaacaccgccaacgccagaggtaccaactgaacctggtaaaccaataccacctgctaaagaagaacctaaaaaaccttctaaaccagtggaacaaggtaaagtagtaacacctgttattgaaatcaatgaaaaggttaaagcagtggtaccaactaaaaaagcacaatctaagaaatctgaactacctgaaacaggtggagaagaatcaacaaacaacggcatgttgttcggcggattatttagcattttaggtttagcgttattacgcagaaataaaaagaatcacaaagcataa

SEQ ID NO: 404904 - DNA, 867 bp, Staphylococcus aureus
ttgaaaaaaataaaaaaggcaatcattcccgctgctggtttagggactagatttttaccagcaactaaagcgatgccaaaggaaatgcttcctatcttagataaacccacaatacaatatatcgttgaagaagctgcaagagctggaattgaagatattattatagtgacaggtcgccacaaacgcgcgattgaagatcattttgatagtcaaaaagaattagaaatggtgttaaaagaaaaaggtaaatctgaattactagagaaagttcagtattcaacggaacttgcgaatattttttatgtaaggcagaaagaacaaaaaggtttagggcatgcgattagttctgcgcgtcaatttatcggcaatgaaccatttgcggtattattaggtgacgatattgttgaatctgaagtgccagcagtgaaacagttgattgacgtttatgaagaaacagggcactcagttataggtgtccaagaagttccggaagcagatactcatcgttatggaattattgacccattaactaaaaacggacgtcagtatgaagtgaaaaagtttgttgaaaagccagcacaaggtacggcaccatcaaacctagctattatgggacgttatgtattaacgcctgaaattttcgattatttaaaaacgcaaaaagaaggcgcaggtaacgaaattcagttaacagatgcgattgaacgtatgaataatgataaccaagtgtatgcatatgacttcgaaggcgaacgttatgacgttggagaaaaattaggcttcgttaaaactaccatagaatatgcattgaaagatgacagtatgcgagaagaattaacacgatttattaaagcattaggtttataa

SEQ ID NO: 404905 - DNA, 744 bp, Staphylococcus aureus
gtggactatcaaactttcgaaaaggtcaataaattcataaatgtagaagcgtacatattttttctcactcaagagttaaagcaacaatataaattatcattaaaagaattgttgatattagcatatttttattacaaaaatgaacacagtatttcactaaaagaaatcattggtgacatactttacaaacaatctgatgttgtaaagaacattaagtcactatctaaaaaaggatttataaataagtctagaaacgaagcagatgaacgccgtatttttgtttcagttactccaatacaacgtaaaaagattgcttgtgttattaatgagttagataaaataattaaaggatttaataaggaaagagactacataaaatatcaatgggctccaaaatatagcaaagaattttttatactttttatgaacattatgtactcaaaagattttttaaaatatcgatttaatttaacatttcttgatttatctatcttatatgtaatatcatctcgaaaaaatgagatactaaatttaaaagatttgtttgaaagtattagatttatgtatcctcaaattgttaggtcagttaatagattaaataataaaggtatgctaatcaaagaacgatcccttgcagatgaaaggattgtgttaatcaaaataaataaaatacaatataacactattaaaagcatattcacagatacttccaagattctcaaaccaagaaaatttttcttttaa

SEQ ID NO: 404906 - DNA, 357 bp, Staphylococcus aureus
atgaatgatttgaaaagcaagagcaatattaaattaatgaaaagagtattaactacatatgagctgcgtaaatatttaaaaaaatatttttgtcttacattagataattatttagtattagcatatttagatgtatttaaaaatgatgaaggtaaatattttatgagagacattataagttatatcggtatagaccaatctagaattgttaaaagcgtaaaagatttatcaaaaaagggttacttgaataaatgtagagacccacatgatagtagaaatgtaatcattgttgtttctgtaaaacaacacaattatattaaaaatcttttgagtgaaataaatattaatgaaacataa

SEQ ID NO: 404907 - DNA, 2580 bp, Staphylococcus aureus
atgagagataagaaaggaccggtaaataaaagagtagattttctatcaaataaattgaataaatattcaataagaaaatttacagttggaacagcatctattttaattggctcactaatgtatttgggaactcaacaagaggcagaagcagctgaaaacaatattgagaatccaactacattaaaagataatgtccaatcaaaagaagtgaagattgaagaagtaacaaacaaagacactgcaccacagggtgtagaagctaaatctgaagtaacttcaaacaaagacacaatcgaacatgaaccatcagtaaaagctgaagatatatcaaaaaaggaggatacaccaaaagaagtagctgatgttgctgaagttcagccgaaatcgtcagtcactcataacgcagagacacctaaggttagaaaagctcgttctgttgatgaaggctcttttgatattacaagagattctaaaaatgtagttgaatctaccccaattacaattcaaggtaaagaacattttgaaggttacggaagtgttgatatacaaaaaaaaccaacagatttaggggtatcagaggtaaccaggtttaatgttggtaatgaaagtaatggtttgataggagctttacaattaaaaaataaaatagattttagtaaggatttcaattttaaagttagagtggcaaataaccatcaatcaaataccacaggtgctgatggttgggggttcttatttagtaaaggaaatgcagaagaatatttaactaatggtggaatccttggggataaaggtctggtaaattcaggcggatttaaaattgatactggatacatttatacaagttccatggacaaaactgaaaagcaagctggacaaggttatagaggatacggagcttttgtgaaaaatgacagttctggtaattcacaaatggttggagaaaatattgataaatcaaaaactaattttttaaactatgcggacaattcaactaatacatcagatggaaagtttcatgggcaacgtttaaatgatgtcatcttaacttatgttgcttcaactggtaaaatgagagcagaatatgctggtaaaacttgggagacttcaataacagatttaggtttatctaaaaatcaggcatataatttcttaattacatctagtcaaagatggggccttaatcaagggataaatgcaaatggctggatgagaactgacttgaaaggttcagagtttacttttacaccagaagcgccaaaaacaataacagaattagaaaaaaaagttgaagagattccattcaagaaagaacgtaaatttaatcctgatttagcaccagggacagaaaaagtaacaagagaaggacaaaaaggtgagaagacaataacgacaccaacactaaaaaatccattaactggagtaattattagtaaaggtgaaccaaaagaagagattacaaaagatccgattaatgaattaacagaatacggacctgaaacaatagcgccaggtcatcgagacgaatttgatccgaagttaccaacaggagagaaagaggaagttccaggtaaaccaggaattaagaatccagaaacaggagatgtagttagaccgccggtcgatagcgtaacaaaatatggacctgtaaaaggagactcgattgtagaaaaagaagagattccattcgagaaagaacgtaaatttaatcctgatttagcaccagggacagaaaaagtaacaagagaaggacaaaaaggtgagaagacaataacgacaccaacactaaaaagtccattaactggagtaattattagtaaaggtgaatcgaaagaagaaatcacaaaagatccgattaatgaattaacagaattcggtggcgagaaaataccgcaaggtcataaagatatctttgatccaaacttaccaacagatcaaacggaaaaagtaccaggtaaaccaggaatcaagaatccagacacaggaaaagtgatcgaagagccagtggatgatgtgattaaacacggaccaaaaacgggtacaccagaaacaaaaacagtagagataccgtttgaaacaaaacgtgagtttaatccaaaattacaacctggtgaagagcgagtgaaacaagaaggacaaccaggaagtaagacaatcacaacaccaatcacagtgaacccattaacaggtgaaaaagttggcgagggtcaaccaacagaagagatcacaaaacaaccagtagataagattgtagagttcggtggagagaaaccaaaagatccaaaaggacctgaaaacccagagaagccgagcagaccaactcatccaagtggcccagtaaatcctaacaatccaggattatcgaaagacagagcaaaaccaaatggcccagttcattcaatggataaaaatgataaagttaaaaaatctaaaattgctaaagaatcagtagctaatcaagagaaaaaacgagcagaattaccaaaaacaggtttagaaagcacgcaaaaaggtttgatctttagtagtataattggaattgctggattaatgttattggctcttagaagaaagaattaa

SEQ ID NO: 404908 - DNA, 1194 bp, Staphylococcus aureus
atgttgtatttagaagttttgaaaaatagaaactttacatatttattgattggtaatttcttacgtcggagttgttttgtgctgttttcgttacaaataatttggtttactgttgaattgacaaaccaatcatctttaaaattatcaatgatggttatgagtcaaacacttccatttattatatttggtattttcggtggcgcatattctgataaacataataaaaagaaaatactttatctatctgatcttatactaagtttgattataataattattcctttacttgcaataacatcaaatttaaattatctgacgcttctaaccatatctacagctatcaccattattaactgctatacggatcctgcgtttagggcaattcttcctgaaattattgatgaggagcatttagcaacaagtaatgcgttaatcgatagtttgcaaagaggctcaaatattattttacctgctttaattggtgtcattgtaatactagttggtaatgttggcgtcttttttatttgtagtatattgctatttttaggatttatttttaatgcacttttaaaatatacaaataacaacatgattgatagacactcaaaagaagatttttctgaaacttgggaattcttgaaacaatctaaagaaattccatttattataatcatccaatttgcctgcatattgattaatactggcctttggcgtgttgtattaccattgtttatttccaatatattaaaagagggcgttggtgtatatggactagctacatcatgtttaggtatagcatctttattaatgtcattgattatgggtttgctgtcagaaaagcgattaatctttaaatttagtattggtgttttagtttggggaattggcttatcgattattaatgtgtttccaagtgtggcgatattatatataggtgcaacattattgggacttggacaatctatagagggactaacaagatcagttgccattcaaataaaaacgccaaatcatttgatggggaaagtatttagtatctcatctacatcgaattatgcagcggatacattgtctttaggactgataagtataattatacctttactaagcttaagtaatatatttatattaggaggtgtaattatttcaatacttagcttagctgggttaaagtttgttaagaagtctatgtaa

SEQ ID NO: 404909 - DNA, 171 bp, Staphylococcus aureus
atgaaatataaaattagtttggcttataatttagcaattataatagggtcgctaattatattatgtatactaatatctagaggttatgatatttatgtaatcttgattccaattttgactattttagctagtttaatcaatttgttttgtgatattaaaaagcataaatga

SEQ ID NO: 404910 - DNA, 309 bp, Staphylococcus aureus
atgaccgtcaacatcgtatttagtatcgtattctgcataagtatggttatattaggcatttatgtcgcaataactaaagatttcacactaatctcttttataaatcaaacggccattgcagataaacacaagaaccaaattgcatatatatttacgctatgtataagtttgagtgcagtatttttaatgtcttcaattctaagctttgaatatgattttattgcattagcattcttatttttaacgatagcattattacttatcgcattattctacgtttgcttttataaaattacaaaatacccataa

SEQ ID NO: 404911 - DNA, 267 bp, Staphylococcus aureus
atgaaaggctctaaacaaatacttttgattatgggcattatatctcttattgttttatttatttttacactattcatcatggcgcaatatgcaaaacattatgaacaaaaatccgacagttccaacgcacatactttaaattcatcatcagccataattgagcaacatactatgtcgaatttagcgtctctagatttatacgctcctgttcgtaacattacttctagtcgtgatattcatcccatttatttcatgacaaaagattaa

SEQ ID NO: 404912 - DNA, 1638 bp, Staphylococcus aureus
atggataaagaattatggatagaacgagctaatgatagtttagttaaacatttttatgagcagcaatctgacattgaacagcgagaaggttttgaaagtaaattaacatttggtactgcgggtatacgcggaaaattcggtcttggtgaaggtcgacttaataagtttactattgaaaaattggcattaggtttagcgcgttatttaaatgcccaaacaaacagtccaacaatagtcattcattatgatattagacatctttcaactgaattcgcccaaataattgctaatgtattagcaaaccatcaaataacagtttatttacctgatacatataaaacgacaccggaattatcgttcgcggtgcgcaatcttaatactactgctggcattatgattacagcaagtcataatccgaaagactataacggcatcaaagtatatggttctgatggtgcgcaattatcgactgatgcatctgagcttgcaagtcgttatatcgaagaagttggcgatccattacagattgatatacctatttctaaacaaaatacatcttatatcaagccttttccgaaatctgtaactgatgactatatgaaacacattcaaaatatgattggctatattcctaaatctgatttacaagttgtgttcactagtttgcatggtacaagtgttccgattgtacctgagttattacaatctttgaatttcaatcaatttaatcttgtagaagcacaatgtaaacctgatccgaatttcagctcagttcaaagtgctaatcctgaagatcatcgcgcttttgatcaagcagtcgaacttgcaaataaaagtcatgcagacttattaatatcaactgaccctgatgcagatcgacttggtattgctgaacgtgatgcacacggtcatatcacatattttaatggcaaccaaattggtgcgctgttacttaattatcgtattcaacaaacgtctcaattacgtcaccgcttaatgattcaatctattgtaagtagtgagttaacaaagtcattagcacgctataataatgttgaatataaagaggtgctgacgggctttaaatttattgctcaggaaataagacaactggatgatcatcaaaatatgattttcgcatttgaagagagttacggttttctatcagagccttttgtacgtgataaagatgccgtacaaattgtgccactcattataaaatacgcttctgagttaaaattatatggcaaaacattgaaagatgaattagaacagatttatcaaactgttggtagacatgaggatacattattctcgcatacgctagaaggatttgaagggaaaaagaaaattaatgcaataatgaccaaattccgttcaaatccaccgcaagagattcaaggactcaaagtgaaagcaattgaagattatttaactagcgaggtttatcatttggataaagatacaacgtcgcagattaattctcctaaatcaaatgttattcgtgtcttatttgacgaaggatttatcgctttacgtccttctggtactgaacctaaaattaaattatatgtgtcgttaaaatgtccgaattttgatgatgtagctcaaaaaattaatgcgatgatttttagctaa

SEQ ID NO: 404913 - DNA, 393 bp, Staphylococcus aureus
atgaaaaaagtaatcaatgtagtaggagctattattttttctgataacaaaattctttgtgcacagagaagtgaaaaaatgagtctgcctttaatgtgggaatttcctggcggtaaggttgaaaagaatgaaactgaaaaagacgctttgattagagaaattagagaagaaatgaaatgtgatttaattgttggagacaaagttataactacagaacatgaatatgattttggaattgttaggttaacaacatacaaatgtactttaaacaaagagttaccaactctaactgaacataagagtattgaatggttgtcaataaacgaacttgataaattaaattgggccccagcggatataccagccgttaataaaattatgactgagggataa

SEQ ID NO: 404914 - DNA, 2862 bp, Staphylococcus aureus
atgagtagattactaaatgatttcaatcaatctttacataaagggtttatagacaaacatatttctcataaagggaattatacaccgaagcttttagtaaataataaaaatgaaaaagttctttcaacaattatagatgaacttcaaaaatgtgaaacgttttatttttctgtggcttttataacagaaagcggtttagccagcttaaaggctcaactattagatttaagcaataagggtgttaaagggaaaatattaacatctaattacttagggtttaatagtcctaaaatgtatggagaattacttaaattaaaaaatgtagaggtaagattaactgatattgctggattccatgccaaaggatatatttttgagcataaggattatagttctatggtaataggaagctctaatttaacatctaatgcgttaaaggttaattatgagcataatgttttactgtctactatgaaaaatggcgatttagttgatagtgtaaaaagtgaatttgacttgttatggcaaaagagtaccccactgactgagcaatggattaattcatataaagaatcatttgagtaccgttccttagaaaaattagcggaggttgaacaaactcaaatgctgctagctgataaggtgaaaaaatcagtggaaattgtacccaatttaatgcaagcagaagcattaaggtcattaaaagctattagggataaagccaaagataaggcgttaataatatctgcaactggtacaggtaaaacgattttatgtgcattagatgttagagaagtaaaccctaataaatttttatttattgttcataatgaggggattttaaatagagctaaggaagaatttaaaaaagtattacctataaaaaatgatagtgattttggattgttgacaggaaaacatagagatgtcgatgccaaatatttatttgcaaccattcaaacattatctagagatgataattttaagcaatttgatgaaaatgaatttgattatattgtttttgatgaagcacatcgttctgctgcatctacttatcaacgagtatttaactacttcaaacctaagttcatgctgggaatgactgctacaccagaaagatcagatgaattaagtatatttgaactgtttgattataatattgcatatgaaataaggttacaagcagcattagaaagtgatattttatgtccatttcattattttggtgtgactgattatgtacatcaaggtattaaagaagatgatgtaactaaactgagatatttaacttctgatgaaagagttaattatattattcaaaagacagattactatggatattcaggtgaaattttacaaggattgatttttgtaagtagcaaaaaagaagcttatgatttagcggataaactaagttcaaaagggattaaaagtgttgctttaacaggagatgatagtgttaattatcgccaaattgtaatagaaaaattaaaagaaggtaagattaactatattataactgtagatctttttaacgaaggtattgatattccagaagtcaatcaagttgtaatgttgagaccaacagagtctagtattatattcattcagcaacttggtagaggattaagaaaaagttcaaataaagagtatgttacagtaattgattttattggtaattataagacaaattatttaattccgattgcgctttctggggatcaatcgcaaaataaagataattataagaagtttttaacgaataacgattcgattaatggagtatctacaattaattttgaagaagttgctaaaaaacagatttacaattcattggatgcagtatcattaaatcaaaataaattaatattaaaagcttatgaagaagttgaaaatagattgggacacatgccgttactaatggatttcatacaacaacattctatagatccaagcgttatattttctaaatttagtaattattacgagttcttagtgagatataaaaaaatagatacattattgacggaaaatgaatctaaaaatctggttttcttttcaaggcaaatagcacctggattgaaaagaatcgatagtttagttttagaagaacttttaaaaaatgaattaacatatgatgaattaaaaaataaaatgttgaacgaagttaaggatataacagaagatgatatagatacttcattaagaattttagatttttcattttacaacgcaggaattgaaaaaatctatggaagtcccattatagaacgtaatgaaagaatgataagactaagcgatgcatttactaatgctctaagtaatcaaacatttaatatgtttttagaagatcttattgaattatcaaagtataacaatgaaaaataccaaaaaggtaaaaatggactgattttatataataaatattcaagagaagattttagtaaaatatttaattggaataaaaatggttcgtctgtaatcatgggatacatgataaaaagccaagaaatgccaatatttatcacttatgataagcatgaggatataagtgatagcacaaaatatgaagatgaatttttaagtcaagatgaattaaaatggtttactaaatctaatagaacgctagaatcaaaagaagttcagaaaattttgtcccatagagcaaaaggaattaaaatgtatatttttgtacagaaaaaagatgatgatggtatatatttttattatttaggaactgctggatatatagaaggttcagaaaagcaagataaaatgccgaatggttcaaacgtagtaacgatggatttagcactggataaagctgtaagagatgatatatatcgttatctaacaaattaa

SEQ ID NO: 404915 - DNA, 777 bp, Staphylococcus aureus
atgatgattcactcaaaaaggttgaggctctggctgtatttagtattattagctgtttttataggggcttgcggaatgaaaaaggaagaaagcagtaaagataaacaaattaaagaaaacttcaacaaaacgttgagcctgtatccaactaaaaatcttgaagacttttatgataaggaaggctttcgagatcaagagtttgaaaagggcgacaaaggcacttggataattcactctaaaatgacaatagaaacaaatggaaagaatatggaatccagaggattggtcctgtatgtagaccgcaataccagaacgacaaaaggtgaatttattgtgagggaattatgggaagataaaaaaggatactcacgtagtaaagaaaaagaatatccagtaaaaatggaacataataaaattatcccaaccaaaccgatagctgatgataaattaagaaaagaaatcgaaaactttaaattctttgtacaatacggtgactttaaagatattaatgattataaagatggtgacatttcatataatccgaatgtgccaagttattcagcaaagtatcaattaagtaatgatgactacaatgtgaagcaacttagaaagaggtatgatataccaactaagaaagcacctaaattattaataaaaggcgatggtgatttaaaaggatcatctataggacacaaaaatttagagtttacatttatagaaaataaagaagaaaacatctattttacggatagtattaatttcaaacctactgaatag

SEQ ID NO: 404916 - DNA, 786 bp, Staphylococcus aureus
atgattcattcaaagaaattaacgctcggtatatgtttggtattactcattatattgattggaggttgtgtcattatgacaaaaacaaatggtcgaaacgctcaaattaaagaaaatttcaacaaaacattaagtgtatatccaaccaagaatctcgatgatttttacgataaggaaggttttcgagatcaagaatttgataaaagagataaagggacttggattatttattctgaaatggttatcgaaccaaaagggaaaaatatggaatcgagaggaatggtgctctatatcaatcgcaatactagaacaacgaagggtaattttattgtcaccgaaataactgaagatagtaaaggatattcacgtagtaaagaaaaaaaatatcctgtcaagatggaaaacaatcgaattattccaacaaagcctataccggatgacaagttaaaaaaagagattgaaaactttaagttctttgtacaatatggaaattttaaagattttaaagattataaaaatggtgatatttcatataatcctaatgtgccaagttattctgcaaagtatcaattgaataatgatgactataatgttcaacagttaagaaaacgatatcatattccaaccaaacaagcgcccgaattaaaattgaaaggatccggcaatttaaaaggctcatccgtaggatctaaggatctagaatttacgtttgtagaaaatcaagaagagaatatctatttttcagattcggtcgaatttacacctagcgaggatgataaatcatga

SEQ ID NO: 404917 - DNA, 1113 bp, Staphylococcus aureus
atgagtcaaacggaatatcaaataaaatctggcaatataaaaggtaactctgaagaaacaagtacagtatctaatataagttatgaaatagaaaacgcaaataacagtggtttaaaacaaaataaaattgataaacaaattaaaaagttacaagaaaaaaataaattccctaaaaatctttcatatcttaaaagttatacggaccccaaaacaggcacgactacaagcgcctttttaaataaagacactggcaaagttactttaggtatgacaggtactaatgtacacaaagacgcaatattaaaacaaacatttggtgttccttcttatcaaggatatatagatgtgagtgaaacgctaaaggatattggggccgatgtcaatattggccttcattccgtcacagataaagatccacattataaaaatacccaagactttatcaaaaatatcaaaaaagactatgatattgatattattaccggacattcgctgggcggtagagatgcgatgattttaggtatgagtaatgatattaaacatatcgttgtgtataatccagctccattagcgatcaaagatgtgagcggcctttatgccgatcaagaagaacttaaaaaattgattgaaaagtacgatggtcacattgtaagatttgtgtctgatgaagacgaattagatgcaggtgtccgcaatcatttatatgaaactgctggagaaaaaatagtacttaaaaatggagaaggccatgcaatgagtggtattttaatgagcagaacacaggctataatcttagctgaattaaacaaagttaaaggctaccaagacgaaaataataaagcattaaaatccgttcgtaaacaaacgaggcatagattacataaagtagagacgttaagagcgaattggattcaaacaacgggtggatcactctcttcctcccaacaacaattattagaagctttaacagcactaaccattgccgaaggcttaaatcaattagtgaatgaagaaagccaacatttgaaaaaatgtatcacgcgatggcacataaatttggagacaactggaaaaaagcgcaagaagttggaaatgaaattggtgaaaaattaa

SEQ ID NO: 404918 - DNA, 327 bp, Staphylococcus aureus
atgtttactacgtataaaaatattaatgaacttgaaaatgcctatgatgaagaaagaaaacaattgaatgatgcattcaatcaaattgatgaattcagacatcaaacacgcaagaaatgtgaacaaatgtatgatcatttcttatatctcaaacataaaatgaattatagtgaagacgctatgatcaggatgacacgtattatagaatctttcgatagagaaacgaatcaacgtatccgacatcacgaaatgaaattagaagattataaagatgagttaagaagagaatatctaaaacaatctgacagaattgaaggagatgaataa

SEQ ID NO: 404919 - DNA, 288 bp, Staphylococcus aureus
gtgggacttgattttagtggtttaccagatttagcagtattggaacaaatgaaggaaaaagaacagattagtgaggttattgcgcctgaacatgttcgtatgcatcatgatcatcaaaataagctgaaaagtgatgagaaaatattacttgaccaaatggtaagtcatttcaaaaaatttgaagatgattttaaaaatgcggcacaaggggcttgggtgaaaaatgccacagacgaattaaaagatattagtaatgatttagaaaaaattcaagatattaaagtataa

SEQ ID NO: 404920 - DNA, 462 bp, Staphylococcus aureus
atgattcattcaaagaaattaacgctcggtatatgcttggtattactcattatattgattgtaggttatgtcattatgacaaaaacaaatggtcgaaacgcccaaattaaagacacatttaatcaaacattaaaattatatccaaccaaaaatctcgatgatttttacgataaagaaggctttcgagatcaagaatttaaaaagggtgataaaggtacttggatagttaattctgaaatggtaatcgagccaaaaggtaaggatatggaaacgagaggaatggtgctctatatcaatcgcaatactagaaccacaaaagggtattattttataagtgaaatgacagatgacagtaacggcagaccaaaggatgatgaaaaaaggtatccggtaaaaatggaacataataaaatcataccaacgaagccactaccgaatgacaagttaaaaaaaagagattga

SEQ ID NO: 404921 - DNA, 192 bp, Staphylococcus aureus
atgagaaaagagattgaagcgcttattttctcagacgtaagtagctatgatatttacgtgaacactggtgtaaatcaaggattaattggtgacatcaaagatggttacctaactattgattctatgccttacattgatgctgagcgtttgtatcactttgctatggaacgtaaatcgttagtcactaactag

SEQ ID NO: 404922 - DNA, 282 bp, Staphylococcus aureus
gtgacatatcatgagcgtgttttagcattaagagcagaaagtaaaagaaccgcatttgattttcgattcgaagatttatttagcaaagaagaatggctaagtatgtctcttgcagaaagacaaaaagctgaaaaagcatttcgacacgaagttaaaaatatggacgatgtaagaatgcccttctcaagtgtccatgacgcccaagtaaaattatataatgttgtatattcttataacggcattaaacgtaattttaaacaagttgaaaatgaaggattctaa

SEQ ID NO: 404923 - DNA, 696 bp, Staphylococcus aureus
atgacagtattaacagataaagtagcagtagttacaggtgcaggtagtggtattggagaagcaattgcaacattactacatgaagaaggggcaaaagttgtcttagcaggtagaaataaagaaaaattacaaaacgtagcgaatcaattgtcacaagatagtgtgaaggtagtgccaacagatgtaacgaataaagaagaagtcgatgaattgataaaaattgcacaacaaacattcggtggtttggatattgttatcaatagtgcggggcaaatgttgtcgtctaagattactgattatcaagtagatgagtgggatagtatgattgatgtgaatatcaaaggcactttatatacggcacaggctgcattaccaactatgttagaacaatcaagtggccatcttattaacattgcatctatttctggctttgaagtaacgaaaagtagtacgatttatagtgcgacgaaagcagcagttcacactattactcaaggattagaaaaagagttggcaaagacaggcgttaaagtaacaagcatttctccaggaatggtagatacagccataactgccgcatacaatccaacagatcgtaaaaaacttgaaccacaagatattgcagaagcagtattatatgcattaacacaaccaaagcacgttaacgtgaatgaaattacagtgcgtcctgtataa

SEQ ID NO: 404924 - DNA, 423 bp, Staphylococcus aureus
atgaacaaaaaacatgtttttataattattggtgtcattttatgtatatgtatagttgcatcagtcatttatttaaaagtgaaatatgacgaaaaagaaaaacaaaaagcaatatactataaagaacaacaggagcgtattacactctatcttaagcataatactaaagaacccaataccatcaaaactgtacatttcacaagtttaaaaagaggacctatgggcgatgcagtaattgaaggttacataaatgaaaataaagaagatgattttgttgcatatgggtctccagaacataattatcaatttggtggaagtttaatcaaaagtaaaaatttaagcacgttattaaaaccagtacatcaaaccaaatcacctgatgagataaaaaaggaattagagtctaaaaagaacgaccgctaa

SEQ ID NO: 404925 - DNA, 420 bp, Staphylococcus aureus
atgtcgaaaaagaaaattttaatattaactagtattatgttaatcatattaattagtgttgcaggtatctatttaaaagtgaaatatgacgaaaaagaaaaacaaaaagcaatatactataaagaacaacaagcgcgcattacactttatctcaagcataacactaaagaaccgaatacaatcaaatctgtacatttcacaaactcggaaacaagtcctatgggaagtgctgtgattgaaggttacataaatgaaaacaaaaaagataattttactgcttatgctacaccagaacataattatcaatttggtggtgctatgatagaaagtgaaaaattaagcgagttactaaagccagccaatcagttaaaatcaccagatgatataaaaaaagaactaaataaaaagaagagtcactaa

SEQ ID NO: 404926 - DNA, 420 bp, Staphylococcus aureus
atgtccaaaaaacatgtttttataattattggtgtcatattgtgtatatgtacagtttctacggtcatgcattttaaaatgaaatatgatgaaaaagaaaaacaaaaagcgatttactacaaagaacaacaagaacgtattacactctatcttaagcataatactaaagaaacgaacacgattaaatctgtacatttcacaaacttggaaacaagtcctatgggaagtgctgtgattgaaggatacatcaatgaaaataaagaagatgattttactgcttatgcatcgcctgaacataattatcaatttggtggcgctatgataaaaagtgaaggagtagataaattattaaaaccagcacatgaaagaaaatcaccagaaaaaatcaaagaagaattagataaaaaagaaggccactag

SEQ ID NO: 404927 - DNA, 423 bp, Staphylococcus aureus
atgccgtataattacaagaaacaaaatggagagttaatgtctgtaatgagccaaggtgaaaagtttattcatcaatcacccgttaatgatgaacttagtgcattgattaagttattaatttctaaaattaacggttgtcattattgtgttgatatccataaaaaagaattaaaggaattgggtgtaacacaaatgaaaattgatgaagtcttgagttttagacatttagatttatttactgatcaagaaaaagtgacgcttgaatttgcagaaatgttaaattcaatcaaagactttaagaagtttgaaattattgaccggctaaaatcattttatgatgaagaacaaattattgatcttgtctttgttgtaaaccaaattaacggttggaacagattaaatattattagtgatagactataa

SEQ ID NO: 404928 - DNA, 1539 bp, Staphylococcus aureus
atgacatcaaaacatcaacaaaaggggtctatcgtcaatcgtttcttgaatagtgttgaaaaaatcggaaataaattgccagatcctagcgtcttattctttttaatgtgtgtgggcttagccattatgacatgggttatctcattatttaatgtatctgttaagcatccaggtacgcatcaaaccatttatattaaaaatataattagccatgatggatttacgatgataatgaatgatacgattaaaaatttctcagagttcccagcattaggcttagtactagcagtgatgattggtattggtgttgcagagaaaacaggatacttcgataagttaatgatttctgttgtgaatcgcgcaccacgtttcttaattttaccgactattatattaattggtattttaggtagtacagccggcgatgctgcgacaattatcttgccgccgcttgcagcaatgctttttattaaaattggctatcaccctatcgctggactaacgatggcatatgcttccgctgttggaggatttgcagcaaatatagttgttggtatgcaagatgctttggtctattcatttacagaaccggcaacacgtatcgtttcagattctattaaaacaaacgttgctatgaactggtactttatcgcagcgagtgtcgttgtattacttcctacgatattgctagttacaactaagctcattattcctagattaggaaaatatgatgacagtttaatgcatgatgaccatgaagaaacatcttcacatattactgacaaagaagcacatgctttaaaatgggcaaatatcagtttcatagtcacaattattttattaattattacagccattcctgaacatagctttttaagaaatgctaaaacaggcagcttactagacgatgcgccattaattaacggtgtcggattaattattcttgtcgtatttttagtacctggattagtttatgggattttaagcaaagaaattaaaaatacaaaagacttaggtaaaatgttcggcgatgctgtaggatcaatgggaacatttatcgttattgtgttttttgcagcacagctacttgcgtatttaaagtggagtaatttaggaattatcgctgctgttaaaggtgccaaattattagaacatcaaaacggtattgtattgatactaggtattattgtactgagtgcaatggtcaacatgttaatcggaagcgcatcggctaaatggggtattttaggaccgatattcgtaccaatgttaatccttatcggctttcatcccgcattcacacaagtcatttaccgtgtaggcgattcaattaccaatccaattacaccgatgatgccgtacttacctttattattaacttatgcacaaaaatacgataaacgcatgaaactcggagccttactttctagtttaatgccgtattcaatcgcgctaagtattgtatggacagtatttgtcatcatttggttcctattaggtatccctgttggaccaggtggaccgatattcgttaaataa

SEQ ID NO: 404929 - DNA, 720 bp, Staphylococcus aureus
ttggcggtagacatagctgaagcggtatcggagactgtcgataaaattaaaagtaatggtgacaatgcgaaggcgtataatgtggataatgcaagcgaacaacaagtggtagactttgtgtctgacataaaggaacagtttggaagaatcgatgtgttgtttaataatgccggtgtggataatgcggctgatagaattcatgagtatccaatagatgtgtatgacaagattatgaatgtagatatgcgtgggacatttttaatgacgaaaatgatgttacctttaatgatgaatcaaggtggctctattgttaatacgtcttcattttccggacaagcagcagacttgtatcgctctggatataatgctgcgaaaggtgcagtgattaattttacaaaatcaatcgcaattgagtatggccgtgatagcattcgagccaatgcgattgcaccaggtacaattgaaaccccgttagtagataaactgacaggtacgagtgaggatgatgcaggtaaaacatttagagaaaatcaaaaatggatgactccgctgggacgtttaggtaaaccagaagaagttgctaaattagtagtcttcttagcatctgacgacagttcattcataactggagagacgattcgaattgatggtggtgtgatggcttacacatggcctggcgagatgttaagtgatgattcgtggaagcggacattggaataa

SEQ ID NO: 404930 - DNA, 366 bp, Staphylococcus aureus
atgttaaaagaaaaagaaagttttagattgctatatcaagctataagagagattgcagataaaattggagataatcagttagaaactaattccgttagtttattattattggactttgattttgaacatgaagtatttgatgaattgtatcttgtgattttaaaatatttaaatacagtaagtatagagaacataagtcatagtgagcttttgaatttaatagaaaatacgattccagaagatcgagagattaacacgtttgtaaaaaataaaataataattggctttgctaataattacttccctgaattacaagtattagcaaacgaaataaaatctgatatggctagttcattaaaacaatga

SEQ ID NO: 404931 - DNA, 822 bp, Staphylococcus aureus
atgaatcggcaggttatagaattttctaagtataatccttcggggaatatgacgatacttgttcattcaaaacatgatgctagtgaatatgcatctatcgccaatcagttgatggccgcaacacatgtatgctgtgaacaggtaggctttatagaatcaacacaaaatgatgatggtaatgattttcacttagttatgagcggtaatgaattttgcggtaatgcgacgatgtcatatatacatcatttgcaggaaagtcatttgcttaaagaccaacagtttaaggtgaaggtgtctggctgttcggatttagtgcaatgcgcaattcatgattgccaatactatgaagttcaaatgccacaagcccatcgtgttgtgccaacaacaattaatatgggtaatcattcatggaaagcaatagaaattatttatgaaacatatgtacattatgtgattccagttaaacaagtaacaacagaaattcaacatttggttgaagcgtttgtgcgtgagcaacaatggagtcacaaatataaaacagtaggtatgatgctttttgatgaacaacgtcaatttttacagccattaatctatataccagaaattcaaagtttaatttgggaaaatagctgtggttctggtacagcatcaattggggtttttaataattatcaacgtaatgacgcatgcaaagattttacagtacatcagccagggggcagtattttagtgacatcaaagcgatgtcatcaattgggatatcaaacttcaattaaaggacaggttacaactgtagctacaggaaaagcatatatagaataa

SEQ ID NO: 404932 - DNA, 819 bp, Staphylococcus aureus
atgaataactttaataatgaaatcaaattgatattacaacaatatttagaaaagtttgaagcgcattacgagcgtgtattacaagacgatcaatatatcgaagcattagaaacattgatggatgactatagtgaatttattttaaatcctatttatgaacaacaatttaatgcttggcgtgacgttgaagaaaaagcacaattaataaaatcactgcaatatattacagcgcagtgtgttaaacaagtggaagtcattagagcgagacgtctattagacggacaggcgtctaccacaggttactttgacaatatagaacattgtattgatgaagagtttggacaatgtagtatagctagcaatgacaaattattgttagttggttcaggtgcatatccaatgacgttaattcaagtagcaaaagaaacaggtgcttcagttatcggtattgatattgatccacaagccgttgacctagggcgcagaatcgttaacgtcttagcaccaaatgaagatataacaattacggatcaaaaggtatctgaacttaaagatatcaaagatgtgacgcatatcatattcagctcgacaattcctttaaagtacagcattttagaagaattatatgatttaacaaatgaaaatgtcgtagttgcaatgcgctttggtgatggcatcaaagcaatatttaattatccgtcacaagaaacagcggaagataagtggcaatgtgtgaataaacatatgagaccacagcaaatttttgatatagcactttataaaaaagcagctataaaggtaggtattacggatgtctaa

SEQ ID NO: 404933 - DNA, 1302 bp, Staphylococcus aureus
atgtctaaattattaatgataggcactggtccggtcgcaatccaattagcgaatatttgctatttaaaatcagattatgagattgatatggttggacgtgcctcaacatcagaaaaatcaaaacgcttatatcaagcgtataaaaaagcgaaacaatttgaagtcaaaatacaaaacgaggcgcatcaacatctggaaggtaagtttgaaattaatcgtttgtataaagatgttaaaaacgttaagggtgaatacgaaacggttgtcatggcatgcacagcagatgcttattatgacacactacagcaattgtcgttagaaactttgcaaagtgtcaaacatgtcattttaatatcaccgacatttggttcgcaaatgattgtcgaacaatttatgtctaaatttaataaagatatcgaagtgatttcattctcaacttatcttggcgatacacgtattgttgataaagaagcgcctaatcatgtgttgacaacaggtgtaaaaaagaaattgtacatgggatcgacacattcaaactcaacaatgtgtcaacgaatctctgctttagctgagcaattgaagattcaattagaagtcgttgaatcgccactgcatgctgaaacgcgaaacagttcgctttatgtgcacccaccactatttatgaatgacttttcattgaaagccattttcgaaggaacagatgtaccggtttatgtgtataagttatttcctgaaggaccgataacgatgacactaatccgtgaaatgcgtttaatgtggaaggaaatgatggttattttacaagcatttagagtgccgtcagtcaacctgcttcaatttatggtgaaggaaaattatccagtacgtcctgaaactttggatgaaggtgatattgagcatttcgaaatcttgccagatatcttacaagaatatctgctttatgtaagatataccgcaatcctcattgatccattttcacagccagacgaaaacggacattactttgatttttcagctgtaccatttaagcaagtctataaaaatgaacaggatgttgttcaaattccaagaatgccaagtgaagattattacagaacggcgatgattcagcatattgggaaaatgctaggtatcaaaacgccaatgattgatcagttcctaactcgctatgaagcaagttgccaggcgtacaaggatatgcatcaagatcaacacgtatcttctcaatttaatacaaatctatttgaaggagataaagcactcgtcacaaaatttttggaaatcaatagaacgctttcataa

SEQ ID NO: 404934 - DNA, 1599 bp, Staphylococcus aureus
atgagaaaactaactaaaatgagtgcaatgttacttgcatcagggctaattttaactggttgtggcggtaataaaggtttagaggagaaaaaagaaaacaagcaattaacgtatacgacggttaaagatatcggtgatatgaatccgcatgtttacggtggatcaatgtctgctgaaagtatgatatacgagccgcttgtacgtaacacgaaagatggtattaagcctttactagctaaaaagtgggatgtgtctgaagatgggaagacatacacgttccatttgagagatgacgttaaattccatgatggtacgccatttgatgctgacgcagttaagaaaaatattgacgcagttcaagaaaacaaaaaattgcattcttggttaaagatttcgacattaattgacaatgttaaagttaaagataagtacacggttgaattgaatttgaaagaagcatatcaacctgcattggctgaattagcgatgcctcgtccatatgtatttgtgtctccaaaagactttaaaaacggtacaacaaaagatggcgttaaaaagttcgatggtactggtccatttaaattaggtgaacacaaaaaagatgagtctgcagactttaacaaaaatgatcaatactggggcgaaaagtctaaacttaacaaagtacaagcaaaagtaatgcctgctggtgaaacagcattcctatcaatgaaaaaaggtgaaacgaactttgccttcacagatgatagaggtacagatagcttagacaaagactctttaaaacaattgaaagatacaggtgactatcaagttaagcgtagtcaacctatgaatacgaaaatgttagttgtcaattctggtaaaaaagataacgctgtgagtgacaaaacagtcagacaagcgattggtcatatggtaaacagagataaaattgccaaagaaattttagatggtcaagaaaaaccagcaactcaattatttgcgaaaaatgtaacagacattaatttcgatatgccaacacgtaagtatgaccttaaaaaagcagaatcattattagatgaagctggttggaagaaaggtaaagacagcgatgttcgtcaaaaagatggtaaaaaccttgaaatggcaatgtactatgacaaaggttcttcaagtcaaaaagaacaagcagaatacttacaagcagaatttaagaaaatgggtattaagttaaacatcaatggcgaaacatcagataaaattgctgaacgtcgtacttctggtgattatgacttaatgttcaaccaaacttggggattattgtacgatccacaaagtactattgcagcatttaaagcgaaaaatggttatgaaagtgcaacatcaggcattgagaacaaagataaaatatacaacagcattgatgacgcatttaaaatccaaaacggtaaagagcgttcagacgcttataaaaacattttgaaacaaattgatgatgaaggtatctttatccctatttcacacggtagtatgacagttgttgcaccaaaagatttagaaaaagtatcattcacacaatcacagtatgaattaccattcaatgaaatgcagtataaataa

SEQ ID NO: 404935 - DNA, 936 bp, Staphylococcus aureus
atgttcaaatttatcttaaaacgtattgcgctcatgtttccattgatgattgtagtaagttttatgacatttctattgacgtatattacaaatgaaaatccagctgtgacaattttacatgcacaagggacgccaaatgtaacaccagagttgattgcagaaacgaatgagaagtacggtttcaatgatccattattaattcaatataaaaattggttacttgaagcgatgcaatttaattttggtacaagctacattacaggtgacccagttgctgaacgtattggtccagcatttatgaatacattgaaattaacaataatttcaagtgttatggtgatgattacatcaattattttaggtgtagttagtgcattaaaaagaggaaagttcactgatcgtgcgatacgttcagtggctttctttctaactgcattaccatcatattggatagcttcaatacttattatttacgtttcagtgaagttaaacatattgccgacttctggattaacaggtccagaaagttacatattgccagtgatcgttattacgattgcctatgctggtatttactttagaaatgttagacgctcgatggtggaacaattaaatgaagattatgtactttatttaagagcaagcggtgtgaaatctatcacattaatgttgcatgtgttgcgtaatgctttacaagttgcggtatcaatcttttgtatgtctataccaatgataatgggtggactagttgttatcgagtatatctttgcatggcctggactaggtcaattaagtttaaaagcaatacttgaacacgattttccagtcattcaagcatatgtattaattgtagcggtattatttattgtatttaatacattagcagatatcattaatgcgctattaaatccaagattaagggagggcgcacgatga

SEQ ID NO: 404936 - DNA, 870 bp, Staphylococcus aureus
atgataattttaaaacgattattacaagataaaggtgcagtaattgctttaggcattattgtattatatgtctttttaggattagcagcaccacttgtgacattttatgatcctaaccatatcgatacagcaaacaaatttgctggcatgagttttcaacatctactaggtactgaccatttaggtagagatattttaactaggttaatttatgcgattagaccaagtttgttatatgtctttgttgcgctatttgtttctgtacttattggatctattttaggattcttatcaggatatttccaagggtttgttgacgccttaatcatgcgtgcgtgtgatgttatgttggcattcccaagttatgttgtaacgttagcattaattgcattgtttggaatgggtgccgaaaatattatcatggcatttattttgacgcgttgggcatggttctgtcgtgttatacgtacaagtgttatgcagtacactgcttctgaccatgtaagatttgctaaaacaatcggtatgaatgatatgaaaattattcacaaacatattatgccattaacattagcagatattgctatcatctctagtagctcgatgtgttcaatgatcttgcaaatatctggcttttcatttttaggattaggtgtcaaagcgcctactgcagagtggggcatgatgcttaacgaagctagaaaagtgatgtttacacatcctgaaatgatgtttgcgccaggtattgccatagtgattatagtgatggcatttaacttcttatccgatgctttacaaattgctattgatccccgcatctcttctaaagataaacttcgttctgtgaaaaaaggagtggtgcaatcatga

SEQ ID NO: 404937 - DNA, 816 bp, Staphylococcus aureus
atgacattgttaacagttaaacatttgacgattacagatacctggacagatcaaccactcgtgagtgatgtgaattttacattaactaagggtgaaactttaggcgttattggagaaagtggtagtggtaaatcaatcacttgtaaatcgattattggtttgaatcccgaacgactcggggtgacaggtgaaattatctttgatggtacatcaatgttgtcattatctgaatcgcaattgaaaaagtaccgtggtaaagacattgcgatggtcatgcaacaaggtagtcgtgcctttgacccatcaactactgtcggtaaacaaatgtttgagactatgaaagtacatacgtcaatgtctacacaagaaattgaaaagacattgattgaatatatggattatttaagtttgaaagatcctaaacgtatattaaaatcatacccttacatgttatcaggaggaatgttacagcgattgatgattgctttagcgttagctttgaaaccaaagttaatcattgctgatgagccgacaacggctttagatacaattacacaatatgatgtactggaagcatttatagatattaaaaaacactttgactgtgcgatgattttcatttcacatgatttaacggttattaacaagattgcagaccgtgttgttgtgatgaaaaatggtcagcttattgaacaagggacacgtgaatcagtcttgcatcatccagaacatgtttatacgaagtatttattatcaacgaagaagaagattaatgatcattttaaacatgtgatgaggggtgatgtacatgattaa

SEQ ID NO: 404938 - DNA, 750 bp, Staphylococcus aureus
atgattaaaattaaagatgttgaaaagtcatatcaaagcgcacatgtttttaagcgtcgtcgaacacctatcgtgaaaggtgtgtcatttgagtgtccaatcggtgcgacgattgcgattatcggagaaagtggtagcggtaaatcgacgttgagtcgtatgatattaggtattgagaaaccggataaaggttgtgtaaccttaaatgatcaaccgatgcataagaagaaagtgagacgtcatcaaattggtgctgtatttcaagattatacgtcatcattacatccatttcagactgttagagaaatcttatttgaagtgatgtgtcaatgtgatggacaacctaaagaagttatggaagtccaagcaattacattgttggaagaagtcggtctatctaaggcatacatggataaatatcctaatatgttatcaggtggagaggcgcaacgtgttgcgattgcgcgtgcaatatgtattaaccctaaatatattttgtttgatgaagccattagttcactcgacatgtcaattcaaacacaaatattagatttattgattcatttacgtgaaacgcgtcagttgagttatatttttatcacacatgatattcaagctgccacgtatttatgtgatcaattaattatttttaaaaacggaaaaatagaagaacaaattccgacaagcgcattgcataaaagtgacaatgcttatacaagagaattaatagaaaaacaactatcattctaa

SEQ ID NO: 404939 - DNA, 1194 bp, Staphylococcus aureus
atgaaaggtgcaatggcttggccctttttgagattatatatattaacattgatgttctttagtgccaatgcaatcttaaacgtgtttatacctttacgagggcatgatttaggcgcaacgaatacggttatcggtatcgttatgggggcatacatgttaacagcaatggtatttcgaccatgggcaggacaaattattgctcgtgtcggtcccattaaagtattaagaattattttgattatcaatgccatagctttaattatttatggttttactggcttagaaggttatttcgtagcacgtgttatgcaaggtgtgtgtacggcattcttttctatgtctttacagctaggtattattgatgcattaccagaggaacatcgttctgaaggtgtatcattgtactcgctattttcaacgattccaaacttaatcggaccattagttgccgtaggtatttggaatgcaagtaatatttcactatttgcaattgtcattatctttatcgcattaacaacaacattctttggctatcgcgtgacctttgctgaacaggaacccgatacgtcagataagattgaaaaaatgccgtttaacgctgtaactgtttttgcgcaatttttcaaaaataaagagttgttgaacagtggtattatcatgattgttgcatcgattgtatttggtgcagttagtacatttgtaccgttatacacagtgagtttaggattcgcgaatgcgggaatctttttgacaatacaggccatcgcagttgttgcggcaagattttacttaaggaaatacattccgtcagatggtatgtggcatcctaaatatatggtatctgtactatcattattagtaatcgcgtcatttgtagtggcatttggtccgcaagtaggtgcaattattttctatggtagtgcgatattaataggaatgacgcaagcaatggtgtacccaacattaacatcatacttaagcttcgtcttaccaaaagtaggtcgtaatatgttgttaggtttatttattgcctgtgcagacttaggtatatcgttaggtggcgcattgatgggacctatttccgatttagtaggatttaaatggatgtatctaatttgtggtatgttagtcattgtaataatgattatgagtttcttgaaaaagccaacaccacgtccagcgagtagtctttaa

SEQ ID NO: 404940 - DNA, 750 bp, Staphylococcus aureus
atgtcaaatacaaataaacattacatagaagaagaatacgctaccgaacaatcgcgttttttcaaacgtgatattggatttattttcctttacatatttttggttaacatcttgccgatcattatcgtctttttaacttttgggttagtagctgtattcactcaacaagctccgtggggtttctcttttcctatttcaatgaacattagctatttactcgcagttattatttcactagctatttttcgtctgatgcatgaagatgcgtttattccaatgatacgttcgcaaatcgttgctagtgctaaatataaatggcatattcttatatcatttacactaagtgtcgtactctttttacttttaaatcatttcaatattttcgcactaaatgtagattcctttactgtctttgacatttacccgctcattaaagggtatggttccatcagtttaatagctatattttcgttaaccattatattaaatactttgatttgtcaacttattttccgtcatattttaattcaagaattaagcagattaatacctttaaagattacaatagtattgtccattatccttgaaactctgttctactatccatacattaatacatggtgggaattcattccagcattgatactagcaggtagtgcgacttacttatatttaaaatcataccgtaattttatggtgagctatttctatcaattagcagttatactcgttttgcatattttcatgtaa

SEQ ID NO: 404941 - DNA, 1578 bp, Staphylococcus aureus
atgacgtttcttacagtcatgcaatttatagttaacattatcgttgtaggattcatgcttacggttattgttatcgggcttatttggttaattaaagataaaagacaatcacaacatagtgtattaaggaattatcctttactagcacgtattagatatatttcagaaaaaatgggaccggaattacgtcagtatttattttctggggataatgaagggaaacctttttcacgtaatgattataaaaatatcgttttggctggaaaatataactctcgtatgaccagcttcggtactactaaagattatcaagacggcttttacatacagaacacaatgtttccgatgcaacgtaatgagatttcagtagataatacaacattgttatcaacattcatttataaaatcgcgaatgagcgtttatttagtcgtgaagaatatcgtgtgccgacaaagattgatccgtattacttaagtgatgaccatgcaataaaattaggtgaacatttaaaacatccatttattttaaaacgtatcgtaggacaatctggtatgagttatggcgctttaggaaaaaatgccattacagctttatctaaaggtctagctaaagcgggcacttggatgaatacaggtgaaggtggcttatcagaatatcatttaaaaggtaatggggatatcattttccaaattggtcccggtttatttggtgttcgtgataaagaaggtaattttagtgaaggtttatttaaagaggttgcacagttatctaacgtacgcgcatttgagctgaagttggcacaaggtgctaagactcgtggtggtcatatggaagctgaaaaggtaaacgaagaaattgctaaaatccgaaatgttgaaccttataaaacaatcaattcacctaaccgttacgaatttattcataatgctgaagatttgattcgtttcgtcgatcagttgcagcaattaggtcaaaaaccagtaggattcaaaattgtagtaagcaaagtttcagaaattgaaacacttgtacgtacgatggtggaactagataagtatccaagctttattacgattgatggtggtgaaggtggtactggtgcaacattccaagaattacaagatggtgttggcttaccgctatttacagctctacctattgtgtctggcatgttagaaaaatatggtattcgagataaagtgaaattggcggcatctggtaagttagtgacaccagataaaattgcgattgcactaggtttaggtgcagattttgtaaatatcgcacgtgggatgatgattagtgtcggttgtataatgagtcaacaatgtcacatgaatacgtgtcctgtaggtgttgcaacgacagatgcgaagaaagaaaaagcattgattgttggagaaaagcaatatcgtgtcacaaactatgtaacaagtttgcatgaaggcttattcaatattgcagcagctgttggcgtatccagtcctacagaaattactgctgatcatattgtatatcgaaaagtcgatggtgagttacaaacgatacatgattataaattaaaactcattagttaa

SEQ ID NO: 404942 - DNA, 456 bp, Staphylococcus aureus
ttgaaaaaattatgttcattaattgtagtagcattagtttgtatcattgcattatcagcttgtggtaaagaacaaaccaaaacatatgaaggtgatgttagtggtaaacatgtactaacttctatcacatataaagatgataaagttttaaaacagtctacaatcaacacaattaaatatgacgatctaggtatggataaagacgaagccaaaaagttattcgccaaatctgaaagtattttcaaagaccttaaaggcgtaaaatacaaagtagactataaagataaaaaagcaattgaacacttagacatagattacacagaagttgacatgaaaaaattaaataaacgtcttggtgtttcgactaaagaaaataaagatattagttttgaaaaacttgaaaagcaattaaagcacagaggtttaaaagaaaaagataaaatggacgacaaatag

SEQ ID NO: 404943 - DNA, 258 bp, Staphylococcus aureus
atgattatcactagccctacagaagcgagaaaagatttttatcaattactaaaaaatgttaataataatcacgaaccaatttatattagtggcaataatgccgaaaataatgctgtgattataggtttagaagattggaaaagtatacaagagacaatatatcttgaatctactggtacaatggacaaagtaagagaaagagaaaaagataatagtggtacaacaaatatagatgatattgattgggataatctttaa

SEQ ID NO: 404944 - DNA, 267 bp, Staphylococcus aureus
atgagcaattacacggttaagattaaaaattcagcgaaatcagatttaaagaaaataaaacattcttatttaaagaagtcatttttagaaattgttgagactttaaaaaatgatccgtataaaataacacaatcttttgaaaaattagagcctaaatatttagagcgatattcaagaagaattaaccatcagcacagggtcgtctataccgtagatgatcgaaataaagaagtattaatactatcggcatggtcacattatgattaa

SEQ ID NO: 404945 - DNA, 1077 bp, Staphylococcus aureus
atgaatcagtcagtcaaattacttaaacatttaacagatgtaaacggcattgctggttatgaaatgcaagttaaagaagcaatgcgtaactatatagagcctgtcagtgatcaaattattgaagataacttgggtggcatttttggaaagaaaaatgctgagaatggtcaatactcaattatgatttctggtcatatggatgaagttggttttatggtaacaaagattgataaacatggttttatttcatttacgccagttggtggatggtggaatcaagtcatgctatctcaaaaagtaacgattacaacagattcgggcaaagaaattagaggtatcatcggttctaaaccgccacatgtcttaacgcctgaagaacgtaaaaagccaatggaaatcaaaaatatgtttatagatattggtgttagtagcaaggaagaagctgaagaagctggcgttgaagtaggcaatatggttacgccatatagtgaatttgaagtgcttgcaaatgataaatatttaactgcgaaagcatttgataatcgctatggctgtgcattagctattgaggtattaaaacgtttaaaagatgaaaatattggcattaacttatacagtggtgccacagtgcaagaagaagttggtttgcgtggtgcgaaagtggcagcgaatacgattaaaccagacttggcgatagctgtcgatgtaggtattgcttatgataccccaggtatgtcaggtcaaacgagcgatagtaaactaggcggtggtccagttgtcattatgatggatgctacaagtattgctcaccaaggtttgcgaaagcatattaaagatgtagctaaggaacataacatcgaagtacaatgggatacgacaccaggtggaggtacagatgcgggaagtattcatgtcgcaaatgaaggtattccaacgatgacaatcggtgttacgctgcgatacatgcattctaatgtttcagtgctcaatgtagatgattatgaaaattctatccgtcttgttactgaaattgtccgttcattgaatgatgaaagttataaaaatatcatgtggtaa

SEQ ID NO: 404946 - DNA, 663 bp, Staphylococcus aureus
atgttgttagaaattaaagatttagtgtataaagcgagcgatagaatcatactagatcatatcagtctaaaagtagataaaggcgagagtattgccattataggtccatcaggtagtggtaaaagtacatttcaaaagcaaatatgtaatttgtttagtccaactagtggagaactttattttaaaggtaaaccctataatgattatgacccggaagaattgcgtcaacgaatcagttatttgatgcagcaaagtgacttgtttggtgaaacgattgaaaataacatgatattcccatcacttgcacgtaatgataaatttgatagaaaacgtgcaaagcaattaattaaagatgtcggtttgggacattatcaattaagttcggaagtggaaaatatgtcgggtggtgagcggcaaagaattgctatagcgcgccaactgatgtatacaccggatattcttttattagatgaatcgaccagtgcattagacgttaataataaagaaaagatagaaaatatcatttttaaattagcagatcaaggcgtggcaattatgtggattacccacagcgatgaccaaagtatgcgacactttcaaaagcgtataacaattgttgatggtcaaatttctaatacagaggagttgaatcaacatgagtaa

SEQ ID NO: 404947 - DNA, 777 bp, Staphylococcus aureus
atgagtaatacggcacttggattgacggcattgcttttagtcattccgattatcatttcatataaagaaggtttacatattattaaagatttaattgttgcgacattacgagcagttgtgcaattaatcattttgggatttttgctgcattatatttttaaaataaacgataaatggctgcttattttatgtgtattggtcattattattaatgcatcatggaatacaattagtcgagcatcaccagtgatgcatcatgtgttttggatatcatttctagctatcttcattggaacggcattaccgcttgcaggtactattgcgacaggggccattcaatttaccgcaaatgaagttatacctatcggcggcatgcttgcaaataatggcttgattgcaattaatttagcttaccagaatttagatcgtgcattcgtacaagatggtactaatattgaatctaaattatcacttgcagctacacctaaattggcttctaaaggtgcaatacgtgaaagtattcgtttagctatagtgccaactattgattcggttaaaacatatgggcttgtgtcgattcctggtatgatgacaggcttaattattggtggcgtaccacctttacaagcgattaaatttcaattgttagtcgtgtttattcatacaactgcgaccattatgtctgctttgattgcgacatatttaagctatggtcaatttttcaatgcaagacatcaattagtagcacgaaatactgatgttaagagtgaatcatga

SEQ ID NO: 404948 - DNA, 1188 bp, Staphylococcus aureus
ttgtcaatcatgcgactatttacattcattttaagtatttttatcgtaggaatggttgaaatgatggttgcaggaattatgaacttgatgagtcaggacttacatgtatcagaagctgtcgttggtcaattagtgacaatgtacgctttaacatttgcgatatgtggacctattctggttaaattaacgaaccgtttttcatcaaggcctgtattattatggacattacttatatttatcattggtaatggcattattgctgtagcgccaaatttttcaatattagtagttggtagaattatctcatctgcagcagcagcactaattatcgtaaaagtattagctattacagcgatgttatcagcacctaaaaatcgtggtaaaatgattggacttgtctatacagggtttagtggtgctaatgtttttggtgtaccaattggaacggttatcggcgatttagtaggttggcgctatacatttctattcttaattattgtgagtattattgttggcttcttgatgatgatctatttaccgaaggatcaggaaatacaacgaggccctgtgaatcatgagacaccatctcatgaaaatcatgttacttcgaaaatattaagacctgctgaagtagcaaaatatttaattattacgtttttagtattgattgcaaactcagtgacattcgtctttataaatccacttattttatctaatggtcatgatatgtcattcgtttcattagcacttctagtaaatggaatcgctggcgttattggaacatcattaggtggtatattctccgataaaattacaagtaagcgttggttaatgatttctgtttctatttttatcgtcatgatgttacttatgaatttaatcttacctggttcaggtctattgttagcaggactatttatttggaatatcatgcaatggagtactaatccagcagtgcaaagcggtgtgattcaacatgttgaaggcgacacaagccaagtaatgagttggaacatgtctagtttaaacgctggtattggtgttggaggcattattggaggcttggtcatgacacatgtttctgttcaagctatcacatatacgagtgccatcattggcgcattaggattaatcgttgttttcacattgaaaaataatcattatgctaaaacatttaaatcatcataa

SEQ ID NO: 404949 - DNA, 1353 bp, Staphylococcus aureus
atgaagattaatactacaggtggtcaaattcatggtattacacaagatggtttagatatcttcttaggcattccttatgcagaaccaccagttcatgacaatcgctttaaacattctacgttaaaaacacaatggtcagagccaattgatgcaactgaaatacaacccatcccaccgcaaccagacaacaaattagaagattttttctcctcacaatctacaacttttactgaacatgaagactgtttatatctaaatatttggaaacaacataatgatcagacgaagaaacctgtcatcatttatttttatggtggtagttttgaaaatggtcatggtacagccgaactctatcaaccggcacatttagtacaaaataacgacattatcgttattacatgcaattatcgtttaggcgcattaggatatttagactggtcatattttaataaagattttcattccaataatggcctttcagatcaaatcaatgtcataaaatgggtgcatcaatttattgaatccttcggtggcgacgctaataacattactttaatgggtcagtctgcaggcagtatgagcattttgactttacttaaaatacctgacattgagccatacttccataaagtcgttctactaagtggcgcactacgattagacacccttgagagtgcacgcaataaagcacaacatttccaaaaaatgatgctcgattatttagatacagatgatgttacatcattatcgacaaatgatattcttatgctgatggcgaagctaaaacaatctcgaggaccttctaaagggcttgatttaatatatgcgcctattaaaacagattatatacaaaataattatccaacaacgaaaccaatttttgcatgttatacaaaagatgaaggcgatatttatattactagtgaacagaaaaaattatcgccgcaacgctttatcgacattatggaattaaatgatattcctttaaaatacgaagatgttcagacggcgaagcaacaatctttagcgattacacattgttatttcaaacagccgatgaagcaatttttacaacaactcaatatacaagattcaaacgcacaactatggcttgctgaatttgcatggcatgatacttctagcgcacactatcgcagtgcttaccatattctagatatggtattttggttcggaaacttacaaatattagcagcacatcaatatccaacaactgctcaccttaaatttttaagtcgacaaatgcaaaatgatttagctaattttgctaaaagcggtaaaatgccttggccgatgtatcataatgaacgtcgctattatcgcacatatcaataa

SEQ ID NO: 404950 - DNA, 1638 bp, Staphylococcus aureus
atgaataaagacaagcaattgcacaacgacaaaatcaatctatcccaattagtcttattagggttaggctctttaataggatctggttggctatttggtgcgtgggaagcatcatcaatagctggaccagcagcaatcatatcatgggttcttggattcctagtcattggaaccattgcctataactacattgaaatcggcacaatgtttcctcaatcaggtggcatgagtaactatgcccagtatacacatggctcattattaggctttattgctgcttgggcgaattgggtgtctttggtgacaataatacctatcgaagctgtgtcagctgttcaatatatgagttcttggccgtggcattgggcgaaaccaatgagatatttaatggaaaatggctctattagcacatacggattgctagctgtatatctcatcattgttattttttcattattaaactattggtccgtaaaacttttaacatcatttacgagtttaatttctgtatttaaattaggcgtacccatgttaaccatcatcatgttgatgctatcaggattcgacacttcaaattacggccattcggcaagcacatttatgccttacggaagtgcaccgatttttgctgcaacaacagcatcagggattattttttcattcaattcattccagacaattattaatatgggttcagaaattaaaaatcctgaaaaaaatatcgcaagaggcatcgctatctcactgtcaatcagtgcagtgttgtacatcattttacaaagtacgtttatcacttctatgcctcaatcaatgttacaacatagtggatggaatggcatcaacttcaattcaccatttgctgatttagctatcttattaggaattaattggctcgcaattttactatacattgaagcttttgtatcaccattcggtactggcgtgtcatttgtcgccgttacaggtcgagttttacgagcaatggagaaaaatggacatatccctaaatttcttgggaagatgaatgaaaaatatcatatcccacgtgtagcaatcatctttaatgccatcattagtatgattatggttacattatttagagattggggtacgctagcagcagttatttctactgcaactttagtagcctatttaactggcccaacgacagtgattgcattaagaaaaatgggaccaacaatgactcgtccatttagagcaaaaattttaaaagtaatggcaccattatcatttgtattagcttcattagctatatattgggcaatgtggccaacaacggctgaagttattttaatcattatacttggattaccaatctacttcttctatgaatatcgtatgaattggcgtaatacaaagaaacaaattggtggtagcttatggattattgtatatttaatcgtgctatcaatactgtcatttataggaagcaaagaatttaaaggcttaaatatgattcactatccatttgactttatcgttattattattgtggcacttatcttctattacatcggtacaacgagttcatttgaaagcgtctatttccgtcgcgcaacacgaatcaatacgaagatgcgtgagtcactaaataatgaatcaaagtcatctcattaa

SEQ ID NO: 404951 - DNA, 600 bp, Staphylococcus aureus
atgagtgagaaacaatcaaatgaacaagttgaagcatttttaaataaagagagtcaatggcaagaagaatataaatatttgagagcgttaatctttaatgaaacagaattagaggaagcgtataaatggatgcatccttgttacacgttgaataataaaaatgtagtacttatccatggcttcaaaaattatgttgcactattatttcataaaggtgccattttggaggataaatatcatacactcattcaacagactgaaaaggtgcaagcagctcgtcagttacgatttgaaaatttaacagagattcaagcacgtaccgaagaaattaaatattatctagccgaagcaattaaagctgaaaaagctggtaaaaaagttgaaatgaagaaaacagaggaatatgttattactaaagagttagaagctaagttcgaagaaatgccacagttagagtcttcattttataaattaacgccaggcagacaacatcaatatatatatcatattggacaagctaaacgcagtgaaacaagacaaaagcgtgttgaaaagtatattaaccaaatactagaaggtaaagggatgcatgataagtaa

SEQ ID NO: 404952 - DNA, 1227 bp, Staphylococcus aureus
atgttaagtattaagcatttaacgaaaatttattctggtaataaaaaggcagtagatgacatctctttagatattcaatctggggaatttatcgcatttattggaaccagtggaagtggcaaaacgactgctttaagaatgataaaccgtatgattgaagcgacagaaggacaaattgaaattgatggtaaagatgttcggagtatgaatcctgtcgaattgcgtagaaatattggctatgttattcaacaaattggcttaatgcctcatatgacgattaaagagaatattgtgttggtacccaaattgttgaaatggactaaagaggaaaaggataaacgtgcaaaggaattaattaaacttgtggatttaccggagtcatttttagagcgttatccagcagaactatcaggtgggcaacaacaacgtatcggtgttgtaagagcacttgcggccgaacaagatattattttaatggatgaaccttttggtgcattggatcctattacgagagatacgttacaagatttagttaaaacgttacaacgaaaattaggcaagacgtttatctttgtaacacatgatatggatgaagcgattaaattagcagacaaaatttgtattatgtcagaaggtaaggtggtgcaatttgatacgccagacaatattttaagacatcccgcaaatgattttgtacgtgattttataggacaaaatagactgattcaagaccgtcccaatgacaagactgtagaaggtgtaatgattaaaccaatcacgatacaagcagaagcaacactgaatgacgccgttcatattatgagacaaaaacgtgttgatgctatttttgtagtagatagtaataaccatttactaggtttcttagacattgaagatataaatcagggtatacgtggacacaaaagtttacgagacaccatgcaacaacatatttataccgttcaaattgattctaaattacaagattctgtacgtacgattttaaaaagaaacgttaggaatgtacctgtcgtagatgatcaacagcgtttagtaggactgattacgcgtgccaatgttgttgatattgtatatgacacgatttggggcgatagtgaggatacagtgcaaacagaacatgtgggggaagacactgcgtcctcaaaagtgcatgagcaacacactactaatgtcaaagtacgtgacataggagatgataaatcatga

SEQ ID NO: 404953 - DNA, 636 bp, Staphylococcus aureus
atgattgagttcctacatgaacatggtggacagttgatgtcgaaaacactggaacatttctatatttctatagtggcattattacttgccatcattgttgcagtacctataggcattttattatcaaaaacaaagcgaactgccaatattgtattaactgtggcaggtgtcttacaaactattccaacactagctgtacttgctattatgataccgatttttggtgttggtaaaacgcctgcaattgtagcgctatttatttatgtattattacctattttaaataacacggtactcggtgttcaaaatattgatagcaacattaaagaagctggaaaaagtatgggaatgacacaatttcaattgatgaaggatgttgaattgccgttagcattgccgcttatcattggtggcattcgtttgtcatctgtgtatgtaattagttgggctacacttgcaagttatgtaggtgcgggtggattaggtgatttcattttcaatggtttaaatttatatgatccactgatgattgtaactgcaacggtactcgttactgcactagcattaggtgttgatgccttattagctttagttgaaaaatgggtagttcccaaaggcttaaaagtatctggataa

SEQ ID NO: 404954 - DNA, 942 bp, Staphylococcus aureus
atgaagaaaattaaatatatacttgtcgtgtttgtcttatcgcttaccgtattatctggatgtagtttgcccggactaggtagtaagagcacgaaaaatgatgtcaaaattacagcattatcaacaagcgaatcgcaaattatttcacatatgttacggttgttaatagagcatgatacacacggtaagataaagccaacattagtaaataatttagggtcaagtacgattcaacataatgccttaattaatggggatgctaatatatcaggtgttagatataatggcacagatttaacgggagctttgaaggaagcaccaattaaaaatcctaagaaagcaatgatagcaacacaacaaggatttaaaaagaaatttgatcaaacgttttttgattcgtatggttttgcgaatacgtatgcattcatggtaacgaaggaaaccgctaaaaaatatcatttagagacagtttcagatttagcaaagcatagtaaagatttacgtttaggtatggatagttcatggatgaatcgtaaaggcgatggctatgaaggatttaaaaaagagtatggttttgactttggtacagtgagaccaatgcaaataggtctagtctacgacgcattaaactcagagaagttagacgttgcattaggttattctacagatggtcgaattgcggcgtatgatttgaaagtacttaaagatgataaacaatttttcccaccttatgctgcgagtgctgttgcaacaaatgaattattacggcaacacccagaacttaaaacgacgattaataagttgacaggaaagatttcgacttcagagatgcaacgcttgaattatgaagcggatggtaaaggtaaagaacctgctgtcgtcgcagaagaatttttgaaaaaacaccactattttgataaacagaaaggtggtcataagtaa

SEQ ID NO: 404955 - DNA, 696 bp, Staphylococcus aureus
atggaaggtaatttattacagcaattattcaattattatgttacgaactttggttatctatgggatttatttttcaaacacttattaatgtctgtctatggtgtgctgtttgcagctttaattggtattccattgggaatcttgcttgcaagatacacaaaactttctggatttgtaattacaattgcaaatataattcaaacagttccagtcattgcaatgttagctattttaatgttagtcatgggcttaggttcagaaacagtagttttaacagtgtttttatatgcgttacttccaattataaaaaacacttatactggtatagctagtgttgatgcgaatattaaggatgctggcaaaggtatgggaatgacacgcaatcaagtgctacgaatgattgaattaccgttatctgtttcggttattatcggtggcattcgtattgccttggttgttgcgataggtgttgttgccgttggatcatttataggagcacctacgcttggtgacattgtgattcgtggtacaaatgcgacggatggcacaacgtttattttagcaggtgcgattccgattgctatcattgcaatcgtcattgatgtactattaagatttttagaaaaacgattagacccaacaacacgacatcgtaaaaatcaatctaatcatcggccgcaaagtattaatatgtaa

SEQ ID NO: 404956 - DNA, 1401 bp, Staphylococcus aureus
atggacacatcaaaacaatttagaggtgacaaccgattgcttttgggtatcgttttaggggttattaccttttggctattcgcgcagtcacttgttaatcttgttgtcccattacaatcaacatatagtagtgacgttggaacgataaatatcgctgttagcttatctgccttatttgctggtttgtttatcgtaggtgctggtgatgttgctgataaatttggtcgcgtcaaaattacttatgtaggattgatattaaatgttgtaggttcattactcatcatcattacacctttgccagcatttttaattataggtagaataattcaaggtttgtctgcagcatgtattatgccatcaacacttgctattattaacgaatattatattggtacaagaagacaacgtgccttaagctattggtctattggttcttggggtggtagtggtatttgtacgttgtttggtggcttaatggctacatatataggttggcgttcaatatttgttgtttcaattctattaacattattagcaatgtacttaatcaaacatgcacctgagactaaagcagaaccaatcaaaggtatgaaagcagaagctaaaaagtttgacgttattggtttagtcattttagtagtgacgatgttaagtttaaatgtaatcatcacacagacgtctcattttggtttagtttcaccgttaattctaggtttaattgttgtgtttatctgttcattagttggttttgtatattacgaaaataaaataaagcatccacttgttgatttttcaatttttaaaaatagaggatacagtggtgcaactatttcaaacttcttattaaatggtgtagcaggtggtgcacttatcgttattaacacgtattatcaacaacaattaggatttaattcttcgcaaacgggttatatttcattaacgtatttaataacagtgttgtcaatgattcgtgtaggtgaaaagattttatctcaacatggtccgaagcgcccactattactaggaagtggctttacagtgattgggttaatcttattgtcgttaacatttttaccagaagtgtggtatatcatatctagtatagttggatatttattgtttggtactggtttaggattatatgctacaccatcaactgatacagcagttgctagtgcgccagatgataagtcgggtgttgcttcaggtgtgtataaaatggcgtcatcattaggaaatgcatttggagtagcagtatctggtacggtttatactgtgttagcagctaatttaaatttgaacttaggtggtttcacaggtatgatgtttaatgccttgctagcaattgttgcatttttagtcattttactattagttcctaaaaatcaaacgaatttgtaa

SEQ ID NO: 404957 - DNA, 936 bp, Staphylococcus aureus
atgaaaattgcaattgctggatcgggtgcattaggtagtggctttggtgccaaactatttcaagcaggatatgatgtcacacttattgacggatatacatctcatgttgaagcggttaagcaacatggattaaatataacgattaatggagaggcattcgagttaaacattccgatgtatcattttaatgatcaaccggacgaaagcatttacgatgttgtctttctatttccaaagtctatgcaattaaaagaagtgatggaagatatgaagccacatattgataatgaaacgatcgtcgtatgtacgatgaatggtctgaagcatgaagaagtcattgcgcagtatgttgctcaatcacaaattgtcagaggtgttacgacttggacggcaggtcttgaaagccctggacacagtcatttacttggtagtggaccagttgaaataggtgaactagtggatgaaggtaaagaaaatgttataaaagttgctgatttacttaacgaagcggaattgaatggtgtcattagtaaagatttataccaatcgatttggaaaaagatttgtgttaatggtacggcaaatgcattaagcacagtgttggagtgtaatatggcatcgctgaatgaaagtagttatgcgaagtgtttgatttataaattaacgcaagaaatagtgcatgtagcgacgattgataatgttcatttaaatgttgatgaagtatttgaatatttagttgatttaaatgaaaaagttggtgcgcattatccatccatgtatcaagatttaattgttaataatagaaaaactgaaattgattatattaatggcgcagttgcaacattaggtaaacaacgtcatattgaagcgccagtcaatcgctttattactgatttaattcatactaaagaaagtcagcgacacgcacaggattaa

SEQ ID NO: 404958 - DNA, 852 bp, Staphylococcus aureus
atgagtaaaatttttgtaactggtgcaacgggccttattggcattaaattagttcaaagactaaaagaagaggggcatgaggttgctggttttactacatctgagaatggtcaacaaaagctagctgctgttaatgtaaaagcatatattggtgatatattaaaagctgatactattgatcaagcgttagcagattttaaaccagaaatcattatcaatcaaattacggatttaaaaaatgttgatatggcagcaaatacgaaagtacgtattgaaggttctaaaaacctaattgatgcggcgaaaaagcatgacgttaagaaagtaattgcccaaagtattgcctttatgtatgaacctggcgaaggattagcaaatgaggaaacttcacttgattttaactcaactggcgatagaaaagtaacggttgatggtgtggttggtttagaagaagaaacggctcgtatggatgaatacgttgttttacgttttggctggttatatggcccaggtacttggtacggaaaagatggcatgatttataatcaatttatggatggtcaagtgacactttcagatggcgtaacatcatttgtgcatcttgatgatgcagttgaaacatctattcaagctattcattttgaaaatggtatctataatgtagcagatgatgcacctgttaaaggttctgaatttgcagaatggtataaagaacaacttggtgttgaaccaaatattgatattcaacctgcgcaaccatttgaacgtggcgtaagcaatgagaagtttaaagcgcaaggtggtactctgatttatcaaacttggaaagatggcatgaatccaattaaataa

SEQ ID NO: 404959 - DNA, 1497 bp, Staphylococcus aureus
atgactactaaaaaactgtattttctatccatttctattatcattttagtcgccatttcaattgctatatatataacattaaatagcaatacgaagacacggttaaccaatgattcgcaacaacaaatagatacaattatcgagcatgatttacaaaagggacacattcctggagcatcaattttaatagtaaaaaatggcaaagtttttttaaataaaggttatggttatcaagatgttgataaaaaagtcaaagcttctcccacaacaaagtatgaaattgcttctaatacgaaagctttcacaggtcttgcaattttaaaattagctcaagaaggtcgattaaacttaaatgatgccgtatccaaacatgtgcctcattttaaaatgaactataatggtcaaaatgaaactattacgattaagcaacttttagctcaaacaagtggtatacctagtgatattacaagcgaagattctgtgacaagcaaaaataatcgtttaaatgatgtaacccgtgcaattatgggtgatgaattacatcataagcccggagaagaatttgaatactcaaatatgaactatgatttattaggtttaattatccaaaacgttacgaagcaatcctatacaaaatatattacaaattcatggctcaagcctttgcatatgacacatacatcattcaaacaaaccaattacaaatcaaaacatgatgctattggctatgaattacaaggttcgacacctgtcgtctctaaacctgaatttaacctttgggatacaccatcagcatatatgatgacatcaactgaagatttggaacattggataaaattccaacttaatccacctgataaatacaaatcattagttcaacaatcacataaaaatttatcttcaacaattggtgaacctaatgccaatgcatatgcttccggctggtttaccaataatgatgaacatttagtgtttcattcaggaacgctagataacttttcatcatttattttactaaatccaaaacaaaattatggaattgttgtacttgcaaatctaaattcggaatatgtacccaaattagttgagcatcttaatacacaaattgtaaatcacaagcgatattcgacggttgcgtctatgctcaatcaatataaagatcaatttaatattgttaccgttttgatgacaacacttattttattagcatttatattctcagcttatcgtgcttggcaaatgcgccatggtcaaattcttttgcgtagatcaaaacggattgctgtattgagttggttatcattatgtatatgtatcgctttagcgctcatattatatgcattaccatatctcattctcggtagcaataattggtcttttgtactgacttggctaccaatagaaattaaattagcactaatcacaacattaattgcattattcagtacattaattgtaattctgttattccttcatacaaagataacgaagacataa

SEQ ID NO: 404960 - DNA, 1830 bp, Staphylococcus aureus
atgttcaatcaatttaaaagacttattatagggcaacctaaaaaaaacagagaactaaaagacgaaaagatatcgaagtttaaagggttagcgattctttcgtcggatgcattatcttcagtggcttacggtcccgaacaaatactgattacactatcagtagtgggtgcagttgcaacttggtatactttaccgattgcaggtgctgttctgatcttattagctgctttaattatgtcttataggcaaattatttatgcatatcctaaaggtggcggcgcgtatatggtgtccaagaccaatttaggagaaaaatggggattgcttgcaggaggctcattattagtcgattacatactgactgtcgctgttagtatatcatctggtgctgatgcatttgttgctgcattcccaagtttatatgggcataaagtactgattgcatgtttacttgtactttttattttaatattaaatttacgtggtttaactgaatctgccaccgtattatcctatccagtatatcttttcattatagggttagtgatattaatatttataggtactttccgtgtggcgacaggagatattcaaccacatatgcatgcatcagtaggaactgcggttcctggagtaacattattcttgctattaaaagcattttcatcaggggcttcatcgttaacgggtgttgaagctatttcaaatgcggtaaccaattttagagagccaagtgctaaaaatgctgtgaaaacgttaattgctatgggttcaattttagcgtttttattagttggtatcgttggtttagcatatgtttatggaattttgccacaaacggaaacgacagttttatcacaattagctatgcaaatatttggtgataatgctgccttctattttgtacaggcaacgaccgtgatgattttggtattagcagccaacactggatttacagcttttccgatgttagcggcttcaatgtctaaagataaatatatgcctagaatgtttactgttagaggtgatcgcttaggctactctaactcgattattattttaggtgtattagccattattttaattattgtatttgatggtatgactgaagatttaattccattgtatgcggttggtgtatttattccatttacactagcacaattcggtatggttattaaatggattcatgaacgtcctaagaattggttaagtaagttgtctgtgaacttacttggtggtatcgtgacatttattgtttttatgattttactcataactaaatttagccaagtatggccgatacttattttcttgccgttcgtggtgattttcttcttgaaaattaacaaacattatcgagatatcgcagaacaattacgttctgacattgatgttcttaatgtggacgtggtagatcgtaatttagcaattgtgccgataacaagtattacaacagcagttgataagtctatttattacgcacaaatgcttgcgaataatgatgtcatagcagtacatgtatcatttggagatgaagatgaaaaagcattccaagagaaatggaaacgtcatttcccagatgtaagattagttattttacattcggaatatcgcagtattatacgaccaatttcacgttttatcgataagattaatcgtaaagccaacgatcaaaactatatgattacagtagtgataccagaatttattactaagaaacgttggcataatttattacacaatcaaactagtttgcgtatgaaattgtatttaatttatcaaaagaatgttaacgtatgtacaattccatttaaacttaaaaaatag

SEQ ID NO: 404961 - DNA, 2079 bp, Staphylococcus aureus
atggcactattagaagcatttttaatttttatttttgctgtgattattagttcggttatcaataatcgattcccacaaattcctactgcctttattcaaattgcattaggtgtcgttattttcattattccaatacaagttgatttccaattcaattctgaagtatttatgtttgccgttatcgcgccactactttttgtggaaggtacccacgtctctcgaacaaaattattagaatatcgtaaacctatactattaatgtcaatggcactagtgtttgcaactgtagtcggtgttggctattttatacattggatttggcctgccttaccaatgccagccgcttttgcaatagcagcaattttatgtcctactgatgcagtagcagtatctgctattacacgcggaaaattattacctaaaggttctatgacgattttagaaggtgaatctttactcaatgatgcagcaggtatcatttcatttaaaattgctgttactgcattagtaactggtaccttttcattattccaagctgttgaacaatttatcatttcaacaatactaggtgtacttattggtgcaattattggattcgttgtcgttagaatacgtatagacttaaccgctaataaaggtttaaaagataacaataccttaacttttattcaattattaactccttttgtcgtatactttttagcagaagaagttcatgcttcaggtatcattgcagttgtaatcgcaggtctaatccatggtttagaacgcgaccgtttaattagagcacaaacggaactacaaatgaattaccatcaaatttggaacacatttagttatgccttaaatggttttgtatttgttgtattaggttttatgattcctactgtagtcatagatattttccaaacagagcctgacaacttttcatttttaatagtgatcactatattaatcgctattgcaatttatgcatgtcgatttgtttgggtttatttctggtacaaagatttttatttcccgaaaaatatacaatcttatctagacgaggaacatgattcacatgaaacaccaccttctcgagtgcgttacgcatttattatgaccatgtgtggtattcacggtacaatttcactttcaatggcacttacattaccatttatcattacaaaaggacaagcattcgaataccgtaatgatttattgtttattgcatctttcatggtattaattagtttaatcttagcgcaaattgttttacctttaattacaccatctgccgaagatactacttttaaaggtatgacttatcaatctgccaaaattttcattgttcaaaaagtgatccagcattttaaaaacgaaagtaaaaaagacaaaaacgatacaaattatcgcccagtattaaaccaatactatggagaattgttatttttattaaattcagaacctgataatcaaaatacaaaagaactcaaacgtttagaagatattgcaaaagtaatcgaaacatctacacttgagcgtttaattgataaaggtaaggcaacatatcaggatattaataattaccgcaatattgtcgaattaacagagacacaccgtactgcatcatttgttgaaaaatttgcaaacttcttcaagatgttatggcttagacttaaagcgatgaagcactacaaagccttaaataaagaatctaagaagcaagaatttgaaaattcattcaaagatgttcaaaaaattatgcgtattgtgaatcacaatattattttacgcttaaaagaagaacaaaatagtacaaatgtacttgaggttagcttagtcattaatcattactatgatatgagtcgctcattaaagtggcgtgcacaacgtcgaaaagaacgtcaagaaaacagcaatcaaatcataccgcaagctatgttccataaccacaaattggaagcattgtacttacaacgtcatcttttagatgaattaattcgcaaaaataaaatcaacaatatcgttgcagctcaaattcgagaaaatatcaattacaacgaaattgtcttgtctttacagtccaaacattaa

SEQ ID NO: 404962 - DNA, 1410 bp, Staphylococcus aureus
atggcaagaaaattgcatagagagttgaataacagacacatccaattaatagcaattgggggcgcaattggaactgggttattcctaggatcaggtcaaacaatatctttaactggtccatcactgttattcacatacatgattattggggttgtactattcgcttttatgcgcgcattaggcgaattgttgttgagcaatacaagatttaattcatttgttgatattgcaaatgaatatttaggcccttttggtggctttgtcattggctggacttactggttatgttggattgtatcaagtatgtcagacctaactgcgatgggacaatactttgcattttggtatccacaagtcccaaattggattaccgtgctatttattgttttaatcttgattagcttcaacttattaggtgccagattatttggtgaactggagttttggttctcgattattaaagttgtcacaattattgcgatggttatcgttggtcttgtattaatctttttctcatttaaaacacattatggacatgcatcattcacaaacttaatcagtcacggtggcatgttccctggtggaacatttggtttcttaatgtcattccaaattgctgtatattcattcattggtattgaacttataggtgtaactgctggtgaaacgaaagatcctgaaaaaaccttaccgaaagcaattaataatgtacctatccgtattttattattctatatcggtggtctattagtaattatgtcagtcataccttggaatgatatcgatccaaatagtagccctttcgttaaactctttacattaatcggcgtaccatttgcagcaggtgtcgttaactttgtcgtgctaactgccgcggcctctgctacaaatagtggtatctattcgaatagtcgtatcttattcggactgtcacaacaagggttaggtcctaaagttttaaataaaacgaatagtcatggcgtgccttatttatcaatgttagtttcatcaattgcattacttatagcagccttgttaaactacattttccctaatgcaattcaactattcatatacgttacaacgttatcaactgtgttgtttttagttgtttgggcaatgattattgtcgcttatctaatgtatttgaaaaagcatcctgaggcacataaaaacagtaaatttaagttgattggtggtaagcctattgcttacattattctagcgttcttcttctttgtattcattttattattctttagtgacgaaacaagagcagctatttatatttcgccattctggtttatatttttatttttcttttataaaaaatacaaaacgaatgctgaaaagctcgcgtatgaacaacgacaaaatgacagcggtcatttcagatatgacaatcaataa

SEQ ID NO: 404963 - DNA, 807 bp, Staphylococcus aureus
atgaagatagggacaatcgccgatttacatattgatcgtcataataaaaaaacatccgaagattacttagaggcattggttgaaatagttaagtataagaaattggatatattgttgattgcgggggatatctcaaatcattatcaattgacgcaccaatttataacgcaattgacaaaacaattagatatacctgtgaaatttgtacctggaaaccatgatttatgggaagttgaaagtatgactacgcaagacatttggaataattataagagtatgtcacagtgcttggtaggaaaaccatttatagtaaatgaagaatgggcaatcataggacatactggctggtatgattatagctttgcagcacaacgattttcattagatgagttacaaaaaggaaaacattatggtgcgacttggcaagataaagaacgaatatcttggggcatatcagatcaaaatttatctaaaatagcggctgaacaagtgaagaaagatatattagaagtaggaaatagacgagtgattttagtcacacatgttgtgacgcaccctgatttcattgttcctatgccgcatcgtatattcgatttttataatgcatttattgggacaagtgatttcaatcctttgtatgcgatgttcgatataccatatagtattatgggccatgttcattttcgtaaaagtgtgatagatgatggcagatgttatctctgtccgtgtctaggctatccaagacaatggcgttcagaagatatttaccaggaaataaatgagacgatacaaataatagaaatttaa

SEQ ID NO: 404964 - DNA, 657 bp, Staphylococcus aureus
atgaaccgaaaaatattaccagttaaacctatcagtcagctatttcctatccctatggtcatggggtgtgaaggtgtttccgcagccatgatgttgcaatacaacaaccaacatatccctgctacagaaattatgagacattggccgacacatccgaacaatccacataaaggttatgttggacatcacttattcattaagcttggcaattatcatcaaacgatatttccagaagcatatgtaccatttttacaaaaatacaatcctaatatcgtagacggcactggtaaatcgttagaagatcttaaaggtattatcgatcaaggtcaacctgtgttaatataccatactaatcttggttctaaaccattactacgtgttttccgctttgataacaagccagcgaaacaagtttcaaatattcacgtaacgttactcattgggtacgatgattactattactattatatcgatccactttggagtcatattcgtcgtggcctagttttacctgccatcattccaaatcgcaaacaaattattaaaattcgtaaagagaaaatggaatacagctttaattcaccaggaagaaagtgcatttatgtgcaaccacattcatatacaattgaaaatcagcaacaaaataaacacacgtaa

SEQ ID NO: 404965 - DNA, 474 bp, Staphylococcus aureus
atggaatatcaattacaacaacttgcgtcgttaacgttagtaggtattaaagaaacgtatgaaaatggacgacaggctcagcaacatatagcagggttttggcaaagatgttatcaagagggagtaattgcggatttacagttaaaaaataatggtgatttagccgggatacttggcttatgtatacctgaattagacggtaagatgtcatatatgattgcagttaccggagataatagtgctgatattgaaaaatatgatgtcataacattagcaagttcaaagtatatggtatttgaagcacagggcgcagtacctaaagcagttcaacaaaaaatggaagaggttcatcactacatacatcaatatcaagcagatacggtaaaatcagcaccattttttgagttgtatcaggatggtgatactacaagtgaaaaatatattacagaaatttggatgcctgttaaagggtga

SEQ ID NO: 404966 - DNA, 1212 bp, Staphylococcus aureus
atgcaatcaacgaaaaccaaaacgaagcatttttcatttttattgctaattacgttaggcgtcatgaccgcttttggcccactaactatagatatgtacgtaccatcattacctaaagtgcaaggtgattttggttctactacatcagaaattcaattaacattatcattcacaatgattggtcttgcactaggccaatttatctttggacctttatccgatgcttttggtcgcaaacggattgctgtatccattttgatcattttcattttggtatcaggtttgtctatgtttgttgatcaattgtcattattcttaactttacgatttattcaaggtttaactggtggtggcgtcatcgtgattgcaaaagcctctgctggtgataaatttagtggcaacgcactcgctaaatttttagcatctttaatggtagttaatggcatcatcactattcttgcaccattagccggtggattagctttatccgtagcaacatggcgttctattttcacaattttaactattgtggcactcatcattttaattggcgtcgcttctcaattacctaaaacatctaaagatgaattaaagcaggtgaattttagtagcgtcattaaagattttggaagtcttttgaaaaaaccagcatttattattccaatgctattacaaggtttaacttatgtaatgctatttagttattcatctgcatcgccatttattactcaaaaattgtataatatgacaccccaacaatttagtatcatgtttgctgttaacggtgtaggtttaatcattgtcagtcaagtcgttgctttattagtagaaaaattacatcgccacatattattaatcattttaactattatacaagtggtaggtgttgctttaattatcctgacacttacattccatttaccactttgggtcttactcatcgcattcttcttaaatgtgtgtcctgtgacgtcaattggaccgcttggtttcacaatggctatggaagaacgaacaggtggcagtggtaacgcatcaagtttacttggcttattccaatttatcttaggtggcgctgttgcaccattagttggcttaaaaggcgaatttaatacatcaccatatatgattattatcttcattacagccattctattagtcagtctacaaatcatttactttaaaatgattaaaaagcaacatgtcgcataa

SEQ ID NO: 404967 - DNA, 660 bp, Staphylococcus aureus
atgaaaagaactgataaataccgtgattcatatcaatacgacaatcaaaaccaaaatcatcgtcgtcaatctgaagacgcatcgtatagacaacaatatgctaaaggcgatcctgaagaacacccggaacgatactataatggtagagattatcgaagagaacaaattcttgaagaagaaaacgagaaatcccgccgttcaaaaaaatggttatatatcattattgccattctcttaattattgtcgctatttttgtcacacgcgccttacttaacaatgatagcgataaagttagtaatgaccctaaagtctctcaaaattataaaaaacaagttgaaaatcaagacggccaaattaaccagcaagtagataatgctaaagaaaatattaaaaacaaccaaaaaactgatgacattattaaaaatttacaaaatcaaatcgacaacttgaagcagcaagaacaaaacaaagctgattctaagctaactcaattttatcaagaccaaatcaacaaattgacagaggcaaataatgcacttaaaaacaatgcaagccaaggtaaaattgaaagcatgttaaatgatattaatacaaaattcgacagtattaaatctaaattagaaagcttatttaaagatgacaatggtggcgctaattaa

SEQ ID NO: 404968 - DNA, 1143 bp, Staphylococcus aureus
atgcaattacaaaaaattgtcatcgctcctgactcatttaaggaaagtatgaccgcacagcaagttggcaatattataaaacaggcttttactaatgtttatgggaatacccttcattatgatatcattccgatggctgatggtggtgaaggtaccacagatgctttaatgcatgcaacaggtgccactaagtatacagtcatcgttaatgaccctttaatgcgacctattgaagcatgttatgcacgcgcagacgaacaacaaattgcaattattgaaatggcggcagcgtcaggtttggatttattagaaaaagaggaacgtaatcctttatacacatcatcatatggtaccggtgaactaattaaagatgcattaaatcatggtgctaagaccattattttagggattggtggcagtgcaacaaatgatggtggtacaggtatgctaagtgcactaggcgtaaagtttactgatgtaaacggggacttattacaaatgaatggtgctaatcttgctcacattgcacaaatcgatataaccaatctagattcgcgattaaaagaggtgacctttaaagtggcctgtgatgtttcaaatcctttattgggtgaaaatggtgctacctatatttatggtcctcaaaaaggcgctgatgcaaagatgataccaaagttggatttcgcaatgtcgcattatcatgataagataaaaatgtgcacaggaaagtccgttaatcaaataccaggttctggtgcagctggcggtatgggcgcagcattattagcgttttgtgagacaactttaacaaaaggtattgatgtcgtctttgacattacagattttcatcaaagaattaaagatgcagacctcgttattactggagaaggacgcatggattatcagaccatctttggtaaaacacccgtaggcgttgcgttagctgcaaaacaatatcatattcctgtcatcgcgatttgtggcagtctaggcgaaaattatcaacatgtttacgatttcggtattgatagtgcctattctataatctcttcacctagcactttagaagatgtcctacaaaatagcgaacaaaatttattaaacactgcaactgacattgctcgtattctgaaattacaataa

SEQ ID NO: 404969 - DNA, 387 bp, Staphylococcus aureus
atgaaactaacacaaacgcatgctgaaattttaaaatttatcattgttggcggcattaatacgttaaattattatgttgtctatttattgctgttaaaattattacacattgaatatatgattagtcatattaccggatttctagtcgcttttgtgatttcatattatttgaattgttattttgtttacagggtaaaacctacttggagaaaattcattagttttccaattacgcagattgtcaacgtaagcttacaaacagttttattatatgtatttgtatcctggctaaatttgccagcagaaattgcaccatttgctggtttaattattacgatacccatcacatttatattatctaaatggattttaaaagatagcaattaa

SEQ ID NO: 404970 - DNA, 1764 bp, Staphylococcus aureus
atgaacaatcagacaaattggataaagatactcagcggatttgcttctgatagtaaatggaaaattatgttatcaattttgttgtctatcatcagtgtcttttctggattagttccttattgggcagtatttaaaattattttaatgatgattaacaatacatatacgattaattcgattatggtttatatctttattgctttaatcgcttatatttcacaagtgtgttgttttggagcgtcaacgatgctatcacatattacggcatatgaaattttatctgaaattcgtaaaaaattagctcaaaaattaatgcgtctccctttaggcgtagtggaatctaagaaaataggtgaattaaaaaatatatttgtcgataaggttgaaacaatagaattacctttagcacatatgattcctgaagttataggaaacttacttttgtcagctgctatctttttatacataatgctcattgattggcgtatggctagtgccttattagtaacgataccaatttcaattttcgcttttaaaaaagttatgtctggatttaatgagacatatgctgaacaaatgaaatcgaataattatatgaatagcgcgattgtagagtttatcgaaggcattgaagtgattaaaacatttaatcaatctcaaagttcatataaaaaatataaagatgcagtagataattataagattcacactttgaattggtttaaaaatacatgggggtatatgaatttaggagctagtgtattaccttcaacatttttagggattttaccggtcggcatgtatttgatatctatcaaccaattaaactatgcggaatttttcctatgcatcgtattatctttaggtgtagtagcaccgattaagaattttactaattatgtaaatcatttaaagtctatacaatacgcattaactgaagtgaatcaaatattaagtctagaagagttagtattgtcaacaaaatttaagaagcctcaacattatgaaattgcttttaataatgttggattttcatataacaaagataaggacgatctggtctttaagcatttatcatttacagtaccagaaaataatttcacagctatcgtcggggcatctggtagcggtaagtcaaccattgccaagcttatatcacgatactgggatgtgacttcaggtgaaattacgattggcggtataaatataaaagatattgaatcgaaacaacttaacgatttagttggttttgttggacaagataactttttattaaatcttacttttaaagaaaatattaaacttggcaatccagaagctacggatgaggcagttgaaaaagctgccaagttagcacaatgtcatgaatttattgaaaagttgccagatggatatgatacgaatgttggtacagtgggagataaattgtctggtggtgaaaaacaacgagtcactattgcaagaatgatattaaaagatgcgcctatcattgtattagatgaagcgactgtttacgttgatccagacaacgaacaaaaaattcaagaagcattaaatgtgttgacgcaggataaaacattgattgttattgcacatcggttatctacgattcaacatgcagatcaaattattgttttaggtaaacaacaaattttagaaaaagggtcacatcacttattgctaaaattaaacggtaattataagaaaatgtgggatacgcacatgcatacaaaagattggggaatcaatactggacataattaa

SEQ ID NO: 404971 - DNA, 1734 bp, Staphylococcus aureus
atgtttcaaattacatttaaaattttaaactggataagaccatataaagcaagaatgattttaggatttagcatgtcatttttaaatgctatttttattgcgttacctatctttttagctgcaaaaatatttaataatgtgctatctcataaacctatttatatgaaagatatattgaatgttgtaattatcatggttttattagtgattggacgatttattacagcatatttcaaaagcaaaagccatgagagcatcgcttatgaaatgagtgcgaaagaacgtttagatataggggataaattgaaaaatgtaaggttaggttattttaattcgcatcattcaaatgagttaacaacaatagtaacaacagatttaacctttttagaaaactttgctatgaaaatggtggacgttgttgttaatggatacatattaattacagtactcatattgtctctacttgtagtttcgtggcaagtatcattattagcatgcattggcgtattactatcattttttgcgattcaattattagaaagaaagagtcgacaaaatgcgccagcgtatcataatgtacaaaaccaattagtggaaaaggtattggaggttattcgtggtattcaagtaataaaatcattcgcgaaagaaaatacgagtcttaaaagttttaaccaagcagtcaatgaaagtaaacgtataaatacaaaaatagaaatgcaatatatcccattcaatttattgcatttacttagtttaaaagttgtttcaataatgattgtattagttgcatgcttattatatatgaatcatagtattgatttacctacccttattatgatttcaattttttcatttgtgatatttgatagtgttgaaaatattaatagtgctgcacacgtacttgaaatgatagatatgacgatagatgatattgaaaagataaaaaatgctccagaactggatgagaatggaaaaaatttgacgattaaaaatgaaaatatcgcttttcaaaacgtgaacttttcatatgatgataaacaagtgataaagaatgtgaattttgagatacctacacaaacatcaacagcaataattggaccttcaggaagtgggaaatctacattatgtcacttactcttgcgcttttatgatatcgatgatggaaatattcgcatcgatggtgttgatattaaagatatgacattaagtacgttaatgtcgaaaattagtgcagtatttcaaaaggtgtatttatttaatgatacgattgaaaataacatattgtttggcaatccaggtgcaacgaaagaagaaattattcgtgcagcgaagcaagcatgttgccacgacttcatcatgtcattacctgagggatatcaaacaatgctaaatgaaaaaggtagtaatttatctggcggagaaaagcaaaggatttctattgctagggcgatattaaaagatgcaccaataattattttagatgaagcaactgcaagtattgaccctgaaaatgaacagctgattcaaacggcaattaatgaattaagtaaaggcaaaacagtaattacaattgcacataaacttgaaactattaaaaatgcagatcagattatagtgctcaatgaaggtgaaataattcaaaaaggtagtcatgatgaattaattcgaaaaccaggaatgtatcaagactttataagaataaaaagtaaatcagcaggctggaaattataa

SEQ ID NO: 404972 - DNA, 687 bp, Staphylococcus aureus
atgaggatttttattacaagtacgaatactgatgtaggcaaaacctatgttacaaagcatttataccatgctttgaaaacacgtggtcatcgagtttgtatttttaaaccatttcaaactgaggaacgccaagacgggacgtttccagatttagaagtatttaaaaatgaatgtgatttaagctatgacataacgtcactttatacttttaagcaacctgtatcaccacaccttgcatttaaaatgacagatcaaatttttctaaataagcagcgtgtattagataaggtaaaagttttagataaggaatttgattttatcttaattgagggtgctgggggaattgccgtaccaatatatgaaggtacagatgatttctacatgactaaagatctaatcaatgattgtgcagattgtgtcatcagtgtgttgccatcaaaattaggtgctattagcgatgccattgttcaccaagattatgttaatcagaatgtatcggcgagtaattttttaataatgaatcgctatacagacagctatattgaaaaagacaatcaaatgacgattggaaaattaacaaataaaacagtctatacatttgaagaacatgccacgtatgaaaatttctcagaagcatttttaaaacaattaataggagttaaaaatgaattacacacaacaacttaa

SEQ ID NO: 404973 - DNA, 1359 bp, Staphylococcus aureus
atgaattacacacaacaacttaaacaaaaagactcagaatatgtttggcatccatttacacaaatgggtgtatatagcaaagaagaagcaatcatcattgaaaaaggaaagggtagttacctttacgatacgaatggcaataaatatttagatggttatgcatcgttgtgggtcaatgtgcatggtcataataacaaatacttaaataaggtaattaaaaagcaactcaataaaattgcccattctacgctgctaggatcatcaaatattccgtcaatagaacttgcggaaaaattaatcgaaatcacgccaagtaatctaagaaaagtattttattctgatacaggcagtgcgtctgttgaaatcgcaataaagatggcatatcagtattggaaaaatattgatagagaaaaatatgccaagaaaaacaagtttataacgctaaatcacggttatcatggggatacgattggtgcggtaagtgttggtggtatcaagacctttcataaaatatttaaagacttaatatttgagaatattcaagtagaaagcccatctttctatcgcagtaattacgatactgaaaatgaaatgatgacagctattttaacgaatatagagcaaattctaattgaaagaaatgacgaaatcgcagggtttatattggaaccgttgattcaaggtgcgacaggcttgtttgttcatcctaaaggctttttgaaagaagtcgagaaattgtgcaaaaaatacgatgtcttattaatttgtgatgaggtagcagttggttttgggagaactggaaagatgtttgcatgcaatcatgaagatgttcaaccggatattatgtgtttaggtaaggcgattactggtggctacttaccacttgcagctacattgacatctaaaaaaatatacaatgcatttttaagtgattcgcatggtgtgaatacctttttccatggtcatacatacaccggaaatcaaatcgtttgtacggttgcattagaaaatataagactttatgaaaaacgtaagttattgtcacatattgaaacgacatcatcaacacttgagaaacagttacatgcgctgaagcgtcatcgaaatgttggtgatgtaagaggacgaggcttaatgtttggagttgaattagttacagataaagatagtaaaacgccgttagaaattgaaaaagttgaacgtattgtacgtaattgtaaagaaaacgggctaatgattagaaatttagaaaatgtcattacgtttgtgccagtgttaagtatgtcaaataaagaagtgaaaacgatggtacgtatttttaaaaaggcagtacataacattttagataggaagtgttaa

SEQ ID NO: 404974 - DNA, 1008 bp, Staphylococcus aureus
atgaatttggctaaacgcatattacaaggggaacaattaacaaaagagactgtattgaaaatttatgaggatactaatattgataccttagatttattaaatgaggcgtacattttaagaaaacattattttggtaaaaaagtaaaattaaacatgattttaaatgctaaaagtggtatatgtcctgaaaattgtgggtactgtggacaatcacgagatattaaacaaaaacagcgatatgctttaattccagaggaacaaattatcgatggagcaaaggtggcacatgataatcatattggaacatattgtattgttatgagtggtagaggaccgagcgataaagaagttgatcatattagtaatactgtaagaacgattaaatctcaacacccgcaactaaaaatctgtgcatgtttaggattaacgaatgacgaacaagctaagaaacttaagtcagctggtgtagacagatataaccacaatattaatacaagtgaaaattaccatgataacgtcgtgacaacgcatagttataaagatagaacagatacgatagaactaatgaaagcgaataatatatcaccatgttctggcgtgatttgtggtatgggagaatctaatcaagatattgttgatatggcatttgctttaaaagaaatggatgccgacagtattccgattaattttttgcatccaatcaaaggcacaaagtttggaagcatggatgatttaacaccaatgaaatgtttaagaatcgtagcattattccgattaatcaatcctacgaaagaaattcgtattgctggaggaagagaggtcaacttacgttcgttacagccattagcattaaaagcggcgaattcaatatttgtcggtgattatctaattactggtgggcaaccgaaccaattagactacgatatgattaatgatttaggctttgaaattgattatgacacttgtgaaaataaggaaaacaagaatgaagtttcaagagcaaattga

SEQ ID NO: 404975 - DNA, 1116 bp, Staphylococcus aureus
atgaagtttcaagagcaaattgatttattacaacagaaagggttatatcggtcgcttaaatcggtagggtatatagatagacagtatattgaagtagaaaataagagatgtacgaactatacatctaatgattatttaggattaggtcaaatagcgtttgataaggatgatttcgaaagatttatgcggaagtatagttatcacttatcaagttcaagattaattagtggaagttcgacagcttatgaagaaattgaaacaatgttagcaggttggctcggatatagtgcatgtactatcttaaatagtggttatgatgctaatttggcgttatttaatattttcaaaaatacaaattgtgtcgtgttttcagatcaagaaaatcatgcgagtattattgacggtattaagttaagtggtttagaaaaagtgatatataagcatttagatattgctgatttagaaaaaaggttagagaaataccctaatcaaaatataccaaaaataatcatatctgatagtgtattttcaacgaatggcgacgttgtggatattggtcaattagtctcattaaagcataaatataacgcaacactgatactcgatgtttcacatagttttggaatagagaattactcgaattatcaaggtgtagatatactcacttctagtttatctaaagcatgtggtgcatacgggggtgtgattttaagttcaaatgatgtgaaggatatgttaattaatcacggtagaccactcatctactcaagtagtttgccaatttataatttgtattttataaaaagaaacattgaaaagttaataaatgctgatgatagacgcactaaattaaatagtttgagtaaatattttaaccaaaagttaaaagcactcaatgttaattataatagttcaaactcgccgattaagtttattgagtttgatgacatagaagcggctgagaacattcatcaaacattattaaagcatcatgtgtttacaagttatttaaggtatccaactgtgactaagccaatgttaagaatatcattgtcgtattttcatactgaacaagatatagataggttgtttgaaattttgcatcaagaagattga

SEQ ID NO: 404976 - DNA, 693 bp, Staphylococcus aureus
atgtatagtataaaaatgcgttctagcaatcaagatgttcatattagtggtgctgaaacgatttgtgagtttgacaaaatagaacagacggtacaaaggttttataataaaggtttttttcatgaaaatgggcaaccggattttctcaatataaaaatacaaaaaatcatggaaccgattcaacaaataaaagcattacaaattattgaggatgataaagcaaatctccaacatttaacacaagaatgtggtgtcactgaacaagcgctaaatcaagggatgacatatattaaaaatgaaacggtttatacaggagctattattctatctgctatatctggtaaacgtttagattcatttggacaaagggggattagggcaacacatttttcgtttgaagatataaataataaaggtgatcttaatgaaagagtgactgatgccttagcaattgctagttgtatcaatgcgcatccgtatgtcaaaggagaactttgcgtgtccgatgacttaacgtatacgacaggttattttgccgctgctaaaattggttaccatcgattatttgatattaaaccagttaatacgagatatggaggcagaataatatttgtggacgattgtattgatttaaatcattacatatcatttttagaaagcacaccgaagcaagttgtttatgaaacggtatag

SEQ ID NO: 404977 - DNA, 468 bp, Staphylococcus aureus
atgacatcaaaagatattactcaaattagtgtcattgctgcgattttaaccattttggcagttttgaaaataccgtccattataccaggattagattttcaattatctgcaccggcagcattattgatattagctttctttggaattaaaaagtactttttaggtggattattatctagcctattattactagtatttggcgtatttaatccaattaatgtgattatctctattatatttagagttatagctattgcagttgtttatttattgaaaataaatgtactatcattagttttagcaagtgtattaggcagtttggtatctaggctactattatctattattttaaatttacctgtgtgggtagtgttgttaaacgcgattccaggcgtaatattcactttaattgtagctattcctttatatctcacattgagaaaaagaatggcagtattactaagataa

SEQ ID NO: 404978 - DNA, 978 bp, Staphylococcus aureus
atgaaaatgaataaattagtcaaatcatccgttgctacatctatggcattattattactttctggtactgctaatgctgaaggtaaaataacaccagtcagcgtaaaaaaagtcgatgacaaagttactttatacaaaacaacagccacagcagattctgataaatttaaaatttcacagattttaacatttaatttcatcaaagataaaagttatgataaagatactttagtacttaaagctactgggaatattaactcaggctttgtgaaacctaatcctaatgactatgacttttcaaaattatattggggagctaaatacaatgtatctataagctcacaatctaatgattcagtaaacgtcgttgattatgcaccaaaaaatcaaaatgaagagtttcaagttcaaaatactttaggctatacatttggtggtgacattagtatctctaatggtttatctggtggacttaatggaaatacagctttttctgaaacaattaattataaacaagaaagttacagaacaacattaagtcgcaacacaaattataaaaatgttggctggggagttgaagcacataaaattatgaataatggttggggaccttatggaagagatagcttccacccaacatatggtaatgaactcttcttagctggcagacaaagcagtgcatacgctggccaaaacttcatagcgcaacaccaaatgccattattatctagaagtaacttcaatccagaatttttaagcgtactatcacacagacaagatggcgctaaaaaatctaaaattacagtaacttatcaacgtgaaatggatttataccaaattcgttggaatggcttctactgggcaggcgcaaattataaaaactttaaaactagaacatttaaatcaacatatgaaattgattgggaaaatcacaaagtgaaattgttagatacaaaagaaactgaaaacaataaatag

SEQ ID NO: 404979 - DNA, 948 bp, Staphylococcus aureus
atgcttaaaaataaaatattaactacaactttatctgtgagcttacttgcccctcttgccaatccgttattagaaaatgctaaagctgctaacgatactgaagacatcggtaaaggaagcgatatagaaattatcaaaaggacagaagataaaacaagtaataaatggggcgtgactcaaaatattcaatttgattttgtaaaggataaaaaatataacaaagatgctttgatattaaagatgcaaggattcattagctctagaacaacatattacaactataaaaaaactaatcatgttaaagctatgcgatggccattccaatataatattggtttaaaaacaaatgataaatatgtttctttaattaattatttacctaaaaataaaattgaatctacaaacgtgagtcagacattaggatacaatatcggtggtaatttccaatcagccccatcactcggtggtaatggatcatttaactattctaaatcgattagctatacacaacaaaattatgtaagtgaagtagaacaacaaaactcaaaaagtgttttatggggcgtcaaagcgaattcattcgccactgaatcaggtcaaaaatcagcctttgatagcgatttatttgtaggctacaaacctcatagtaaagatcctagagattatttcgttccagacagtgagttaccacctcttgtacaaagtggatttaacccttcatttatcgccacagtatctcatgaaaaaggttcaagcgatacaagcgaatttgaaattacttacggaagaaacatggatgtcactcatgccattaaaagatcaacgcattatggcaacagttatttagacggacatagagtccataatgcatttgtaaatagaaactatactgtgaaatacgaggtcaattggaagactcatgaaatcaaggtgaaaggacagaattga

SEQ ID NO: 404980 - DNA, 966 bp, Staphylococcus aureus
atgaacttaaaattaaatagaaagaaagtgatttctatgattaaaaataaaatattaacagcaactttagcagttggtttaatagcccctttagccaatccatttatagaaatttctaaagcagaaaataagatagaagatatcggccaaggtgcagaaatcatcaaaagaacacaagacattactagcaaacgattagctataactcaaaacattcaatttgattttgtaaaagataaaaaatataacaaagatgccctagttgttaagatgcaaggcttcattagctctagaacaacatattcagacttaaaaaaatatccatatattaaaagaatgatatggccatttcaatataatatcagtttgaaaacgaaagactctaatgttgatttaattaattatcttcctaaaaataaaattgattcagcagatgttagtcagaaattaggctataatatcggcggaaacttccaatcagcgccatcaatcggaggcagtggctcattcaactactctaaaacaattagttataatcaaaaaaactatgttactgaagtagaaagtcagaactctaaaggtgttaaatggggagtgaaagcaaattcattcgttacaccgaatggtcaagtatctgcatatgatcaatacttatttgcacaagacccaactggtccagcagcacgagactatttcgtcccagataatcaactacctcctttaattcaaagtggctttaatccatcatttattacaacattgtcacacgaaagaggtaaaggtgataaaagcgagtttgaaatcacttacggcagaaacatggatgctacatatgcttacgtgacaagacatcgtttagccgttgatagaaaacatgatgcttttaaaaaccgaaacgttacagttaaatatgaagtgaactggaaaacacatgaagtaaaaattaaaagcatcacacctaagtaa

SEQ ID NO: 404981 - DNA, 1311 bp, Staphylococcus aureus
atgaaaaataaatatatctcgaagttgctagttggggcagcaacaattacgttagctacaatgatttcaaatggggaagcaaaagcgagtgaaaacacgcaacaaacttcaactaagcaccaaacaactcaaaacaactacgtaacagatcaacaaaaagctttttatcaagtattacatctaaaaggtatcacagaagaacaacgtaaccaatacatcaaaacattacgcgaacacccagaacgtgcacaagaagtattctctgaatcacttaaagacagcaagaacccagaccgacgtgttgcacaacaaaacgctttttacaatgttcttaaaaatgataacttaactgaacaagaaaaaaataattacattgcacaaattaaagaaaaccctgatagaagccaacaagtttgggtagaatcagtacaatcttctaaagctaaagaacgtcaaaatattgaaaatgcggataaagcaattaaagatttccaagataacaaagcaccacacgataaatcagcagcatatgaagctaactcaaaattacctaaagatttacgtgataaaaacaaccgctttgtagaaaaagtttcaattgaaaaagcaatcgttcgtcatgatgagcgtgtgaaatcagcaaatgatgcaatctcaaaattaaatgaaaaagattcaattgaaaacagacgtttagcacaacgtgaagttaacaaagcacctatggatgtaaaagagcatttacagaaacaattagacgcattagttgctcaaaaagatgctgaaaagaaagtggcgccaaaagttgaggctcctcaaattcaatcaccacaaattgaaaaacctaaagtagaatcaccaaaagttgaagtccctcaaattcaatcaccaaaagttgaggttcctcaatctaaattattaggttactaccaatcattaaaagattcatttaactatggttacaagtatttaacagatacttataaaagctataaagaaaaatatgatacagcaaagtactactataatacgtactataaatacaaaggtgcgattgatcaaacagtattaacagtactaggtagtggttctaaatcttacatccaaccattgaaagttgatgataaaaacggctacttagctaaatcatatgcacaagtaagaaactatgtaactgagtcaatcaatactggtaaagtattatatactttctaccaaaacccaacattagtaaaaacagctattaaagctcaagaaactgcatcatcaatcaaaaatacattaagtaatttattatcattctggaaataa

SEQ ID NO: 404982 - DNA, 867 bp, Staphylococcus aureus
atgtctcataatgaaaatcttaaattggcgcaacgcggtgcttatttgagtttaattgtatatataatcttatctattgttaagtatgtcacgggttttgtctttaactctgcagctgtaagagccgatgcattaaacaatatgacagatattatcgtttctttagctgttattattggattgaaaatttcaattaaacctgccgatcgaaatcatccttatggccatttgaagtctgaaaatatttcttcattattggtgtcatttgtcattatgtttgtaggtatccaagtagttattcaaaatgcacctcgtttgttcaaagaagatgacgttgtacctaacgcaataacaattatcgtcagcttaatcagtggtcttgtaatgttgattgtatttgcagtcaatcaaagactagcgaaaagaacgaaaagtagttctttaaattcggctgccaaagataatttatcggatagtttagtcagcattggaacagcgataggattaatttttacgcaaatcggtttcccaattgtcgatattattttagcaacattactaggcttactaatcgtttatactggttttggtatttttaaagaagcaatttttatgttgagtgatggtttcaatgaaactgaattagaagcgtatcgcaatgatattttagaagttgatgaagtacaagaagttaaaagtattaaagggcgttaccatggaagtagtgtgtttattgatgtcacaattgttgtagatgctaacctttccttagtagaagcgcatcaaatttgtgacaatgtcgaacatcatttgcacaaaaaaggtatttcctcagtatacgttcacccagaaccagaccatctataa

SEQ ID NO: 404983 - DNA, 687 bp, Staphylococcus aureus
atgccaaaattaattttatgtcgtcatggacaaagcgagtggaatgctaaaaacttatttactggatgggaagatgttaatttatctgaacaaggtattaatgaagcgactagagcaggtgaaaaagtaagagaaaataacattgccatcgatgtagcttttacatcgttattaacacgtgctttagatacaacgcattatattttaactgaatctaaacaacaatggattcctgtatataaaagctggcgtttaaatgaacgccactatggtggattgcaaggcttaaataaagatgatgctagaaaagaatttggagaagaacaagtacatatttggcgtcgttcttatgatgtgaaaccacctgctgaaaccgaagaacaacgtgaagcttacttagctgatcgtcgatataatcatttagataaacgtatgatgccttattctgaaagtctgaaagatactttagttcgagtgataccattttggacagatcatatttcacaatatttgctagatggtcaaacggtattagtttctgcacacggaaattcaattcgcgcattgattaaatatcttgaagatgtgtcagatgaagatatcattaattatgaaattaaaacaggtgcaccgcttgtttatgaattaacggatgatttagaagttatagataaatactacttataa

SEQ ID NO: 404984 - DNA, 1440 bp, Staphylococcus aureus
atgtcgaagaaacaaaaattaacgatgattattactatgctgatgggtggattttttggattattaaatgaaacactattagtgacggctttaccaagtattatgaaagattttgaaatttcatatacacaagttcaatggctgacaacagcttttttattgactaatgggattgttattcctttgtccgcgcttgttatacaacgttatacaacaagacaagtgtttttagtgggtatttctatctttttcttaggtacattactcggcggcttgagtccgcactttgcaacattattagttgctagaattattcaggcgttaggcgcaggtattatgatgccattgatgatgacaacgattttggatgttttccaaccacatgaacgcggtaaatatatggggatatttggtttggtaattggtttagcaccagctattggacctactctttcaggttaccttgttgaatattttaactggagatcgcttttccatgttgtcgctccaattgcagctgtgacatttttaattggatttaaaacgataaaaaatgttggaactacaattaaagtacctattgattttatttctgtcattttttctgtactaggtttcggcgggttattgtatggaacgagttcaatttcagaaaaaggttttgataatcctatcgtattagtatctatgattggaggcgttgttttagtcgcattatttgtattacgtcaatatcggctatcaacaccattattaaattttgctgtatttaaaaataaacaatttacagttggtatcattattatgggtgtcacaatggtatcgatgattggttcggaaacgattttacctatctttgtgcaaaatttattgcatcgttcagctttagattctggattaactttattaccaggagcaattgttatggcatttatgtcgatgacttcgggtgctttatatgaaaagtttggtcctagaaatcttgctttagtaggtatggcgattgttgttattactacggcttattttgttgtaatggatgaacaaacatcaacaatcatgttggcaacagtttatgcgattcgaatggttggtatcgcgttaggattaattccagtaatgacccatacgatgaatcaattaaagccagaaatgaatgcacatggttcatctatgacaaacacagtacaacaaattgctggttctatcggaacagctgcattaattactattttatcccatgcaagcaaaaacttttctccaactatgtcagactataatggcatgaacaaaattgatatgatgaatcaaattaaagttgatacgatgttgcatggttatcacgctggatttttatttgcattattgattacagttgttagtttcttttgttcatttatgttacaaggtaagaaaaaagaagttgattctcgtcaataa

SEQ ID NO: 404985 - DNA, 780 bp, Staphylococcus aureus
atgaaaagacttttatttgtgatgatagctttcgttttcatattggctgcatgcggaaacaattcgtcgaaagacaaggaagctagtaaagatagcaagacaattaatgttgggactgaggggacttatgcaccatttagtttccacgataaagatggtaaattaactggttacgatattgatgttattaaagcagtggctaaagaagaaggtttaaaacttaaatttaatgaaacttcttgggattctatgtttgcaggtttagacgcagggcgttttgatgtaatcgcgaaccaagtaggtattaatcctgatagagaaaagaaatataaattttctaagccttacacattctcaagtgctgttttagttattcgtgaaaatgaaaaagatattaaagattttgatgatgttaaaggtaagaagttagcacaaacattcacatctaattatggtaaattagctaaggataaaggtgctgatattacaaaagttgatggctttaaccaatcaatggatttattattgtctaagcgtgttgatggtacatttaatgatagtctgtcatacttggattataaaaaacaaaaacctaatgctaagatcaaagcaatcaaaggtaatgctgaacaaagtagatctgcatttgcattttctaaaaaagcagatgatgaaacagttcaaaaattcaatgatggcttgaaaaaaatcgaggaaaacggtgaattagctaaaataggtaagaaatggtttggtcaagatgtttctaaatctaaatag

SEQ ID NO: 404986 - DNA, 729 bp, Staphylococcus aureus
ttggtcaagatgtttctaaatctaaatagcgaacaacaacatgcgctagatgctgcaaaacaagctttcggacctatgctagaaggtttggtcaaatattcaattcctattacattagttacatttgttttaggattgattattgcattatttacagcattaatgcgaatttcaacgagtaaaattttaagaagtatttcacgtgtctatgtatctattattcgaggaacaccaatgatagtacaactatttatcatattttatggtattccagaattaggtagattattaacaaatgacgctgacaaccaatggacattggcacctgtagtggctgctattattggtttatcattaaatgtaggtgcgtatgcttcggaaattattcgtggcggtattatttctataccgaaaggacaaacagaagctgcatattccatcggtatgacgtatggtcaaacgatacaacgtatcattttaccgcaggcaattcgagtgtcgattcctgcactaggtaatacatttttaagtttaatcaaagatacatcattattaggatttattttagtggctgaaatgtttagaaaagctcaagaagttgcgtctacaacatatgaatatttaacaatttatgtgttagttgcgctaatgtactgggtggtatgctttattatttcaattatccaaggtatctatgaatcttatattgaaagagggtatcgctcatga

SEQ ID NO: 404987 - DNA, 732 bp, Staphylococcus aureus
atgattcaattgaacaatatccataaatcatttaatgatgttgaagtcatcaaaggtattgatttatctgttgaacaaggtgaggttgtaaccttaatcggtcgatctggttcaggtaaaacaacattgttacgtatgattaatgcattagaaattccaactgaaggtacagtttatgttaacggcaaaacatatacatctaaagataaaaaatcacaaatagaagttcgtaaacagtctggtatggtatttcaaagttataacctttttccgcataagacggcattagaaaatgtaatggaaggtcttatcacagttaaaaagttgaaaaaggatgaggcacgtgggaaatcacttgagttacttgagaaagttggtttaacacatgtcaaagatcaacgtccacatgcattatcaggtggtcaacaacaacgtgttgctattgcaagagcactagcaatgaaccctaaagtgatgttgtttgatgaaccaacatctgcacttgatcctgaacttgtgaatgatgttttaaaggttattaaagatttggctaatgaaggcatgacaatggtcattgtgacacatgaaatgcgttttgctaaagaagtatctaataacattgtatttattcatgaaggcatgatcggagaacaaggggctccagaagagatgttcaatcgtccgaaaacagaagaattaagacgtttcttaaatgttataaatgaagaataa

SEQ ID NO: 404988 - DNA, 1251 bp, Staphylococcus aureus
atgaactttgtaacgttgacttcggatgagttcaatgcgtttacaacaaagcatttttcacattacacacaatcagctattcattacaatcatagagttgatttaaaaggcgatgtgcatcttgtaggggttaaagatgacaatggtcaagtgattgcaggatgcttattgacagaagcacgcacacttaaatttttcaaatatttttatacacatcgcgggccagtgatggattatacaaatcaatcattagtagcatttttctttaaagcattaacgtcatatttaaagaaacacaattgtttatatgtccttgtagatccatatttaattgaaaatttacgcaatgcagacggtgaaattgttaaatcttatgataaccgagcatttgttagaacaatggataaattaggttataaacaccaaggtttccctgtaggttatgattcaatgagccaaatccgttggctgtcagtgttagatttaaaagataagactgaagaccaacttttaaaagaaatggattatcaaacgagacgtaatattaaaaaaacatatgatattggtgtcaaaactaaaacgttaacgattgatgaaacgcaaacttttttcgacttattccatatggctgaggaaaagcacggtttcaaattccgtgagttaccatactttgaagaaatgcaaaagttatacgatgaccacgccatgttaaagttggcgtatattgatttaaacgagtatttaaaaacgttacaattaaagcaacaacaattaacagctgaactctcaggtgttgaagaagcattggaagaaagtcctaattcaaagaaaaataaaacgaaacgcacacagctagaacaacagctaaatagcaataagcgtaaaatcgacaatacaatagaacaaattgaacaagatggtgcagtcttaaacttagcttctgctttatttatctacaatgagcatgaagtttattacttatctagtggttcaaaccctaaatataatgcttatatgggtgcctaccatttgcagtgggaaatgattaagtttgctaaagcgcatcatattgatcgctataatttttatggtattaccggtgacttttcagagtcatcagaagactatggcgtccaacaattcaaaaaaggttttaacgcacatgtagaagagtatatcggtgactttattaagcctatcaaaccattactatataaggtacaaacgtacttaaatcataaacgtcgttaa

SEQ ID NO: 404989 - DNA, 363 bp, Staphylococcus aureus
ttgaagcgatttgtggcgacggtattattattactagtctttatatcaggatgtggtaatgataaatatgtgaaagaaatagatgaagcagttaaaattcaaaatcaaaaacaagaacaacttgccaaaaaaggcaacggtgatcgtgttgatcattttgaacgcaaagatgctaatatttatgtctatgataaggataaaattatcattttagcttataaacctttgagtaatgatgatgaagtgcattattatgcatatgattttagtgataaacgtgtatcatataagcaagattttgattcgagacgatattatcaacaacatgatgcggattatcatgaagaaaatatgacgaactag

SEQ ID NO: 404990 - DNA, 600 bp, Staphylococcus aureus
atgactaaaaaattactaacattatttatagtgagcatgttaattttaacagcttgcggtaaaaaagaatcagcaacgacatcttcgaaaaacggcaaaccattagttgtcgtatatggcgactataaatgtccttattgtaaagaattagatgaaaaagtcatgccaaagttgcgtaaaaattatatagataatcacaaagtggaataccaatttgtcaatttagctttcttaggtaaagactcaattgttggttcgcgtgcgagtcatgcagtattgatgtatgcacctaaatcatttttagattttcaaaagcaattatttgctgcccagcaagatgaaaataaagaatggttaacaaaagaactattagataaacatattaaacaactgcatttagataaagagacggaaaataaaattataaaagattacaagacaaaagatagcaagtcttggaaagctgcagagaaagataaaaaaatagcgaaagataatcatataaaaacgacaccaactgcatttattaatggcgagaaagttgaagatccatatgattatgaaagttatgagaagttattaaaagataaaatcaaatag

SEQ ID NO: 404991 - DNA, 252 bp, Staphylococcus aureus
atgattattaaaaattattcatacgctcgacagaatttaaaggcacttatgacaaaagtaaatgatgatagtgatatggtaactgtaacatctactgatgataaaaacgtagtaatcatgtcagaatcagattataactccatgatggaaacactttacctccaacagaacccaaataatgctgaacacttagctcaatcaattgcagatctagaacgtgggaaaactataacgaaagatatagatgtataa

SEQ ID NO: 404992 - DNA, 267 bp, Staphylococcus aureus
atggctaggttaaatattacgttttcgcctcaagcctttgaagattataagtattttcagcagaacgataaaaaaatggtgaagaagattaatgagttacttaaaagtattgacagaaatggtgcattggaaggtataggtaagcctgaaaagttaaaatcgaatctgactgggtattatagtagacgtatcaatcacgaacatagattggtttatacagtagatgacaatcatataaaaatagcatcatgtaaataccattattaa

SEQ ID NO: 404993 - DNA, 1551 bp, Staphylococcus aureus
atgaaaaagaaattaggtatgttacttcttgtaccagccgtaactttatcattagccgcatgtgggaatgatgatggaaaagataaagatggcaaggtaacaattaaaacgacagtttatccattgcaatcatttgcagagcaaattggtggaaaacacgtgaaggtatcatcaatctatccagcagggacagatttacatagctatgaaccaacacaaaaagatatattaagtgcaagcaagtcagacttgtttatgtatacaggggataatttagatccggttgctaagaaagttgcatctactatcaaagataaagataaaaaactgtctttagaggataaattagataaagcaaagcttttaactgatcaacacgagcatggtgaagagcatgaacatgagggacatgatcatgagaaagaagaacatcatcatcatcatggtggatatgatccacacgtatggttagatcctaaaattaaccaaactttcgctaaagaaattaaagatgaattagtgaaaaaagatccaaaacataaagatgactatgagaaaaactacaaaaaattaaacgacgatcttaagaaaattgataacgatatgaagcaagttacaaaagataagcaaggtaatgcagtattcatttcacatgaatcaattggatacttagctgattgttatggttttgttcaaaaaggtattcaaaacatgaatgctgaagatccatcacaaaaagaattaactaaaattgttaaagaaattagagatagcaatgctaaatatattctttacgaagataatgttgcgaataaagtgactgaaacaattcgtaaagaaacagatgcgaagcctttaaaattctacaacatggagtctttaaataaagaacaacagaaaaaagataatattacgtatcaatcattaatgaaatctaatattgaaaatatcggtaaagctttagacagtggtgttaaagtgaaagacgacaaagctgaaagtaaacatgacaaagcaatttctgatgggtattttaaagatgagcaagttaaagaccgtgaattaagcgattatgctggtgaatggcaatctgtttacccttacttaaaagacggtacgcttgatgaagtgatggaacataaagctgaaaatgatccgaagaaatctgctaaagatttaaaagcttattatgacaaaggatataaaactgatattactaacattgatataaaaggaaatgaaattacatttactaaagatggtaagaaacacactggtaaatatgaatacaatggtaagaaaacattgaaatatcctaaaggtaaccgtggcgtgagatttatgtttaaattggtcgatggtaatgataaagacttaccgaaattcatccaatttagcgatcacaacattgcacctaaaaaggcagaacacttccatatctttatgggtaatgataatgacgcgttattaaaagaaatggataactggccaacatattatccttcaaaattaaataaagaccaaatcaaagaagaaatgttagcgcattaa

SEQ ID NO: 404994 - DNA, 468 bp, Staphylococcus aureus
atgacgattaaagttgaagataataaaattattttttcaagaacgatagaagcaccgattgaaaaggtgtttgatgcctatacgacaaaagcattatttgaaaaatggtttcatccaaaagacgctagtaccaaagtgtttcgctttaatgctgtttcaggcggtgatgcattttatgcgattaaaacacctacaatgaccagctatacattagcagaatataaaacggttaagcgtccatatttaattgaatatattgactcatttgcgacacctcaaggtgcaaaagatacaaaaatgccaagcatgaaaattactttgtcattttccaagagcaatacaacgaaaacgacagtgacatcaacatcggtatttccaacaaaagaagccgctcaacaagtcataaacatgggtgttgaacaaggtatgaatcaaactttagatcaacttgatgctttattgaaataa

SEQ ID NO: 404995 - DNA, 183 bp, Staphylococcus aureus
atggtagaacgttatatcaaagttttaatattatatattttcacaacactactatcttctatttcagtaacgtcaaaatgtgtacctaataaagttataaggtttattttacgtactgcaattggttacagtgtatttgcatatggtttacattacttttcaaatttaaaaaagaataagtaa

SEQ ID NO: 404996 - DNA, 825 bp, Staphylococcus aureus
gtgatagaaaataagaaaacagttgaagatacatattcaacaggcgcaattgttgattcaatatcatcttcagtacaaatgaagcaagtaatggtacagcaaacacctggccgatatatgcttaaagcaatgatggccggatttttactctcaatcgttactgtatttatgttcggaataaagacgcagtttgcgagtactcacgtagatggacttatcaatttaatgggagccattgcgtttagtttaggtttgattttagttgtattaactaactctgaattattaacaagtaacttcatgtactttacagtaggctggtattataaagtcgtttctgttaagaagatgacttggattttattatattgtttcttaggaaatattttaggtgggtttgtgttatttttcttaatgaaatttgcgcatgtcatgacacctgaaatgacacaagctttaacagctttagttcagaaaaagactgttgattcaacatggttgaatatttttacaaaaggtattttctgtaacttctttattaatattggtattttcatctctatgcaattcaaaggcggcttaacaaaggcattcttcatagcttgtggtgtcgtggtctttgtatacatgggatatgagcacgttgtgttcaatgcaggtctatatgcaggtatggtattctttaaccttgatgcagtttcatggttacacgttttaaaaaatatcgtttttgctttcttaggtaactttgtcggtggcggtatttttgtaggtctcgtttatgctttcttaaatggtaagcgtaatcgtttagagcaacaataa

SEQ ID NO: 404997 - DNA, 537 bp, Staphylococcus aureus
atgacaaaaacgatgattcgactcgcaagtgaacaagatgcagaaaaattgcaacaactcatgcatgaagcatttacgcctctaagagaactaggtattgattggccttcggttaatgctaatttagatgctgttaaagaaaatatagataaaaatactacatttgtcatgacaattgatgatgaaattatatctacgattacggttagatatccttggggaagtgtgaaaagtatttcgggttatccttttgtctggtggtttgcgacaaatcctgagtatgaagggaaaggctatggtagccaattacttacttatgttgaagaagcatttttgcgagatacgttaaagtcagcggcagttactttaggtacatctgcaagattgcatccgtggttacttaaaatttatgaaaaaagaggttatgaaatatacagcgaacatgaaaatgatgatggcgatttaggtgtgatcatgcgcaaagtattgatacccgagcgctttgacgaaacaatattaggccaaccaccattttaa

SEQ ID NO: 404998 - DNA, 732 bp, Staphylococcus aureus
gtgaatgggaatatcattgttgcacatggcatgaggcacggacgacagaatcaagcgttagaagcatttatttctgaattagtaaaagatgatatacatcactatgatattgcgtttttagaaagtgagcatcaggatttagagacggtaatgacgacgttgattcaaagtggggttgaccattttaaaattgtaccattgctaatctttagtgcaatgcattatctcaaggatataccgaatatcgttcatgaaatgaaacgacggtatccagacataaaggtagaagtaagcgagccacttggcacacatcctttaatgagacgattaattgaacaacgtatttgtgacgcattagcaggtgacgaacaacaagttggagttatggttgttgcacacggcaatattaatggaaagtttactaaggcacacgaagagttacaaatatgcgctcaaaatttgcaaattagcaagccgacatatgcgagaacgctatatggagagattagttttacacatgatttagaaagcatctcgaaacggtatcaaaaattgattgtcgtaccattatttttatatgacggaagacttgttaacaaagtgaagcagcaaatgaatgacatggttattaatacagatatacacttcacaccttcaattaacttcgacccaattttaaagcaaatcattaacgatagattagaaagcttaatgattccaatgaaaatataa

SEQ ID NO: 404999 - DNA, 2406 bp, Staphylococcus aureus
atggcaaagcaaaaactagtaatgattggtaacggtatggcgggcattcgaacaatcgaagaaatattagagcgcgccaacgatttatatgatattacggtaataggtaaagaaccttatccaaactataaccgcatcatgctttcaaatattttacaaaataaaatgacagttgaagaaacaattatgaatccatatgagtggtatgaggaacatggtatcgagttaattacaaatgatcctgtaattgaagtagatagagcaaatcaatcagttactactgcaaatggtattgaagtatcatacgataaattgatttttgcgacaggttctaaagcattcgtcattccagttccaggttcgacattaccgagtgtaattggttggagaacgattgatgatactgaacaaatgatgaacattgctaagactaaaaagaaagcaattgtaattggtggaggattactaggtttagagtgtgcacgtggtttattagatcaaggtatggaagtaacggtgttacatttagctgaatggttgatggaaatgcaactagaccgtaaagctggaaatatgcttaaagcagatctagaaaagcaaggtatgaagtttgaaatgcaagccaacacaactgaaatcttaggagaagatgatgttgagggtgttaaattggctgatggacgcgagattccggcagacttagttgttatggcagtaggtatacgaccatacacagaagtagccaaagaatcaggtctagatgttaatcgtggtattgttgtcaatgatgtgatgcaaacaagtgatagcaatgtatatgcagttggtgaatgtgcagaacataacggcaaagtttatggactcgttgcaccactatatgaacaaggtaaagtattagctgatcatttaacaaataaagaaacgaacggatacaagggatcaacaacatttacgtcattaaaagtttctgggtgtgacttgtatagtgctggtcaaattgtagaaaatgcagaaattaaaggtattgaaatatttaatagtgttgataataactataaaaaaatctttttaaaagacggtaatgtagttggtgcagtactatatggtgatatcgatgatggttcacgcttttataacatgatgaaaaaaggtgaatccactgaagattacacacttgtatcattgcttactaaaggtggagaagaggcatcgctatcaattgctgatatggctgatgatgaaacaatttgtggttgtaatggtgttgataaaggtactatagtaaatgcgattacggaaaatggctttacaacagttgaagaagtaacggctaaaacaaaagcggggaattcatgtggtaaatgtaaaccgcaaattgctcaaatattgcagcacaccttaggagatgactttgttgccgcaaaacctgctggtatatgtggttgtactgatttgacacgcgatcaaatagtaacgcaaataagagcgaaaggtttaaaaacatctaaagaagttcgacatgttttaaactttaaaaataaaggtggatgtccaaaatgtcgaccagcaatcaactattatttaaacatggtttatccacatgatcatgaagatgaaagagaatcaagatttgctaacgaacgttaccatgcgaatattcaaaatgatggtacattttctgttatacctcaaatgcgtgggggtgttacagatgcagaccaactgattcgtctaggagaagtggctaagaaatatcatgtgccactagttaaagtgacaggttcacaacgtgttggtttgtatggagttaaaaaagaagaattaccaaatatatgggaagacctaggtatgcgttcagcatcagcttatggtaagaaaacacgctcagttaaaagctgtgttggtaaagagttttgtcgatttggtacgcaatacacgacacgacttggcattcgtttagaaaaaacatttgaatacatcgatacacctcataaattcaaaatgggtgtatcaggctgcccaagaagttgtgttgaatcaggtgttaaagattttggtattatctcagttgaaaatggattccaaatctatatcggtggtaatggtggtacagaagttgaaaaagctgaatttttaacaactgtagaaacagaagatgaagtaatcaaattatgtggtgctttgatgcaatattatcgcgaaacaggtatatatgctgaaagaacagcgccatggttaagaagacttggatttgaaaatgtaaaagaagtcttacttgacccagaaagacaaaatgaactatttgaacgcattatggatgctaaaaaagcagtcgaagctgaaccttgggaagcaataactagcaatgcgcaagcacgtagaatttttgaagtggagaaggtgtaa

SEQ ID NO: 405000 - DNA, 315 bp, Staphylococcus aureus
atggaaacaaaagaaaaaattaaagtgacaactatagatgaattaacacccctaattggaaaaaaggttattgtcaaaggcaaagaggtagggttgtttttaacagaaagtggcaaaattcatgcgattcacaatatctgtccacacaaacaaggaccattgtctgaagggacagtgagtggggaatatgtattttgcccgctccacgatcaaaaaattgatttaaatacaggtattgttcaagaacctgatgaaggttgtgtagatgtttatgaggtagaagttacagacgggaacgtatatatatgtctgtag

SEQ ID NO: 405001 - DNA, 978 bp, Staphylococcus aureus
atgtctgtagaggaatatggcaaggtttacttgataggtgcgggtccaggtaatccgaattatttgacgaaaaaggctgagcgtttaatacgtgaagcggatgtcattctatatgatcgattagtgaatccgttaattttacaatatgcgaatttgactactgaaattatcgatgttggtaaaaagccgtatgcaaaacatattcagcaagaaaaaataaatgactgtatcgtggaagcagcgcgtcgatataacaaggttgttagacttaaaggtggcgatccagcgatatttggtcgtgtgcaagaagaagtcgacacactaaatgaacatcatattgcgtttgaaattgtaccaggggtgacatcagcgagcgcagcagttgctactatgcagacaggtttgacaatgcgtacagttgctaaaagtgtgacattttctacaggtcactttaaagattcagaagaaaatgaagtggatgtcaattccttagtgaatggtggcacgttagcaatttatatgggggtaaaacgtttagggaaaattatcacacagatacaacaatacacagatattgattacccgatagcgattgtctttcaagcatcgtgttttaacgagtttgttgttaaggggcgtttaagtaatattatttcaaaattgcaacactattcaattgaggcgaaaccaggtatatgtattataggggaagttgttgattatactgaaaacactcctaaatcatatgatcctatgaagcaattttatgtagtaagtggttctaaacatgacgcccttatgctctgtgaacatttatatgacgaaggttatggctgtttgctaaacccaaatgatacatcgaatggcacatatcattcgtcgcaatatgattactatgatgcatttattaagcagcaagaaaatgtaacatatatttcaaccgatcgtgcagatgctaatacagtgttatgtcactaa

SEQ ID NO: 405002 - DNA, 3690 bp, Staphylococcus aureus
atgggaaaatttggattgaatttctttaagccaacagaaaaatttaatgggaattggtcgatcctagaaagtaaaagtagagaatgggaaaaaatgtacagagaacgttggagccacgataaagaagtaagaacaacacatggtgttaactgtacaggctcatgttcttggaaagtatttgtgaaaaatggtgtgattacctgggaaaatcaacaaactgactatccaagttgtggtccggatatgcctgaatatgaaccgagaggatgtccacgaggtgcgtcattctcttggtatgaatacagtccgcttcgaatcaaatatccatatattcgtggaaaactctgggatttatggactgaagcattagaagaaaacaatggtaatcgcgttgctgcatgggcgtctattgttgaaaatgaagacaaagccaaacaatataagcaagcccgaggtatgggagggcacgtgcgttcaaattggaaagacgttacagagataatcgcagcacaattactgtatacaataaaaaaatatggtccagatcgaatcgcaggatttacacctattccagcgatgtcaatgattagttatgcagcaggtgctcgattcatcaatttgcttggtggtgaaatgcttagtttttatgactggtatgcagatttaccacctgcctctccacaaatttggggagagcaaacagatgtgcctgaatcaagtgactggtataacgcatcatacattattatgtggggctctaatgtacctttaacacgtactccggatgcacattttatgactgaagtccgctataaaggtacaaaagtcatttcagtagcaccagattacgcagaaaatgtgaaatttgcagataactggctagcaccgaatcctggttcagatgctgcaattgcacaagcaatgacgcatgttattttacaagaacattatgttaatcaacctaatgaacgctttataaattacgctaaacaatatacagatatgccgtttcttatcatgctggatgaagatgaaaatggatataaagcgggtcgatttttaagagcgagtgacttaggtcaaacaacagagcaaggcgaatggaagccagttattcatgatgcaatcagcgatagtttagtagtacctaatggcacaatgggtcaacgttgggaagaaggtaagaagtggaacttaaaactagaaacagaagatggttctaaaattaaccctacattatcaatgacagaaggtggatacgaattagaaacaattcaattcccatactttgatagtgatggagatgggatattcaatcgtccaattccaactcgacaagtcactttagcaaatggtgacaaagtccgtattgctacaatttttgacttaatggcaagtcaatatggcgtgcgtcgttttgatcataaattagaatcaaaaggatacgacgatgcagaatcaaaatatacacctgcttggcaagaagccatttcaggcgtaaaacaaagtgttgtcattcaagtagcgaaagaatttgcgcaaaacgctatcgatactgaagggcgttcaatgattatcatgggtgcgggtattaaccattggtttaactcagatacgatttatcgttcaatcttaaacttagttatgttatgtggctgtcaaggtgtgaacggtggcggttgggctcactatgtgggacaagaaaaatgtcgtccgattgaaggatggagtactgtcgcatttgcgaaagactggcaaggaccaccacgtttgcaaaacggaacaagttggttctattttgcaacagaccaatggaaatatgaagagtcaaatgtagatcgtttaaaatctccattagctaaaacagaggagttaaagcatcaacatccagctgattataatgttttagcagctagacttggttggttaccatcatatccacaatttaataaaaatagtttgttgtttgcagaagaagctaaagatgaaggtatagattcaaatgaagcgattttgcaacgtgcaattgatgaagtgaaatcaaaacaaacacaatttgcaatagaagatcctgatttgaaaaagaatcatccaaaatcattatttatatggcgttcaaacttaatttcaagttctgcaaaaggtcaagaatactttatgaagcatttacttggcacaaaatcagggttattagctacaccaaatgaagatgaaaagccagaagaaattacgtggcgtgaagaaacaacaggtaagttagatttagtggtctctttagacttcagaatgacggcaacaccgttatattctgacattgttttgccggcagcgacttggtatgaaaaacatgatttatcatcaacggatatgcatccatatgtacatcctttcaatcctgccattgatccgttatgggaatcgcgttcagactgggatatttataaaacgttggcaaaagcattttcagaaatggcaaaagactatttacctggaacgtttaaagatgttgtgacaactccacttagtcatgatacaaagcaagaaatttcaacaccatacggcgtagtgaaagattggtcgaagggtgaaattgaagcggtacctggacgtacaatgcctaactttgcaattgtagaacgcgactacactaaaatttacgacaaatatgtcacgcttggtcctgtacttgaaaaagggaaagttggagcacatggtgtaagtttcggtgtcagtgaacaatatgaagaattaaaaagtatgttaggtacgtggagtgatacaaatgatgattctgtgagagcgaatcgtccacgtattgatacagcacgtaatgtagctgatgcaatactaagtatttcatctgctacgaatggtaaattatcacaaaaatcatatgaagatctcgaagaacaaactggaatgccgttaaaagatatttctagcgaacgcgctgctgagaaaatttcgtttttaaatataacttcacaaccacgagaagtaataccgacagcagtattcccaggttcaaataaacaaggtcgacgatattcaccatttacaacgaatatagaacgtctagtaccttttagaacattaacaggacgtcaaagttattatgtggatcacgaagttttccaacaatttggggagagcttaccagtatataaaccgacattgccgccaatggtatttgggaatagagataagaaaattaaaggtggtacagatgctttggtactgcgttatttaacgcctcatggaaaatggaatatacactcaatgtatcaagataataagcatatgttgacactatttagaggtggtccaacggtttggatatcaaatgaagatgctgaaaaacacgatatccaagataatgattggctagaagtgtataaccgtaatggtgttgtaacggcaagagcagttatttcgcatcgtatgcctaaaggtacaatgtttatgtatcatgcacaagataaacatattcaaacgcctgggtcagaaattacagatacacgtggtggttcacacaacgcgccgactagaatccatttgaaaccaacacaactagtcggaggatacgcacaaattagttatcactttaattattatggaccaattgggaaccaaagggatttatatgtagcagttagaaagatgaaggaggttaattggcttgaagattaa

SEQ ID NO: 405003 - DNA, 1560 bp, Staphylococcus aureus
ttgaagattaaagcgcaagttgcgatggtattaaatttagataaatgcataggatgccatacgtgtagtgtgacatgtaaaaacacttggacaaatcgtccaggtgctgagtacatgtggttcaacaacgtagaaacgaagccaggtgtagggtatccgaaacgttgggaagaccaagaacactacaaaggtggttgggtactaaatcgtaaagggaaacttgaattaaaatctggaagtagaatttcaaaaattgctttaggtaaaattttttataacccagatatgccattaattaaagattattatgagccatggaactataattatgaacatttaacaactgcgaaaccagggaagcattcgccagttgctagagcgtattcagaaattacgggggataacattgaaattgaatggggacctaactgggaagatgacttagcaggtggtcatgttacaggtccaaaagatcctaacatccaaaaaatagaagaagatattaaattccaatttgacgaaacttttatgatgtatttaccacgtttatgtgaacattgcttgaatccaagttgcgttgcatcgtgtccttcaggtgctatgtataaacgtgatgaagatggcattgtattagttgaccaagacgcatgtcgtggatggcgttactgtatgacaggttgtccatataagaaagtttacttcaattggaaaacgaacaaagctgaaaagtgtactttctgtttcccgagaatcgaggcgggtatgcctacggtatgctctgaaacttgtacaggacgtatgcgttacttaggtgttttattatatgatgcagatcgagttcatgaagcagcttcagcagtagacgagaaagatttatatgaaaaacaattagatatattcttaaacccatttgacgaagaagtcattgctcaagctgaaaaagatggtattggttacgattggattgaagctgcacaaaactctccaatttataagttagcaattgaatataaacttgcatttccgttacatcctgaatttagaacgatgccgatggtttggtattgcccaccacttagcccaattatgagctattttgaaggtaaaaatacaactcaaaatccagatgcgattttcccagccattgaagaaatgcgtttacctattgaatacttagctaatattttcactgcaggagatacagagccagtaaaaggagccctacaacgtatggcaatgatgagaagttatatgagatctcaagttactcaacagccatttgacacgtctcgattagagcgattaggtataaccgagcgccaaactaaagacatgtatcgtttattaggactagccaaatatgaagatcgatttgttattccaacatcacacaaagaaacctatttagatacgtatcacgcacaaggtagtacaggatacaattacggcggcgagcattttggagataactgtgaaggctgtggcgttgcagtaggttcagggaaaactggtcaagaaatttataatgagaatttctatggagggattttccgtgattaa

SEQ ID NO: 405004 - DNA, 576 bp, Staphylococcus aureus
gtgattaatttcgataattttaaaaaatatcaagaaagttttggatatatggcacaacagttatgttttccagaaaaattaacttttcatccaaaaacttttgaagaaacaatttcgaaagatcatccagcatatgaagatttagtagcatttagaaatgtaatgatgacattttcattatcagaaatcaaagcgatttatacagatacatttgattttacgaaaaaagcaccattatatatgacgtataacaaatttgatacgcaaaaagaacgtgggcaaatgttagctaaattaaaggtattatatgaaatgtttggactagaaatggtagataatgaactttctgattatctaccgttgatgcttcaatttttgcaagtggcagaatggcgaaatgatccaagagctgaagagaatattcaattaatcattatgattattgaggatggaacatatgtgatggcgaatgcacttggtgaagataacaatccatatgcctatgtgattcaagcacttagaaaaacattgaaattatgtttgacatcaccaaaaggagtgaaacatcatgcttaa

SEQ ID NO: 405005 - DNA, 678 bp, Staphylococcus aureus
atgcttaatcagtttttatgggttatatttccgtatttatgtttagttgtctttgtcgcaggtcatattgcacgttatcgttatgataaattttcttggacagctaaatctagtgaattaatagaaagaaaaaggttgatgtggggaagtttattatttcacttaggtattattccagtgttttttggacacgtagttggattgttaataccgaaaccatggatggatgcagtgggtgtgtctgagcatttatatcatataggcgctgtttatattggtagcatctttggtataataactttgatagggatgtttttattaacagcgagacgtgttactacgaaaagtattcgaagattaagttcagcgtcggatatatttgtaaatttcttattattacttatcgtatttatgggatgttacgcaacattagtaacaaatatacaacatccagactttaactacagaacttcattatcaatttggtttagacaattatttatgttaaaaccagatgcgtcattgatgagtggtgtgccgattgcatttaaaatgcatatattgttaggtttcactattatggcttgttggccatttacacgtttggtgcatgtttggagtgtacctttgacatatataaatcgcagatatattatttaccgtaagaataaagtgtaa

SEQ ID NO: 405006 - DNA, 453 bp, Staphylococcus aureus
ttgacaccagaagcaataattgaagatcgtagatttcaagagacattagataaaatacgcaaagaagagggttatgattttgcggcaatcgctttctatgaatctaacaaaccatcatctccaataaaatggcactatgtttcaggtaataaaaataatcgatttaaattgattattttaagaaaaggtcgtggattagctggaactgttatgaaaacaggaaagcgtatggtaatagccaatgttggtttagctttagggcctgaagaaaagattgactatccaattttattgagcgaatcattaacagcagttttagcagtgccgctttggtataagaatcaagtgtatggcgtactattatttggtcaaagagatggtcgtcctttaccaaaaatatttgataatgatgatattcaacgtaagtttggtattttcaatgatgataaataa

SEQ ID NO: 405007 - DNA, 1035 bp, Staphylococcus aureus
atgattaatgaggacagtatacagttagatactttattgaaaaaatattatgagcattcaatcgaaaagatagtttttgctgatgataacggtaaaattattgcaatgaatgatgctgctaaagatatattatctgaagaagataattacagtgctgtggcgaatgcgatttgtcacagatgtgaagggtatacaaatgcctatgatgtacaatcatgtaaagactgtttcttagaatcgatgcaagtacaagctacgaatttccaagtatttatgaagacgaaagatcaaaaagtgatgccatttacagcaacatatcagttgattgatcaagacaggggaattcatgcatttacgcttcaaaatgtttcatcacaaattgaacagcaagagaaattgcatcaacaacgtatgatgcgtaaaacaatctcagcccaagaaaatgaaagaaagcgaatttctagagagttacatgatagtgtgattcaagaaatgctcaatgtagatgttcaattgagattattaaaatatcaagaagatacaactaagcttttggaagacgcagaaaatattgaatatattgtcgctaaattaattgatgatatacgtaatatgtcggttgaattaagacccgcttctttggatgatctaggccttgaagcagcttttaaatcatattttaaacagtttgaagaaaattatggaataaaaatcatatatacatcaaatattaaaaatactcgctttgatagtgatattgaaacggttgtttatcgagtagtgcaagaagctattttaaatgcgttgaaatacgctgatgtaaatgaaataaatgtaggtatccgtcaaactgggcgccatttggtagcagaagtgatagatgcgggaaatggttttgatccaagttctaagcctaaaggttctggactcggtttatatggaatgaatgagcgagctgagttagtcagcggtagcgtcaatattgaaacgaaaattggtgagggtaccaatgttacattgaacattccaatttga

SEQ ID NO: 405008 - DNA, 654 bp, Staphylococcus aureus
ttgaaaatagtcattgccgatgatcacgctgttgtccgtacggggttctctatgattttaaattatcaaaatgatatggaagttgttgcaacggctgcagatggcgtcgaagcttaccaaaaagtaatggaatataaacctgatgtgttactaatggatttaagtatgccaccaggtgagtcaggtcttatcgctacgagtaaaattgctgacagttttcctgaaactaaaatactaatattaacaatgtttgatgatgaggagtatttgttccatgtgttgcgtaatggtgcgaaaggttacatattgaaaaatgcacctgatgaacaattattgttagctattcgaactgtatataaaggtgaaacatatgtagatatgaaacttacaacatctttagtgaatgaatttgtatctaattcaaatcaggacactgcaaacacaacagatccttttaaaatcttatcaaaacgagaactagaaatattgccacttattgccaaaggttacgggaataaagaaattgcagagaaattatttgtatctgtgaaaacagtagaagcacataagacgcatattatgacaaagcttggcttaaagagtaaacctgagctagttgaatatgcattgaaaaagaaattattagagttttag

SEQ ID NO: 405009 - DNA, 741 bp, Staphylococcus aureus
ttggcatacacatacactttaaaagatattattgaaattacaggtgtaactaaaagaactttacattattacgatgaaataggattattagttccagataaaaatgataaaaattatcgcgtttataaacagcaagacttagaaaaattacaaaagattttaatactcaagtcttttgattttgatatcgctaaaataaaacaatacatttcgtatgataatgaacaattgcgaaagttattatcagagcaaataagcaagttagataaaaagatttctgacttacaattaattagacgctctgtatgtgaatttattaaaggactctctctaatagataccagcattttaaacaagacactacagtcacaatatgataaagaagcatctataaaatatggtcatacgaaagcatatcaatcatttattagacgtaaagacagcttacaatcgcaggatatcagacataaattgacaactatcttcaataaatttaatcatatgtctttgagtcattatccaatccaagattgtagtgatctcgtatttgagtggaaggcatttatgaacactatcgctgattttgatgatgaaacattatgctgtattgctaaaacatatgaagatgatacgcgtttcaaagattactttaattcatatgataatcaaaatttagcatcatacatttcagaagctgttaattattttttgagcaatgtgaataagagcgacaatttttaa

SEQ ID NO: 405010 - DNA, 207 bp, Staphylococcus aureus
atgccttatctctatggtgatgatattaataaacttcaaggtaggcctatcgttggcttatctcatgctgccgggtatgcatgtggctatcacttggtaaaatactttttacaaaaaacaaacatacctattgaagttgctacaacacttccagcacaaaaaataataaatgaggtgactgaattttggcatacacatacactttaa

SEQ ID NO: 405011 - DNA, 639 bp, Staphylococcus aureus
atgtataaaatcaatattattagatcagattccgtctataataatatactcaaggcaccaataaacgaccgtgattcaattttcactaaagaaatattagtaccttttaaaaagaaatttgaggtacaacatatgcctatttataatgatgacaaacagacaatgagtgcgattcaatttttagatgcctttcaaatttctcccaaagatttacgcatgtctgaccaaatgtcaatacaatacctgaataatgatttctggagtaattgcgaaaaatatttaaaagttgctatagatcaattttcaaattatagtatctcatctcaagtttctaactatcatttcacagtattacttggagatcgccaaaaaccacttatgtatctaaataaaaatcgcggtggtgatggtggcataccaggttatattatgatttatttagtgccgagtacaagtacaattaattctatgaaaagcttaattgcacatgaagtaaatcataatatgcgctatcaatatattgattgggatggcggaagtttgattgaattgattattgcagaaggattagctgaaaactatgtagaatcattgtatggtaaagcgcatattggaccgtgggtaacaaatactaattga

SEQ ID NO: 405012 - DNA, 1170 bp, Staphylococcus aureus
atgtacaaaacaaaaggtggctttcaacttacattacaaacattaagtttagtggttgggtttatggcttggagtataattgcgccattaatgccctttattaaacaagatgtcaatgttactgaaggtcaaatatcaatcattttagcgataccagttattttgggatcggtgctccgtgtgccatttggttatttaacaaacattgttggcgctaaatgggtattctttactagttttatcgtattgttattcccgatatttttcttaagccaagcacaaacaccgggtatgttaatggcttcaggatttttccttggtgtaggtggtgcaattttctcagttggtgttacatcagttcctaaatatttccctaaagaaaaagtaggtctagcaaatggtatttatggtatgggaaatatcggtacagcagtttcttcatttttagcaccaccgatagcgggtattattggttggcaaacaacagttagaagttacttaattattatcgctttatttgcattaattatgttcatttttggtgacacacaagaacgtaaaattaaagtaccattaatggctcaaatgaaaacattatctaaaaactacaaattatattacttaagttattggtattttattacttttggtgcttttgtagcatttggtattttcttacctaactacttagtaaatcattttggaattgacaaagtagatgctggtattcgatcaggtgtattcattgcgctggcaacattcttaagaccaataggtggcattttaggtgataaatttaatgcagttaaagtattgatgattgattttgttgttatgattatcggtgccattattttaggtatttcagaccatatcgcattattcactgtaggctgtttaacaataagtatttgtgcaggtattggtaacggcttaatcttcaaattagtaccatcatacttcttaaatgaagcgggatccgcaaatggtatcgtatcaatgatgggtggtttaggaggattcttcccaccactagtaatcacgtacgtagctaatttaacaggatcaagtcatttagcatttattttcttagcggtatttggatgtattgcattatttaccatgcgtcatttataccaaaaagaatatggctcattgaaaaacggttga

SEQ ID NO: 405013 - DNA, 423 bp, Staphylococcus aureus
ttgaacttcaatcaattcgagaatcaaaacttttttaacggtaatccaagtgatacatttaaagatttaggtaaacaagtatttaattacttttcaacaccttcatttgtaacgaatatatatgaaacagacgaattatattacttagaagctgaactagcaggtgtaaataaagaagatattagtatcgatttcaataataatacgctcactattcaagctactagaagcgcaaaatacaaatctgaacaactcattttagatgagcgtaacttcgaatcattaatgcgtcaatttgattttgaagctgttgataagcaacatattactgctagttttgaaaatgggttattaaccattaccttgcctaaaatcaaaccaagcaatgaaactacttcatcaacatctattccaatttcatag

SEQ ID NO: 405014 - DNA, 519 bp, Staphylococcus aureus
atgtatgtagaaaacagctatcttagcaaacagttgtgttttttattttatgtttcttcaaaagaaataattaaaaaatacacaaactatcttaaggaatatgatttaacctatactggttacattgttttaatggcgattgaaaatgatgaaaaacttaacatcaaaaaattaggtgaacgtgtgttcttagattctggaacactgacaccattactaaagaaattagaaaagaaagattacgttgttcgaacacgtgaagagaaagatgaaagaaacctacaaatttctctaacagaacaaggtaaagcaataaaaagccctcttgctgaaatttctgttaaggtctttaatgaattcaacatttcagaacgagaagcatcagatataattaataatttgcggaattttgtttctaaaaattttgactattccgacaaaaaaataactccctatcataaggtgatgggcagaagtatgcatcgatatgtttattcattatctttattgcttgtataa

SEQ ID NO: 405015 - DNA, 366 bp, Staphylococcus aureus
atgaagaagaaaaaaaacgcgattaaagttatcattatattatttatttcattaattgttgcagtagcatttttctttggtctgaaaacatatcaaggccataagaatattcaactaattgacagttacttggaagagaaaaatctaaaagataaaattaaatcagaaaaaacagagtatagtgctaaaaaaggtctcttctataaggaagttacatttaaagatgaacctggtgtaacttatgttgtgcaaccaatcagtactaataaaggattatttgttgaaggctttgatacagagactaagaaaagtttgaaaactgcaaagcataaatatttcaatcaaaattataaaccatcaaaatag

SEQ ID NO: 405016 - DNA, 1278 bp, Staphylococcus aureus
atggctctattcaagagaaaaattagcctacctatgcaagttgttattgcattagtgttaggtgttgtcgtaggacttttattatatggacaagaaaacgtagcaaattacattaaaccatttggtgacgtatttttaaatttaattaaaatgatcgttataccagttgtattttgctcactagcgctttctatttcgaacgttggggaatcgaaaactgtagggcgttatggctggaaaacaattttatactttgaaattattacaacaatcgcaataggtttagggattatcttcggtaacctatttaaaccaggtgctggattagacccaacaaaattacctaaaggtgatatttctaaatatcaatcaactgcacatgcagcagaacaatctacatatggaaatcattttattgataccattgtacatattattccgacaaacttttttgaagctttaaataagggtgaattattacctattatcttcttcgcagtattctttggattaggattagctgctgtaggtaaaaaagcagaaccagttaaagaatttttaagcggatcgcttgaagctgtgttctggatgattaataaaattttaaaattagcaccacttggagtgtttgcattcatttgtactacaattattacatttggtgcatccgcattattaccactattaaaattagtattagttgttgtctttgcaatggtgttctttgtattcgctatactaggactagttgcatggatgtgtggtattaatatcatgaatattattagaatcttgaaaagtgaattgcttttagcattttctacatcaagttcggaagctgtacttcctgtaatgatgaagaaaatggaaaacttcggttctccaaaagaaattacttcttttgttataccaattggttatacgtttaacttagatggatcagcactttatcaatctattgcagcattattcgttgcacagatgtatggaatgcacttaacattatcagagcaaattgtgttgatgttaacattaatgattacgtctaaaggtatggcggcagtaccaggaacttcaatcgttgttttattaacaacattaggtgccatgggcttaccggcacaaggtttagcattaattattggtgttgaccgtatcttagatatggtacgtacatgtgtaaacgttattggtaatgcattatcaacaatcgttatagctaaatgggaaaacgtatatgacaaagcaaaaggtcaagaatatttaaaatcaatttaa

SEQ ID NO: 405017 - DNA, 357 bp, Staphylococcus aureus
atgaaaaagaaaaaaggttttggtcttggtattagtttaatcgccatcatgttaattgtatgtattgtattagtaatcatgatgatgactggcggaaagaaagatacatactatggaattatgaaagataatactactattgaaaaaatgattagtgaaaaagatgaaagtattgaaaaaaatgttaaattaccttcagattcagatgttaaagttaaaaaaggtgattttgtaattgtttataaattagcagattcagataaaattgttaaagttaaaaaagttgaccatgacgatgtaccacatggtttaatgatgaaaattcatgacatgggcaaaatgcacatgaaacactaa

SEQ ID NO: 405018 - DNA, 423 bp, Staphylococcus aureus
atgagtaactcacaagcaattcaagcaattgaaaacgtgttagcaacgtcaaaagttggtgtattatcaactgcatataataataaacctaatagtagatatatggtcttttataatgatggtcttactttatatactaaaacgaatatccattctgctaaggtcaaagaaattaaagataatccagcagcatatgttttgttaggctataacgacacaactaatcgtagtttcgttgagatggaagcgacaatcgaaatcgttacagaacaagaagtgattgattggctatgggaaacacaagacaaaagctttttcagttcaaaagaagacccagagttatgtgttttaagagtagttccgcaatccattaagctaatgaatgataaatcattagatacacctatcaaaatcgatttataa

SEQ ID NO: 405019 - DNA, 2106 bp, Staphylococcus aureus
atgacatgccaacttaaaatacatcatacattatcgacaataccaagtcgtaatattaataatattatggtgctattttcacttacaagtaaactcaatattacgattaatggtgaaaccaaagacgtaagtaattatattatcttaattaaccatggtgatatttataatattaaccacggcgaaaatataatcgaattaatgatacccgttttttatttttatcaacaagatgatgatttctttaatggttatttagatcgtcatttattacaatcaagtaattatattaagtcattaattgccgatttaatcagtacaccaacaagttcttctttaatggggaaaaatataggtcaaagtattatagacactttacttaaagaagcttttataagaatagatcatgaatatttaccaaatattgctttaagcaatccggtgttcatagactgtgtaaactatattcatgacaatattgatgcgcacttgtctttaaaagatatagcgatgcattgcaacatctctgaatcatattgttctaatctttttgttcgatatttgagtatgaattttaaagattattttacaagtattaaacttgttaacgccatcaatttattactttctacaaaacattctattacaactgtttctgaattggccggttttaacagtcatacaaattttgcaaatcaatttaagaattacttgcattttagtcctaaacagttccgttcactcgtttccaagattactgaaccaccacaaatacacttccaacaagataacgtatcacaattcactgagttaatttcaacaattgatttaacagctcaactggctacaaatacaacagatattcatatagatgattttaatccgaaagatcgaagtcagcgtgccaaagtatttgttcgatttagtaatttcaatgaactatttcaatttattttcaatgaatattacgatattaactttgagcacttaccaaaacctgtcgttttcattgacgatattcacgatattgagattagccaaacgaattacaacctgttaaatagatgttttgaaaagcttttcgaaaaaaatataggtttagcaatcgctattaaatcaacacaacaattcgaaacgatgaagcaattaatactaacatttttacaaggcaatcaagactataagacaagcaagaaattagttaaatttatgctcgtattttgctctaattctatgacagcagaagaaattcatttatgtcatcttaaaattaaaaacaaaaataaagaaattaaatatagtgtgacagtcgatggctttttagaaacttattcaaccgtggaacaagtttatgatgtcatgcagcgtcttaaattccattattactttattgatattgaaaattcaaaaactgcaacacatcttatcactaaaaaccaacactatcatcaaactgacactcattttgaacagtataagaaatttattttagattcaggtatatcatcaacacaatttgtatataataacctgtctgtaagcggatttaaatatactaatgatggtaagaatccaattcaattatctgacatagtgtatcacttaatcgcattattacgatatggcggtggcattagctatcaattattagatgaccattcaaattatatttccttgtacaacaaatatggtagccccctaccattaatgcatttatataaaatgtttagaccttttgttaatgaagatattgaaattacaaataattatgtattgagtcgtaaagataataactaccatttcttattattcaataaaattaatgatcgatatatgtcagacgtaaaacaagatttcattttccataatgaattacctcaagactctttgatgattattaaaacattgaatcatgaacatggttcaattcaacatttgcttccaataagcgatcaacttgtttatatagaaaaagaaattttagatgaattagacaaaacgaattaccctaaaacggagcttgcagttcaagaagaaactggtcgtacatttgaactcaagttaaatcacgacgaggttaaatatatttgctttaaaccaagctaa

SEQ ID NO: 405020 - DNA, 384 bp, Staphylococcus aureus
atgaaagaacgtggctatatcgaacagctttggcgtgaggaaaaatatcatgtattgttacacagtcaacagtcttaccaaatgataaggaatgctttaaaaacggatttatcacttcatcaagttcaacaaatgattgatgttgctttgttaattgaaccgagtataggaagtgtatgtaatgcttttgatcatatgtggggatatttaaaaaaatgtgcgaatgaagaagaaagacaacaatcaaaactacttaaagctgattttattaatggtaaaatcgacacccaaactttattagattttttagcagaacttgctaataaatatgatgttcaatatttactacaaagtcgtgttttaaacacaaaaagaaagagatag

SEQ ID NO: 405021 - DNA, 1443 bp, Staphylococcus aureus
atgaattataagcaatccgcagaagaaattttgaacgcgataggcggagaagagaatttagatgcaatggcgcattgtgcaacgagactacgattagttttaaatgatgaaagtttagtaaatgaagaggcgctaaacaatatggatgtagttaaagggacgttttctactgggggacaataccaaattattattgggtctggtacagtcaataaagtatttagtgaactggaaaaattaactggaaaagaagcatcaaccacttcggaagtcaaagcacaatctgctaaaaatatgaatccgttacagcgatttgtaaaaatgctttcagatatctttgttccgattataccagccatcgttgctggtggtttattaatggggttaaataacattttgactgcgaaagatttattcttttcaggtaaatcattgatagatgtatatagtcaatttgctggattagctgaaatgataaatgtttttgcgaatgcaccatttacattattaccaattttaattggatttagtgcagcaaaacgctttggtggcaatccatttttaggtgctgcattaggtatgatactagttcatccatcgctaatgagcgcatacgatttcccaaaagcagttgaagcaggtaaggctattccatattgggatgtttttggtttgcatattaatcaagtaggttatcaaggacaagtgttacctatgcttgtagcagcttatatcttagcctcaattgaaaaagggttacgcaaagttattccaacggtgttagataatttgttaacaccattgttatctatttttataacagcatttctaacattttcatttgtaggtccaatcactcgacaattaggttactggttatcagatggtttaacatggctttatgaatttggtggtgcaattggtggattaatattcggattattgtatgctccgattgttattacaggtatgcatcatagctttatagctgtagaaacgacattaattgcagatgccactaaaacgggtggatcatttatattcccgattgcgacaatgtctaatgttgcacaaggtggtgcagcaattgcagcgttctttattattaaacaaaataagaagttaaaaggtgtggcatctgccgcaggtatttcagcattacttggtattacagaaccggctatgtttggtgttaacttaaaactaagatatccatttattggcgctatcgttggatcaggtattggttcagcatatattgctttcttcaaggttaaagcaatcgcattaggaactgctggattgccaggatttatttcaatcaatccagtacatgcaggatggttacactactttgttggtatgacaatatcattcatcattgctataacagttactttaattttatctaaaagaaaagcaaataaagaagttgtagaataa

SEQ ID NO: 405022 - DNA, 945 bp, Staphylococcus aureus
atgattacttcattcagacattctgaagatatagataaacatattataaaaacaccattagatcatacagcgtcatggattaatgtagtagaaccagaccgagaagaaattgaaaatcttatggaacaatataatatacctgaagactttatacgtgaccctttggactcagaagaaagttcccgtattgaatatgacgaagatactggttactcattaatcattattgatttacctatcgtcaattcaactaatcgtagcgttctatcttttgtaacgattccattaggcattattattggcaacggtattatcgtaacagtttgtgacgctgaaaatgaatttttagaaaatttacctaagcgtgatattaatttaaaatttcacagcagatttgcattagaaattttaactactattgccgaccattataatcgtaacttacgattacttaataaaagtagaattcgtattgagaaagaactaaaaaataacattactaacaaacaacttttcaaattaatggaagttgaaaaaagtttagtatactttttagctgccttaaaaggtaacgatacaattattaaaaagttattccgtttacctgcaattaaacgttttgaagaagatgaagaattactagaagatttaatcattgaaaataaccaagccatcgaaacaacagaattacatcaacgtatcttagaaagtatcacaacatcatacgcttccttattatctaatgatatgaatacgattatgaagacattaacacttttcacggtactattaacgttaccaacactcgtatttagtttcttcggtatgaatgtgccgttgccaattgatgaccatagttatatatcttggattattgtggtaggtatttcattaattcttgtcgtaattgttagtattttcttatggcgtaaacagaaattataa

SEQ ID NO: 405023 - DNA, 624 bp, Staphylococcus aureus
ttgaaagaagataggcgaattagaaagacaaagtcctccattaaacaagcgttcactaaattactacaagaaaaagatttagaaaagattaccattcgcgacataacaacacgcgctgatatcaatagagggacattttacttacattacgaggataaatatatgttactcgcagatatggaagatgagtatatttcagaactaacgacatatactcaatttgatttgttacgcggttcttcaattgaagacattgcgaatacttttgtaaataatatactcaaaaatattttccaacatattcatgataatttagagttttatcatactattttacaattggaacgcacgagtcaattagaattgaaaatcaacgaacatattaaaaataatatgcaacgttacattagtatcaatcattctatcggaggcgttccagagatgtatttttacagttacgtttccggagcaacaatttcaattattaaatactgggtaatggacaaacagcccatttcagttgatgaattagctaaacatgtgcataatattatttttaatggtccattaagaataatggcagaaaaccgtttgcataaatcaaaccttgattcactaacttaa

SEQ ID NO: 405024 - DNA, 1278 bp, Staphylococcus aureus
atgaatatatttaaaaataaattattatggattgcaccaatagcaactatgattatcttggtaatcttttctttagctttttatcctgcatataatcctaaaccaaaagatttaccaattggtatattaaacgaggataaaggtacaacgattcaagataaaaatgttaacattggtaaaaaattagaggataaattattagatagtgattctaataaaattaaatgggttaaggttgatagtgaaaaagaccttgaaaaagatttgaaagatcaaaaaatctttggagtagctattattgataaagacttttcaaaagatgctatgagtaaaacacaaaaagtagttatggatagtaaaaaagaagaaatgcaacaaaaagttgcttcaggtgaaattccgccacaagtggttcaacaaatgaaacaaaaaatggggaatcaacaagtagaggttaagcaggctaaatttaaaacgattgtaagtgaaggatcaagcttacaaggttcacaaattgcatcagctgtgttaactggtatgggtgataatattaatgctcaaattacgaagcaaagtttggaaacattaacgagtcaaaatgttaaagtcaatgccgcggacatcaatggtttgacgaatccagtaaaagtggataatgaaaaacttaataaagttaaagatcaccaagcaggtggtaatgcaccattcctaatgtttatgccaatttggataggttcaatcgtaacgtctatcttattgttctttgcatttagaactagtaacaatatcgtcgtgcaacatcgtatcattgcttcaattggacagatgatatttgcagttgttgcagcatttgcaggtagctttgtttatatttatttcatgcaaggcgttcaaagatttgattttgaccatccaaatcgtatcgcaatttttgtagcatttgcgattcttggtttcgtgggccttattttaggtgttatggtatggctaggtatgaagtcagttccaattttcttcattttaatgttctttagtatgcaacttgtaacgttacctaaacaaatgttgcctgaaagttatcaaaaatatgtatatgattggaatccattcacacactatgcaacaagtgtaagagaactattatacttgaatcatcatattgaattaaatagtacaatgtggatgtttatagggtttatgatttttggcgctgtatcaagtttagtttcagctattgttagaaaacatagcacaaaacgtactgaagtgccgtcataa

SEQ ID NO: 405025 - DNA, 432 bp, Staphylococcus aureus
atgcgtaggttattatattcatttcttttttatatgatcataggtttatttagtggctttttctatagagagctaacaaaagcatatgattttactggtacaacacaattatcacttgtacacacacatacacttattttaggtatgtttatgtttttaatattattaccattggagaagttatttaaattatcaagttactacttatttaactggttcttctatgtatataacataggtgttatcgttactataggtatgatggtgacaaaaggattcttccaagtcactggtaaatcatactctccagaagcatttgcaggctttgcaggtattgggcacacaggtatgcttgcaggtttattgttgctatttttccttttaagacaagcaattcttaaagaaccacgtgatgagtcttttaaaaaataa

SEQ ID NO: 405026 - DNA, 1035 bp, Staphylococcus aureus
atgaaagatgttacaatcattggtggcggtccgtctggtttgtatgcaagcttttatgctggattgcgagatatgtctgtaagattgatagatgttcaatctgaattagggggtaagatgagaatttaccctgaaaaaattatttgggatattggcggcattgcgccaaaaccttgtcatgaaattttaaaagatacaattaagcaaggattatattttaaaccggaagttcatttgaatgaacgtgtggtagatattaggaaaaaggcagaacgtcatttcgaagttgaaacagaagcgggagaaatatatacatcgaaagcagttatcattgcaattggtgcgggtattattaatccaaaacaattagatgttaaaggtgtagagagatatcaattaactaatttacattatgttgtacaaagttacagacgtttcaaagataaagatgtattaatatcaggtggaggaaatacagcattagattgggcgcatgatattgccaagattgctaaaagcgtgacagttgtttatcgaaaagaagatgtaagtggtcatgaagcgatgaaaacgttggtgacagatttaaatgtgaaactatgcccaaaaacacgtattaaatacttggtcggcaatgatgatgaaacgcatataagtgaagttgttttggaacatgttgaaagtggcgataggcatacagttaaatttgacgatgtcattattagtcatgggtttgatcgttgtaatacattattgagtgaaacatcttcaaagctagatatgcatgatgattgtcgtgttaaaggatttggtaatacgacaactagtatacctggtatctatgcgtgtggagatattgtttatcatgatgcaaaatcacatctaattgcaagtgcatttagtgatggtgcaaatgcagcgaaccttgctaaaacatatatccaaccagatgcgaatgcagagggttatgtttcaagtcatcatgaagtgtttaaagaagcgaataagactattgtaaataaacatttatactag

SEQ ID NO: 405027 - DNA, 336 bp, Staphylococcus aureus
atgagtccaaagacgcgcgaagcagctgaaaaaggattacctaatgccttatttacagtaaccttgtatgataaagatcggttaattggtatgggtagagtgattggcgatggcggaactgtttttcaaattgttgatattgcagttttgaaaagttaccaaggtcaaggttacggcagtctaattatggagcatattatgcaatatattaaaggtgtggctgttgagagtacatacgttagtctgattgcagactacccagcggataaattatatacaaaatttggatttatacctaccgaaccagattcaggcggtatgtatatcaaatactaa

SEQ ID NO: 405028 - DNA, 1005 bp, Staphylococcus aureus
gtgatagaaacatttaaagcgtttgtaattgataaagatgagagtggtaaagtgacaccaactttcaaacaattatcgcctactgatttacctaaaggagatgtgctgattaaagtacattactctggtataaattataaagatgctttagcgactcaagatcataatgcagtcgtaaaatcgtatcctatgattccaggaatagatttagctggaacaattgttgaatccgaagcaccaggctttgaaaaaggagaacaagtaattgtaacgagttatgacctaggtgtcagccattatggcggttttagtgaatatgcgcgtgtaaaatcagaatggattatcaagcttcctgatactttaacattagaagaatcaatgatatatggcacagctggttatactgccggtttagcaattgaaagacttgaaaaagttggaatgaatattgaagatggtcctgtactcgttcgcggtgcttcaggtggtgtcggtactttagcagtactcatgcttaatgaacttggttataaagttatcgcaagtacaggtaaacaagatgttagcgatcaattacttgaacttggtgccaaagaagttatcgatcgacttcctgttgaagatgatcataaaaagccactcgcatcatcaacttggcaagcttgtgtagaccctgttggtggcgaaggtattaattatgttacaaagcgtttaaatcatagtgggtcaattgcagttattggtatgactgccggtaatacttatactaattctgtattccctcacattttaagaggtgtaaacattttaggaattgactcggtatttactgctatgaaattaagacagcgcgtttggcgtcgtctcgcaaaagatttaatgcctgaaaatttacatgagatcaagcaagttattacatttgatgaacttccagaacaacttaacaaagtaattaaacatgaaaataaagggcgcattgttatcgatttcggtgtagataaatag

SEQ ID NO: 405029 - DNA, 516 bp, Staphylococcus aureus
atggctgggataatcaaagaaatttcagaacaaaatgctagtgaattagttgaattagcaactagaacattttatgacacgtttggttcttactatgatgacaaagattttgatcaattttttaaagacaattatactgtagagaaatttacacaagagattaaccatgtagattcatttcattatttttatcaagaagatggtgcgaatgttggttatataaagatgaatattaatagtgctcaaactgaagaaatgggggagacctatttagaagtgcagcgcatatattttttgaaagactttcaaggtggcggaagaggttcacaattgatagaattggccgaaaaaattgctcaagaacataataaacataaaatttggctaggagtttgggagcataatcctcgtgctcaagcattttataaacgtcatggatttaaagtggttggtgaacatcattttcaaacaggtgatgtaacggatacagatttaattatggaaaaagagttataa

SEQ ID NO: 405030 - DNA, 630 bp, Staphylococcus aureus
atgaaaagattagttacagggttactagcattatcattatttttagctgcatgtggtcaagatagtgaccaacaaaaagacggtaataaagaaaaagatgataaagcgaaaactgaacaacaagataaaaaaacaaatgattcatctaaagataagaaagataataaagatgatagtaaagacgtaaacaaagataataaagataatagtgcaaacgataaccagcaacaatctaattcaaatgcaacaaacaatgaccaaaaccaaacaaataataaccaatcaagtaataaccaagcgaataataatcaaaaatcaagttacgttgcaccatattatggacaaaatgccgcgccggttgcacgtcaaatttatccgtttaatggaaataaaaatcaagctttacagcaattgccaaatttccaaacagctttaaatgcggctaataatgaagcaaataaatttggtagtaataataaagtgtataatgattattctattgaagaacataatggcaactataagtatgtgtttagttttaaagacccaaatgcaaatggaaaatattcaattgtaacggttgattatactggacaagcaatggttactgatccaaactaccaacaataa

SEQ ID NO: 405031 - DNA, 1674 bp, Staphylococcus aureus
atgattaaacagataaatgtttctaatatgcaaaagtttgaatctcaattaatgaaagctcagtctgaaggttatacacatgtcgttccatatgccaatgagataatgatttatcaatcgatgttagatgcggttcaattatatcctaagtctatcgtggttgattatactgtggatggacaatacaaaaatgattgtcactatttcggtcaatcatcgatcaacattgccgattgggctcaaaacaataattatcatcctaacctgatatatgcgattcaacagactcttgatttaatacattattactctgtagaaacgattttcgatttagctttattgacacttctgaaaggtgatttatcaatcgatggtcatgtcgtttttgattttaaagcccctatagcaacaagtgcttcaatatgggaaactattaaaactattgaagattttgatatgatgtctcagttttatttgaataaaatggcttatattgatcatcatcctataccttttcgcaacctttttatcgaggattcagaacaacttaattcgccagataattggttgtattctaccaagtttatgctacctaaatggttatataaaatagcaaagcaacgtgctgataacaaacaattacaaaacttcggcctgtatacgaagcaaccaaacgttttaaaagatcacatcgtttttatcggtgatcatcatcaatatataggtaattcaaaatatttatttacttacttcgttaaacataatccaatgactgcctgttattttgttactgacgatcgtcgcggaccacatttcatatcacctaagtctgaaaaagctgacgaattgattaacagcgcacgcgtagttatagttgaaaatgatatacctgaaacgttacaaccaaacggtactttaattcaattacatcaaggcacaccaataatgcaattatttttagatagtaaagagcctattaaaaatatagaaacacctttttatcgtgctaaaaggtataatcgctggttgcaattcgattatgttatacattctgctgatgatattagccacttttatcaaacggcttttcctagtcaccaagcaaatgtattggcttatggtaatcctaaacaccaatatttactacaaaagagtaacgaaagtactactcaacaacagtataagaaatcgtttaaaataaatgatcaaaaaccagttttattatacgcacctattggattagtgagtgcgcaacaattaccactatcagatgctttattcaaagcctatcatgttgtggttcagggtgttgatgaagcgatcttaccagaagaggcgcttgttgcaccaaagtatcttagtgctcaagacttaattctaatgtctgatgtcgttatcactgattactcaaatataatatttgatgcgatggctatagacaaaacagtagcattatacactccaaatcacagtcaatacattgagtctcaaggtgttaacgaagatatttggcgtcatctatcaaaaatttggtatacagaccgacaattattaattaataatttaatttcccaggcaataccagtgattaaatatccacaaatacaacataaagaacaaccattagaatctatttcacaacttatattgtctaagatgacatctaatcaatag

SEQ ID NO: 405032 - DNA, 1599 bp, Staphylococcus aureus
atgttagtaaatacgtttaacccatttgataatttattattatcgtctttaattgcagcaataccgattgtactgtttttactatgtttaactgtttttaaaatgaaaggtatttatgcagctattacaacacttgttgtaacattactaattgcaataccatttttcaaattgccagttggtatcgcttctggtgcagtagtcgaaggtttcttccaaggtatcattccgattggctatatcgttatgatggcagtattgttatacaaaattactgttgaatctggacaatttttaacaattcaagatagtattacaaatatttcacaagaccaacgtattcaagttttacttattggatttgcattcaacgcatttttagaaggtgcagcaggatttggtgtaccaattgcaatttgtgcacttttattaacacaattaggatttaatccattaaaagctgcgatgttatgtttagtcgcaaatgcagcgtctggtgcttttggtgcgattggtatccctgtaggtgttgtagaaacgttgaaattacctggagatgtttcagtattaggtgtttctcaatcagcaactttaacattggcaatcataaatttcattattccattcttacttatctttattattgatggttttagaggtgttaaagaaacattaccagcaattttagtagtttcaatcacttatacacttactcaaggattattaactgtattcagtggacctgaattagcagatattattccaccgttattaacaatgttagcattagcagtattttctaaaaaattccaaccaaaacacatttatcgtgttaataaagatgaagaaattgaacctgcaaaagcacattctgcaaaagcagtattacatgcatggagcccattcattgtattaacagtcattgtaatgatttggagtgcgccattctttaaaaacttattcttaccaaatggtgctttatcatcattagtatttaaattcaacttacctggaacaatcagcgaagttacgcataaaccattagtattgactttaaatattattggacaaacaggtacagctattttattaactattattattacaattttaatgtctaaaaaggttaactttaaagatgcaggtagattattcggcgttacatttaaagagttgtggttaccagttcttacaatttgtttcatcttagcaatttctaaaatcacaacttatggtggtttaagtgcagcaatgggtcaaggtattgctaaagcaggtaatgtcttcccagttctatcaccaattttaggttggataggtgtgtttatgacaggatcagttgtaaataacaactcattatttgcaccaattcaagcttctgttgcacaacaaattggaacaagtggttcacttcttgtatctgctaatacagttggtggtgtagcggcaaaattgatttcaccacaatcaattgcaattgcaactgcagcagtaaaacaagttggtaaggaatcagaattattaaaaatgacattgaaatacagtgtatgtttactaatattcatctgtatttggactttcatcttgtcattattataa

SEQ ID NO: 405033 - DNA, 1479 bp, Staphylococcus aureus
atgacaacacaacatagcaaaacagatgtcatcttaattggtggcggtattatgagtgcaacattaggaacattacttaaagaattatcacctgagaaaaatattaaagtgtttgaaaaattagcacaacctggcgaagagagttcaaatgtatggaataatgccggtacagggcattcagcactttgcgagttgaactatacaaaagaaggtaaggatggcacagttgattgtagtaaagcaattaagataaatgagcagtaccaaatttcaaaacagttttgggcatatttagttaaaacaggacaattagataacccagatcgctttattcaagcggtgccacacatgagttttgtcattggcgaagataatgtagcttttataaaaagtcgtgttgcaacgttaaagaaaagtattttattcgaaaaaatgaaattatcgcaagatgaagaagaaatgaaatcttgggtaccgttaatgattgaaggtcgtaagtctgatgaaccaattgctttaacttatgatgaaactggtacagatgttaactttggtgcgttaactgcaaagttatttgataatttagagcaacgtggtgtgggaattcaatataagcagaatgtattagacatcaagaaacagaaatctggggtatggctagttaaagttaaagatttagaaactaatgaaacgacaacatatgaatctgattttgtatttattggtgctggcggtgcgagtttaccattactccaaaagactgggattaaacaatcaaaacatattggtggtttcccggtaagtggattattcctgcgctgtacaaatcaagaagtgattgatcgtcatcatgctaaagtgtacggaaaagcagcagtgggtgcgccaccaatgtcagtgccgcacttagatacacgttttgtagacggcaagcgttcattgttatttggtccatttgcaggtttctcacctaaatttttaaaaacaggttcacatatggatttaattaaatcggttaaaccaaataatatcgtgacgatgttatctgcaggtatcaaagaaatgagtcttacgaagtatttagtgtcacaattgatgttatctaatgatgagcgtatggatgatttaagagtctttttcccaaatgctaaaaatgaagattgggaagtgattacagcagggcaacgtgtccaagtaatcaaggatactgaggattctaaaggtaacttacaatttggtactgaagttattacgtcagatgatggcacattagctgcattacttggtgcatcacctggtgcgtcaacagctgtagatattatgtttgatgttttacagagatgctatcgtgatgaattcaaaggatgggaaccaaagattaaagaaatggtgccgtcatttggttatcgcttaacagatcatgaggatttatatcataaaattaatgaagaagtaactaagtatttacaagttaaataa

SEQ ID NO: 405034 - DNA, 456 bp, Staphylococcus aureus
atgaaaaatttgaaaaactcattatttattagcttaatcattggtttgtccctttcactgttctttagtatgttatttgcagacggcaaatattatccactgaacccacaatcaactattggcatattgtattatacgcatttcacagaaactaccgtaatgttgatttctatcattttatggttactcataggcgtcgtctttttccttggagattttatctttaaatacacagattggagcattactaaagcaactataatgcatttcataacaacgtatgtcggattcttgcctttagcaatgcttgccggttggtttccactaacagtgcattatctaatcatattcacaattatcttcattgtggtttatgtattaatttggataattcaattctttaaaaacaagaactacgtagacactattaacaagcaactgaaacaattaaaatga

SEQ ID NO: 405035 - DNA, 444 bp, Staphylococcus aureus
atgatgaaactcaatttatttatcaatgcaaatgagacggaatcttatattgatatacatgcacctaaaatgaatgataacgttcaaagtattattaatgcagtcaatgatttagacaaatcacatacattagtcggatacatagacaaagaaatccatatcattaatgtatcagatgttataacattccaagttattaataaaaatgtaacagccattacaagcaatcaaaaattcaaactaaaattacgactttatgaactagaaaaacagttaccacaacatttcattcgcatttccaaatcagaaatcgtcaacaagtattacattgaaaaattattattagagccaaatggacttatacgtatgtatcttaaagatgcacactacacctattcttctagacgttatttaaaatctataaaggagcgcttatcaatatga

SEQ ID NO: 405036 - DNA, 1374 bp, Staphylococcus aureus
atgtttaaaacactctatgctagaattgcgatttattccattacggttattttatttagtgcattaataagttttgtattaacaaatgtttactatcattataatttaaaagcatctaatgacgcgaaaatcatgaagacgcttaaagaagcaagacaatatgaacaatcagctaaaccaacgcacattcaacaatatttcaaacatttagggcaaatgaattaccaaataatgaccattgatcaaaaaggtcataagacattttatggggagccatttagagaagatactttatcacaaaatgctattaacaacgtattaaataatcaagattaccatggtattaaagataaaccattcgcattattcgtaactggatttttcgacaatgtaacagataatactgttggtattaactttaagacaaaagacggttcaatagcagtatttatgcgtccagatattggagaaacatttagcgagtttagaacattcttagccgtcttgttaatgttgttattatttatctcgatttcattagttatcgcatcaacctattcaatcattcgtccagtaaaaaagttaaagctagcgaccgaacgcttaattgatggtgattttgaaacacctatcaaacaaacacgcaaagatgaaattggaacattacagtatcactttaataagatgagagagtcattgggacaagttgatcaaatgaggcagcattttgtacaaaatgtatctcatgaaatcaaaacaccattaacacatattcatcatttattaagcgagttacaacaaacttctgataaaacattaagacaacaatatataaatgatatctataccattacaacgcagctgagcggattaacaactgaattgttgctcttatccgaattagataatcaccaacatttattattcgatgataagattcaagtcaatcaactcattaaagatatcattcgacatgaacaatttgctgctgatgaaaagtcgttaatcattttagctgacctagaatcaatcaatttcctaggaaatcaacgtttgttacatcaagcattgagtaatttattaataaatgctattaagtatacagatgttggtggtgccattgacatcgctttgcaacatagtcacaacaatatcattttcacaataagtaatgatggttcaccaattagtccacaagctgaagcacgtttatttgaacgtttttataaagtgagcaaacatgataatagcaatggtttaggtcttgcaattacaaaatccatcattgaattgcatcatggtacaatccaattcacacaaagtaacgagtatgtaaccacctttactattacactgccaaataattcactttaa

SEQ ID NO: 405037 - DNA, 675 bp, Staphylococcus aureus
atggtgcaatgtcttgttgtcgatgacgatcctcgaatcctaaattatatagctagccatttacaaacagagcacattgatgcatacacacaaccaagtggtgaagctgcattaaaacttttagaaaaacagcgtgtcgatattgcagtggtagatattatgatggatggtatggacggctttcaattatgtaatacattaaaaaatgattatgatataccagttattatgttaacagcgcgggatgcacttagtgacaaagagcgtgcgtttataagcggtactgacgattatgtaaccaaaccctttgaggttaaggaacttatttttagaattcgtgctgtattacgtcgatataatatcaattcaaattcagaaatgactattggcaacttaacgctaaaccaatcctatttggaactccaagtatctaataaaacgatgacgttaccgaacaaggaatttcaattattatttatgcttgcagcacgtcctaagcaaatctttactcgtgaacaaataatagaaaaaatttggggctatgattatgaaggagatgagcgaacagttgacgttcatattaagcgactacgccaaagattaaaaaaattaaatgccacacttacaattgaaacagtaagaggacaaggctataaggtggagaatcatgtttaa

SEQ ID NO: 405038 - DNA, 1056 bp, Staphylococcus aureus
atgaaattagcgataaaagagattatgttttacaaatttcgttatattttaatcacattaatcattcttttattaagtattatggtgttatttattagtggtttagctcaagggcttggtagggagaatatttcgttatttgaacactttgataatgatgaatatgttgttcaaaaaatgaaagagccgcaaattgagaaatcgcaacttagtgatacgcaacagaatcaaattaaaaaggtaattcatcaagaaccatataaaatgaatattcaaacattgaaattatctaataaagaacaagatgtgattacaatgaatgacgttaaacaacaacgcatacaacttaaaaaaggtgattatcctaaaaatgctcatgaggtcgctattaatgataagttagctgcagacaacattagagtcggggatagattacattttaaaaataattcaactagttatagagtttctggtattttaaacgacacaatgtatgcgcatagttccattgtgctattgaacgataacggatttaatgcattgaataaggttaatacggcattttatccagtgaaaaatttaacacaacaacaacgtgatgagcttaataaaataaatgacgttcaagttgtgagtgaaaaagatttaacaggtaatattgcgagttatcaagcagagcaagcaccgttaaatatgatgattgttagtttgtttgctattacagcaatcgttctaagtgcatttttctatgttatgacgattcaaaaaatatcacaaattggcattttgaaagcaattggtattaagacaagacatttattgagtgcgttagttttacaaattttaacactaacaataattggggtaggtattgctgtgatcatcatagtaggactatcatttatgatgccggtaacgatgcctttttacttaacaacgcaaaatattttattaatggtggggatatttatattagtagcgattttaggtgcctcactatcatttatcaaattatttaaagtggatcctatcgaagcaattggaggtgcagaataa

SEQ ID NO: 405039 - DNA, 666 bp, Staphylococcus aureus
atggcattagtcgttgaagatatcgtcaaaaatttcggagaaggtttgtctgaaacaaaagttttaaaaggtattaattttgaagtggaacaaggggaatttgtcattttaaatggtgcctctggttctgggaaaacaacattgctaacgatattaggcggattgttaagtcaaacgagtggtacagtgctttacaatgatgcgccattgtttgataaacagcatcgtcctagtgatttacgattggaagatattggttttatttttcaatcttcacatttagttccttatttaaaagtgatagagcaattgacactcgtaggtcaagaagcgggaatgaccaaacaacaaagttcaacaagagcaatacaacttttgaaaaatattggtttagaagatcgcttgaatgtatatccgcatcagttatctggcggtgaaaagcaacgtgttgcgattatgagagcatttatgaataatccgaaaatcattttagcagatgagcccacagcaagtttagatgccgatagagcaacaaaagttgttgagatgatacgtcaacaaattaaagaacaacaaatgattggtattatgattacacacgatcgaagattatttgaatatgcagatcgagtgattgaattagaagatggcaaaataactgattag

SEQ ID NO: 405040 - DNA, 357 bp, Staphylococcus aureus
atgattcaaaataccttcggttatttaccggagtatattgtagctgatgcatgttatgatagtgagcaaaactatatggctattatagatgattttaataaaacgccacttattacgtatgtcatgtttattaaagataaaactagaaagtttaaaagtgacatttttaacactcaaaattggaaatatgacgaacttaatgatgaatttatatgtcctaataacaaaagaataggttttaaaagatatgcataccataatgatagatatggttttaaacgtgacttcaagctatatgaatgcaacgagctgtacattataaaatacatatcaaaaaagctgatttctatcaaataa

SEQ ID NO: 405041 - DNA, 2610 bp, Staphylococcus aureus
atgttaactatacctgaaaaagaaaatcgtggatcgaaagaacaagaagtggcaattatgattgatgctctagctgacaaagggaaaaaagcattagaagcattatctaaaaagtcacaagaagaaattgatcatattgttcatcaaatgagcttagcagctgttgatcaacatatggtgctagcaaaattagcacatgaagaaactggaagaggtatatacgaagataaagcgattaaaaatttatacgcttctgaatatatatggaattcaataaaagacaataagacagtagggattattggtgaagataaagaaaaaggattaacgtatgtagcggaaccaattggtgttatttgtggtgttacgccaacaacaaatcctacgtcgacaactatttttaaagcgatgattgcaattaagacaggaaatccaatcatttttgcattccatccaagtgcacaagaatcgtcgaagcgtgcagcagaagttgtattagaagcggcaatgaaggcaggtgcacctaaagatattattcagtggattgaagtgccttctatcgaagcaacaaaacaattaatgaatcacaaaggtattgcattagttctagcaacaggtggttcgggcatggttaagtctgcatattcaactggcaaaccggcattaggtgtgggaccaggtaacgtgccgtcttacattgaaaaaacagcacacattaaacgtgcagtaaatgatatcattggttcaaaaacatttgataatggtatgatttgtgcttctgaacaagttgtagtcattgataaagaaatttataaagatgttactaatgaatttaaagcacatcaagcatactttgttaaaaaagatgaattacaacgcttagaaaatgcaattatgaatgaacaaaaaacaggtattaagcctgatattgtcggtaaatctgcagttgaaatagctgaattagcaggtatacctgtccccgaaaatacaaaacttatcatagccgaaattagcggtgtaggttcagactatccgttatctcgtgaaaaattatctccagtattagccttagtaaaagcccaatctacaaaacaagcatttcaaatttgtgaagacacactacattttggtggattaggacacacagccgttatccatacagaagatgaaacattacaaaaagattttggactaagaatgaaagcttgtcgtgtacttgtaaatacaccatcagcggttggaggtattggtgatatgtataacgaattgattccgtctttaacattaggttgtggttcctacggtagaaactcaatttcacataatgttagtgcgacagatttattaaacattaaaacgattgctaaacgacgtaataatactcaaattttcaaggtgcctgctcaaatttattttgaagaaaatgcaatcatgagtctaacaacaatggacaagattgaaaaagtgatgattgtctgtgaccctggtatggtagaattcggttatacaaaaacagttgagaatgtattaagacaaaaaacggaacagcctcaaattaaaatatttagcgaagtcgaaccgaacccatcaactaatacagtatataaaggtctggaaatgatggttgatttccaaccggatacaatcattgcacttggtggtggttcagcgatggatgctgcaaaagcaatgtggatgttctttgaacaccctgagacatcattcttcggtgctaaacaaaagttcctagacatcggtaaacgtacttataaaataggcatgcctgaaaatgcgacgttcatttgtatccctacgacatcaggtacaggttcagaagtaacaccatttgcagttatcacagatagtgaaacaaatgtaaaatatccgttggctgattttgctttaacacctgacgttgcaattattgaccctcaatttgtgatgagtgtgccaaaaagcgttacagcagatacaggaatggatgtactaacgcatgcaatggaatcatatgtatctgtaatggcttcagactacacaagaggtttgagtctacaagcgattaaattgacgttcgaatatttaaaatcatctgttgaaaagggtgataaagtttcaagagagaaaatgcataacgcatcaactttggctggtatggcatttgcaaatgcattcttaggcattgcacactcaattgcgcataaaattggtggcgaatatggtattccgcatggtagagcgaatgcgatattactaccgcatattatccgttataatgccaaagacccgcaaaaacatgcattattccctaaatatgagttcttcagagcagatacagattatgcagatattgccaaattcttaggattaaaaggtaatacgacagaagcactcgtagaatcattagctaaagctgtctacgaattaggtcaatcagtcggaattgaaatgaatttgaaatcacaaggtgtgtctgaagaagaattaaatgagtcaattgatagaatggcagagctcgcatttgaagatcaatgtacaactgctaatcctaaagaagcactaatcagtgaaatcaaagatatcattcaaacatcatatgattataagcaataa

SEQ ID NO: 405042 - DNA, 669 bp, Staphylococcus aureus
atggaaagtacattagaattaacaaaaattaaagaagtattacaaaaaaacttgaagattttaattattttaccgctattatttttaattattagcgctattgttacatttttcgtcttatcacctaaatatcaagctaatactcaaattttagtgaatcaaactaagggtgacaatcctcagtttatggcgcaagaggttcaaagtaatattcaacttgtaaatacgtataaagaaattgttaaaagtcctagaattttagatgaggtgtcaaaggacttaaatgataagtattcaccatctaaattgtcgagtatgttgacaattacaaaccaagaaaatacgcaacttatcaacatccaagttaaaagtggtcataaacaagattcggaaaaaattgcgaatagcttcgctaaagttacaagtaaacaaattccgaagattatgagtgtggataacgtatcaattttatctaaagcagacggtacagcagttaaagtcgcaccaaaaactgtagtgaatctaatcggtgcattctttttaggattagttgtcgcgcttatatatatcttcttcaaagtaattttcgataagcgaattaaagatgaagaagatgtagagaaagaattaggattgcctgtattgggttcaattcaaaaatttaattaa

SEQ ID NO: 405043 - DNA, 687 bp, Staphylococcus aureus
atgtcaaaaaaggaaaatacgacaacaacactatttgtatatgaaaaaccaaaatcaacaattagtgaaaagtttcgaggtatacgttcaaacatcatgttttcaaaagcaaatggtgaagtaaagcgcttattggttacttctgaaaagcctggtgcaggtaaaagtacagttgtatcgaatgtagcgattacttatgcacaagcaggctataagacattagttattgatggcgatatgcgtaagccaacacaaaactatatttttaatgagcaaaataataatggactatcaagcttaatcattggtcgaacgactatgtcagaagcaattacgtcgacagaaattgaaaatttagatttgctaacagctggccctgtacctccaaatccatctgagttaattgggtctgaaaggttcaaagaattagttgatctgtttaataaacgttacgacattattattgtcgatacaccgccagttaatactgtgactgatgcacaactatatgcgcgtgctattaaagatagtctgttagtaattgatagtgaaaaaaatgataaaaatgaagttaaaaaagcaaaagcacttatggaaaaagcaggcagtaacattctaggtgtcattttgaacaagacaaaggtcgataaatcttctagttattatcactattatggagatgaataa

SEQ ID NO: 405044 - DNA, 765 bp, Staphylococcus aureus
atgattgatattcataaccatatattgcctaatatcgatgacggtccgacaaatgaaacagagatgatggatcttttaaaacaagcgacaacacaaggtgttacagaaatcattgtaacatcacatcacttacatcctcgatataccacacctatagaaaaagtgaaatcatgtttaaaccatattgaaagcttagaggaagtacaagcactaaatctaaagttttattatggtcaggaaataagaattaccgatcaaatccttaatgatattgatcgaaaagttattaacggtattaatgattcacgctatttactaatagaatttccatcaaatgaagttccacactatactgatcaattatttttcgaattacagagtaaaggctttgtaccgattattgcacatccagagcggaataaagcaataagtcaaaaccttgacatactatacgatttaattaacaaaggtgctttaagtcaagtgacaacggcgtcattagcgggtatttccggtaaaaaaattagaaaattagcaattcaaatgattgaaaacaatctgacacatttcatcggttcagatgcgcataacacagaaatcagaccgttcttaatgaaagacttatttaatgataagaaattacgtgattattatgaagatatgaacggatttattagtaatgcgaagttagttgttgatgataaaaaaattcctaaacgaatgccacaacaagattataaacagaaaagatggtttgggttataa

SEQ ID NO: 405045 - DNA, 1005 bp, Staphylococcus aureus
atggcacatttatctgtgaaattgcggcttttaatactagcattaatcgattcactgatagtgacattttcagtattcgtaagttattacattttagaaccgtatttcaaaacatattctgtcaaattattaatattggcagctatatcactattcatatcgcatcatatttcagcatttatttttaatatgtatcatcgagcgtgggaatatgccagtgtgagtgaattgattttaattgttaaagctgtgacgacatctatcgttattacgatggtggtcgtgacaattgttacaggcaatagaccgttttttagattgtatttaattacttggatgatgcacttgattttaataggtggctcaaggttattttggcgtatttatcggaaataccttggaggtaagtcatttaataagaagccaactttagttgttggtgctggtcaagcaggttcaatgctgattagacaaatgttgaaaagtgacgaaatgaaacttgaaccggtattagcagtcgatgatgacgaacataaacgcaatatcacaattactgagggtgtaaaagtccaaggtaaaattgcggatattccagaactagtgaggaaatataagattaaaaaaatcatcattgcaattccaactattggtcaagagcgtttgaaagaaattaataatatttgccatatggatggcgttgagttattgaaaatgccaaatatagaagacgtcatgtctggtgagttagaagtgaaccaacttaaaaaagttgaagtagaagatttactaggcagagatcctgttgaattagatatggatatgatatcaaatgaattgacgaataaaactattttagttacgggtgcaggtggttcaataggatcagaaatttgtagacaagtttgtaatttctatccagaacgtattattctacttggccatggtgaaaacagtatttatttaatcaatcgtgaattgcgaaatcgcttcggaaaaaaatgttga

SEQ ID NO: 405046 - DNA, 855 bp, Staphylococcus aureus
gtgaattgcgaaatcgcttcggaaaaaaatgttgatatcgttcctattatagcggatgtgcaaaatagagcgcgtatgtttgaaattatggaaacgtataaaccatacgcagtttatcatgcagcagcacacaagcacgtgccgttaatggaagacaaccctgaagaagcagtacgtaataatattttaggtacgaaaaatactgctgaagctgctaaaaatgcagaggtaaagaaattcgttatgatttctacggataaagccgttaatccgcctaatgtcatgggagcttcaaagcgaattgcagaaatgattattcaaagtttaaatgatgaaacgcatcgaacaaattttgttgcagtgagatttggtaatgtacttggatcgagaggatctgtgattccacttttcaaaagtcaaattgaagaaggtgggccagttactgtgacacatcctgaaatgacacgttactttatgacaattcctgaagcttctagactagttttgcaggcaggggcattagcagaaggtggcgaagtatttgtgctagatatgggagaaccagtgaaaattgtagatttggcacgtaatttaattaagctaagtggtaaaaaagaagacgacatacgcattacttatacagggattagacccggcgaaaaaatgtttgaagagcttatgaataaagatgaggttcatcctgaacaagtatttgaaaaaatttatcgtggcaaagtacaacatatgaaatgtaatgaagttgaagcgattattcaagacatcgtcaatgactttagtaaagaaaaaattattaactatgccaatggcaaaaagggagataattatgttcgatga

SEQ ID NO: 405047 - DNA, 1029 bp, Staphylococcus aureus
atgttcgatgacaaaattttattaattactgggggcacaggatcattcggtaatgctgttatgaaacagtttttagattctaatattaaagaaattcgtattttttcacgcgatgagaaaaaacaagatgacattcgaaaaaaatataataattcaaaattaaagttctacattggtgatgtgcgtgatagtcaaagtgtagaaacagcaatgcgagatgttgattacgtattccatgcagcagctttaaaacaagtgccgtcatgtgaattctttccagttgaggcagtgaagacaaatattattggtacagaaaatgtcttacaaagtgctattcatcaaaatgttaaaaaagtcatatgtttatctacagataaggcagcgtatcctattaatgctatgggtatttcaaaagcaatgatggaaaaagtattcgtagccaaatcaagaaatattcgtagtgaacaaacgcttatttgtggtacaagatacggtaatgtgatggcttcaagaggatcagtaatacctttgtttatcgacaaaatcaaagctggagaacctttaacgattacagatcctgatatgacaagatttttaatgagcttagaagatgcggtagaactagttgttcatgcatttaagcatgcagagacaggagatattatggttcaaaaagcaccaagctcaacggtaggggatcttgcgaccgcattattagaattgtttgaagctgataatgcaattgaaatcattggtacgcgacatggagagaaaaaagcagaaacattgttgacgagagaagaatacgcacaatgtgaagatatgggtgattattttagagtgccggcagactccagagatttaaattatagtaattatgttgaaaccggtaacgaaaagattacgcaatcttatgaatataactccgataatacacatattttaacggtggaagagataaaagaaaaacttttaacactagaatatgttagaaacgaattgaatgattataaagcttcaatgagatag

SEQ ID NO: 405048 - DNA, 1110 bp, Staphylococcus aureus
ttgaatattgtaattacaggagcaaaaggttttgtaggaaaaaacttgaaagcagatttaacttcaacgacagatcatcatattttcgaagtacatcgacaaactaaagaggaagaattagagtcagcattgttgaaagcagactttgtcgtgcatttagcgggtgttaatcgacctgaacatgacaaagaattcagcttaggaaacgtgagttatttagatcatgtacttgatatattaactagaaatacgaaaaagccagcgatattattatcgtcttcaatacaagcaacacaagataatccttatggtgagagtaagttgcaaggggaacagctattaagagagtatgccgaagagtatggcaatacggtttatatttatcgctggccaaatttattcggcaagtggtgtaagccgaattataactcagtgatagcaacattttgttacaaaattgcacgtaacgaagagattcaagttaatgatcggaatgttgaactaacgctaaactacgtggatgatatcgtcgctgaaataaagcgtgctattgaaggaactccaacgattgaaaatggtgtacctacagtaccaaacgtatttaaagtgacattgggagaaattgtagatttattatacaagttcaaacagtcacgtctcgatcgaacattgccgaaattagataacttgtttgaaaaagatttgtatagtacgtatttaagctatctacctagtacagactttagttatcccttacttatgaatgtggatgataggggttcttttacagaatttataaaaacaccggatcgtggtcaagtttctgtaaatatttctaaaccaggtattactaaaggtaatcactggcatcatactaaaaacgaaaaatttctagtcgtatcaggtaaaggggtaattcgttttagacatgttaatgatgatgaaatcattgaatattatgtttctggcgacaaattagaagttgtagacataccagtaggatacacacataatattgaaaatttaggcgacacagatatggtaactattatgtgggtgaatgaaatgtttgatccaaatcagccagatacgtatttcttggaggtatag

SEQ ID NO: 405049 - DNA, 1125 bp, Staphylococcus aureus
atggaaaaactgaaattaatgacaatagttggtacaaggcctgaaatcattcgtttatcatcaacgattaaagcatgtgatcaatattttaatcagatattagtacacactggtcaaaattatgattatacattgaatcaaattttctttgatgatttggaattaagacaaccggaccactacttagaggcagttggaagtaaccttggagaaacgatggggaatattattgcgaagacatatgatgttttattacgcgaacaaccagatgcacttttaattcttggtgatacaaatagttgtttagcagcagtatctgctaaacgattaaagattcctgtgttccacatggaagcgggtaatagatgctttgatcagaatgtacctgaagaaatcaatcgtaaaattgttgaccatgtcagtgatgtgaatctaccttatacggaacatagcagacgttatttattagatgaaggcttcaataaagcgaatatctttgtgacaggatcaccgatgacagaagtgatagaagcgcatcgagataaaattaatcacagtgacgttttaaataaactaggattagaaccgcaacaatacattttagtatctgcgcatagagaagagaatatcgataatgaaaagaattttaaatcattaatgaatgcgataaatgatattgccaaaaagtataaaatgcctgtgatttattcaacgcatccaagaagttggaagaaaattgaagaaagtaaatttgaatttgatccattagttaaacagttaaagccatttggtttctttgattataatgcattgcaaaaagatgcatttgttgtgctatcagatagtggaacattgtcagaagagtcgtctattttgaagttccctggtgtccttattcgaacttccacagaaagaccggaagtactagataaaggtacggttattgtaggtggtattacctataacaatctaatccaatccgttgaactagcaagagagatgcaaaacaataacgaaccgatgattgatgctattgattataaagacactaacgtttcgacaaaggtagttaaaattattcaaagctataaagatattatcaatcgaaatacttggaggaaatga

SEQ ID NO: 405050 - DNA, 627 bp, Staphylococcus aureus
atgaggatagcgattgaaaagataattggtttgctgaaaaaccagtcctctaaagaatcgaatgttaagattcatcgcttggcgtatattacaaactcaaaatttgatggcaataactatatagatagatggtgtaaaatcaggaattctcacattggtgaatacagttatattggatttggtagtgattttaataatgtagaagtaggaagatattgttcgatatcttcggatgtaaaaattgggttaggaaaacatcctacacacttttttagctcatcaccgattttttattctaataataatccatttaacataaagcaaaagtttatagactttaatgaccaaccaagccgtacaacaattaaaaatgatgtgtggattggtgcaaatgtaattattatggatggtttaacaataaatactggtgcagtcatagcagccggctcagttgttactaaaaatgtaggagcatatgaggttgttggtggtgttcctgcaaaagtgattaagaagcgatttgacaataaaacaattgaaaaacttttggaaagcaagtggtgggagaaaacgcctgacaaactaaaaggattttcggttgaatatttaaataaaaaggatacttaa

SEQ ID NO: 405051 - DNA, 1110 bp, Staphylococcus aureus
atgagaattttaaatattgtatcgagtaatattgttcaagacccaagggtacttaaacaaatagaaacaattaaaggcgttacggatgattataaaattgttggaatgaataattcacaagctactaataagcgattggaaaatttagattgtaattatcgtttgttaggtagcaaggtagatccaaaaaatattctttctaaattaattaagcgtataagatttgcaacaggtgttatccgagaaattaaagcttataaacctgacgtgattcatgcaaatgatttcgacgtattattaatggtctatttaagcaattataaaaaagctaatattgtttatgatgcgcatgaaatatatgcgaaaaatgcctttattaataaagttccacttatttcaaagtttgtagaaagtatagaaaaacacatagtaaaacatcgtgttaatgccttcgtaacagtaagtcatgcagcaaaagaatattatcaatctaaaggatataagaaggaagcgaatgttattacgaatgcacctattttaaatgatagcagagaatttaaagaaatcgaaaactttaaagaaattgtatatcaaggtcaaattgtaatggacagaggatatgaagagtttattattgcttcatcagcttttaaacaaaatgctccttcattcataattcgagggtttggtccgcatgaagaagtgataaaagaactgattagttataacccggaaaatattaggttggataaaccagttgaagtaaaagaattggttgataagttagcagaaagtaatgttggtgttgtcttgacgaaaccagtatctattaattttgaatatacagtatctaataaaatttttgaatgtatacatgctggtttaccagtaattttatctcctgtcaaagagcatatttatctcaatgaaaaatataaatttggcattgttctaaaggaagttacgccgttagaaattgaaaaggcggttagaaaattaagagataatcacgatttgtttaatcatttacgtcaaaatgcaattaaggcgtctaaaattttgaattggcaaatagagagtgaacggttagtagaattatataaattttaa

SEQ ID NO: 405052 - DNA, 1167 bp, Staphylococcus aureus
atgaaattttttgtactttgtgcaattatcagcatgaacatatttatagtaatctctacatttactaaagaagtattagggttccctatagagccggtgtattactcaaccatggttggtatagcattaattactacggtgtttgctatttataagataattgtcacccaagaaattccgcgagggttaatattattaattgctatatgtttgctttatctagctttttattatttttcaccagataaggaagagaaactagctaaaaataatattctattctttttaacatgggcagttccagcggcaattagtggtatttatattaaatatataaacaaggctacggtagaaagattttttaaattagtatttttcatattttctgtttcatttatttttgtaattttaataccaaaacttacaggtgagatacctagctatatcaattttggacttatgaactatcaaaacgcttcgtacctttcagcatttactgccggattaggcatttatttcattatgaaaggttcagttaaacataagtggatatatgttctatttacaataattgatatccctattgtgtttataccaggagggcgtggaggtgctattttattaattctttacggcttatttgcatttatacttattacgtttaaaagaggaatacctatcgcagtaaaaagcattatgtatatttttgcattaagcatatctagtgtattgatttactttctttttacaaaaggttcgaatactagaacattttcatatctacaaggtggaacacttaatttagaaggtacttctggaagaggaccgatttatgaaaaaggtatttactttattcaacaaagttcgttattaggctatgggccatttaactattataaactaatcggaaatataccacataacatcattattgagttgattctatcatttggcttattagggttttttatcataatgatttgcattttgctactagtttataaaatgattaggaactatgatccaaacactatagatttactcgttatgtttatagcaatctatccaatcacattattaatgtttagttcaaattatttagttgtaagtgaattttggtttgtgttgttctattttattacaaaaggacggcgtcatcatggctaa

SEQ ID NO: 405053 - DNA, 1206 bp, Staphylococcus aureus
atggctaagaaagtttttattatggatagcgtaaagacaataattggtacgttgcttatagctttaggattacaatttttagcttatccaattattaatcaacgagtaggtaatgaagcgttcggttctattttaacgatttatacaataataacaatcacgagtgttgtattaggcaatacgcttaacaatatacgattgattaatatgaatctatacaaatccaatcattactactggaaatttgcatcgatacttttaatctcaattctgattgagagtatagctttaattattgtatttctttacttttttaatttgaacatcatcgatattatctttttaattctacttaatattttaatgtgtttaaggatttatctgaatgtattttttaggatgactttaaaatataatcagattttgtatattgctcttattcaatttttaggtttgctgataggactatttctatattatttaacccaaaactggattgtttgttttattaccagtgaattgtttgcaacgatatatacattggttaaattacggggattaactataggcgagtatcaaagtgaagataataatgtggtaaaagattatgtgatgctactgagtacaaatagccttaataatttgaatctctatttagatagattaatcttattaccaattataggtggaacagctgtaactatatcatttctttcaacatttattgggaaaatgttagctacatttctatatccgattaataatgtagtactttcatatatttctgtaaatgaaagtgacaatataaagaagcaatatttgaaaactaatctaattgctatagctgccctatgtttagtcatgattatatgttatccaattacaataattattgtctctttactgtataacattgattcaagtttatattcgaagtttattattttaggtaatataggtgttttattcaatgcagtgagtattatgatccaaactttaaatacaaaacacgcatcaataacattacaagcgaattatatgacgcttcacacgattacatttatattcataactattttaatgacaattgcgtttggtctaaatggattcttttggacaacgctgttcagcaacattattaagtatgtgattttaaatattataggtttaaagtctaaattcattaataaaaaggacgtcgattag

SEQ ID NO: 405054 - DNA, 1206 bp, Staphylococcus aureus
atgagtgaaaaaaagattttgattttatgtcagtatttttatccggaatatgtatcttctgcgacgttaccaactcaattggcggaagatttaattgcgaatcacattaatgtcgatgtcatgtgtggatggccatatgaatatagtaatcataaacaggtttctaaaaccgagatgcatcgtggtattcgcattcgacgtctcaagtattcgaggtttaataacaaaagtaaggttggaaggatcatcaatttctttagtttattttcaaaattcgtgattaatatacctaaaatgttgaaatatgatcagattcttgtttactctaatccaccaatcttgccattaataccagacgttttacacagactgcttaagaaaaaatattcttttgtggtgtatgatatagcacctgataatgcgattaagacaggtgcaactcgtccaggtagcatgattgataagctgatgcgttacattaatagacatgtctacaagaatgctgaaaatgtcattgtccttggtacggaaatgaaaaactacttactaaatcatcaaatttctaaaaatgctgacaatatccatgtgattcctaactggtatgacatgcgtcaattacaagacaatcgtatctataatgacacatttaaagcttaccgtgagcaatacgacaaaattttattgtatagcggtaatatggggcagttacaggatatggagacacttatctcatttttaaaattaaataaggatcagtctcaaacgttaacaatactttgtggtcatggtaagaaatttgcagatgtcaaaacggcaatagaagaccatcgtattgaaaatgttaaaatgtttgagtttttaacaggtacagactatgctgacgtattaaaaattgcggatgtatgtattgcatcgctgattaaagaaggcgtcggtttaggcgtgccgagcaagaattatggctatcttgcagctaagaaagcgttggtactcatcatggataagcaatctgatatcgttcaacatgttgaacaatatgatgcgggtatccaaattgataatggcgatgcacatgccatttataacttcatcaacactcactcgagtaaggaattgcacgagatgggtgagcgcgcacatcaactgtttaaagataaatatacgagagaaattaatactatgaagtattacaatctgttgaagtga

SEQ ID NO: 405055 - DNA, 558 bp, Staphylococcus aureus
atgaagcgattattcgatgtagtgagttcaatatatggtttagtagttttaagtccgattctgttaattacagcattactaattaaaatggaatcacctggaccagccattttcaaacaaaaaagaccgacgattaataatgaattgtttaatatttataagtttagatcaatgaaaatagacacacctaatgttgcaactgatttaatggattcaacatcgtatataacaaagacagggaaggtcattcgtaagacctctattgatgaattgccacaattattgaatgttttaaaaggagaaatgtcaattgtaggtcctagaccagcgctttataatcaatacgaattaatcgaaaaacgtacaaaagcgaacgtgcatacgattagaccaggtgtgacaggactagctcaagtgatggggagagatgatatcactgatgatcaaaaagtagcgtatgatcattattacttaacacatcaatctatgatgcttgatatgtatatcatatataaaacaattaaaaatatcgttacttcagaaggtgtgcatcactaa

SEQ ID NO: 405056 - DNA, 888 bp, Staphylococcus aureus
atgagaaaaaatattttaattacaggcgtacatggatatatcggtaatgctttaaaagataagcttattgaacaaggacatcaagtagatcaaattaatgttaggaatcaattatggaagtcgacctcgttcaaagattatgatgttttaattcatacagcagctttggttcacaacaattcacctcaagcaaggctatctgattatatgcaagtgaatatgttgctgacgaaacaattggcacaaaaggctaaagctgaagacgttaaacaatttatttttatgagtactatggcagtttatggaaaagaaggtcatgttggtaaatcagatcaagttgatacacaaacaccaatgaaccctacgaccaactatggtatttccaaaaagttcgctgaacaagcattacaagaattgattagtgattcgtttaaagtagcaattgtgagaccaccaatgatttatggtgcacattgcccaggaaatttccaacggttaatgcaattgtcaaagcgattgccaatcattcccaatattaacaatcagcgcagtgcattatatattaaacatctgacagcatttattgatcaattaatatcattagaagtgacaggtgtgtaccatcctcaagatagtttttactttgatacatcgtcagtaatgtatgaaatacgtcgccaatcacatcgtaaaacggtattgatcaacatgccttcaatgctaaataagtattttaataagttgtcggtctttagaaaattattcggcaatttaatatacagcaatacgttatatgaaaataataatgcacttgaaattattcctggaaaaatgtcacttgttattgcggacatcatggatgaaacgacaaccaaagataaggcataa

SEQ ID NO: 405057 - DNA, 1263 bp, Staphylococcus aureus
atgaagttaacagtagttggcttaggttatattggtttaccaacatcaattatgtttgcaaaacatggcgtcgatgtgcttggtgttgatattaatcagcaaacgattgataagttacaaagtggtcaaattagtattgaagaacctggattacaagaggtttatgaagaggtactgtcatcgggaaaattgaaggtatctacaacgccagatgcatctgatgtttttatcattgccgttccgacgccgaataatgatgatcagtaccggtcatgtgacatttcgctagttatgcgtgcattagatagtattttatcatttttagaaaaaggaaataccattattgtagagtcgacaattgcgcctaaaacgatggatgattttgtaaaaccagtcattgaaaatttagggtttacaataggtgaagatatttatttagtgcattgtccagaacgtgtactgccaggaaaaattttagaagaattagttcataacaatcgtatcattggcggtgtgactgaagcttgtattgaagcgggtaaacgtgtctatcgcacattcgttcagggagaaatgattgaaacagatgcacgtactgctgaaatgagtaagctaatggaaaacacatatagagacgtgaacattgctttagctaatgaattaacaaaaatttgcaataacttaaatattaatgtattagatgtgattgaaatggcaaacaaacatccgcgtgttaacatccatcagcctggtccaggtgtaggcggtcattgtttagctgttgatccgtactttattattgctaaagaccctgaaaatgcaaagttaattcaaactggacgtgaaattaataattcaatgccggcctatgttgttgatacaacgaagcaaatcatcaaagtgttgagcgggaataaagtcacagtatttggtttaacttataaaggtgatgttgatgatataagagaatcaccagcatttgatatttatgagctattaaatcaagaaccagacatagaagtatgtgcttatgatccacatgttgaattagattttgtggaacatgatatgtcacatgctgtcaaagacgcatcgctagtattgattttaagtgaccactcagaatttaaaaatttatcggacagtcattttgataaaatgaagcataaagtgatttttgatacaaaaaatgttgtgaaatcatcatttgaagatgtatcgtattataattatggcaatatatttaattttatcgacaaataa

SEQ ID NO: 405058 - DNA, 1146 bp, Staphylococcus aureus
atgaaaaaaattatggttattttcggtacgagacccgaagcaataaaaatggcaccattagtaaaagaaattgatcataatgggaactttgaagcgaacattgtgattacagcacaacatagagatatgttagatagtgtgttaagtatatttgatattcaagctgatcatgatttaaatattatgcaagatcaacaaacattagcaggccttacggcgaatgcacttgctaaacttgatagcatcattaatgaggaacaaccggatatgattttagtacatggtgatactacaacgacttttgtaggaagtttggcagcattttatcatcaaattccggtcggacatgtagaagctggacttcgaacacatcagaaatactcaccatttcctgaagagttaaatcgagtcatggtaagtaatattgctgaattgaattttgcgccaacagtaattgcagctaaaaatttactttttgaaaacaaagacaaagagcgtatctttattactggaaatacagttattgacgcattgtcaacaacagttcaaaatgattttgtttcaacgattattaataaacataaaggcaagaaagttgttttactaacagcgcatcgtcgtgaaaatattggggaaccgatgcatcagatttttaaagcagtaagagatttggcagatgaatataaagatgttgtcttcatttatccaatgcatcgtaatccaaaggtaagagcgattgccgaaaaatatttatctgggagaaatcggattgaattaattgagccattagatgcgattgagttccataattttacaaatcaatcgtacctcgtgctgacagattctggtggtattcaagaggaggctcctacatttggaaaacctgtgttggtattaaggaatcatacagagcgtcccgaaggcgttgaggcgggaacatcgagagtaattggcacagattatgacaatattgttcgaaatgtgaaacaattgattgaggatgatgaagcgtatcaacgtatgagtcaagcgaataatccatatggtgatggacaagcatcacgacgtatttgtgaagcaatagaatattattttggattgcgcacagacaagccggatgaattcgtacctttacgtcacaaataa

SEQ ID NO: 405059 - DNA, 327 bp, Staphylococcus aureus
atgtttatggcagaaaatagattacaattacaaaaaggcagtgcggaagaaacgattgaacgtttttacaatagacaaggtattgaaactattgaaggcttccaacaaatgtttgtcactaaaacattaaataccgaggatacagacgaagttaaaatcttaactatttgggaatctgaagatagctttaataattggttgaattccgatgtatttaaagaagctcataaaaatgtacgtttaaaaagtgatgacgatggacagcaaagtccaatattatcaaataaagtattcaaatatgatattggctaccactatcaaaaataa

SEQ ID NO: 405060 - DNA, 384 bp, Staphylococcus aureus
atgcgacttattttaatcgtcattggcttaatatttacagcgcttggtattgcaggtgccgtattacctttactgccaacgaccccttttttactcgtagcagttttttgttttgctcgaagttcagatcgcttttacaattggcttattaatcaaaaaatttataaagaatatgtagaaaacttttatttacatcgaggctacacgctacaacagaaaattaaaattttaattagcttatacattgtaataggtttttcaatttatatggtggatgttcttgcagtccgtgtaggattaatcataatggttatcatacaaaccgctgtactctttacatttgtaaaaacattacccaaatcaaatcataaaatagaggagtga

SEQ ID NO: 405061 - DNA, 1488 bp, Staphylococcus aureus
atggcagtaaacgttcgagattatattgcagagaattatggtttatttatcaatggggaatttgttaaaggtagcagtgacgaaacaatcgaagtgactaatccagcaactggagaaacactatcacatattacaagagcaaaagataaagatgtcgatcatgcagtcaaagtggcgcaagaggcatttgaatcatggtcattaacttctaaatcagaacgtgcacaaatgttgcgtgatattggtgataaattaatggcacaaaaagataaaattgcaatgattgaaacattaaataatggtaaaccgattcgtgagacaacagcaattgatattccatttgctgcaagacatttccattatttcgcaagtgttattgaaacagaagaaggtacagtgaatgatatcgataaagacacaatgagtatcgtacgacatgagccgattggcgtcgtaggtgctgttgttgcttggaacttcccaatgctattagctgcatggaagattgcgccagccattgctgcaggtaatacaattgtgattcaaccttcgtcttcaacaccattaagtttattggaagttgctaaaattttccaagaggtattacctaaaggtgttgtcaatatactaacgggtaaaggttcagaatcaggtaatgcaattttcaatcatgatggtgtagataaattatcatttacgggctcaactgatgtaggttatcaagttgccgaagctgcagcaaaacatctagtacccgctacattagagcttggtggtaaaagcgccaatatcatattagatgatgctaatttagaccttgcagttgaaggtattcagttaggtattttattcaaccaaggtgaagtatgtagtgcaggttctcgattattagttcatgaaaaaatttatgatcaattggtgccacgtttacaagaggcattttcaaatattaaagttggaaatccacaagatgaagctacacaaatgggtagtcaaactggtaaggatcaattagataaaattcaatcatatattgatgcagcaaaagaatcagatgcacaaattttagcaggcggtcatcgcttaactgaaaatggattagataaagggttcttctttgagccgacattaattgctgtgccagacaatcatcacaaattagcacaagaagaaatatttggaccagtgttaacagtgattaaagtgaaggacgatcaagaagcaattgatatagctaatgattctgagtatggtttagcaggcggtgtattttctcaaaatatcacacgtgcattaaatattgctaaagctgtacgtacaggacgtatttggattaacacttacaaccaagtaccagaaggcgcaccatttggtggttataaaaaatcaggtatcggtcgagaaacttataaaggtgcgttaagtaactatcaacaagttaaaaatatttatattgatacaagcaatgctttaaaaggtttgtactag

SEQ ID NO: 405062 - DNA, 960 bp, Staphylococcus aureus
atgaatgggaaaaaggcgaatacgataaacagatacaaatattttcatcatgtcaatcatcaaaaaattcaacaaagttctaaaaagacgctgtgggcatcactaatcatcacattgttatttacagtgattgaatttgtcggaggtttagtatctaattcattggcattactgtcagattcatttcatatgcttagtgatgtattagcacttggtttatctatgttggccatttattttgcaagtaaaaagccgactgcacgatacacatttggatatttaagatttgagatattagctgcatttttaaatggtttagcattaattgtaatttcaatctggattttatatgaagctattgtacgtattatttatccgcaaccaattgaaagtggcattatgtttatgattgctagtattggtttactcgtcaatattattttgactgttatccttgtaaggtctttaaaacaagaagacaatatcaatattcaaagtgcattatggcatttcatgggagacttattgaactctattggtgtcatcgttgcagttgtattgatttactttacaggatggcgcatcatcgacccaatcattagtattgtaatttcactcatcattttacgtggtggttataaaattacgcgtaatgcgtggttaattttaatggaaagtgtgcctcaacatttggatactgatcaaattatggcagatattaaaaacatagatggcatattagatgtacatgaatttcatttgtggagtattacaacagagcattattcattaagtgcccatgttgtgttagataaaaaatatgagggtgatgattatcaagcgattgatcaagtatcatcattgttgaaagaaaaatatggcattgcacattcaacgttgcaaattgaaaacttgcaattgaatccattagatgagccatacttcgacaaattaacataa

SEQ ID NO: 405063 - DNA, 204 bp, Staphylococcus aureus
atggataaagaatctgtcgtagcaagtttagctagaaacaaaaagattgctgtagaaacaatggccggtcaaaggtacatcatagaacgcattttacatacaaatgatgaaaaacatattcatattttgaaacctaaagatgtcgtgttagatgtagatagcatcaaagaaattgacgaaaatcatttaaatgatgcaacataa

SEQ ID NO: 405064 - DNA, 513 bp, Staphylococcus aureus
atgacattatttttattagaagctaacaatcttgattttgcatcaacgaaagaagaactagaagcaaaggcagcatcactatctacgaagacaattccaacattaattgaagtacaagctactgaaaatttaactcatggttattttattgtggaagcaaatgacgaagcagaagctaaacaatttttaacagaagcagatattagtattcaattagtcaaagaagtacgcttagttggtaaagatttagatgaagttaaaaatggtgatgcacatgttgattaccttgtaacttggaacattccggaaggcattacgatggatcaatatttagcacgtaaaaagaaaaattctgttcattatgaagaagtgccagaagttgaatttaaacgcacatatgtatgtgaagatatgtctaaatgtatttgtttatacaacgcacctgatgaagaagcggtacgtcgcgcgcgcaaagcagttgatacaccgattgatggcatcgaaaaactttaa

SEQ ID NO: 405065 - DNA, 741 bp, Staphylococcus aureus
atgattaaaattcaacaattacaacatcactttggatcacataaagtaattcataactttaatttggacattagcaagggagaaatagtcactttcatagggaaaagtggttgcggaaagtctactttactcaatattatcggtggatttattcatccatcgtctggtcgtgtcattattgataacgaaattaaacaacagccatctccagattgtttaatgctatttcaacatcataatttgctgccatggaaaacgattaatgacaacattaggattggattacaacagaaaattagtgatgaagagattaacgcacagcttaaattagttgatttagaagacaggggaaagcattttcccgagcaactgtccgggggtatgaaacaacgtgtggcactatgtcgagcgcatgtgcataagcctaacgttatattgatggatgagccattaggtgcattagatgcatttacacgttataaacttcaggatcaactagtgcaactaaaacataaaacgcaatcaactattattttagtgacgcatgacattgatgaagctatttatctttccgaccgcattgttctgttaggtgaagggtgcaatattatttctcaatatgaaattacagcatcacatccacgcagtcgtaatgatagccacctacttaagattcgtaatgaaattatggaaacatttgcattgaatcatcatcaagttgaacctgaatattatttataa

SEQ ID NO: 405066 - DNA, 975 bp, Staphylococcus aureus
atgaaaaggttaagcataatcgtcatcattggaatctttataattacaggatgtgattggcaaaggacgtctaaagaacggtctaaaaatgcccaaaatcagcaagtgattaaaattggatatttgccgattacacattcagctaatttgatgatgactaaaaaattattatcacaatacaatcatccgaaatataaactagaattagttaaattcaataattggccagatttaatggacgcattaaacagtggtcgtattgatggtgcatcaactttaatagagctagcgatgaaatcaaaacagaagggctcaaatataaaggctgtggcattgggccatcatgaaggcaatgtcattatgggacaaaaaggtatgcacttaaatgaatttaataataatggcgatgattaccattttggtataccacatcgttattcaacacattatcttttacttgaggaattacgtaaacaattaaagattaaaccggggcattttagctatcatgaaatgtcgccagcagaaatgccagccgcattgagtgaacacagaattacagggtattctgtagccgaaccattcggtgcactgggtgaaaagttaggcaaaggtaagactttgaaacatggtgatgacgttatacctgatgcgtattgctgtgtgctagtactgagaggggaattgcttgatcaacacaaggatgtagcgcaagcatttgtacaagattataaaaagtctggctttaaaatgaatgatcgcaagcaaagtgtagacattatgacgcatcattttaaacaaagtcgtgacgttttaacacagtcagcggcatggacatcctatggtgatttaacaattaagccatccggctatcaagaaattacgacattggtaaaacaacatcatttgtttaatccacctgcatatgatgactttgttgaaccgtcattgtataaggaggcatcgcgttcatga

SEQ ID NO: 405067 - DNA, 762 bp, Staphylococcus aureus
atgacacgtcccacaaataacaaatttatattacctattatcacatttattattttcttaggcatttgggaaatggtcattattattgggcattaccaacctgtattgttaccgggtcctgctcttgtaggaaaaagtatatggtctttcattgttactggagaaattttccaacatttagcaattagtttatggagatttgtagcgggctttgttgtcgcattgttggttgctattccattgggcttcttgcttggaaggaatcgttggctatacaacgctatcgaaccgctatttcaattgattaggccgatatctccgatagcatgggcaccatttgttgttctatggtttggtattggtagtttgccagcgattgcgattatttttatcgctgcttttttcccaattgtgttcaatactattaaaggcgttagagacattgaacctcaatatttaaaaatagcagcaaatttaaatttaactgggtggtcattgtatcgcaatatattatttcccggggcatttaaacaaatcatggctgggatacatatggcggtaggaacaagttggatatttttagtttctggtgaaatgattggtgcacaatcgggattaggttttttaatcgttgatgcacgaaatatgttgaacttagaagatgttttagcagcaatattctttatcggattatttggttttattattgatcgattcattagttatattgagcagtttatacttagaagatttggtgaataa

SEQ ID NO: 405068 - DNA, 1035 bp, Staphylococcus aureus
atgatgactttagaaacgcttatcaaagaacaattagatcctcatttagtagaagttgatgaagggacgtattatccgagaacatttattcagcaattatttgtagatggttatttcggtgaggcggcattgagaaaaaatgctgaagtaatcgaagctgtatcgcagtcttgtttgacaacaggattttgtttatggtgccaattagctttttcaacgtatttagaaaatgccacgcagccacatttaaataatgacttacaacagcaattgttatctggagaaatattaggtgctaccggattgtctaatccgatgaagtcatttaatgatttagaaaagttgaaccttgaacacacttatgttgatggacaattggttgtcagtggacgtatgccagctgtaagtaatattcaagaagaccattattttggtgcgatttcgaaacatgaatcatcagatgaatttgtcatgttcattctacgtgccaatcaagatggtatcactcttgttgaaaaaaccaattttttaggagtcaacgggtcagcaacgtatcaaatcacattgaatcaagtcgtagtgccacaatcacaaattatcacgcatgatgcgaagcagtttgcagcaactattcgcccgcaatttattgcttaccaaattccaataggattaggctcaattaaaagttctttagagttaattgatgcattttcaaatgtgcaaaacggaataaatcaatatttagagtatgatgttgaagcttttaaaaaacgttatcgtcaacttagagaggaatattatgcaatattagatgacggtaacttaacttcacatttaaatgaattaatatcattgaagaaggacatcggctatttattgttagatgtaaatcaagcttctgttgtcaatggtggttctagagcgtacacaccatattcgccacaagttcgcaagttaaaagaaggattcttcttcgcagcattgacaccgacattaagacatttaggtaaacttgaagcagagttgaaggggtaa

SEQ ID NO: 405069 - DNA, 360 bp, Staphylococcus aureus
gtgaatactatagatacgcatactaaagaacaacaattctcgaatctagtaagatcttatcgtaaagaatacgtgggtaaaggacccaatagtattcgagtgtcgtttaaagataattgggcgattgcacatatgacaggtgttttgagtaaagttgagagtttttacctaaacgacaaacgcaatgaatcgatgctccattatacacgcacagagaagattaaacagatgtataaagaaatagatgtaaatgagatggaaagtcttgtaggcgctaagtttgtaaaattatttacagatattgatttgaatgatgatgaagtcatttcaatatttgttttcgataagtcaatagaataa

SEQ ID NO: 405070 - DNA, 1026 bp, Staphylococcus aureus
atgaaaatcgtagcattatttccagaagcagtagaaggtcaagaaaatcaattacttaatactaaaaaagcattaggattaaaaacatttttagaggaaagaggacatgagttcattatattagcagataatggtgaagacttagataaacatttaccagatatggatgtgattattagtgcgccattttatcctgcatatatgactcgtgaacgtattgaaaaagcaccgaacttgaaattagcaattacagcaggtgtaggatctgaccatgtagatttagcggcagcaagtgaacacaatattggtgtcgttgaagttacaggaagtaatacagttagtgtggcagaacatgcggttatggatttattaatacttcttagaaactatgaagaaggtcatcgtcaatcagtagaaggtgaatggaacttgtctcaagtaggtaatcatgcgcatgaattacaacacaaaacaattggtatttttggatttggtcgaattggacaacttgttgctgaaagattagcgccatttaatgtaacattacaacactatgatccaatcaatcaacaagaccataaattgtctaaatttgtaagctttgatgaacttgtttcaacaagtgatgcgattacaattcatgcaccattaacaccagaaactgataacttatttgataaagatgttttaagtcgtatgaaaaaacacagttatttagtgaatactgcacgtggtaaaattgtaaatcgcgatgcgttagttgaagcgttagcatccgagcatttacaaggatatgctggtgatgtttggtatccacaacctgcacctgctgatcatccatggagaacaatgcctagaaatgctatgacggttcactattcaggtatgactttagaagcacaaaaacgtattgaagatggagttaaagatattttagagcgtttcttcaatcatgaacctttccaagataaagatattattgttgcaagtggtcgtattgctagtaaaagttatacagctaaatag

SEQ ID NO: 405071 - DNA, 1251 bp, Staphylococcus aureus
atgaaacgcttaagtacgactttgaaagtacgattgattagcaattttttacagctaattattacgacagcatttataccgtttatagcactatatttaacagatatgttaagtcaatcaattgtcggtatatatcttgttggtttagtggttctaaaatttccattgtccattatatctggttaccttattgagatatttccgaaaaagttgctagtacttatttatcaagcgacgatggtgataatgcttgtgttcatgggcgtatttgggtcacatcaattgtggcaaattattggtttttgtgttgcatatgccatatttacaatcgtttggggattacaatttccagttatggacacattaattatggatgcaattaccgaagacgtggaacattatatttacaagattagctattggatgacaaacttatcggtagctattggggcattgttaggtggcttgatgtatggctacagtatgttactacttttcttaatagcagcttgtatatttttaattgtactctttattttatatatttggttacctcaagaccgaaatcaagtaaagcaaagtgatgacaagaggcatgcaagtcgttatcaaaaattacaaataatgaatatatttcgcagttataaattagttttgaaagaccgtaattatatgttattgatttcggggttcagtatcatcatgatgggtgaattttcaatctcctcatatattgctattagactaaaggatcagtttgaaacaataagtataggttcatatgatattacaggtgctaagatgttagcaatcttgctaatgattaatacggtcgtcgtcattttactcacgtattcaatctcgaaagttgtattgaaaatagattttaaaaaagctttaatcactggtttgctgatttatattgttggctatagtggtctaacctatcttaatcagtttggcttattagttgtttttatgataattgcgactgtaggtgaaattatttattcgcctatagtttcagaacaacgctttaaaattattcctaaagctaaaagaggaacatatagtgcagttaatgcattaggtattcatttttcagaaacactagctaggttagggattgtgttgggtgttttcttaacgtcattacaaatgggactgtatatgtttatcgttttaacaattggtgctagcatgcttgttgctggtgtatttgggggacaaaaacaagtgaatacaaattga

SEQ ID NO: 405072 - DNA, 7176 bp, Staphylococcus aureus
atgattatgggtaatttgagatttcaacaggaatattttcgtatatacaaaaataatacagaatcaacgacacaccgtaatgcgtattgggttaaactcgctaaaaatgttgaagctactaaaatgatgtatgcattatcgacaattgtgcaacaacatgcatctataagacatttttttgatgttactaccgatgacaatttaacaatgatacttcatgaatttctgccttttattgagataaaacaagttccatcttcttccgcaaactatgatttagaagctttttttaagcaagaattaagtacttaccattttaatgattcacctttattcaaagttaaattgtttcagttcgctgatgctgcatatatactattagattttcatgtgtccattttcgatgatagtcaaattgatatttttcttgatgatttatgcaatgcatatcgtggcaatactgttattaacaatactcgacagcatgcacatataaatagaaatgatgataaagacaatcaagatgcatcgcatatagcattagactcaaactattttcggttagagaataactctgacatccatattgatagttattttccaattaagcatccatttgaacaagctttatatcaaacgtatttgattgatgatatgacatcaatagatatggcatcgttggctgttagtgtgtatttagctaatcatataatgagtcaacaacatgatgtcacattaggtatacatgtaccatcacatttaccaaatgatttacacggaaatattgtgccgttaacgttaacaatcgatgcaaaagatgtatgtcaacgttttacaacagattttaataaatgtgtgttgcaaaatatgtcgcaattacagtgcgcgaagtcttcgctttcactagagactatttttcattgttatcatcatatgatgtcttgttgtaatgatgttattgaggatgtacatcaaatacatgatgcacatacatctttagcggatattgaaatttttccacatcaacacgggttcaaaattatatataacagtgcagcatatgatttgctctcaatcgagacgctgagtgacttagttcgaaatatttatttgcaaattactgaagaaaatggaaataaacgaacaactgtagatgaacttaatttgatgacagaacgtgatattcaattatatgacgatatcaatttaagtttgcctgagatagatgatgcgcaaacagttgttaccttatttgagcaacaagttgaagcaacgccgaatcatgtcgctgtgcaatttgacggagtgtttataacatatcaaacattgaatgcacgcgcgaatgatttagcacaccgtttgagaaaccagtatggtgttgaacctaatgatcgtgtcgctgtcatagctgaaaaaagtattgagatgataatagcgatgataggtgtgttgaaagctggtggggcttacgtgccaattgatccgaactatccaagtgatcgtcaggagtacattttaaaagatgtaacgcctaaagttgtaataacgtaccaagctttatatgaaaatggtaaacaaaatattaatcacattgatttgaataagatagcgtggaaaaatattgataatctttctaaatgtaacacgttagaagatcatgcttatgttatttacacgtcggggacaactggtaaccctaaagggacactaattccgcaccgaggtattgttcgcttggtccatcaaaatcattatgtaccattaaatgaagagacgacgattttgttatcaggaactatagcctttgatgctgcaacatttgaaatatatggtgcattgctcaatggtggaaagctgattgttgctaaaaaagaacaattattaaatccaatagcggtagaacaattaatcaatgaaaatgacgttaatactatgtggttaacctcctcattatttaatcagattgctagtgaacgaatagaagtattggtaccgttaaagtatttattaattggtggagaagtattgaatgctaagtgggtggatttgcttaatcaaaaaccgaagcatcctcaaattattaatggttatggaccaactgaaaatacaacatttacaacgacgtataatatacctaacaaagttccaaatcgtattcctattggtaaaccgattctgggtactcatgtttatatcatgcaaggcgagcgtcggtgtggcgttggtattcctggagaattatgtacaagtggctttgggttagctgcaggttatttaaatcagccagaattgacagcagataaatttatcaaagattcaaatataaatcagctgatgtatagaagtggtgatatcgttcgtttgttacccgatggcaacatagattatttatatcgaaaggacaaacaagttaagattcgagggtttaggattgagttgtcagaggttgagcatgcgctcgagcgtatacaaggtattaataaagcagttgttattgttcaaaatcatgatcaagatcagtatatcgttgcttattatgaagcgatgcatacattatcacataataagattaaatcacaattacgtatgaccttaccggagtacatgataccagttaatttcatgcatattgagcaaattcctattactattaatgggaaattagataagaaggcattgcctatcatggactatgtcgatacggatgcctatgtagcaccgagtacagataccgaacacttgctatgccaaatttttgcagatattttacatgtgaatcaagtaggtattcatgataatttctttgaattaggtggccattcattaaaagcaacgttagtggtgaatcggatagaggcatctactgggaaacgattacaaattggtgatttattacaaaagccaactgtatttgaactagcacaagcgattgctaaggttcaagaacaaaactatgaagtgattccagaaactatagttaaagatgattatgtgctgagctctgcacaaaagcgtatgtatttattatggaaatcaaaccataaagatacggtgtataacgtaccttttttatggcggttatcatcagaacttaatgtagctcaattgcgacaagcagtgcagcgtttgatagcgcgacatgagattttacgaacacaatatattgttgtagatgatgaggttcgacaacgtattgtggcagatgttgcagttgactttgaagaagttaacacgcattttacggatgaacaagaaatcatgcgccaatttgtagcaccttttaatttggaaaagccaagtcaaattagagtgagatacattagaagtcccttacatgcatacctctttatagatacgcatcatatcattaatgacggtatgagtaatatacaattaatgaatgatcttaacgcactttatcaacataaattattgttaccacttaaattgcaatataaagactatagtgagtggatgtcgcatcgtgatatgacgaaacatagacaatattggttatctcaattcaaagatgaagtacctattttaagcttaccgacagactatgttagaccaaatattaaaacgacaaatggagcaatgatgtcatttacaatgaatcaacaaatgagacagctacttcaaaagtatgtagaaaagcatcaaattactgattttatgttctttatgagtgtggtcatgacgttgttaagtagatatgctcgaaaagatgatgttgttgtcggtagtgtgatgagtgcgcgtatgcataaaggcacggagcaaatgctaggcatgtttgctaatacgttggtatatagagggcaaccgtcacctgataaaatgtggacacagtttttacaagaggttaaggaaatgagtttggaggcatacgagcatcaagaatacccattcgaatgtttagtaaatgacttagatcaatcacatgatgcctcacggaatccattatttgatgtcatgttagtactacaaaacaatgaaacgaatcatgctcattttgggcatagtaaattaacacacattcaacccaaatcagtgacggcgaaatttgatttatctttcatcattgaagaagatcgcgatgactatacaatcaatatcgagtataataccgatttatatcactcagaaacagttcgtcacatgggtaatcaatgtatgattatgattgattatattttgaagcatcaagatacactacaaatttgtgatataccaaacggcacggaggaacttctaaattgggtcaatacgcatgttaacgatcgaatgcttaatgtcccgggaaataaatctatcataagttactttaatgaagttgtctcacgacaaggtaatcatgttgcgctagtcatgaatgatttgacaatgacgtatgaaacattacgcaactatgtggatgccattgcgcacatgctcctatcaaatggtgtgggcaatggtcaacgggttgccttgtttacagaacgtagttttgaaatgattgcggcgatgttggcgacagttaaagtaggtgcatcttatatacctatcgatattgattttccgaataaacgacaaggtgcaattttggaggatgctaaagtaactgcagtcatgtcttacggcgttgaaattgaaacgacattaccagtcattcaattggaaaatgctaaaggctttgttgaatcaaaggaaaatgaacaatatgatgatttacatggcaatcaacttgaaaacacagcgatgttagataatgagatgtatgctatttacacatctggtacgaccgggatgcctaaaggggttgccatacgacaacgaaatttgttgaatttagtgcatgcatggtcaactgaattgcaattaggcgacaatgaagtatttttgcaacatgcaaatattgtttttgatgcatcagttatggagatttattgttgtttgttaaatggtcatacgcttgtgattccagatagagaggaacgtgttaatccagaacagttacaacaactcattaataagcatcgtgtgacggttgcgtcgattccgttacagatgtgtagtgttatggaagacttttatattgaaaagttgattacaggcggggcaactagtacggcatcctttgttaaatatattgagaagcattgtggcacgtatttcaatgcctatggaccatctgagtcaacagtcatcacatcgtattggtcacatcattgtggtgatttgatacctgagacgattccaattggcaaacccttatctaacatccaagtgtatattatgtcagatggtttgttatgcggtattggtatgccaggcgagttgtgtattgcaggtgatagtttagcgataggatatattaatcgtccagaattaatggctgataaatggcaaaataatccatttggtaaaggaaagttgtatcatagtggtgatttagcacgttatacatctgatggtcaaattgaatttttaggaagaatagataaacaagtgaaagttaacgggtaccgtattgaacttgatgaaattgaaaatgcaatattagctattcgtggtatatctgattgtgttgtaacagtaagtcactttgatacgcatgatatattgaatgcttattatgtcggagagcaacaagtggaacaggatttgaagcaatatttaaatgatcagctgcctaagtatatgattcctaagactataacgcatatcgattgtatgccattaaccacgaatgacaaggtggatactacgcgtttgccaaatccatcacctatacaacagtctaataaagtgtatagcgaaccctctaatgaaattgagcagacatttgttgatgtatttggagaggtattgaaacaaaatgatgtcggtgttgacgatgatttctttgaacttggtggtaactcattagaggcgatgttagttgtctcgcatttaaaacgatttggccatcatatttcaatgcagacattataccaatataaaaccgtgcgacagattgttaattatatgtaccaaaatcaacaatcattagttgcattaccggataatctttcggaattacaaaagattgttatgtctcgttataacttgggtattttagaggatagtctaagtcatcgacctctaggaaatacactattgactggcgcgacaggttttttaggtgcttatctgattgaagtactacaaggatacagtcatcgcatttattgtttcatacgtgctgataatgaggaaatagcatggtataagttgatgacgaatttaaatgattatttttcagaagagacggttgaaataatgttatcaaacattgaagtcattgttggtgatttcgagtgtatggatgatgttgttttaccagaaaacatggatacgattattcatgcaggtgctcgtacagatcactttggtgatgatgatgaatttgaaaaagtaaatgttcaaggtactgttgatgtcatacgtttggcacaacaacatcatgcaaggttaatatatgtgtctacgataagtgtgggaacttattttgatatagacacagaagatgtgacattttcagaagcggatgtctataaagggcaactactaacatcaccatatacacggagcaaattttatagtgaattaaaagtattagaagctgtaaataatggcttagatggtcggattgtacgtgttggtaatttgacgaatccttacaatggaagatggcatatgagaaatataaagactaaccgtttttcaatggtaatgaatgatttgttacaactggattgtatcggggttagcatggctgaaatgcctgtagatttttcttttgtggatacgactgcaagacaaattgtcgcattagcacaggtcaacacaccacaaatcatttaccatgtgctatcacctaataaaatgccggtgaaatctttgttagaatgcgttaagcgcaaagaaattgaactcgtcagcgatgaatcatttaatgaaattttacagaaacaagacatgtacgaaacgattggattaactagtgttgaccgtgaacaacaactagcaatgatagatacaacattaacattaaaaataatgaatcacatcagtgaaaaatggccaacgataactaacaattggctgtatcattgggcacaatatatcaaaacaatattcaataagtaa

SEQ ID NO: 405073 - DNA, 645 bp, Staphylococcus aureus
atgacagtatttgtaatgcaattacagagtaacttgaaaagtattgaagaattaatatcacaaagtcgttggtcatataaaaaaccgcgtacagtcaactatagatacaatcaagataaactcatgcacagattgggagatattttagtgcaatatggaattcaacatgacacaggtttattaccacatgaatggcattatcacatttcgccacgaggtaaggcagatattgttcaacacaatcgtgatggacagcccatctatgtgagcttatcatatagttatccttatatcgtgtgtgttgtcgataaagaaccagttggtattgatatcgaaaagatatcacaacgtttagactggcgtacgttagtgacgtgtttctctacaaacgaagcacatcaaatatgtagtttaaatgatttttatcaaatatggacacaaaaagaaagttttacaaaattgattggtgaaggtttaatcaaaggattggacatttatgatatgacacaatcacacttttatcaatcacgtgaagtgaagttcaaacaatttatttttgatcagtttatggtacaggtatgtttcttaggacaggcaccctggggttataaaaaagtgtctgtatttcagttattgagtagttaa

SEQ ID NO: 405074 - DNA, 495 bp, Staphylococcus aureus
ttgacgaaacgacaaatgggtatattcatttatgctggaattatcggtggcttgttatctggaattgtaaaattaggttgggaggtcatgtttccacctcgcacaccagaacgtaatgcaacgaacccacctcaagagttattgcaacaattaggatttagtagtgagtttacgcatcaaacatatacattttcaaatatggaattgccttgggtaagctttattgtccactttagtttttctatcgtcattgcaattatttactgcatattagttaaaaaatacgcttacttagcaatgggacaaggtgctgtttttggtattgctatttgggtattattccaccttatcattatgccaatcatgcatactgtacctgctgtgtgggatcaaccattccaagagcatctgtcagaattctttggccatatcgtctggatgatgacaattgaattagtgcgacaacattttgtctatcgctataaattaaattaa

SEQ ID NO: 405075 - DNA, 765 bp, Staphylococcus aureus
atgaaatttattgtcattaaaattggtggcagtacacttagtgacatgcatccatcaattattaacaacattaagcatttacgatcaaacaacatctaccccattatcgttcatggcggtggcccatttattaatgaagcattatcaaaccagcaaatcgagccacactttgttaatggcctaagagtgactgataaagcaaccatgaccattactaaacacacgctcattgcagacgttaacactgcattagtagctcaatttaaccagcaccaatgttctgcaataggcttatgtggtttggatgcacagctgtttgaaattacatcttttgatcaacaatatggatatgtcggtgttccgaccgctttaaataaggatgctttacagtatttatgtactaaatttgtacctatcatcaattcgattggtttcaataaccatgatggagaattttacaatattaatgctgacacgcttgcctattttattgcatcatcattaaaagcgcctatttatgtattaagtaatattgcaggtgtactcatcaatgatgttgttatacctcaattgccattagtcgatattcatcaatatattgaacatggtgatatttatggaggtatgattcccaaagtgctagatgccaaaaatgcgattgaaaatggctgtcctaaagttatcattgcatcaggaaacaagccaaatatcattgaatctatttacaataatgattttgttggcacaacaatccttaattcataa

SEQ ID NO: 405076 - DNA, 1242 bp, Staphylococcus aureus
atgaaacatcaagaaacgacatcacaacaatataacttttcaattattaaacatggcgatatcagtacacctcaaggcttcacggctggtggtatgcacatcggtttacgcgctaacaaaaaagactttggatggatttactcatcgtctttggcaagtgcagctgccgtatatactttaaatcagtttaaagctgcaccacttattgtcactgaagacactttacaaaagtctaaaggaaaattacaagcacttgttgttaattcagctaatgcaaattcttgtaccggtcaacaaggcatagatgatgcacgacaaacacaaacatgggttgctcaacaacttcaaataccatctgagcatgttgctgttgcttcaactggggtcattggtgaatatttgcctatggataaaattaagactgggaccgaacatattaaggatgctaattttgcaacgccaggtgcgtttaacgaggcaattttaacaactgatacctgtacaaaacatatcgctgtatcactaaaaatcgatggtaaaaccgttacaattggtggtagcaccaaaggttcaggtatgattcacccaaatatggctaccatgcttgcttttataacaaccgatgcatcgattgaatcgaatacacttcatcaattattaaaatcttcgactgaccatacatttaatatgattactgttgatggcgatacaagtacaaatgacatggtattagtcatggcaaatcaccaagttgaacaccaaatacttagtcaagaccatccacaatgggaaacatttgttgatgcattcaattttgtctgtacatttttagctaaagctatagccagagatggcgaaggcgcaacaaagttaatcagcgtcaatgtgtcaggcgctaaatcaatatcagatgcaagaaaaatcggtaaaactatcgtaagttcaaatctagtaaaatcagctatttttggcgaagatgccaattttggtcgaatcattacagctattggctacagcggatgtgaaattgatcctaactgcacatatgttcaactgaaccaaatacctgtcgttgataaaggtatggctgtactatttgatgagcaagctatgtcgaatacattaactcatgaaaatgtcacaattgacgttcagcttggtttaggtaacgctgcagcgactgcatacggttgtgatttatcctatgattatgtgcgtatcaacgcatcatatcgaacataa

SEQ ID NO: 405077 - DNA, 1035 bp, Staphylococcus aureus
atgatgattaaagtaggtatcgttggcggtagcggttatggcgcaattgaattaattcgattgttacaaacacatcctcatgtaacgattgcacacatctactcacattcaaaagtagatgaaccgttgaaattaacatttccacatttacaacatattatgcaacatttcgaagcacttacagtggacaataatgactgtgatgtaattttctttgcgacaccagcacccgtaagtaaaacatgtatccctcccttagtagaaaaaggtattcatgttatcgatttatctggcgcatttagaattaagaatcgtgaaatatatgaagcatattacaaagaaactgctgcagcacaagatgatttgaatcatgctatttacagcatttcagaatggcaatcgtttgataacaatggaacgaagctcatttctaatcctggctgtttccctacagcaacattattagcattacatccacttattagcgaaaaaatagtagatttgtcatctattattattgatgctaagaccggcgtgtcaggtgctggtcgttcattatcacaacgtgttcatttttcagaaatgaatgaaaatctaagcgcttatgcaatcggaaaccataaacacaaaccggaaatcgagcaatatttatctatcattgcgggtcaagatgtatcagtcatatttacaccacatctcgtaccaatgacacgaggtattttatcaacaatatatgtcaaattatcatctgaatatacgactgaatcattacataaattaatgacctcttattatgctaatcagccatttgtcagaattagagatattgggacttttccaaccacaaaagaagtactcggtagtaactactgcgatatcggcatctatgtagatgaaacaacgcaaacagcaattttagtatcagtgattgataaccttgtcaaaggcgcaagtgggcaagccattcaaaatttaaatatattatatgattttgaagtgacgactggcctaaatcaatcaccagtttatccataa

SEQ ID NO: 405078 - DNA, 1185 bp, Staphylococcus aureus
atgaattcaatcattgaattaactgattattatagctctaataattatgcaccacttaagcttgtcatttctaaaggtaaaggtgtcaaagtttgggatactgatggcaaacaatatatagattgcatttcgggtttttcagttgcaaaccaaggccattgtcatccaacaattgttaaagcgatgacagaacaagcttcaaagttgtctatcatttcacgtgtcctttatagtgacaatctcgggaaatgggaagaaaaaatttgtcatcttgctaagaaagacaaagtactcccccttaactctggtactgaagctgttgaagcagccattaaaattgctagaaaatggggctctgaagttaaaggcattactgacggacaagttgaaatcatcgctatgaataacaattttcacggtcgtacacttggctcattatcactatctaaccacgacgcatataaagcaggatttcaccccctacttcaaggcactacaacagtagattttggagacattgaacaattaacacaagctatttcaccgaatacagcagcaattattttggaaccaattcaaggtgaaggtggcgttaatataccaccgaaaggatatattcaagctgtgcgtcaactatgtgataaacatcaaatattattgattgcagatgaaattcaagttggtcttggtagaactgggaaatggtttgctatggaatgggagcaagtcgttccagacatttatattttaggtaaggcattgggtggcggcttataccctgtatctgctgtacttgcaaataatgatgtcatgcgtgttctaacaccaggtacacatggttcaacatttggtggtaaccctttagccattgcaatatcgacggcagcgcttgatgtacttaaagatgaacaactggttgaacgatcagaacgcttaggttcatttttattaaaagcgttgctacaacttaaacatcctagtattaaagaaattagaggtcgtggtttatttataggcatagagcttaacacagatgctgcaccttttgtggatcaactgattcaacgtggaatcttatgcaaagacacgcatcgtactatcattcgattgtctccacctctagtcattgataaagaggaaatccatcaaattgttgcagcttttcaagacgtttttaaaaattaa

SEQ ID NO: 405079 - DNA, 1356 bp, Staphylococcus aureus
atgaagaagaaactaacatttaaagaaaacatgtttataggttctatgttatttggtttattctttggtgccggcaatcttatcttcccaatacacttgggtcaagctgctggttctaacgtttttatcgctaacttaggatttttaattacagcaattggcttaccatttctaggtatcattgctattggcatttcaaagacatctggtttatttgaaattgcatcgcgtgttaataaaacatatgcttacattttcacgattgccttatatctagttatcggaccatttttcgccttacctagactggcaacgacatcatttgaaattgcattttcgccatttttatcaccaaagcaaatcactttatatttatttatttttagcttcgtcttctttgtgattgcatggttttttgcgagaaagccatcaagaattttagaatatatcggtaaatttttaaatccggtattcttagtattattagcaattattttattatttgcttttatccatccattaggtggcatatctgatgcacctattagtaaacaatatcaatcacatgccttatttaacggctttttagatggatacaataccttagatgcgctagcgtcattggcatttggtattatcattgttgcaacgattaaaaagttaggtatcgaaaatccaactgatatcgctaaagaaacaattaagtctggtactatcagtatcattatgatggggatcatttataccctactagcaatcatgggtacattaagtattggtcatttcaaacttagtgaaaatggtggtattgccttagcgcaaattactcaatactacttaggtaactacggtatcgtcctgttgtcacttatcgttatggttgcttgtttaaaaacagccatcggtttgattacggcattttcagaaacattcgaacaccttttccctaaaatgaattacctagcgattgcaacagttgtaagctttatttcgttcttattcgcgaatgttggtttaactaagattattatgtactcagtcccagtgttaatgttcttatatccattagcaattgccttgattgtactaacattatttagtagcaaattccatcattcaaaacttatttatcaatgtaccattttctttacaatgattgctgcattagtagatggattaaaagctagtccagagttcatttcaagcacatcattctcacaaactttgattaatttcagccaaaaatatttaccattatcagacattggtatgggctgggttgttctcagtttgattggtttcattatcggcttcattatttataaaattaagcatcgtaaaattccacaagcataa

SEQ ID NO: 405080 - DNA, 558 bp, Staphylococcus aureus
atgattaattttaataaaaccgctttagtgttaatcgacctgcaagaaggtattcttaaaatggattatgccccatatacagctgaaaatgtcgttcaaaacgctaataaattaatagatgtttttagaaaaaacaatggctttatcgcttttgttcgcgtgaatttctatgatggtaaagatgtattgcaaccaaatgcaatgatctcattaccaccaaaagaaggcgacgactacagtcgtttccatcatttattagacaagagagatgacgattttgtcatagacaaacgacattttagtgcatttgtaggaacagatttggacttacaattgcgacgtcgaggaattgatacgattgttcttggtggtgtcgcaacgcatattggcgtagatacgacagcgcgagatgcctatcaattaaactacaatcagttttttgttacagatatgatgagtgcacaaaacgaaacgctacatcaatttccaatagataatgtattcccattgatgggacaaacaataactacaaacgactttctaaatatattgaactaa

SEQ ID NO: 405081 - DNA, 1641 bp, Staphylococcus aureus
atgaaacaacgcattggagcttacttaattgacgctattcatcgagcaggcgtcgataaaatttttggtgttcctggtgattttaatctcgcttttctagacgatattatcagcaatcccaatgtagattgggtaggaaatacaaatgaattaaacgcaagttacgcagcggacggttatgcccgtcttaatggactcgctgcattagttactacatttggtgttggcgaattaagtgccgtcaacggtatcgcaggttcatatgctgaacgcatacctgtcattgcgattacaggtgcgccgacacgtgctgttgaacaaggcggtaaatatgtacatcactcacttggtgaaggtacatttgacgactatcgaaaaatgtttgcacatataaccgttgcacaaggttatatcacacctgaaaatgcaacaaccgaaataccacgtttaattaatacagcaatcgccgaaagacgcccagttcatttacatttaccaatcgatgtcgcaatctctgaaattgagataccgacaccatttgaagtgacggcaactaaatatacggatgcatcaacatatatagagttattagcaactaaactgcatcaagcgaagcagcctatcatcattactggacatgaaattaacagttttcacctccatcaagaattagaagattttgtaaatcaaacacagataccagtagcacaactttcattaggaaaaggtgcttttaatgaggaaaatccatattatatgggtatttacgatgggaaaattgccgaagataaaatacgagattatgtggacaacagcgatttaattttaaatattggagccaaattaacagattcagcaacagcaggtttttcataccaattcaatatcgatgatgtcgttatgttaaatcatcacaatatcaaaattgacgatgttacaaatgatgaaatatctctaccatcattgttaaaacagttatccaatatttcatatacgaataacgcaacgttccctgcgtatcatcgtccaacatcacccgattatactgttggcacagaaccattaacacaacaaacttattttaaaatgatgcaaaatttcttaaaaccaaatgatgtcatcattgctgatcaaggtacatcattctttggtgcttatgatttagcattatacaaaaacaatacttttatagggcaaccgttatggggttctatcggctatacattacctgcaacattaggttcacaattagcagacaaagatcgtcgtaacttattattaattggtgatggctcattgcaactaactgttcaagctatttcaactatgattagacagcatattaaaccggtattatttgtgattaataatgacggctatacggtagaacgacttattcacggcatgtatgaaccttataatgaaattcacatgtgggattataaagctttaccagctgtatttggtggtaaaaatgttgaaattcatgacgttgaatcatcaaaagatttacaagacacgtttaatgcaattaatggtcatcccgatgtgatgcattttgtcgaagtcaaaatggctgtcgaagacgcaccgaagaaactcatcgatatcgctaaagctttttcacaacaaaataaataa

SEQ ID NO: 405082 - DNA, 2046 bp, Staphylococcus aureus
gtgaggaagaaacttttcggtcaattgcaacgtattggtaaagcgctaatgttacctgttgcgattttaccagcagctggtctgttattagctatcggtacagctatgcaaggtgaatcattacaacactacttgccgtttatacaaaatggtggcgtacaaactgtcgctaaattaatgacaggtgctggtggtatcatttttgataacttgcctatgattttcgcattaggtgtcgcaatcggattagctggcggtgatggcgtagcagctatcgcagcattcgtcggttacataatcatgaacaaaacaatgggcgactttttacaagttacacctaagaatattggtgatccagcgagtggttacgctagcattttaggtatcccaacattacaaacaggtgtgttcggcggtattataatcggggccctggcagcttggtgttataacaagttctataacattaacttaccatcttatttaggtttcttcgctggtaagcgtttcgtacctattatgatggctacaacatcatttattttagcattcccaatggcattaatttggccaacgattcaatcaggattaaatgcattcagtacaggattattagattcaaatactggtgttgccgtattcttatttggtttcatcaagcgtttattaattccattcggtctacatcacattttccacgcaccgttctggttcgagtttggttcatggaaaaatgcagctggtgaaattattcacggtgaccaacgtatctttatcgaacaaattcgtgaaggcgcacatttgacagctggtaaattcatgcaaggtgaattccctgttatgatgttcggtttacctgcagcagctttagcaatttatcacacagctaaacctgaaaataagaaagtagtagcaggtttaatgggttctgctgctttaacatcattcttaactggtattacagaaccattagaattctcattcttatttgtagcaccattattattctttattcacgcagtacttgatggtttatcattcttaacattgtacttattagatcttcatctaggttatacattctcaggtggtttcatcgactacttcttactcggtatactacctaataagacacaatggtggttagtcattcctgtaggtcttgtatacgcagttatttactacttcgtattccgattcttaattgtaaaattaaaatacaaaacaccaggtcgtgaagataaacaatcacaagcggctactgcttcagcaactgaattaccatatgcagtattagaagctatgggtggcaaagcaaacattaaacatttagacgcttgtatcacacgtctacgtgttgaagttaacgacaaatctaaagttgatgttcctggtttgaaagatttaggcgcatctggtgtattagaagtcggcaataatatgcaagcaatttttggtcctaaatctgaccaaatcaaacatgaaatgcaacagattatgaatggtcaagtagtagaaaatcctactactatggaagacgataaagacgaaactgttgttgttgcagaagataaatctgcaacaagcgaattgagccatatcgtgcatgcaccattaactggtgaagtaacaccattatcagaagtgcctgatcaagtgttcagcgaaaaaatgatgggtgacggtatcgctatcaaaccttcacaaggtgaagttcgtgcaccattcaacggtaaagtacaaatgattttcccaacaaaacatgcaattggtcttgtatcagatagtggtttagaactattaatccacatcggtttagacactgttaaattaaacggagaaggctttactttacatgttgaggaaggtcaagaagttaaacaaggtgatttattaatcaactttgatttagactacatccgcaatcatgcaaagagtgatattacgcctattatcgtgacacaaggaaacattacaaaccttgattttaaacaaggtgaacatggcaacatttcatttggcgatcaattatttgaagctaaataa

SEQ ID NO: 405083 - DNA, 1056 bp, Staphylococcus aureus
ttgacaggcttttcagtgtatttaggacaacctttagatgaagcgtatattaagcgaatgattaaacaaggttaccaaatgatttttacatctgtacaaataccagaagaagatgacgagacaaaatatcattatttcacaaaactactcaatttattaaaacatgaacaagtgacttacctcatagatgctaatccatctattttaacaccatctttttatgaccatcttcgacaatatgatgcacaatttatgattcgtatcgatcatagtacatcaattgaggcaatcgaagcgataatggcacagggtttaaagtgctgtttgaatgcaagtattatttcccgggaattgttaacaagcttacatcaacaattgaatgattttacattactttcattttgtcataactattatccaagaccagatacgggattatctgttgacttggtcaataagaaaaatgaactcatttatcaatttaatccaaaggcacaaatatatggttttattgtagggagtgatttgcgaggtcctttgcataaaggcttgccaacaattgaagcaacgagacatagtcatcctgtcgttgcagctaaattattacaagaaactggtgtatctgaagtgttagttggagactcattgattgaaatgaggcaggcaaaacaacttatagatttttgcaagcataggcatttcacgttatgtattgaagaagtgtttgatacgacagtgacttaccttttcgatatgtgtcataaagtacgcccggataatccggaaaatgtcattcgttcggaaacgtcaagacaaatatgtccacattcgattcaaccacagtttacgacgcaacgacgcattggttcagtaaccgttgataatttgaataacggacgttatcaaggcgaaatgcaaattgtgagacaaacgcttagtgcacatgacaatgtgaatgttgttgcacaaattattaaagaagacttaccactgttaagttgtatcgagccgaatgatacatttgattttcaaaaaactagggagtgtaagaagtga

SEQ ID NO: 405084 - DNA, 897 bp, Staphylococcus aureus
atggaaaatagtacgaccgaagcgcgtaatgaagcgacgatgcatcttgatgaaatgactgtggaagaggctttaattacgatgaataaagaagatcagcaagtcccgttagcagttcgaaaggcaataccacaattgacaaaagtaattaaaaaaacaattgcacagtataaaaagggtggacgattgatttatatcggtgcaggtacaagtggaaggttgggtgtcttagatgcagcggagtgtgtacctacattcaatactgaccctcatgaaattataggtattattgctggtggacaacatgctatgacgatggctgtagaaggtgcggaagatcacaaaaaattagcggaagaagatttgaaaaatatagatttaacatcaaaagatgtcgttataggaattgccgcgagtggcaaaacgccatatgttataggcggtttaacatttgctaacacaatcggtgctacaacagtatctatttcatgcaatgaacatgcagttataagtgaaattgcgcagtatccagtagaagttaaagttggtccagaagtattaactggttcaacacgtttaaagtctggtacagcacaaaagttaattttaaatatgatttcaaccatcacaatggttggtgtcggaaaagtttacgataacctcatgattgatgttaaagcaaccaatcaaaaactgatcgaccgttcagtgcgtattattcaagaaatatgtgctatcacatatgatgaagcaatggcgttatatcaggtatctgagcatgatgtgaaagttgcgacagttatgggtatgtgtggcatttctaaggaagaagcaacaagacggttattaaacaatggtgacattgttaaacgagcaatcagagatagacaaccttag

SEQ ID NO: 405085 - DNA, 1455 bp, Staphylococcus aureus
atgaccaaagaacaacaacttgcagaacgaattattgctgcagtaggtggtatggataatatagatagtgtcatgaactgtatgacacgtgtgcgtattaaagtattagatgagaataaagtagatgaccaagaactaaggcatattgatggtgtcatgggtgttatacacgatgaacgcattcaagttgtggttggacctggtacagtcaataaagtggctaatcatatggcggaattaagtggtgttaaactaggtgacccaataccacaccatcacaatgatagtgaaaaaatggactataaatcatatgcagctgataaagcaaaggcgaataaggaagcgcataaagcaaaacaaaagaatggtaagttgaataaagtattgaaatcaattgccaatatctttataccgttgattcctgcatttattggagctggattaattggtggtattgcagcagtactgagtaacttaatggtggcaggctatatttcaggtgcttggattacgcaacttataacagtatttaatgtcattaaagacggtatgttagcatacttagctattttcactggtattaatgcggctaaagaatttggtgcgacaccaggacttggtggcgtgattggtggtacaacgttattaacgggtattgctggtaaaaatattttaatgaatgtcttcactggagaaccattgcaacctggacaaggtgggattattggcgttatttttgccgtttggattttaagtattgtcgaaaagagattacataaaattgtgccaaatgcgattgatattattgtaacgccgactattgcattgttgattgtaggactattaactatctttatctttatgccattagcaggttttgtttcagacagtttagtttcagtagttaacggaattattagtattggtggcgtatttagtggatttatcattggtgcaagcttcctaccgttagttatgttagggcttcatcatatttttacgccaattcatatagaaatgattaaccaatcaggtgctacttacttattgccaattgcagcgatggctggtgctggacaagtaggtgccgcattagcactttgggtaagatgtaaacgcaacacaacattacgtaatactttaaaaggtgcattgccagttggtttcctaggtatcggagaaccattaatctatggtgtgactttgccattaggtcgacctttcttaactgcttgtattggtggtggtattggtggcgctgtaataggtggaattggacatattggtgccaaagcaataggcccaagtggtgtgtcactattaccattaatctcagataatatgtatttaggttatattgcaggattacttgctgcgtatgctggtggattcgtttgtacatatttatttggaacgacaaaggcgatgcgacagacagatttgttgggtgattaa

SEQ ID NO: 405086 - DNA, 879 bp, Staphylococcus aureus
atgatgacaaatattttatatcgcattgataagcagttgagtgattttacgaagacagaaaagataatcgctgattacattttaaagaatccacataaaatcattgatatgactgtgaatgatttggcagatgttacgaatgttagtacagcatcaattgttagatttagtcggaaaatgacacatcaaggttttcaagagctaaagattgcgatatctcgatacttacccgaagatattgcaaccaatccacatttagaattgattgaaaatgaatctgtagaaactttgaaaaataaaatgattgctagagcaacgaatacgatgcgatttgtagctactaatattatggatgcgcaaattgatgcaatttgtgatgtgttgaaaaatgccaggacaatatttttatttggatttggcgcatcgagtttgactattggtgatctttttcaaaagttatctcgtattggcttaaatgtcaggttattacatgaaacgcatttacttgtgtcaacatttgcgacgcatgatgatagagattgcatgatttttgtgacgaatcaaggtagtcatagtgaattgcagtcaattgcacaggtggccacacattacagtattcccatcataactatatctagtacagctaataatccagtggctcaaattgcagactatgcattgatttatggcagaactgatgaaaatgaaatgcgtatggcggctacaacgtcactatttgcacagttattcacggtagatatattgtactatcgatttgtagcattaaattatcatgcgattctagattgtataacccaatcgaaaatggcacttgataattacaggaagcatcttgcgacgatagattttaaacattag

SEQ ID NO: 405087 - DNA, 282 bp, Staphylococcus aureus
atggtgttaattacctatcaaatcattttattttttattattagtctaagttactatttaactttaaatcattacatggcagtcactgtaggtaacttcacttcaatattcggcatgttcgcagccatactctttatgtactactacctactctataaaagtcccgaatacaatcaacgcaaacgatttaaacatttcattcatatcactaatttgataataattgcttttagcaccttcgtattagttcatttagcattaaaattattcttcagcatttaa

SEQ ID NO: 405088 - DNA, 2790 bp, Staphylococcus aureus
atggcataccaaagtgaatacgcattagaaaatgaaatgatgaatcaacttgaacaattgggttacgaaagagtaacgatacgtgataataagcaattgcttgataattttagaacgattttaaatgagcgtcatgcggacaaattagaaggcaatcccttaacagataaagaatttcaacgtctgttaacgatgattgatggaaaaagtattttcgagagtgcccgtattttacgtgataaattaccacttagacgtgatgatgagtctgagatttatttgtcgtttttagatacgaaaatttggtgtaaaaataagtttcaagtgacgaatcaagtatctgtcgaggatacatataaagcacgttatgatgtaacgatattaatcaacggactaccccttgtccaagttgaattgaaacgtcgaggtattgatattaatgaggcgtttaaccaagtaaaacgttaccgcaaacaaaattacacaggcttattccgctacatacaaatgtttatcattagtaatggtgttgaaacgcgatacttttctaataatgatagcgaactattgaagagtcacatgttttattggagtgataaacagaataaccgtatcaatacattgcaatcgtttgctgagtcatttatgagaccttgtcaattagctaagatgatatcgcgctatatgattattaatgaaacagatagaatactgatggcaatgcgtccgtatcaagtgtatgcggtagaagcacttattcaacaagcgactgagacagggaataatggatatgtatggcatacaactggaagtggtaagacgttgacttcttttaaagcgagtcagattttatcacagcaagatgacattaagaaagttatctttttggttgaccgtaaagacttggatagtcaaacagaagaggaatttaataaatttgctaagggtgctgtagacaaaacttttaatacctcgcaactggtacgccaactaaatgataaaagtttgccacttattgtaacgacgattcaaaaaatggctaaagcgattcaagggaatgcccctttattagaacagtataaaacgaataaagttgtatttattattgatgagtgtcatcgcagtcaatttggtgacatgcatcgtctagttaaacaacatttcaaaaatgcccaatactttggattcactggtacgccacgttttccagaaaatagtagtcaagatggtagaacaactgcagatattttcggtagatgcttacatacgtatttaattagagatgccattcatgatggtaatgtacttggtttctcagttgactatattaatacttttaaaaataaagctttaaaagcagaagataacagcatggttgaagcaattgatacggaagaagtatggttagcggataaacgtgtggaattagtaacacgacatatcatcaataatcatgataaatatacacgtaatcgtcaatattcaagtatatttacagtccaaagtattcacgcgcttattaaatattatgagacatttaagcgacttaacaaaaagttggaacaaccgttaacgatagctggtatatttacgtttaaacctaatgaagatgatcgtgatggtgaagtgccatatcattcacgtgaaaaattagagataatgattagtgattataataaaaagttcgagacgaatttttcaacagacacaactaatgagtattttaatcatatttcaaaaaacgttaaaaagggcgttaaagatagtaaaattgatatcttaatcgttgttaatatgttcttaactggttttgatagtaaagtactgaacactttatatgttgataagaatttaatgtatcatgatttaattcaagcgtattcacgtacaaatagggttgaaaaagaatcaaagccatttggtaaaattgtaaactatcgtgacttgaaaaaagagacagacgatgcactgagagtattctcacaaacaaatgatacggatacaattttaatgcgcagttatgaagagtataaaaaagaatttatggacgcttatcgtgagcttaaaatgattgtgccgacaccacacatggttgatgacattcaagatgaagaagagctaaagcgctttgttgaagcttatcgtttattagctaaaataatattacgtttaaaagcatttgacgagtttgagtttacaattgatgaaattggaatggatgaacaagagaatgaagactataaaagtaaatatttagctgtgtacgatcaagtaaaaagagcgacggctgagaaaaataaagtatccattttaaatgatattgatttcgaaatagaaatgatgcgtaatgatacgattaatgtgaattatattatgaatatattgagacaaattgatcttgaagacaaagcggaacaacgtcgtaaccaagaacaaattagacgcattttagatcatgcagatgatccgacattgaggttaaaacgagatctaattagagaattcatcgacaatgttgtaccttctttaaataaggatgatgatatcgatcaagaatatgttaatttcgaaagtattaaaaaagaagcggagttcaaaggatttgctggagagagatctatcgatgaacaagccctaaaaacaatttcaaatgactaccagtatagtggtgttgtaaacccacatcaccttaaaaaaatgattggtgatttgccattgaaagaaaagcgtaaagcaagaaaagccattgaatctttcgtggcagaaacaactgaaaaatacggtgtgtaa

SEQ ID NO: 405089 - DNA, 843 bp, Staphylococcus aureus
atggataatagaaatatgattaatcgtgtttttagtcaaaagatattacatcaaattgcaatcaaaaataaaagtgatgttgttgatgaggcatatgatttttatatacagggacctaaaaatatcaatgtaatacagaagatgaaatctttatataactatcttaaaaagtcttatcgtaacgaatatttttacaaaaacacaatacttaataaactccttctaggacgacattctattaatacaactactgcactttctgagatgcccatagggaaaagtattgctgattttatattgttaaacggcaaaggcgttgtctatgagattaaaacagaattagataagctggatagattagataatcaaattaatgattattatgaagtgtttaattatgtcgtagttattacaaatgacaaacatctgaataaagttatggctagatacaaagatacaacagttggaattttagtgttaacaactagaaatacactgagtgaagttcaaaaacctaaagaaaacaatagtctcttaaacacaaaagcgatgtacaactttttacgaaaagaagaaagaaaaagagttattgcacaaaatcatatggatgtgccaacttataatgatttcacagagtatgatgtgttatttgacgtgtttaaagaaataccaatgacgaaactgcataacaatatgatttctgagttgaaaaaaagaggaaacatgaaagaatacaaagatgaatttttagcagcgccggctgaaattaagttcttgttatatttcgcaaaaatgacaaagaaagataaaaataaactatatcattttcttaaggaggattaa

SEQ ID NO: 405090 - DNA, 924 bp, Staphylococcus aureus
atgtattatccttatttgcgtgggaaacaaaatgaactatttgcaattagagaattgttagagaaaggtttgattggtgattgtattcaacctataattgaaccaattaaatatacaaccacatttaaaaatactttgcaatactgtggtgaaaaagcattctctataaatttagtagtaaattcaaagttaactgaagaagagattagtaacgaaactgttgcacatttaactgaaataataacaaaaaacaaaagtgttattcaaaaagcttacttgggtccttctgatgaaggcaatgataggttgaaacagcaattttcaagtaatagtttagctattttaacaagtgtagatgattgggaaatgtttggagataaaaataaacttgaaatggtttttgtaccagatgatagacacattaaacgtaaattgcgtaatattccaaacaaaggcatcattatggatccttttaataaactaagtcgtaatgttgattatttagataatgatgacgagttttatagcgacgatcacctttattataaggaagatggatacgtagcattttcagactattctgttataggtggagaatatgtagacggtggcttttcgccattagctattgcgatacatattgtctattttgatgaggctaatgagctaagagttaagcattttgtctctgattctaataatgatagatcaaatccaggtaaaaagttttttgaggctgtagataaattagtaacatggtcaaaaaacttagatattaaaaatagatcttatgcgcttggacaatttgaagaattaaatgaaaataataagtatccaggattaggtttaattaaaaggttatctatcatgcatcacctagaaattatgaatagatacttggagtctcaaaatgaaaatatgtga

SEQ ID NO: 405091 - DNA, 1113 bp, Staphylococcus aureus
atgaaaatatgtgaaaaatgttttaataatactgaaatcgtagaaatcattgcaaatgataatagcaaatttgacaattgtgatattgataacaatcatcttggtgttaaaatatttgatacgactaaggacatagataaattagaacttattagagattatttaagaccagcattagaattatatgatattagtataaatttaccagatacttttagcccaaaagaaggtaaaaagattgaaatagcattaaaagacgactggagtatatttaatgttgaggaagctcaaataagttgtattttaaatgaactttttaaagatgatgaaaatttagatagacgagtgttggaagatttagtaggcgctaaaatcataaacgataaaaaatatacaaataaaaatctaattgtagcaaataatgactgggatggattttgtgagagcttgaagtataaaaatagatttcataataatatgatcaatttagagaatttagcgttctttctcgatatcactactaattactatagtattgaggaatttagagaaagatttgaaccattatatagatctagaatagttaagttcattacagagaaaagtgaactaatgtcaccaccaaagggatttgcaacggcaggaagattgaattctaaatggataagcgtattataccttagtacaaaagaacaggtcagtatagaagaagttaaacctaagcataatgacattatttatataggtaaggttaagttacaaaaaaacgtgacaaaagagaaattgaaaattgcgaatttaactaatttaactagtaatgcaatcaaagctggcgatgatggatttagaaagtattttgtaaattaccaaacattaaaaaagattcataaaggaataacaaatccaagcgatgaacaaggaatagattatttgccatttcaatatttagctgattatattcgaagccttaaatatgacgggataatgtatgagagcatattacaagatggtacttttaactttgtgttttttgatcaaagtttatttgaatgtgttaattatgaaagaaaaagagtaagtgacgttaaatatacattgactaagctaagttga

SEQ ID NO: 405092 - DNA, 1593 bp, Staphylococcus aureus
atgtcaaatttattagaagtcaacagtctgaatgtacaattcaattatgatgaaactacagttcaagcggtaaaaaacgtctctttcgaattacgaaaaaaacatatcctaggtattgttggtgaatcaggatcaggaaaaagtattaccgctaaatctattttagggctactaccagattatccagatcacacattaacaggagaaattatttttaatgggcaatcgttaaataatttatcaacttcagcgttacaacaaattcgaggtaaggatatttcaatgatttttcaagatccactctcttcgttgaatccaagattaacgattggcaaacaaattacagaagtaatatttcaacataaacgtgtatctaaatctgaagcaaagtcgatgacaatagacattttagaaaaagtaggtataaaacatgcaactcgacaatttgatgcttatccacatgaactttctggtggtatgcgtcaacgtgtcatgatagcaatggcattgattttaaagccacaaattttaatcgcagatgaaccaacaacggcattagatgccagtacacaaaatcaattactgcagttaatgaagtccctttatgagtacacagaaacatctattatttttatcactcacgatttaggcgctgtgtatcaattttgcgacgatgtgattgtaatgaaagatggaagtgtcgttgaaagtggcacggttgaaagtatttttaaatcgccacaacatacctatacaaaacgcttaatagatgcgattcctgatattcatcaaacgcgtccgccaagaccgttaaacaatgatattttattaaaattcgatcgcgtgagcgtggattacacatcaccgagtggcagcctataccgagcagttaatgatattaacttggctattagaaaaggcgaaacattaggcattgtcggtgaatcagggtcagggaaatcgacattagctaagacggtcgtcggtctaaaggaagtgtcagaaggctttatttggtataacgaattaccattaagtttatttaaagatgatgaattgaaatctttacgacaagagatacaaatgatttttcaagatccattcgcatctattaatccaagatttaaagtcattgatgtgattaaacgaccactaatcattcatgggaaagtcaaagataatgatgacattattaaaactgtcgtatcgttgttagaaaaggttggcctagatcaaactttcttatatcgctatccacacgaattatctggtgggcaacgtcagcgtgtaagtatcgcgagagcacttgctgttgaacctaaagtgattgtttgcgacgaggcagtgtccgctttagacgtttcaattcaaaaagatatcatcgagttattaaaacaattacagttagacttcggcatcacttatttattcatcacacatgacatgggtgttatcaatgaaatatgtgatcgcgttgcagttatgaaaaatggcgaaatcgttgaactgaataacacagaagatattatcaaacatccgcagtcagactatgcaaagcaacttatttcagaagtagcagttattgctaaataa

SEQ ID NO: 405093 - DNA, 1434 bp, Staphylococcus aureus
atgttgtgcctccctattcacaaatgtgtaaatttattctatacttttgtatatcatagtaatctactcaagattattttacaaggagtgattatcataattacttatttagaatcttttaagtcgttgtatcacaaggcattttacaagtttgtattatcggtattaagcttgccaatatttttatatgcagtgataaagtttttcttttctgctaagaggaaaaatttttacgctaataattctgaaatttcagaaattgaacaggcgttacatcaaaaatataaatatttatcgcagcaaaagtcatccacacaaatacataaagaagcattaaaaatattcaaggcacaaagttctaatacgagttcaaagaatattgaacaagcacatttttcaacatactttgaaaatgtattatttcataagttcatcatgatcaaagtgatattggccttgccgatgttcatcttattgactttttatttacagccattagttagatatatttttgaacgaattgtcatggctgtgattgtcatcattggtgttattgtcagtgtgtttaccattctgtatttttcaccgcttgatgcggcttatagcatactgggacaaaatgcaacaaaggcacagatacatcaattcaatgtattacatcatcttaacgaaccttattttattcaattgtgggataccatcaagggtgtttttacctttgacttaggtacgacttacaaagggaatgaggttgtgactaaagcagttggcgaaagaattccaattacaataattgtcgcagtattagcgctaatggtggcattaattattgcaataccaattggtattatcagtgcgatgaagcgaaatagttggcttgatatcacgttaatgataattgcattaattggtttatctattccaagtttctggcaagggctattattcattttagcgttctcattgaaattggatattttgccaccatcttatatgccagaacatccaatatcgttgattttacctgtacttgtcattggaacaagtattgctgcttctatcacgcgtatgacaaggtcttctgtacttgaagtaatgcgcagcgattatgttttaactgcttatgcaaaaggattatcgacgacacaagttgttattaaacatattttgaaaaatgccattattccaattgtaacgttagttggtcttctagtggcagagttactaggcggttcagcagtgacggaacaagtatttaacattaatggtatcgggcgttatatcgtccaaaaacaactaatacctgatattccagcagtcatgggtggggtcgtatatatatcaattgtaatatctttagcaaacttaattattgatatattttatgctttaatcgatccaaaattacgtagtgaaatcaacgaaaggaagtga

SEQ ID NO: 405094 - DNA, 1164 bp, Staphylococcus aureus
atggcacaacttaattcaaagatagcttccttaaaattattcgcaagttacgccatagcaacttatattttagttatattaacgagtgcattaaatctttttaaaggttatgtggccgatacgttctatattgctgaaacattgctaatcgttttaaccatcattttaattattattttaacaacggaacaaacatggaagcatcatgacctatggcgacgtatcgtcgaagtgttgttattgttgatgacattaacaggcaacgtatttacattattaatgtttgtaagtattagacgttaccaacgtacatcgcaaatacatagttataacgggtgggaatcgtttatacgaaaaactactagacatcgtattgcgattatcgggttacttattttagtctacatgctgacattatcaattgtgtcacaatttacatttgatacgacattggctactaaaaatcagttcaatgcactgttacatggaccgagtctagcctatccgtttggtactgatgatttcggtagagacttatttacacgcgtagttgtaggaacgaagctgacattttcaatttcaattatttcagtagttattgcagttatttttggtgtgttactaggcactatcgcaggttattttaatcatattgataatttaataatgcgaattttagatgtagtgtttgcaattccatcattattgttagcggtggcaattattgcatcatttggagcaagtattccaaatttaattattgctttaagtatcggtaatataccatcatttgcacggacaatgcgtgccagtgttttagaaattaaacgcatggaatatgtagatgcagcacgtatcactggtgaaaacacttggaatatcatatggcgttatattttaccgaatgcgattgcgcctatgattgtacgtttttcattaaatataggtgtggttgtattaacaacaagtagtttaagtttcctaggacttggtgttgcacctgatgtagctgaatggggcaacattttacgtaccggtagtaactacttggaaacgcacagtaatttagctattgtacctggtgtttgtattatgttcgtcgttttagcatttaattttataggtgatgcagtgcgtgatgcactagatccaagaattcattaa

SEQ ID NO: 405095 - DNA, 1776 bp, Staphylococcus aureus
gtgaagaaaatcattagtatcgcaattatagttttagcgttggtattaagtggttgtggtgtccctacgaaatcagaagtggctcaaaagtcatcgaaagttgaagtgaaaggcgagcgaccaacaatacatttcctaggacaagcaagttatgaaaatgatatgaatatcgttaaagatcaattggaaaatgcaggatttaacgtgaagatgaatatccaaccagattatggtagctatcgtacacaacgtcaagccggcaattatgatatccaaattgatgactggatgacagtgtttggtgacccgaactatgctatgacggcattatttagttctacaggatcaaatagtttattgaaagataaacatgtagaccagttgttaaataaagcttctactcaaaatgaagcagatgttaaacaaacatataagcaaattgaagatgaagttgtatttgataaagggtatatggcgcctttatatggatcaaaaaagaatttagtatatgacaataaagtgttagataaaaatagtgttggattgccaaattcacgtgcattaatatggcaacaatttgattacaacaatagtagagaacgagatacgcggccacttgtgatgacacaacaagatggtgaaattcctacattggatccaatacgttcaattgcgccgtcagtatattcaattaatatgaatatgtacacaaggttattattattagatgaaaatgatcatttaacaacgaaaggttcgttaagtcatgattatgctgtgaataaggacaataaagcattttatttcttgttaagagatgatgattattttgcgaaagtggtcaatggacaagcacgtaatactggagagcgtgtatcggctgaagatgttaagttttctttagatagagcacgtgataaaaagtctgtgcctaacaataatacttacaatatgcacaaacatataaatgacatcaagatattaaaagatgaggacatcgatcagttgcgtaaagagaaagacaaggacgataaatcaatctatgataagttgattaaagcttataacgtcaaatcgttaacgacagatggtcaaaaagtaaataataaagacggtatttatcaaattgttaaaattacgacagatcaatcgatgcctcgagaggtaaattacttaacacactcttcggcaggcattttatctaaaaaatttgttaatcaagtaaatcaagaatatccaaaaggatatggggatagcagtacaattcctgcaaattcagatgggaaaaatgcgctgtatgcaagtggcgcatacattatgacacagaaaaatgcatatcaagcaacgtttcaacgtaatccaggattcaacgaaacagaaaaaggtagttatggaccagctaaaattaaaaatattacattgaagtttaatggtgacccgaataatgcattgtcagaacttagaaatcattcaattgatatgttggcagatgtgaatcaaaaacattttgatttaattaagtcggataaaaatttaagcattattcgcaaaaatggacgcaagtcagtctttttaatgctaaatattaaaaaaggtatatttaagacgcatccaaacttgagacaagcagtagttaatgcgatagatcaggatcaatttattaagttttatcgtggcgataaatttaaaattgcatcaccgattacaccacttgtcgatactggtaacgagcaacgtcaagatttagaaaaagtagaaaaagccattaatcaataa

SEQ ID NO: 405096 - DNA, 2007 bp, Staphylococcus aureus
atggtcattaacttaaatgacaaacagacaaaaacatctaaagaagggttaatttccgtatcacatcctcttgcggctaaaattggtaaggatgtattagatcaaggtggcaacgccatggatgcagtgattgcaattcaactggcattgaatgtgttagaaccatttgcatcaggtattggtggtggcgggtatttgctatattatgagcaaagtactggcagtataactgcgtttgatgcacgtgagacagcacctgaacatgtagacaaacaattttatctagatgattcaggcgaatataaatcattttttgatatgactacacatggtaaaactgtcgctgtgccagcaattccaaagctgtttgattatattcacaagcgttatgctaaattgtcattggaagatttaattaatcctgcaattgaactagccattgaaggtcatgcagccaattgggctactgaaaaatattcgcgccagcaacacgcacgattgacaaagtatcatgaaacggcacaagtatttacgcatgaaaatcaatattggcgtgaaggtgattggattgtacaacccgaattaggtaagacatttcaaatattaagagaacaagggtttaatgcattttataaaggtgacattgcgaaacaattagtcaatgttgtcaaagcatgtggtgggacaatcactttagaggatctagccaaatatgacattcagattaaagcgccaatcagtgcaacatttaaagactatgacatttattcaatgggaccatctagttctggcggtatcacggtaattcaaatattgaagttattagaacatgtcgatttaccatctatgggtccaagatctgttgattacttgcatcatttgatacaagcgatgcatttagcatatagtgatcgtgcgcaatacttggcggatgataattttcatgaggtgcctgtacagtcattaattgatgatgattatttaaaagcacgcagtacgctcattgatagcaataaagcaaatattgatatagagcatggtgttgtgtctgattgcattagtcatacagatgttgaagaaaatcataccgaaacaactcatttttgtgtgattgataaggaaggtaatattgcttcatttacgacatcaattggtatgatttatggttcaggtatcacgattccaggctacggtgtgttattgaatacgacaatggatggctttgatgtagtagatggtggtattaacgaaattgcaccatataaacgaccactaagtaacatggctccaacgattgtgatgtatcacgggaagccaatattaacagtaggtgcacctggtgccataagtatcattgctagtgttgcgcaaacattaatcaatgtattagtgtttggcatggatattcagcaggctatagatgaacctagaatttatagtagccatcctaatcgcattgaatgggagcctcaattttcacaatctacaatattagcattgattgcacatggacatgcaatggaacataaaccagatgcttatattggagatgtacatggactacaggttgacccaacaacgtatgaagcttcgggtggaagtgatgatactagagaaggcaccgtaatgggtggcgaggtgttagtgattagaaaacagccattaccatatcggcaaatgtatgatagtgacggctttcgtctatatttcaatgatgtgcagttacctttattggcagatcaagtgcgatggatgcatgacaaatattgggttgatgaaagtgttgttagaatcattttccctgaagttagtgcacatattgaagatttaagaagttatgaaaacgcaggagaaaattatatagatattgcctggttagcacggaaatatgcttatcaagtaacattgaaggatgacggtttatacttaactgatgatacatatacttcagtgaaacggaacacaaatgcatactatagatatgatcgagatagtatcacaagatag

SEQ ID NO: 405097 - DNA, 774 bp, Staphylococcus aureus
atgaaagcacataaaattttctggttaaacttagcagcaattattattatttcaattgtagtcagtggcgatatgtttttggcaatgaagtgggaacaaattcatttgaaagatggtcttaaaaaagtactaagtacgtatcctattaaaaacttagaaacgctttatgaaattgatggtcacgataatccccattatgaaaataatgatcaagacacatggtatatagaatcctcttattcagttgttggatcagatgagcttttaaaagaagaccgtatgttgttaaaggtagataagaacacacataaaataactggtgaatatgacacaactacaaacgataaaaaaaatgctactgactcgacatacaaaagttatccagtaaaagtagttaataataaaatcgttttcacaaaagacgtaaaagatcccgcgctgaaacaaaaaatcgaaaacaatcaatttttgattcaaagtggtgatttaacaagcattttaaatagcaatgatttgaaagtcacacatgatcctaccactgattattataatttatctggtaagttgtcgaacgataatccaaacgttaaacaattaaaacgtagatataatattcctaaaaacgcatcaacaaaggtggaattaaagggaatgagtgatttaaaaggcaataatcatcaagatcagaaactttatttttatttttcaagtcctggaaaagaccaaatcatttataaagaaagccttacttataataaaataagtgaacattaa

SEQ ID NO: 405098 - DNA, 627 bp, Staphylococcus aureus
atggcaaaagtattatatattacagcacacccttttaatgaactggtatcaaattctatggcggctggtaaagcatttatcgaaacatatcaacaacaacatcctgatgatgaagtgaaacatattgatttatttgaaacttatattccagttattgacaaagatgtattaactggttggggaaaaatgagtaatggcgaaacgttaactgatgatgaacaaatgaaagtttcaagattgagtgacattttagaagaatttttaagtgcagataaatatgtatttgtaacgcctatgtggaacctttctttcccacctgtagttaaagcatatattgatgctatttcaattgcaggtaaaacttttaaatattctgctgaaggaccacaaggtttactaactgacaaaaaagtattacacattcaatcacgtggtggatattatactgaaggacctgctgctgattttgaaatgggtgaccgttatttaagaacaattatgacattcttaggtgtgccatcatatgaaacaatcattattgaaggacacaatgctgaacctcataagactgaagaaattaaagcaactagtattaataatgctgaaaaattagcaacaactttttaa

SEQ ID NO: 405099 - DNA, 579 bp, Staphylococcus aureus
atgacaaagcgaccaaaacgtattttggcaacaattatcatttttctttcactattatttacgattatttatatagatgacattcaaaaatggtttaaccaatataccgataaattgacacaaaatcataaaggacaaggacactcaaaatgggaagacttttttagagggagtcggattactgagacttttggtaaatatcaacattcaccatttgatggtaagcattatggcattgattttgcattgccaaaaggtacaccaattaaagcgccgacgaatggtaaagtaacacgtatctttaataatgaattgggcggcaaggtattacagattgccgaagacaatggagaatatcaccagtggtatctacacttagacaaatataatgtcaaagtaggtgatcgagtcaaagcaggtgatattattgcatattcaggcaatacaggtatacaaacgacaggcgcacatttacattttcaaagaatgaagggtggcgtaggtaatgcatatgcagaagatccaaaaccgtttatcgatcagttacctgatggggaacgtagcctatatgatttgtag

SEQ ID NO: 405100 - DNA, 1098 bp, Staphylococcus aureus
atggcagaactaaagttagagcatattaaaaagacgtatgataacaacaatactgtagtgaaagattttaatctacatattactgacaaagaattcattgtatttgttggaccatcgggatgtggtaaatcaacaacattacgaatggttgctggactagagtctatcacatctggagatttttatattgatggggaacgcatgaacgatgttgaaccaaagaatagagatattgcgatggtatttcaaaactatgcattatatccacatatgactgtttttgaaaatatggcatttgggctaaagctacgtaaagtaaataaaaaagagattgaacaaaaagttaatgaagcagctgaaatattaggattaactgagtatcttggtcgtaaaccaaaagcgttatctggcggacagcgtcaacgtgttgctttgggcagagctattgttagggatgcgaaagtctttttaatggatgaaccattatcgaatcttgatgcgaagcttcgagtacaaatgcgcacagaaatattgaaattacataagcgacttaatactacgacaatttatgttacacatgatcaaactgaagcattgacgatggctagtcgaattgttgttttgaaagatggcgacattatgcaagtcggcacacctagagaaatatatgatgcccctaattgcatatttgtggcgcaatttatcggctcaccagcaatgaatatgttgaatgctacagttgaaatggacggattgaaggtaggaacacaccattttaaattacataataaaaaatttgaaaagttaaaagctgctggctacttagacaaggaaattattttaggtattcgagctgaagacattcatgaagaaccaatatttattcaaacttctccagagacacaatttgaatctgaagtagttgtatccgaactgttaggttcagaaattatggtacatagcacattccaaggaatggaattgatttctaaattagattcaagaactcaagtgatggcgaacgacaagattacactagcatttgatatgaataagtgtcacttttttgatgaaaaaacaggaaatcgtatcgtctaa

SEQ ID NO: 405101 - DNA, 1272 bp, Staphylococcus aureus
atgtctaaaattttaaaatgtatcacgttagccgtggtaatgttattaatcgtaactgcatgtggccctaatcgttcgaaagaagatattgataaagcattgaataaagataattctaaagacaagcctaaccaacttacgatgtgggtggatggcgacaagcaaatggcgttttataaaaaaattacggatcaatatactaaaaaaactggcatcaaagtaaagcttgtaaatattggtcaaaatgatcaactagaaaatatttcgctagacgctcctgcaggaaaaggtccagatatctttttcttagcacatgataatactggaagtgcctatctacaaggcttagctgctgaaatcaaattatcaaaagatgagttgaaaggtttcaataagcaagcacttaaagcgatgaattatgacaataagcaactagcattgccagctatcgttgaaacaaccgcacttttttataataaaaaattagtgaaaaatgcaccgcaaacgttagaagaagttgaagctaatgctgccaaactaactgatagtaaaaagaaacaatacggtatgttatttgatgctaaaaatttctattttaattatccgtttttattcggcaatgatgattatattttcaagaaaaatggcagtgaatatgatattcatcagctaggactaaattcaaaacatgtcgtcaagaatgctgaacgattacaaaaatggtacgacaaagggtatcttcctaaggcagcaacacatgatgtcatgattggtctttttaaagaaggaaaagtaggacaatttgtcactggaccgtggaacattaatgaatatcaagaaacgtttggtaaagatttaggagtaacaacattacctacagatggtggcaaacctatgaaaccatttctaggtgtacgtggttggtatttatctgaatatagtaaacataagtattgggctaaagatttaatgctgtatatcactagtaaagatacattacaaaaatatacagatgaaatgagcgaaattactggacgtgttgacgtgaaatcatctaatccaaatttaaaagtgtttgaaaagcaagcacgtcatgctgaaccgatgcctaatattcctgaaatgcgacaagtttgggaaccgatgggcaatgcaagcatatttatttcaaatggtaagaatcctaaacaagcgttagatgaggcgacgaatgatataacgcaaaatattaagattcttcatccatcacaaaatgataagaaaggagattag

SEQ ID NO: 405102 - DNA, 1269 bp, Staphylococcus aureus
atgacgaaacgtaaccctaaattagcggcattattatctgttatacctggtttgggacagttttataataaaagacccattaaagggacgatattttttatctttttcatcagttttatttctgttttttatagctttttaaatattggtttttggggattgttcacattagggacagtacctaagttagacgattctcgtgtcttacttgcacaaggtattatttctatcttactcgttgctttcgcaatcatgctatatatcattaatattttagatgcatatcgtaatgctgaacgatttaatcgcaatgaggaaataaaggatccgaaggcgcgtatggtggcaacatgggacaagacgttcccatacttactaatctcaccaggtacattcttattgatatttgtagttgtatttccattaatatttatgtttggagtagcatttacaaattacaatttatacaacgcgcctccgagacacacattagaatgggttggtttagataactttaaaacgttattcacaattggcgtttggcgtaaaacatttttcagtgttattacttggacattagtatggacgcttgttgcaacgacacttcaaattgcattagggctgtttttggcaattattgtaaatcaccctgtcgtcaaaggtaagaaatttatccgtactgtgttaatcctaccttgggctgtaccatcatttgtgacaattttaatatttgtagcgttatttaatgatgaatttggtgcgataaataatgatattttgcaacctttattaggtgtagcaccagcatggttaagtgatccgttttgggcaaaagtggcattaatcggcattcaagtatggcttggattcccatttgtctttgcactgttcactggagtactgcaaagtatttcatcagattggtacgaagcagcagatatggatggtgcgtctagttggcaaaagtttagaaacatcacattcccgcatgtcatttacgccacagcgccattgttaattatgcaatatgcaggtaatttcaataattttaatcttatttatctatttaataaaggcggtccaccagtgtcagggcagaatgctggtagtacagatatcttgatatcttgggtgtataatctgacatttgagtttaacaacttcaacatgggtgcagttgtgtcattaattattggatttattgttgctattgtcgcatttattcaattcagacgtacaagtacgtttaaagatgagggaggtttataa

SEQ ID NO: 405103 - DNA, 840 bp, Staphylococcus aureus
atgacaaagaagaaaaacatattaaaagcaatcggtatttacagttttatagcgatgatgtttgtcatcattttatatccactactgtggacatttggcatttcccttaatccaggtacgaacttgtatggtgccaaaatgataccagacaatgcaacatttaaaaattatgcattcttactattcgatgacagtagtcaatacctgacttggtataaaaatacgcttatcgtagcatctgcaaatgcactgtttagtgtgatatttgtcacgttaacagcatatgctttttctagatatcgctttgttggtcgtaaatacgggctgattacatttttgattttacaaatgttccctgtattaatggcaatggtcgcaatctatattttgctaaatacaattggattattagattctttatttggactaacactggtatatattggtggatcaataccgatgaatgcctttttagtgaaaggttacttcgatacgattccaaaagaacttgatgaatctgccaaaattgatggtgcagggcatatgcgtattttcttacaaattatgcttccattagctaagccgattttagcagttgttgctttgttcaattttatggggccatttatggactttatattacctaaaatactattaagaagtcctgaaaaattcacattagcagttggattgttcaactttattaatgataagtatgcaaataatttcacagtgtttgcagcaggggcaattatgattgcagtacctatagcaatcgtattcttgttcttgcaacgctatttagtatcaggtttaacaacaggtgcgacaaaaggttag

SEQ ID NO: 405104 - DNA, 1077 bp, Staphylococcus aureus
atgacgattaaagttggaatcattgggtgtggtggtattgcgaatggcaagcacatgccaagtttacaaaaagttgaaaatgttgaaatgatcgcattttgtgacgtagacatttcgaaagcagcgagtgcggcagaagcatacggaactgacaatgcaaaggtttatgatgattacaaagcattgttaaaagatgacacgattgatgttatccatgtttgtacgccaaatgactcgcattgtgaaattactgtagcagggttgcatgctggtaaacatgtgatgtgtgaaaaaccaatggctaaaacgacagcagaagctcaaaaaatgatagatacagctaaatcaacaggtaaaaaattaacaataggttatcaaaatcgtttccgagcagatagtcaatttttacatcaagcagcgcaacgtggcgacttaggagacatttacttcggaaaggcacatgccattcgtcgtcgagcagtaccaacatggggtgtctttctagacgaagaagctcaaggtggaggaccattaatcgatatcggtacacacgctttagatttaacgttatggatgatggataattatgaaccagaatcagtgatgggttcaacattccataaattaaataaacagcatcatgcggcaaacgcttggggttcatggaatccagatgaatttacagttgaagattctgcgtttggatttattaaaatgaagaatggagcgacgatcattttagaatccgcttgggcgattaattctttagaagtggatgaggcaaaatgttcattatcaggaactaaagcaggtgctgatatgaaagatggtctacgtattcatggtgaagacatgggtacactttataccaaacacgttgaattggaaaacaaaggcgtcgacttttatgaaggtaatgaagtggatgaagctgaagaagaagcaaaagcttggattgatgcagttgtaaatgatactgaaccagttgtgaaaccggaacaagcaatggtagttacaaaaattcttgaagcgatttatcagtctgcaaaatcaggcaaagcaatttactttgaataa

SEQ ID NO: 405105 - DNA, 1041 bp, Staphylococcus aureus
atgacaaaattaaaagttggtgtgataggtgttggtggtattgcacaagaccgtcatattccagcattgctgaaactcaaagacacagtctcattagttgcagtacaagatattaatacagtgcagatgattgatgttgcgaagcgctttaatatacctcatgcagttgagacacctagcgagctgtttaaacttgttgatgcggtggtcatttgtacacctaataaattccatgctgatctttctatagaagcattgaaccatggtgtccatgtattgtgtgaaaagccaatggcgatgacgacggaagagtgtgatcgcatgattgaagcggctaataaaaatcacaaattattaactgtcgcatatcattatcgtcacacagatgtggcaattactgctaaaaaagcaattgaatcaggtgtggttggtaaacctttagtagcacgtgtacaagcgatgcgtaggcgtaaagtgcctggctggggtgtttttaccaataaagcgttgcaaggtggcggtagtttaatcgattatggttgccacttgttagacttatctttgtggctactaggtaaagatatggtgccgcatgaagtgctaggaaaaacatataatcaattgagcaaacaaccgaatcaaattaatgattggggaacatttgatcatactaaatttgatgtcgatgatcatgttactagttatatgacatttgccaatcgagcaagcatgcagtttgaatgttcgtggtctgcaaatatcaaagaagataaggttcacgttagtttatcaggagaagatggcggtatcaatttatttccatttgaaatatatgagccccgctttggaactatttttgaaagcaaagctaatgttgagcataacgaagacattgctggtgagagacaggcgcgtaactttgtcaatgcgtgtttagggatagaagagattgtggtgaaaccggaagaagcacgcaatgtaaatgcccttatagaagcgatttatcgtagcgatcttgataacaagagcatacaactttaa

SEQ ID NO: 405106 - DNA, 969 bp, Staphylococcus aureus
atgaaaataggtgtattttcagtattattttacgataaaaattttgaagatatgttagattatgtctcagaatctggattggatatgattgaagttggaacaggtggtaacccaggagataaattttgtaagttagatgagttgttagaaaatgaagacaagcgccaagcatttatgaagtcaatcacagacagaggcttacaaataagtggtttcagttgtcataacaatccaatttctccagatccgatagaagcgaaagaagccgatgaaacgttacgtaaaacaatccgtttagcaaatctattagacgtgccagttgttaatacattttctggcattgcaggatcagatgataccgctaaaaagcctaattggcctgttacaccttggccaacagcctactctgaaatttatgattatcagtggaatgaaaagttgataccatattggcaagatttagctgagtttgcaaaagagcaagatgtaaaaattgccatagagttgcatgcaggatttttagtgcatacaccatatacaatgttgaagttacgtgaggctacaaatgaatatatcggtgctaacttagatcctagtcatctatggtggcaaggtattgacccaattgctgcgattcgcatattaggccaagcaaatgcaattcatcacttccatgctaaagatacgtatattaatcaagaaaatgtaaatatgtatggtctaactgatatgcaaccatatggtaacgttgcgacaagagcatggacattccgtacagttggttatggacatagtccatatgtatgggcagatatcataagtcaacttattattaatggatatgattatgtattaagtattgaacatgaagatcctattatgtcagtagaagaaggtttccaaaaagcttgtcaaactttgaaatctgttaatatttacgacaagccagcagacatgtggtgggcataa

SEQ ID NO: 405107 - DNA, 495 bp, Staphylococcus aureus
atgattctatctatattacttatctttttctgtatcagacttgtcagcttaaagatatctattaatcactcaaaacaattaaaagcagacggtgcagttgaatatggcgttaaaaattcgaagtttttagcaataacacacgttttaatttatgtattggctggtgtagaggcatttattaataaagatacatttagctttgcaaatggtattggcttagttatattaatctttgcttatatcatgttatttatggttattaaaactttaggtggtatttggacattaaaattattcattttacctaaccatcctattattaaatctggattatataaaattacaaaacacccaaattacttcttaaacatcattcctgaattaatcggtgtattattattaacacacgcaacatatacaactattttattagtaccgtatgcgtatttcttatatgtacgtattaaacaagaagagaaattaatgaatatttaa

SEQ ID NO: 405108 - DNA, 1380 bp, Staphylococcus aureus
atgaacttttttgatatccataagattccgaacaaaggcattccattatcggtacaacgtaaattatggcttagaaacttcatgcaagctttcttcgtagtgttctttgtttatatggctatgtatttaattcgaaacaactttaaggcggcacaaccgtttttaaaagaggaaattggattatctacattagaacttggttatatcggattagcatttagtatcacgtacggtttaggaaaaacattacttggatattttgtcgatggacgtaacacaaaacgtattatctcgttcttacttatcttatctgcgattacagttttaattatgggatttgttttaagttactttggttctgtaatgggattattaattgtactttggggacttaacggggtgttccaatcagttggtggacctgcaagttattcaacgatttcaagatgggcgccaagaacgaaacgtggccgatacttaggattctggaatacatcacataatatcggtggtgccatagcaggtggtgttgcactttggggtgctaatgtattcttccatggaaatgttatagggatgttcattttcccatcggtgattgcattacttattggtatcgcaacattatttatcggaaaagatgatccggaagaattaggatggaatcgtgctgaagaaatttgggaagagccggtcgataaagaaaatattgattctcaaggtatgacgaaatgggagatctttaaaaaatatatcctgggaaatcctgttatatggattctatgtgtttcaaacgtctttgtatacattgtacgaatcggtattgataactgggcaccgttatatgtgtcagagcatttacactttagtaaaggcgatgcagttaatacgatattctactttgaaattggtgcattagttgcaagtttattatggggctacgtatcagacttattaaaaggtcgtcgtgcaattgtagctattggctgtatgtttatgattacatttgttgtcttattctacacaaatgctacaagtgtcatgatggttaacatttcattgtttgcattaggtgcgttaatctttggtccgcaattattaattggtgtatcattgactggttttgttcctaaaaatgccatcagtgtagcaaacggaatgacaggttcattcgcgtatctattcggtgactcaatggcgaaagttggtttggcggctattgctgatccaacacgtaacggtttaaacatctttggatatacattaagtggatggacagatgttttcatcgtcttctatgttgcattattcctaggcatgattctattaggaatcgttgctttctatgaagaaaagaaaattagaagtttaaaaatttaa

SEQ ID NO: 405109 - DNA, 759 bp, Staphylococcus aureus
atgtttaaggtagttatttgtgatgatgaacgaattattcgagaaggattaaagcaaatcattccttggggagactatcatttcaatacaatatacactgctaaagatggtgttgaagcattatcactaattcaacaacatcagccagaattagtaattactgatattcgtatgccacgtaaaaatggcgtcgatttactcaatgatattgcgcatctagattgtaatgtcatcatattatcgagttacgatgactttgaatatatgaaagccggcattcaacatcatgttcttgattatttattaaaaccagtagaccatgcacaattagaagttattttaggaagacttgtccgtaccttattagagcaacaatcacagaacggccgtagcttagcatcttgtcatgatgccttccaaccactattaaaagtagaatacgatgattattatgtaaaccagattgtggatcaaattaagcaatcttatcaaacgaaagtgactgtttcagatttaattcaacatatcgatgttagtgaatcgtatgcgatgcgaacatttaaagatcatgttggtattacaattgtcgattatttaaatcgctatcgtattttacaatctctgcaattgttagatcgacattacaaacactatgaaattgcagacaaagtaggcttttcagagtataaaatgtttagctatcattttaaaaaatatttacaaatgtcgccaagtgattattgtaagcaagcaaaatag

SEQ ID NO: 405110 - DNA, 1557 bp, Staphylococcus aureus
atgacggcatacaaaccttatagacatcaattaagacgatcgttatttgcgtctactatttttccagtatttttagtcattattattggactagtaagcttctatgccatctatatttggattgagcatcgtacgattcatcaacatgttgatgaaagtcagtcatctttacatcatactgaaaagcagattcagacatttattacacagcataataattcgtttcaagagctcgatttaacaaatcatcatgatgtgaccgctacaaaacgtgaattattaaaattaatacaccaacagcccgcaacactttattatgaattatctggaccaaatcagtttataaccaataattatgaacatttaaacactaaaaatatgtatttattttcaacgcatcagcttaaattcaaaaatagtacatatatgcttaaaatttatatggctaacaccccacgtttaagtgaaattaagaaagataaccgacaattcgcacttatcgttgatcaatatgacaatattttatacgccaacgatgaccgttttactataggtgaaaagtatagaccacaacaattcggatttatgaatgaatctgtaaaattaaaccatgctgaccatcgtctcattatttataaagatatacatgaaaacattgaagatggtatcacgttgttaattgttatggccgtagttcttgttttactagtaatatttggtttcattagcgcagataatatggctaaacgacaaacaaaagatatcgaaacgattattcaaaaaatttactatgccaaaaatcgtcatctaggtacatatacgcctttaaaaaacaacagtgaactagaagaaattaataattatatttacgatttatttgaatcaaatgagcaactgatccattctatcgagcatacagaacgtcgcttgcgtgatattcagttaaaggaaatagaacgccaattccagcctcatttcctattcaatacgatgcaaacaatacaatatttaattacgttatctccgaaattagcacaaactgtggtccaacaattatcgcaaatgttacgttactcattacgtacaaactcacatacagtggaattaaacgaagagttgaactacattgaacagtatgttgcaatacaaaacatccgttttgatgacatgattaagctccatattgaaagttctgaagaagcgcgtcaccagacaattggtaaaatgatgcttcagccactcatagaaaatgctattaaacatggtagagatactgagtcattggacattactatacgcctgacattggcacgtcagaatttacatgttttagtttgcgacaatggtatcgggatgtcgtcatctcgcctgcaatatgtacgccaatctcttaataatgatgtatttgatactaagcatttgggattaaatcatttacacaataaagcaatgattcaatatggttcacatgcacgactccatattttttcaaagcgtaatcaaggtacgttaatttgttataaaataccactttcaagggggaatgtagatgtttaa

SEQ ID NO: 405111 - DNA, 969 bp, Staphylococcus aureus
atgaaatcaaaaatttatatcttgctattatttctcatttttttatcagcatgcgctaatacgcgtcactctgaatccgataaaaatgtattaacagtttattctccgtatcaatcaaacttgattcgtccaattttaaatgaatttgaaaaacaagagcatgtcaaaattgaaattaaacacggatctactcaagtactgctttcaaacttgcataacgaagatttttcggagcgtggtgatgtctttatgggtggtgtgttgtcagaaacaattgatcatccagaagattttgttccctatcaagatacatctgtaacacagcaattagaggattatcgctcgaacaataaatatgttactagttttctattaatgccaacagttatagtagtgaattcagatttacaaggagatattaagattcgaggttatcaagatttattacaacctatacttaaaggtaaaattgcgtactcaaatccaaatacaacaacgacaggctatcaacatatgcgtgctatttatagcatgcatcatcgagtaagtgatgtgcatcaattccaaaaccatgcgatgcaactgtcaaagacgtctaaagtcattgaagatgttgcaaaaggtaaatattacgcaggtctaagctacgaacaagatgcacgcacatggaaaaacaaaggttatcctgtatcaatcgtttatccaattgaaggaacaatgttaaatgttgatggtattgctttagttaaaaatgcacaccctcatcctaagcgtaaaaagttagtgcaatatttaacaagccgctcagtacaacaacgattagttgcagagttcgatgccaagtcaattcgaaaggatgttagtgaacaaagcgatcagtctatcgaaaatcttaagaacatacctttaataccgaaatctaaattaccggatattccacatcataaatttttggagatgattcaatga

SEQ ID NO: 405112 - DNA, 2250 bp, Staphylococcus aureus
atgttagaaacaaataaaaatcatgcaacagcttggcaaggatttaaaaatggaagatggaacagacacgtagatgtaagagagtttatccaattaaactacactctttatgaaggtaatgattcatttttagcaggaccaacagaagcaacttctaaactttgggaacaagtaatgcagttatcgaaagaagaacgtgaacgtggcggcatgtgggatatggacacgaaagtagcttcaacaatcacatctcatgatgctggttatttagacaaagatttagaaacaattgtaggtgtacaaactgaaaagccattcaaacgttcaatgcaaccattcggtggtattcgtatggcgaaagcagcttgtgaagcttacggttacgaattagacgaagaaactgaaaaaatctttacagattatcgtaaaacacataaccaaggtgtattcgatgcatattctagagaaatgttgaactgccgtaaagcaggtgtaatcactggtttacctgatgcatacggacgtggacgtattatcggtgactatcgtcgtgtagctttatatggtgtagatttcttaatggaagaaaaaatgcacgacttcaacacgatgtctacagaaatgtcagaagatgtaattcgtttacgtgaagaattatcagaacaatatcgtgcattaaaagaattaaaagaacttggacaaaaatatggtttcgatttaagccgtccagcagaaaacttcaaagaagcagttcaatggttatacttagcataccttgctgcaattaaagaacaaaacggtgcagcaatgagtttaggtcgtacatcaacattcttagatatctatgctgaacgtgaccttaaagcaggcgttattactgaaagcgaagttcaagaaattattgaccacttcatcatgaaattacgtattgttaaatttgctcgtacacctgattacaatgaattattctctggagacccaacttgggtaactgaatctatcggtggtgtaggtattgacggacgtccacttgttacgaaaaactcattccgtttcttacactcattagataacttaggtccagctccagaaccaaacttaacagtattatggtcagtacgtttacctgacaacttcaaaacatactgtgcaaaaatgagtattaaaacaagttctatccaatatgaaaatgatgacattatgcgtgaaagctatggcgatgactatggtatcgcatgttgtgtatcagcgatgacaattggtaaacaaatgcaattcttcggtgcacgtgcgaacttagctaaaacattactttacgctatcaatggtggtaaagatgaaaaatctggtgcacaagttggtccaaacttcgaaggtattaacagcgaagtattagaatatgacgaagtattcaagaaatttgatcaaatgatggattggctagcaggtgtttacattaactcattaaatgttattcactacatgcacgataaatacagctatgaacgtattgaaatggcattacatgatacagaaattgtacgtacaatggcaacaggtatcgctggtttatcagtagcagctgactcattatctgcaattaaatatgcacaagttaaaccaattcgtaacgaagaaggtcttgtagtagactttgaaatcgaaggcaacttccctaaatacggtaacaatgacgaccgtgtagatgatattgcagttgatttagtagaacgcttcatgactaaattacgtagtcataaaacatatcgtgattcagaacatacaatgagtgtattaacaattacttcaaacgttgtatacggtaagaaaactggtaacacaccagacggacgtaaagctggcgaaccatttgctccaggtgcaaacccaatgcatggccgtgaccaaaaaggtgcattatcttcattaagttctgtagctaagatcccttacgattgctgtaaagatggtatttcaaatacattcagtatcgtaccaaaatcattaggtaaagaaccagaagatcaaaaccgtaacttaactagtatgttagatggttacgcaatgcaatgtggtcaccacttaaatattaacgtatttaaccgtgaaacattaatagatgcaatggaacatccagaagaatatccacagttaacaatccgtgtatctggttacgctgttaacttcattaaattaacacgtgaacaacaattagatgtaatttctcgtacattccatgaaagtatgtaa

SEQ ID NO: 405113 - DNA, 756 bp, Staphylococcus aureus
atgcttaagggacacttacattctgtcgaaagtttaggtactgtcgatggaccgggattaagatatatattatttacacaaggatgcttacttagatgcttgtattgccacaatccagatacttggaaaattagtgagccatcaagagaagtcacagttgatgaaatggtgaatgaaatattaccatacaaaccatactttgatgcatcgggtggcggtgtaacagtcagtggtggcgaaccattgttacaaatgccattcttagaaaaattatttgcagaattaaaagaaaatggtgtgcacacttgcttagacacatcggctggatgtgctaatgatacaaaagcatttcaaaggcattttgaagaattacaaaaacatacagacttgatattattagatataaaacatattgataatgacaaacatattagattgacaggaaagcctaatacacacatccttaacttcgcgcgcaaactgtcagatatgaaacaacctgtatggattcgacatgtccttgtgcctggttattctgatgataaagacgatttaattaaactaggggaatttattaattctcttgataacgtcgaaaagtttgaaattctgccatatcatcagttaggtgttcataagtggaaaacattgggcattgcatatgaattagaagatgtcgaagcgcccgatgatgaagctgttaaagcagcctaccgttatgttaacttcaaagggaaaattcccgttgaattataa

SEQ ID NO: 405114 - DNA, 1764 bp, Staphylococcus aureus
atgaagagaattagtaaagatatatgggcagtatttaaattactgtatcaaaataaagggcgttttagcattaatgccttactattgcagttaatcatgatttttattagtagtacatacttaattttactatttaatatgatgttaaaagtagctgggcaaagccaacttacgattaacaattggacggaaatcgttagtcatcccgccagtgtgatacttcttattatattcatattaagtgttgcctttctgatttatgtagagttttcattgttagtttatatggtttatgccggctttgatcgacagattattacatttaaatccatttttaaaaatgcctttgtaaatgtgcgtaaactcataggtgtaccagttattttctttgtcatttatttaatgttaatgatacccattgccaacctaggactaagttcagtattaacaaaaaatatttacatacctaaatttttaacggaagaacttatgaaaacgacgaaaggtataatcatttacggtacctttatgattgctgtatttatattaaattttaaattaatatttactctaccgttaacgattttaaaccgccagtcgttatttaaaaatatgagactaagttggcaaattacgaagcgaaataagtttcggcttgttatagaaatagttatattagaactcatcattggtgcgattttaacattaattatttcaggagcaacatatcttgctatttgtgtagatgaagaaggagataagtttttagtctcatcaattttatttgttgtattgaaaagcgcattgttcttctattatttatttacgaaattatcattaatcagtgtgttagtactgcacttaaaacaagagaatgtattagaccaaccgggcttagaatttaaatatccaaaaccgaaacggaagtctaggttctttataatttcaatggtgcttgcagtgacatgttttatcggttataacatgtacttactttacaataatactatcaatacaaatatctccattattggccatcgtggtttcgaagataaaggcgttgaaaattctattccgtcattgaaagctgctgcaaaagcgaatgtcgaatacgttgagttagatacaattatgacgaaagataaacaatttgttgttagtcatgataacaatttgaaacgtttaacaggtgttaataaaaatatttctgaatctaatttcaaagatatcgtcggtttgaaaatgcgtcaaaatggacatgaagcaaaatttgtatccttagacgaatttattgaaacggctaaacaatcaaatgtgaagctactagtagagttaaagccacatggtaaagaaccagcagattatacacaacgtgttattgatattttgaaaaagcatggtgttgaacatcaatatcgtgtgatgtctttggattatgatgtgatgactaagttgaaaaaagaagcgccatatctcaagtgtggttatatcattccgttgcagtttggtcattttaaagaaacatcattagatttctttgtcatcgaagatttttcttattcgccaagacttgttaatcaagcgcacttggaaaataaagaagtctatacttggactattaacggcgaagaagatttaacgaaatacttacaaaccaatgttgatggtattatcacagatgacccagcattagctgatcagattaaagaagaaaagaaagacgaaacatacttcgatcgttctataagaattttgtttgaataa

SEQ ID NO: 405115 - DNA, 345 bp, Staphylococcus aureus
atgacaacacaaatgaaaatcaaaacatatttagttgctggtattaaagcggcgctccttgatacgactggtattaaattagcaagcaaatctgaaactacatcacatacgtatcaacatcaagcgcttgtagatcaattacatgaattaatagcaaacactgacttaaataaattatcgtacctaaatttagatgcgtttcaaaaacgcgatattttagctgcgcactatattgcaaaatccgctatacgcactaaaaatttggatcaaatgactaaagcgaaacaaagattagaaagtatttacaattcaatttctaaccctttgcattcacaaaacaattaa

SEQ ID NO: 405116 - DNA, 1911 bp, Staphylococcus aureus
atgaaaaagcaaataatttcgctaggcgcattagcagttgcatctagcttatttacatgggataacaaagcagatgcgatagtaacaaaggattatagtgggaaatcacaagttaatgctgggagtaaaaatgggacattaatagatagcagatatttaaattcagctctatattatttggaagactatataatttatgctataggattaactaataaatatgaatatggagataatatttataaagaagctaaagataggttgttggaaaaggtattaagggaagatcaatatcttttggagagaaagaaatctcaatatgaagattataaacaatggtatgcaaattataaaaaagaaaatcctcgtacagatttaaaaatggctaattttcataaatataatttagaagaactttcgatgaaagaatacaatgaactacaggatgcattaaagagagcactggatgattttcacagagaagttaaagatattaaggataagaattcagacttgaaaacttttaatgcagcagaagaagataaagcaactaaggaagtatacgatctcgtatctgaaattgatacattagttgtatcatattatggtgataaggattatggggagcacgcgaaagagttacgagcaaaactggacttaatccttggagatacagacaatccacataaaattacaaatgaacgtattaaaaaagaaatgattgatgacttaaattcaattattgatgatttctttatggaaactaaacaaaatagaccgaaatctataacgaaatataatcctacaacacataactataaaacaaatagtgataataaacctaattttgataaattagttgaagaaacgaaaaaagcagttaaagaagcagatgattcttggaaaaagaaaactgtcaaaaaatacggagaaactgaaacaaaatcgccagtagtaaaagaagagaagaaagttgaagaacctcaagcacctaaagttgataaccaacaagaggttaaaactacggctggtaaagctgaagaaacaacacaaccagttgcacaaccattagttaaaattccacagggcacaattacaggtgaaattgtaaaaggtccggaatatccaacgatggaaaataaaacggtacaaggtgaaatcgttcaaggtcccgattttctaacaatggaacaaagcggcccatcattaagcaataattatacaaacccaccgttaacgaaccctattttagaaggtcttgaaggtagctcatctaaacttgaaataaaaccacaaggtactgaatcaacgttaaaaggtactcaaggagaatcaagtgatattgaagttaaacctcaagcaactgaaacaacagaagcttctcaatatggtccgagaccgcaatttaacaaaacacctaaatatgttaaatatagagatgctggtacaggtatccgtgaatacaacgatggaacatttggatatgaagcgagaccaagattcaataagccatcagaaacaaatgcatataacgtaacaacacatgcaaatggtcaagtatcatacggagctcgtccgacatacaagaagccaagcgaaacgaatgcatacaatgtaacaacacatgcaaacggccaagtatcatacggagctcgtccgacacaaaacaagccaagcaaaacaaacgcatataacgtaacaacacatggaaacggccaagtatcatatggcgctcgcccaacacaaaacaagccaagcaaaacaaatgcatacaacgtaacaacacatgcaaacggtcaagtgtcatacggagctcgcccgacatacaagaagccaagtaaaacaaatgcatacaatgtaacaacacatgcagatggtactgcgacatatgggcctagagtaacaaaataa

SEQ ID NO: 405117 - DNA, 1185 bp, Staphylococcus aureus
atgcaagaagcatacattgtagcttatgggcgttcagccgcagcgaaagcaaagcaaggcgcattattccacgaaagacctgatgatgtcgcagccaaagtattacaaggcgtattgaaacgtattgacggaaaattcaataagaatatgattgaagatgtcattgttggtacggcttttccagaaggattacaaggccaaaacattgcacgaacgattgcattgcgtgcgggattatctgacacggtaccgggtcaaacagtgaatcgctactgctcatcaggattacaaaccatcgcgattgcagccaatcaaattatggctggtcaaggagatatacttgtagctggtggcgttgaattgatgagtgccgtaccaatgggtggcaacgagcccacaaacaatccaaccttacaatatgatgatataggtgcgtcatatcctatgggtttaactgctgaaaatgtagcatcccaatttgacgtatcacgcgaagatcaagatgcttatgctgtcagaagtcatcaacgtgcctatgacgcacaacgtgatggtcggttcaaagatgaaattattccaatacaagtaaactcagttgaatatacaaacgcaggaccaaaagtacacacaaatatctttgaccaagatgaatttatacgccctgacaccacgatggaggcattagccaaattacgtacagtatttaaagctgacggcactgtgactgcaggaacatctgccccactttctgatggtgcaggatttgtagttttaatgtctggagataaagtgaaagaactcggcgtgacacctattgcacgattcgttggttttaaggcagtaggcgttgacccgaaaattatgggtattgggcctgcatatgcgattcctgaagtattgtcactcagcaatctatctgttgaagacattgatttgatcgaattgaacgaagcatttgcttctcaaacgattgcatctattaaagaagtaggtctagatatatcacgtacgaatgtgaatggtggcgctattgctttaggtcatccattaggtgctacaggcgcaatgttaaccgcgcgtttacttaatgaaatgggtagacgtcccgatagccgttacggcatggttacgatgtgtattggtgtcggcatgggtgcagctgctatatttgaatatgtgcgttag

SEQ ID NO: 405118 - DNA, 2262 bp, Staphylococcus aureus
atgacaattaataaagtaaccgttcttggcgcaggcacaatgggcgctcaactggcagcactttttgtgaatgctggacttaaagtaaaactattagatattgtagtggacaaaaacgatccaaatctcattgcgaaaaaatcttacgataaaattacagataagaaacggccgctactattcgacttaaatctagcgagtcatttaacatatggtaattttgatgatgacttggtaaatgatgatgctgatttatatatcgaagcagtcaaagaagatattgaaattaagcatgctgtttggcaacaagttctacaacatgctaaagaagatgctttattcgctacaaatacatcaggtattccaattaatgcgattgctcaagcatttaacgagaaggatcaagaacgattctttggtctacatttctttaacccaccacgtattatgaaattagtggagttaatacctacgtcacacacgaaggaatctattatattagatgtaaaaaatttcgcgcaaaatgtgttaggtaaaggtgtcattgtcgtcaatgatgtgcctggctttgtcgcaaatagagtcggcacgcaaacaatgaatgatattatgtatcgcgccgagcaacacaagataagcattgtagatgtggatgctttaactgggcaagcgattggtcgtcctaaaacaggtacatatgcgctatctgacctagtcggtttagatattgcagtgtctgtaattaaaggcatgcaacaagtacctgaagaaacaccttattttcatgatgtcaaaattgtaaatacgttgtttgacaatggcgcactcggacgtaaaacgaaacaaggattttacaaaaaggataaagaaactaaagctcgacttgtttacgatgttgaaaaacaagattatgtacctgtatcgcaaccacaattaccaattttaaatgaatttaataaagacttagtgcataaccttgataccatattcaatgcgcaagacgaagcgggactatttttatgggagacattacgtaataatttctattactctgctatcaatgtacctaaagctaccgatgatttccgagacatagaccgtgcgcttgtctgggggttcaactggaaacttggtccattccaattatgggatgcaatgggatacgaacgtgttaaaacacgtatggaagacgaacttggagacttaccacaatggattagtgatttagatggtggcttttataaacaagatgagaccattgaatatgcaacacctatttctcacttcgtaaaagatgaactttgggataaaggtgatgccaaactttccgtaactcatgatgatcaactgttactgaaattacaaagtaaaaataatgtcattaccgatgaattcaacgatgcgttagttgatgcgattgatttactggaaaatgaccattacacaagtatggttatttatgcagatggtaacaatttcagtgtgggtgctaaccttttcttaatgaaaaaggcgcatgaagacggtcttgtagatgatgtcgttgcacaatcaattgataaattacattatagctttaatcgtttgaagtatagtttgaaaccagtagtcacagctgttcaaggtcgtgccttaggcggtggctgtgagcttgtactttactcacctattgttgtcgctgcaagtgaaacatatatcggtcttgttgaagcaggtgttggcttattaccgagtggcggtggccttgcagaaatggctgatcgcatattacgcacatcgcataagtttgatgacaaacaagcttccatgacaaaagtactgacgaatatcgcatttgcgaaagtctctacaaatgcctttgaggcacgtcgttatggttatttacgtgatacagatacgattattttcaatacagcacaacgtgtcgaagttgcgctcaaacgtgcgaaatatgaagcagaaacaaactatattccgaatcctagacatcaatatatcgctttaggtgaagacttcaaagcattgatccaaggacaattagatgcgcaaagacggggtcattttattagcgaccatgattatcatattgccttaaatatcgccacaattttagcgggtggtgatttaccaagaaatacatttatcaatcaacgttacattcaatcgttggagaaaattggctttattgacttactaaaatctaaaaaatcatatgaaagaattgcacatatgttaaaaactggtaagccattacgtaattaa

SEQ ID NO: 405119 - DNA, 1212 bp, Staphylococcus aureus
atgacatttgaaaaagaaacggtcttaaaaacattatttcctgaagatgtacttagtattgctaaaggtttaacagacggtgaagtcgaatttttacaacaagtagattcattgctagaaagtaagtaccgtgaaaatattaatcaacattggatagacgctactgtacccgaggactattttaaagatctgggagaattaaattattttaacaatccattactttacaaggatcgtccaaacgccaaaatgcctagtcaactatttcagtttttcatgtcttacctactcgcgcgatttgatatttccttagctaccctactcggtgttcaccaaggtttagggcataacactttctatttcggaggtagcaaagaacaaattgcgaaatatgtacctaaattacagtcacatgaactgcgtacatgctttgctttaactgaaccagaacacggttcggacgttgcgggaggtcttgaaacagtcgctgaacgccaaggcgatacttgggttatcaatggtgaaaagaaatggattggtggtgcacatgtatctgatgtcattccagtattcgcagtaaataaagaaactggcaaaccccattgctttgtagtcagaccagaacaagatggcgtcgatattgaagtcattgataataaaatcgcacttcgcattgttcctaacgccctaattaaattaactaatgtcaaagtagatgaagcggatcgcttacaaaacataacaagctttaaagatattgccaaaattctttattcaacgagagcaggcgttgcttatatggctacaggtggtatggctggcgctttacgtgccacattagattatgtcactgagcgtaagcaattcggcaaaccaattagtaaatatcagttaatacaagaaaagctagcaatgatgcaaggtaatttagctcaagcaatggcaacatgtgctcaattagctaatatgcaagcacatggtgaatatgacgaggttgcaacttcaacggcgaagatgatgaatgccttacgtttgcgtgagacagtagctatgggccgcggtattacaggtggtaatggcatactagctgacgattatgatattgcacgtttcttctctgatgcagaagcgatttacacgtacgaaggtacacatgaaattaatgccttagtaattggacgcgctttgactggagattctgctttcgtataa

SEQ ID NO: 405120 - DNA, 1506 bp, Staphylococcus aureus
atgaatttcgattggataaaaacgcgttcagacttcgatgatgacaagcctgccgttattgatcacgcaaaacaaacatcttggacataccaacaactcaatgcacgcgctgataatatggcacattatttaacatctcaaggtgttaaaaaaggcgatgttatcggtatttttgcgccaaatgatattgcaatattagatttattgtttgcttgttttaaaacaggtgcggtttttttaccattgaattggcggcttaacccaaaagaaattgcagccattgtggaagatgcacaattaaaactgctcttctatgctgaaaaacatttaagttcactcaccgatattgaccaaaacttattgcatatggatattgatgtggcgcaatatgatgaaatcgtaaatccagattatcaccaaccttttcaagcaacacctgttgaaccacaagatcttgcagcattaatttatacaagtggtacaaccggatcacctaaaggtgtgatgttctcatatgaatcatttgttcataacggtgcaaacttagagctgacgtataagttcaattcaaactatattacgattgtatcaacaccaatgttccatgttttagggtttaacgatactgtattaccagtattaatgtcaggtggcacacttattcttcaacgttactttaacggcgaagaattgaatgacatgattgcacaatatcaccctacatttattatcatgattccgacaatgtattatagtacgctacgtgctagtaattttaatcctgaaaattttagagctatggattatatcatccaaggtggttcacaaccattaccaagtatccaagcagcttttaaacaatatggcataaacattattaacggctatggtttaactgaagcacctcttgtacttgttaatacaccggaaaattcaaaacgtaagccaatgagtattggtaaagcagtcatgttcgttgatgcacgtatccttgatgataacggtgaggaagtacctactggtgagattggcgaacttgcaattaaggctaaaaatgtcacgccaggatattggaataaaccagcagagactgccaaagcatttcatggtcgatatttattaactggtgacttagcgaagatggacaacgatggcgatatatttattattgaccgcaaaaaagaattaatcataactggtggcgaaaatgtcttaccatccgaagtcgaaaatgctttagctgagcatccactagtagaccggtgtgtggtcgttggctatgatcatccaaaatatggtgaatcaattgctgcagccattatacttcgcgaagatgaacctcattacgctgaaattttaaatcaacatatgcgaagtcgtttagcaggttataaagtcccaagaatgtatgtaccagtgacacatatgccgttaaacagtacgcagaaaccagataaacttgcgattcgacaaatgatgaatgacaaagtctcgcaaacactttaa

SEQ ID NO: 405121 - DNA, 1563 bp, Staphylococcus aureus
ttgaaacaaatcacatggcacgacttacaacatatcattaaagatggtgatgtgattggtttaccagcattagctgtagccaacttacccgccgaagttctacgtgctgtgttagcgcaacatgacacatatcatacgcccaatgatttaacgtttatattagcgaatgatattcatagtttaggtgccgcaccggatttagatgattttatagaacgtcgcatgattaaacgtgtcattatgagtattttaacggcttcttccaaaacggcacaagcaatgaaaaataatgacattgaagcttattttttaccacaaggtatcattgcaactcattatcgtcagagtaatcaattattacctggagttattactaaaatcggattaaacacagctgttgatcctagatacggtggcggtaaagtaaatacacgaacaacggatgatttagtttcattagtaaccatcaacgatgaaacatacttacattacacattccctagcgttgatgtggcactactgagaggaacatacgcagatcaacaaggtaacatttatttaactcaagaagcgtacttgagcgagtgttatcatgtcgcattaaacgcgaaagccaatcatgggaaagttattgtacaagttaaagctttagttgacgactatcaactaaaaccgaatgaagttgttatcccaggaaatcttgtcgattatgtatacgtcacagaagatgaaaagaatcaccgccaagtaattcaaagtcattatttaccagccttgtctggagaagaacgaattgatggaatacctgaacccgcattaccttttaatagtcgcaaattgattctccgacgtgctgctcagtttttaacttatggcgatacaattagcatcggttatggcatcaataatgaactctctaatttattgcatgaagaatgtgttgaacatgatgtgcaaccgattttagatgttggcattttcggtggattcgttgggagtcgtgaacattttggtatgaattacaatgcagatgtgcgcatgcctcatgatcgagcatgggattttatttataacaatggtgtatcagttgcctatcttagctttgctgaggttgatcaatacggcaatgtcaacgtgtcttacttcaatgaccgactaaatggatgtggtggctttatagacattacgcaatctgtaaataaaattatcttttcaggtacttttgtagctggcagtcatgtctcatgccataatcaacgattaaacattgaaactgaaggacaaaaccagaaatttgtatcagatgtgagccatatcgactttaatgcacaatattcacaatcactcgagcaagaaatctattttgttactgatcgtgcagtattcgaactcaccaatcaaggcttgaaactaattgaaattgcaccaggtcttgatttgcataaagatattttgaatcaaatggcttttaaaccaattattgctgatcatttaaaattaattgataccagcatttacaaagaaaaatggggacaacttaaacaatcaattcataaagtatga

SEQ ID NO: 405122 - DNA, 1230 bp, Staphylococcus aureus
atggaaggtcttaatcatcgaagaaatacagaaaaagaagagacaacacaaacgcaatcagttgcacctaatacaggtgaagaggggatgtcatcagcaagtacacaatcaactaagacgtccgacatacataatgaatctatcgataaacaaatggaagctaaagcgcatgaaacagcgcaaaatacagatttaaaaaacgaagcaagaagtttatttgataatgcaaccaaatcaatcggtagactagcgggcaatgatgaaagcttaaatcttaatttaaaagatatgctttctgaagtatttaagccgcatactaaaaacgaagcagatgaaatatttatagcgggtactgctaaaactacgccagcaatttgtgacatatcagaagaatgggggaagccatggctcttttctcgagtattcatcgctttcacagtaacatttattggattatgggtcatggcagcaatttttaataacactaacgcgattccgggtctcatttttataggggctttaacagtaccattatcgggtttgttcttcttttatgaatcaaatgcgtttaaaaatattagcatttttgaagttattatcatgttctttattggcggcgtattttcattactaagtacgatggtattatatagatttgtcgtttttagtgatcaattcgaaaggtttggttctttaacatttttcgatgcatttttagtaggattagttgaagaaactggaaaagcactcattattgtttatttcgtcaataaattgaaaacaaataagattttgaatggattattaatcggtgctgctattggtgcagggttcgcagtttttgaatcagcaggttatattttgaatttcgctttaggagaaaatgtcccattattagatattgtcttcacacgtgcgtggactgcgattggtggtcatttagtttggtcagcgattgttggtgctgcaatagttattgcgaaagaacagcatggctttgaattcaaagatatttttgataaacgctttttaatattctttttatcagccgttgttttacatggcatttgggatacatctttaactgtacttggcagtgatacgttgaaaatatttattttaatcgttattgtgtggatacttgtattcattttaatgggggcaggtttaaaacaagtgaatttactgcagaaagaatttaaagaacaacagaaaaaagtagacgaataa

SEQ ID NO: 405123 - DNA, 1476 bp, Staphylococcus aureus
atgaagtttaaaagactagcaactatattttcagcagtattagtgttatcaggatgtggctcaatgcattcatctggcaaagacttaaatatttcgttaccgttaaaaacaaagtctattgcaccttatgaaacagatgtaccagttaagattggtgctgcagaatcattatttaaaacaaatgatcaaggaaaaatagaaaaagcattagtgaaatcgtatcatcaaccaaatgatacaacgttagatatagaattaaaagataatattaaatttcaaaacggtcaaaaattgactgcagaaaaagtgaaatctagccttgaaaatagcatgaaaaaaagcgacttggtcaaatattcattaccaatatcatcaattaccgctaaaggtcaaaaactgacaattaaaaccaactccgcttaccctgaacttgtatctgaattagctaatccttttatggcaatttatgatacagatgctaaatcagatgttaatcaaactcctgttggtacaggcccttaccaaataaaagattataagcaatctcgaaaaatatcattgtcgaattttaaggactattggcaaggtaaaccgaaacttgatcatattactgtgacgtaccaagaagacggcaataatcgcgtcagaaatttagaatctcaaaaagatgatttaataactgatgtcccagttaataaagttcaagacatagaaaataatcaaaatttaaaagtgtcaaaagaatctggatttagaacttctttacttatgtataatcatactaataaaaaaatgactaaatccgttcgtgaagcattagatcatatcattgatagacaaggtattgcagatcatatttatcaaggttatgcgaaacctgcaacgagtccatttaatgataaaattccatatattaaagaacctaagttaaccaaacaaaatatcgaacaagcaaaaatgttattagctaaagatggttatacaaaagaacaccctttaaaaattaagttaattacgtatgacggtcgtccagagctatcgaaaattgcgcaagtattacaatcagatgctaaaaaagcaaatattgaaatcgacattaaaagtgttgatgacatagaaggttacttaaaagaccgttctgcatgggatgcaacgatgtatagtttcggaacaattcctcgtggagatacaggttatttctttaatcaagcatataaaaaagatggtgctattaataaaggagactacaataatagcaacgtcgatgatttaattaatcaattgaatcatactgtagatgttaaggaacgtcacaatatttctaatgatattattaaattatcaagtcgagatgtaccaaacagttatattgcttacaacgatcaaatagtcgctgctaactctaaggttaaaaattataaagtaacacctgaaggtatctatttaatcgattatcgaacaacgattgaacgataa

SEQ ID NO: 405124 - DNA, 357 bp, Staphylococcus aureus
atgaccgtagatattggacggatttatgacaataaagataataccgacgctattcgtatcctagtcgatagagtctggccgagaggtatttcgaaaagaactgctaacctagattattggttaaaagacattgccccttctactgagttgcgacaatggttccaacatgatcctaaactttttggagcttttaaagaaaaatatgaaaaagaattacgtgatcaggatgcgcaaaaagatgcttttgaaaaattaaaggatattgtaaatcagcataatcatgttctattgttatatgcagcaaaagatactaaacataaccaagctgtagtactacagcagttgctcaatacttag

SEQ ID NO: 405125 - DNA, 174 bp, Staphylococcus aureus
atgaaacttaatcaacgttacgtaaaagtatttgcattatatttcgtaagtattgttactgcaaatattattgttaaaaataataatttaattaaaacattgatacaaaccatagccgggtacacggtctttgcagttggtttgaagtatttaactaaacgtaaaaataaatga

SEQ ID NO: 405126 - DNA, 1146 bp, Staphylococcus aureus
atgcttacagaacaagagaaagacattatcaaacaaacggtgcctttacttaaagagaaagggacagaaattacgtcaatcttttatccaaaaatgtttaaagcgcatcctgaacttttaaacatgtttaatcaaacgaaccaaaaacgaggcatgcaatcttcagcattagcacaagctgtaatggccgcagcggttaatatcgataacttaagtgttattaaaccagtcattatgccagtcgcatataaacactgcgcactacaagtttatgctgaacattatccaattgtggggaaaaatttattaaaagccattcaagacgtgacaggattagaagaaaatgaccctgtcattcaagcttgggcaaaagcatatggcgttattgcggatgtgttcatccaaattgaaaaagaaatttatgatcaaatgatgtggattggttttaaaccattcaaaattaccaatattaaacaagaatctgaagacattaaatcatttacagttgaaactgaagaatatgactttagtgaatttacaccaggccaatacatcacagttgatgtttctagtgataaacttccatatagagctaaacgtcactattctatcgtatcaggtgaaaaaaaccatttaacttttggcgttaaacgtgatgtcacaacagaacatgaaggcgaagtttcaacaattttacacgatgagattaaagaaggcgatatgattaatttagctgcgcctgtaggtggattcgtattagagaatacgactgaaccacaacttttcttaggttcaggtattggtgttacacctttagtagctatgtatgaagctgcctctgccaaaggtttagatacacagatggttcaagttgctgaaaatgaacaacatttacctttcaaagacaacttcaacagtatcgcaagccatcatgacaacgctaaattatatacacacttaaaagataaacaaggctatattggtgctgaagaattacaagtatttttagcaaataaacctgaaatttatatctgtggtggtacaaaattcttacaatctatgatcgaagcacttaaatctttaaattacgatatggatcgcgtacactacgaaacatttattccaagactaagcgttgcagtataa

SEQ ID NO: 405127 - DNA, 954 bp, Staphylococcus aureus
atgaacaaatttaaagggaacaaagttgtattaataggtaatggtgcagtaggttcaagctacgcattttcattagtgaaccaaagcattgttgatgaattagtcatcattgatttagacactgaaaaagttcgaggagatgttatggatttaaaacatgccacaccatattctccaacaacagttcgtgtgaaagctggcgaatacagtgattgtcatgatgcggatctagttgtcatctgtgctggtgctgcacaaaaacctggagaaacacgtttagatttagtatctaaaaacttgaaaatattcaaatcaattgttggtgaagtaatggcatcaaaatttgatggtattttcttggtagctacaaatcctgttgatattttagcgtatgcaacatggaaattctctggtttacctaaagaacgtgttataggttctggtacaattttagactctgcacgctttagattattgttaagcgaagcgttcgatgttgcgccacgtagcgtcgatgctcaaattattggtgaacatggtgacactgaattaccagtatggtcacacgctaatattgcgggtcaacctttgaagacattacttgaacaacgtcctgagggcaaagcgcaaattgaacaaatttttgttcaaacacgtgatgcagcatatgacattattcaagctaaaggtgccacttattatggtgttgcaatgggattagctagaattactgaagcgattttcagaaatgaagatgccgtattgactgtatcagcattattagaaggcgaatatgaggaagaagatgtttatattggtgttccagcagtcatcaatagaaacggtattcgcaacgtcgtagaaatcccattaaacgacgaagaacaaagcaagttcgcacattcagctaaaacattaaaagatattatggctgaagcagaagaacttaaataa

SEQ ID NO: 405128 - DNA, 1530 bp, Staphylococcus aureus
atgaaatctttatttgaaaaagcacagcagttcggcaagtcctttatgttacctatcgcaatcttaccagctgcaggtctattgttgggtatcggtggtgcattaagtaatccaaacaccgttaaagcataccctattttagatattaccttattacaaaatatttttacattaatgtcagctgcaggtagtattgttttccaaaatttaccggtcatctttgcaattggtgtcgcaatcggattatctagaagcgataaaggtactgcaggtttagctgcgctgctcggtttcttaattatgaacgcaactatgaatggcttattaactatcacgggcacattggcaaaagatcagcttgcacaaaatggacaaggcatggtgctcggtatacaaacggttgaaaccggtgtttttggcgggattatcacaggtattatgaccgcaatacttcacaacaaatatcacaaagtggtattaccaccgtatttaggtttctttggtggctctagatttgtccctattgtcacagcatttgccgcaatctttttaggtgtattgatgtttttcatttggccaagcatacaagccggcatttatcatgttggtggatttgtaacgaaaacaggtgccatcggtacttttgtttatggcttcatcttaagattgttaggtccactcggtttacaccatattttttacttaccgttttggcagacggcacttggtggtactttagaagtcaaagggcacttagttcaaggtacgcagaacatcttctttgctcaacttggtgatccagatgtgacgaagtattattcaggtgtgtcacgctttatgtcaggccgttttattacgatgatgttcggcttatgtggtgccgcacttgcaatttatcacacagctaaacctgaacataaaaaagttgtcggcggtttaatgttatccgctgcactcacttcatttttaacaggtattaccgaacctttagagtttagtttcttgtttgtcgcacctattctttatgtaatccatgccttctttgatggattagcatttatgatggcagacattttcaacattacaattggtcaaaccttcagtggaggctttatcgatttcttactctttggtgtgctacaaggtaatagtaaaacaaactacctatacgtcatacctattggaattgtgtggttctgtttgtattacatcgttttcagattcttaattacgaaatttaatttcaaaacacctggtcgagaagataaagctgcagcacaacaagttgaggctactgaaagagcacaaactattgttgctggtttgggaggcaaagataacattgaaatcgttgactgttgtgcaacgagactacgcgtcacacttcatcaaaatgacaaagtcgataaagtattactcgaaagtactggtgccaaaggtgtaatccagcaaggcactggtgtgcaagtaatttatgggcctcacgttacagttatcaaaaatgaaattgaagaattgctcggggattaa

SEQ ID NO: 405129 - DNA, 936 bp, Staphylococcus aureus
atgaaaagaaagattattatggattgtgatccaggacacgatgatgcaatagcattaattttagcgggggcaattgacagtccactagagatattagctgtaacaacagtcgcaggtaatcaatcagttgacaagaatacgacaaacgccttgaacgtattggatattatgggacgccaagatatagcagtagcgaaaggtgcggataggccgttaattaaaccagctgcctttgcttctgaaatacatggggaatctggattagatggtccgaaactaccgtcgacaccatcacgtcaagcagttgcaatgccagcatcagatgtgattataaacaaagtgatgacgagtgatacacctgtaacaattgtagcgacaggtcctcttacgaatgtagcaacggcattgattcgtgagccaagaatcgctgagcatattgaatctattactttgatgggtggtggtacatttggaaattggacgcctacagcagaattcaatatttgggtagatgctgaagcagcgaagcgtgtttttgaaagtgggattactataaatgtgtttggtttagatgtaacacatcaagttttagccgacgatcacgtgattgaacgctttgaaagtatcaataatcctgttgcacagttcgtcgtagaattattgcaattctttaagaagacatacaagactcactttaatatggatggtggtccaatacatgatgcttgtacaattttgtatttgttacaaccagaattgtttacaatggtacccgttaatatcgacattgaacatcaaagtccactaacttatggcactatggctgtcgatttaaatcatgttacaggtaagcctgccaatgcttattttgctacagcagttgatgttgaagaagtgtggaacttgatagaccataagttacgtacatacgaataa

SEQ ID NO: 405130 - DNA, 2097 bp, Staphylococcus aureus
atgaacggggataatcagcaaatactcagagaaattgtattgaatcctactattcatggtaaagaacttgaatcgatatttggtttgtctcgtagacaactaggatatcgcattcaaaaaatcaatttgtggcttgaacaagagggttatccaaaacttgaaagaacaagccaaggaaattttattgtaagttctgaaatcatgacgttattcaagcgagatgtatcggagcagcaaatgttaaacggcaacaatgtcatttttagcatagaaacacgtcgttattatttaatgctcatgctttttagtaaggaaaacgcaatgtctctaaaccatttttcaattgatttacaagtcagtaaaaatactgtcattcacgatataaatcatgtgaaagagcaattggaaaatcatggtttgtcacttaagtattctcgaaaacatggttatgaaattgttggtgatgaatttgaagttcgccgtttcttcattaagttgattgatcaaaggttgaatcatgatattactaaaagtgaagttttaaaggcgctcaacttaacattcgaagatatcgcatatcaaaaagacaagatcaaacaggtagaacaatttttgaagagtcgctttatagacaaatcacttagttcattgccttatgtcctttgtgtgattcgtagacgaattcaaagtggtcatgtgatgaatccattaaatattaattatcagtatttgagggatacgaaagaatatcaagcaacggagattatgacgcaacatgagccggatttgccagaagcggaaaagttatatttgacattacacttactttcaacaagtgtgcaatggactgatttgcaagaatcagatagcatatcgaatttaacgatggccatcgctcaaatgattcaccattttgaacaaatcacttttattaacattgaagataaggagaaattatcacagcaactcttgttacatttaacgcctgctttttataggattaaatataacttaacggatcgtgatgaattaataaatcctttacaaggaaattatcaatccttatttcatatggtgaaacaatcatgtcaatcgttaactgaatatttcggaaaatcgttgcctgataatgaaatagcatatttaaccatgttgttcggaggtagtttgagacgtcaagatgaaaacttcgatggcaagataaaagctattatcgtgtgtacacaaggcacgtcagtatcacaaatgatgttatacgagttgcgaaacttatttccagaaattattttcttagatgcgatttcacttagaacatttgaaaattacacattagattatgacatcgtcttttcaccaatgtttgtcctaacacataaaaaattatttatcacaaaagtagctttatctgaaaatgagcaacgaaagttacgtaaagaagtgatgaagtacattaataaggaatcggctgacattgataaggaaataaacaagttaatggcattaattgaacgcacaacgacagttaatgacattacagaactacgtgatggtttagaagattttattgccaattataattcaatttcaaccattaatggatcgattgtcacacaaaataagacattagatttagctgacttgataccggcaaggcacgtgaaaagaatgcatcatgttgaaaatattgatgaagctattgctaaagcaagtgatgtgttagttgctaatcattttattgatattaaatatattcatgagatgcaacaggtatttgatgattcgtatatggttatcatgcaaaatattgctattccacatgcatactctgaaaagcatgtacataaaacagcgatgagtatgttgatattacaagaaccaatatacatgtcagatggcacagcaatccatattattgtacctattgctgctgttgataaagtgacacacttaagagcgttactacaattgagagatgtggcgcaagacaatgacgcaattaagcgcatcatacaaagtcgcaaaaattctgatgtaaatgagattttaaaaaattattcaaataaagaagcgagggaaaatggatgggacagcaattag

SEQ ID NO: 405131 - DNA, 468 bp, Staphylococcus aureus
atgggacagcaattagtgcataaagaaaatataatgctcaatttgtcggcaactgataaagaatccgtattgtcacaaatgtcagatgtgttatttcaaaatgggttcgtgaagtcaacgtttaaagatgcagtcatcgacagagaaaaagaatttgctactggtttaccaacgcatctatgttcggtcgctataccgcatacagatgtcgaacatattaaccatagaacgataggtgtggctgttctagaaaaagaagtgccgtttattgaaatgggaacacttgatcaacagacagaagtgaaaatcgtttttatgttagcaatggataaagtagatgatcaacttaagctgttacaacagttgatgcaaatttttcaaagtgaagaaaaattggagcagattctacgaacgaaagatgaaacaattttagcaacactaatcaatgattatttggaatataactaa

SEQ ID NO: 405132 - DNA, 279 bp, Staphylococcus aureus
atgaaacaagtattagtagcgtgtggtgcaggtattgcaacgtcaacagtagtaaataatgcaattgaagaaatggcaaaggaacacaatattaaagtagatattaaacaaatcaaaattacagaagttggaccttatgaagacactgcagatttattagttacaactgcaatgacaaaaaaagaatataaattcccagttatcaacgcacgtaatttcttaactggtattggtattgaagaaacaaaacaacaaatcttaacagagttacaaaaataa

SEQ ID NO: 405133 - DNA, 1260 bp, Staphylococcus aureus
atgagttacttcactgattttgtaaggggatttttagatttaggtgcaactgttattttaccggttgtcatattcttgcttggcctattctttaggcagaaaattggagcggcatttaggtctggtttaacaataggtgtggcttttgtagggattttcttagtcatcgatttattagttaaaaatttagggccagcagcacaagcgatggttaaaaatttaggcgtcagtctgaatgtgattgatgtaggttggccagcaacatcatctatcgcttgggcatcatctgtcgcagcatttattattccactcggaatcatagttaacgttgtattgctagtaactaaagtgacaaagacgatgaatgtagatatttggaatttttggcattatacgtttacagcagcaatggtttatgccgtatcaggcagtatttggcaagcgttattagcagcagttattttccaaattatctgtttgaaagtagcagattggacagcaccgatgatgagtgagttctttgatttaccaggtgtatcgattgctacaggaagtacaatttcttatgcaccaggtatttacttagttaaattgttacaaaaagtacccggtctgaataagttagatgctgatcctgaaacaattcaaaaacgttttggcgcatttggagagtctatatttgtcggcttaattttaggtttaggtattggtgtgttagcaggttacaaacctggagacatcattaatttaggaatgtcaatggctgcagtaatggtattaatgcctagaatggtaaaaatcttaatggaaggtttaatgccagtttcagagtctgcaagaacatggctaaataaacgttttggcgaacgtgaaatttatattggattggatgcggctgtagcattaggtcatccagcagttatttcgacagcattaattttagtacctatcactgttttattagccgttattttaccaggaaaccaagtactaccttttggtgacttagcaacgataccatttgttgtcgcgtttattgttggtgcagcaagaggaaacattattcattctgtcattgtgggtacgattatgattgcaatttcactatatattgcaacagacgtagcacccattttcacagatatggcgaaaggtacgaatgtacaaatgccaaaaggttcatctgaaatttcaagtattgatcaaggtggtaatatcgttaactgtcttatctttaaactatttagtctattcaattaa

SEQ ID NO: 405134 - DNA, 1056 bp, Staphylococcus aureus
gtgaaagctttagtaaaaacaagagaaggacatggcaacttagaacttcttgataaagaagttgcaacaccgctagatgataaagtaaagattaaagtacattatgcaggaatttgtggcacagatattcatacttatgaaggtcattataaagttaattttccagtgacattaggtcatgaattttctggtgaaatcgttgaagttggagcagacgttaaagattttaaagttggtgaccgtgtcacatctgaaacgacattctatgtttgtaatgagtgtgaatactgtaaatcaaaagactataatttatgcaaccatcgaaaaggtattggaacacaagttgatggcgcatttactaattatgtcattgcacgtgaagaaagtttgcatcatattccagacgaagtatcgtatcagtctgcagctatgacagaaccattagcatgtgcatatcatggcgtttctaagattcaagtcaattcaggcgatgtagcagttgtaatgggacctgggccaatcggattacttgtagcacaagtgttaaaaagtaaaggcgcaactgttgtggtaactggattggacaatgacaaagtcagattagataaagcagaagcattgcacatggattatgtagtcaatttacaacaaacagacttaaaaacgtatatcaatggaattacagacggttacggtgcagatgttgttgttgaatgttcaggtgcagttccagcagcacgacaaggtttggatattttacgcaaaaaaggtttctacagtcaaataggtatttttaaggatgctgaaattccatttgatatggaaaaagtgattcaaaaagaaataacagttgttggtagtagaagtcaaaagccagcagattgggaaccttcattgcaacttatggcggatggtttagtaaatgctgaagctttggtgacaaaaatatatgatatttcgaaatgggacgaggcgtatcaacatttaaaatccggcgaaggtattaaagtattacttaagccgctcgatttagatgaaaatgaaggagagaattaa

SEQ ID NO: 405135 - DNA, 147 bp, Staphylococcus aureus
atggtagaatcaatgctaacttttatgcttgggccattaagacaaatcactgatttttatatggaacatttactcgtaagtaattccattgtcattgcaggttattttgcgacaggtatttttaaaaagaaaaaagttgtgaattaa

SEQ ID NO: 405136 - DNA, 1044 bp, Staphylococcus aureus
gtgaaagcattgaaattatatggcgtggaagatttacggtatgaggataatgaaaagccagtcattgaaagtgcgaatgacgttattattaaagtacgagcgactggcatatgtggttcagacacgtcacgatacaaaaaaatggggccatacattaaaggtatgccatttggtcatgaattttcaggtgtagtagatgccattggaagtgatgttacgcatgttaatgtgggcgacaaagtgacaggttgcccagcaataccttgttatcaatgcgagtattgtttaaaaggtgaatatgcacgatgtgaaaagttattcgtcattggctcatatgaacctggatcgttcgcggaatatgtcaaattgccagcgcaaaatgttttaaaggttccagacaatgttgattacattgaagcagcaatggttgagccatcagccgttgttgcgcatgggttttataaatcgaatatacaacctggtatgactgttgcagtaatggggtgtggcagtataggtttgttagctattcaatgggcacgaatatttggtgctgcacatatcatcgctatagatatagatgcgcataaactagatattgcaacatcattgggcgcacatcaaacaatcaattcaaaagaagaaaatcttgagaaattcatcgaaaatcattacgccaatcaaatcgatttagctatagaatcatcaggtgctaaagttacgattggtcaaatattgacgctacctaaaaaaggtggcgaggtggtattactcggaataccatatgatgatattgagattgatcgcgttcattttgaaaaaattctgcgtaacgagttgacagtatgtggctcttggaactgtttgtccagtaattttccgggcaaagagtggacggcaaccttacattatatgaagacgaaagatattaatgtaaagcctattatttctcattttttaccgttagaaaaaggcccggagacatttgataaattagttaacaagaaagaacgatttgataaagtcatgtttacgatttattag

SEQ ID NO: 405137 - DNA, 717 bp, Staphylococcus aureus
atgatttatgcaggtattttagcaggaggtattggttcgagaatggggaacgtgccattaccaaaacaatttttagatattgataataaaccgattttaatccatacaattgagaagttcattttagtgagtgaatttaatgagattattatcgcaacgccagcacagtggatttcccatacacaggatattttaaaaaaatataacattacagatcaacgtgtcaaagtagttgcaggtggtacggatcgaaatgaaacaattatgaacattatcgaccatattcgcaatgtaaatggaattaataatgatgatgtgattgtaactcatgatgccgtaagaccatttttaactcaacgtattattaaagagaacattgaagtagcagcaaaatatggtgcagtagatacagtcattgaagcaattgatacgattgtaatgtctaaagataaacagaacatacacagtatccctgtaaggaatgaaatgtatcaaggccaaacaccacaatcatttaatattaaattattacaagatagttatcgcgccttaagtagtgaacaaaaagaaatcttatcagatgcatgtaaaatcattgtcgaatctggacatgcagttaaattggtacgtggagaactatacaacattaaagtgacaacaccgtatgatttaaaagtagcaaatgccattattcaaggtgatattgccgataattaa

SEQ ID NO: 405138 - DNA, 1032 bp, Staphylococcus aureus
ttgccgataattaatcaagtatatcaactcgttgcaccgagacagttcgacgtcacatataataatgttgatatttatggtaatcatgtcatcgtaagacctttatacttgtctatttgtgcagctgatcaaaggtattacacaggtcgaagagatgaaaatgtactacgcaaaaaattaccaatgtcattagttcatgaagctgttggtgaagttgtatttgatagtaaaggggtatttgaaaaaggtacgaaagtagtaatggtaccgaatacacctacagagcaacatcatattattgcggagaattacttagcctctagttattttagatctagtggttatgatggttttatgcaagactacgttgtgatggcacatgatcgtatcgttccgctgcctaatgacattgatttgagtacgatttcatacacagagttagtgtcagtaagttatcatgctatacaacgatttgaacgtaaatctatacctttgaaaaccagctttggtatttggggtgatggtaacttaggttatattactgctattttgctacgtaagttgtacccagaagctaaaacttatgtatttggtaagacagactataaattaagtcatttttcatttgtagatgacatctttacagtaaatcaaataccagatgatcttaaaattgatcatgcatttgaatgtgttggaggtaaaggaagtcaagttgcacttcaacaaatagttgaacatatttcaccagaaggcagtattgctttgttaggcgtaagtgaattacccgtggaagtgaatacacgattagtacttgaaaaaggattaacgttgattggtagtagtcgaagcggctctaaagattttgagcaagttgttgatttatatcgtaagtacccagacatagttgaaaagttagcattattaaaaggacatgaaattaatgtatgtacgatgcaagatatcgtccaagcgtttgaaatggatttatcgacatcttggggaaaaacagtattgaaatggacgatttaa

SEQ ID NO: 405139 - DNA, 1695 bp, Staphylococcus aureus
atgacaaaaacgaaacaagcaatacatattgataacatatactgggaacgtgttcagttatatattgaaggacatagtgaaggtgtcgatttaacatcaggacaatttgttctgaggaatttaaccgaaacaaaaacattagaagcaaatgaaatgaaaatagacggtaatacatttatatgtagattcaacgtcgcaatattagacgatgggtattatttaccaatggataaatatttatttgtttatcatgaccagttagagtatattggacaacttaatccaaatattattgatcaagcttatgcggcattaaatgaagagcaaattgaagaatacaatgagctgactacacaaaatggaaaagtgaactatttattagcgtatgatgctaaagttttccgtaaaggtggcgtatcacaacatacggtctataccattactccggaaatagcaagtgacgttaacgaatttgtatttgatattgaaatcaccttacctcaagagaaatcaggggtcattgcgacaagtgcacactggcttcataaacaaggtcataaagcttcatttgaaagtagaagtttcttatttaaagctatttttaatattacaaagttactacatattaaaagaagcaaaacaatattattcacatcagattcgcgtccgaatttatcagggaatttcaagtatgtatatgatgagttactacgccaaaaagtagattttgattatgatattaaaacggtatttaaggagaatattacggatagacgcaaatggagagacaagtttagattgccatatttacttggtaaggccgattatatttttgttgatgatttccatccattaatttatacggttcgctttagaccatcacaagaaattattcaagtgtggcatgctgttggtgcctttaaaacagttggctttagtcgtacaggtaaaaaaggtggtccgtttatcgattcattaaaccatcgtagttacacgaaagcatatgtttcatcagaaaccgatattccattttatgctgaagcatttggaattagagaagaaaatgttgtaccaacaggtgtaccacgtactgatgtactatttgatgaagcttatgcaacacaaattaaacaagagatggaagatgaattgccaattataaaaggtaagaaagttattctattcgcaccgacatttagaggtaatggtcacggtacggcacattatccattttttaaaattgattttgaacgtttagcaagatactgcgagaagcataatgcagttgtgttattcaaaatgcatccgttcgtaaaaaatagacttaatatttcacgtgaacatagacaatactttatcgatgtgtcagatcatcgtgaagttaacgatattctctttgttacagacttgttgattagtgattattcatctttaatatatgaatatgcagtatttaaaaagccgatgattttctatgcatttgacttagaagattacattacgacgcgtgatttctatgaaccatttgaatcatttgttccaggtaaaattgtacagtcctttgatgcattaatggatgctttggacaatgaagattatgaggttgaaaaagttgtgccattcttagataaacattttaaatatcaagatggtcgctcaagtgaacgtttagtcaaagatttgtttagacgctaa

SEQ ID NO: 405140 - DNA, 1170 bp, Staphylococcus aureus
atgattaaaaatacaattaaaaaattgatagaacatagtatatatacgacttttaaattactatcaaaattgccaaacaagaatctaatttattttgaaagctttcatggtaaacaatacagcgacaaccccaaagcattatatgaatacttaactgaacatagcgatgcccaattaatatggggtgtgaaaaaaggatatgaacacatattccaacagcacaatgtaccatatgttacaaagttttcaatgaaatggtttttagcgatgccaagagcgaaagcgtggatgattaacacacgtacaccagattggttatataaatcaccgcgaacgacgtacttacaaacatggcatggcacgccattaaaaaagattggtttggatattagtaacgttaaaatgctaggaacaaatactcaaaattaccaagatggctttaaaaaagaaagccaacggtgggattatctagtgtcacctaatccatattcgacatcgatatttcaaaatgcatttcatgttagtcgagataagattttggaaacaggttatccaagaaatgataaattatcacataaacgcaatgatactgaatatattaatggtattaagacaagattaaatattccattagataaaaaagtgattatgtacgcgccaacttggcgtgacgatgaagcgattcgagaaggttcatatcaatttaatgttaactttgatatagaagctttgcgtcaagcgctggatgatgattatgttattttattacgcatgcattatttagttgtgacacgtattgatgaacatgatgattttgtgaaagacgtttcagattatgaagacatttcggatttatacttaatcagcgatgcgttagttaccgactactcatctgtcatgttcgacttcggtgtattaaagcgtccgcaaattttctatgcatatgacttagataaatatggcgatgagcttagaggtttttacatggattataaaaaagagttgccaggtccaattgttgaaaatcaaacagcactcattgatgcattaaaacaaatcgatgagactgcaaatgagtatattgaagcacgaacggtattttatcaaaaattctgttcattagaagatggacaagcgtcacaacgaatttgccaaacgatttttaagtga

SEQ ID NO: 405141 - DNA, 717 bp, Staphylococcus aureus
atgaaatacgctggtattctagctggaggtataggctcaagaatgggtaacgtacctttacctaaacaatttttagatttagacaacaaaccgattttaatccatacattagaaaaatttattttaattaatgattttgaaaaaattattatcgcgacgccacaacaatggatgacgcatacgaaagatacacttagaaaattcaaaatttctgatgaaagaattgaagtcattcaaggtggtagcgatcgtaacgatacaattatgaatatcgttaaacatattgaatcaacaaatggtattaacgatgacgatgtcattgtgacacatgatgcagttagaccatttttaacgcatcgtattattaaagaaaatattcaagctgctttagagtacggtgcagtagatacagtgattgatgctatagatacgattgttacatctaaagataatcaaacgattgatgcaattccagtgcgtaatgaaatgtaccaaggtcaaacacctcaatcgtttaatattaatttattaaaagaaagctatgcacagttgagtgatgagcaaaagagtattttatctgatgcttgtaagattattgtagaaacaaacaaaccggttcgacttgtaaaaggtgagttatataacattaaagtaacaacaccttacgatttaaaagtagcgaatgctattattcgaggtggtattgccgatgattaa

SEQ ID NO: 405142 - DNA, 1026 bp, Staphylococcus aureus
atgattaatcaagtatatcaattagttgcacctagacaatttgaagttacgtataacaacgtagatatttacagtgactatgtcattgtacgtcctttatatatgtcaatttgtgctgccgatcaaagatattatactggtagccgtgatgagaatgtcttatctcagaaattgccaatgtctttaattcatgaaggtgttggtgaggtcgtatttgacagtaaaggtgtgtttaataaaggtacaaaagtagttatggtaccgaatacgccgacagaaaaagacgatgtcattgctgaaaactatttaaaatcgagctacttcagatcaagtggacatgatgggtttatgcaagattttgtgttgctaaatcatgatagagctgtaccactacctgatgatattgatttaagtattatttcatatacagagcttgtaacagtaagtttgcatgctattcgtcgttttgaaaagaaatctatttcaaataaaaatacatttggtatttggggtgatggtaacttaggttacattacagccattttattacgtaaattatatccagagtctaaaatatatgtctttggtaaaacagattataaattgagtcacttctcatttgttgatgatgtcttctttattaataaaatacctgaaggcttaacatttgatcatgcatttgagtgtgtgggtggtcgcggtagtcaatcagccataaatcaaatgatcgattacatttcaccagaaggaagcattgcactgttaggtgtaagtgagttcccagtagaagttaatacacgtctagtattggaaaaaggactaacgttgattggtagtagtcgaagtggttcaaaagatttccaagatgttgtagacttatacattcaatacccagatattgtagataaattagcgttgttaaaaggtcaagaatttgaaattgcaacaattaatgatcttacagaagcttttgaagcagacctgtctacatcttggggtaaaacagtattaaaatggattatgtaa

SEQ ID NO: 405143 - DNA, 1689 bp, Staphylococcus aureus
ttggttaaaagtaagatatatatagataaaatctattgggaacgtgttcagttattcgttgaaggacatagtgaaaacctagatttagaagatagtaattttgtattaagaaatttaactgagacacgtacaatgaaggcgaatgatgtcaaaatagatgggaatcaattcgtttgtcgtttcaatgtagctatcttagataatggttattacttacctgaagataagtacttattagtgaatgagcaagaacttgattatattgcacagttaaacccagatgtgattaatgatgcatatcaaaatctaaagccagaacaagaagaagaatacaacgaattagaaacacaaaatggtaaaatcaatttcttattgcagacttacctaaaagaatttagaaaaggcggcatttcgaagaaaacggtttatactgttacacctgaaatttctagcgatgttaatgaatttgtccttgatgttgttgtaacgactccggaagttaaaagtatttatatcgttcgtaaatataaagaattacgtaagtatttccgcaaacaatcatttaatacaagacaatttatttttaaagcgatatttaatacgacgaaatttttccacttgaaaaaagggaatacggtgttgttcacatcagactctagaccaacgatgtctggaaactttgaatacatctataacgaaatgttacgtcaaaatttagataaaaagtatgatattcacactgtttttaaagcgaatattacagatagacgtggcatcatcgacaagtttagattgccatatttacttgggaaggcagactacatctttgttgatgactttcacccattgatttatacagtgcgttttagacgttctcaagaagttattcaagtatggcatgccgttggtgcctttaaaacagttggctttagtcgtactggtaaaaagggtggaccatttattgattcattaaatcatcgtagctatacaaaagcttatgtatcatctgaaaccgatattccattctacgctgaagcatttggtattaaagagaaaaatgtagtgcctacaggtgttccacgtactgatgtactatttgatgaagcttatgcgacacagatcaaacaagagatggaagatgaattaccaattattaaaggtaagaaagtcattcttttcgcaccaacatttagaggtagtggtcatggtacagcacattacccatttttcaaaattgattttgaacgtttagcaagatattgcgaaaaaaataacgcggttgtattatttaaaatgcatccatttgtgaaaaatagacttaatattgcagacaaacataaacaatattttgttgacgtttctgactttagagaagttaatgatatactgttcataacagatttattaattagtgactattcatctttaatatatgaatatgcagtatttaaaaagccaatgattttctatgcatttgatttagaagattatattacgacgcgtgatttttatgaaccatatgaatcatttgttccaggtaaaattgtgcaatcatttgacgcattaatggacgccttggacaatgaagattatgaaggagaaaaagtcattccattcttagataaacattttaaatatcaagatggccgatcaagtgagcgtttagtcagaaatttatttggtagctaa

SEQ ID NO: 405144 - DNA, 1725 bp, Staphylococcus aureus
atgatgaaattttcagtaatagttccaacatacaattcagaaaagtatataacagaattacttaatagccttgcgaaacaagattttccgaaaactgaatttgaagtggttgtagttgatgactgttcaacagatcaaacgttacaaatagttgaaaagtatcgcaataaattgaacttgaaagtaagtcaactcgaaacaaattctggtggtccaggtaaacctagaaatgtggcgttaaaacaagcagaaggtgaatttgtattatttgtggactccgatgactatataaacaaagagactttaaaggatgcagcagcatttattgatgaacatcactcagatgtcttattgattaaaatgaaaggtgttaatggtcgtggtgtaccacaatctatgtttaaagaaacagcacctgaagttactttgttaaattcaagaattatctatactttaagcccgactaaaatctatagaacagcattactaaaagataatgacatttattttccagaagaattaaagagtgcagaagatcaattatttacaatgaaagcatatttaaatgcaaatcgaatcagtgtgttaagtgataaagcgtattattatgctacaaagcgtgaaggtgaacatatgagtagtgcgtatgtttcacctgaagacttttatgaagtcatgagattgattgctgtagaaatattaaatgcagatttagaagaagcccataaaaatcaaatcttagcagaatttttaaatcgtcattttagtttttctcgtacgaatagcttctcacttaaagttaaactagaagatcaaccacaatggattaatgctctaggagactttatacaagcagttccagaacgtgtagatgcattggtgatgagtaaattacgaccattgttgcactacgcgagagcgaaagatatagacaactatagaactgtggaagaaagttaccgtcaaggtcaatactaccgttttgatattgtagatggtaaattaaacattcaattcaatgaaggcgaaccatactttaaaggcattgatatcgctaagccaaaagtgaaaatgacagcatttaaatttgataatcataaaattgttacagagctaacgttaaatgaatttatgattggcgaaggacattatgatgtcagacttaaattacattcacgaaacaagaagcacacaatgtatgtacctttaagtgtcaatgcgaataaacaatatcgttttaacattatgttagaagatattaaagcgtatttacctaaagaaaaaatttgggatgttttcttagaagtccaaataggtacggaagtatttgaagtgcgtgttggtaatcaacgtaataaatatgcatatactgcagaaacaagtgcattaattcatttgaataatgatttttatagattaacaccgtatttcacaaaagactttaataacatttcgttatactttacagctattacattaacggattcaatctcattgaagttaaaaggtaaaaacaaaatcattttaactggtctggatcgtggttatgtatttgaagaaggtatggctagtgtcgtactaaaagacgacatggtgatgggaatgttaagccaaacatcagaaaacgaagtgcaaatcttacttagcaaagatattaaaaagcgagacttcaaaaatattgttaagttaaacactgcacatatcacttatccactaaataaataa

SEQ ID NO: 405145 - DNA, 675 bp, Staphylococcus aureus
atgataaataaaaatgacatagtagcagatgtagtaactgattatccgaaagcagcggatatttttagaagtgtgggaatagatttttgttgtggcggacaagtaagtatagaagcagcagccttagaaaagaaaaatgtagatttgaacgaattattacagcgtctcaacgacgttgaacaaacgaatacaccaggttcgttaaatcctaaatttttaaatgtttcatcacttattcaatatattcaatcagcatatcatgaacctctaagagaagaatttaaaaatttaacaccttatgtgacgaagttatcgaaagtacatggacctaatcatccatatttagttgagttaaaagaaacatacgatacatttaaaaatggcatgttagagcatatgcaaaaagaagacgatgtcgattttccaaaactcattaaatatgagcaaggtgaggtagtagacgatattaatactgtgatagatgatttagtttcagaccacattgcaacgggagaattgttagtaaaaatgagcgaattaacatctagttatgaacctccgatagaagcgtgtggtacttggcgacttgtttatcagagattaaaagcacttgaagtgttaacacatgaacacgtacatttagagaatcacgtattatttaaaaaagtatcataa

SEQ ID NO: 405146 - DNA, 1755 bp, Staphylococcus aureus
gtgctatcgctaacaatgttattacttgagcgtgtaggtttaattattattttggcctatgtgttgatgaatattccatattttaaaaacttaatgaatcgtcgacgtacatggaaagcacgttggcaattatgtattattttcagtttgtttgccttaatgtctaatttaactggtatcgtcatcgatcatcaacatagtttgtcaggaagtgtgtacttccgtttagatgatgatgtatctttagctaacacacgtgtattaacgataggtgtcgcaggattagttggtggcccttttgtaggtctatttgttggcgttatttcaggtattttcagagtgtatatgggtggggcggatgcacaagtttatcttatctcatctatatttattggtataattgctggttattttggcttacaagctcaaagacgcaagcgttacccgagtattgcgaaaagtgccatgattggaattgttatggaaatgattcaaatgttgagcattttaacattttcccacgacaaagcatatgcggttgacctcatatcattaattgcactaccaatgattattgttaatagcgttggtacggcgatttttatgtctattatcatttcaacattaaagcaagaggagcaaatgaaggctgttcaaacacatgatgtactgcaattgatgaaccagacattgccgtattttaaagaaggattgaatagagaatcggcacagcaaattgcgatgattattaaaaatttaatgaaagtatctgccgtagcaattacaagcaaaaatgaaatcttatcgcatgtaggtgcaggtagtgatcatcacataccaacaaatgaaatattaacaagtctgtctaaagatgtattgaaatcaggaaagttgaaagaagttcatactaaagaagagattggttgtagtcatccgaattgcccgcttagagcagctatcgtgataccacttgagatgcatggttctatcgtcggtacattgaagatgtattttacaaaccctaatgatttaacttttgtggaacgtcaacttgcagaaggattggcaaatatttttagtagccaaattgaacttggtgaagccgaaacgcaaagtaagttattgaaagatgctgagattaagtcattacaggcacaagtgagtccacattttttcttcaattcaattaacacgatctcagctttagttagaataaatagcgaaaaggcacgagagttactattagaattgagttattttttcagagcgaatttacaaggctctaagcaacatacgattactttagataaagagttaagtcaagtgcgtgcatacttatcactcgaacaagcacgttatccaggaagatttaatatcaatattaatgttgaagacaaatatcgcgatgtgcttgtaccaccatttttaattcaaattttagttgaaaatgccatcaaacatgcgtttacgaatcgaaagcaaggtaacgatattgacgtgtcagtgattaaagaaactgcaacacatgtacgtattattgtacaagataatggtcagggtatttctaaagataaaatgcatttgttgggagaaacatctgtagaatcagagtctggaactggtagtgctttagaaaatttaaacttacgcctaaaaggattatttggaaaatccgcagcattacaatttgaatcgacatcgagcggtaccactttttggtgtgtacttccttatgaaagacaagaggaggaataa

SEQ ID NO: 405147 - DNA, 741 bp, Staphylococcus aureus
atgaaagcattaatcatagatgatgagccattagcacgtaatgaattaacatatttattaaatgaaattggtggttttgaagaaattaatgaggcagaaaatgtaaaagaaacattggaagcactactgatcaatcaatatgacattatatttttagatgtcaatttaatggatgaaaatgggatcgaattaggagctaagattcaaaagatgaaagagccacctgcgattatttttgcaactgcacatgaccaatacgcagtacaggcatttgaattaaatgcgacagactatattttgaaaccgtttggtcaaaaacgtattgaacaagcagtcaataaagtgcgtgcgactaaagccaaagatgataataacgcaagtgcaattgcgaatgatatgtcggcgaattttgatcaaagcttacctgttgaaattgacgataaaattcacatgttaaagcaacaaaatattattgggattggcacacataatggtattacaaccatacatacaacgaatcataaatacgaaacaacagagccattgaatcgttatgaaaaacgattgaatcccacttattttatacgtattcatcgttcatatattattaacacgaaacacattaaagaagtgcaacaatggtttaactatacttatatggtaatattgacaaatggtgtcaagatgcaagttggacgttcatttatgaaagattttaaagcgtcgataggattactttaa

SEQ ID NO: 405148 - DNA, 438 bp, Staphylococcus aureus
gtgaaacaacaaaaagacgcatcaaaaccagcacacttttttcaccaagtcattgtaattgctttagtactctttgtatcgaaaataattgaatcatttatgccaattcctatgcctgcatcagtaatcggtttagtattattatttgtattattatgtactggtgctgttaagttaggcgaagtcgaaaaagtaggaacgacactaacaaataacattggcttactcttcgtaccagccggtatctcagttgttaactctttaggtgtcattagccaagcaccatttttaatcattggactaataatcgtctcaacaatactattacttatttgtactggctatgtcacacaaattattatgaaagttacttcgagatctaaaggtgacaaagtcacaaaaaagatcaaaatagaggaggcacaagctcatgattaa

SEQ ID NO: 405149 - DNA, 702 bp, Staphylococcus aureus
atgattaaccacttagcactaaacacaccttacttcggaatactgttatccgttataccatttttcttagcgaccatattatttgaaaaaactaatcgtttcttcttattcgcaccgctatttgtcagtatggtatttggtgtggccttcctctatttaacaggcattccgtataagacttacaaaataggtggagacattatttacttcttcttagaaccggcaacaatctgttttgcgattccgttatataaaaagcgtgaagtgcttgttaaacattggcatcgtatcatcggaggtattggtatcggtacagttgtagcgttattaattattttaacttttgcgaagttagcacaatttgccaatgatgttattttatcaatgttacctcaagcagcaactacagcgattgcgttaccagtatcagctggtatcggtggtataaaagaattaacatcattagcagttattttaaatggtgtcattatttatgccctaggtaataaattcttaaagcttttccgaattactaaccctattgcccgaggattagcacttggaacaagtggtcacacattaggtgtagcaccagccaaagaattaggacctgtagaagaatcaatggcaagtatagctttagtgttagttggtgtagttgttgtagcagttgtgcctgtctttgtagcaatattcttctaa

SEQ ID NO: 405150 - DNA, 705 bp, Staphylococcus aureus
ttgttaaagtatgaacatattgctaagcaacttaatgcgtttatacatcaatctaatttcaaacccggtgataaattgccaagcgtgacgcaattaaaagaacgttatcaagtaagtaagagtactatcattaaagcattaggcttattggaacaagatggtttgatctatcaagcacaaggcagtggtatttatgtgagaaatattgctgatgccaatcgtatcaacgtctttaagactaatggtttctctaaaagtttaggtgaacaccgaatgacaagtaaggtacttgtttttaaggagattgcaacgccacctaaatctgtacaagatgagctccaattaaatgcagatgataccgtctactatttagagcgattaagattcgtggacgatgatgttttatgtatcgaatattcttattatcataaagaaatcgtgaaatatttaaatgatgatattgctaagggctctatcttcgactatttagaatcaaacatgaaacttcgtattggtttttcagatattttctttaatgtagatcaactcacttcaagtgaagcttcattactacaattgtctacaggtgaaccatgtttacgttaccaccagactttttatacaatgactggcaaaccctttgattcatctgacatcgtatttcattatcgtcatgcacagttttatattcctagtaaaaagtaa

SEQ ID NO: 405151 - DNA, 792 bp, Staphylococcus aureus
atgagcaataaatataaagaacaagcccaagacattcttacagctgtaggtggtgtcgaaaacattgttgatgcaacgtatgatacgaagtgcattacaattcatatgcaacatacaattccttctacagcaaatgaagtgaaacaaatagttgatgtgacatctgtagcagaaaatgatacgcagttagtcataaaattaaatggaaatgtcgatgaagtgtatcagcaattacagcgattaattaagaatgctaatgtcgaagagagtgagaatactgacaatattaatagtcaagatacaagttatacacctcaagtaaaagtaacaacaccaattttagtgaaagcaccaatcgctggtcgtcgtattttacttaaagaagtaagagattcaatttttagagagaaaatggtaggtgaaggcttagcaatcaaagctcatgaagaatccaaagtaatcgcaccgttcaatggtttaatatctatgattgtaccaactaagcatgcagttggtattcaatcagaagacggtgtggacatagtcattcatattggcgtgaatacagttgacttggaaggtaaagggttcaagtgctttgtaaagcaaaatgatcatgttgaagcagggcaaacgttgttgcaattcgaccagcaatatatacaacaacaaggctacaatgctgacgttattgtcgttattagcaactctgccgatttaggaaaagtagaactgacaatgaatgaaatcattacgactgaagatgttatttttaaaatatttaaaaactag

SEQ ID NO: 405152 - DNA, 1437 bp, Staphylococcus aureus
atgacaaaattaccgcaaaatttcatgtggggtggcgctcttgccgcaaatcaatttgaaggtggatatgataaaggtggtaaagggttaagtgtaattgatgttatgacgagtggtgcacatggcaaagcacgtcagattacagaatctatagatcccaatcactattatccaaatcatgaaggtattgatttttatcatcgttataaggaagatattgccttgtttaaagaaatgggattgaaatgtttacgtacgtcgattgcgtggacacgtatctttccgaatggggatgaagatgtgccaaatgaagaaggactcgccttttatgatcgtatctttgatgaattaattgcacaaggtattgaacctgttgtgacgttatcacattttgagatgccacttcatttagcgaaacattatggtggatttagaaatagagaagttgtcgattattttgtgcattttgcgcgtgttgtatttgaaagatataaagataaagttacatattggatgacgtttaatgaaattaataatcagatggacacatcaaatcctatctttttatggacgaattctggggtagcattgacagaaaatgataatcctgaagaagtcttgtatcaagtagcacatcatgaacttttagccagtgctttagcagttcgtcttggtaaagagattaatccgaagtttaagattggaacaatgatttcacatgtacccatttatccatattcgtgtcatccgaaagatatgatggaagcacaaattgcgaatcgcttacgtttctttttcccggatgtccaagtgagaggttattatccaagctatgctaaaaaaatgttggcacgaaaaggatatgatgttggatggcaagaaggggacgacagtattttacagcagggcacggttgattatattggctttagttattacatgtctacggctgtaaaacatgatgttgatactacagttgaaaacaacatcgtcaacggtggtttgaatcattctgtggagaatccgcatatcgcaacgagtgattggggttgggcgattgatccagatggcttaagatatacattgaatgtgttatatgatcgttatcagttaccactttttattgtggaaaatggttttggtgcagttgatgaagtggtagatggacatattcatgatgattatcgcattgaatatttaaaagcacatattacagcagcgatagaagcagttgatcaagatggtgtagatttaatcggttatacaccgtggggaatcattgatattgtttcatttacaaccggtgaaatgaagaaacgctatggtttaatatatgttgatcgagataatgatggtcatggcacgatggaacgcttgaaaaaagattcgttctattggtatcaacaagtgatagcatcaaatggagataaattataa

SEQ ID NO: 405153 - DNA, 762 bp, Staphylococcus aureus
atgtctaaagaagctggtcatacatttttagctaaattaggaaaaactcgtctacgccccggtggtaaagaagcaacagattggttaatacaacaaggggcattttcacaagataaacaagtgttagaagtggcatgtaatatgtgcacaacatctatttatctagctcatacatatggctgtcacattcaaggcgttgatataaataagaaagcattagaaaaagcacaggaaaacatttcagcagcaggtcttgaatcatatattcaagttcaacaagcgaatgctgttaaattgccctttgatgacaatcaattcgatatcgttttaaatgaagcaatgttaacaatgttacccatcgccataaaggaaaaagcattacgcgagtactaccgagtcttaaagcctgggggtatcttgttaacacatgatattgtcatcgttaatgaatcacatgccacacatgttgttaaatcattatctgcagcaattaatgtcaatgtctcaccgcagacgaaacttggctggttagatttatataatcaagctggttttaatcatgtgcattatcatactggtccaatgagtttaatgacaccaaaaggtttaatttatgacgaaggtattgttggaactataaagattatcaacaatgctttgaaaaaagaaaatcgaccaatgttttgtaaaatgtttaaaacgatgactaaattgcgtaaagatatgaattatattacttttgtcgctaaaaaagagcactaa

SEQ ID NO: 405154 - DNA, 915 bp, Staphylococcus aureus
atgaccaacaaagttgttattttaggttcaacgaatgtcgatcaatttttaacagttgaaagatatgcacaaccaggcgaaacattacatgttgaagaagcacaaaaagcattcggcggaggtaaaggtgccaaccaggctattgccactgcacgcatgcaagcagacacaacatttattactaaaattggcactgatggcgttgctgatttcatcttagaagattttaaagtagctcatattgatacatcatatattatcaaaacagctgaagcaaaaacgggccaagcctttatcactgtgaatgcagaaggacaaaacaccatctatgtttatggtggtgcgaatatgacgatgacacctgaagatgttattaacgcaaaagacgctataatcaatgcagactttgtcgttgcacaattagaagtacccatcccggctattatatctgcatttgaaattgccaaggcacatggtgtgacgacagtattaaatcctgcaccagcgaaagcattacctaatgaattattatcattaatcgatattattgtgccaaacgaaacagaagccgaattgttatctgggattaaagtaactaatgaacaatctatgaaagacaatgccaattactttttatctataggcattaagactgttttgattacgctaggtaagcaaggtacatattttgctactaaaaatcaaagccaacacatcgaagcttataaagtaaatgcgattgatacaactgctgcaggcgacacatttattggtgcatttgtcagtcgcttaaacaagtcgcaagataacttagcagatgctattgattttggtaataaagcgagctcactcactgtacaaaaacacggcgcgcaagcatctattcctctactagaagaagtaaatcaagtttaa

SEQ ID NO: 405155 - DNA, 405 bp, Staphylococcus aureus
atgaaaaaatcagctgttttaaatgaacatatttcaaaagcaatcgcgacaattggtcattttgatttattaacgattaatgacgctggcatgccaattccaaatgatcatcgtcgtatcgacctagctgtaactaaaaacttaccacgctttattgatgtcttagctacagtgttagaagaaatggaaatccaaaaaatatacttagcagaagaaataaaagaacataaccctacacaattgcaacaaattaaacaattgatttcatcggaaatcgaaatcattttcattcctcacgaagaaatgaaaagtaacttagctcacccattaaataaaggtaatattcgtactggtgaaacaacgccctactctaatattgcattagaatcgaatgttactttttaa

SEQ ID NO: 405156 - DNA, 882 bp, Staphylococcus aureus
atgagcattgttgcattacttatcgggttaggccccttaattggctggggcttcttcccaacagtcgcttcaaagtttggtggtaaacctgtacatcaaattatcggtgctactgtaggtacgttaatcttcgctattatattagccgtagtcacatcaagtggcttccctactggaaccaatttgctattcgccttattatcaggtgcaggatggggattcggacaaatcattacatttaaagcgttcgaattagtcggctcatctcgtgccatgccagtcacaacagcatcccaattattaggcgcatctttatggggtgtctttgcattaggaaattggccaggcattggtcataaaatcattggatttacagctttagtcgttattctaattggagcgcgtatgacagtttggagtgaacgcaaagaagcaagtaacgccaaaaatttacgtcgtgcagtggtacttctgttaattggtgaatttggatactggttatattcagctgcaccgcaagcaacttctattgatggcctaactgcctttttacctcaagcaatgggtatggtaattgttgcagtcatttatggctttatgaatatgaaagcagagaatccattccgtaataaaattacgtggttacaaattatttcaggtttcttctttgcatttggtgctttaacatatcttatttcagcacaacctaatatgaatggtttagcaactggatttattctttctcaaacatccgttgtgcttgctacattaactggtatttatttcttaaaacaacataaaacgtcaaaagaaatggttattacaatcatcggcttagtactcattttagtagccgcttctgttacagtatttataaaataa

SEQ ID NO: 405157 - DNA, 999 bp, Staphylococcus aureus
atgaaaaaagtgtcaattaaagatgttgctagagaagctggtgtatcagttacaactgtgtcacatattttaaatcataatgatagtcgtttttccgcaacaacgataaaaaacgtacatgctgtttcagaacgtttaggctatgcccctaataaacatgcaaaacaattgcgcggcagtaaaattcaaactattggcgtcattttgcctagcttaacaaatccgtttttctcagcactgatgcaaagtattcatgaccataaaccatctgatgttgatttatgctttttaacatctacagcaactgatttgtatgacaatattaaacatttaattgatcgaggtattgacggattaattatcgcacaatacatatcatccccggacgccctaaataactatctaaagaaacatcatgtaccttatgtcgtactggatcaaaatgaccatcaaggctatacagattttgttcggacaaatgaatatcaaggtggacaacttgcagcacaacatttaatagaactcggtcacaaccatatgataattgttgcaccatatgacatgatggcgaatatgtcgactcgtgtcgctggatttgtcgatactttgcgcgcgaatcaattgccagaaccacaaatcgtccatactgaattatctaagcgcggtgggctaaccattgttgatgacatcatggttcaatctgccactgcaatcttcgctattaacgatgaactcgctattggcattttacgaggactaattgaacatggcatcagtatcccgaaagatatctcattaataggttatgacgacattgattatgcagcgtacgtctcgccacctttaactactgtggcacaacctataactgatattggcaaaacatctttaaccttattacttcaacgattacagcacttagataaatccattgatatgattgaattaccaacgactttaaaaattcgtgcaacaactggctatcatctttcaaactaa

SEQ ID NO: 405158 - DNA, 393 bp, Staphylococcus aureus
atgcaattcaaattaaaagaagaagagattattagttttttagaattgaaatatccagaaaaagagttcgaatatggtcgtttgttagttggacaacataaacgtgatgatttagatgtttattactttggtgatacgtttttaatgtgcacgattatttcattcaagacatttgaaattaaagaaacagtagaattatcatatgatgctgttaatcgtattgtgttaaaagatggatggttatttagaaaaatgagaatagaaacaatgcaaaaagtgttaaaatacggtacatctaaattaatgttaactgattttcaaaaagagaattataataaatatattcaaggtcagaaacaacgcgtgatatttgaaaatggccattttgtctaa

SEQ ID NO: 405159 - DNA, 405 bp, Staphylococcus aureus
ttgaaatactttaaaaaaataagacactttgcccaacttacactaccaataaaaacttctgttagaattcctcaaaatgatatttcgcgacatgttaatgaaattgttgaaacgatacctgatagcaaattcgatgaattcagacatcatcgtggcgcaacatcctatcatccaaagatgatgttaaaaatcatcttatatgcatatactcaatctgtattttctggtcgtagaatagagaaattacttcatgacagtattcgaatgatgtggttagctcaagatcaaacaccttcttataaaactattaatcgttttagagtgaatcctaatactgatgcgttaattgaatctttatttattcagttcgcttatttttcttggatttcttgtatatcattttaa

SEQ ID NO: 405160 - DNA, 1377 bp, Staphylococcus aureus
gtgaataacacacaatcttcaccacgcagtaatattattattgcgattatgttgtctgcattaacatattggttgtttgcacaatcatttattaatataggacctctcgttggtcaaacgtatcaaacctctcctgccgtgttaaatttatctattagtttaacttccttcgccacaggtatcttcatggtggctgcaggtgatattgctgataaaataggacaactgagaatgacatacatgggtctcataatcagtatgtttgcatctcttctattaattatatcggacatcactgcactgctcatcatcggtagaattttacaaggtctatcagcagctatcttgttaccttcaacagttggcgtgttaaataatcaatttaaaggagaacatttaagacgagcgattagttatctaatgattagtactgttggtggcatcggcctagctggtgttatcggcggtttaattgcctcaaatttcggatggcaaacgaatttcatcattagtatagtcattgctttcattgccatattgcttctaaaaggcacacctgaaaaagtaagtcaacatagccaccgtcatccattcgattacaaaggtatgtcgattttcgctgttatgattggtagctttacattattgttaacacaaggattcgaacaaggttggtttagtacattttcaatcatttgtctgagcatttttatcatcactacgttgatattcatcatcatcgaacgtcgacatgaagtaccttttattgatttctcagtattacgcaaccgtccgttcattggtgcatttttaaataactttgttttaaatagcggtctaggcgtaacagtggtctttttcatatatgctcaaacacaccttggtttatcagctgcgcaatctggacttgttacattgccatatgccattgtggcagttgcgatgattcgtttaggtgaaaaagcaacattacgtttcggtggcaaattgatgctcatcattggtccgttgttccctgtcatcggcatcactattattagcatgactcaattattggcatcacaatatgtcattgcagttatcattggtttcgtcatatgtgcgataggtaatggtttagtcgcaacacctggacttacgattgcaattttcagtatgcctaatgaaaaagttggtttagctacaggattatataaaatgagtggtacattaggtggcgcctttggtatagcactaagtactacagttttcagtatgttacaactaaactatgcaccaagtgtagctgcaaccgtaacatttatagtcagcattgtattgatgatccttggctcattgtctgcatacatgatcattccaaaaacagttaaatcttaa

SEQ ID NO: 405161 - DNA, 993 bp, Staphylococcus aureus
atgtgcacaggattcacaatacaaactttaaataatcaagtacttcttggacgcacgatggattatgattatccattagatggttcgccagcagtgacgcctagaaattatcgttggaaatctcgcactggcacgacaggccaaacgcaatatggctttattggcacaggaacagatatggaaggttttatttatggtgatggtgttaatgaacatggcgttgccatttcaacacaatatttccgaggttatagttcatatggatcaacacacaaagcggacgcgatgaatattacgcaaaatgaaattgtgacatggattttgggatatacaacaagcattgaagatatgaaacaacaagcatcccaaatacatgttgtagctgtatatttaaatgacatcggtgaagttccgccattgcattatcatgtttccgatgcaactggacatacagtcgaagtttcatttaaagagggtgaagtggttataaaagataatcctattggtgtcttaacaaatcatccagacttaaattggcattatagtaatttaagacaatatatcaatatttctccttatccagcaacagcaaatttattggaaggtgtaacgattgaacctttaggcaatgaagcaggtacatttggattgccaggtggatttacttcaactgagcgctttgtgagaatggcatttatgaaagcaaacattgctcaaaacaatgataaagaaatggatttaatgaatgcattttatttattagatgcggtaaatataccgattggaattgtacgtccgcatgatgctgacaatcactatacgatgtatcagaccgtaataaatttaactacaagaacgttatatattaagtattatggcagcaatgaattagtagcattaaagctcacagatgatttaattaatagaaaagatatgacgatttttaagcctgagaagcatatcactattagaaagttgaatgacaatcaatag

SEQ ID NO: 405162 - DNA, 951 bp, Staphylococcus aureus
atgaaaaaattaacagcagcagcgattgcaacgatgggcttcgctacatttacaatggcgcatcaagcagatgcagcagaaacgacaaacacccaacaagcacatacacaaatgtcaacacaatcacaagacgtatcttatggtacttattatacaattgattctaatggggattatcatcacacacctgatggtaactggaatcaagcaatgtttgataataaagaatatagctatacattcgtagatgctcaaggacatacgcattatttttataactgttatccaaaaaatgcaaatgccaatggaagcggccaaacatatgtgaatccagcaacagcaggagataacaatgactacacagcgagtcaaagccaacagcatattaatcaatatggttatcaatcaaatgtaggtccagacgcgagctattattcacatagtaacaacaaccaagcgtataacagccatgatggtaatggaaaggtcaattatcctaatggcacatctaatcaaaatggtggatcagcaagtaaagcgacagctagtggtcatgcgaaagacgcaagctggttaacaagtcgtaaacaactacaaccatatggacaatatcacggtggtggtgcgcattacggtgtcgactatgcaatgcctgaaaattcaccagtttactcattaactgatggtacagtagtacaagcaggttggagtaactatggtggcggcaatcaagtaacgattaaagaagcgaacagtaataactaccaatggtatatgcataataatcgtttaactgtttcagctggtgataaagtcaaagctggtgaccaaattgcatattcaggtagtacgggtaattcaacagcgcctcacgtacacttccaacgtatgtctggtggcatcggtaatcaatatgcagtagacccaacgtcatacttgcaaagtagataa

SEQ ID NO: 405163 - DNA, 660 bp, Staphylococcus aureus
atgatagaaattaataacctttcaaagcgttaccgtaacaaacagattttcaatcatttaactatgtcctttgatagtaatcgtttaaccgtattacttggtgataatggtgctggaaaatcaacattacttcgtatgattgctggtattgaaaaagctaatgatggaactatcaactatttcggcgaaaaatggaatcaaagacaaatacaaaatcacatcggttatgtgccacaagacattgcgttatttgaacacatgacagtggctgaaaacattaaattttttaaatcactttgtaaaaatccaattaacgatacaactatcaacgaatatttacagcaattaaactttgatgatacgtctgccaaagtatctacattgtccggtgggaataaacgtaaaattaatatattagtaggtttactaggtcaacctcgaattctcattttagatgaaccgacagttggtattgatttaaaatctagacatgacatccaccaactacttaacatcatgaaatctaaatgtttaattatattaactacccatcatttagatgaagttgaagcacttgcagatgatatcaagttaattggccaagatcctttttatcaacatgttttagaggacaaacaatggacttatacctattattaa

SEQ ID NO: 405164 - DNA, 921 bp, Staphylococcus aureus
atgaagccttatatacaacttgttgtgttcaagcaatggttacaatacatcttgctcgtaacaaccattgtcatcgcactcgtacttattggtatcggttaccgtgtagcacatgacaacttcaaaataccgattaccattcaagatttagaccaaaccactgcatcaaaatcattcgtcaataaaattaaacaatctgactatgtaactattaaaaaagtcgatgaagatgaaagctatattgaagatgatgttactaaaaaggaagctattttaagtatgcaaattcctaaaggtttctctcaaaaattaaaagagaaccgtttaaaagaaacgatacagttatatggtagagatgactttataggtggtattgctgtagaaattgttagtagttcattatatgagcagcaaattcctaacattatttatgaacaccttgaggatatgaaacagcatcaatccatcgatgctatcaacaagtcctatcataaacatacacctgaatctaaaatcaaatttgtgtcgcttactaaacaagcacaacactctatttcaattagcttaatctttgcggtgattttatttgttagcgctgttcaagtagtacttcattatcgtttaaaccaacaagcagcattgcaacgattatcacaatatcatttaagccgtttcaaactatatagtacttatgtaatgacacatacgattttgttattgttggtactattggcagttagtctatatttgtctcaaccactcagcttaatattttacttaaaatcactgttacttatattgatttatgagataggtatcgtctttatcttattccatattcaaacaataagtcatcgattattcatgacatttatatatgcacttgctatgggtatcgtatacttgattattttcatgtaa

SEQ ID NO: 405165 - DNA, 1167 bp, Staphylococcus aureus
atgaaaacaatacatttgtttcgcatctaccactcttttttattgaaaaagtggtatttgattatctatttactatttatattagcggcactccttattacattaacgacaatccaacatgtaacagaagatgacaatcattttaatataggtgtcgtagataaagatcaatcaagtgaaacgaaattaatcttaaactctattggtaaagggagtaacctaggaaaaaacgtgagcattaaagcatatgatgataagcaagcacatactttgttaaaaaaacataaacttcaaggctattttgtttttgataaaggtatgaccaaggcattttataaacaaggcgaactaccaatttcagtatatacatatgatcaacaatccatgaaaagtgtcgtgctatctcagctaacagattctgtttaccaacgtcttatgcgatcaatgggtggcatcttagcttttcaagacttagcaccgaaagcatcacattctgacagtatcaatgttatgactgatttgctgattacaggattaaaccgttcaggtgcatttaacttagaaccgattcatttatacgatacgggcagttattatgcaattacaggatttttaacaacggtattcatctttgcactatctttatttacagttttgaaaatgaatcaagatactgtattgaaagcgcgattgaaaatgtttcatttttctaaagagcgtttattaatcattcgtacgttgattacatggttttatactatgttatggagtatcgttggtgtagtttggattgtgttcagtattccgaatatctttgaattatataattggccaacgttagccattcatttaagctattatgttacctttttaatactgtggttattactcatcgaacttttaacaacaggcttgttgaatagtattagtaaagtcatattagctattgtcatcctggtgttatctggtttaacaatacctacgatttttttacaacatatagcaaatggtgttttcaatattcaaccgttcgcagttgtaacaaatcaattgttagaaattattttaaacaactacattttagaactgcaccctagtttctatcttagcttcatcgcacttttgataattaatttagctgtattggtttggaggtatcgtcaatga

SEQ ID NO: 405166 - DNA, 1524 bp, Staphylococcus aureus
atgtctaaaaagttaaaaattataattcctattattattgtcttactattaataggtggaatcgcatggggagtttatgcattttttgctaatacaccgaaaaatacatacctaaaaagtgaacaacaaacagcaaaaatgtataaagattattttaatgaccgttttgaaaatgaagtgaagttccaagaaaagatgaaagataattcgtttttatcttcattagaattaagcgcagatgcatcagatgaaattgttaaagggcttggcattcctaaatctgttgttaatgcatcgaaaattaaaatgtcatatggacatgatcctaaaaaagagaaatcaatgattaatcttgaaccaacaatcgcagactctgcattagggaaattccagttagctgcagataaagataagcattatttcgaatcaccattatttaaagggaaatatagtgttaataattctgatttattatcaacttattcaaaacttacaggtgaagatgaagaaacagcaaaagaaaatggtattacaaaccaacaactaaatttaaatactctttttaataatgctcaagcacaacaaagtgactacagcaaaattgccgaaaaatattccgaacttattgtcgacaaattagatgacgataattttgataaaggtaaaaaagaagaaattaaggttaatggtgaaaagtacaaagttagacctgtcacgttaacacttagcagagctgacactaaaaaaattacattagctgtattagaagaagctaaaaaggataaagaccttaaaaaattaatggaagaacaaggtgctacaaaagactttgaaaaagacatcaaaaaagcaattgacgatgtcaaagaaactaaaaaggatgaatttgctaaaattcaatctaaaatttataccgaaaaacatacgattgtaaaacgagaaattactattacagacaaagaaaataataaaactaaaatcaaaggtactaatactttagaagacgataagttaaaactagattacgcacttgatttcgatcaagataaatacacgtatgctgaagcgaaatatacaattaaaggcgtatcttctaaagaaaaagataataaatataatgataaatacgaatttggtaaaaagacagaatatgatgaatcaaaaatcaaattagataaccaagaaaaagtagatggcacaaaacgtcaagataaaggtaaaatcactgtcgcattagataaatatagcgacgaaaatgaattcacttttgaaaataatatagattctgacgtaaaaaataacactcagaaatctacgttaaatatcggcatcaaatatgctgaagaaccaattaatttcattttaaaatctagcacaaaattgaaagcagatattgattttgatgatagtggtgcaaaagatttcaatagtctatcttcaaaagaccgtgaaaaacttgaaaaagaaatcgaaaaaaatggcggcaaaatgtttgaatcaattttaaaaaaggcatctaaataa

SEQ ID NO: 405167 - DNA, 654 bp, Staphylococcus aureus
atggaattgaaagtcgatgattttgtaaagaatataaaaagaccatacttgactgtattgggagtatttgtagttgcagtttcattattttttgacgcgattatgtttttctacgctaaactatatgataaattgcctatgtatttactggtgtttatggcctttacagctgtaattttgattatgatgtacatacaagagaaaaatgaaaattacaaagttgaaaaaagatatgtggttagatatctcacacttaacgttattgtgggatatactttgccattgctttttgtatctatttacgtttttggtgtagtcggttttggatttgatgttttcaattattgtctaggtattatcttgatgttatttatttcttggttaggtttatttttattttataaaaacgaatttgatagtgaaaatcctaatcctgcagttaatgccatagcaattattataaaattatttgcttttggaggaatattttatataagtctaatagttcctgtaacacagcaagaagagatttttatagggttaagtatattcatcaatataattgttgatgctcttcttgttaggtcatattttaattacgcgttatataagagtattaagaaagatatcgaaaatgaaggtaagacaatgtaa

SEQ ID NO: 405168 - DNA, 588 bp, Staphylococcus aureus
atgataatttttattttaataacaatatttgctatttattatatagctatgattgctagtttgtttaaaagtgaaggtttttcaataataggtttaatattagatgttgttataatggggacattgattttttactattttataggcgctcgctttgttgatcatgatttaagcaactttttaatgtttatggatactggatcatatatttttatgtactttgcaattaagtgtttatgggtgaaacctaaggtagtaaattatttgattgcaaaagaattgggtgaatctaaagaggtcattgaagagcaggaattagatttacagacatcaaagataagaggtatctactttttcattatttcagtagtgatgttaattatcactaaattaagaatgcaacctgagttacaggcagatgctatatcgatgaatcctgtatttatttttgttggtgttataatcattttaatttggctagtactggatatatatcgcaagaaaaaatacggtatattcttattcaagacgatagtgccactagttgttacgacttggattattatagctacaattatactttcgtaa

SEQ ID NO: 405169 - DNA, 903 bp, Staphylococcus aureus
atggttattatgaagaaaacaattttactgacgatgacaactcttactttatttagtatgtcgcctaactcggctcaagcatatacgaatgatagcaaaacattagaagaagcaaagaaagcacacccaaacgcacagttcaaagtgaataaagacaccggcgcgtatacttatacatatgacaaaaacaacacgccaaacaacaatcatcaaaaccagtcacgtacaaacgacaatcatcaacacgcaaatcaacgtgatcttaacaacaatcagtaccattcttcattaagtggtcagtatacgcacattaatgacgcaattgattcacacacaccgcctcaaacgtcaccaagcaatcctttgacaccagcaataccgaatgtcgaagacaatgacgatgaattaaataacgctttttcaaaagataacaaagggcttattacaggcatcgatttagacgaattgtatgacgaattacaaatcgccgaatttaatgacaaagcaaagaccgctgacggtaaacctttagcattaggtaacggtaaaatcattgatcagcctcttatcacaagtaagaacaacttatatactgctggacaatgtacatggtatgtctttgataaacgtgccaaagatggacacacgattagtacattttggggagatgctaaaaactgggcaggccaagcttcaagcaatggcttcaaagtagatagacacccaacacgaggatcaattttacaaacagtaaatggtccatttggtcatgtagcctacgttgaaaaagttaatattgatggaagtattctaatttcagaaatgaactggattggtgaatatatcgtttcatcaagaaccatctctgcttcagaagtttcatcatataattacatccattaa

SEQ ID NO: 405170 - DNA, 294 bp, Staphylococcus aureus
atggcaatgattaagatgagtccagaggaaatcagagcaaaatcgcaatcttacgggcaaggttcagaccaaatccgtcaaattttatctgatttaacacgtgcacaaggtgaaattgcagcgaactgggaaggtcaagctttcagccgtttcgaagagcaattccaacaacttagtcctaaagtagaaaaatttgcacaattattagaagaaattaaacaacaattgaatagcactgctgatgccgttcaagaacaagaccaacaactttctaataatttcggtttgcaataa

SEQ ID NO: 405171 - DNA, 3030 bp, Staphylococcus aureus
atgaaaaagaaaaattggatttatgcattaattgtcactttaattattataattgccatagttagtatgatattttttgttcaaacaaaatatggagatcaatcagaaaaaggatcccaaagtgtaagtaataaaaataataaaatacatatcgcaattgttaacgaggatcaaccaacgacatataacggtaaaaaagttgagctgggtcaagcatttattaaaaggttagcaaatgagaaaaactataaatttgaaacagtaacaagaaacgttgctgagtctggtttgaaaaatggtggataccaagtcatgattgttatcccagaaaacttttcaaaattggcaatgcaattagacgctaaaacaccatcgaaaatatcgctacagtataaaacagctgtaggacaaaaagaagaagtagctaaaaacacagaaaaagttgtaagtaatgtacttaacgactttaacaaaaacttagtcgaaatttatttaacaagcatcattgataatttacataatgcacaaaaaaatgttggcgctattatgacgcgtgaacatggtgtgaatagtaaattctcgaattacttattaaatccaattaacgacttcccggaattatttacagatacgcttgtaaattcaatttctgcaaacaaagacattacaaaatggttccaaacatacaataaatcattattgagtgcgaattcagatacgttcagagtgaacacagattataatgtttcgactttaattgaaaaacaaaattcattatttgacgagcacaatacagcgatggataaaatgttacaagattataaatcgcaaaaagatagcgtggaacttgataactatatcaatgcattaaaacagatggacagccaaattgatcaacaatcaagtatgcaagatacaggtaaagaagaatataaacaaactgttaaagaaaacttagataaattaagagaaatcattcaatcacaagagtcaccattttcaaaaggtatgattgaagactatcgtaagcaattaacagaatcactgcaagatgagcttgcaaataacaaagacttacaagatgcgctaaatagcattaaaatgaacaatgctcaattcgctgaaaacttagagaaacaacttcatgatgatattgtcaaagaacctgatacagatacaacatttatctataacatgtctaaacaagactttatagctgcaggtttaaatgaggatgaagctaataaatacgaagcaattgtcaaagaagcaaaacgttataaaaatgaatataatttgaaaaaaccgttagcagaacacattaatttaacagattacgataaccaagttgcgcaagacacaagtagtttgattaatgatggtgtcaaagtgcaacgtactgaaacgattaaaagtaatgatattaatcaattaactgttgcaacagatcctcattttaattttgaaggcgacattaaaattaatggtaaaaaatatgacattaaggatcaaagtgttcaactcgatacatctaacaaggaatataaagttgaagtcaatggcgttgctaaattgaaaaaggatgctgagaaagatttcttaaaagataaaacaatgcatttacaattgttatttggacaagcaaatcgtcaagatgaaccaaatgataagaaagcaacgagtgttgtggatgtaacattgaatcataaccttgatggtcgcttatcgaaagatgcattaagccagcaattgagtgcattatctaggtttgatgcgcattataaaatgtacacagatacaaaaggcagagaagataaaccattcgacaacaaacgtttaattgatatgatggttgaccaagttatcaatgacatggaaagtttcaaagacgataaagtagctgtgttacatcaaattgattcaatggaagaaaactcagacaaactgattgatgacattttaaataacaaaaagaatacaacaaaaaataaagaagatatttccaagctgattgatcagttagaaaacgttaaaaagacttttgctgaagagccacaagaaccaaaaattgataaaggcaaaaatgatgaatttaatacgatgtcttcaaatttagataaagaaattagtagaatttctgaaaagagtacgcaattgctatcagatacacaagaatcaaaatcaattgcagattctgttagtggccaattaaatcaagtcgacaataatgtgaataagctacatgcgacaggtcgagcattaggcgtaagagctaacgatttgaatcgtcaaatggctaaaaacgataaagataatgagttgttcgctaaagaatttaaaaaagtattacaaaattctaaagatggcgacagacaaaaccaagcattaaaagcatttatgagtaatccggttcaaaagaaaaacttagaaaatgttttagctaataatggtaatacagacgtgatttcaccgacattattcgtattattgatgtatttactatcaatgattacagcatatattttctatagttatgaacgtgccaaaggacaaatgaatttcattaaagatgattatagtagtaaaaaccatctttggaataatgtcattacgtcaggtgttattggtacaactggtttggtagaagggttaattgtcggtttaattgcaatgaataagttccatgtattagctggctatagagcgaaattcatcttaatggtgattttaactatgatggtcttcgtacttattaatacgtatttactaagacaggtaaaatctatcggtatgttcttaatgattgctgcattgggtctatactttgtagctatgaataatttgaaagcagctggacaaggtgtgactaataaaatttcaccattgtcttatatcgataacatgttcttcaattatttaaatgcagagcatcctataggcttggtgctagtaatattaacagtacttgtgattattggctttgtactgaacatgtttataaaacactttaagaaagagagattaatctaa

SEQ ID NO: 405172 - DNA, 459 bp, Staphylococcus aureus
atgttgatgaatagcgtgattgctttaacttttttaacagcatctagcaataatggcggacttaatattgatgtgcaacaagaagaggaaaagcgaatcaataatgatttaaatcaatatgatacaacgctatttaataaagacagcaaagcggttaatgatgcgattgctaagcagaaaaaagaacgacaacaacaaataaaaaatgatatgtttcaaaatcaagcgagtcactcgactcgcttgaatgaaactaaaaaagtgttattttccaaatctaacttagaaaagacttcggagagtgataaaagcccctatattcaaaacaagcaggagaaaaaaatattcccgtacattttgatgtctgtaggggcttttttgactttaggatttgtcattttttcaattcataaagggagacgaacgaaaaatgaatcagcacgtaaaagtaacatttga

SEQ ID NO: 405173 - DNA, 243 bp, Staphylococcus aureus
atgaatcagcacgtaaaagtaacatttgattttactaattataattacggcacatatgacttagcagtaccagcatatttaccgataaaaaacttaatagctttagtattggatagtttggacatttcaatatttgatgtcaatacacaaattaaagtgatgacgaaaggtcaattacttgttgaaaatgatcgactcattgattatcaaatcgctgatggagatattttgaagttactatag

SEQ ID NO: 405174 - DNA, 1335 bp, Staphylococcus aureus
atggttaaaaatcataaccctaaaaatgaaatgcaagatatgttaacgcctttagatgctgaagaagcagctaaaacaaaattacgcttagatatgagagagattcctaagtcttcaattaaaccagaacattttcatttaatgtacttattagaacaacattctccatattttatagatgctgaattaactgaactacgtgacagtttccaaatacattatgacattaatgacaatcatacaccttttgataatattaaatcatttactaaaaatgaaaaattacgttacttactcaatatcaaaaatttagaagaagtaaatcgtacacgctacacatttgtgttggcaccagatgaattatttttcacaagagatggattacccattgctaaaacaagagggttacaaaatgttgttgatccattacctgtgtcagaagctgaatttttaacaagatataaagcgctggttatctgtgcattcaatgagaaacaatcatttgatgctttagttgaaggaaacttagaactacataaaggaacgccatttgaaactaaagttattgaagcggcaacgttagatttactaacggcatttttagatgaacagtatcagaaacaagaacaagattatagtcaaaattatgcatatgtacgcaaagtaggacataccgttttcaaatgggttgctatcggtatgacaacgttaagtgttttattaattgcattcttagcctttttatatttttcagtaatgaagcataatgagcgcattgaaaaaggataccaagcatttgtaaaggatgattatacgcaagtactaaatacgtatgatgatttagatggtaaaaaattagataaagaggcactttacatttatgccaaaagttatatccaaacaaataaacaaggtttagaaaaagataagaaagaaaatttacttaataatgtgacaccaaattcaaacaaagactacttattatattggatggaattaggacaaggacatcttgatgaagcgattaatattgccacttatttagatgataacgatattacaaagttagcgttgattaataaattaaatgagattaaaaataacggagatttatcgaatgataaacgttctgaagaaacgaaaaagtataacgataaattgcaagatattttagacaaagaaaaacaagttaaagatgaaaaagcgaaatctgaagaagagaaagcaaaagcgaaagatgagaaattaaagcaacaagaagagaacgaaaagaaacaaaaagaacaagcacaaaaagataaagaaaaacgccaagaagctgaaagaaaaaaatag

SEQ ID NO: 405175 - DNA, 4440 bp, Staphylococcus aureus
atgcataaattgattataaaatataacaaacaattgaagatgctcaatttgcgagatggtaagacatatactattagcgaagacgagcgtgcagatattacgttgaaatcgttaggcgaagtcattcatttagaacaaaataatcaaggtacttggcaagcgaatcatacttctattaataaggtgcttgttagaaaaggtgaccttgatgacattacattacagctttatacagaagctgattatgcatcatttgcgtatccttcaattcaagatacgatgacaattggaccaaatgcgtatgatgatatggttattcaaagcttgatgaatgccatcattattaaagattttcaatcaatacaagaatcacaatacgtacgcattgtgcacgataaaaatacagatgtgtatattaactatgaactacaagagcaactaacgaacaaagcttacattggtgatcatatttatgttgaagggatatggctcgaagtacaagctgatggtttaaatgtattgagtcagaatacagtggcatcgtcattaattcgcttaacacaagagatgccacatgcacaggcagatgattacaatacgtaccatcgttcgccaaggattattcaccgtgaaccgacggatgatattaagattgaaagaccgccacagccaatacagaagaacaatacagtgatatggcgttccattataccgccattagtaatgattgctttaactgttgtcatctttttagtgagaccaattggtatttatattttaatgatgattggtatgagtacagtaacgatagtatttggtattacaacgtatttctctgaaaagaaaaagtataacaaagatgttgaaaaacgagagaaagattacaaagcttatttggataataaatctaaagaaattaacaaagcgattaaagcacaacgttttagtttgaattaccattatccaacggttgctgaaattaaagatatcgttgaaacgaaagcaccaagaatatatgaaaaaacatcgcatcatcacgatttcttacattataagttaggtattgcgaatgtagaaaagtcattcaaattagattaccaagaagaagaatttaaccaacgtcgtgatgaactattcgacgatgctaaagaattgtatgaattttacacagatgtagaacaagcaccattaatcaatgatttaaatcatgggccaattgcatatattggtgcacgacatctcattttagaagaattggagaaaatgctaattcaattgtcaacattccatagttatcatgatttagagtttctatttgtgacacgtgaagatgaagttgaaacattgaaatgggcacgttggttgccacatatgacattgagagggcaaaacattagaggatttgtttacaatcaacgaacgcgtgaccaaattttaacgtcaatttatagcatgattaaagaacgtatccaagctgtgcgtgaacgcagcagaagtaatgagcaaattattttcacaccgcaattagtgtttgtcattacagatatgtcattaattattgatcatgtcattttagaatatgtaaaccaagatttatcagaatatggtatttcattaatctttgttgaagatgtgattgaaagtttgccagagcatgtagataccattattgatatcaagtctcgtactgaaggcgaactgattacgaaagaaaaagaattagttcaattgaaatttacacctgaaaatattgataacgtcgataaagaatatatcgcgcgacgtttggcgaatttgatacacgtcgaacatttgaaaaatgcaattcctgatagtattacatttttagagatgtataacgtgaaagaagtagatcagcttgatgtggttaatcgatggagacaaaacgaaacatacaaaacgatggcagtacctttaggtgtaagaggtaaagatgatattttatcattgaacttacatgaaaaagcacacgggccacatggtttagttgctggtaccactggttcagggaaatctgagattatccaatcatacattttatctttagctattaattttcaccctcatgaagttgcattcctattgattgactataaaggtgggggtatggcgaacttatttaaagatttagtccatttagttggtacgattacaaacttagatggcgatgaagcgatgcgtgccttaacatcaatcaaagccgaattgagaaaacgtcaacgtttattcggagagcatgatgttaaccatattaatcaataccataagttatttaaagaaggtattgcgacagaaccaatgccacatttattcattatttccgatgagtttgccgaattaaaatcagaacaacctgattttatgaaagaacttgtatcaacggcacgtattggacgttcgttaggtattcatttaatacttgcgacacaaaaaccatcgggtgttgttgatgaccaaatttggtctaactctaaatttaagttggcattaaaagtacaagatagacaagacagtaatgaaattttaaaaacaccagatgcagcagacattacattaccaggtcgtgcgtatttacaagttggtaataatgaaatttatgaattattccaatctgcatggagtggtgcaacatatgacatcgaaggcgataaattagaagttgaagataagacgatttacatgattaatgactatggtcaacttcaagcaatcaacaaagacttgagtggacttgaagatgaagaaacgaaagaaaatcaaactgagttagaagcggtcatagatcatatcgaatctattacaacacgattagaaatcgaagaagttaagcgtccatggctaccaccattgccagaaaatgtatatcaagaagatttagtagaaacagatttcagaaaattatggtcagatgatgcaaaagaagtggaattaacattaggacttaaagacgtaccagaagaacaatatcaaggaccgatggtattgcaattgaaaaaagctgggcacatcgcgttaatcggaagtccaggatatggtagaacaacgttcttacacaacattattttcgatgttgcaagacaccatcgtcctgatcaagcacacatgtacttgttcgatttcggtaccaatggtttgatgccagttacagacataccacatgtcgctgattactttacagtagatcaagaagacaagattgctaaggcgatacgtatatttaatgatgaaattgatcgtcgtaagaagattttaagtcagtatcgtgtcactagtatttctgaatatcgaaaattaactggtgaaacaattccgcatgtctttattcttattgataactttgacgcagtaaaagattcacctttccaagaagtttttgaaaatatgatgattaaaatgacgcgtgaagggctagcattagacatgcaagtaaccttaactgcttcaagagctaacgctatgaaaacaccaatgtacattaatatgaaaacgcgtatcgcaatgtttttatatgataaatcagaggtgtcgaacgtagtaggacagcaaaaatttgcggttaaagatgttgtgggtcgagcattgttaagtagtgatgacaacgtatcattccatattggccaaccatttaaacatgatgagaccaaatcatataatgatcaaattaatgatgaagtatcggcgatgacagaattttataaaggtgaaacaccaaatgatattcctatgatgccagatgaaattaaatatgaagattacagagaatcattaaacttaccagatatagttgcaaatggtgctttaccaattggattagattatgaaggtgttacactacaaaaaattaaattaactgaaccagcaatgatttcatcagaaaatccgagagaaattgcgcatattgctgaaattatgatgaaagaaattgacatattaaatgaaaaatatgcgatttgtatcgcagactcaagtggagagtttaaagcttataggcatcaagtggctaactttgccgaagaaagagaagacattaaagcgattcatcaactaatgattgaagacttaaagcaaagagaaatggacggcccatttgaaaaagattcactttatattatcaatgattttaaaacatttattgattgcacgtatattccggaagatgatgttaaaaagcttattacaaaaggaccagaacttggcttgaacattttatttgtcggcattcataaagaattaatagatgcttatgataaacagattgatgttgcacgtaaaatgattaaccaatttagtataggtattcgtatttcagaccaacaattctttaaatttagatttattcaacgagaacctgttattaaagaaaatgaagcatatatggtcgcaaaccaagcttatcaaaagattagatggtttaaatag

SEQ ID NO: 405176 - DNA, 393 bp, Staphylococcus aureus
atgaattttaatgatattgaaacaatggttaagtcgaaatttaaagatattaaaaagcatgctgaagagattgcgcatgaaattgaagttcgttctggatatttaagaaaagctgaacaatataagcgattagaatttaatttgagttttgcactagatgatattgaaagcacagcaaaggacgtacaaactgcaaaatctagtgctaataaggacagtgtaactgttaagggaaaggcgcccaatacgttatatattgaaaaaagaaatttgatgaaacaaaagcttgaaatgttgggtgaagatatcgataaaaataaagaatccctccaaaaagctaaggaaattgctggcgaaaaggcaagtgaatattttaataaagcaatgaattaa

SEQ ID NO: 405177 - DNA, 315 bp, Staphylococcus aureus
atgggtggatataaaggtattaaagcagatggtggcaaggttgatcaagcgaaacaattagcggcaaaaacagctaaagatattgaagcatgtcaaaagcaaacgcaacagctcgctgagtatatcgaaggtagtgattgggaaggacagttcgccaataaggtgaaagatgtgttactcattatggcaaagtttcaagaagaattagtacaaccgatggctgaccatcaaaaagcaattgataacttaagtcaaaatctagcgaaatacgatacattatcaattaagcaagggcttgatagggtgaacccatga

SEQ ID NO: 405178 - DNA, 678 bp, Staphylococcus aureus
atgatgaaagatgttaagcgaatagattatttttcttacgaagaattaacaattttaggtggtagtaaattgcctctcgtaaattttgaattgtttgatccatcaaattttgaagaagctaaagctgctttaattgaaaaggaattagtaacagagaatgacaagttaactgatgcaggttttaaagtggctacattagtcagagagtatattagcgccattgtaaatattcgaattaatgatatgtattttgcaccatttagctatgaaaaagatgaatatattttgttaagccggtttaaaaataatgggtttcaaatacgaattatcaataaagacattgcatggtggtcgattgtacaatcatatcctttattgatgagacaagaaaagtccaatgattgggactttaaacaaattgacgatgaaacattggagaacttaaataatgaaagtatcgatacgattgggcgtgttttagaaattgaaatatacaatcatcaaggtgaccctcaacaaagtttatataacatttatgaacaaaatgatttgttattcattcgatacccattaaaagataaagtgctgaatgttcatattggtgtcattaatacatttatacgagaattatttggattcgatactgatgaaaatcatattaataaagcagaggagtaa

SEQ ID NO: 405179 - DNA, 312 bp, Staphylococcus aureus
ttgagtggaaaaattagtgttaaagctgaaacgattgcacatgttgtaaaagaattggaaagcataagtcaaaagtatgatgaaatagctcaaaactttggaaaaatagcgcaattaaattactacagtagtgaaaaagctgcacattctatggaaaatggctatagtagtgctgcaacagtcattagtggtctcaaaggtccattgagtacactcggtggtggcgtcatgaattcagcacaaaagttctttgaagcagatgaacattggggtacggaatttgccaagctttactataatattgagggatag

SEQ ID NO: 405180 - DNA, 1854 bp, Staphylococcus aureus
gtgcatgacatgacaaaagatattgaatatctaacagctgattatgacaatgaaaagtcatctatccaaagtgtaatagatgcaatagagggtcaagacttcttagatgtagatacaacaatggatgatgcggtaagcgatgtcagttctttagacgaagatggcgcaatatcattaacaagtagtgtagtaggtccacaaggatctaaattaatggggtattatcaaaatgagttatatgattatgcatctcaattagattcgaaaatgaaagaaattattgacacgccatttatagaagatatagataaagcattcaaaggtataacgaatgttaaattggaaaatatactaattaaaaatggtggtggacatggtagagatacctatggggcttctgggaaaattgcaaagggagatgccaagaaaagtgacagcgatgtttatagcatcgatgaaatattaaaatcggatcaagaatttgtaaaagtaattgatcagcattacaaagaaatgaaaaaagaagataagaaattatctaaaagtgattttgaaaaaatgatgactcagggcgcttcttgtgattacatgacagtagctgaagcggaagagctagaggagcaaaagaaaaaagaagaagctatagagattgcagcactagctggtatggtagttttatcttgtattaatcctgttgctggagcagtagctattggtgcttattccgcttattcagcagcaaatgcagccacaggaaaaaatattgtaactggaagaaagctatctaaagaagaacgaatcatggaaggactttcgcttattccattgccaggtatgggcttcctcaaaggtgctgggaaaagtttaatgaaattaggcttcaaaggcggagaaaaatttgcagttaaaacaggattgcaaaagacaatgcaacaagcagttagtcgtatttcacctaaaatgggaatgatgaaaaacagtgtgttgaatcaatctcgtaactttgctcaaaatactcatgttggacaaatgctgagtaacatgcgtggtcaagcaactcatactgttcaacaaagtagaaattggattggacaacaagcacaaaatgtcaaacgaatagtgaataatggacttgataaagaaatagcacatccatttaaacaacaacttgcaccagcgggaatgggtggtataaaatttgctgaaacaactactttgagaaacatgggtcaaaacataaagcgtgctgttacaccacaaaatcacgtgacacatggtccaaaagatagtatggtgagaagtgaaggcaaacatagtataagtagccatgaaatgaattcatcaaagtatgttgaatcaccaaactacaccaaggttgaattcggagaacactatgcaagacttagacctaagaaactaaaggcgaatattgaatacacaacacctactggtcacatatatcgaaccgatcataaaggtcgcataaaagaagtttatgtagacaatctctctctaaaagatggggatcgtaatagccatgcacaaagaactgtggggggagaggatagattaccagacgatgatggaggtcacttaatcgctagaatgtttggtggttcaaaagacattgataaccttgtggcacaaagtaaatttatcaaccatccatttaaggagaaaggtcattggtataatcttgagaaagagtggcaagagttcttaaactctgggaaagaggtgaaaaatattaaaatggaagtaaaatatagcggtaatagtcaaagaccgactatatttaaagttgaatatgaaattaatggtgaaagaaatattagaagaatattaaataagtag

SEQ ID NO: 405181 - DNA, 408 bp, Staphylococcus aureus
atggcatatatagatgacggaggaggagaagtgttctactattacacagaacctggaagtaatgaattatactactatactagtgtattaaataaatatgatatatcggaatcggaatttatggattcagtgtatgagttgtataaacaatttcaaaatttaaggaatttatttaaagaagaaggacatgaaccatggacatcatgcgaatttgactttacaagagaaggtgaattaaaagtttcatttgattatattgattggataaattcagaatttggtcaagtaggtcgacaaaattactataagtatagaaaatttggaattttaccagaaacggaatatgaaattaataaagttaaagaaatcgagcaatatgttaaagagcaagaagaagctgaacaatag

SEQ ID NO: 405182 - DNA, 153 bp, Staphylococcus aureus
atgattttcgaagaaaaactaaatgaaatgtacaacgagattgcgaataaaattagtagcatgataccagtagaatgggaaaaggtatatacaatggcttatatagatgatggaggaggtgaagtattctttaattatactaaacagcgatga

SEQ ID NO: 405183 - DNA, 300 bp, Staphylococcus aureus
gtgcaagtatttgatgatttatggatggatttatatgatttgtttgaggaattaagaaatttatttaaagaagaaggactagaaccatggacatcatgcgaatttgattttacaagagaaggtaaattaaaagtttcatttgattatattgattggataaattcagaatttggtcaagtaggtcgacaaaattactataagtatagaaaatttggaattttaccagaaacggaatatgaaattaataaagttaaagaaatcgagcaatatattaaagagcaagatgaagctgaactatag

SEQ ID NO: 405184 - DNA, 492 bp, Staphylococcus aureus
atgactttcgaagaaaaattaagtgaaatgtatagcgagattgcgaataagattattagcatgataccggtagagtgggaaaaagtatatgcaatggcatatatcgatgaagaatgtggagaagtgttttacaattatactgaaccaagcagtgatgaattattttactatacaagtgtgataaagaagtataatttattgaaatcaagctttatggattcagtatatgagttgcatgatcaatttgaggaactaagagaagtatttatagaagaaggtcttgaaccatggacatcatgcgaatttgattttacaaaagaagataaattaaaagtttcatttgattatattgattggataaatacagagtttgatcaattaggccgtgaaaattattatatgtacaaaaaatttggtgttttaccagaaacggaatatgaaatggaggaggttaaagaaatcgagcaatatattaaagagcaagaagaatag

SEQ ID NO: 405185 - DNA, 684 bp, Staphylococcus aureus
atgactactaaagaaaatattgatactcttcgaaagccaggcgcacaagccttaagtttaatatcattgtttttgatacttttttcatgtttgactttcttttttggtttagattatgaaaggtttccaaattatttaaagataacgacaattatagaattaataattatcataattagtttacttcaatggattagatttatagatttcgaaaaagaaagtgcacagaaatataaaaaaatatatgctcgatttttagttgttataaatgtgttaactactatcactgtagtatttgcactgtgtaatctttattattttgcagctgtacaaaaccattatgatttatttaattattggttgatgggttcgatttcaatcataattagctatttattattagtaattggcggaatgttcacgttattaaaattacctaaagtaacaaaacgttggggtggtaaaactaaaacacatttcggtttattattaaccgcgttgagcgcatttatatatattgaaaaaattatcgaatatatattggttcctaatgtcgtagaatctaagtttgtcataatggtaagtatcattattattgcttgtacacaatttgtggcatttcaatttattatgcaatacagtagattctatatttttgaattaaacactgaagatgatgactaa

SEQ ID NO: 405186 - DNA, 612 bp, Staphylococcus aureus
atggagttcttattattaattgtcgtagccggactgtattatattatatatttaactgctgtgatgtattctgaaaaaatagtagtattgcctataatcatctatgccattgtgtttgtaataattggtatcacttatatctttataggcgacagctatgatcaattaacaaatttcaatgtgattttgtatatggggagtttgttttatgcatggatggctattagaaatctttggaacagaccactattactaaaatataagaacattacagatagttcaagtggaatagttaataaatctgaatacaattcagttgaaagcttacgtataaatattgaaatagctaagtataaagggattatttctttgatagtagctatagtactaacggtattaatgacattaaagtcaacacctcaaatcactgcagaaacacgtgacttaagtatctcatttttcatactcagcttatttatcattattatatttgcagtttgggatttgtttattagaattagaaaaggaacgtttgcttttgttgtaataaggccaatattatttagttgttggttatttattttgaatatgattttatcaagattattataa

SEQ ID NO: 405187 - DNA, 501 bp, Staphylococcus aureus
atgactttcgaagaaaaactaagtgaaatatacaacaagattgcgaatgagattagtgggatgataccagtagaatgggaccaagtatttacgatagcttatgtaaatgatagaggtggagagatcgtttttaattatactaaaccaggtagcgatgaattgaattattacacatatatccctagagagtataatgtctctgaaaaagtattttatgatttgtggacggatttatatagattgtttaagaagttaagaaacgcatttaaagaagaagatttagaaccatggacatcatgtgaatttgactttacaagagatggtaaattgaatgttgtatttgattatgttgattggatgaattcagaatttggtccaatagcaaaagaaaattattatatgtacaaaaagtttggtgttttaccagaaacggaatatgaaattaataaagttaaagaaatcgatcaatatgttaaagagcaagatgaagctgaactatag

SEQ ID NO: 405188 - DNA, 501 bp, Staphylococcus aureus
atgactttcgaagagaaactaagtcaaatgtacaataaaattgcaagtgagatcagtggaatgataccagtagaatgggagcaagtatttacaatagcttatgtaactgatcaagctggggaagtcatttttaattatactaaaccaggtagtgatgaattaaattattattcagacatacctaaagattgcaatgtctcaaaagatatttttaagaattcatggtttaaagtttatcgaatgtttgatgagttaagagaaacttttaaagaagaagagcttgaaccatggacatcatgcgaatttgactttacaagagatggcaaattgaatgtatcttttgattatattgattgggtgaattcagaatttggaccaatgggaagagaacattattatatgtataaaaaatttggaatttggcctgaaaaagaatatgccataaattgggttgaaaaaataaaagattatgttaaagagcaagatgaagctgaactatag

SEQ ID NO: 405189 - DNA, 501 bp, Staphylococcus aureus
atgactttcgaaggaaaactaagtcaaatgtacaacgagattgcgaatgagattagtgggatgataccggtagaatgggagcaagtatttacaatagcttatgtaactgatcaagctggagaagtcatctttaattatactaaaccagatagtgatgaattaaattattattcagacatacctaaagattgcaatgtctcaaaagatatttttaagaattcatggtttaaagtttatcgaatgtttgatgagttaagagaaacttttaaagaagaagggcttgaaccatggacatcatgcgaatttgactttacaagagatggcaaattgaatgtatcttttgattatatagattggataaatacagagtttgatcaattgggccgtcaaaattattatatgtacaaaaaatttggggttataccagaaatggaatatgaaatggaagaagttaaagaaatcgaacaatatattaaagagcaagaagaagctgaacaatag

SEQ ID NO: 405190 - DNA, 501 bp, Staphylococcus aureus
atgactttcgaagagaaaataagcaaattatataatgagattgcgaatgagattagcagtatgataccggtagagtgggaaaaagtatatacaatggcttatatagatgatggaggaggtgaagtattctttaattatactaaaccaggtagtgatgacttgaattattacaccgatatacctaaggagtataacatctctgtgcaagtatttgatgatttatggatggatttatatgatttgtttgaggaattaagagatttatttaaagaagaaggacttgaaccatggacatcatgtgaatttgactttacaagcgaaggtaaattaaaagtttcatttgattatatagattggataaatacagagtttgatcaattaggccgtgaaaattattatatgtataaaaaatttggggttttaccagaaatggaatatgaaatggaagaaattaaagaaatcgatcaatatattaaagagcaagatgaagctgaaatatag

SEQ ID NO: 405191 - DNA, 489 bp, Staphylococcus aureus
atgactttcgaagaaaagctaagtcaaatgtacaatgaaattgcaaatgaaatcagtggaatgataccagtagaatgggaaaaagtatatacaattgcctacgtagatgatgaaggtggagaggttgtttttaattatactaaaccaggaagtgaagatttgaattattattcagatattcctaaagattgcaatgtctcaaaagatatttttaagaattcatggtttaaagtttatcgaatgtttgatgagttaagagaaacttttaaaaaagaagatttagaaccgtggacatcatgtgaatttgactttacaagaaagggaaatttaaaagtatcatttgattatatagattggattaaattaggttttggcccatcaggaaaggaaaactactatatgtacaaaaaatttggtattttaccagatatggaatatgaaatggaagaaattcgagcagtagagaagtatgttaaagagcaagagtag

SEQ ID NO: 405192 - DNA, 375 bp, Staphylococcus aureus
atgaaaagaatattggtagtatttttaatgttagcaattatattggcaggttgttctaataaaggtgaaaagtatcaaaaagatattgataaagtgtacaaagaacagaatcaaatgaataaaattgcctcgaaagtacaaaacactattaaaacagacattaaacaagaagacagtaatacacatgtttataaagatggtaaagtcattgttattggtattcaattatataaagatcgtgaaaaaatgtattatttcgcatatgaaataaaagatggtaaggcagagattaatagagaaatagacccaattaagtatatgaaagaccataaagcagattatgaagatgaaaatgtagaagtggaaaaagattaa

SEQ ID NO: 405193 - DNA, 399 bp, Staphylococcus aureus
atggaaaaatcgatcaaaataatgacaataataggaattgttgttcagggtttagcaacggtatttagtttactattgatggttttagcagcatcaggtgtaatgactacagatgtgtcaacaacagttaatggtgaggttgacccagttgatgcagaaacagcagcagcaattttcactgtattattcttatccctattcatatttggaatcatttcaattattttaggtgcaatcggtatgtttaaagcatctaaaaacaaaaaaatgagtggtatattgttgattattggagctgtaataagtggtaacataattacatttgctttatggttaatcagtggtattaaactacttactaataacaagcctaaagatgaaataagcgacttatcataa

SEQ ID NO: 405194 - DNA, 825 bp, Staphylococcus aureus
gtgaaggagaaacatattaaatgggataagattttttatggggacgactgggtaaataacgtagtcgaaacgataagaacaaaagatatattacaaagcgtttatttaaaacgttatttattacgcgcgatgatggcaggatttattatcgggattattacggtcttcgtattatcagttaaagcaacacacgaaccagatttaccgccaggcattgtgaatatggccagtgccattacattcagctttgcgttagtactcattttatttacaaactccgaactactaaccagtaacttcatgtactttactgtaggcctgtattataaagtaattaaaccaactagagtattgaaaatatttttattatgctttgcaggaaatattttaggtgctgctattttatttagtttcatgcgtttttcaaatgtaatgacgccagatatgttaaatcagttatcagcagttatagagcataaaacgttgtctactggttttgtaagtatattaatgaaagcgatcttcgccaatttctttatcaatatttcattagttattgccatgcaaattgacgatgtactcgcaaaaatgtttgtcatgatgttcggtgttaccatattcgcctttatgggttatgaacacgtcgtttacaacagttgcttatttatgggtggtttaatttatcaagttgatacattgcacttcataccagctatttcgaatatcgctgcggcttttatcggtaactatattggaggcggactcattataggtttattctatgcttacttgaatgatcatcatcaattttataaaaataattaa

SEQ ID NO: 405195 - DNA, 1308 bp, Staphylococcus aureus
ttgaaaaaacaagttattatttcgggcctcatgttattttcactattttttggagccggaaatttaatattcccgcccatgcttggccatacagcgggtcaaaatatgtggattggtatgctaggctttgcccttacaggcatattactcccctttattactgttattgttgttgcattttatgatgaaggtgttgaaagtgtaggcaatcgtatacatccatggttcgggtttatttttgctgtcgtgatttacatgtctatcggagcattttacggtattccacgtgctgcaaatgtcgcgtacgaaattggtacaagacacattttacctgtgcataaccaatggactttaattatattcgcagcaatcttttttgccatcgtttactggattagtttaaatccatcgaaaatcgttgataatttaggtaaattattaacaccgttattactattaatggtcgctctattaagtattgctgtcattttcaaccctgaatctgcactaagtgcacctaaggataaatatataacacatcctttcatttcaggaagtttggaaggctattttacaatggatcttgttgctgcgttagctttttccgtagtcattgtcaatggctataagtttaaaggcctcacagatcgcatgaaaattttaaaatatgtctgcttttcaggtcttattgcagccatattacttggaatgatttactttgcacttgcatacgttggggcatcaacagctccaggaaactttaaagatggtacagatatattgacgtacaactcattacgattatttggttcgttcggtaacctcgtatttggaatgacggttatccttgcatgcctaacaacatgtataggactcgtcaatgcttgcgccacatttactaagaaacacgtacctaagttttcttataaaatattcgcacttattttctctatcatagggttcttatttacaacacttggtttagaaatgattttaaaaattgctgtcccattattgactttaatatatcccgtgtcgattgcacttgtactcatatcatttgctaacatgtttagcacattcagattcagttgggcctatcgactcgcaactgttattacattgattatttcaattttacaaatactaaatagtttcaacttattacacggtgttattttgaaatcgtttatgatgttacctttagcagatatcgatttagcttggcttgtaccattcatgctctttgctattatcggtttcataatcgatgtatttatacgccgtccgaaacaagcgacaacttaa

SEQ ID NO: 405196 - DNA, 891 bp, Staphylococcus aureus
atgaataaaatttcaaagtatattgcaatagcatcattatcggtagcggttacagtttcagcaccacaaacgacaaattctacagcgtttgccaaaagttctgctgaagttcaacaaacgcaacaagcttctataccagcatcacaaaaggcgaatcttggtaatcaaaatattatggcagtggcttggtatcaaaattcagctgaagcaaaagcattatatttacaaggttataacagtgcaaagacacagttagataaagagattaaaaagaataaaggtaaacataagttagctattgctttggatttagatgaaacagttttagataattctccatatcaaggctatgcatcaatacataataaacctttcccagaaggttggcatgaatgggtacaagctgctaaagctaaacctgtctatggcgcaaaagaattcttgaaatatgctgacaaaaaaggtgtcgatatctactatatttctgatagagataaagaaaaagatttaaaggcaacacaaaagaacttaaaacaacaaggtatccctcaagctaagaagagtcatattttactaaaaggtaaagatgataagagtaaagaatcacgcagacaaatggttcaaaaggatcataaacttgtcatgctatttggagataatttattagactttacagatccaaaagaagctacagctgaatctcgtgaagcattaattgaaaaacataaagacgatttcggtaagaaatatatcattttccctaacccaatgtatggtagttgggaagctacgatttacaacaataactataaagcaagtgacaaagcaaaagataaattacgtaaaaatgctattaagcaattcgatcctaaaacaggcgaagttaaataa

SEQ ID NO: 405197 - DNA, 1050 bp, Staphylococcus aureus
atgtttttagcttggaatgaaatacggcgcaacaaattgaagtttggactaattattggtgtgttaacgatgattagttacttgctatttttattatctggattggcgaatggtcttatcaatatgaataaagaaggcattgataagtggcaagcagatgccattgttctaaataaagatgccaatcaaactgtgcaacaatctgtttttaacaagaaagatattgaaaataaatacaagaagcaagctactttgaagcaaacaggggaaattgtgtctaatggccatcaaaaagacaatgttttagtgttcggtgttgaaaagtcatcatttttagttccgagtttaatagaagggcataaagcgactaaagataatgaagtgttagctgatgaaacgcttaaaaataaaggatttaaaattggtgacacattatcactatctcaatcagatgaaaaattgcatatcgtaggttttacagaaagtgcaaaatataatgcgtcatcagtcattttcacgaatgacgctaccattgccaagatcaatcctagattgactggagataaaattaatgcagttgttgtacgtgatacaaattggaaagacaaaaaattaaaccaagagcttgaagcggtaagtattaatgactttattgaaaatttaccaggttataaaccacagaacttaacattaaactttatgatttcattcttatttgtcatttcagctacagttataggcattttcctatatgtcatgacattacaaaagacgagtttatttggcatattaaaagctcaaggatttacgaatggctatttggcgaatgtggtaatttcgcagacggtcatattagcactatttggtacggcatttggcttactgttaacaggcgttacaggtgcatttttacctgatgcagtacctgtcaaattcgatgtactaacattgctcgtatttgcaattgtgttaatgattgtctctgtattaggaagtttattctccattttaacaattagaaaaatagatccgttaaaggcgattgggtag

SEQ ID NO: 405198 - DNA, 678 bp, Staphylococcus aureus
atgttgaaatttgaaaatgtaacaaagtcatttaaagatgggaatcgtaacattgaagcggttaaagatacaaattttgagataaataaaggtgatattatagcattggttggaccttctggctctggtaaaagtacatttctaactatggcaggtgctttacaaacaccgacatctgggcacattttaatcaataaccaagatattacgacaatgaagcaaaaagcattggcaaaagttagaatgtctgaaataggttttattttacaagctacaaaccttgtaccatttttaacggtaaagcaacaatttacattattgaaaaagaaaaataagaatgttatgtctaatgaagactatcagcaacttatgtcacaattaggtctaacttcattgcttaataagttaccttcagaaatttcaggtggtcagaaacaacgtgtggcgatagccaaagcgttatatacgaatccgtcgattattttagcggatgaacctaccgcggcgttagatactgaaaatgcgattgaagtcattaaaattctacgtgatcaagccaaacaaagaaagaaagcatgtattattgttacacatgatgaacgacttaaagcatattgtgatcgttcatatcatatgaaagatggcgtccttaatcttgaaaatgaaacagtagaatag

SEQ ID NO: 405199 - DNA, 1032 bp, Staphylococcus aureus
atggatttattgataggtactttatttttatttttggtcttagtgatttttacattatttacatataaagcgcctaatggtatgcgtgccatgggagcattagctaatgcagcaatcgcaacatttttagtggaagcatttaataaatatgttggtggcgaagtattcggtattaaatttttagaagagctaggagacgctgcgggaggtctaggtggtgtcgctgccgctggattaacagcattagctatcggtgtgtcaccagtatatgcattagttatagcagccgcgtgcggtggtatggatttattaccaggtttctttgcgggttatatgattggatatgtgatgaaatatacagagaaatatgtgccggatggtgtcgacttaattggatcgattgtcatcttagcgccattagctcgtcttattgcagtattattaacgccagtagtgaatagtacattgattcgaattggtgatattatccaaagtagtacgaatacgaatccaattatcatgggtatcattttaggtggtattattacggttgtcggcacagcgccattgagttcaatggcattgacagcattattaggtttaacgggtgtacctatggctattggtgccatggcagcatttagttcggcatttatgaatgggacgctattccatcgcttaaaattaggtgatcgtaagtctacgattgcagtaagtattgaacctttatcacaagcagatattgtatcagccaatccaattccaatctatattacaaatttctttggtggtgcgattgctggtttaattattgctatgtcaggtttaattaacgatgcgacaggtacagctacaccgattgcaggatttttagttatgtttggatttaatcatccgacgacaattgtgatttatggtgtagtaatggcgattgtaggtgcgcttgcaggttatcttggttcaattgtatttaaaaaatatccaattgttactaagcaagacatgattaatcgaggtgcagtagacgcatag

SEQ ID NO: 405200 - DNA, 1119 bp, Staphylococcus aureus
atgagcgattctgagaaagaaattttaaaaagaattaaagataatccgtttatttcacaacgtgaacttgctgaggcaattggattatctagacccagcgtagcaaacattatttcaggattaatacaaaaggaatatgttatgggaaaggcatatgttttaaatgaagattatcctattgtttgtattggcgcagcgaatgtagatcgtaagttttatgtgcataaaaatttagttgcagaaacatcaaatcctgtaacgtcaacacgctctattggtggcgtagcaagaaatattgctgagaacttaggtaggcttggcgaaacggtcgcttttttatctgctagtggacaagatagtgaatgggaaatgattaaacgattgtccacaccatttatgaatttggatcatgttcaacaatttgaaaatgcgagtacaggttcatatacagctttaattagtaaagaaggcgacatgacatatggcttagcagatatggaagtgtttgactacattacgcctgaatttttaattaagcgttcacacttattgaaaaaggctaagtgcattattgtagatttgaatttaggcaaagaggcattaaacttcttatgtgcctataccacgaaacatcaaatcaaattagttatcaccacggtttcttccccaaaaatgaaaaatatgcctgattcattacatgctattgattggattatcacgaataaagatgaaacagaaacatacttaaatttaaaaatagaatctactgatgatttaaaaatagctgctaaacgctggaatgatttaggtgttaaaaatgttattgtgacaaatggcgtgaaagaactcatttatcgaagtggtgaggaagaaatcattaagtcagttatgccatcaaatagtgtgaaagatgttacaggtgcaggcgattcattctgtgctgcagtagtgtatagctggttaaatgggatgtctactgaagatatattaattgctggtatggttaacgcaaagaaaacgatagaaacgaaatatacagttaggcaaaacctagatcaacagcaactttatcacgatatggaggattataaaaatggcaaatttacaaaagtatattga

SEQ ID NO: 405201 - DNA, 924 bp, Staphylococcus aureus
atggcaaatttacaaaagtatattgagtattctcgagaagttcagcaagcacgggagaacaatcaaccgattgtagcattagaatcaacaattatttcgcatggtatgccgtacccacaaaatgttgaaatggcaacaacagtagagcaaattatcaggaataatggtgccattccagcaaccatagccattatagatggcaaaattaaaattggtttagaaagcgaagatttagaaatactggcaactagtaaagacgttgctaaagtatctagaagggatttagcagaagttattgcgatgaagtgtgttggtgctactactgtagcgacgacgatgatatgtgctgcaatggctggtattcaattttttgttacaggaggtattgggggcgtccataaaggtgcagaacatacgatggacatttcagcagacttagaagaactgtctaaaacaaatgtcactgttatctgtgcaggtgccaaatcaattttagacttacctaagacgatggagtatttagaaacaaaaggcgttccagttattggatatcaaacgaatgaattgccagcattcttcactcgcgaaagcggtgttaagttaacaagttcggttgaaacgccagaacgacttgctgacattcatttaacaaaacagcagttaaatcttgaaggtggcattgttgttgctaatccaattccatatgagcatgccttatcaaaagcatatattgaggcaatcataaatgaagctgttgttgaagcggaaaatcaaggtattaaaggtaaggacgccacaccgttcttgttagggaaaattgtagaaaaaacgaatggtaaaagtttagcagcaaatataaaacttgttgaaaacaatgcggcgttgggtgctaaaattgctgtcgctgttaataaattattgtag

SEQ ID NO: 405202 - DNA, 1221 bp, Staphylococcus aureus
atgaatattttattcgctatcacagggatagcatttgcactatttgttgcgtttttattcagttttgatcgtaaaaaaatagacttcaaaaagacgttaataatgatatttattcaagtgttgatcgtgttatttatgatgaacacaacgattggtttgacaattttaactgcactaggttcattttttgaagggctaataaatattagtaaagcaggcataaattttgtttttggagatatacaaaataaaaatggctttacgttctttttaaacgtattactgccattagtttttatttctgtattaataggcatctttaattatattaaggtattaccatttattatcaaatatgtaggtatcgctattaataaaataactagaatggggcgcttagaaagttattttgctatttcaacagcaatgtttgggcaaccagaagtatatttaacaataaaagatattattccaagattatctagagcgaaattatatacaattgcgacgtctggtatgagtgctgttagtatggcaatgctaggttcatatatgcagatgattgaacccaagttcgtagttacagcagtaatgttaaatatttttagtgcgcttatcatcgccagtgtaatcaatccctataaatctgatgatactgatgttgaaattgataacttaacgaaatccacagaaactaaaacattgaatggaaaaacaggaaaacctaagaaagttgcctttttccaaatgattggtgatagtgcgatggatgggtttaaaatcgctgttgtagtagccgtaatgttgttagcatttatttcattaatggaagcaattaatatcatgtttggtagtgttggtttgaactttaaacagcttattggctatgtgtttgcaccaatcgcattcttaatggggattccatggagcgaagctgttccagctggctctttaatggcgactaaattaattacaaatgagtttgtagcaatgcttgattttaaaaatgtcctgggtgatgtatcagctcgaacacaaggtatcatttcagtttacttagtaagcttcgctaattttggtacggttggtatcatcgtaggttcaattaaaggcattagtgataaacaaggagaaaaagttgcatcctttgcaatgaggttgctacttggttcaactctagcttcaatcatttcaggatcaatcattggcttagtattgtaa

SEQ ID NO: 405203 - DNA, 1533 bp, Staphylococcus aureus
atgaaagaagttggatttggcacactaaactgggttgccgttatcatttatctactagctatgttgttcattggcgtttattttaccaagcgcgcgagccaaagtaccaatagtttctttaccgcaagtggtcgcttgccatcttgggtagttggcttttcaatttatgctactacgttaagtgcgattacatttatgtcgacaccagagaaagcatttttaacagattggtcatatatcgctggtaacattgctatcgtcgcaattattccattacttatttatttctatgtccctttctttaaaaagttaaaggtaacatctgcatatgaatatttagaagctagatttggccctagcatacgtgtcattggctcattattatttgtcgtttaccatttagggcgtgttgcaattgttatctacttaccaacattagcaatcacatctgtatcagacatgaacccttatatcgttgcatcactcgttggtttactatgtattttatatacatttttaggtggtttcgaaggtgtggtttggagtgatttcattcaaggcgtcattttattaggcggcgctttagttattattattctaggtgttgtgaacattaaaggcggtttcggcactgtctttgcagatgcgattgagcacaaaaaattaattagtgcagacaattggaaactaaatactgcggcagctgccattccaattattttcctaggaaatattttcaacaacttgtatcaatacacagcgagtcaagacgtcgtgcagcgttatcaagcttctgatagtttaaaagaaacaaataaatcgttatggacaaatggtatcctagctttaatttcagcacccttattttatggtatgggtacaatgctgtattcattttatacacatgaagctgttttaccaaaaggcttcaatacatcatctgtagtgccatatttcattttgactgagatgccaccatttgtagcaggattacttattgcagccattttcgccgctgcacagtctaccatttcatctagtttaaattctatatctgcttgtatttcaatcgacattaagcaacgcttcttcggaaaaggtagcgagcgacacgaagttaactttgcacgtttcattattatcattgcaggtattttcggttttggaatgtcactatacttaattgcttctaattcaaatgacttatgggatttattcttgtttgtgactggattattcggcgttccattggctggtgtatttgcagttggtattttcactaaacgtacgaatacattcggtgttatttgtggattaatattgggtatcatctttgcttatgtctataatggtgttggcaaaggtaactcacctttctatgtatctaccatttcatttacagttgcttttgtctttgcttatatacttagcttcattgtcccttcaaaacataaaaaagatataacgggattaacaatttttgaaaaagataaaccatcaacatacatttcaaaaacggctacgaaaaagtag

SEQ ID NO: 405204 - DNA, 882 bp, Staphylococcus aureus
atgaacaaagatttaaaaggtttatatgcagcgttactcgttccttttgatgaaaatggtcaagtaaatgaacaaggacttaaacaaattgctcaaaatgccattgaaactgaagaattagacggtctttatgtaaatggtagctcaggcgaaaactttttattaaatacagagcagaagaagcaagttttcaaggttgccaaagaggcagttggggataaagtgaaattgattgctcaagtaggttcgttagatttaaatgaagccattgaacttggaaaatatgccacagaactcggttatgatgcactttctgccgtaacaccattctactatccatttacttttgaagaaattagagattactatttcgatattatcgaagcaactcagaacaatatgattatttatgcaataccagatttaacaggtgtgaatatttctattgaacaattcagcgagctatttaatcatgaaaaaattgttggtgttaaatatacagcgccaaacttcttcctactcgaacgtattagaaaagcattcccagacaaattaatcttatctggctttgatgaaatgttagttcaagctacgatttctggcgtagatggtgcaattggttctacatataacgttaatggtcgccgtgcaagaaaaatcttcgacttagcacgacaaggtcaaattcaagaagcttaccaactgcaacatgattcaaacgacattatcgaaacagtgttatcaatggggatttatccaacattgaaagaaatattacgtcatcgtggcattgatgcaggattaccgaaaagacctttcaaaccttttaacgaagcacatcgacaaacattagatcaactcattgcaaaatacgatttatag

SEQ ID NO: 405205 - DNA, 861 bp, Staphylococcus aureus
gtgtattacatcgcaatcgatattggaggcactcaaattaaatcggcagttattgataagcaattgaatatgtttgactatcaacaaatatcaacgccggacaacaaaagtgagcttattactgacaaagtatatgagattgtaacaggatatatgaagcaatatcagttgatccaacctgtcataggtatttcatcagcaggcgttgttgatgaacaaaaaggcgaaattgtatacgcagggccaaccattccgaattataaaggtactaattttaagcgattattaaaatcactgtctccttatgtcaaagtaaaaaatgatgtaaacgctgcattactaggcgaattgaaattacatcaatatcaagcagaacggatcttttgtatgacgcttggtacaggcattgggggtgcgtacaagaataatcaaggtcatattgataatggtgagcttcataaggcaaatgaagttgggtatttattgtatcgtccaactgaaaatacaacgtttgagcaacgtgctgcaacgagtgcattgaaaaagcgcatgattgccggaggatttacgagaagcacacatgtgccagtattgtttgaagcagctgaagaaggtgatgatattgcaaaacaaatattgaatgagtgggcagaagatgtagcagaagggattgcccaaatacaggtcatgtatgatccagggcttatattaattgggggcggtatatctgaacaaggagataatctcattaaatatatcgagccgaaagttgcacactatttaccaaaagactatgtttatgcaccaatacaaacgactaagagtaaaaatgatgcagcattatatggctgtttgcaatga

SEQ ID NO: 405206 - DNA, 801 bp, Staphylococcus aureus
atgaaatttgagaatcgtgttcaacgttatcaacatttatttacaaaaactgataaacgcatcgtcaattatataagacaaaatggttatagcgatgccttttcaacgattaactccttagcccatgcgattggtacatcaccagcaacgatgacacgctttagtcataagctggattatgagaatttccaagatttaaaatttaatattcaacaagaaatgacagagacagttattgaaaatagcccaattattcaaagaattcataaatatcatcaacaaatcattcaacaaactggtgaatttattgataacgacattatccaaacctttatcgacaaacttcaatcaagtcgacatatactctttgctggactaggtagctctggtttatcagcgactgaattttattatcgtatgattcgtatggggctaaaaggtaatgttactaccgattcacatttaatgaaaatatcggcatccctactatctcattcggatatgtttattgctatgtcaaatagtggtaatacttcggaattaatttctgcagcggaagtcgccaaatctcatggtgcatatgtcgttgccatcacaaattttgaaggtagtaaacttacagattgtgcagatttagtacttttaacaacggatcaatcgcgtaataccgaccatcaatttatcaacacacaaattgcgacactctttttaatcgatatcgtgagttatcatttattagaaaatacgaatctgagtcaaacttatcaacatactaaatctattatcctagacaacaaataa

SEQ ID NO: 405207 - DNA, 669 bp, Staphylococcus aureus
atgttaccacatggattaatagtatcttgtcaggcactaccagatgaaccattgcattcatcttttattatgtcgaaaatggcattagctgcgtatgaaggtggtgcttttggtattcgcgcaaatactaaggaagacattttagcaattaaagaaacggtagatttaccagttattggcattgtgaaacgtgactatgatcactcagatgttttcattactgcaacgtcaaaagaagttgatgaactgatagaaagccaatgtgaagtcattgcattggatgcaacgttacagcaacgtccgaaagaaacgttagacgaattagtatcatatattagaacacatgcaccgaacgttgaaatcatggctgatatcgcgaccgttgaagaagctaaaaatgccgcacgacttggctttgattatattggcacgacgttacatggctatactagttatacgcaaggacaattactttatcaaaatgacttccaatttttaaaagatgtactacaaagtgttgatgcaaaagttattgcggaaggtaatgtcattacaccggatatgtataaacgtgtgatggacttaggcgttcattgttcagtcgttggtggtgcgataacacgaccaaaagaaattacgaaacgttttgttcaaattatggaagattaa

SEQ ID NO: 405208 - DNA, 1362 bp, Staphylococcus aureus
atgcatcatacagttttgtgtattcatttaaacaaaggggttgctttaatgaatcaatatcattctaatgcacaacaaccaagtgcatggcgtttttttgtctatagtttagtgggcatactatgtttctttattccttttacgattaatggtaacaacactattttcgtcgatcatgttcatctagccattcgctcaatcataggtccacttatgccctatgttgcactgattatgattttaattggtacagcgttaccaatagtgagacgtacttttatgacttcaatcacaaacttggtcattacattatttaaagttgcaggtgcaatgatcggtataatgtatgtatttaaaatcggtccatcaatactatttaaagctaactatggtccgtttttgtttgaaaaattaatgatgccattaagtatcttaattccagtaggtgcaattgcgctttctttattagtgggctatggcttattagaatttgtcggtgtttatatggagcctattatgagacctatttttaaaacaccaggaaaatccgctgtcgatgcagtggcttcgtttgtcggcagttattccttaggattattgattactaatcgtgtctataagcaagggatgtacaacaaacgagaagccacgattattgcgactggcttttcaacagtttcagcaacttttatgattatcgttgctaaaactttaggattaatgccgcattggaatttatacttttggataactttagtcatcacatttgtcgtgactgcaattactgcatggctaccgccaatcagcaatgaatcaacagaatattataacggacaagaaggagaacaagaagttgctattgaaggaagcagactgaaaactgcatatgcagaggcgatgaaacaaaatgcattaacaccatctctcgtgaagaacgtttgggacaatttgaaagacggtttagaaatgactgttggtattttaccttctatattatcgattggttttttaggactgattgtagcgaactatacaccattcattgattggcttggctatatcttctatccatttatttatattttcccaattgctgatcaggctttactagcaaaagcgtcagcgatttctattgtagagatgtttctaccatctttgttagtaactaaagctgcaatgagtactaaatttgtcgtcggtgtagtaagcgtatcagccattatctttttctcagcattagtgccatgtatactagcaactgaaattaaaatacctgtctggaaactcatcatcatttggtttttacgcgtggcgttgtcgctattaatcaccatccccgtcgctttacttatttttggataa

SEQ ID NO: 405209 - DNA, 2061 bp, Staphylococcus aureus
atgttaagaggacaagaagaaagaaagtatagtattagaaagtattcaataggcgtggtgtcagtgttagcggctacaatgtttgttgtgtcatcacatgaagcacaagcctcggaaaaaacatcaactaatgcagcggcacaaaaagaaacactaaatcaaccgggagaacaagggaatgcgataacgtcacatcaaatgcagtcaggaaagcaattagacgatatgcataaagagaatggtaaaagtggaacagtgacagaaggtaaagatacgcttcaatcatcgaagcatcaatcaacacaaaatagtaaaacaatcagaacgcaaaatgataatcaagtaaagcaagattctgaacgacaaggttctaaacagtcacaccaaaataatgcgactaataatactgaacgtcaaaatgatcaggttcaaaatacccatcatgctgaacgtaatggatcacaatcgacaacgtcacaatcgaatgatgttgataaatcacaaccatccattccggcacaaaaggtaatacccaatcatgataaagcagcaccaacttcaactacacccccgtctaatgataaaactgcacctaaatcaacaaaagcacaagatgcaaccacggacaaacatccaaatcaacaagatacacatcaacctgcgcatcaaatcatagatgcaaagcaagatgatactgttcgccaaagtgaacagaaaccacaagttggcgatttaagtaaacatatcgatggtcaaaattccccagagaaaccgacagataaaaatactgataataaacaactaatcaaagcgcctaaaacacgttcgactacaaatgcagcagcagatgctaaaaaggttcgaccacttaaagcgaatcaagtacaaccacttaacaaatatccagttgtttttgtacatggatttttaggattagtaggcgataatgcacctgctttatatccaaattattggggtggaaataaatttaaagttatcgaagaattgagaaagcaaggctataatgtacatcaagcaagtgtaagtgcatttggtagtaactatgatcgcgctgtagaactttattattacattaaaggtggtcgcgtagattatggcgcagcacatgcagctaaatacggacatgagcgctatggtaagacttataaaggaatcatgcctaattgggaacctggtaaaaaggtacatcttgtagggcatagtatgggtggtcaaacaattcgtttaatggaagagtttttaagaaatggtaacaaagaagaaattgcctatcataaagcgcatggtggagaaatatcaccattattcactggtggtcataacaatatggttgcatcaatcacaacattagcaacaccacataatggttcacaagcagctgataagtttggaaatacagaagctgttagaaaaatcatgttcgctttaaatcgatttatgggtaacaagtattcgaatatcgatttaggattaacgcaatggggctttaaacaattaccaaatgagagttacattgactatataaaacgcgttagtaaaagcaaaatttggacatcagacgacaatgctgcctatgatttaacgttagatggctctgcaaaattgaacaacatgacaagtatgaatcctaatattacgtatacgacttatacaggtgtatcatctcatactggtccattaggttatgaaaatcctgatttaggtacatttttcttaatggctacaacgagtagaattattggtcatgatgcaagagaagaatggcgtaaaaatgatggtgtcgtaccagtgatttcgtcattacatccgtccaatcaaccatttgttaatgttacgaatgatgaacctgccacacgcagaggtatctggcaagttaaaccaatcatacaaggatgggatcatgtcgattttatcggtgtggacttcctggatttcaaacgtaaaggtgcagaacttgccaacttctatacaggtattataaatgacttgttgcgtgttgaagcgactgaaagtaaaggaacacaattgaaagcaagttaa

SEQ ID NO: 405210 - DNA, 828 bp, Staphylococcus aureus
gtgactgaaattaaagataaagtaattactaaagatgcatttgcattaccttacacaattattaaagcaaaaaatcaaccaacaaaaggcgctattgtctacatccacggtggtggattaatgttcggtaaagctaacgatttatccccacagtatatcgatatccttacggaacattacgatttaattcaactaagttatcgtttattaccagaagtaagtctcgattgcattattgaggatgtctacgcatcattcgatgcgattcaatcacaatattctaattgccctatttttacctttggcagatcatcaggtgcatatttaagtctattaattgcacgagacagagatattgatggtgttattgatttttatggttatagtcgcatcaacactgaaccttttaaaacaactaatagttattacgcaaaaatagctcaaagcgtaaacgaaacaatgattgcacaactcacttcaccaacaccggttgttcaagatcaaatcgcacaacgttttttaatctacgtttatgcacgtggcacaggtaaatggataaatatgattaacattgctgattatactaattcaaaatataatattgcaccagatgaacttaaaacacttccacctgttttcattgcgcattgtaatggcgattatgatgttcccgttgaggaaagcgaacatatcatgaatcatgttccacattcaacatttgaacgcgtgaataaaaacgagcatgattttgatcgtagacctaatgacgaagcaatcactatttatcgtaaagttgttgatttcttaaacgctataacaatgatgtaa

SEQ ID NO: 405211 - DNA, 1200 bp, Staphylococcus aureus
atgtaccgatacaaaccacttttacaatcaatccacttacctaatggcatcaaaatttcgaatcgctttgtattatcaccaatgaccgtaaacacatcaacaaaagaaggctatattacaaaagaagacttggcttatgctgcacgtcgctctaattcagctggaatgcaagtcaccggcgctgcttacattgaaccttatggtcaattgtttgaatatggctttaatattgatcatgatgcttgtatccctggattaactaacatggcatctacgatgaaacaacatggtagcctcgctattatccagctagcgcatgctggtcgtttttcaaatcaagccattttaaattttggaaaggtgtatggaccaagccctatgacattgcattcaccgattgaacacgatgttatcgccatgtctcatgagaaaatcaatagcatcattcagcagtatcgcgatgctacattacgcgcgattaaagcaggttttgatggtgtggaaatttcgattgcacaacgtttgctgattcaaacatttttctcaactttttcgaataaacgtacagaccattacggtgccgactcattaaaaaatcgtgcaagattatgtttagaagttatgcgtgcggtacaagaagtgattgataaagaagcacctgacaattttattttaggatttcgagcaacgccagaagaaaccagaggcagtgatttaggatataccattgacgagttcaaccaattaatcaattgggtcatggacgtttcaaacatccaatacttagcaatcgctagctggggtcgacatatttatcaaaatacgtctcgtacaccaggtgatcatttcggtcgaccagttaaccaaattgtctatgaacatttagcaggtcgtatccctttaattgcaagtggcgggattaattctccagagtctgctttagatgctttacaacatgcagatatggtcggcatgtcttcgccttttgtcacagaacctgactttgtgcataaacttgctgaacagcgaccacatgatatcaatcttgaattttctatggcagatttagaagatttagccattccacatgctgcttttaaagatattgttaaaatgatggattatggggaaggtctaaagaagcatacccgtgacgctttacgtcaattggaacagaattatcatgactcatcgtcttaa

SEQ ID NO: 405212 - DNA, 1002 bp, Staphylococcus aureus
ttggttaaattaagcgtattagactatgccttaatagatgaaggtaaggatgcacaaaaggcattgcaagattcagtgacacttgcaaaattagcagatcgacttggctttaagcgaatttggtttacggaacatcataatgtaccagcgtttgcgtgtagtagtccagaacttttgatgatgcatacattggcgcagacaaatcacatacgagttggctctggtggtgtgatgctgccgcactatcgaccttataaaattgctgagcattttagaatgatggcagcgttatatccaaatcgtattgatttaggtattggtaataatccaggtactactatggtaaagcaagctttagatggaataaatcctacatatgatagttacgatgaatcgatttcgttattacgtgattatcttacaataaaggataaaccaagtgcgcatacgttaggtgtccaaccacacattgatcattttccagaaatgtggttattaagtagtagcgcaacatctgccaaaatagctgccgaactaggtatagggctttctgttggaacatttttgctaccagatataaatgcgatacatgcagcgaaggataacattgatatttacaaaaaacatttccaagcatcaacgattaaaatggacgcaaaggtgatggcatctgtatttgtcattgtagctgataacgaagcggaagtagcagcattacaacatgccttagatgtttggttattaggtaaattacaatttgcagaatttgaagattttccttcagtagacacagcacaaaagtataagcttaatgatcgagacaaagagatgattcaagcacatcaagcacgcatcattgcaggtacacaagaaaaggttaaagcacaattagatgatttcattgctacgtttgaagttgatgaggtgttagtagcaccgcttattccaggtattgaacagcgttgtaaaacattaaaattactcgcggaaatttatttgtag

SEQ ID NO: 405213 - DNA, 333 bp, Staphylococcus aureus
atgaaaaagttagccaattatttatgggtagaaaaagtaggagatttgtatgtgtttagtatgacacctgaattgcaagatgatattgggacagtaggttatgttgaattcgtaagtccagatgaagttaaagtggatgatgaaattgtgagtatcgaagcatcgaaaacggtcattgatgtgcaaacgccattgtcaggaacgattattgagcgaaatacaaaagcggaagaagaaccgacaattttaaactctgaaaaaccagaagaaaattggttgttcaaattggatgatgtcgataaagaagcattcctagcattaccggaggcttaa

SEQ ID NO: 405214 - DNA, 801 bp, Staphylococcus aureus
atggaaacgttaaaatcaaataaagcgagacttgaatatttaatcaatgatatgcatcgagagagaaatgacaatgacgtattggtaatgccatcttcatttgaagatttgtgggaattatatcgaggcttagcaaatgtcagaccggcattacctgtaagtgatgaatatttagctgtacaagatgctatgttaagtgatttgaatcgtcaacatgttacggatttgaaggatttgaagccgataaaaggtgacaatatctttgtttggcaaggtgatatcacgacgttaaaaatcgatgctattgttaatgctgcaaatagtcgttttctaggatgtatgcaagctaatcatgactgcattgataatattattcatacaaaagcgggtgttcaagttcgacttgattgtgcagagatcattcgacaacaagggcgcaatgaaggtgtaggtaaagccaaaataacacgtggatataatttgtcagcaaagtatataattcatacggttggtccgcaaatacgtcgattgcctgtttcaaagatgaatcaggacttgttagctaaatgttatcttagctgtcttaaattggctgatcaacatagtttaaatcatgtcgctttttgctgtatatctacaggtgtatttgcttttcctcaagatgaagcagcagaaattgctgttcgaacagtagaaagctatctcaaagaaacaaattcaacattgaaagtcgtgttcaatgtatttacagataaggatttacaactgtataaggaggcatttaaccgtgatgcagagtag

SEQ ID NO: 405215 - DNA, 945 bp, Staphylococcus aureus
atgcagagtagtaagtggaatgcaatgtctctgttaatggatgacaagacaaagcaggctgaagtattgcgtactgcgattgatgaagcagatgcgatagtgattggaattggtgcaggcatgtctgcatctgacggatttacatatgtaggagagcgttttacggaaaatttcccagattttattgaaaaatatcgcttctttgatatgttgcaagcgagtttacatccttatggcagttggcaagagtattgggcatttgagagtcgttttattacattaaactatttagatcaacctgtaggtcagtcttacctcgctttaaaatccttggtggaaggtaaacagtaccacattataactacgaatgcagataatgctttcgatgtagctgattatgatatgactcatgtatttcatatacaaggggagtatatactgcaacagtgtagtcagcattgtcatgctcaaacgtatcgcaatgatgatttaattcgtaaaatggttgttgcgcaacaagatatgcttataccttgggagatgattccaagatgtccaaaatgtgatgccccaatggaagtgaataaacgtaaagcggaagttgggatggttgaagatgctgaatttcatgcgcaactacatcgttataatgcttttctagagcaacatcaagatgataaagtgttgtatttggaaattggaattggttatactacaccacaatttgtgaagcatccttttcagcgtatgacacgtaaaaatgaaaatgccctttatatgacgatgaataaaaaggcatatcgcattccgaattcaattcaagaacgtaccatacatttaactgaggatatctcaacattgattacagcagcactccggaacgacagcacaacgaaaaataacaacattggagagacagaagatgtacttaatagaaccgattag

SEQ ID NO: 405216 - DNA, 1023 bp, Staphylococcus aureus
atgtacttaatagaaccgattagaaatggagaatatattactgatggtgcgattgcactcgctatgcaagtttatgttaaccagcatatctttttagatgaagatattttattcccttattattgtgatccaaaagtggaaattggacgttttcaaaatactgctatagaagtgaatcaagattatatagataaacacagtattcaagtagttcgccgagatactggtggtggcgctgtgtatgttgataaaggtgccgttaatatgtgttgtattttagaacaagacacttcaatttatggtgattttcaacgattttatcaaccagctataaaggcgttgcatacattaggtgcaacagatgtggtacaaagcggtagaaatgatttaacattgaatggtaaaaaagtgtcaggcgccgcaatgacattaatgaataatcgtatttatggcggttattcgctattacttgatgttaattatgaagcaatggataaagtgttaaagcctaatcgcaaaaagattgcatcgaaagggattaaatctgtgcgcgcacgtgttggtcatcttagagaagcactggatgaaaagtatcgtgatataaccattgaagaatttaaaaatttaatggtgacgcagattttgggaatcgatgacattaaagaggcgaaacgatatgaattaacggatgcagattgggaagcgattgatgaattagctgataaaaagtataaaaattgggattggaattatggcaagtcacccaaatatgaatacaatcgaagtgaaagattatcttcaggtacggtagacataacaatttctgttgaacaaaatcgtatcgcagattgtcgtatttatggggatttctttggacaaggtgatataaaagatgtggaagaagcattacaaggaacaaaaatgacaagagaagatttaacgcatcagttaaagcaattagacatcgtttattattttggcaatgttacggtagaagcattagtggatatgattttaagttaa

SEQ ID NO: 405217 - DNA, 1026 bp, Staphylococcus aureus
atgaataataaagtattagcaaccggtggtacagggtttgttggcatgcgaattatttcacgattattagaacaaggttatgacgtacaaacgacgatacgtgatttaagtaaagctgataaagtaattaaaacaatgcaagacaatggcatttccacagagcgattaatgtttgtcgaagcggatttatcacaagatgaacattgggatgaagcaatgaaagattgcaagtatgtcttgagtgtagcatctccggtgtttttcggtaaaacagacgatgcagaagtgatggcgaagcctgcaattgaaggtatacaacgtattttaagagctgcagaacatgcgggtgttaaacgtgtggtaatgactgcaaactttggtgcagttggttttagtaataaagataaaaattcaatcacaaatgaaagtcattggacaaatgaagatgaaccaggcttatcagtatatgaaaaatcaaaattgttagctgaaaaggcagcgtgggattttgttgagaatgaaaatacaacagtagaatttgccacaatcaatccagttgcaatttttgggccatcattagatgcacacgtttcaggaagctttcatttattagaaaatttattgaatggttcaatgaaacgtgtaccgcaaattccgttaaatgttgttgatgtgagagacgtagctgaactgcacattttggcaatgacaaatgaacaagctaatggcaagcgatttattgcgacggctgatggacaaattaatttgttggaaattgcaaaattaattaaagaaaagagacctgaaatagctcaaaaagtttctactaaaaaattaccagactttattttgagtctaggtgctaaatttaatcatcaagctaaagaaggtaaacttttattagatatgaaccgcaatgtaagtaacgaacgtgcaaaaacattacttggttgggaaccgattgcgacacaagaagaagcaattttagcagctgtcgatagtatggctaagtatcatttaatataa

SEQ ID NO: 405218 - DNA, 1347 bp, Staphylococcus aureus
atgcaagcaatccttaattttatagtcgatattttaagtcaaccagccattcttgttgcactgattgcctttataggtttaatcgttcagaaaaaacctgccgcaacgatcacttcaggaaccattaaaacgatattaggcttcttaattttaagtgcaggtgctgatgtcgtcgttcgatctcttgaaccattcggcaaaatattccaacacgcatttggtgtgcaaggtatcgtacctaacaacgaagctatcgtctcactagccttaaaagattttggaacaacagctgcactcatcatggtctgtggcatgattgttaatattttaattgcccgcttcactaatttaaaatatatctttttaacaggtcatcatacattttacatggctgcgtttttagcaatcattttaacagtcagtcatattaaaggctggctaacgattgttatcggcgcactcgtattaggattaatcatggcagtattacctgcattactccaacctacgatgcgaaaaattacagggaatgaccaagtagctttaggtcattttggctcaatcagttactttgccgcaggtgctgtaggtcaattattcaaaggtaagtctaaatcaacggaagagattaaatttccaaaaggcttaagtttcttacgagaaagtacaattagtatctcgattacgatggcattactttacttcatcgcatgcttatttgcgggcgttagttatgtacacgaatctattagtgatggtcaaaactttattgtcttttcattaattcaaggtgtgacatttgctgctggtgtatttattattttaacgggcgttcgtttaatcttagctgaaatcgtcccagcatttaaaggaatttctgaaaagcttgtaccaaattctaaacctgcattagactgccctattgtgttcccttatgcacaaaatgcagtattaattggattctttgtcagctttattacaggtgtcatcggtatgtttatcttattcttatttggtggcgtcgtcattttacctggcgtagttgcacacttcttcttaggtgcaacggctgctgtattcggtaatgcaagaggcggtattaaaggtgctattgctggcgccgctctaaatggtatcctaatcacgtttttaccattattattcttgccatttttaggcgaattaggtggtgctgcaacaacattctcagatacagactttttagctgtcggtatcgtgttcggtaacgcagtaaaatatatgggattatttggtgcgattctatttattattatcgtaggtgcgacaacaattttattaaaaggccgtcaaaaagaacagcaatag

SEQ ID NO: 405219 - DNA, 285 bp, Staphylococcus aureus
atgaaaattttagtagtatgtggccacggtttaggaagtagttttatggtagaaatgaacgcacaagaagcacttaggcaacttaatgcaccatctgatatcgaagttgaacatagtgacattatgacagcaagtccagagatggctgacttgtttatttgtggtagagatttagctgaaaatgccgaacgtctaggggatgtcttagttcttgataatattttagataaagctgaattacaacaaaagctctcagaaaaattacaacaacttaacatgatttaa

SEQ ID NO: 405220 - DNA, 444 bp, Staphylococcus aureus
gtgtcattagacattttgtcaacaacacgcatcattgtaaaagaacaagtaaatgattggactgaagctataactatagcttctcagccattactacaagaacaaattattgaacaaggctatgttcaagcaatgattgatagcgttaatgaacttggaccttatatcgttatcgcacctgaaattgcaattgcacatgcaagaccgaacaatgacgtacatcaagttggtttaagtctattaaagttgaatcaacatgtggcattttgtgatgaagagcactacgcatctctcatttttgtattgagtgccatcgacaatcattcacacttatctgtattacaaaatttagcaaccgtactgggcgataaccaaacagtccagcaactattaactgcaacaaatgcacaagacattaaaaacattttaaaggagcatgattaa

SEQ ID NO: 405221 - DNA, 1956 bp, Staphylococcus aureus
ttgttaagttatagacaaatcgaaattttgtatcttttaattcatgagcaaacgtttattccaatcaataccattgctaatcaacttggtgtatcacctcgtaccattcaatatgatatagcatatattgagcaatatgctgaaacttatcattaccaagtcagccgtaataaagctgcaggcatcaaagtaacaacagctcacgcgacactattaaatgaattagagcacaatctaacaaatcaaattcatttttcaaaagatgaacgactcacacatatcgctttaaagttattcgaaacaaccgatcctgtttcaacaaagcaacttgcgcaagatgttaatgtttcgcgtcggacaattgcagatgatattaaaatgattcaagcccaactagatcaataccatttaaagttaaattatgtccacaataaaggattcaatattattggtgaggaagatcattatcgtaaagcgtatgcacactttatacatcaatatatgaaacaagctgcaccttttatagaggcggatatctttaattcagaatcaatcgcattggttcgccgtgccattattaagacattaaatagtgaaaattatcatttagttcagtcggctatcgatggcttaatctatcatatactcattgccattcagcgtttaaatgaaaatttttcgttcgatatacctatcaatgaaattgataaatggcgacatactaatcagtatgctattgcttcaaaaatgatagaaaacttagaacgcagttgtaatgtcacatttccagagtctgaaattatctttatcacgttacatttactaggctctaaaatgactgaacatacagcatcttcaattacctttgaataccatgatttatcgcaaaatatacatgaattgatcacttgtgttagccaagaattaggcattgatatgtcaaaagacaacaagttacataccagtctgatcacacatatcaaaccagctatacatcgtattaaatacgatatgctacaacctaatcctttgaggcaagaagttatgcgtcgctatcctcaaatcattgaagccgttagcaagcatattagtccaattgaacaagatgctgctattcgcttcaacgaagatgaattaacatacattacaattcacttcgcatcaagtatagagcgtgttgcaacacataaacaatcaatgattaaggttgtcttactatgtggttctggtataggcacgtcacaacttttaaaatcaaaactaaatcacctgtatcctgagtttcacatttgggatgcctattccatttatcaattggaagaaagtcgattattgcaagataacattgattatgtcatttcaacagtaccttgtgaaatatcagctgtaccagttattcatgtcgatccatttatcaatcaacaatctcgtcaaaaattgaatcaaattatcaatgactcaagagaacaacgagtcatgaaaatggcaactgatggcaagtcactcgcagatttattgcctgaacatcgcatcattataaataaacaaccattatcaattgaatccgcaattgcagtggctgtgcaacctttaatcaatgatggcattgtctattcaaattatacagctgcaattttaaaacaatttgaacaattcgggtcatatatggtcattagtccacatattgcacttattcacgctggtactgattatgtacagaatggtgtaggtttcgcactaacatatttcactgaagggattatctttggtagtaaagctaacgatcccgttcaccttgtaattacattagcaacggaccaccccaatgcacatttaaaggcattgggacagttaagcgaatgcttaagcaacgacttatatcgacaagatttcttagatgggaatatttttaaaattaaacaacacattgctttaactatgacaaaggaggcttaa

SEQ ID NO: 405222 - DNA, 420 bp, Staphylococcus aureus
atggaattcacttattcgtatttatttagaatgattagtcatgagatgaaacaaaaggctgatcaaaagttagagcaatttgatattacaaatgagcaaggtcatacgttaggttatctttatgcacatcaacaagatggactgacacaaaatgatattgctaaagcattacaacgaacaggtccaactgtcagtaatttattaaggaaccttgaacgtaaaaagctgatctatcgctatgtcgatgcacaagatacgagaagaaagaatatagggctgactacctctgggattaaactcgtagaagcattcacttcgatatttgatgaaatggaacaaacactcgtatcgcagttatctgaagaagaaaatgaacaaatgaaagcaaacttaactaaaatgttatctagtttacaataa

SEQ ID NO: 405223 - DNA, 1356 bp, Staphylococcus aureus
atgaaagacgaacaattatattattttgagaaatcgccagtatttaaagcgatgatgcatttctcattgccaatgatgatagggactttattaagcgttatttatggcatattaaatatttactttataggatttttagaagatagccacatgatttctgctatctctctaacactgccagtatttgctatcttaatggggttaggtaatttatttggcgttggtgcaggaacttatatttcacgtttattaggtgcgaaagactatagtaagagtaaatttgtaagtagtttctctatttatggtggtattgcactaggacttatcgtgattttagttactttaccattcagtgatcaaatcgcagcaattttaggggcgagaggtgaaacgttagctttaacaagtaattatttgaaagtaatgtttttaagtgcaccttttgtaattttgttcttcatattagaacaatttgcacgtgcaattggggcaccaatggtttctatgattggtatgttagctagtgtaggcttaaatattattttagatccaattttaatttttggttttgatttaaacgttgttggtgcagctttgggtactgcaatcagtaatgttgctgctgctctgttctttatcatttattttatgaaaaatagtgacgttgtgtcagttaatattaaacttgcgaaacctaataaagaaatgctttctgaaatctttaaaatcggtattcctgcatttttaatgagtatcttaatgggattcacaggattagttttaaatttatttttagcacattatggaaacttcgcgattgcaagttatggtatctcatttagacttgtgcaatttccagaacttattatcatgggattatgtgaaggtgttgtaccactaattgcatataactttatggcaaataaaggccgtatgaaagacgttatcaaagcagttatcatgtctatcggcgttatctttgttgtatgtatgagtgctgtatttacaattggacatcatatggtcggactatttactactgatcaagccattgttgagatggcgacatttattttgaaagtaacaatggcatcattattattaaatggtataggtttcttgtttactggtatgcttcaagcgactgggcaaggtcgtggtgctacaattatggccattttacaaggtgcaattatcattccagtattatttattatgaatgctttgtttggactaacaggtgtcatttggtcattattaattgctgagtcactttgtgctttagcagcaatgttaatcgtctatttattacgtgatcgtttgacagttgatacatctgaattaatagaaggttaa

SEQ ID NO: 405224 - DNA, 441 bp, Staphylococcus aureus
atgtgtaaatctaaaatactgttgaaaaatatttttagtgaagaatcagaagttaaagatttaactgaagaaaaatataatcaagattacgaagcattaacatttagctttaaagaggaaacatatcaaagtaggttagctaagaaaacaccgactaaatcgggatatttcgtgacatgttggacaaaagacgaagataattataatcggccatacaaaattgaagagtttgctgattacctgattgttgctgttatcgatgatgaattaaatggctactttctatttcctagggaattattggtagaaaaaggtatcttagcttcatctaagtatcaagggaaaatggcttttagagtttatcctaagtggtgtaatcaattgaataaaacagcagggcaaacacaaaagtggcaatgtaaatatttttttgaatactaa

SEQ ID NO: 405225 - DNA, 1359 bp, Staphylococcus aureus
atgaattttcttaaacctgcaaagcatattaagcctttgccagaaaatcagatagatgatacctataaacgattacgtctccaagtatttcttggtattttcatcggttatgctgggtactatttattacgtaaaaacttttcgttagcgatgccggcattgcaagagcaaggttttacaaaagcggaactaggttttgcactttctgctgtttccatcgcatatggatttagtaagttctttatgggtactgtaagtgatcggagcaatgctcggatattcttagttcttggattagcactcactgctatcgtcaatttgttaatgggatttgtaccgttcttcacatcaggtatcggtattatgtttgtcctattattcttaaatggatggtttcaaggtatgggctggccaccttcaggccgtgttctcgttcactggtttagtgtaagtgaacgcggaagtaagactgccctttggaacgttgcgcataatgttggtggaggtattatggcacctattgctgcttggggtattacaacaactgcatttatcaactttggttatttaaaaggtttcgaaggtgtattcatttaccctgcactcttagcacttatcattgccgcaatttcatacgtattgattagagacacacctcaatctcaaggtttacctccaatcgaaatttataaaaatgactttgctacaagcgataagaaaacattagaaacagaattaactacaaaagaaattttatttaaatatgtactgaacaataaatgggtatgggcaattgcctttgcaaatatatttgtttatttcgtgcgttatggtgtacttgattgggcgccagtctacttaagtgaagaaaaacatttcgacttaaaagcatcaggttgggcatacttcttatacgaatgggctggaattcctggtacattattatgtggttacatttctgataaattattcaaaggtcgtcgtggacctgcaggtttcttctttatgttaggtgtcacagtatttgtattaatttattggttaaatcctccaggcaatgcttggttagacaatgtctcattaattgccattggtttcttaatatatggaccagttatgttaattggtttacaagcattagattatgtacctaaaaaagcagctggcacagcagctggattaacaggattatttggttatctgtttggtgctgtaatggccaacatcgtcttaggtgctgtagttgataaattcggatgggatgtcggttttattttattaacagcaattagtgtgtttgcaatgttgagctttatcctcacttggaataaagtaggacaagaaaccgttcatcattaa

SEQ ID NO: 405226 - DNA, 927 bp, Staphylococcus aureus
atgaatatagtagggcatcatcacatatccatgtatacaaaagatgcaaaacgtaataaggatttttacacaaatgtccttggattacgattagttgaaaagtcggttaatcaagacaatccttcaatgtatcatttgttttatggggacgaagtaggtacagccggaacaattttaagcttttttgaaattcccaatgcgggtcataagcagccaggtactgaaacgatttatcgattttcattattagtaccaaatcaagcggcacttcattattttgaaaaacgtcttgagaataatggtattaagtctgaacgtttgtactatcttggacaagaaggtgttgtctttaaagatgaagacgacttagaaatcatattgcttgttaatgatagttttgaagtaccacatcaatggcaacataacgcttatagtgaaatacctcaagcatatcaaattttaggaatagggccagtcgaattaagagttagaaatgcagcgcgtacggtagaatttttggaaaatgtcttaggttatcgcaaaagagataataaatcattcgatgtgctgacattagcaccacaaggtttatattcggattttgtagttattgagcaacagggacaacgtgaaagacctggacgaggttatatccatcatattgcagttaatacaccacaaatgagtgacttagatgcaatttacaagaaattacaacaacaaccacaaagtaattcaggtataattgatcgctatttctttaaatcattatactatcgccataattcaattatgtatgaatttgcgactgaagcgcctggatttactattgatacacctgttgaacaattaggaagtcaattgaacttgcctgactttttagaagcagaacgtgaacaaattgaaagtaagttacacgaaatataa

SEQ ID NO: 405227 - DNA, 1062 bp, Staphylococcus aureus
atggccaaattagaaatgaataaaaatacgcctcttgagtttggtttgtattccttaggtgatcatttattgaatccattgaaaggtgaaaaagttagttatgagcaacgtattaatgaaattattgaagcaagtaaattagcagatgaagcaggtattgatgtttttgcagttggtgaaagtcatcaggagcattttacaacacaggcacatacggttgtgttaggtgcaattgcccaagcgacaaagcatattaaagtttcaagttcttcaacgattattagtgcaacagatcctgtaagagtatttgaagacttcgcgacattagatttgatttctcatggtagagccgaaattgtagctggcagagcatcaagaacaggtatttttgacttgtttggctatgatttaaaagactatgatgaattgtttgaagaaaaattaggtttacttttagagttaaataaaactgagcgtattacttggtctggaaaatatcgtccagaacttagaaatatgaaaatattcccaagaccaatcgataatatattgccaatatggcgtgctgttggtggtccacctgcaagtgctattaaagcgggaaaacaaggtgtgccaatgatgattacaacccttggtggcccagcaatgaactttaaaggttctatagatgcttatcgtcaagcggcaactgaagcaggtttcgatgcttcgcctaagtctttaccagtaagtacagcgagtctgttttatacagctgaaacaactcaggatgctatgagagaattttatccacatttgaatacagggatgtcatttattcgtggtgttggttatccgaaacagcaatttgctaattcgtcagattatcgagaagcgctaatggttggaagcccgcaacaaattattgaaaagatattgtatcaacacgagttgtatggtcatcaacgttttatggcacagcttgattttggcggtgtgccatttgaaaatgttatgaagaatattgagttaattggcaacgacattataccggcgattaaaaagcatttatcaaaatag

SEQ ID NO: 405228 - DNA, 567 bp, Staphylococcus aureus
atgaatattgtattattgtcaggttccacagtaggttctaaaacgagaattgctatggatgatttaaaaaatgaactagaagtcatcaatgagggacatcaaatagagttgatggatttacgagaacttgaattagaatttagcgttggaaagaattatctagatactacaggagatgtatataaattaacgacgtcgttaatgcaggctgatgtgatttttattggttttccaatttttcaagcttccatccctggtgctttgaaaaatgtgtttgatctacttccagtcaatgcgtttcgtgacaaggtaataggacttgtagcgacagcaggttctagtaaacattatttaattcctgaaatgcatttaaaaccaatattgagttacatgaaagcacatacgatgcaaacgtatgtatttattgaagagaaagatttttcaaatcaacaaattgtcaatgatgatgttgtatttcggttaaaagcgttggcacaatccacaatgcgaactgccaaagtacaacaacaagtgtttgaagaagaaaacaaccaatacgacttttaa

SEQ ID NO: 405229 - DNA, 996 bp, Staphylococcus aureus
atggcatcattgaaaaataagcattttatgattgggctatcactaacatttatagtcgcattatttagctttttagcagctaaattgccaatcctagataaggttggcgcattaactatcgcgatattaatcgctattctatatcgtcactttagaggatatcctgaacaatatagctcaggtattacgttttcatctaaatatttattaagatttgcaatcatcctatatggacttaaactcaatatattcgatattatcggtcaaggtagtaaactattagccatcgatgtaggtgtcgttattttcagtattgtaatgatgctctttgtcaacaaactgttgcatggtgacaaaaacatcgcattattactaggtgtcggcacaggcgtttgtggtgctgctgctattgccgcagtcgctccaatattcaaatcacgtgaaaaggatacagctattagtatcggtatcatcgcattgattggtacgatattttcacttatatatacagctatctacgctatcttttcaatgacgacaaatgtttatggcgcttggtctggtgttagtcttcatgaaattgcacacgttgtcttagctggtggctttggtggtagtgatgcacttaaaattgcacttcttggtaaacttggtagagtattcttactgattccattaaccatcgtacttattttaattatgcgtttccgttcatcagaatcatctagcaagggtcgaataagcattccatactttttaattggatttgtcattatggccttagtgaatacatatgtaactattccgtcagcattgctaaatattttaaatactgtatcaacaatttgcttattaatggccatggttgctttagggttaaatgttgcatttaaagatcttaaaaatcgcgcacttaaaccgcttatgacaatcattattacctcaatatgcttgtcatcacttgcctttatcgtcgttcattggctatatagttaa

SEQ ID NO: 405230 - DNA, 546 bp, Staphylococcus aureus
atgtttggaatgaaagtgaatgaacaaataacattaaaaattttagaagctcatgacacagaagcgcttttcaatttagtcaatcgttcaagaaattcacttagggaatggttaccttgggtagatgcaactgagcaaccatcagatacgcgtgcatttattaaaagaggacttttgcaatttgctgatggtaatggatttcagtgtggcatttggtatgaaggaacgctagttggtgtcatcggtttacatgaaattaatcacatgcacagaaaaacttcattagggtactatttagataaagaatttgagggtcatgggattatgacacaagcagttgaggcattgataaagtattgtttcgaagagcttgacttaaaccgaattgagattagtgccgcagttaataatgaaaaaagccgggctattcctgaaaggctgggatttactagagaaggtatgttacgtgacaatgaattactaaatggtatttattcatcgagttacatctatagtttattaaaatcagaatacgaccaaaaatga

SEQ ID NO: 405231 - DNA, 855 bp, Staphylococcus aureus
atgaaaaagttaacaacgctattattagcatcaacgttattaattgctgcatgtgggaacgacgatagtaagaaggatgattcaaagacatcgaaaaaagatgatggtgttaaagcagaattaaaacaagcaacaaaagcatatgataaatatactgatgaacagttaaatgaatttttaaaaggtacagaaaaatttgttaaagcgattgaaaataatgatatggcccaagcaaaagcgttatatccaaaagttcgtatgtattatgaacgctctgaaccagttgcagaagcatttggagatttagatcctaaaattgatgcacgtcttgcagatatgaaagaagagaaaaaggaaaaagaatggtcaggatatcataagattgaaaaagcattatacgaagataagaaaattgatgatgtgactaaaaaagatgcacaacaattattgaaagatgcaaaagaattgcatgccaaagctgatacattagatatcacaccaaaattaatgttacaaggttctgttgacctattaaatgaagttgcaacttctaaaatcacaggtgaagaagaaatttattcacatacagatttatatgattttaaagcgaacgttgaaggcgcacaaaaaatttatgacttatttaaacctattttagagaaaaaagataaaaaattaagtgatgatatccaaatgaacttcgataaagtgaatcaattattggataaatataaagataacaacggcggttatgagtcatttgaaaaagtatcgaagaaagaccgtaaagcatttgcggatgctgttaatgcattaggagagccactaagtaaaatggctgtgattactgaatga

SEQ ID NO: 405232 - DNA, 1230 bp, Staphylococcus aureus
atgacaaattatgaacaagttaacgatagtacgcaattttcaagacgtacatttttgaaaatgttaggtattggcggtgccggtgttgcaattggcgcaagtggtgttggtagcatgtggtctttcaaatcaatgttcaatacaccagaagatccggaaaaagatgcgtatgaattttatggtaaagtgcaaccaggcattaccacacccacgcaaaaaacatgcaatttcgttgcgttagatttgaagtcaaaagatagagatgcaattaaggcaatgtttaaaaagtggacggttatggctgatcgtatgatggatggtgatacagttggcaagccgagtaacaatcctttaatgccaccagtagataccggtgaatcgataggattaggtgcaagcaagttaacgattacctttgggattagtaagtctttgatgaagaaaattgggttatctagtaaaattcccgatgcctttaaagatttaccgcattttccgaatgatcagttaatagacgattacagcgatggtgatattatgattcaagcatgctcaaatgattcgcaagtatcctttcatgcggttcataatttagttcgtccatttcgagatattgttaaggtacgttgggcgcaatctggttttatctctgctaaaggtaaggaaacacctagaaatttaatggcatttaaagatggaacaattaatcctaggaagaataatcaacttaaagattatgtgtttattgatgacggatgggcgaaacatggaacttattgcgttgtcagacgtattcaaatacacattgaaacgtgggatcgtactgcgctggaagaacaagaggctacatttggtcggaaacgacatagtggtgcaccgttaacaggtgggaaagagtttgatgaaattgacttaaaagcgaaagatagtcatggcgagtatattattgataaagatgcccatacgaggctagcgaaagaagcaaatacgtcaattttacgtagagcctttaattatgtggatggtacggatgaccgcacaggtaacttcgaaacaggcttactttttattgcttttcaaaaagcgacaaaacaatttatcgatatacaaaataatttaggtagtaatgataaattaaatgaatatattacacatagaggttctgcttcatttttagtattaccaggtgttagtaagggaggataccttggtgaaacattatttgactaa

SEQ ID NO: 405233 - DNA, 1713 bp, Staphylococcus aureus
gtgaaacattatttgactaaatttgtagcaatgctaataactgctgctatggtgtgtagctttgggttactgaaaagtcaggcagcagaacaacaaagtattagtgatgtatatagtgtgataacggatgcgaaatctgcactttctaataattcgatatcgaatgacaataagcagaaagcaattgagcaagtggtaagtgcagttaagaaattatcgcttgaagataatagtgaaagtaatgctgtcaaatcagatgtgagaaagcttgaagatgcaaaagcgaatgataatcaaaaagatacactttcgcaattaacgaagtcattaattgcttatgaagagaaattggctagtaaagatgcgggttctaaaattaaactattgcaacagcaagtcgatgctaaagatgctgcgatgacaaaagcgattaaagataaaaataaagcggaattagaatctttgaacaatagtttgaatcagatttggacaagtaatgaaacagtgattcgcaattatgacgcaaatcaatatggacaaattgaagtcgcattattacaacttagaattgcaattcataagtcaccattagatacggcaaaagtgtcacatgcttggacaacttttaaatcaaatattgatcatgtcgataaaaaaagtaatacgtctgcaaatgatcaataccatgtatcacaattaaatgatgcgttagagaaggcgattaaagctatcgacgacaatcaattgtcggatgctgatgctgcgcttacacattttatagaaacttggccgtatgttgaaggtcaaattcaaactaaagacggtgctttgtatacgaaaattgaagataaaataccatattatcaaagtgtattagacgaacataataaagcacatgtgaaagatggtttagtagatttaaataaccaaattaaagaggttgttggccatagttatagcttcgtcgatgtgatgattatctttttacgtgaagggctagaagtgttgttaattgtaatgacattgactaccatgacgcgtaatgtaaaagataagaaagggactgcaagtgtgattggtggtgcaattgccggacttgtactgagtattatcttagcaattacgtttgtagaaactttagggaatagtggcattcttcgtgaaagtatggaagcgggattaggtatcgttgcggtcatattaatgtttatcgttggtgtttggatgcacaaacgttcaaatgcaaaacgttggaatgacatgattaaaaatatgtatgctaatgcgattagtaatggtaatttggtattgttagcgacgattggtttaatatctgtgttgcgtgaaggtgtcgaggttatcattttctatatggggatgataggtgagctagcgaccaaagattttattattggtattgctttagctatcgttattttaatcatctttgcattattatttagatttatagttaaattaatacctattttctatatatttagagtgttgtcgatctttatttttattatgggattcaaaatgcttggcgtaagtattcaaaagttacaattattaggtgcgatgccaagacatgttattgaaggattcccaacgattaactggttgggcttttatccaagttatgaaccattgatagcacaaggtgcttatattatggtagttgctatcttaatctttaaatttaaaaaataa

SEQ ID NO: 405234 - DNA, 606 bp, Staphylococcus aureus
atgacaccattcataacgtatattacccgtgcacatgtgtccttacatgcattttcattcacagaaatgatacaaatatacgtgatgattatatttttcatcgcgttttgtttcatttcaccagtcatgttttatcaattgtgggcattcattgcacctggattacataataatgaacgtcaatttatttataaatatagttttttcagcgtgttattattctgtgctggcgtcgcttttgcattttatgttggctttccaatgatcattcaattcgcgttaaaattatcattaactttaaacatttcgcctgtcattggctttaaagcatatttgattgaactcatacgttggttattcacatttggtcttctatttcaattaccaatattatttatgggtcttgcaaaattcggtcttatagataccacatcattgaaacattatcgtaaatatatttatttcgcttgctttgtattagcaagtatcattgcaccacccgatttaacattaaatatattactcacattgccactcatattgctctttgagttcagtatgttcatcgttaagttcacatgccgaggcaaaccgccaacacattaa

SEQ ID NO: 405235 - DNA, 216 bp, Staphylococcus aureus
atgataactaacacttttattttaggcatcacaggcccaacaagtcttgtcgtcattagcattatcgctttaattatttttggtccgaaaaaattaccacaatttggccgtgccatcggttctactttaaaagaatttaaatctgcaacagaagatttagataaagagtctcacgatacacccagtaaggaatcgaaacaacagcgagagcaatag

SEQ ID NO: 405236 - DNA, 390 bp, Staphylococcus aureus
atggcatttacattatctgcaattcaacaagcacatcaacaatttactggtgttgactttccaaaactattcaaagcttttaaagatatggggatgacttacaatatcgtcaacattcaagatggcactgcaacatacgtacatcaatcagaagatgatatcgttacgtcatctgtaaaaagtaatcatcctgttgctcaaaaatcaaacaaaacaatagttcaagacgtcttaactagacatcaacaagggcaaacagattttgaaacattttgtgatgaaatggctgaagctggcatttataaatggcatatcgatattcaagcgggcacttgtacttatatcgacttgcaagaccaagctgttatttcagaattaatccctcaataa

SEQ ID NO: 405237 - DNA, 204 bp, Staphylococcus aureus
gtgcgtaatcgattgaaagaattacgagcacgagatggcttaaaccaaacgcaacttgctaaacaagcgggcgtttcaagacaaaccatatcgctaattgagcgaaacaattttatgccatcagtattaacggcaataaaaattgctcgcattttcaatgaaacggtggaaactgtttttattattgaggaggatgaggcatga

SEQ ID NO: 405238 - DNA, 714 bp, Staphylococcus aureus
atgaaaatactaagatatatcggatatcttttactgggtggacttgtagggggtatcataggtggaattttaggtaattttgatggatttggtattgagaacttgacgtttgcgacatataacaatgtcgttgtaatatcgattgttgcgacgattattatcatattggtagaagccattgttttgatgaatcaaagacgtgcattgaagtataagcaacttgtagataaagaggtagatatcgatgcaacagatcaatatgagttgcttgcgaatcgttatgttttaaatggaagtatattaagtattctgcagacagttattgcttttttagtattgcttatttttgtggtagggcacgctgcagcaaatgcaatactattctttttaataccattttttgctagtgctattttcaatacacaatttacactgtttaatagaaggtttgatgacagaataccaaaaattgcagataagaattacactgaaaagcgattggaaatattggatgaaggtgaacgccatatagaattaattgcattatttaaaacatatgcgatcaacttatcaatattgatactagccattgtagtaattgggctttattcaattactactggaattaatcaaagctttagtttgctacttatcattgctattttcatatataacgcctttagttacttattgaagagaagacgtttttattaa

SEQ ID NO: 405239 - DNA, 843 bp, Staphylococcus aureus
atgacaacattgttaaacgtagatagtgtgaacaaacaatacaaagattcggattttaaattgcaagatgcatctttaacgatttctactaatgagacagttggattaattgggaaaaatggctcaggtaaatcgacattaattaatattctagtaggcaatcgacataaagataacggtagtatcacattttttggagaagaacataccgtggatgatgtcgaatataaagaacacataggtgtagtgtttgatgatttgagagtgcctaataaattgactattaaagatattgataaagtatttcaatctatttatatgacttggaatagtcaaaaattctttgatttaatcaaatatttcgagttaccactacaaactaaaattaaaactttttcaagagggatgcgaatgaagatagctttaacgattgcgctttctcatgatgtgaagttattaatcttagatgaagcaactgcaggtatggatgtttctggaagagaagaagtaatggaaatactagaagattttgtcgcacaaggtggaggcatcttaatatcatcgcatatttctgaagatatagaacatttagctgataaattagtgtttatgaaagatggacgaatgattttaactgaacagaaagatatacttttagcacaatatggaattgttacgacagaagataaagatgttgaaattcctaagcatttaatcattgcttctagattgtcaaaggggaaatatcaaattttagttaaagattatgcagaaattgaaaatgcagagcctttaaaacacattgatgacgctacaaaaatcataatgcgaggtgaagtataa

SEQ ID NO: 405240 - DNA, 630 bp, Staphylococcus aureus
atgaaaggtatgttcctaagtagtttttatgcaacgagaaagcaaacatatatttattttatagtcgctattatagctgcaggatactttgcagtatttaatccgttgatgagttcggcaatggctggggttatgttaatcacacctattactgataatattaaacatgaaaaagactcaagatggatgtattatgtatctactttaccggttaaacgtagtgattatattaagtcatactttgccttttatttaatcttattcggtgcaagtttaatgattggattagttgtgactacgattgtgacccaaagtgtgatgattggtattatgtcaggtttaatgagttttggtatcataggggcatactctatcattttcccattgacatttaaatttggcgctgaaaactccaatgtcattatgatatgtgcatctatactactacttatttctttcgtggtctttttctttatatatggtatggttagtggtgcatctgcattagaatttgaaaaaattagcactgaaggatggctagttgtcatagcatatgcggtcattggtatagttataacgagcgtttcttatatattgtctattaaaatttttaacaaacaagaactataa

SEQ ID NO: 405241 - DNA, 1134 bp, Staphylococcus aureus
atggttaatgcattaacaccaaaacatttagctgaaaagcgtgcaggattccatgagttgttctttgatttaattttcgtctatgccattcaaaaaattgcacatgtgattttaacaacacaaaacggttccatttcagctgatttatttttcaaatacatcgtcatgagtttgttcttatggttaatgtggtctcatcaaacattttttacaaatcgatttggtcaagttacattcaaagacgtctcgtttatgatgtttaatatgttcatcatggtcttcctatctaacagcctatatccggactttgaaaagacattcttcccattcttcttatgcgtggcaattatgtatttaagtatcggattacagtatttattacatatacgtacagggttagattatggcgataagcgtacatgtcaagcttttgcgagcgtagcctttgtgatttcatttttatcatttctatcattagtactaccacaaagtatccattacatccctggatttttaggcgtattcattgcagcgacaggacttattccatttcagaaatatcttgtattatcacctgttaatatgatgcatttagtagaacgtttttcgttactaacaattattatctttggcgaggtactggttggtttagcttcgtcatcatttagcattgatcattttagttacatttatatattccaatttatgattttaattagtcttttcggtgtatattggatcattactgaaaattatattaatcataaattaacatctatcggtttccgtttatcgtatacgcatctattaatcaatatcgctttaggtgtgattaatgctgcaattgtttttagtaataacaataaactaaatgacttgtttgaaattaatatgatgtatatcagtgttttaatattctatattggattatggttaatcacgccttatttccataatgaactgacaaacgcgaagtatatttcatattcactaggtatactcgttatgtcttatattgtcagccttttatttaaaggtcacgaccatgtaatgattatctcagtatcagttgcaaccttctgcatcatgctgatttattttaaaaatcaacgtctacgtaataaacatgaataa

SEQ ID NO: 405242 - DNA, 1182 bp, Staphylococcus aureus
atgacgagagtcgtattagcagcagcatacaggacacctattggcgtttttggaggtgcgtttaaagacgtgccagcctatgatttaggtgcgactttaatagaacatattattaaagagacgggtttgaatccaagtgagattgatgaagttatcatcggtaacgtactacaagcaggacaaggacaaaatccagcacgaattgctgctatgaaaggtggcttgccagaaacagtacctgcatttacggtgaataaagtatgtggttctgggttaaagtcgattcaattagcatatcaatctattgtgactggtgaaaatgacatcgtgctagctggcggtatggagaatatgtctcaatcaccaatgcttgtcaacaacagtcgctttggttttaaaatgggacatcaatcaatggttgatagcatggtatatgatggtttaacagatgtatttaatcaatatcatatgggtattactgctgaaaatttagtagagcaatatggtatttcaagagaagaacaagatacatttgctgtaaactcacaacaaaaagcagtacgtgcacagcaaaatggtgaatttgatagtgaaatagttccagtatcgattcctcaacgtaaaggtgaaccaatcgtagtcactaaggatgaaggtgtacgtgaaaatgtatcagttgaaaaattaagtcgattaagaccagctttcaaaaaagacggtacagttacagcaggtaatgcatcaggaatcaatgatggtgctgcgatgatgttagtcatgtcagaagacaaagctaaagaattaaatatcgaaccattggcagtgcttgatggctttggaagtcatggtgtagatccttctattatgggtattgcaccagttggcgctgtagaaaaggctttgaaacgtagtaaaaaagaattaagcgatattgatgtatttgaattaaatgaagcatttgcagcacaatcattagctgttgatcgtgaattaaaattacctcctgaaaaggtgaatgttaaaggtggcgctattgcattaggacatcctattggtgcatctggtgctagagtattagtgacattattgcatcaactgaatgatgaagttgaaactggtttaacatcattgtgtattggtggcggtcaagctatcgctgcagttgtatcaaagtataaataa

SEQ ID NO: 405243 - DNA, 753 bp, Staphylococcus aureus
atgacacaatatcctttatggcaacaattaaatactttaaaacaagcaacttgggttgatttaacgcatacatttgatccggaaataccacgttttagtgagtttgaaaaaggcgaagtttcaactttattcacggttaaagatcatggtttctatgtgcaacgttggaatattgtaacgcaatatggtactcacattgatgcaccaattcactttgtcgagaataaacgttatttagaagacattgatttaaaagaattggtattgccgttaattgtattagacttttcaacagaagtagcgaacaacaatgatttcatcgtaacacgtgcgcatatagaagcatgggaaaaagagcatggtactattgaacctggcacttttgttgcacttcgtaccgattggtcaaaacgttggcctaatattgaaaagtttgaaaacaaagatgcgaacggacaacaacatgcaccgggttggggattagatgctttgaagtacttaattgaagaacgtcgtgttgaagctgttggtcatgaaacattcgataccgatgcatctgtggacgttgtaaaaaatggtgatttagttggcgaacgttatattcttggtcaggataaataccaagtcgagttattaactaatttagatcaattaccaactcgtggcgccatcatttacgctatcagccctaaaccaaaagatgcacctgggttccctgttagagcatttgcaattaaaccatcaaatgactaa

SEQ ID NO: 405244 - DNA, 2229 bp, Staphylococcus aureus
atgacaacaattaaaacatcaaacttaggattcccaagattaggtagaaaaagagaatggaaaaaagccatcgaaagttattgggcaaagaagatttctaaagaagaattagatcaaacattaactgatctacataaagaaaatttattattacaaaagtactatcacttagatagcatcccagttggtgatttctctttatatgaccatatattagatacgtcattattattcaacatcatccctgaacgtttccaaggaagaactattgatgatgatttattatttgatattgctcgcggtaataaagaccatgttgcaagtgcacttataaaatggtttaacactaactatcattacatcgtacctgaatgggacaatgttgagcctaaagtgagtcgcaatgtattattagatcgctttaaatatgcccaatctttaaacgttaacgctcaccctgtcattgttggtccgattacttttgttaaattatcaaaaggcggtcaccaaacttttgaagaaaaagttaaaacgttattaccactttataaagaagtgtttgaatcattaattgatgcaggtgctgagtacattcaagttgatgagccaatcttagttacagacgacagcgaaagctatgaaaatattacacgtgaagcttatgactatttcgaaaaagctggtgttgctaaaaaattagtcattcaaacatactttgaacgtgcacatcttaaattcttaagttctttacctgttggtggtataggtttagactttgtccatgataatggctataaccttaaacaaattgaagctggagattttgataaatcaaaaacattatacgctggaattattgatggtcgtaatgtatgggcaagtgacattgaagctaaaaaagtcttaatcgataaattgttagcacacactaatgaacttgtcattcaaccatcatcttcattattacatgttccagtatctttagatgatgaaacattagatacaagtgttggcgaaggcttaagctttgcaactgaaaaattagacgaattagatgcattgcgtcgcctatttaatcaaaacgatagtgttaaatatgataaattaaaagcacgttatgagcgtttccaaaatcaatcattcaaaaacttagattatgatttcgaaagcgtgcgtacttcaagacaatcaccattcgcgcaacgtattgaacaacaacaaaaacgtttgaacttaccggatttaccaacaacaactattggatcattcccacaaagccgagaagttcgaaaataccgtgcagattggaagaacaaacgcattacagacgaagcatatgaaacattcttaaaaaatgaaattgctcgatggattaaaattcaagaagacattggcttagatgtattagttcacggtgaatttgaacgtaatgacatggttgaattcttcggagaaaaattacaaggtttcttagtaactaaattcggttgggtgcaatcatatggttcacgtgccgtaaaaccaccaatcatttatggtgatgtaaaatggacagcgcctttaactgttgatgaaacagtttatgcacaaagcttaacagataaaccagttaaaggtatgttaactggacctgtaacaattctaaactggtcatttgaacgtgttgatttaccacgtaaagtcgttcaagatcaaattgctttagcaatcaacgaagaagtattagcacttgaagctgcaggaatcaaagttatccaagttgacgaacctgcattacgtgaaggcttaccattacgctctgaatatcacgaacaatatcttaaagatgctgttttatcatttaaacttgcaacgtcttcagttcgtgatgaaactcaaatccatacacatatgtgttattctcaattcggtcaaatcattcatgctattcatgacttagatgctgatgttatttcaattgaaacatctcgtagccatggtgatttaattaaagactttgaagatattaattatgatttaggtattggtctaggtgtatatgatattcatagtccacgtattccaacaaaagaagaaattactacagcaatcaatcgttcactacaacaaatcgaccgctcattattctgggtaaaccctgactgtggtttaaaaacgcgaaaagaagaagaagttaaagatgcattgactgtgcttgtgaatgctgttaaagctaaacgccaagaataa

SEQ ID NO: 405245 - DNA, 1842 bp, Staphylococcus aureus
atgagtcaattcctcacacaattgaaagataatgttttagtagctgatggcgctataggaaccattttatactctgaaggattagacacctgtccagaagcatataatcttagccatccagataaagttgaacgcatccatcgttcatatattgaagccggtgctgatgtcattcaaaccaatacttatggtgcaaattttgaaaagttaaaacgattcggtcttgaagataaagttaaagcaatacatcaagccgccgttcgcatcgcaaaaaaagcagcaaataaagatacgtatatattaggcacagttggtgggtttagaggtatcaaacaagaggatatcagcttacaaactattctttatcatactgaaattcaaatagacaccttaattgaagaaggcgttgacgcgctacttttcgaaacgtattacgacctagaagagttaacaaatgtcatttcacgaacgagaaagaaatacgacattccaatcattgctcaattaaccgcttcaaacacaaattacttagttaatggtcaggcaatcaatgaaggattaaaacaactcgttcaatgtggtgcaaacatcgtgggactcaattgtcatcatggcccgcaccatatgcaagagtctttcacacatattgaattaccagagcacgcattcttatcttgttatccaaatgccagcttattagatattgaaaatagtgaatttaagtatagtgacaatgcacaatatttcggtcaagttgctcaaaatctaattcgcgaaggtgttcgtttaattggtggttgctgtggtacaacgccagagcacatcaaatttattaaagaatctattcagacacttaaacctgttaatgacaaaaaagtgattccgataccaacgaaagcacttttcaatccatctcaaaataaagttagacaatcattaacatctaaggttcaagaacgtccaaccgttattatcgaattggatacaccgaaacatttagacacggatagattttttgaaaatatcgctaaacttgataaagctaatgtagatgcggtaacactcgcagataattcattggcaactgtcagaattagcaatattgctgctgctagcttaattaagcaatattacaatattgaaccactcgtacatattacatgtcgagaccgaaacttaatcggcttgcagtcccatttacttggattatcgctcattggcgttaacgaaatattagccataactggtgatccttcaaaagttggtcacttaccaggtgcaaccaatgtctatgatgttaattctaaaggattaactgaactcgctctaagatttaatcaaggtattaacactgacggtgatgcgctgaagaaacgtacacacttcaacatcgctggcgcctttaaccctaatgttcgtaaattatatggtgccgtcaaaagattagagaaaaagatagaaagcggaatgtcttattttataacacaacccgtgtacagcaaagagaaaatcattgaaatttaccatgccactaagcacttgaacaaaccatttttcataggcattatgcctatcgcaagttacaaaaacgcactctttttgcataatgaagtgccaggaatcaagatgtcagatgaaattttacaacaatttgaagcagttaaagatgataaagccaaaacacgagaactaagtcttaagctttcaaaggatttaatcgatactgttcatgaatattttaatggtttatacattatcacaccgtttcaaaatgtcgaagattcattagaacttgcagcatactcaaaatctattactgctcacaaggaggcaatattatga

SEQ ID NO: 405246 - DNA, 1161 bp, Staphylococcus aureus
atgacactttcaaaagagacagaagtgatattcgattggcgtagaggtgtggaatatcattcagctaacccaccactctatgattcttcaacattccatcaaacaagtcttggtggcgatgttaaatatgattatgcacgaagtggcaaccctaaccgtgaacttttagaagagaagttagcacgattagaacagggaaaattcgcttttgcttttgcatcaggtattgctgctatttcagcagtacttttgactttcaaatctggtgatcatgtcatcttacccgatgatgtatatggcggtacttttcgcctcactgagcaaattttgaatcgatttaatattgaatttacaaccgtagatactacaaagctcgaacaaatcgagggtgccattcaatcaaacacaaaattaatttatatcgaaacaccatcgaatccctgttttaaaattactgatatcaaagctgtttctaaaatagccgaaaagcatgaactactggtagctgtggacaatacatttatgacaccgttaggtcaatcacctttattacttggcgctgatattgtcattcatagtgctacaaaatttttaagtggacatagcgatttaattgctggtgctgtcataactaataatgaggcaattagtgacgctctttatttaatacaaaatggtacaggcaatatgttatctgctcaggatagctggacacttgctaaacatttaaaaacttttccaatcagatttaaacaatctgtcgaaaacgctcaaaaaatcgtgtcatttttaataaagcaagatgaaatttcagaagtttattatccgggactcactactgctcatttagaacaagctaaaaatggcggtgccgttattggctttcgtttagctgatgagtctaaagcacaacaatttgtcgatgcactgacattaccactcgtttcagtgagtctgggcggtgttgaaacgatcctttcacatccagcaacaatgtctcacgctgcactacctgaagaagtgagacaagaacgtggtatcactttcggtctattccgattaagtgttggtctcgaagatcctgatgaactcattgcagacatcaaatacgcattaaaggaggcattcaatgagtcaattcctcacacaattgaaagataa

SEQ ID NO: 405247 - DNA, 1104 bp, Staphylococcus aureus
atgaaggatacacagttagcccaaatcacattaaccgatgattcaaccggtgctatagcgaatccaatccatttatctactgcctacaagcatccaaaactaggacaatcgacaggttttgattatacacgtactaaaaatcctacacgctcaacatttgaaacctgttttgccaaacttgagcatggtattgcatcattcgctacatcaagtggaatgtcagccattcaattaatatgtaatctatttaaacctcatgatgaaattttagtttcattcgatttatatggtggcacatttagattatttgaattttacgagcaacaatacgatatcaaatttaagtacgttgattttacagattatgaacaagttgaaaaagaaatcactgataaaacagttgcattattcattgaaccaatatctaacccacaaatgattgctattgatgtaaagccatactatcaactttgtaaagctaaaggcttattgtcaattatcgacaatacttttttaacaccttatctttcaacaccactagcagaaggtgctgatatagtcttacattcagccacgaaatatattggcggacataacgatgtactagcaggtgtcgtaaccgtcaaagatgaatcactcgcgcaacagttgtttgattttcacaacatgactggcgcaacactttcaccaatagatagttatttgttgttacgtggacttaaaactttgcatttacgcattgagcgtgcgcaatcaaacgctagaaaacttgctaaaaaatgtcagtcacttcaagcaattgacgaagtactatatagcgggcaaactggcatgcttagtttaagacttaacaaggcctatagcgtcgctaaattattagaaaatttagacatttgcatttttgcagaaagtttaggaggtactgaaacattagtgaccttcccttacacccaaacacatgttgatatgccagatgctgaaaaagataaacgtggcattgatgagtatttaatccgcttatcactaggtgttgaaaattatgaagacatcgaacgcgatatcatccaagcattagataaagctcagattggagagattgtatga

SEQ ID NO: 405248 - DNA, 846 bp, Staphylococcus aureus
gtgagtgaattgtcaaaaagtgaagatcaacgtattactaaaacaaaagatgaacaaattaagcaaatagatatatcggatatcaaaccgaatccgtatcagccccgaaaaactttcgatgaaaatcatttaaatgatttggcagattcaattaagcaatatggaattttgcaaccaattgtgcttagaaaaacagttcaaggttattacattgtagttggtgaaagaaggtttagagcttcgaaaattgctggtctaaaatacgtatcagcgattatcaaagatttaacagatgaagatatgatggaactggcggtcatcgaaaatttacaacgagaagacttaaatgcgattgaagaagctgaaagttatcaacgtttgatgacagatttgaaaattacacaacaagaagtagcgaaacgattgagtaagtcgcgcccgtatatagcgaatatgttgaggttattacatttgccgaaaaagattgctgacatggtaaaagatgggcgactgacaagtgcacatggacgaacgttattggcaattaaagatgaacaacaaatgcttaggttagcgaaacgggttgttaaagaaaagtggagtgtcagatatttagaaaaccatgttaatgaattaaaaaatgtttcgtcaaagtcggaaacagacaaagtagatataactaagcctaaatttataaagcagcaagaacgacagttgcgagaacagtatggtaccaaagtagatatatcaataaaaaaatcggttggtaaaatctcatttgagtttgattcacaagaagattttgtgagaataattgaacaattaaatcgtaggtatggtaaatag

SEQ ID NO: 405249 - DNA, 882 bp, Staphylococcus aureus
atgaatcaagtcatgaatattatttcatctctatttgagccattaacaaaaatagaaacatatgaaaacattgcaactaaaatcgctatgattgttatttatattatcgtagccctcatagttattaaaatactgaataaaatgattgaacagggatttaagattcaaaataaaagtaaaaagagtaacaaaaagcgctctaaaactttaatatctcttgttcaaaatgtagtgaagtatatcgtttggtttatagttattacgacgattttaagtaaatttggcattagtgttgaaggggtaattgccagtgctggtgtcgtaggcttagcagtaggttttggtgctcaaactatagttaaagacgtaattacaggattctttattatatttgaaagccaatttgatgtaggtgattatgttaagataaataacggtggtacaactgtagcagagggaacagttaaatcaattggacttcgttcaacacgaatcaatacaatttcaggagaattaacaattttaccaaatagtagtatgggtgaaataacgaactactcaattacaaatggtacagctatcgttaaaattccagtgtctgtcgaagaaaacattgataatgttgataaaaaactaaacaaactatttacttctttacgtagtaaatattacttatttgttagtgatccggttgttattggtattgatgctattgaagatacaagagtaatattgagaatatctgcagaaacaattccaggtgaaggatttgctggagctcgaattattcgcaaagaagtacaaaaaatgtttttacaagaaggtattaaaacacctcaaccaattatgactgcttataatcatagtgaaaacggtgtttag

SEQ ID NO: 405250 - DNA, 204 bp, Staphylococcus aureus
atggcgtcaaaatatggaataaatgatatagtagaaatgaaaaaacaacatgcgtgtggaacaaaccgttttaagattattagaatgggtgcagacataagaattaaatgtgaaaattgtcaaagaagtattatgattccacgtcaaacgtttgataaaaaacttaaaaaaatcatcgaatctcatgatgatacacaaagatag

SEQ ID NO: 405251 - DNA, 1098 bp, Staphylococcus aureus
atggctttaacagcaggtatcgttggattgccaaacgttggtaaatcaacattatttaatgcaataacaaaagcaggtgctttagcagcgaactatccattcgctacgattgatcctaatgtagggatagtagaagtgccagatgctagattacttaaattagaagaaatggttcaacctaaaaagacattgccgactacatttgaatttacagatatcgctggtattgtgaaaggtgcttcaaagggagaagggttaggtaataaattcttatcacatattagagaagtagatgcgatttgtcaggtcgttcgtgcatttgatgatgataacgtaactcatgttgctggtcgagtagaccctattgatgatattgaagttattaatatggaattagtactagcggacttagaatctgttgagaaacgtttgcctagaattgaaaaattagcacgtcaaaaagataagactgctgaaatggaagtacgtattttaacaactattaaagaagctttagaaaatggtaaacccgctcgtagtattgactttaatgaagaagatcaaaaatgggtgaatcaagcgcaattactgacttctaaaaaaatgctttatatcgctaatgttggtgaagatgaaattggtgatgatgataatgataaagtaaaagcgattcgtgaatatgcagcgcaagaagactctgaagtgattgttattagtgcaaaaattgaagaagaaattgctacattagatgatgaagataaagaaatgttcttagaagatttaggtatcgaagaaccaggattagatcgattaattagaacaacttatgaattattaggattatcaacatattttactgctggtgtgcaagaagtacgtgcttggacatttaaacaaggtatgactgcacctcaatgtgctggtatcattcatactgattttgaacgtggatttatccgtgccgaagtaacaagttatgacgactatgtacaatatggtggcgaaagtggcgctaaagaagcgggcagacaacgattagaaggtaaagaatatattatgcaagatggcgatatcgttcatttcagatttaatgtataa

SEQ ID NO: 405252 - DNA, 192 bp, Staphylococcus aureus
atgaatttaaatattgattggtctaaagattttcaagaattccaagagatacttaatagtggtattcatcctgaatggctttattgtgcaaaggctaatcttgttttagagcctgcttatactggcgaaggcaaacaatttttcagcactcaagatattattaacgcgagtaaaattattccattcttttaa

SEQ ID NO: 405253 - DNA, 297 bp, Staphylococcus aureus
atgagaacatatgaagttatgtacatcgtacgcccaaacattgaggaagatgctaaaaaagcgttagttgaacgtttcaacggtatcttagctactgaaggtgcagaagttttagaagcaaaagactggggtaaacgtcgcctagcttatgaaatcaatgatttcaaagatggcttctacaacatcgtacgtgttaaatctgataacaacaaagctactgacgaattccaacgtctagctaaaatcagtgacgatatcattcgttacatggttattcgtgaagacgaagacaagtaa

SEQ ID NO: 405254 - DNA, 504 bp, Staphylococcus aureus
atgctaaatagagttgtattagtaggtcgtttaacgaaagatccggaatacagaaccactccctcaggtgtgagtgtagcgacattcactcttgcagtaaatcgtacgttcacgaatgctcaaggggagcgcgaagcagattttattaactgtgttgtttttagaagacaagcagataatgtaaataactatttatctaaaggtagtttagctggtgtagatggtcgcttacaatcccgtaattatgaaaatcaagaaggtcgtcgtgtgtttgttactgaagttgtgtgtgatagcgttcaattccttgaacctaaaaatgcgcaacaaaatggtggccaacgtcaacaaaatgaattccaagattacggtcaaggattcggtggtcaacaatcaggacaaaacaattcgtacaataattcatcaaacacgaaacaatctgataatccatttgcaaatgcaaacggaccgattgatataagtgatgatgacttaccattctaa

SEQ ID NO: 405255 - DNA, 243 bp, Staphylococcus aureus
atggcaggtggaccaagaagaggcggacgtcgtcgtaaaaaagtatgctatttcacagcaaatggtattacacatatcgactacaaagacactgaattattaaaacgttttatctcagaacgcggtaaaattttaccacgtcgtgtaactggtacttcagctaaatatcaacgtatgttgactacagctatcaaacgttctcgtcatatggcattattaccatatgttaaagaagaacaataa

SEQ ID NO: 405256 - DNA, 1107 bp, Staphylococcus aureus
atgaaaaaggggatcaaattgaaagaagaaaaacgttatactacattattaaaaagaattgatacattaaagaacgaacgctcattaaacatagatttaaccaatccagaagacagaagaatattacattcatataaccattacaatttaataaatgcttataaagataatttcattgataatactgtagattatgaaaaatatctccccagttctacattagatgaatttgaagcattatataaattcgacaaaaacttacgtaaaataattttagataatatattagatatcgaagaaactataaaacatttaattactcagtctttttacgaatatttttatcttcaatgtaaaaacgactcttcatctcactataatatagagaaattacataaagaggacgaataccttaaaccactttattatgacatatcaaacttacaaatattgcgaactaaaaaaatccttaatcgtgctgatattcatgcagaatttgaaagtgaagtaagaaagaaaataaataaatctaaatttaaaagtcaatatttaagacaatatactaaaaaagggtattttccgatgtgggttacaatgaatgttctcacactcggaaatatagtaaatatgtacgacatacttaaacacgatgtgaaaattaaaatgttaactcggctaggtcttattacaaatccaaacgacattaacaataatacaaggttaatacaagattttagtgacatgttaaaactactaaatatttttagaaatttgtgcgctcataacgaaagactttataattttcttttaccaaaggataaaatagtcgacaatagattcatgaatatacacaaaattgtacccaagcactataatccgacaaccacaaattttttaaagagaagtatttttatctgtttatttataatttcactatttaaaactcaaggagaaagaactagttttataagagatattaagctagaattcaaaaagctcgacaaagttttacgtactataaaaacttctaacattaaatttaaaatgaatttagctttcgattgggagaattcaatattaaaggttaatcatgtaaatattttttaa

SEQ ID NO: 405257 - DNA, 1212 bp, Staphylococcus aureus
atgtgggttcgtgaaatcaccaaaaacaatagtacggcctatcgctatttagagcgctatacagaccctttaactggcaagtataaaacagtatcagttacacgtaacaagaataatgtacgtagccaaaaggacgctcaattagaattaaataaaataattgagcaacgtttgaaacattacagtacgaaacaacttgaaaacttaacgttccatgatgcgtgcgatgaatggttagagcattacaagacacattcaggctcgaaaccaaccactattaaagaaaagaaaagtaatactaatacagttaaaaatgctattgatagcaaagtactcatcagcaagattacgcacacctacttacaaaacatcattaatgaatgggctaaatcacatagtattggccatgttcaatctcttgttattgttattcgttccgttttcaaatatgcgtttaaatattatgatctgcacgatattagtgtgttagataaaatagatatacccaagaaagcccaaaccagaaacgaacttcaagctaaacgtaataactatttagaagatagcgaagtaaaggagttacttcaatgcttcgactatctaattaaacataagcgtcatgctacacgtaaacgtaactatgaaatggtaaaagcattagtagaatttcaaattaacaatggaatgcgcattggcgaactcctagcaatcaagacagacaatataaatattgagaataaaacactagagattgacggaacaataaattgggttactgatgcagaaactggagcatttggcgttaaagaaacgactaagacgagtaagagttatcgaacaataggcctcacaactcaaagtattaatttacttaaaaagctcatgctagaaaataaaaaagaaaatcagtggaatgctaaattcatagatagaggttatatattcaccaacactgctggtagccctattgacttaaataaggtgaataatattattaaagaagcaacagatataagttcaattaacaaacgtgtgacaacgcacacattacgtcatacacatatatctacacttgcgcaattaggaataaacctaaaagcgatacaagatagagttggccacagtgattataaaacaactttagagatatacactcatattacagatcagatgtctaaagacatgatgaataaattagaggaaatatcgtaa

SEQ ID NO: 405258 - DNA, 624 bp, Staphylococcus aureus
atggttgaatcaaatgatgaattaaaaaaagaattaggcagatttttaaagtctatccgaaaacaaaaagggaagacagcaagcgaaataagtaaacaaatgcagtattctcaagggcatataagtggcattgaaaatggtgttaaatcttttccaagcaataaacttatcgaaagttacttaatgaacataaaagacactaatgaggagtataatttttatgttgatgaaatagctaagataacgaaaaataaagttaagttaaacaaagtttctaatgtaacaaataaaatggaaattatagatagaatgatggatataccatattctagagaattcatatcttttgatgacaataacgaaaagagtttcacaatttttaacattagcattaatgatttgcactttcatctgcaagatattaataattataaattttacaaaggcattagattaacggataacgataaaaataacatcgataaaattttaaataattatttcgaaaataaatcagttattataaaagagaacacaaaaactttaagagataaaaatgaaaactgggaacaattagtaaaattaagcgattatatagatgataagttagataaaaagaactga

SEQ ID NO: 405259 - DNA, 165 bp, Staphylococcus aureus
atgtttatgactgtaaaagaagttgctcaattgttacgtataagtgaacgccatacttataaacttcttcaaaaaaacgttataccacatactaaaattggcggaaagatattagttaacaaagaaaggttattagaaactttagaaaaaaaggaggttaaataa

SEQ ID NO: 405260 - DNA, 324 bp, Staphylococcus aureus
ttgccagctgcagcaacctttgctgttgctatagaaacgtttttaatcaaattaaaaaaagttaataaaatcaaacataaagacaccgattcaactatgtacacaaaattattaggagaattaactaaagaaggtaaagtaaattatagaaccaaaaaacgggtagaaattgcgtatagtatgagaaacataatcaaccattcacaagctggtgcagtagccaaaggtgattgtgactttcttttaaacacactaaaagacattgttgatgaaaacgaaaaaatattaagagaatataccaaatcaattaataagacggaataa

SEQ ID NO: 405261 - DNA, 180 bp, Staphylococcus aureus
atgtgtgtaaaatttactgacgcagaaatagcttatataaaagaatcagttgaaaattatagtagtgaatttgatatttatgacgatgaacaagaacttaaattaaaaatttatgaacaaattatgttaaaaatcaaatctgaatacaaggatacctatttattccgtcttattaattga

SEQ ID NO: 405262 - DNA, 1386 bp, Staphylococcus aureus
atgaaagtagcaatttatactagagtgagtacacttgaacaaaaagaaaaaggacactctatcgaagaacaagaaagaaaattaagagcttacagcgacataaacgactggaaaattcataaagtatatactgacgctggatactccggagctaaaaaagacagacccgctttacaagaaatgttgaatgaaatagataattttgatttggttttagtctataaactagatcgattaactcgaagtgttaaagacttactagagatactagaattgtttgagaataaaaacgtgttgtttaggagcgcaacagaagtatatgacacaacttctgctatgggacgtttgttcgtaacattagtaggtgctatggcagagtgggagcgtactacaattcaagagcgtactgcaatgggtcgacgcgcatcagctagaaaagggttagctaaaactgtccctcctttctattacgacagagtaaacgataaatttgtgcctaatgaatataaaaaagtattacgatttgcagtagaagaagcgaaaaaaggtactagtttaagagaaataactataaaattgaacaactctaaatacaaagcacccttaggtaaaaactggcacagatcagttataggcaatgctctaacgagtccggtagctagaggtcatcttgttttcggtgacatattcgtcgaaaacacccacgaagctattataagtgaagaagaatacgaagaaataaaattaaggataagtgaaaaaactaactctacaatcgtaaaacataacgctattttcagaagtaaactattatgtccaaactgtaaccagaaattgactttaaacacagtcaagcatacgcctaaaaataaagaagtttggtattctaaactatacttttgttctaactgcaaaaatactaaaaataaaaatgcatgtaacatcgacgaaggcgaggttttaaaacaattttacaattatctaaaacaatttgatttaacatcatataaaatcgaaaaccaacctaaagaaatagaagatgtcggcatcgatattgaaaagttgcgaaaagaacgcgctagatgtcaaacactttttatagaaggtatgatggataaggatgaagcttttccaataataagtcgtattgacaaagaaatacatgagtatgaaaagcgcaaggataatgataagggtaagacttttaactatgagaagattaaaaatttcaagtattcattgctaaacggctgggaattaatggaagatgagttaaaaactgaattcataaagatggcaatcaaaaacattcattttgaatatgtaaaaggaattaaagggaagcgccagaactcattgaagattacgggtatagagttttattaa

SEQ ID NO: 405263 - DNA, 174 bp, Staphylococcus aureus
atggcagtaccaaaaagaagaacttctaaaactagaaaaaacaaacgtcgtacgcatttcaaaatttcagtaccaggtatgactgaatgcccaaactgtggcgaatacaaattatcacaccgtgtatgtaaaaactgtggttcttacaatggcgaagaagtagcagctaaataa

SEQ ID NO: 405264 - DNA, 558 bp, Staphylococcus aureus
atgaaatggtcaattacgcaattaaggaaatatcaaggtaagccatttgaatttgatcaaacggtgagttttgacaatttaaaagaatcattagatttaattgatttatctccaattacaatccaaggtcagttaaccattaagtcaacagaagtcgttgcggatattcacattactggaacgtatacaatgccttgtgcacgtactcttgtaccagtaaaagtcccactagatgtaactactacagaagtatttgatttagaagggtacaatcagtataacgatgatcaagatgatgtagatgaacactatcacattattaaagatggtatggttaatcttcaggatattgtcgaggatatagttattattgagaaaccaatgagagcttattcagagcaaagtgaccaaatgttgacagtaggtaatggttgggaagtaatcgatgaggatcaattagatgagcttgctaaacagcaagaacaagatgattcagaatcacgacaagttgatccaaggcttcaaaaattacaacaattatatgataaagagcaataa

SEQ ID NO: 405265 - DNA, 1140 bp, Staphylococcus aureus
atgaaaagcgttggcttaatcacagaatataatccctttcataatgggcatcaatatcatattaatcaatctaaaaaacttacaaatgctgacgttactattgcaataatgagtggtaactttgtcatgcgtggcgaaccagcaatctataataagtttactcgtgcaaaaatggcattatcaacagctgatttagttatcgaactaccagcaactgccagtttatcatctggcgatcattttgccgaactagcagttaaagtcgcagattatatgagtgtcgatacaattgcatttggtagtgaaaataatgatatcaaaacattaaagcaattagcacacagcattaatgaaattgaacaatctgaatccttttcacaaaaagtaaaagaaggtaaaagctaccctcgtatcattagcgaattattagagcatcatgaagcactagcaagtcctaacaacatacttggtattagttacctgaaagcaattgctaaaaatgctaaaaacatcaatgcaatttctatcaaacgagaaaatgctcaacatcatgattcattaattcaacaccatcagtttgcaagtggtacatctattagaacatcaatcattagtcaagatgatcattggcatcatgtggtacctaaagatattcaacacttgtacgtaacacctcatataacattaaatcaaatatttccatatttgaaatatcaaatcatagctatgactacagattcattaaaaaatatttatactgttactgaaggttttgaaaatcgtttgaaatctaacatttatgaagcaactgattttcatcattttgtaaaattactaaaaacaaagcgttatacatatacgcatatccaaagactgttaatgaatgtattattaaacattaaacctacagatgttacgagtaacattcacgcagttaaagtattagcgatgaacgaccgtggcagacaatatttaaagcatttaaaaacagcgttcccagaaagacaatatataaccaatattaacaaaagcaatgcacattacttcacaaatgaaatcaaagcaacacacatatacaatgcaataagcgggcaacaacaaacagatttcaacacgcctgtcatacagcaatatcgttaa

SEQ ID NO: 405266 - DNA, 483 bp, Staphylococcus aureus
atggaacatacaatagcggtcattccgggtagttttgaccccattacttatggtcatttagacattattgagagaagtacagatagatttgatgaaattcatgtctgtgttcttaaaaatagtaaaaaagaaggtacgtttagtttagaagagcgtatggatttaattgaacaatctgttaaacatttacctaatgtcaaggttcatcaatttagtggtttactagtcgattattgtgaacaagtaggagctaaaacaatcatacgtggtttaagagcagtcagtgattttgaatatgaattacgcttaacttcaatgaataaaaagttgaacaatgaaattgaaacgttatatatgatgtctagtactaattattcatttataagttcaagtattgttaaagaagttgcagcttatcgagcagatatttctgaattcgttccaccttatgttgaaaaggcattgaagaagaaatttaagtaa

SEQ ID NO: 405267 - DNA, 543 bp, Staphylococcus aureus
atgcgcgtcattgcaggtaaacataaaagtaaagctttagaaagtatggaaggccgtaatacgagaccaactatggataaagttaaagaaggtatctttaatagtttatatgatgtgtcaggtataggtttagatttatttgcaggaagcggggcgcttggaatagaagcactctctcgaggtatggataaggtaatctttgttgatcaaaattttaaagctgtaaaagttattaaatcaaatcttgcgaatttggatttagaggcacaatctgaagtttataaaaataatgcagatagagctttaaaagcattgtcaaaacgtgatattcaatttgatgtcattttcttagatccaccttataataaaggtctcattgataaagctttaaaactaatttcagagtttaatttattgaaagaaaatggtatcatcgtttgtgaatttagcaatcatgaagaaatagattatcaaccgtttaatatgattaaacgttaccattatgggttgacagacacattgttattagaaaagggagaatag

SEQ ID NO: 405268 - DNA, 390 bp, Staphylococcus aureus
atgaaacaaacatttattacacttggtgaaggtctaacagatttgttcgaattcatgacgatgattgaatataaccatcaacgtattgataaaattatctattttcattcaccacaagctgaaaataaaaagtcatctgtagcaatcattatgaaccctacaactggcaatcatttccaagcattttatatcatgataaacgctattaaatatccatatccagattcaaataaaaagtttcaaatgataaatgattgtgctgaaaaattcgacataccaattttaggtatcgatgtacagccccctcaagcatttcatgatttatcgttatattataattatttaattagtgtgttaaggctccaaaaatggataccagaacttcaataa

SEQ ID NO: 405269 - DNA, 255 bp, Staphylococcus aureus
atgaatttaatcccaagaactagtattgtagtttatttaaaacatatgaaacatgaacgacaaatccgaaaatatggacatatcgttcattcaaatagagatcgtaaatttgtaattatgtatgtgaatgagcaagatgttgatcaaattgtacataaactaatgcaacttaaatacgttagacacattgatggctcaccatataaatacttaaagaaaacttacgaaaaagagaaacacgaaatatataattaa

SEQ ID NO: 405270 - DNA, 927 bp, Staphylococcus aureus
atgaaaaaagtaaacagaaacattttaaatgcggtactagtcggtgctggatttttaagtagtctattaatgatcaataaaaataaagtgattactaaaaagcaaaccatccctgcttttttcaaaggcaatgcaccatatatatttgcgcatcgcggtggtatggctttaagaccagagcaaacgcaacttgcatttgactatgctaaacaattaggcgttgatggctttgaaacagatgtgagactcacaaaagatcaacagcttatcgtttttcatgacgcaactgttgatagaacgacgaacggctctggaaaagttagtgcccatacattagcagaattaaagaaattagacgcagcttatcacttcaaagatatcaatggactaacaccatatcgtggtcatgcacacacagctatactaaccttcgatgagttgctgaagcaatatcctgatatgtatataaacgtagacttaaaagatgctcctgaatcctatgaaggctcaatcgcaccacaaattatgtttgatacaattgcagaaaatcaagcatttgaccgcgttcttgtgacaagtttttataaagaacaaatcgttcgttttaataaaattgcacaaggatccgtcgcaattggtgctagccaacaggaagttacagaagcatttttaaaatatcatttattaggtggtaggtactaccaaccattagcacaaacgttccaaatgcctactcattttaaaggcattgatttgacttcatctcgttttatcaaatggttaaatgatatgaatatcattccaggctattatggcgtaaatagtataaatctgatgaatgatttataccaaaaaggtgcacacacgattgtgacagatcgaccagatttagcacaacaattcaaacaaacaatcccgaataaataa

SEQ ID NO: 405271 - DNA, 435 bp, Staphylococcus aureus
atgattaatgaagcttcactagcgatattagatgatattgatgaactagctgatatgatagttgcatcagatatttatgcatcatttgagcaagctaaacaggcgctcgaaaacaatgacgaagcacatttactttatcaatcatttttaaaatcaaaagagaaatatgatgaagtaatgcgattcgggaaatatcatcctgattataagaaagttatgttagagacaagacaacgcaaaagagcatatgagatgcttgacgttgtgatgcattacaaagctagggaaatggcacttcaacatttaatagatgaagttgttacgaaaattgcgtacgctgtttcagaacatgtcaaaatagaaacaggtaatccattctttcaaacatcacatagtggttgtgcgacgggcggatcctgtaattgttcattataa

SEQ ID NO: 405272 - DNA, 1038 bp, Staphylococcus aureus
atgaaaaagttaattataagagtcgtcggtgtattatttttagttggatttttaatatatcttttttattcaccgagattaaaatttgatgtattagagaacccgaataaaggtaataaagtaaatagatctgaacaggtgaataaatcaaataaccatgctgaaaatccaaagcctaaagaaggtgttggtacatgggtaggtaaagatattaaagtgcttacttctaaatttggacaagcagatcgtgtctacccttttagagatggttacaaaaattatgtgtttaaagacaaaaacagttattacattgtttcaactaaacgtgaagaaatcgtttcagtgtatgctacaggtgagaaagtcaatgttagtccgttaaaaataggacaacattctgcagaaatttttaatcatacaagtattaatccagaaccgtcctttaaagttgatggtaaaaaatatgaatttgaactttcagatgaagatttaaaaacacaaacactgattaaatatggcgacatatatgcacaagtgtattctgatcaacaatcgaaaaaggtgctaagtgtacgatttttaacaaaagaaatgttagcagatattgaaccttatcaattaaattctaattctacgtcagaagagcataataagcgtccagttgagcaaaatccaaatcaattaatttctctttatgaagtaacgaatgaaatgagaaaattaaaaggattaaaaccattgaaaatcaatagcgatttagcacatattgcatctaataacttatatgaagcgacctctaatggttctgatagtgttgaatttacagaggacgcattaagagggcaattagataaaaatcacgttacttataaaacaactgctcaaaatgttggttatgcgtttaatgatgtaccaacattaatccatagttggatgaattcagatatacatcgatctcgtctattaaattcaaaatacgatgagatgggtggagatgtaatgagagattattattcactaattttcttagaaaaataa

SEQ ID NO: 405273 - DNA, 462 bp, Staphylococcus aureus
atgggcgttccaattttaccaacgattagtacgacatgtattgtcattagtgcaattttaattgccattggttggagacttatttggaaaagggaaataaataaacacaaaaatgttatgttagctgcagctgtttttgctttaacttttttcttaatctatgcaagtagaacgatttttatcggtaatacagcatttggcggaccagcatcaattaagaaatattatacgattttcttatttttccacattaatttagcaacaattggtggtattctaggcctagttcaaattattactgcatttaaagataaatataatgtacaccgcaaattcgggccattcgcttcagttatatggttctgtactgcaattacaggtgtagcagtttacttattattatatgtattatatccaggtggagaaacgacatcactgattaaagcaacatttggtcattaa

SEQ ID NO: 405274 - DNA, 912 bp, Staphylococcus aureus
atgagcaaagagcatactttgtcacaaaatattagcagagttaacttcaaagaattgcaacagataattaaaatgggacttgttcaaggtaacttaattccggcttttgcgggcgcatggctagcagttgtaatgacaaatcattccttcttatcatcaatacctcaaattttattaatgctatttggatctactttaattatgggtggcgcatgtgcgttaaataattattacgaccaagatattgatcgtattatgcctagtaaacaaaatagaccaactgtaaataatagaattacagatcaaaatttattactattaagttttggtatgatgttagttggagaaatttgtttgtttttattgaatataccatcaggcgtacttggtcttatggggattgtaggttatgtgtcttattactcaatatggtctaaaagacatacaacatggaacacagtgattgggagttttcctggagcagtaccaccactaattggatgggttgcaattgaaggacaaattagtttaacagcgattgcgctgtttttagttgtattttgttggcaaccaattcatttttatgccttagctattaaacgtaaagatgaatatgcacttgcaaatattccaatgttaccatcagttaagggctttaaacgtacacgtgtcagtatgtttatctggttgattattttattgccagtacctttattactaataaatttaggtgtcgtattcgtagtgttagctacattattaaatttaggatggattgcattaggtttaacaacatttaagaaaaattcagatcaaacaaaatgggcaacacaaatgtttatatattcactaaattatttagtgatctttttcgtgttagctgtgattgtttcattacttactttgatctag

SEQ ID NO: 405275 - DNA, 1071 bp, Staphylococcus aureus
atgtcgtccacatacaatacttgtaaaattaaatcatatttcctgcgttggatcccatcttttcatatcctacaatcaggtctatttatagtatcatctcaaatccggctattaattctaattctcagtgatgcgtttttttatgatggggtgtataaattgtttggcaaaaagaatttaaaatggttaggtgtcgtagcaacgttaatgatgacatttgtacaacttggtggagccttagttaccaaaaccggatcagctgatggttgtggttcttcttggccactatgtcatggtgcgttgattccagaattctttcctattgatacgattattgagttaagtcatagagccgtttcagctttgtctttattaatggtcttatggttagttatcactgcatggaaacatataggctatattaaagaaattaaacctttatcaatcattagtgttggattcttattattgcaagcattaatcggagctgctgctgttatttggcaacaaaacgattacgttttagcattgcactttggtatatcattaatcagtttctcatctgtatttttaataacattgattattttctctatagatcaaaaatatgaagctgacgaattatatatcaaaaagccattaagacgtttaacatggttaatggcaatcatcatttattgtggtgtttatactggtgcactagtgagacatgcggatgcaagtttagcatatggtggttggccattgccattccacgatcttgtaccacattcagaacaagattgggttcaactcacgcatcgtatcatggcttttatagtgtttacgattattatgattacttatattcacgctgttaaaaattatccaaataaccgtactgttcattatggttatacagctgcatttatacttgttatattacaagttatcacaggtgcattatctattatgacaaatgttaacctgataatcgcacttttccatgcattatttatcacttatttatttggtatgacaacatactttatcatgctaatgttacgatcagtaagaagtgacaagcaataa

SEQ ID NO: 405276 - DNA, 3453 bp, Staphylococcus aureus
ttgaaacaaataaaaaagttacttgttgctaaccgtggagaaattgcaattcgtatattcagagcggcggcagaattagacatcagcacagttgcaatttattcgaatgaagacaaaagttcattacatagatataaagcagatgaatcctatttagttggaagtgatttaggtcctgctgaaagttatttaaatattgagcgtatcattgatgtagcaaaacaagcgaatgtggatgcgattcatcctggctatggatttttaagtgaaaatgaacaatttgcgcgtcgttgtgcagaagaaggaattaaatttattggtcctcatttagaacatttagatatgtttggagataaagttaaagctcgtacaacggctatcaaggcagatttaccagttattcctggtacagacggtccaattaaatcatatgaattagcaaaagaatttgcagaagaagctggtttcccgctaatgattaaagccacaagtggtggcggcggtaaaggtatgagaatcgttcgtgaagaaagtgaattagaagatgctttccatagagcaaaatcagaagctgaaaaatcatttggtaatagtgaagtttacatagaaagatacattgataatccaaagcatattgaagtacaagtcataggtgacgaacatggaaatatcgtacacttatttgaacgtgattgttcagtacaacgtcgtcatcaaaaagttgtagaagttgcaccatcagttggattatcatcaacattacgtcaacgtatttgtgatgctgcaattcaattgatggaaaatattaaatatgtcaatgcaggtactgttgaatttctagtatctggtgacgaattcttctttatagaagttaaccctcgtgtacaagtagagcatacaattacagagatggtaacaggaattgatattgttaagacacaaattttagttgcagcaggtgccgatttatttggtgaagagattaatatgccgcaacaaaaagatattacaacattaggctatgccatccaatgtcgtattacaacagaagatccgttaaatgatttcatgccggatactggaacaatcattgcttatcgttcaagcgggggctttggtgtacgtcttgatgctggagatggtttccaaggtgctgagatatcaccttattatgattcattactcgtaaaattatctacacacgcgatatcatttaaacaagcagaagaaaaaatggtacgctcattacgagaaatgcgtattcgtggtgttaaaactaatattccattcttaattaatgtaatgaagaataaaaagttcacaagtggtgattacacaactaaatttattgaagaaacaccagaacttttcaacattcagccgtctctagatagaggtactaaaacattagaatatataggtaatgtaacaattaatggtttcccaaatgttgagaaacgtccgaaaccagactatgaattagcatcaattccaactgtatcttcaagtaaaatcgcttcatttagtggtacgaaacaattgcttgatgaagtaggtccaaaaggtgtagctgaatgggttaaaaagcaggatgatgtcttactaacagatacaacctttagagatgcacaccaatcattattagctacacgagttagaactaaggatatgattaatatcgcatccaaaacagcggacgtatttaaagatggtttctcactagaaatgtggggcggtgctacatttgatgtggcatataatttcttgaaggaaaacccatgggaacgacttgaacgtctacgtaaagctattccaaatgtattattccaaatgttgttacgtgcttcaaacgcagttggttataaaaactatcctgataatgttattcataaattcgtacaagaaagtgctaaagcaggcatagatgtctttagaattttcgattcattaaactgggtagatcaaatgaaagttgccaatgaagcagtacaagaagcgggcaaaatctcagaaggtactatttgttatacaggtgacattttaaatcctgagcgatcaaacatttatactttagagtattatgtcaaactagctaaagagttagaacgtgaaggtttccatattttagcgattaaagatatggcaggcttattaaaacctaaagccgcttacgaattgattggtgagttaaaatcagctgtagatttaccaattcatcttcacactcatgatacaagtggtaatggtttattaacatacaaacaagcaatagatgctggtgtcgatatcattgatactgctgttgcttcaatgagtggtttaacaagtcagccaagcgccaattcgttatattatgcattaaatggcttcccacgccaccttagaactgatattgaaggtatggagtcacttagtcattattggtcaactgtacgtacttattattcagactttgaaagtgatatcaaatcaccgaatactgaaatttatcaacatgaaatgcctggtggacagtattcgaatttaagtcaacaagctaaaagtttaggtttaggcgaaagatttgatgaagtcaaagatatgtatcgcagagtgaatttcttatttggtgatatcgtaaaagtaacaccatcgtctaaagtagttggtgatatggcactttatatggtacaaaatgatcttgatgaacaatccgtgattacagatggctataaattagatttcccagaatcagtagtgtcgttcttcaaaggtgaaataggacaacctgtaaatggttttaataaagatttacaagcggttattttaaaaggccaagaagcactaacagctcgtccaggtgaatatctagagccagttgattttgaaaaagtccgtgagttgcttgaagaagagcaacaaggtcctgttacggagcaagatattattagttatgtactatatccaaaagtatatgaacaatatattcaaactagaaatcaatacggaaacttatcgttacttgatacgcctacattcttctttggaatgcgtaatggtgaaacagtagaaatcgaaatcgataaaggtaaacgattaattattaaactagaaacgattagtgaaccagatgaaaatggtaatagaacgatttactatgcgatgaatggtcaagcgagacgtatttacattaaagatgaaaatgtgcatacaaatgcgaacgttaagccaaaagcagataagagtaatccaagtcatatcggtgctcaaatgccaggttcagtaactgaagtcaaggttagtgtaggtgaaactgtgaaagctaatcagccgttgctaattactgaagctatgaaaatggaaacaacaattcaagcaccatttgacggtgtgattaaacaagtaactgtaaataatggtgacacaatagcgacaggcgatttattaatcgaaattgaaaaagcaactgactaa

SEQ ID NO: 405277 - DNA, 1227 bp, Staphylococcus aureus
atgaagaattttagaagtattttacggtatattggtaaaacctcaaagtttattgattatccgttattagttacatatattgtattgagtttaattggattagtgatggtatatagtgcaagtatggttccagcaactaaaggcacattgactggtggtatcgatgttccaggaacgtatttttacaaccgacaattagcatatgtcataatgagttttataattgtattttttattgcatttttaatgaatgttaaattactgagtaatattaaagtgcaaaaaggtatgattataactatcgtctcactattattactgacgttagtaataggtaaagatattaatggttctaaaagttggataaacttaggatttatgaacttacaggcatctgagttattaaaaattgcaatcatattatatatcccatttatgatcagtaaaaaaatgcctagagtattaagtaaaccaaaattaattttaagtcctattgtattagcattaggttgtacgtttttagttttcctacaaaaagacgtagggcaaacattactaatattaattattttagttgcgatcattttttattcaggaattggggtaaacaaagtcctaagatttggtataccagcagtgctaggattcttagtagtatttgtcattgcattaatggctggttggttaccaagttatttaactgccagatttagtacgctaacagatccattccaattcgaatcaggaactggataccatatttccaattcattgcttgcgataggtaacggtggcgtatttggaaaaggattaggaaatagtgcaatgaaattgggctatttaccagaaccacatacagattttatttttgcaattatttgcgaagaattaggtttaatcggaggattgctagttattactttagagttctttattgtatatcgtgccttccagtttgcaaataaaacatcatcatatttttataaacttgtgtgtgttgggattgccacatactttggaagtcaaacgtttgtaaacattggcggtatttcggcaacaattccattaactggtgtgccattgccatttatcagctttggtggatcatcaatgattagtttaagtattgctatgggtttacttctgattgtaggtaaacaaatcaaagtagaccagcaacgaaagaaacaacaacaaaaagttgatataagaagacaatttaattaa

SEQ ID NO: 405278 - DNA, 276 bp, Staphylococcus aureus
atggcgaaacaagcaacaatgaaaaatgcagctttgaaacaattgactaaagatgctgatgaaatcttgcatctgattaaagttcaactagataatttaacattaccttcatgcccattatatgaagaagtactagatacacaaatgtttggacttcaaaaagaagttgattttgctgttaaattaggtttagttgaccgcgaagatggcaaacaaattatgttacgtcttgagaaagaactttcaaaattacatgaagcttttacacttgtttaa

SEQ ID NO: 405279 - DNA, 483 bp, Staphylococcus aureus
atgatacaaattaaaggagccgtaaagtttcctataacattagatagtacgacttggattttcgatgatagaaaagttagcatcgaagatttagaaaaaggtgtatttgatggttcaaaaccaatcgactttgaagataatcatgaatggaatcgtgctatcctagaaggacaaactaatccgcctactttaaattcagaaataaaatataaaaaacgtgccatgttagaaggttcatttgtcattaatatgacaccatttttcaaacattccgaaccacatgactctgcaactactattcgattatcaaatgagcatgatcatttagatataccgatagatctattaccctatttatttttccaatttgcaaaagacggtaaacgactttacagcgataatggtgtagatagttttatttacaatcaagaagatggttattcatatcgaatcaaccatgtaactcatattgaggtgatttaa

SEQ ID NO: 405280 - DNA, 1848 bp, Staphylococcus aureus
atgactaataaaagagaagatgtccgcaatatagcaattattgctcacgttgaccatggtaaaacaactttagtagatgagttgttaaaacaatctggtatattcagagaaaatgaacatgtcgatgaacgtgcaatggactctaacgatatcgaaagagagcgtggaattacgattctagccaaaaatacggctgttgattataaaggtacacgtattaatattttggatacaccaggacatgcagactttggtggagaagtagaacgtattatgaaaatggttgatggggttgtcttagtagtagatgcgtatgaaggtacaatgcctcaaacacgttttgtacttaaaaaagcgctagaacaaaacctgaaacctgttgttgttgttaataaaattgataaaccatcagcacgtccagagggtgttgtagatgaagttttagatttatttattgaattagaagcaaacgatgaacaattagaattccctgttgtttatgcttcagcagtaaatggtacagctagcttagatcctgaaaagcaagatgataatttacaatcattatatgaaacaattattgattatgtaccagctccaattgataacagtgatgagccattacaattccaagtagcattgttggactacaatgattatgttggacgtattggtattggtcgtgtattcagaggtaaaatgcgtgtcggagataatgtatcactaattaaattagacggtacagtgaaaaacttccgtgtaactaaaatctttggttactttggattaaaacgtttagaaattgaagaagcacaagctggagatttaattgctgtttcaggtatggaagacattaatgttggtgaaactgtaacaccacatgaccatcaagaagcattgccagttctacgtattgatgagcctactcttgaaatgacatttaaagttaacaattctccatttgctggccgtgaaggtgactttgtaacagcacgtcaaattcaagaacgtttaaatcaacaattagaaacagatgtatctttgaaagtttctaacacagattctccagatacatgggtagttgctggtcgcggtgaattgcatttatcaatccttattgaaaatatgcgtcgtgaaggttatgaattacaagtttcaaaaccacaagtaattattaaagaaatagatggtgtaatgtgtgaaccatttgaacgtgtgcaatgtgaagtgccacaagaaaatgcaggtgctgttattgaatcattaggtgcacgtaaaggtgaaatggttgatatgactacaactgataatggacttacacgtttaatctttaatgtaccggctcgtggtatgattggttatacgactgaatttatgtcaatgacaagaggttacggtattattaaccatacatttgaagaatttagaccacgtattaaagcacaaattggcggtcgtcgtaatggtgcattaatttcaatggatcaaggttctgcaagtacttatgccattttgggacttgaagatagaggtgtaaacttcatggaacctggtactgaagtttatgaaggtatgattgttggtgaacataatcgtgaaaatgatttaactgttaacatcactaaaacaaaacatcaaactaacgtacgttctgcaacgaaagaccaaacacaaacaatgaatagaccgcgtattctaacattggaagaagcgttacaattcattaatgatgatgaacttgttgaggttacaccagaaagtatacgtttaagaaagaaaattttaaacaaaaatgttcgtgaaaaagaagcaaagcgtatcaaacaaatgatgcaagaaaacgaataa

SEQ ID NO: 405281 - DNA, 192 bp, Staphylococcus aureus
atgaaacaaaaaaaatctaaaaatatcttttgggtattttctatattagctgttgttttcttagtattatttagttttgctgttggtgcatcaaatgtaccaatgatgattttaacatttatattactcgttgcaacctttggaattggatttactacaaagaaaaaatatcgagaaaacgattggctataa

SEQ ID NO: 405282 - DNA, 828 bp, Staphylococcus aureus
atggcactttatggatttgcccaaggacttattcaagaagcaggaattagaattaaacaattgatggagcaaaatttaacaattgaaacaaagtcaaatccgaatgaccttgttacaaatgtagataaagcaacagaagatttcatttttgatacaattttagaaacatatcccaatcatcaagtattaggtgaagaagggcatggtcatgacatcgatacttccaaaggtacggtatggattgttgacccaatagacggtacattgaattttgttcatcaacaagaaaatttcgcaatttcaattggtatttatatcgatggtaaaccttatgcaggttttgtatatgatgttatggctgatgtcttatatcatgctaaagtaggggaaggtgcatatcgtggtagccaacccttgaaaccattgaatgattctaatctaagacaaagcattattgggatcaatccgaactggttaactaaaccaattttaggagaaatctttaaagaaattgttaatgattctagaagtgcaagggcatatggtagtgcagcgcttgaaatcgtttcagttgctacaggtaatttagaagcatatatgacgccaagacttcaaccatgggattttgctggcggattggttattttatatgaagtaaatggacaagcttccaatttactaggagaaccattaacaattagtggtccaaattcaatcttagttggaaatcgtggtctccatcaagaaattagcaatgattatttagagccccaccatgatgcgttaatacaattacatgaacaacgatttaaaagaaaatcaaaataa

SEQ ID NO: 405283 - DNA, 615 bp, Staphylococcus aureus
atgacaaaatatacatttaaacctaaagatttcaaagcgttcaacgtagaaggcttagacgcacgaatggaagctttaaacgaatacatacgaccacaactccgtgaattaggagaatattttagtgacttctttacaagtcaaactggtgaaacattttatcctcacgtagcaaagcatgctagaagaagtgtgaatcctcctaaagatacatgggttgcttttgcaacaaacaaaagaggctataaaatgttacctcatttccaaattggtatgtttgaagatcaactgtttgttatgtttggaatcatgcatgaagcaaaagataaagcaacacgtgcaaaagtttttgaaagaaaatttaaagctattcaacaattacctgatgattatcgtgtttgcttagatcatatgaaacctgataaaccatttattaaagatttaacggatgatgatttaatagaagcgatacaaagagccatcaatgtgaaaaaaggtgaattctttatagcgcgtgcaatcacaccacaagataaaagattaaaaagtgacaaagcatttattgcatttttagaagaaaccttcgatcagttcttaccattttattctgcataa

SEQ ID NO: 405284 - DNA, 1353 bp, Staphylococcus aureus
atgaataataaacgacattcaacaaatgaacaattaagtttagacgaaataaacaatacaattaaattcgatcatcgcagttcaaataaacagaaatttttatcatttcttggacctgggttattagtcgctgttggttacatggatcccggaaactggataacatcaatgcaaggtggcgcccaatatggctatactttgctattcgtaattcttatttcaagtttatcagcaatgttacttcaaagcatgacagtgagattaggaatagcaacaggtatggacttagctcaaatgacacgacattatttatcaagacctattgctataatcttttggatcattgcagaactagcaattatcgctacagatattgctgaggttattggtagtgctattgctcttaatctcctatttaacatacctttaatcgtcggtgcactaataactgtacttgatgtatttttactactttttataatgaaatatggttttagaaaaattgaagctattgttggtacattaattttcacagtgttattcatctttatatttgaagtctatatttcatcaccacagttgaatgctgtgttaaatggatttataccacatagtgaaatcattacaaataacggcattctctatattgcattaggtattattggcgctacaattatgcctcataatttgtacttacattcatcaattgtacaatctagaacatactcaagacataacaatgaagaaaaagcgcaagcgattaaatttgctacgatagattcgaacattcagttatcaatcgcatttgtagtcaattgcttattattagtgttaggagcatcactatttttcaactcaaatgctgacgatttaggtggtttctatgatttatatcacgccttaaaaactgaacctgtactaggtgcaacaatgggtgcaatcatgagtacattatttgcagttgcattattagcgtcaggtcaaaattcaacgattactggtactttagcaggacaaattgtaatggaaggatttttaagattacacataccaaattggttaagacgtttaattacacgttctcttgctgtcattcctgttatcgtatgcttaatcatttttaaaggtaatgcagctaaaattgagcaactacttgtattctctcaagtatttttaagtattgctctgccattctgtttaataccattacaattggctactagtaataaagacttgatgggacctttctataataaaacatgggttaatatcatttcatggacacttattattattctaagtattttaaatgtctatttaatcgttcaaacattccaagaactacaaagttaa

SEQ ID NO: 405285 - DNA, 420 bp, Staphylococcus aureus
atgaatagaaaacctgaattaatcatggcttggattgcaaatagtattagtattatttatttattagttatggggctatcctatttttctttaaaaagtggtaatgcatcacaacgtgaagaattagcgaagcaattatctcagaacggtggcaaggtttctttagatatgcttcagacaacaatgggtgcattagcaattattttattaatttcaacactttatggtatatttgcgacaatttgtattaaaggacgtagaaaattatcgattatactttttgttatcgcgataattgtaagtttgatggctcttaatttaattgcaattgtcttatgggttatcgtgatgattatgttgatttctaaaaaagaatcaaaagaaacaacacataaggacgatgagtatatttatcattaa

SEQ ID NO: 405286 - DNA, 1020 bp, Staphylococcus aureus
atgactggagaacaatttactcaaattaaacgtccagtaagtagattaactgaaaaagttctaggttggttatgttgggtgatgttattagtgcttactgtcattacgatgtttatagcacttgtttcattcagtaataacacatcgattgctaatcttgaaaatacattaaacaataatgcatttatccagcaattattagctggaaatggctataatacaacacaatttgtaatatggttacaaaatggtatatgggctattatcgtttactttattgtttgtttgttgatttcatttttagctctcatatctatgaatataagaatcttgtcaggtttcttattcttaatatcagcaattgtaacgattcctttagttttacttatcgttactttaatcattccgatattattctttattattgcgatgatgctatttataagaaaagataaagttgaaatggttgcgccacaatattatgaagagtataacggaccgatttatgattatcgtgaacctgtgtatgagcgcccccaaccgaaagatgattattatgatgtgcctaaatatgaaaaagaattggataaatcaaatactgtatatgatcaagaacaggaaagagataaatatgatcaatttcctaaacgtgcagttgaaagtgaatataatcatgatgagcgcactgaggaagaaccatcagtattatccagacaggctaaatacaaacaaaaaagtactgaagaactaggtattgaagatgatggttattatgcagaacctgaagttgatccaaaagaattgaaagcacaacaaaagcgagaaaaagctgaaattaaagctaagaaaaaagaaaaacgtaaagcttataaccaacgaatgaaagaacgtaggaaaaatcaacctagcgcagttagtcaacgtcgaatgaattttgaagagcgacgtcaaatttacaacaatgatatttctgaagaacgcaattcaagtgaagttaaggacaaaaaagagcaagaataa

SEQ ID NO: 405287 - DNA, 1074 bp, Staphylococcus aureus
atgaaacgatttttacaactcattataggtgcattagttgtgggtatgctttgtcttactttaagtcattggtttaaatctaaagaacaagtgcatacaaatcaaaaaatttacgtatacaattggggcgaatatattgatccagagttaattaagaaatttgaaaaagaaactggcattcaagtcgtttatgaaactttcgattcaaatgaagcgatggaagccaaaattcgcaatggcggtacacattatgatgttgcttttcctagtgaatatacagttcaaaaattgaaaagagatcatttattgttaccaatagatcataataaggtacctaatattaaaaatttagattcagattatatgaatatgtcatttgatagaggcaataaatattctttaccttatttctttggaactgtaggtattttatataataaagaaaagtatccaaatgaatcatttgatagttggaagtcattgtataatcctaaatttaaaaaccaaattttactagttgacggtgctagagagattataggcatgagtttgaataaacttgggtataatcttaatgaccgtaattcgcaccatttaaaagaagcagagcgagatttaaccaaactagcaccacaagtaagaggtgtcgtaggtgatgaaattaccatgatgcttcaacaaaatgaaggtaacatagcggttgtttggagtggtgttgcagcacctctagtgcaagaaggggataaatataattatgttattcctaaagaaggatcgaatttatggttcgacaatatggtaattccaaaaacggcacaaaataaagagggtgcatataaatttatgaattttttattagatgctaaaaataacaagcaaaatacagaattcgtaggctatgcaacgccaaacaaggctgctcgacaattgttgcctaaagagattaaagacgaccatcgtttttatccgactaagaaagagcaagaacgccttgaagtttataaagatttaggacctgaagttttaagtgaatacaatgaaaactttttgaatttcaaaatgtcattaaaataa

SEQ ID NO: 405288 - DNA, 810 bp, Staphylococcus aureus
atgaaatggtatggaaagctgtatatcgggatacttttagcgattttatacatcccaatattctttttaatgttctattcattcaattcggctggtaatatgattcactttgaacattttacattagagcattatcaatcattatttcaaaatgatcatttaatgtcggtcatttttaatacgatagctgtagcacttttagcagcctcaatttctacagttattggtacatttggtgccattgctatttattatttaagaaataaaaagtttaaagtaactttactaacattgaataatgtcttgatggtatcatccgacgttgtcataggtgcatcattcttaattatgtttacaacgattggccattttactggtcttggtttaggattttggacagttctaatatctcatattgcattttgcatacctatagttgtgattatcgtcttaccacaactgtatgaaatgaataataatatgttaaatgctgcaagagatttaggagcgactgaaccacaattattaagcaacattattattcctaatattttaccttctattataggaggattctttatggctttaacttattcactagacgatttcacagtaagtttcttcgttactggtaatggctttagtgtgttatcagttgaagtttatgctatggcgagaaaaggaattagtatggaaattaatgcgatttcaacattattgtttgctgttattgtattaggaatactaggatattatttgattcaatacgtgataaataagaaaaaactaatcaagcgaggtgtaaaataa

SEQ ID NO: 405289 - DNA, 798 bp, Staphylococcus aureus
atgcgtaatactaataaatttctcttaatcccgtatttactatggatggttatatttattattgtaccagttgtattactcatttatttttcatttttagatatcaatggacattttagtttcacgaattatcaacaaatttttactacaaaatatttgaaaatgtttgcatattcaattttatatgccgcttcaataacaattattaccttgactatcagttatccagctgcctattatattactcgttcgaaatttcaaaatatcttattaatgataatgattattccaacatggataaatttattgttaaagacatatgcttttataggtttattaagtcatgatggcgtgattaatcaatttttccacttatttaatttaccatcattcaatttgttatttacaactggtgcgtttttagtagtggcaagttacatttatataccatttatgattttacctatatttaatagcatgaaagcaattcctaataatttattgcaggcctcaagtgatttaggtgccagtcctttctatacttttagaaaagtaatcatgccgttaacaaaagaaggtgttatgactgggattcaagtaacctttattccatcactttcattatttatgattacaagattaattgcaggtaataaagtcataaatataggtacggcaatagaggaacaatttttaacaattcaaaattatggtatgggatcaactatagctatattcttaattgtatttatggcattcattttaatcattacaaaatcatctaatgggagagggtga

SEQ ID NO: 405290 - DNA, 1095 bp, Staphylococcus aureus
ttggaaccgttattatcattaaaatcagttagtaaaagctatgatgatcttaatatcttagatgacatagatattgatattgaatcaggatacttttatacattattaggtccttcaggttgtggtaaaacaacaattttaaaattaattgcagggtttgaatatcctgacagtggtgaagtgatttatcaaaacaaaccaattggtaatttaccaccaaataaacgtaaagtgaatacagtctttcaagattatgcattatttccacacttaaacgtctatgataatatcgcttttggtttgaaattaaaaaaattatcaaaaaccgaaattgatcaaaaagtaactgaggcattaaaattagtaaaactttcaggttatgaaaaaagaaatattaatgaaatgagtggcggacaaaagcaacgtgttgcaattgcacgtgctatcgtaaatgaaccagaaatattattgttagatgaatctttatccgcattagatttgaaattgcgtactgaaatgcaatatgaattacgagaattgcaatctagattaggtattacatttatatttgtaacacatgatcaagaagaagcgttagcattaagtgactttctttttgtattaaaagatgggaaaattcaacaatttggcacaccaacagatatatatgacgaaccagtgaatcgatttgtagctgattttattggagaatctaatattgttgaagggcgcatggttagagattatgtcgtgaatatttatgggcaagatttcgaatgtgtcgatatgggtattcctgaaaataaaaaagtagaagtcgttattcgaccagaagatatatcattaatcaaagctgaagaaggattatttaaagcaactgttgattctatgttatttagaggggtccactatgaaatatgttgtatagacaataaaggttatgaatgggtaatacaaacgactaaaaaagctgaagtaggcagtgaagttggtctttattttgatcctgaagccattcatattatggttcctggagaaacagaagaagaatttgataaacgtattgaaagctatgaggaagtagacaatgcgtaa

SEQ ID NO: 405291 - DNA, 540 bp, Staphylococcus aureus
atgaacataggtaataaaattaaaaatcttagaagaattaaaaatttaacgcaagaagaacttgctgaacgtacagacttatcgaaaggctacatttcacaaatagaaagtgaacatgcctcaccaagtatggaaactttcttaaatattatagaggtgttaggaacgacgccaagtgaattttttaaagacagtgaaaatgaaaaagtattatacaagaaggaagaacaagttatttatgatgagtatgatgaaggttatatattaaattggttagtttcaaagtcaaatgaatatgatatggagccattaatattaactttaaagcctggagcatcatataaaaattttaatccatcagagtctgatacgtttatttattgtatgtcaggtcagataacacttaatttaggcaaagagatatatcaagcacaagaagaagacgttttgtattttaaagcacgagataatcatcgtttgtcaaacgaatcaaacaatgaaacacgaatacttattgtagcgacagcttcatatttataa

SEQ ID NO: 405292 - DNA, 276 bp, Staphylococcus aureus
atggaatatgagtatccaattgatttagactggagtaatgaagagatgatttcagtgataaatttctttaatcatgtagagaagtattatgaatccggcgtgacggcaggcgactttatgggtgcatataaaagatttaaagaaattgtgcctgctaaagcagaggaaaaacaaatttttaatactttcgaaaaaagtagtggctataatagttacaaagcagttcaagatgtaaaaactcactctgaagaacaaagagtaacagctaaaaaataa

SEQ ID NO: 405293 - DNA, 1407 bp, Staphylococcus aureus
atggtagttggagatttcccaattgaaacagatactatagtaatcggagcaggtcctggtggatacgttgcagcaattcgtgcagctcaattaggacaaaaagtaacaatcgttgagaaaggtaatcttggtggtgtttgcttaaacgtaggatgtattccttcaaaagcattactacatgcttctcaccgttttgttgaagcacaacattctgaaaacttaggtgttattgctgaaagtgtttctttaaacttccaaaaagttcaagaattcaaatcatcagttgttaataaattaactggtggtgttgaaggcttacttaaaggtaacaaagttaacatcgttaaaggtgaagcatatttcgtagataacaatagcttacgtgttatggacgaaaagagcgcacaaacatacaactttaaaaatgcaatcattgcaacaggttcaagaccaattgaaattcctaatttcaaattcggtaaacgtgttatcgactcaacaggtgctttaaacttacaagaagtaccaggtaaattagttgtagttggtggaggatacattggatcagaattaggtacagcatttgctaactttggttcagaagtaaccatccttgaaggtgctaaagatatcttaggtggcttcgaaaaacaaatgacacaacctgttaaaaaaggtatgaaagaaaaaggtgttgaaatcgttactgaagctatggctaaatcagctgaagaaacagataacggagttaaagttacttatgaagctaaaggcgaagagaaaacaatcgaagctgattatgtattagtaactgtaggtcgtcgtccaaacacagacgaattaggcctagaagaattaggtgttaaattcgctgaccgtggattattagaagttgataaacaaagccgtacgtctatcagcaatatctatgcaattggtgatatcgttccaggtttaccacttgctcacaaagctagctatgaagctaaagttgctgctgaagcaattgatggtcaagctgctgaagttgattacattggtatgccagcagtatgctttactgaaccagaattagctacagttggttattcagaagcgcaagctaaagaagaaggtttagcaattaaagcttctaaattcccatatgcagcaaatggtcgtgcattatcattagatgatactaacggatttgttaaacttattacacttaaagaagatgatactttaatcggtgctcaagtagttggtactggtgcatcagatattatctctgaattaggtttagcaattgaagctggtatgaatgctgaagatatcgcattaacaatccatgcacatccaacattaggtgagatgactatggaagcagcagaaaaagctatcggatacccaatccatacaatgtaa

SEQ ID NO: 405294 - DNA, 1293 bp, Staphylococcus aureus
gtggcatttgaatttagattacccgatatcggggaaggtatccacgaaggtgaaattgtaaaatggtttgttaaagctggagatactattgaagaagacgatgttttagctgaggtacaaaacgataaatcagtagtagaaatcccatcaccagtatctggtactgtagaagaagttatggtagaagaaggtacagtagctgtagttggtgacgttattgttaaaatcgatgcacctgatgcagaagatatgcaatttaaaggtcatgatgatgattcatcatctaaagaagaacctgcgaaagaggaagcgccagcagagcaagcacctgtagctactcaaactgaagaagtagatgaaaacagaactgttaaagcaatgccttcagtacgtaaatacgcacgtgaaaaaggtgttaacattaaagcagtttctggatctggtaaaaatggtcgtattacaaaagaagatgtagatgcatacttaaatggtggtgcaccaacagcttcaaatgaatcagctgcttcagctacaagtgaagaagttgctgaaactcctgcagcacctgcagcagtaacattagaaggcgacttcccagaaacaactgaaaaaatccctgctatgcgtagagcaattgcgaaagcaatggttaactctaagcatactgcacctcatgtaacattaatggatgaaattgatgttcaagcattatgggatcaccgtaagaaatttaaagaaatcgcagctgaacaaggtactaagttaacattcttaccttatgttgttaaagcacttgtttctgcattgaaaaaatacccagcacttaacacttcattcaatgaagaagctggtgaaatcgttcataaacattactggaatatcggtattgcagcagacactgatagaggattattagtacctgttgttaaacatgctgatcgtaagtctattttccaaatttcagatgaaattaatgaattagctgttaaagcacgtgatggtaaattaacagccgatgaaatgaaaggtgctacatgcacaatcagtaatatcggttcagctggtggacaatggttcactccagttatcaatcacccagaagtagcaatcttaggaattggccgtattgctcaaaaacctatcgttaaagatggagaaattgttgcagcaccagtattagcattatcattaagctttgaccacagacaaattgatggtgcaactggccaaaatgcaatgaatcacattaaacgtttattaaataatccagaattattattaatggaggggtaa

SEQ ID NO: 405295 - DNA, 978 bp, Staphylococcus aureus
atggcacaaatgacaatggttcaagcgattaatgatgcgcttaaaactgaacttaaaaatgaccaagatgttttaatttttggtgaagacgttggtgttaacggcggtgttttccgtgttactgaaggactacaaaaagaatttggtgaagatagagtattcgatacacctttagctgaatcaggtattggtggtttagcgatgggtcttgcagttgaaggattccgtccggttatggaagtacaattcttaggtttcgtattcgaagtatttgatgcgattgctggacaaattgcacgtactcgtttccgttcaggcggtactaaaactgcacctgtaacaattcgtagcccatttggtggtggcgtacacacaccagaattacacgcagataacttagaaggtattttagctcaatctccaggtctaaaggttgttattccttcaggcccatacgatgcgaaaggtttattaatttcttctattagaagtaatgacccagtcgtatacttagagcatatgaaattgtatcgttcattccgtgaagaagtacctgaagaagaatatacaattgacattggtaaggctaatgtgaaaaaagaaggtaatgacatttcaatcatcacatacggtgcaatggttcaagaatcaatgaaagctgcagaagaacttgaaaaagatggttattctgttgaagtaattgacttacgtactgttcaaccaatcgatgttgacacaattgtagcttcagttgaaaaaactggtcgtgcagttgtagttcaagaagcacaacgtcaagctggtgttggtgcagcagttgtagctgaattaagtgaacgtgcaatcctttcattagaagcacctattggaagagttgcagcagcagatacaatttatccattcactcaagctgaaaatgtttggttaccaaacaaaaatgacatcatcgaaaaagcaaaagaaactttagaattttaa

SEQ ID NO: 405296 - DNA, 1113 bp, Staphylococcus aureus
atggctcctaagttacaagcccaattcgatgcagtaaaagttttaaatgatactcaatcgaaatttgaaatggttcaaattttggatgagaatggtaacgtcgtaaatgaagacttagtacctgatcttacggatgaacaattagtggaattaatggaaagaatggtatggactcgtatccttgatcaacgttctatctcattaaacagacaaggacgtttaggtttctatgcaccaactgctggtcaagaagcatcacaattagcgtcacaatacgctttagaaaaagaagattacattttaccgggatacagagatgttcctcaaattatttggcatggtttaccattaactgaagctttcttattctcaagaggtcacttcaaaggaaatcaattccctgaaggcgttaatgcattaagcccacaaattattatcggtgcacaatacattcaagctgctggtgttgcatttgcacttaaaaaacgtggtaaaaatgcagttgcaatcacttacactggtgacggtggttcttcacaaggtgatttctacgaaggtattaactttgcagcagcttataaagcacctgcaattttcgttattcaaaacaataactatgcaatttcaacaccaagaagcaagcaaactgctgctgaaacattagctcaaaaagcaattgctgtaggtattcctggtatccaagttgatggtatggatgcgttagctgtatatcaagcaactaaagaagcacgtgaccgcgcagttgcaggtgaaggtccaacattaattgaaactatgacatatcgttatggtcctcatacaatggctggtgacgatccaactcgttacagaacttcagacgaagatgctgaatgggagaaaaaagacccattagtacgtttccgtaaattccttgaaaacaaaggtttatggaatgaagacaaagaaaatgaagttattgaacgtgcaaaagctgatattaaagcagcaattaaagaggctgataacactgaaaaacaaactgttacttctctaatggaaattatgtatgaagatatgcctcaaaacttagcagaacaatatgaaatttacaaagagaaggagtcgaagtaa

SEQ ID NO: 405297 - DNA, 627 bp, Staphylococcus aureus
atgaaatttggaaaaacaatcgcagtagtattagcatctagtgtcttgcttgcaggatgtactacggataaaaaagaaattaaggcatatttaaagcaagtggataaaattaaagatgatgaagaaccaattaaaactgttggtaagaaaattgctgaattagatgagaaaaagaaaaaattaactgaagatgtcaatagtaaagatacagcagttcgcggtaaagcagtaaaggatttaattaaaaatgccgatgatcgtctaaaggaatttgaaaaagaagaagacgcaattaagaagtctgaacaagactttaagaaagcaaaaagtcacgttgataacattgataatgatgttaaacgtaaagaagtaaaacaattagatgatgtattaaaagaaaaatataagttacacagtgattacgcgaaagcatataaaaaggctgtaaactcagagaaaacattatttaaatatttaaatcaaaatgacgcgacacaacaaggtgttaacgaaaaatcaaaagcaatagaacagaactataaaaagttaaaagaagtatcagataagtatacaaaagtactaaataaggttggtaaagaaaagcaagacgttgatcaatttaaataa

SEQ ID NO: 405298 - DNA, 552 bp, Staphylococcus aureus
atgttaacaatgaaagacatcattagagatggtcatccaactttgcgtcaaaaagcagctgagttagaattaccattaactaaagaagaaaaagaaacattaatcgccatgagagagtttttagtaaatagtcaagatgaggaaatcgcgaaacgatatggtttacgttcaggcgttggtttggctgcacctcaaattaatatttctaaacgtatgattgctgttttaataccagatgatggcagtggcaaatcttatgactatatgcttgtgaacccaaaaattgtaagtcatagcgttcaagaagcttatttaccaactggtgaaggttgccttagtgtcgatgataatgttgctggtctagttcaccgtcataatagaattacaattaaagccaaagacatcgaaggtaatgatatacaattacgactaaaaggatatccagcaattgttttccaacatgaaattgaccatttaaatggtgtaatgttctatgatcacattgacaaagatcacccattacaaccacatacagatgcagtagaagtttaa

SEQ ID NO: 405299 - DNA, 219 bp, Staphylococcus aureus
atggcagtatttaaagttttttatcaacataacagagacgaggtaattgtgcgtgaaaatacacaatcactttatgttgaagctcaaacagaagaacaagtacgtcgttacttgaaagatcgtaattttaatatcgaatttatcactaaattagagggcgcacatttagattacgaaaaagaaaactcagaacactttaatgtggagattgctaaataa

SEQ ID NO: 405300 - DNA, 1698 bp, Staphylococcus aureus
atgaaacaattacatccaaatgaagtaggtgtatatgcacttggaggtctaggtgaaatcggtaaaaatacttatgcagttgagtataaagacgaaattgtcattatcgatgcaggtatcaaattccctgatgataacttattagggattgattatgttatacctgactacacatatctagttcaaaaccaagataaaattgttggcctatttataacacatggtcacgaagaccatataggcggtgtgcccttcctattaaaacaacttaatatacctatttatggtggtcctttagcattaggtttaatccgtaataaacttgaagaacatcatttattacgtactgctaaactaaatgaaatcaatgaggacagtgtgattaaatctaagcactttacgatttctttctacttaactacacatagtattcctgaaacttatggcgtcatcgtagatacacctgaaggaaaagtagttcataccggtgactttaaatttgattttacacctgtaggcaaaccagcaaacattgctaaaatggctcaattaggcgaagaaggcgttctatgtttactttcagactcaacaaattcacttgtgcctgattttactttaagcgaacgtgaagttggtcaaaacgtagataagatcttccgtaattgtaaaggtcgtattatatttgctaccttcgcttctaatatttaccgagttcaacaagcagttgaagctgctatcaaaaataaccgtaaaattgttacgttcggtcgttcgatggaaaacaatattaaaataggtatggaacttggttatattaaagcaccacctgaaacatttattgaacctaataaaattaataccgtaccgaagcatgagttattgatactatgtactggttcacaaggtgaaccaatggcagcattatctagaattgctaatggtactcataagcaaattaaaattatacctgaagataccgttgtatttagttcatcacctatcccaggtaatacaaaaagtattaacagaactattaattccttgtataaagctggtgcagatgttatccatagcaagatttctaacatccatacttcagggcatggttctcaaggtgatcaacaattaatgcttcgattaatcaagccgaaatatttcttacctattcatggtgaataccgtatgttaaaagcacatggtgagactggtgttgaatgcggcgttgaagaagataatgtcttcatctttgatattggagatgtcttagctttaacacacgattcagcacgtaaagctggtcgcattccatctggtaatgtacttgttgatggtagtggtatcggtgatatcggtaatgttgtaataagagaccgtaagctattatctgaagaaggtttagttatcgttgttgttagtattgattttaatacaaataaattactttctggtccagacattatttctcgaggatttgtatatatgagggaatcaggtcaattaatttatgatgcacaacgcaaaatcaaaactgatgttattagtaagttaaatcaaaataaagatattcaatggcatcagattaaatcttctatcattgaaacattacaaccttatttatttgaaaaaacagctagaaaaccaatgattttaccagtcattatgaaggtaaacgaacaaaaagaatcaaacaataaataa

SEQ ID NO: 405301 - DNA, 663 bp, Staphylococcus aureus
atgggtaaagaatatgtagtcatcggtctaggtcgttttggaggtagtatcgttcgtgagttgaatgcattagacatggatgtaatggccatcgaccatgatgaaaatagagtgaatgaatatagtgatatcgctactcatgcggttgttgcagacactacagatgaagcagttatgaaaagtttaggtatccgtaactttgatcatgtcattgtggcaattggtgaaaatattcaatcaagtacgttgacgactttaattttaaaagagttaggtgtaaaaaaagtaactgctaaagcacaaaatgattatcatgcaaagattttaaataaaattggagcagatacggttgtgcaccctgagcgtgatatgggtagacgtattgcgcataatgttgcgagtgcaagtgtacttgattatcttgagttggcagacgagcattctattgtagaattgaaagcaactgaaaagatggcggggcagtctatcattgatttagatataagagcacaatatggaattaacattattgcaattaaacgaggcaaagagttcatcatttcaccaaatccaaatattaatttagaaataggtgatattttaatcatgattggacatgataatgatttaaatcgctttgaaaaaaatattgcgacgagataa

SEQ ID NO: 405302 - DNA, 1020 bp, Staphylococcus aureus
atgatttatgcatttataggtataacagtgttatggttgtttttattttgctatatcattattgcttctatagattttggggcaggtttcttcgcattgcattcaaagttaactggtgatgaaaagaaaattaatcacttaatttcacgttatttaaacccagtttgggaagttacgaatgtattctttgttttcttcttcgtaggattcgtaggtttctttccagagtcaatcaaatatttaggcacggtattgttaataccaggttcaatagcactgattatgatatcgttgagaaacagtttttatgcatttgaaaattatggtcaagatacaaaattagcatggatgatcatgtatggggtaagtggattattaattccagcttcattatctactgctttaactattacagaaggtggctatattaatgttcgaaacaatgttatcgatctagattgggtgcagttattattaagcccatttgcttggtctgtagtattcttggcaattatttcagttttatatatttcatcaggatttttgacatattatgctaaaaaagcaaatgacgaaccagcatataatttaacaagacaatggcacatatttttagggccgccgatgattatcatttgtttattcgtatttctatcattacgcattcaaaattctgaacatttttattcagctgtttttgactattggtggatgtttggtataagtttcttattctttgcattagcttcattgttaacattctttaagaaaaaacatggtttggcttttgtatttgttattttacaaatgatgttcgcgttctttggctatggaattagtaaattgccataccttttatatccgtttgtaaaaattacagatgcatatgttaatccagaaatgggctggacattagtgattgtctttattttaggtttacttttattacttccatcgttaatattattattaagattatttgttttcgacaaagaatatgttgaaggaaagaaatcataa

SEQ ID NO: 405303 - DNA, 1362 bp, Staphylococcus aureus
atggatacagttgaaatcagtcggtttttgacagctatgactttagcagttcatatcatttttgcaacgattggtgttggtatgcctttaatgttcgcaattgcagaatttttaggtattcgcaaaaatgatcttcaatatatagctatggccaaaagatgggctaaagcttatacaattactgtagcagtgggagttgttacaggtacaattataggacttcaattatcattgatttggcctacatttatggaaatgggtggacacgttattgcacttccattatttatggaaacatttgcgttcttctttgaagctattttcttaagtatatatttatatacttgggatcgttttaaaaataaatggacacatttcttaattagtataccagtaattattggtggctctttctcagcattcttcattacttcagtgaattcatttatgaatacgcctgcaggttttgagttgaagaatggaaagatggtcaatgttcaacctatagaagcgatgtttaacccatcgtttatagttcgatcatttcacgtaattactacagccggtatgacgatggcatttgttattgcatcaatagcagcttttaaattattgcgtaatcgtcaacctaaagatactgtctaccataagaaagctttgaaaatgtctatgatagttggattcttttcaacattactttctatgttggcaggggatttatctgcaaaatttttgcataaattccaacctgaaaaattagcagcttatgaatggcatttcgatacatcttcccatgccaaattattattatttggtgtgttagatgaaaagactcagcaagttaaaggtgcgattgaattacctggactattgagtttcttagcagataatagtgtcaaaactaaagtacaagggttaaatgattttccaaaaagtttacatccgcctatgatcgtccattatttctttgatttaatggtaacgatgggaattttatgttttgtcatttcaggtgtttatgtcttaactttaatgtttaaaaagcttagaaagttttctactcataaatggatgctttatggaatattattaacaggcccagcttcaatgctagctatagaatttggatggttcttaacagagatgggtagacagccttggattgttcgtggttatatgcgcgtggcagaagcagcaacacaagcaggcggaataaccttcgttacaattttatttggcatattgtacatcattttaatgtatacatgtgcatacgtattaattcgtatgtttaaaaataaaccggcgtatgaagatgtaaatcgtttagccaagaagcaaggaggagaaatagaaaaatga

SEQ ID NO: 405304 - DNA, 234 bp, Staphylococcus aureus
atgtcagaaataatcgtttatacgcagaatgattgtccaccttgtacatttgtaaaaaattatctaaatgagcatcacattgattttgaagagagaaatatcaacaatcaacaatatcgaaacgaaatgatagattttgatgctttttcaactccgtttattttgttgaatggcaatccaatgtaccatgttgatcttgatgaaatcaacaaagtattaaatatccaagattaa

SEQ ID NO: 405305 - DNA, 1719 bp, Staphylococcus aureus
atgtctaaattaattaaaggtattgccgcatctgatggtgtcgcaattgctaaagcttatttattagttgagccagacttaacattcgacaaaaatgaaaaagtcactgatgttgaaggagaagttgcaaagttcaatagcgctatcgaagcttctaaagttgagttaactaaaattagaaataatgcagaggttcaactaggtgctgataaagctgctatctttgatgcacatttattagttttagatgaccctgaattaattcaaccaatccaagataagattaaaaatgaaaacgctaatgctgctacagcattaacggatgtaacaacacaatttgttacaatttttgaatctatggataacgaatacatgaaagaacgtgcggctgatattcgcgacgtttctaaacgtgtgttatcacatattttaggtgtagaattaccgaatccgagtatgattgatgaaagcgttgttattgtagggaatgacttaacgccatctgatactgctcaattaaataaagaattcgtacaaggttttgctacaaacattggcggaagaacaagtcactctgcaattatgagtcgttctttagaaattccagcaattgttggtacaaaatcaattactcaagaagttaaacaaggcgacatgattatcgtagatggattaaatggtgatgtaatcgttaatccaactgaagatgagttaatcgcttatcaagataaacgtgagcgttattttgctgacaagaaagaattacaaaaactacgtgatgctgatactgttacagttgatggtgttcacgcagagcttgctgcaaatattggtacacctaatgatttgccaggtgttattgaaaatggtgcacaaggtatcggcttatatagaactgagtttttatatatgggtcgtgaccaaatgcctacagaagaagaacaatttgaagcttataaagaagtattagaagcaatgggcggtaaacgtgttgttgtacgtactttagatataggtggagataaagaattatcatacttaaacttgcctgaagaaatgaatccattcttaggttaccgtgcgattcgtttatgccttgcgcaacaagatattttcagaccacagctacgtgcattattacgtgcatcagtttatggtaagttaaatatcatgttcccaatggttgcaacaattaacgaatttagagaagctaaagctatattattagaagaaaaagaaaaccttaaaaatgaaggtcatgacatttcggatgatatagaattaggaatcatggtagagatacctgcaacagcagcattagctgatgtctttgctaaagaagtagatttcttcagtatcggtacaaatgatttaattcaatacacattagctgctgaccgtatgtcagagcgtgtatcatatctataccaaccatataacccttcaatcttacgtttagttaaacaagttattgaagcgtcacataaagaaggtaaatggacaggtatgtgtggtgaaatggctggagatgaaacagctattccattattgcttggtttaggtttagatgagttctctatgagtgcaacgtctattctgaaagcaagaagacaaattaatggtttaagtaaaaatgaaatgactgaacttgctaaccgtgcagtcgactgtgcaacgcaagaagaagttattgaattagttaacaactacgtaaaataa

SEQ ID NO: 405306 - DNA, 267 bp, Staphylococcus aureus
atggaacaaaattcatatgtaatcatcgacgagactggtattcacgctagaccagcaacaatgttagtacaaacagcttcaaaattcgattctgatattcaattagaatataacggtaagaaagtaaacttaaaatcaatcatgggtgttatgagccttggtgttggtaaagatgctgaaattacaatttatgctgacggtagtgatgaatctgacgccattcaagcaatcagtgacgtcttatcaaaagaaggattgactaaataa

SEQ ID NO: 405307 - DNA, 543 bp, Staphylococcus aureus
atgggattcaaaaacaatttaacatcaaatttaacaaataaaatcggtaattcagtctttaaaatagaaaatgttgacggaaaaggtgcaatgccaacgacgattcaagaattgagagaaagacgacaacgtgctgaagcaattgtaaagagaaagtctttaatgtcatcaacaatgagcgttgttccaattccgggtttagattttggtgttgatttaaaattaatgaaagatattatcgaagatgttaataaaatttatggtttagatcataagcaagttaatagccttggggatgatgtgaaagaaagaattatgtctgcagcagcaattcaaggtagtcaatttattggtaaaagaatttcaaatgcatttttaaaaattgtaattagagatgtagctaaacgtactgctgcaaaacaaacaaaatggtttcctgttgtaggacaagctgtgtctgcatctattagttactattttatgaataaaattggaaaagatcacattcaaaaatgcgaaaatgttattaaaaatgtcatgtag

SEQ ID NO: 405308 - DNA, 1173 bp, Staphylococcus aureus
atgaaaatagcaactctgaacaaaggcaaagaaacaaaatattttaatggatatcctttaattgaagaagaggatatctattcacaagatcatttaaaagaaggagatatttttcaaattgtgactgataaatcacaatatgtcgcaacggcttatgttggtcgccaacataaaggattaggttgggttctaacatacgataaagctcaacaaatcaacacagctttctttgtaaaattgtttaatactgcattagcagaacgtgattattattttaatatagatggaacaaatgcttttagattatttaatgctgaaggtgatggtgttgggggattaacaatcgacaattacgatggtcatttgttgattcaatggtactcaaaaggtatttataaatttaaatatgccattcttgaagcggttagaaaagtatttgattataaatctatttacgaaaaagtaagatttaaagacagcgaatatagtggtggttttgttgaaggagatgcacctgagtttccaattgttatcgaagaaaacttcacattttataatgtagaccttgaagatggtttgatgacaggtatctttttagatcaaaaagaagtgcgcaagaaattaagggatcaatatgccaaagaacgccatgttttaaacttatttagttatacaggtgctttttctgcaatagcagcaagtgaggcatcttcaacaacaagtgtagatttggctaatcgttctcgtagtttaactgaagaaaattttggattaaatgctattgatcctaaatcccaatatatttatgtcatggacacttttgatttctataaatatgctgcacgacatggacatagttatgacacgatcgtgattgatccacctagctttgcgcgtaacaaaaaacgtacattttcagtgcaaaaagattatgacaaattaattaatggcgccttaaatatcttatcatctgaaggaacattattgttatgtacaaacgcaagtgtatatccattaaagcaatttaaaaatactattaaaaagacgcttgaagagagtggcgttgattatgaattaactgaagttatgggattaccaaaagattttaaaacgcatccacattataagccatctaaatatttaaaagctgtttttgtaaatattagacattaa

SEQ ID NO: 405309 - DNA, 1296 bp, Staphylococcus aureus
atgtcttttcttaggaaacacgccgaaattatttttagctatttaatcggtatcgtttcactcttcactggtctcattattttaattaacttgccattaattaaacaattaaatggtggtaaaaaagttgatacacatgttcataatgtgtgggaatttctgaatgcatttttcagtgaaattattaaagtaatgagtcgatttataggtaatttccctatagttagtgcaattgtgataattatattcggtattttagttatgttgattggtcatacattacttagaactattaagtatgactatgatatttctatctttttcttagttatcggtatcatgtactttattattactcttatattaatgactcaagtttatggattctttgcagtgattttcattattccatttacaattcatataggatatatcgtctataaagatgaattgaatcaggaaaatgtaaaaaatcatttcatgtggataattgtgagttatggtataagttacttaattacacaaattgcattgtatggcagaattgatgctaatgaaatagagtcaattgatatcttaagtgtcaatgctttctttataattatgtggttacttggtcaaatggctatttggaatttcttgttcttgcgccgagctttacctttaacaaagcaagaattaggtgaagaggagccagaattatcaagaacaagtaaagggaatgtcacgaatcaaactaaaattcacttgaaacaactccaagataagactacagaatatgcacgtaagacaagaagaagtgtcgatttagataaaattagagctaaaagagataaattcaaaaagaaagttaatgatattatcgatattcaagaagacgatattcctgattggatgagaaaaccgaaatgggttaaaccaatgtatgtcgaactattttgtggtgtcgtcatctttttattcacatttttagaatttaataatcgtaatgcattatttgtatctggtgattggaaattatcacagacacaatatgttattgaatgggttacattattaattctgttattcattattatcgcatatatcgctacaacgttaactttccacttgaaaggtaagttttattatttacaattatttatggggagcattttattctttaaattgttaacggaatttataaatataatgattcatggactattactttcagtgttcattacgccaacattactattaatgttattggcaatcatcatttcttattcgttacaattacgagagcgaccataa

SEQ ID NO: 405310 - DNA, 135 bp, Staphylococcus aureus
atgtctaatgaaaatcaaaataaaaaagcagcagaaaaagctaaagaagttgaagaaaaattaaaagataaaaaagaagaaaaaacagaagatattaatcaaacaaaacaagatatccaagatacactaaattaa

SEQ ID NO: 405311 - DNA, 576 bp, Staphylococcus aureus
atgtcaaaaggtttaaagctatctgaaatactagtaaccgtacttatttcagtagtattcgcagttatttacaatttatggtggtttgtttacaatggtgtgcaagctacaggccttcacctcgaacaattaacaaacggggtttggttcatggcagcgattgtctgctatctaattattccaaaaccaggtattgctttactggctgaatttgctgcaggtgccggcgaaactatcattatgggtcgtttcgatattccgacaatcgtttacgcttttatacaaggtttagcgtgtgaacttgtctttgcaatttttaaatatcaatcacgttcagttatggtagctatgttagcaggtttttgtacagcaatcgcggctttcccgatagattatttctatggttatttaaatgaagttgcaggttggaacttaacattattcatcgtatttagattaattagtggtgcagtagtcgccggcgtcctatcttaccttttagtaaaagctttagataagacaggcgtaacaaaattatttagaccagctgctaaagaagattacgacaacttataa

SEQ ID NO: 405312 - DNA, 1401 bp, Staphylococcus aureus
gtgttaaaagtaagtgatttacgattaaaatatccaagtggtcaacgtaaaattttcgatcatttaaatatcactattcaagacaaagaaaaagtacttttactcggtccttctggttgcggtaaaagtacacttctgaatgtattaagtggtattgttcctaatttaattgaattacctatgaaatatgatgaactaatcgttgacccattaagtggcgttattttccaagaccctgatagccagttttgtatgccaaaagtatacgaagaacttgcattcgttttagaaaatagacaattaccacgtgaagacatggatgcgttaattatcaatgctttaaatatggtcaatttaaatgttacccctgaaacgtatatcaaagatttaagtggcgggatgaaacagaaattggcaattgttgaaaccattcttcaacaatcaaaaacattgtttttagatgaaccgacagcaatgttagatgttcaagcaacagaagatttatggactaaactaattgaactttgggaagatcaaacggttgtaatcgttgaacataaagttaaacacatctggaatcatgtcgaccgcgtcattttgatggattataacggaaatatcattgccgatgaatgtcctgaaatcatattacagaagtatgttcatttactcagtgaatatggtgtgtggcatccacgtgcatgggaattcgcaccaagtcgtgttgactttccaacaacaaactcacacttattacaatttaaaaatggacgtattattcgcggtaaatcaacattgctctcattctcagatttagaaattggtctaggtgagtggattacaattacaggggcaaatggtagtggtaaaacaaccttgcttgaatcaattatgcaattgattaaatatcaaggtgatgtttattttgaaaatcagcgtttaacaaaaattaaacatgcagcaaaacacatgtacctagtttatcaaaacccagaattacaatttataacaaattcggtttatgatgaaattaacattcattttaatcacctttctaaagatcaaagtgatgatgaaacgatacaacttttaaaacttttagatttacaaaatgtaaaagatcaacatccttatgagttgtctattggtcaaaaacgacgccttagcgtagctaccgcactaagttctaaagctgatattatctttttagatgaaccgacatttggacttgatagccataatacattccagttgatcaaacttttccaaaagcgaattaatttgggacaaagtattgtcatggttacacatgacgatgaaataattgaacgttatccatcaagaagacttaaaatttcagatggtgcgttactagattgtgatggtgatacgaatgtatga

SEQ ID NO: 405313 - DNA, 807 bp, Staphylococcus aureus
atgtatgagcaatggaaagttcggcaatcatttgttgatgatgtcaacattataacgaaactatttcttggaattatactatttttctttattatatttgtgcataatttcgattttatgctttatatcactatcttaatgttagttttcttattgatgtttaatggtactcagtttaaaattacagcaatttttataactataagtattggctttgcattactctcttccctgttcatgattttatacgggaatggtagccatacaattttgaaattcggatttatccatattacaacagaaagtttagttcgtggtttacatgtatcattaagaaccattgctatttcatttttcggtatcttaatcgcacttacatctcaggttgtcatgatattttatagtttaatgcaacatttaaaggttaaatcaaaagttgcttatgcattcatggctgccattcgtatgatacctttaatgattagttctttaatacagcttcgcagatctttaaaaatgcgctatcagatgatagacgcggcaaattatagagggttaaagcgatttaagcatttaattatacctctattaagccaaaatattagaaaggcacatcaattatcagttgcgatggagtcgaaaggatttagagatggtcctcgtacttactattacaacgtacctttctcatataaagatataatctttattatagttttaattgccattattactatggcatattattgttcaatcaccttacccatcacgggcatagatgatgttcgtcttggtcgtgtaggttaa

SEQ ID NO: 405314 - DNA, 1248 bp, Staphylococcus aureus
atgaatgtattagtaattggtgctggtggacgagaacatgcacttgcatataaacttaatcaatcgaatctagttaaacaagtgtttgtcattccaggtaatgaggcaatgacacctatagctgaagtacacactgaaatttcagaatctgatcatcaagcgatactagattttgctaaacggcaaaatgttgattgggtagttataggtccagaacagccgctaattgatggattagcagacattttacgagcgaatggtttcaaagtgtttggtccaaataagcaagcagctcaaatcgaaggctcaaaattatttgctaaaaagataatggaaaaatataatattccaactgctgattataaagaagttgagcgaaaaaaggatgctttaacatatattgaaaactgtgaattgcccgttgttgtcaagaaagatgggttagctgctgggaaaggcgttattattgcagatactattgaagcagccagaagtgctattgagattatgtatggtgatgaagaagaaggtactgttgtatttgaaacgtttttagaaggtgaagagttctcgctaatgacatttgttaatggtgatttagcagtacctttcgactgtattgcacaagatcataaacgcgcatttgatcatgatgaaggaccaaatactggtggtatgggggcttattgtccagtaccacatattagtgacgatgttttaaaacttacaaatgaaacaattgcacaacccattgcaaaggcaatgcttaatgaaggttatcaattcttcggtgtattatacattggtgctattttaactaaagatggtccaaaagtaatagaatttaatgcccgttttggtgatcctgaagctcaagtattattaagtcgcatggaaagtgatttaatgcagcatattattgatttagatgaaggaaaacgtactgaattcaaatggaaaaatgaatctattgtaggggtcatgttggcatcaaaaggatatcctgatgcatatgaaaaagggcataaagtaagtggctttgatttaaatgaaaactattttgttagtggattaaagaagcaaggtgatacctttgttacttcaggtggtagagttatacttgccatcggaaaaggtgacaatgtacaagatgcacagcgagacgcatacaaaaaagtatcacaaatacaaagtgaccatttattctatcgtcatgacattgcgaataaagcactacaacttaaataa

SEQ ID NO: 405315 - DNA, 1479 bp, Staphylococcus aureus
atgaagaaagctattttgagcgtatcaaataaaacaggtattgtagagtttgctaaagcgttaacgcaattaaattatgaattatattcaacaggtggtactaaacgtatattagatgaagcaaatgtaccagttcgttctgtttcagacttaacacattttccagaaataatggatggccgtgttaaaacattacatccggctgttcatggtggcattttagctgatcgaaataaaccgcagcatttaaatgaattatcagaacaacatatagatttaattgatatggtagtagttaatttatatccattccaacaaactgttgcaaaccctgatgtgacgatggacgaagcaattgaaaatattgatattggtggtccaacaatgttacgtgctgcagctaaaaactataaacatgtaacaacaattgtacatccggcagattatcaagaagtattgacgcgattaagaaacgattcgttagatgagtcatatagacaatcattaatgattaaagtttttgagcatactgcagaatatgatgaagcgattgtacgtttctttaaaggggataaagaaactttaagatatggagaaaatccacaacaatcagcgtattttgtgagaacttcgaatgctaagcacacgattgcaggcgctaaacaattacatgggaaacaattaagctataacaatattaaagatgcagatgctacactagctttagttaaaaagtttgatacacctgctacagttgcggttaaacacatgaatccatgtggtgttggtatcggtgacacgatagaacaagcatttcaacatgcgtatgaagcggatagtcaatcaatatttggtggaattgttgcattaaaccgagctgtaacacctgagttagcagagcaattgcatagtatctttttggaagtcattattgcaccaaaatttacagatgaagcattagatattttaaaacaaaagaagaatgtaagattattagaaattgatatgactatagacagtaacgaagaagagtttgtttcagtatctggcggatatttagttcaagataaagacaattatgtcgtgccaaaagaagaaatgaaagttgttacagaagtagcacctacagatgaacaatgggaagcaatgttattaggatggaaagttgtaccatcagtaaaaagtaatgcaattattttaagtaataataaacaaactgtaggtataggtgctggacaaatgaatcgtgtcggtgctgctaaaattgcgttagagagagctattgaaatcaatgatcatgtagcgttagtatctgatggatttttccctatgggagatacagttgaacttgcagcacaacatggtataaaggcaattatccaaccgggtggttcgattaaagatcaagattcaattgatatggctaataaacatggtattgcaatggtagtcacaggcactcgacattttaaacactaa

SEQ ID NO: 405316 - DNA, 567 bp, Staphylococcus aureus
atggttaaaattgcgatttttgcatcaggttcaggaagtaactttgaaaatatagttgagcatgttgaatcaggaaaacttgaaaatattgaagttacggcgctatatacggatcatcaaaatgcgttttgtatagatagagcaaaaaagcacgatattcctgtttatattaatgaaccaaaacaatttgattcaaaagcagcgtatgaacaacatttagtaacattattaaatgaagataaggtagagtggattattctagctggctacatgcgtctaattggtccagacttattagcttcatttgaaggtaaaatattgaatatacatccatctctattgccgaaatataaggggattgacgcaataggccaagcatatcatagtggcgatactattactggttcgacagtacattatgttgatagtggtatggatacgggagaaattattgaacagagaaaatgtgatattagaccggacgattcaaaagaacaattagaagagaaagtaaaaaaattggaatatgagttatatccaagtgttattgctaaaattgtaaaataa

SEQ ID NO: 405317 - DNA, 1029 bp, Staphylococcus aureus
atgtctaaagcatatgaacaatctggtgtaaatattcatgctggttatgaagctgtagaaagaatgtctagtcatgttaaacgtacgatgcgtaaagaagttatcggtggtttaggtggattcggtgctacatttgatttatcacaattaaatatgacagcgccagttttagtttctggaacagacggagtaggtacgaaattaaaactagctatcgactatggtaaacatgattcgataggtatcgatgcagtcgcaatgtgtgttaatgatattttaacgacaggtgcagaaccattatattttttagattacattgctacaaacaaagttgttcctgaagttattgaacaaattgttaaaggtattagtgatgcatgtgttgaaacgaatactgcacttatcggtggagagactgctgaaatgggtgaaatgtatcacgaaggcgaatatgatgtagctggatttgctgttggagcagttgaaaaggatgactatgtagatggttcagaagtgaaagagggacaagttgttatagggcttgcgtcaagtggcattcattcaaatggatacagtttagtgcgcaaattaattaatgaatcaggcattgatttggcatcaaacttcgataatcgtccatttatcgatgtctttttagaaccaactaaattatatgtcaaacctgtacttgctttgaaaaaagaagtttctattaaggcaatgaatcatattactggtggaggtttttatgaaaatattccacgtgcattgccagccggatatgctgctagaattgatactacatcatttccaacaccaaaaatatttgattggttacaacaacaaggcaatatagacacaaatgaaatgtataacatttttaatatgggtattggctatacggttatcgttgatgaaaaagatgtatcacgcgctttgaagattttagcagaacaaaatgtggaagcctatcaaattggtcatattgtgaaaaatgagtcaactgcaattgaattgttgggggtataa

SEQ ID NO: 405318 - DNA, 1485 bp, Staphylococcus aureus
atgtttaactactcaggattaaacgaagaatgtggcgtgtttggtatttggaatcatcctgaagcagcgcaactaacatatatgggacttcatagtttgcaacatcgtggtcaagaaggtgcaggtatagttgtttctgatcaaaatgaattaaaaggcgagcgaggattaggcttactaactgaagcgattaaagatgatcaaatggaacgattaaaaggatatcaacatgcaattggtcacgtccgttatgctacttcaggtaataaaggtattgaaaatattcaaccgtttctgtatcacttttatgatatgagtgtaggtatttgtcataatggtaacctcattaatgctaaatcattgcgtcagaatttagaaaaacaaggtgctatcttccattcgtcttctgatactgaagtcattatgcatttgatacgtcgaagtaaagctcctacttttgaggaagcgttgaaagaaagtttgcgaaaagttaaaggcggttttacatttgcgattttaactaaagatgcgttatatggcgcagtagatccaaatgctatcagaccacttgttgtaggtaaaatgaaagatgggacatacatccttgcaagtgaaacatgtgcaatagatgtgttaggtgcagaatttgttcaagatattcatgcaggtgaatatgtcgtgattaacgataaaggtattacagttaaatcttatacacatcatacgacaactgcaatttctgcgatggaatatatttattttgctagaccagactcaacaatagctggtaaaaatgtccatgcagtacgtaaagcttctggtaaaaaattagcccaagaaagccctgtaaatgctgatatggtcatcggtgtacccaattcatcgctatcagctgcgagtggttatgctgaagaaataggtttgccatatgaaatgggactagttaaaaatcaatatgttgcaagaacatttattcaaccaactcaagaattacgtgagcaaggtgtgagagtgaagttatctgcggtaaaagatatagtagatgggaaaaatatcattcttgttgatgattccattgttcgcggtacgacaattcgacgcattgtgaaaatgttaaaagattctggtgcaaataaagtgcatgtgcgtatagcatcaccggaatttatgtttccaagtttttacggaatcgatgtttcaactacggcagaattaatttctgcaagcaaatcacctgaagaaattaaagattatattggcgctgattcattagcatatctatctgtagatgggttaattgaatcaattggtttagattatgacgcgccatatagtggcttatgtgtagaaagtttcactggagattatcctgcagggttatatgattatgaagcaaattataaagcgcatttaagtcatcgacaaaagcaatatatttctaaaaacaaacacttttttgatagcgagggaaatttaaatgtctaa

SEQ ID NO: 405319 - DNA, 2190 bp, Staphylococcus aureus
atgtctaaatttatcgaaccaagcgttgaagaaattaaacttgaaaaagtatatcaagatatgggattaagtgatcaagaatatgaaaaagtttgcgatattttaggcagacaacctaactttacagaaacaggtatcttttctgttatgtggagtgaacattgctcttataaacattctaaaccgtttttaaagcaatttcctacgtcaggtgaccatgtgcttatggggcctggtgaaggtgcaggggtagtcgatataggtgataatcaagccgtagtatttaaagtagagtctcacaatcatccatcagcaattgaaccatatcaaggggctgctacaggcgttggtggaatcattcgtgacattgtctctattggggctagacctattaatttgttaaacagtcttagatttggagaattagataataaacaaaaccaaagattacttaaaggtgttgtaaagggtatcggaggttatggtaactgcattggtattccaacaactgctggtgaaatcgaatttgatgaacgttatgatggcaatccacttgttaatgcaatgtgtgttggtgttatcaatcacgacatgattcaaaaaggcacagcaaaaggtgtaggtaattcggtcatttatgttggtttgaaaactggtcgagatggtattcatggtgctacttttgcatctgaagaattgacggaagaaagcgaaagtaaacgaccttctgtacaaatcggtgatccatttgtaggtaaaaaattaatggaagcaacacttgaagcaattacatttgatgaattagttggtattcaagatatgggtgctgctggtttaacatcttcatcgtctgaaatggcggcaaaaggtggtagtgggttacatttgagattagaacaagtgccaacacgtgagccaggtatttctccttatgaaatgatgctttcagaaactcaagaacgtatgttactagttgttgaaaaaggtactgaacaaaaattcttagatttatttgataagcacgaattggatagtgctgttataggtgaagttacagatacaaatcgttttgttttaacatatgatgacgaagtttatgctgacattccagttgaaccactagctgatgaagcacctgtatatattttagaaggagaagaaaaagattataatacttctaaaaatgattatacacacatcgatgttaaagatactttctttaaattacttaagcatccgactatagcatctaaacactatttatatgatcaatacgaccaacaagttggtgccaatacgataattaagccaggacttcaagcatcggtagtacgtgtggaaggcacaaataaggcaattgcttcaacaattgatggtgaagcgcgttatgtatataacaatccatatgaaggtggaaagatggtagtagctgaagcttatcgaaatttaattgccgtgggtgcaacaccattagcaatgacagattgtttaaattatggttctcctgaaaagaaagaaatctatcaacagttgatagattcaacgaaaggtatggcagaagcatgcgacattcttaagacaccagtagtttctggtaatgtatctttatataacgaaacgaaaggtacttctattttcccaacaccagttgttggaatggtaggtttgattgaaaatgtaaattatttaaatgattttgaacctcaagttggagataaattatatttaatcggtgatactaaggacgactttggtggtagtcaacttgaaaagttaatttatggcaaagttaatcatgaatttgagtcattagatttgagttcagaagttgaaaaaggtgaatcaatcaagaccgctattcgtgaaggactattatcacatgttcaaacagttggtaaaggtggcttactgattaccttagctaaactaagtgcgcattacggtttaggattaaaatcttcaatagatataacaaatgcacaattgtttagtgagacgcaaggccgatatgttgtttctgttaaatcaggtaaaactttaaatattgataatgcaatagaaattggacttttaacagatagtgataatttcaaggtaacaacaccatatacagagattagtgaaaatgtttcagatattaaacaaatatgggaaggggcaattgctcaatgtttaactactcaggattaa

SEQ ID NO: 405320 - DNA, 672 bp, Staphylococcus aureus
atgaaatttgcggttcttgtttttccaggttcgaattgtgatagagacatgtttaatgctgctattaaaagtggtgttgaagcggaatatgtagattatagagaaacatcactaagtggatttgatggcgtacttattcctggtggattttcattcggggattacttaagatctggggcaatggctagtgtagcgccgattatttcggaagttaaacgtcttgcagctgaaggtaagccagtattaggtgtttgtaatgggtttcaaattttaactgaaataggcttattacctggtgcattattgcataacgattcacatttatttattagtagaaatgaagagttagaaatagtgaataatcaaacggcatttacaaatctttatgaacaaggtgaaaaagttatatatcctgtagctcacggtgaaggtcattattattgtactgatgaaatatatcaacaattaaaagctaacaatcaaattattctgaaatatgtgaataatccgaacggttcatatgatgatattgcaggaattgttaacgaaaaaggcaatgtatgtggcatgatgccacatcctgaaagagctttagaaacgttgttaggtactgatagtggtgtgaaattatttgaagcgatggtaaaaagttggagggaacaacatgtctaa

SEQ ID NO: 405321 - DNA, 264 bp, Staphylococcus aureus
atgaaaacaattgaactacatatcacattacaaccacaagtattagatacgcaaggacaaacgcttactcgagctgtacatgacttaggttatgcacaagtgaatgatattcgtgtaggaaaagtattatatatgacagtggatgaggttagtgatgaaaaggtacacaacattattacaactctaagtgaaaaattgtttgcaaatacagtgattgaagaatatagctataaagtgttagatgatgaaaaggagaatgcataa

SEQ ID NO: 405322 - DNA, 705 bp, Staphylococcus aureus
atgacattattatatgaaggaaaagcgaagcgcattttctcaacaaatcaagaaaatgaattaagagttgaatataaagatgaagttactgctggaaacggggctaagaaagacacaatggcaggtaaggggcgattaaataatcaaattacttctattatatttaaatatttacaagaaaatggaatagaaagtcactttattaaacaattatctgaaacagaacaattagttaagcctgtgaaaataattccattagaagtagttgttcgtaatattgctagtggatctattacaaagcgtttaggttttgaaaatggtgaagtttttagagaaccacttgtagaatttttctataaaaatgatgcgttaaatgatccgttgataacggatgaccatgttaaattgctcaatatagcatcagatgaagatattgaaatactaaaatccaaagcattaaagattaataatgtgttgaaacaattaatggatgctatgaatttaaaattagtagattttaaaatcgaatttggaaagactgagactggtcaaattttgttagcggatgaaatatctccagatacatgtcgaatttgggataaagctaccaatgcaaactttgataaagatgtatatagaaataacactggatcactgattgaaacatatcaaatatttttaaacaaattggaggatttaaaataa

SEQ ID NO: 405323 - DNA, 1125 bp, Staphylococcus aureus
atgaacttcaataaattaaagtttggtgcgactattggcattattggtggtggtcagcttggaaagatgatggcacaatcagctcaaaaaatgggttataaagtggttgtattggatccttctgaagattgtccatgtagatacgttgcacacgaatttatacaagccaagtatgacgatgaaaaggcactcaatcaattaggacaaaaatgtgatgtgattacttatgaatttgaaaacatttcagcccaacaattaaaactattatgtgaaaagtacaatattccgcaaggttaccaagctatacagttattacaagatcgcttaactgaaaaagaaacattaaaaagtgctggtaccaaagttgtcccgttcatttcagtaaaagaatctacagatattgacaaagcaattgaaacattaggatatccttttattgtaaaaactagatttggtggctacgatggcaaaggtcaagttttaattaacaacgaaaaagacttacaagaaggttttaaattaattgaaactagtgaatgcgtagctgaaaaatatttgaatatcaagaaagaagtatctcttactgttacaagaggaaacaacaatcaaatcacttttttcccattacaagaaaatgagcatagaaatcaaatacttttcaaaacaattgttccagcgagaatagataaaacagctgaggcgaaagagcaagttaataaaattatccaatcgattcatttcattggaacatttacagttgaattttttatagatagtaacaaccaattgtatgtgaacgagatagcaccaaggcctcacaattccggacattattcaattgaagcatgtgattattcacaatttgatactcatattttagcagttaccggacaatcattaccaaattcaattgaattattaaagccagcagtcatgatgaacttactaggtaaagatttagatttattggaaaatgaatttaatgaacatccagagtggcacttacatatttatggtaagtctgagcgtaaagatagcagaaaaatggggcatatgactgtactaacgaatgatgtaaaccaaactgaacaagatatgtacgctaaatttgaggggagtaattaa

SEQ ID NO: 405324 - DNA, 483 bp, Staphylococcus aureus
gtgaaagtagcagtcattatgggcagttcttccgattggaaaattatgcaagagagttgtaacatgttggattattttgaaattccgtacgaaaaacaagtagtatccgcacatcgtacgccaaaaatgatggttcaatttgcttctgaagcgagagaaagaggtataaacattatcattgcaggcgctggcggtgcggcacatttaccaggtatggttgcatcattaacgacgctaccagttattggagtgccgattgaaacaaaaagtttaaagggtatagattctttattatcaattgttcaaatgccaggaggtattccggttgcaacgactgcaattggtgcagcaggtgctaaaaacgcaggtatacttgcagcaagaatgttaagtattcaaaatccttctttagttgaaaaactaaatcagtatgaatcttcgttaattcaaaaagtggaggacatgcaaaatgaacttcaataa

SEQ ID NO: 405325 - DNA, 861 bp, Staphylococcus aureus
atggttgctaaaattttagatggtaaacaaattgccaaagactacagacaggggttacaagatcaagttgaagcgctaaaagaaaagggttttacacctaaattatccgttatattagttggtaatgatggcgctagtcaaagttatgttagatcaaaaaagaaagcagctgaaaaaattggtatgatttcagaaatcgtacatttggaagaaacagctactgaagaagaagtattaaacgaactaaatagactaaataatgatgattctgtaagtggtattttggtacaagtaccattaccaaaacaagttagcgaacagaaaatattagaagcaatcaatcctgaaaaagatgtggacggttttcatccaataaatatagggaaattatatatcgatgaacaaacttttgtaccttgcacaccgctcggcatcatggaaatattaaaacatgctgatattgatttagaaggtaaaaatgcagttgtaattggacgaagtcatattgtcggacaaccagtttctaagttactacttcaaaaaaatgcatcagtaacaatcttacattctcgttcaaaagatatggcatcatatttaaaagatgctgatgtcattgtcagtgcagttggtaagcctggtttagtaacaaaagatgtggtcaaagaaggagcagtaattatcgatgttggcaatacgccagatgaaaatggcaaattaaaaggtgacgttgattatgatgcggttaaagaaattgctggagctattacaccagttcctggtggcgttggtccattaacaattactatggtattaaataatactttgcttgcagaaaaaatgcgtcgaggtattgattcgtaa

SEQ ID NO: 405326 - DNA, 318 bp, Staphylococcus aureus
atgaataaactattacagtcattatcagccctcggtgtttctgctacactagtaacaccaaatttaaatgcagatgcaacgacgaatactacaccacaaattaaaggcgctaatgatatcgttattaagaaaggtcaagattataaccttctaaacggcataagtgcatttgataaagaagatggagatttaaccgataaaattaaagtcgatggccaaattgatacatctaaatctggtaaatatcaaattaaatatcatgtcactgattcagatggtgcaattaaaatttccactaggtatattgaggttaaatag

SEQ ID NO: 405327 - DNA, 1101 bp, Staphylococcus aureus
gtgtcaaaatttaagtctttgcttctattatttggcacactaattttacttagtggttgttcaaatatagaaattttcaacgcaaaagggccagtagcaagtagtcagaagttcttgattctttattcaatcgtcttcatgcttgttatttgtttcgttgtacttggcatgttcgccatttttatttacaagtatagttataataagaatgccgaatctggtaagatgcaccataatgccatcattgaaacaatatggtttgtaatacctatcataatcgttgctgctttagctattcctacagttaaaactttatacgattacgaaaaaccaccgaagagtgagaaagatccaatggttgtatatgcagtaagtgcaggatacaaatggttctttgcttatccagatgaacatatagagactgttaatacattaacaatccctaaagatcgtcctgttgtatttaagcttcaagctatggatacaatgacaagtttctggattccacaattaggtggtcaaaaatatgccatgactggcatgacaatgaattggacgttagaagcatctcaaactggtacgttcagaggtcgtaactctaacttcaatggtgaaggattctcacgtcaaacatttaaagtaaatgccgttagtcaaaaagactacgacaaatgggtgaaagaagttaaaggtaagaaaacgttagatcaagatacatttgataaacaattattaccaagcacacctaataaagctttagaatttaatggtacacatatggcgtttgttgatccagcagccgatccagaatacatcttctatgcatataaacgtttcaatttcgaattgaaagatccaaacttcactagtgaagaaaatatgtttaaagatgtatcagacaaaccattaatacctgctcgtaaagctcaaattacaaatgcgaactataaacgacatggtatgaagttgatgattcttggaaatgacgaaccatataacaatgagttcaagaaagatgaatcgaaaaatgcgaaagaaatgaagaaaatttcaaaagatgcgcaagatcaagacaatgatgatcatggaggtggacattaa

SEQ ID NO: 405328 - DNA, 1989 bp, Staphylococcus aureus
atgaattttccatgggatcaattactagttaaaggtaactggatgattacaatggcacaaattggtgccccattcttagttattggtttaatcgcagtaattacttactttaaattatggaaatatctttacaaagaatggttcacatctgtagaccataagaaaatcggtattatgtatttaatctgtgccgtattaatgttcgtccgtggtggtattgatgcgttacttattcgtgcgcaattaacagtacctgataacaaatttttagaatctaaccactataacgaaatttttagtacacatggtgtaatcatgattatcttcatggcaatgccatttatctttggtttatggaatatcgttgttccattacaaattggagcacgtgatgttgcattcccagtattaaacaacgtaagtttctggctattctttgcaggtatgattttattcaacctgtcatttattattggtggttcaccagcagctggttggacaaactatgcgccactagcaggtgaattcagtcctggtccgggtgttaactattacttaatagctatacaaatttcagggcttggtaccttagctacaggtatcaacttctttgtaacaattttaagatgtaaaacaccaactatgaagtttatgcaaatgccaatgtttacagtaacaacatttattactacattaattgttattcttgctttccctcctttaacagtagcgttagcattaatgacaactgatagaatatttgacacagcattcttcacagttgcacatggcggtatgccaatgctttgggctaacttcttctgggtatgggggcaccctgaagtttatatcgttatccttccagcatttggtatttactcagaaattatcccgacattcgctcgtaagcgtttattcggacatcaaagtatggtatgggcaactgccggtatcgcgttccttagtttcttagtttgggttcaccatttcttcacaatgggtaatggtgcgttaatcaactcattcttctcaatttcaacaatgctgattggtattccaactggtgtgaaattgtttaactggttattaacattatataaaggacgtattacatttgagtcaccaatgctattctcattagcatttatccctaacttccttttaggtggtgttacgggtgtaatgttagcaatggcatcagctgactatcaatatcacaatacgtacttcttagtagctcacttccactatacattggttactggtgttgtatttgcctgcttagctggtttaatcttctggtatccaaagatgatgggttacaaattaaacgaaacattaaacaaatggtgcttctggttcttcatgatcggatttaacgtttgtttcttaccacaattcattcttggattagatggtatgccacgtcgtttatacacttatatgccatcagatggttggttcttattaaacttaatttcaactatcggtgcattattaatggcaatcggattcttattccttgttgttagtatcgtatacagtcacttcaaatctccacgtgaagcaactggagataactgggatggccttggtcgtactctagagtggactactgcatcagcaattccacctaaatacaactttgccattacaccagattggaatgactacgacacatttgttgatatgaaagaacatggtcgtcattacttagacaaccataattacaaagacattcatatgccaaacaatactcctgttggattctggattggtatctttatgactatcggcggtttcttcttaattttcgaaactgtaattccagcattaatttgtttattcggtatttttggtactatgatttatcgcagtttccaaatcgatcacggatatcatatccctgctgctgaagttgcagaaactgaagctagattaagagaagcgcgtattaaagaaagggaggctgtaagtcatgagtcatga

SEQ ID NO: 405329 - DNA, 606 bp, Staphylococcus aureus
atgagtcatgatacaaacactattgattcacgcacacatgaaggcgaattaaataagcttggcttttggattttcattacagccgaatttgcgttattcggtaccctatttgcgacactattaactttgcaacatggtggcgattatgcaggtaaaatgactactgagttatttgaattgcctcttgttttaataatgacgtttgcattattattcagttcttacacatgtggtattgctatttactacatgcgccaagaaaaacaaaagttaatgatgttttggatgatcattacgttacttttaggtttagtctttgttggattcgaaatttatgaattcgcacactatgcatcagaaggcgttaacccaacaattggttcttactggtctagtttctttatcctattaggaacgcatggttgtcacgtatcgctaggtatcgtttgggccatttgtttattaatccaaatccaacgacgcggattagacaaatataatgcgccaaaattatttatagtaagtttatactggcacttcttagatgttgtttgggttttcatctttactgccgtatatatgatagggatggtgtatagcggatga

SEQ ID NO: 405330 - DNA, 291 bp, Staphylococcus aureus
atgagtacaataatgaaacatactgtaggatttatcgcatctatcgtattaacgcttttagcagtttacgtaacactatacacgtcattaacattccacgcgaagttgacaattatctttggctttgcattcgtccaagcaggacttcaattattaatgttcatgcatttaactgaaggtaaagatggacgtttacaaacattcaaagttatctttgctcttgtaattacactttgtttcgttgtcggaacatattgggttatgcaaggcggtcactcttcacacttataa

SEQ ID NO: 405331 - DNA, 1194 bp, Staphylococcus aureus
atgaaatttaataaagtaaaactagttatacatgcgtgtgtactattatttatcattatttctatagcgttaatttttcatcgattacagacgaagacacattctatagacccaatacataaggaaacaaaattatcagacaatgaaaaatatttagtggatcgtaataaggaaaaggttgcgccgtctaaactaaaagaggtatataatagcaaggatcctaaatataagaaaattgacaagtatttacaaagttcattatttaacggttcagtagctatatatgaaaatggcaaattgaaaatgagtaaaggttatggatatcaagattttgaaaaaggtattaaaaacacaccgaatacgatgtttttaataggttcagctcaaaaattttcaacagggttactgttaaaacagttagaagaagaacataaaataaatatcaatgatccagtaagtaaataccttccatggtttaaaacatctaagcctatcccattgaaagatttaatgttgcatcaaagtggattatataaatataaatcctcaaaagattataaaaatttagatcaagcagttaaagcgattcaaaaacgtggtattgatcctaagaaatacaaaaagcatatgtataacgatgggaattatttagtacttgcgaaagtaattgaagaagttacaggtaaatcttatgctgagaattattatacaaaaataggagatcctttaaaacttcagcacacagcattttatgatgaacaaccttttaaaaaatatctagcaaaaggttatgcttataatagtacaggactttcattcttaagacctaatattttggaccaatactatggtgcaggtaatttatatatgacaccaacagatatgggtaaattaattactcaaatacaacaatataaattattcagtcctaaaataaccaatccattattacatgagtttggtacgaaaaagtatccagatgaatatcgatatggtttctatgctaagccaacattgaatagacttaacgggggattctttggacaagtctttactgtttactataatgataagtatgtagttgtacttgcattaaatgtaaaaggaaacaatgaagttcgaatcaaacatatttataatgatattttaaaacaaaataaaccttacaatacgaagggtgttattgttcaataa

SEQ ID NO: 405332 - DNA, 1218 bp, Staphylococcus aureus
atgaataaatttttaaaatactttttgatccttctagcattggttctcattgttgttccaatagtcttcgctacgttactttttaaaacgtcccaagatgcattcgaatcttctcaagacagcaaaaatgctaatcgtcaatccaacttaagagataataaagtcaatcccgaagaacaacctatctctattcttttcttaggtatcgatgataacgatggaagaagaaaaaaaggacaggatgctgaacactctagatcagacgctatgattttaactacttttaatcaatcaaaacatcaaattagaatgcttagtattccacgtgatactatcagctacattcctaaagttggctattacgataagattacccatgcacatgcatatggtggtccaattgccgcaatggattcggtagaagctaccatgaatgtacctgttgattattatgtgagagtcaatatgaaagcatttgtcgaggctgtaaatgagcttggtggcatatactatgatgtgccatacgacttaaatgaacctaacacagatgatactggtaagattaaaattaaaaaagggtaccaaaaattaaatggtgatgaggctttagcagttgctagaactagacatcatgattcagacttaaaacgtggacaacgtcaaatggaattaattaagattttattccaaaaagcacaggaagttgattctattgataaacttgataacgtgattcaaattgtaggtaaaaatgcaaagcataatttaactaactctgaaattaaagctttagcaaaaatgtacttaacaaatgatgttgaaattaaaactgcgcaattaaaaggtaaagatgatatgttaaatggtatttactattatcatccaagtgttgaaagcattcaaaaatatgcaaacttacttcgtaaagacttagaattatcacctattaatgataaaaatgatttcttagatcaacgtgtcattaatcattatggttcattaataccattaacgcctttagataatagtttattgagaaaagaacaaaatgatacgacagataaagataagacatctaacgagaacagtgattcaactaataacagtgattccagcaatcaacaacaacctgctacagatcaaaactcaaatcaaaatcaaggtggcacacaacaagcgccacaagcttcaaataaccaaaatggtgttgtaaattaa

SEQ ID NO: 405333 - DNA, 471 bp, Staphylococcus aureus
atgagtagaaaaacatacgaaaagattgcaaatataaatggcatgtttaatatgttagaacaacaaatcattcatagccaagatatggctcattttagaagtgaatttttttacgtcaatcatgagcatcgagaaaactatgaagcactcctaatttattacaaaaatagtatcgacaatcctattgtagatggtgcatgttatattttagccctacctgaaattttcaatagtgttgatgttttcgaatcagagttaccattttcatgggtatatgatgaaaatggcattaccgaaacaatgaaatcacttagcattccattacaatatttagttgcagcagctttagaagtaactgatgtgaatatatttaagccttcaggatttacaatgggaatgaataattggaatattgctcaaatgcgaatcttttggcaatatacagcaattattagaaaagaagcactataa

SEQ ID NO: 405334 - DNA, 435 bp, Staphylococcus aureus
atgttttcaaaagtaaacaatcaaaagatgttagaagattgcttctatataagaaagaaagtgtttgtagaagaacaaggcgtccctgaggaaagtgaaattgatgaatatgaatctgaatctattcacctcattggatatgataatggacagccagttgccactgctcgaatacgccctattaatgaaacaactgtcaaaatagaacgagtagctgtgatgaaatcacatcgtggacaaggaatgggtagaatgcttatgcaagctgtagaatcattagctaaagatgaaggtttttacgtagctactatgaatgcccaatgtcatgctatcccattttatgaaagtttaaactttaaaatgagaggtaatatatttcttgaggaaggcatcgagcatattgaaatgacaaaaaagttaacctcgcttaattaa

SEQ ID NO: 405335 - DNA, 3771 bp, Staphylococcus aureus
atggcgaaaaaattcaattacaaactaccatcaatggttgcattaacgcttgtaggttcagcagtcactgcacatcaagttcaagcagctgagacgacacaagatcaaactactaataaaaacgttttagatagtaataaagttaaagcaactactgaacaagcaaaagctgaggtaaaaaatccaacgcaaaacatttctggcactcaagtatatcaagaccctgctattgtccaaccaaaaacagcaaataacaaaacaggcaatgctcaagtaagtcaaaaagttgatactgcacaagtaaatggtgacactcgtgctaatcaatcagcgactacaaataatacgcagcctgttgcaaagtcaacaagcactacagcacctaaaactaacactaatgttacaaatgctggttatagtttagttgatgatgaagatgataattcagaaaatcaaattaatccagaattaattaaatcagctgctaaacctgcagctcttgaaacgcaatataaaaccgcagcacctaaagctgcaactacatcagcacctaaagctaaaactgaagcgacacctaaagtaactacttttagcgcttcagcacaaccaagatcagttgctgcaacaccaaaaacgagtttgccaaaatataaaccacaagtaaactcttcaattaacgattacattcgtaaaaataacttaaaagcacctaaaattgaagaagattatacatcttacttccctaaatacgcataccgtaacggcgtaggtcgtcctgaaggtatcgtagttcatgatacagctaatgatcgttcgacgataaatggtgaaattagttatatgaaaaataactatcaaaacgcattcgtacatgcatttgttgatggggatcgtataatcgaaacagcaccaacggattacttatcttggggtgtcggtgcagtcggtaaccctagattcattaatgttgaaatcgtacacacacacgactatgcttcatttgcacgttcaatgaataactatgctgactatgcagctacacaattacaatattatggtttaaaaccagacagtgctgagtatgatggaaatggtacagtatggactcactacgctgtaagtaaatatttaggtggtactgaccatgccgatccacatggatatttaagaagtcataattatagttatgatcaattatatgacttaattaatgaaaaatatttaataaaaatgggtaaagtggcgccatggggtacgcaatctacaactacccctactacaccatcaaaaccaacaacaccgtcgaaaccatcaactggtaaattaacagttgctgcaaacaatggtgtcgcacaaatcaaaccaacaaatagtggtttatatactactgtatacgacaaaactggtaaagcaactaatgaagttcaaaaaacatttgctgtatctaaaacagctacattaggtaatcaaaaattctatcttgttcaagattacaattctggtaataaatttggttgggttaaagaaggcgatgtggtttacaacacagctaaatcacctgtaaatgtaaatcaatcatattcaatcaaacctggtacgaaactttatacagtaccttggggtacatctaaacaagttgctggtagtgtgtctggctctggaaaccaaacatttaaggcttcaaagcaacaacaaattgataaatcaatttatttatatggctctgtgaatggtaaatctggttgggtaagtaaagcatatttagttgatactgctaaacctacgcctacaccaacacctaagccatcaacacctacaacaaataataaattaacagtttcatcattaaacggtgttgctcaaattaatgctaaaaacaatggcttattcactacagtttatgacaaaactggtaagccaacgaaagaagttcaaaaaacatttgctgtaacaaaagaagcaagtttaggtggaaacaaattctacttagttaaagattacaatagtccaactttaattggttgggttaaacaaggtgacgttatttataacaatgcaaaatcacctgtaaatgtaatgcaaacatatacagtaaaaccaggcactaaattatattcagtaccttggggcacttataaacaagaagctggtgcagtttctggtacaggtaaccaaacttttaaagcgactaagcaacaacaaattgataaatctatctatttatttggaactgtaaatggtaaatctggttgggtaagtaaagcatatttagctgtacctgctgcacctaaaaaagcagtagcacaaccaaaaacagctgtaaaagcttatactgttactaaaccacaaacgactcaaacagttagcaagattgctcaagttaaaccaaacaacactggtattcgtgcttctgtttatgaaaaaacagcgaaaaacggtgcgaaatatgcagaccgtacgttctatgtaacaaaagagcgtgctcatggtaatgaaacgtatgtattattaaacaatacaagccataacatcccattaggttggttcaatgtaaaagacttaaatgttcaaaacttaggcaaagaagttaaaacgactcaaaaatatactgttaataaatcaaataacggcttatcaatggttcctttgggtactaaaaaccaagtcattttaacaggcaataacattgctcaaggtacatttaatgcaacgaaacaagtatctgtaggcaaagatgtttatttatacggtactattaataaccgcactggttgggtaaatgcaaaagatttaactgcaccaactgctgtgaaaccaactacatcagctgccaaagattataactacacttatgtaattaaaaatggtaatggttattactatgtaacaccaaattctgatacagctaaatactcattaaaagcatttaatgaacaaccattcgcagttgttaaagaacaagtcattaatggacaaacttggtactatggtaaattatctaacggtaaattagcatggattaaatcaactgatttagctaaagaattaattaagtataatcaaacaggtatgacattaaaccaagttgctcaaatacaagctggtttacaatataaaccacaagtacaacgtgtaccaggtaagtggacagatgctaactttaatgatgttaagcatgcaatggatacgaagcgtttagctcaagatccagcattaaaatatcaattcttacgcttagaccaaccacaaaatatttctattgataaaattaatcaattcttaaaaggtaaaggtgtattagaaaaccaaggtgctgcatttaacaaagctgctcaaatgtatggcattaatgaagtttatcttatctcacatgccctattagaaacaggtaacggtacttctcaattagcgaaaggtgcagatgtagtgaacaacaaagttgtaactaactcaaacacgaaataccataacgtatttggtattgctgcatatgataacgatcctttacgtgaaggtattaaatatgctaaacaagctggttgggacacagtatcaaaagcaatcgttggtggtgctaaattcatcggcaactcatatgtaaaagctggtcaaaatacactttacaaaatgagatggaatcctgcacatccaggaacacaccaatatgctacagatgtagattgggctaacatcaatgctaaaatcatcaaaggctactatgataaaattggcgaagtcggcaaatacttcgacatcccacaatataaataa

SEQ ID NO: 405336 - DNA, 420 bp, Staphylococcus aureus
atgtataaacaacttgaaaaacttattacactgactaacaatgacttaaacttagtgaatagaagatttggacaacgcacggatatcaaatctgaacagctagaacttctccgtattttatttaattacgatcgcttatcacagtatgatttgacgatgaagattagcagggaacaatctatagtttcaaggtggattaagaaattagttttgaaagggtacatcacaagtcaacaatctagcgaagattttagatgtaaagaattaattttgactgatcaagcacgtacattaatttcacaaataaataatgcacgttgcgaattgattgaagcaagatgtcaatgtttatcggaagtcgaattagacaatttaaatcaattacttgataagttaaatcaacgacgcatatcgttgtaa

SEQ ID NO: 405337 - DNA, 1011 bp, Staphylococcus aureus
atgacttcattaaaagagagagattatttttttgacaacgcaagagcaattttaatattattagtcgtatttggacatatgttacaaccctacactagtggcgataaatatttatcagcattatacctagttatttatagtttccatatgccaacatttttgtttatatctggttatttcgcgaaaaatattgataaaccatactatttagaaaaaatttcaaaacgtttgatagtaccttatatgatattttttgcattcttttcaatttattatttcttaacaggtaaaagtgacgaattacaacttgatccttttaacccagtatttgcgttatggtttttgatcacgctatttttctttcatgtcattttagtaatagttagaagatttaatccatataaagtgctatcagtttcaattattatatctattggagcaggtttttcagataacatcgatagctacttaagcatttcaaggacaatcgtatttttcccaatattttatctaggttacattttcaccaaaaaacatacggctatttttaaaaataaaaaactaataccagtatctatcattacctttattttgttttttatcgtttacgtgattcatcctatcaatgcagattggttattgggaagttcaccatatacttcacttgaaaatgaaggacagagtatattcagtccttttaaacgacttatattatatggaattatattaatcgcaatgactgcgtttctaaatttaatgtcaacaaagaaaaaattatatacttatattggtagtcgtacgctatacgtatatttattacatggtttaattattggcattgttagaggatttgaatggtacccattcgataatcctatatcattaatgacttatctttatttaataagtatatctgtaatcatcgtatatgtattatcgacaaactttgtttgtaaatggacaaatccaataattaatttacaaagaccatcacagtttaaagattcataa

SEQ ID NO: 405338 - DNA, 1155 bp, Staphylococcus aureus
atgaaactttctttaaattctaattctaaatatttaagagcaccaagtattcgccaattttcaaatcgtatgaataatttggatgattgtgttaatttaactattggccaaccagacttcccgatgcctgatgttgtgaaaaaggcatatattgatgctattaacaatgacaagacatcatactctcacaataaagggttattagaaactcgcgaagcaattagtcaatacttcaaaaatcgttatcatttttcctatgatcctgaagaaattattgtgacaaatggagcaagtgaagcaatagacacaacgttacgttctatcatagagcctggagatgaaattataataccgggaccaatttatgcaggctacataccactcatcgaagtactaggtggtaaaccaatttatattgatacaacagcaacacaatttaaaattacacctgatgcattagaaagtcatatttctccaaagacaaaagctgtcttgttaaattatccgactaatccaactggcgtagttttaaaaagaaatgaagttttaaatatcgtaaatgtattaaaaaaatatccgttatttattattagcgatgagatttatgctgaaaatacatttagtggtaaacatgtatccttcgctgaatttgaagacattcgtgatcaattaatattaattggtggtttaagtaaatcacactcagcaaccggaataagaattggttttctattaggacctcaatatttgattgataaattaacatttatgcacgcctataattgtatttgtgccaatgttccagctcaaatagcatgtataacagcacttaacgaaggattagaagctcctaaatatatgaacgaagcttatgtagaacgaagaaattatttagtatctgaattaactaaattaggttttgagattaccgctcaacctgaaggcgcgttttatattttcccaagtattaaacatatcaccgatgacgatttcgaattttgtgtcgatttacttgaatcaacacatttagcaatcgttccaggctcatcctttacagaattcggtaaaggatttgtaaggatttcctatgcttatgaaatggatgttttaaaagaaggtatgaagagacttgctaaatatttaaatactaaataa

SEQ ID NO: 405339 - DNA, 1011 bp, Staphylococcus aureus
atgaaaggtaattttttaaaagttagttctttattcgttgcaactttgacaacagcgacacttgtgagttctccagcagcaaacgcgttatcttcaaaggctatggacaatcatccacaacaaacgcagtcaagcaaacagcaaacacctaagattcaaaaaggcggtaaccttaaaccattagaacaacgtgaacacgcaaatgttatattaccaaataacgatcgtcaccaaatcacagatacaacgaatggtcattatgcacccgtaacttatattcaagttgaagcacctactggtacatttattgcttccggtgtagttgtaggtaaagatactcttttaacaaataaacacgtcgtagatgctacgcacggtgatcctcatgctttaaaagcattcccttctgcaattaaccaagacaattatccaaatggtggtttcactgctgaacaaatcactaaatattcaggcgaaggtgatttagcaatagttaaattctcccctaatgagcaaaacaaacatattggtgaagtagttaaaccagcaacaatgagtaataatgctgaaacacaagttaaccaaaatattactgtaacaggatatcctggtgataaacctgtagcaacaatgtgggaaagtaaaggaaaaatcacttacctcaaaggcgaagctatgcaatatgatttaagtacaactggtggtaattcaggttcacctgtatttaatgaaaaaaatgaagtgatcggaattcattggggcggtgtaccaaatgaatttaatggtgcggtatttattaatgaaaatgtacgcaacttcttaaaacaaaatattgaagatatccattttgccaacgatgaccaacctaataacccagataatcctgataaccctaacaatcctgataaccctaacaacccagatgaaccaaataaccctgacaaccctaacaaccctgataatccagacaatggcgataacaataattcagacaatccagatgcagcttaa

SEQ ID NO: 405340 - DNA, 1182 bp, Staphylococcus aureus
atgaatagttcatgtaaatctagagtattcaatattataagcatcataatggtttcaatgcttattttatcactaggcgcatttgctaataacaataaagccaaagccgattcacactctaaacagctagaaattaatgttaagagtgacaaagtacctcaaaaagtaaaagatctagcacaacaacaatttgctggttatgctaaagcattagataaacaaagtaatgcaaaaactggtaaatatgaacttggcgaagcttttaaaatttataaatttaatggtgaagaagataatagttactattatccagttataaaagacggtaaaattgtttatactttaacacttagtcctaaaaataaagatgatttaaacaaatcaaaagaagacatgaattacagtgttaaaatttcaaacttcatcgctaaagatttagaccaaattaaagataaaaattcaaatatcactgttcttactgatgaaaaagggttttattttgaagaagatggcaaagttagattagtaaaagctacgcctctacctggtaatgtaaaagaaaaagaaagtgctaaaacagtttcagcaaaattgaaacaagagttaaaaaatacagtaacacatactaaagttgaagaaaacgaagcgatacaagaagatcaagttcaatatgaaaatacattaaaaaacttcaaaattagagaacaacaattcgataactcatggtgtgcaggattcagtatggcagcattattaaatgcaactaaaaatacagacacttataatgcacatgatattatgcgtacattataccctgaagtaagtgagcaagaccttcctaattgtgcaacattccctaatcaaatgattgaatacggtaaatcacaaggcagagatattcattatcaagaaggcgtaccatcatatgaacaagttgatcaacttacaaaagataatgtaggaattatgatccttgcacaaagtgtatctcaaaaccctaatgacccacatttaggacatgcgctagcagttgttggtaatgctaaaattaatgaccaagaaaaacttatttactggaatccttgggatacagaattatcaatccaagatgcagattcaagcctattacatttatcattcaatcgtgattataactggtatggttcaatgataggttactaa

SEQ ID NO: 405341 - DNA, 330 bp, Staphylococcus aureus
atgtatcaactacaatttataaatttagtttacgacacaaccaaactcacacatctagaacaaaccaatatcaatttattcattggtaattggagtaatcatcaattacaaaaatcaatttgtatacgtcatggcgatgatacaagtcacaatcaatatcatattctttttatagatacggcacatcaacgcattaaattttcatctattgataatgaagaaatcatttatattcttgattatgatgatacacagcatatcctcatgcaaacgtcatccaaacaaggtattggcacttcgcgaccaatcgtttatgagcgcttagtataa

SEQ ID NO: 405342 - DNA, 822 bp, Staphylococcus aureus
atgactaacagacaatgggaaacacttagagaatatgatgaaatcaaatatgaattttacgaagggattgctaaggtaacaataaatcgccctgaagtacgcaatgcgtttacacctaaaacagttgctgaaatgattgacgcattttcacgtgcacgtgatgatcaaaacgtttcagttatcgtattaactggtgaaggtgatttagcattctgttctggtggtgaccagaagaaacgtggacatggtggttatgtaggtgaagaccaaatccctcgcttaaatgtattagatttacagcgtttaattcgtattattccaaaaccggttatcgcgatggtaaaaggttatgctgtaggtggcggtaatgtactaaatgttgtttgtgacttaacgattgctgctgataatgctatttttggacaaactggtcctaaagtaggttcatttgatgcgggttatggttcaggatatttagcacgtatcgttggacataagaaagcacgtgaaatttggtacttatgtcgtcaatacaatgcacaagaagctttagatatgggtctagtaaatacagtggtacctttagagaaagttgaagatgaaactgtgcaatggtgtaaagagattatgaaacactcaccaacagcgttacgattccttaaagcagctatgaatgctgacacagatggtttagctggtttacaacaaatggctggggatgcaacattgctttattacacaactgatgaagcgaaagaaggccgtgatgcgtttaaagaaaaacgtgatcctgacttcgatcaattccctaaattcccataa

SEQ ID NO: 405343 - DNA, 804 bp, Staphylococcus aureus
atgacacattataaattttatgaagcaaacgttgagaccaatcaagttttagtatttctgcatggatttcttagcgacagccgtacttatcataatcacatcgaaaaatttactgataactatcatgtcatcactatagacttaccaggccatggcgaagatcagtcttcaatggatgaaacgtggaattttgattatattacgacgttgttagaccgaattttagataaatataaagataaatcaataacattgtttggatattcaatgggtgggcgtgttgcattatattatgcaattaatggtcacatccctatatctaatttgatattagaaagtacgtcaccaggtattaaagaagaagcaaatcaattggaacgccgtcttgttgatgatgcacgtgctaaagtattagacatagcaggtattgaattatttgttaatgattgggaaaagttgccattatttcaatcgcaactagaattaccagttgaaatacaacatcaaataagacaacaacgattgtctcaatcgccacataaaatggccaaagcattaagagattatggtacaggtcaaatgccaaacttatggccgcgcctgaaagaaattaaagtaccaacattaatattagctggagaatatgatgaaaaatttgtacagattgcgaaaaaaatggcaaatttaattcctaatagtaaatgtaaattaatttctgctacaggtcatacaattcatgtggaagatagtgatgaatttgatacaatgatattaggatttttaaaggaggagcaaaatgactaa

SEQ ID NO: 405344 - DNA, 1674 bp, Staphylococcus aureus
atgggaaatcataaagcagctttaacgaagcaagtttttacatttgcatctgagttatatgcgtacggcgtaagggaagtagttatcagtccgggatcacgctcaacgccacttgcacttgcatttgaagcacatccaaatattaaaacatggatacaccccgatgagcgaagtgcagcgttttttgcagttgggttaattaaaggcagtgaaagacctgtcgctatattatgtacgtcaggtacagcagcagcgaattatacgcctgcaattgctgaaagccaaattagtagaattcctttaatcgttttaacaagtgaccgtccgcatgaattaagaagtgtaggcgcaccacaagcgattaatcaagtaaatatgtttaataattatgtaagttatgagttcgatatgcctattgcggatgatagtaaagagaccattgatgcaatttactatcaaatgcaaattgctagtcaatatttatatggaccacataaagggccaattcattttaacttgccatttagagatccgttaacacctgatttgaatgcaacagaattgttaacttctgagatgaagattttaccgcactatcaaaaaagtatagatgcatcggcattaagacacattttaaataagaaaaaaggtttaattattgtaggggatatgcagcaccaagaagttgatcaaatactaacgtattcaacgatatatgatttgcctattttagctgatcctttaagtcatttaagaaaatttgatcatccgaatgttatctgtacatatgatttgctgtttagaagcggcttagacttaaatgtggatttcgtaattcgtgttgggaaaccagtgatttctaaaaagttaaatcaatggttaaagaaaactgatgcatttcaaatattagtgcaaaacaatgataagattgatgtctttccgatagcgccagatatttcatatgagatttctgcgaatgatttctttaggtcattaatggaagacacgacagttaatcgcgtaagttggttagaaaaatggcaatgcttagagaaaaaagggcgtaaagaaattaaatgttatttggaacaagctacagatgagagtgcattcgttggtgaattgattaagaaaacatctgaaaaagatgcattatttattagtaatagtatgcctatcagagatgtagataacttgttattgaataaaaatatagatgtctatgcgaatcgtggtgcgaatggtattgatggtatcgtttcaactgcactgggtatggctgtgcataaacgaataacattattgataggtgatttatcattttatcatgatatgaatggactattaatgtcaaaattaaataatattcagatgaatattgtattattgaacaacgatggtggcggtattttttcatatttaccacaaaaagaaagtgcaactgactattttgaacggttgtttggcacaccgacgggattggatttcgagtatacagctaagttatatcaattcgattttaaacgttttaacagtgtttcagaatttaaaaatgccacattgttatctgaaacttcgacgatttatgaattgataacgaatcgcgaagataactttaaacagcatcaaattttataccagaaattgagtgaaatgattcatgacacattataa

SEQ ID NO: 405345 - DNA, 1362 bp, Staphylococcus aureus
atggctacgggcgtattagaggacgatattgtcaaagagatatatggcagctcaaaggaatgggtttcagttgaagtgaaattatcacagtcactagacccgagcacattatttcatctcactgacaatgaggcaggagatcgcttttatatgcgtttgaatgataatcgaacgtcatattttggctacaaagcaattcaattattcaaaaataattctaaaaataaacaatctatttttaaagactgggaaaaattaaaacataacatcacatttatacatccgcaatctgagaaacatcatcttcgagttgttggagggttccaattttcaagtcataaatcagatgatgaatggcgagagtttggactaaatcattttgtattacctgaagttttaatttcaactgataataatgggacatttttaacttatacagttaaaagggaaagttttactgttgaggcattgaacgatttaatggatttgttcaacaatatatcggacatagatgtggacgagcaaattggggaaattactagaaatgaagatatttataaagatgactggcgtcaacttgtagtagaagctatagaatctattaataatgaagaaaaaattgtactagcacgtagacggttaataaagttcgataaagatatcagtattccatatattctaaagcaagcatattctaaagaaaaaaacagttatatattcttgttagaatcacaagattctatattcttttcacaaacacctgaacaattaataaaggtcaataataaaatactatcgactaaagctgtagcaggtacaattaaacgttcacaagatgaggacgaagatacaaaaaatgttgaagcatttttaaaagataataaaaacttaatcgaacatcgatttgttgttgacagtattttacatgatattaaaccttatatcactgaattacattatgataagacgcctaaaattctaaaaaatgatcatttatatcacttgtacactgaaataaaggcgccactgaaggatgattcgtatattagtttaattgataatttacatccaacacctgctttaggtggctatccaaaagaatttgcaatggattttattgagcagaaagaatttggtacgcgaggattatatggtgcaccggttggctatatagatatatacgatgattgtgaatttattgttgcaattcgttcgatgcttattaagaaagcacaagcaactttatttgctgggtgtggcattgttaaagattctgatccagatagtgaattggcagaaacgaaccttaagttcacacctatgatgaatgcattaggagtcgatatgaatgggaaatcataa

SEQ ID NO: 405346 - DNA, 939 bp, Staphylococcus aureus
atgagtaatcaatatcagcaatattctacagttaagaaatattggcatttaatgcgtcctcatacattaactgcttccgtagtacccgttttagttggtacagcagcatctaaaatatattttcttggtagcgaagatcatattaaaatcagcctattcattgccatgttactagcatgcttacttattcaagcagcaactaatatgtttaatgaatactatgattataaaaaaggccttgatgatcatgaatctgtaggcattggtggtgccattgttcgcaacggtatgagcccagagcttgtgctacgattagccattgcattttacatcttagcagcaatattaggtttgtttttagctgctaactcttcattttggttattaccagttggattagtatgtatggctgttggttacctatatacaggtggccctttccctatttcatggacgcctttcggtgaattattctcaggcgtatttatgggtatgtttattatcgttattgcattctttattcaaactggcaatattcaaagttatgtaatttggttaagtgtacctatagtaatcactatcggtttaattaatatggctaacaatattcgcgaccgtgtcaaagataaagcaagtggtcgcaaaactttacccattctattaggtaaaaatgcttctttaacatttatggcaatcatgtactttatcgcttatgcctttattgtacttacgatcattattaaacctggtggctcattattttacttacttgcgttgttatcattcccaatgcctgttaaagttatcagacgtttcaagaagaatgatacaccgcctacaatgatgccagcaatggctgctgctggtaaaacaaatacatttttcggtttattatatgcattaggtatttatattagtgcattatttgcaggcatttaa

SEQ ID NO: 405347 - DNA, 552 bp, Staphylococcus aureus
gtgatacgtcaagcacgtccagaggaccgatttgatattgcgaagttagtttatatggtttgggatgatatggaattagaattggtaaagcatctacctaaagacatggtattagatgcaattgaaaaaagctgtgttgatgcaacatatcgaactttttatcagcatattttagtttatgaagtagaaaataaagtagcaggttgtattattagctatagtggtgaaaatgaattgaaatacgaaaaagcatgggaactacttgacttgccagaaaaaataaaacaatatggcacgccattacctgtaaaagaagctaaagacgatgagtattatatagaaacaattgcgacatttgcagcatatagaggtagaggcatcgcgacaaagttattaacgtcattacttgaatcaaatacacatgttaaatggagtttgaattgcgatattaataatgaagcagcattaaagttatataaaaaagtaggctttatatctgatggacagattgaattatacaagcacatgtatcatcatttaattgttaaataa

SEQ ID NO: 405348 - DNA, 216 bp, Staphylococcus aureus
atgaaagtcaataaagccatttatgttattgttgcattatttcttggaggtttaggtattcataaattttatgctgataaatttggacaaggtctttttcacttattatttttctggacaggtatccctaccatcatctcaataatacatgcaatttttgtcatttttactaaaaaagcagataaagatggttatattatattccctaaaaattaa

SEQ ID NO: 405349 - DNA, 960 bp, Staphylococcus aureus
gtgaataggaatatcgttaaactagttgtgttcatgctaattttagttgtagcagtagcgggttgtggtcaaaaagatactgaagagaaaactgaaatgacgacaataaaagatgaattaggaactgaaaaaattaagaaaaatcctaaacgtgttgttgtattagaatatagttttgctgattatttagcagcattagatatgaaacctgttggtattgcagatgatggcagcactaaaaatataacaaagtcagtaagagataagattggggcatatgaatcggttggatctagaccgcaaccgaatatggaagtgataagtaaattaaaaccggatttgatcattgcagatgttagcagacataagaaaatcaaatcagaattgagcaaaattgctccgacaatcatgttagttagcggtacgggagattataatgcaaatattgaagcatttaaaacagtcgctaaagcagtaggcaaagagaaagaaggcgagaagcgtctggaaaagcatgataaaatattagcggagattagaaagaaaattgaacagagtacgttaaaatctgcatttgcattcggtatctcaagagcaggtatgtttattaataatgaagatacatttatgggacaattcttaattaaaatgggtattcaacctgaagtcacaaaagacaaaactacgcatgttggtgaacgcaagggtggtccttatatatatttaaataatgaagaacttgccaatatcaatccaaaagttatgattttagccactgacggaaaaacggacaaaaatagaacgaaattcattgatcctgcagtttggaaatcattaaaagctgtgaaagataacaaagtttatgacgttgaccgaaataagtggttgaaatcaagggggattatcgcaagtgaaagtatggcagaagatttagaaaaaattgcagaaaaagcaaaataa

SEQ ID NO: 405350 - DNA, 357 bp, Staphylococcus aureus
atgaaattaggtatgcttttaattagatggatgttagcaacatcattcttagtgcatggtactttgaaatttgttgatttagatggaacaattcacttcttaggctctttaggtttaccacctaccatcgcagtattgatgtcaattggtgaagttgttggaggtttagcacttattatcggctttttaacgccttatgttaatgttttttatatttgtgttatgttaggctcaatcttcacacttaaacttacaagaggatatgtaagtggttatgaatttgaaatcatacatatcgtaatgaacttagcttgtattagtagttacagctggaagaaatggctacaattttattaa

SEQ ID NO: 405351 - DNA, 1482 bp, Staphylococcus aureus
atgaaaaaaatatttatgatggtacatgagttagatgtgaataaaggtggtatgacctcttcgatgttcaatagaagtaaagagttttatgatgcggacatacctgctgatattgttactttcgattacaaaggaaactatgatgaaattattaaagctttgaaaaaacaaggtaaaatggatcgaagaacgaaaatgtataatgtatttgagtattttaaacaaatttcaaataataaacattttaagtctaataaattgttatataaacatatttcagaaagactaaaaaatacgattgaaattgaagagagtaaaggtatttcaagatattttgatataacgactggtacatatattgcctacattagaaaaagtaaatctgaaaaagtgattgatttctttaaagataataaacgaattgaacggtttagttttatagataataaagtgcatatgaaggaaacatttaatgtagataataaagtttgttatcaagtattttatgatgaaaagggatacccatatatttcaaggaatattaatgctaataatggtgctgtaggtaaaacttatgtgttagttaataaaaaagaatttaaaaacaatttagcactgtgtgtttactatttagaaaaactaataaaagattctaaagatagtattatgatttgtgatggaccagggagttttccaaaaatgtttaatacaaatcataaaaatgctcagaaatatggcgttattcatgttaatcatcatgaaaatttcgatgatacgggtgcatttaaaaaaagtgagaaatatattattgagaatgcgaataaaattaacggtgtaattgtattaacagaggcacaaagattagatattcttaatcaatttgatgtagaaaatattttcactattagcaattttgttaagatacataatgctccaaaacattttcaaactgaaaaaatcgtaggtcatatttctagaatggtaccaacgaagcgaattgatttgcttattgaagtggctgagttagtcgtaaaaaaagataatgctgttaaatttcatatatatggagaaggatctgtcaaagataaaatagctaaaatgattgaagataaaaatttagaaagaaatgtttttcttaaaggatatacaacaactccacaaaaatgcttggaagattttaaattagtcgtttctacatctcaatatgaaggtcaagggttaagtatgatagaagcaatgatttctaaaaggcctgttgttgcctttgacatcaaatacggaccaagtgattttatagaagataataaaaatggttatttaatagaaaaccataatattaacgacatggctgataaaatacttcagcttgttaataatgatgtattagcagcggagtttggttcgaaagcgagagaaaacattatagaaaaatattcaacggaatcaatattagaaaaatggttaaatcttttcaatagctaa

SEQ ID NO: 405352 - DNA, 288 bp, Staphylococcus aureus
atggaaaaggggattttcaattacgataatgcgaatgtattaaaattagatactaatcagttaaatgaaaacataaaagtcattgacgatatatttaaaaattatgagcagatagagccaactatagaagtcgaaaatggaaatacaaaattaaaattaaatggatattttattgcgtcaattataagcccattaaatttaaataaacttaataatttatatgttgaagaagaattttatcatacatataacgaattaattgttaaatatactgaggtaaaggaataa

SEQ ID NO: 405353 - DNA, 246 bp, Staphylococcus aureus
ttgactagaacttataatattattggtatcctttcttgtcttatatcttttattattatggcgttaccaatgatttggtacacagcttcagcattatggttcttcccaggtgcaatcatgatattgttgttatctttagtcattgttttttgctatattaaaacgaaaaatcaattacatttattactaatcgtattaaatattattatattgctttttttcagtttgccgttgttactttcataa

SEQ ID NO: 405354 - DNA, 642 bp, Staphylococcus aureus
atgatagaattaaaagatttaaccatacaaaaaggtaatacacatattttgaagaaacttaatttgaaatttcaatgtggaaaatcatatgcacttattggtaaaagtggatgcggtaaatctacattattaaatactattgctggacttgaaaaaacaggaaaacaatatgtctattttaatggtcaattagaacaatttaaatctaatttttacagagataaattaggatatttatttcaaaattatggattaatcgataatttgacagtaaatgaaaatttagatattggattagtatataaaaaaataagtaagaaagaaaaagaacaaataaagatacgttatatagaacagtttggtctgtcaaacagtttaaaaagaaaagttcatacgctaagtggaggtgaacaacaacgtgtcgctttaattagaatgatgttaaaagatccgattgttatgttagctgatgaaccaacgggtgcgttagatcctaaaacaggacagatgattattcaatcattatttggtttggtcgatgaaaataaagtgctgattttagcaacacatgatatggctattgcaaatcaatgtgacgaaataatagatttagaacagtatagaaaagtagcatctatgtga

SEQ ID NO: 405355 - DNA, 321 bp, Staphylococcus aureus
atgaaatttatcattgcaatattattaggattaatattatccattactattgcttttacaatcatacatcatcctatacttgatcgttttaatcctttcttaaaaacggagtatagttatgccaaagtgccaaaaggtacgcaacaatatgttaatattacggcttatagtgaaagaggggaaaagcttgattataaattaacatttaatggattttcacctagtagaacgtatgtcgaaataaagcataaagggcaatatgtcatatcgatcacatatgttgaaaaagaggatacaccaaaagaggtaagacaagaatga

SEQ ID NO: 405356 - DNA, 1965 bp, Staphylococcus aureus
atgaaatggttcaaattaatacttgatgttacaatcttcattctgattgctatattgttatttgtttatacatataaagaaaacgaagaaatattgcctgatactaaataccctatagcggtaactgactggaataaaaaatatagtaaaaatgagatttataaacgtatagatcaattcgctaaaaatgagaacgtagcaatctataaatcaacttcaaattatacaaacaaaaacgtagataaagatatatatgtatttaataaatcaaaagcagcaactatcactccttttaatgctaaatataacattcattatttaagtgacgacgaagtattaaaaaaagatatcaaagggagttattttgtaaaagacaaaaattttgacgtgtctaaattcataaattttttaaaagaatatggtgttactgctgaatcatacaaaatagatcatatgatgattgccgttggtgtcattaaacaaatgaatatagtagttccattatcctcacttttaatcgtttattttatttattatattttcgaaaagaacattaatttcaaagcgtatgcgattaagtatttaaatggttttacattaagaaaaataattttcgaaaatttttcaaagaaatgcacgtattgggtaacgttaatcataactcaaattcttttaactacaagtgtactttggatattaaattacacgggtaatttagatttattcatattaagaatagttctgctttcatgtcttttcattttaacgattagtgttattaatttatggactttcttaatgttactaaatttaaatattgcaaatatgattaaaggtaagcagcactttaaaacaattcgttttattaatacagtttgtaaaagtattctcttagtactaatagctaatgtaatgatagaaaatactagtgttattaaagatttgaataaaataaaagaaactgagaaatattggaatgtattagatgattattacacgattgaatttgcaccttatcacgaaacaaaacaaagtttgattgataatatggtgcgatcagaacaattagtaaaggctagtgaagcagaaaataatgcgattttattcaaaccaaagggtgactccgttgacaatgacaacttttcgcctgatgaggggaatgtaatattagtaaataatcagttctggtcgatttattacaagcagtttcaacctgatattccgataaaaaatcaaaaaaataatgtcgaagtaattattccacaaaagtttcatgcaatgcgtaatgaaatcaatcaagcatatcattcatggtttgaatttgtacaaaataaaaataataaagagaataagttatctatacagtttatcaacaaaaatgattgtcgaattttttcatttgatgcacgagatagtcgccatttgtcatttatagaggcgccaatcattgtgaatgttcaggcatcagatttatcgaatgatttttattatgccatgatcagtcaaggcgggtatttattcaaaaattatgacgcgctagtaaaaaatattgaaaagtatcatcttgatggggaaatcagtggaataaccaattataaagatagcgtgatggaaatgtatcatgaaaacaatttgaaattaacagtactcaacttttcacaaatcattatcgcaatcattttaataattattattttatttgatgtgaaatattattttgaacagcatcgaaaattactcgtaatcaaaaagctatatggttattcaacattaagagccaattaccaatacttattaataaataatatagttgttatttttattggaatattgacgaatgtaattttacattctcactatataatgatgttatttgcaacgattcttgtcgttcaaatattattgcagatttgcagcctatactatcatggccgacgttttaatgaagttatcaaggagttttaa

SEQ ID NO: 405357 - DNA, 603 bp, Staphylococcus aureus
atgaataaaatctcgaaggctttaacttggtttattataagtttcattatatttcatctcatattatttattatgtggggcgaacaccaagaatactggtatttatatacaggtataatgctaattgctggtatcagttatgtattttatcaaagagatattgaatctaagcggttgcttacatcaattggtgttggtattattacggcaattattttaattatgcttcaacttttattctcacttataacttctaatttaagttatagttcattaattaaagaattagcaagaacaggtgtcaattggaagtggcaaatgttagtaactttactttttgtcattccatgtcacgagttatatatgagaactgttttacaaaaagaattaacacatttttcaataccgaaatgggtagctatattaataactgcaatttgttctagttcattatttatttatttagataattggtggatagtaacatttatatttgttgcacaagtgatattatcattaagttatgagtatactcgacgtatagcaacaacatccgttgcacaaattgtagctattatattgttattaatttttaatgcttaa

SEQ ID NO: 405358 - DNA, 177 bp, Staphylococcus aureus
atgactgttgcagaagtgggtaacattgttgagtttatggatggattaagaggtcgtgttgaaaaaatcaacgataactctgttattgttgacttaacaattatggaaaattttaatgaccttgatttaccggaaaaaactgttatcaatcataaacgatataagattgttgaataa

SEQ ID NO: 405359 - DNA, 987 bp, Staphylococcus aureus
atgaaattcattagtaataataatattacagatccaactttaaacttagcaatggaagaatatgttttaaaaaatttaccagcagaagaaagttactttttattttacataaatagaccatctatcattgttggaaagaatcaaaatacgatagaggaagtaaatcagacatatatcgatgctcacaacatcgatgtagtaagaagaatttctggtggtggcgctgtttatcatgatactggcaatttaaactttagttttataacagatgatgatggtaacagtttccacaatttccaaaaattcactgaaccaattgttcaagcattacaatctttaggcgtaaatgctgaattaactggtcgtaacgatattcaagttggacaagcgaaaatctcagggaatgctatggttaaagttaaaaatagaatgtttagtcatggtacgttgatgttaaatagtgatttagacgaagttcagaatgcactaaaagttaatccagctaagattaaatcaaaaggtattaaatctgttcgtaaacgggtagcaaacattcaagaatttttaaatgaccctttagaaattgaagaatttaaaaaaatcatcttgaaaactatctttggagaaactgaagtagaagaatataaattaacggatgaagattgggaaaatattgaaaagttaagtaacgacaaatatagaacttgggaatggaattatggtagaaaccctaaatataactttgaacgcgaggaaaaatttgaaaaaggatttgtacaaattaagtttgatgttaaacgaggtaaaatcgaacatgcaaaaatattcggtgatttctttggtgtcggagatgtcactgatcttgaaaatgcattagttggctgtctacacgactttgagcacatagaagaagcactatcagaatatgatttatatcattatttcggtgacatagatagacatgaattaattagattaatgtcataa

SEQ ID NO: 405360 - DNA, 219 bp, Staphylococcus aureus
atgaaatacaatactaatgttaaacatacaactttagaagcgtttgtcacaactgtcaatgatttgggtattgaattaattatcaatgaagcacttcgagaggtaagaaaacgacagctcatagaacttatagatgacgcactcgtcaataaagatgaagcagcatttaatcaatatacggcagaatacaaaaatttggaggcatttctcggtgaataa

SEQ ID NO: 405361 - DNA, 570 bp, Staphylococcus aureus
atgtattctcaaaatatttatgtgatacgcaaaggagacatggttattcgaccagcatttgatgatgacgatcaaagaaacggtagtgaaataattcggtttgacaaaacgcgtattcaaaatccttttaaagtccagaaaatcattgaacgctcttgcaaattttatggtaatacttatcttggcaagaaagcagagacaaaccgcattactggcatttctagtaaaccacctattttactaacaccattatttccaacttattttttcccaacacattctgacagacaaaatgaaaatatttggttaaatatgcattatatcgaaagtattaaagaattaaaaaatcgtaaatgtaaagtgacatttattaataatgaatcaatcattcttcatgtttcataccacagtttatggcatcaatataacaattccattttttactattacatggtagataaacaatctcgcatgatatcaaaaaatcccgaccaaccaatagattataataaagccacattgaatgtgtttgaagcattgacacgctattctttatttgaagataaataa

SEQ ID NO: 405362 - DNA, 1515 bp, Staphylococcus aureus
atgatggaaaaaaatgaaaacattaatgtagagattttaactacgtcagatatgcatagtcatttcttaaatggtgattatggttcaaatatttatagagctggtacttatgttaaccaagtaagagcacaaaatcatcgcgtcattttattagatagtggcggaagtttagctggctcgttagcggcctattattatgctattgttgcaccttataaacgacatccaatgataaagttaatgaacagaatgcattatgatgctagcggtgtgagtccaagtgaattcaagtttggtttatcatttttaactcgttcaattgctttggcacgttttccatggttatcagcaaatattgaatacaatgttactaaggagccttatttttcaactccatattgtattaaacattttggtgacttaaaaattgctatcgtaggcgtcacagcagatggtttaatggaaaatgagtattctgaaatggagcaagatgtatctattgaaaagacattagtggcatcaaaacgttggattagatatatccatgaagttgaagagccagattttttgattgtaatttatcatggtggattgaataaaattagtaatagtacgaaaaataaaaaggcaagttcgaatgaagctgaaaaattaatggaagaactcggtgttatagatttaatgattacagctcatcagcatcaaacaatagtaggtcaagatcatgaaacgtattatgttcaggctggtcaagatgccaaagagcttgtacatctttcgattaattttaaaaagagaacaacaacttatgatgttgaaagcattgattctaaagtgattgacttaaatgagtatgaagaggatcaagaattattagatttaacattctatgatagaaaagcagtggcttattggtcacaggaaatcataagtgataaaggtttgatgttatcagtaaatgggttacaagatttagtctgtcaaacacatccattttcgcaattattacatgatgcaattcaccttgcatttgataatgatataacatgtgtccacgtgcctatgaacggagagaaggggttgagtggacagattcgaaatgaagatttgtatcatgcatacccatatccagataagccaatggatatgacaattagtggtcaaaatatcaaagatatattggagtatagttattcacatttagattttgttaacgagcaattaagcttaacaattattgatgaaacgttatgtacaatgtggcaaggattcaattatgagattgatatgaatcaagaacctgggcaacgagtaatgttagatcaaattgatttgactaagagttatagagttacaatgactgactattgttatcgtaactacaagaattatttaaaaaatgctattatacatgaatcatacgatgaaacaatgagtacattaattgcagagaagttaagagatccgaattatcgtatttcatgtagtgataattttatagttaaaaacaggtaa

SEQ ID NO: 405363 - DNA, 1359 bp, Staphylococcus aureus
gtgtcaatttttagccagtttttaaaaagatcaagccctcaacaaggtattgtattgtactatatcgtcgcaattgtcattgcatttttattattaaacttaccgtatgttcataaaccaggtgtagaagtaaatccaattgacacattatttgttgccgtatccggaattagtgttactggattgtctccgataagtattgtcgatacctattctacatttggacaattaattatcctcatgatattaaatattggtggaattggcgtcatggcaattggtacgatgttatgggtggtactaggtaaacatattggaattagagaacgtcagttaattatgttagataataacaaaaacacaatgagtggtaccgtcaaattgattattgatattgtaaaatcaatatttgtaatcgaactcgtaggagccatgttattagcattttacttttatcgagataatccagatttaaaatatgcaatcatgcaaggtgtttttgtttctatttctgccactaccaatggtggattagatattacaggtaagtcattaattccttatgcacatgattattttgtacaagcgatagttatatttttaataattttaggatcaatcggcttcccagtattattagaagttaaagcttatattcaaaatagggttactaattttagattttcattatttactaaaattacgacatcaacatatttattcctatttattgttggggtattagccattctattatttgaacataaccatgcgttcaaaggtttaagttggcatcaatcgttattctattcgctgtttcaatcagcgactacaagaagtgcgggtcttcaaacaattgatgtgacaacactaagtgaccccactaatattatcatgggtattttaatgtttataggatcttcgccaagttcggttggtggcggtattcgtacaacaactttcgctattttaattttgtttttaattaactttagtaataatgccgataaaacatccattaaagtttacaatagagaagtacacattatggatattcaacgttcatttgcagtatttacaatggcgacaattttaacatttttaggaatgctaattatatcagctactgaaaatggtaagcttacatttttacaagtattttttgaagtcatgtctgcatttggaacttgtggactatcgcttggtgtcacaagtgatattagtgatatttctaaggtcgtactaatgatactcatgtttataggacgtgttggcttaatatcatttatcattatgatagcaggacgtcgagaaccagataaattccattatccaaaagaacgtattcaaataggataa

SEQ ID NO: 405364 - DNA, 2310 bp, Staphylococcus aureus
gtggatattggtaaaaaacatgtaattcctaaaagtcagtaccgacgtaagcgtcgtgaattcttccacaacgaagacagagaagaaaatttaaatcaacatcaagataaacaaaatatagataatacaacatcaaaaaaagcagataagcaaatacataaagattcaattgataagcacgaacgttttaaaaatagtttatcatcgcatttagaacagagaaaccgtgatgttaatgagaataaagctgaagaaagtaaaagtaatcaggatagtaagtcagcatataacagagatcattatttaacagacgatgtatctaaaaaacaaaattcattagattcagtggaccaagatacagagaaatcaaaatattatgagcaaaattctgaagcgactttatcaactaaatcaaccgataaagtagaatcaactgaaatgagaaagctaagttcagataaaaacaaagttggtcatgaagagcaacatgtactttctaaaccttcagaacatgataaagagactagaattgattctgagtcttcaagaactgattcagacagctcgatgcagacagagaaaataaaaaaagacagttcagatggaaataaaagtagtaatctgaaatctgaagtaatatcagacaaatcaaatacagtaccaaaattgtcggaatctgatgatgaagtaaataatcagaagccattaactttaccggaagaacagaaattgaaaagacagcaaagtcaaaatgagcaaacaaaaacctatacatatggtgatagcgaacaaaatgacaagtctaatcatgaaaatgatttaagtcatcatataccatcgataagtgatgataaagataacgtcatgagagaaaatcatattgttgacgataatcctgataatgatatcaatacaccatcattatcaaaaacagatgacgatcgaaaacttgatgaaaaaattcatgttgaagataaacataaacaaaatgcagactcgtctgaaacggtgggatatcaaagtcagtcaactgcatctcatcgtagcactgaaaaaagaaatatttctattaatgaccatgataaattaaacggtcaaaaaacaaatacaaagacatcggcaaataataatcaaaaaaaggctacatcaaaattgaacaaagggcgcgctacgaataataattatagtgacattttgaaaaagttttggatgatgtattggcctaaattagttattctaatgggtattattattctaattgttattttgaatgccatttttaataatgtgaacaaaaatgatcgcatgaatgataataatgatgcagatgctcaaaaatatacgacaacgatgaaaaatgccaataacacagttaaatcggtcgttacagttgaaaatgaaacatcaaaagattcatcattacctaaagataaagcatctcaagacgaagtgggatcaggtgttgtatataaaaaatctggagatacgttatatattgttacgaatgcacacgttgtcggtgataaagaaaatcaaaaaataactttctcgaataataaaagtgttgttgggaaagtgcttggtaaagataaatggtcagatttagctgttgttaaagcaacttcttcagacagttcagtgaaagagatagctattggagattcaaataatttagtgttaggagagccaatattagtcgtaggtaatccacttggtgtagactttaaaggcactgtgacagaaggtattatttcaggtctgaacagaaatgttcctattgatttcgataaagataataaatatgatatgttgatgaaagctttccaaattgatgcatcagtaaatccaggtaactcgggtggtgctgtcgtcaatagagaaggaaaattaataggtgtagttgcagctaaaattagtatgccaaacgttgaaaatatgtcatttgcaatacctgttaatgaagtacaaaagattgtaaaagatttagaaacaaaaggtaaaattgactatcccgatgtaggtgttaaaatgaagaatattgccagtctaaatagttttgaaagacaagcagttaaattgccaggaaaagttaagaacggtgttgttgtagatcaagttgacaacaatggtttagcagatcaatctggtctgaaaaaaggtgatgtaattactgaattagatggcaaacttttagaagatgatttacgctttaggcagattatatttagtcataaagatgacttgaaatcaattacagcgaagatttatagagatggtaaagagaaagaaattaatattaaactaaaataa

SEQ ID NO: 405365 - DNA, 804 bp, Staphylococcus aureus
atgttaatggatccaagtttgatcttaccttatttatgggtacttgtcgttttagtatttttagaaggcttattagcagcagataacgcgattgttatggctgtaatggttaagcacttaccacccgaacaacgtaaaaaagctttgttttacggtttgttaggtgcatttgtatttagatttttagcattattcttaattagtattatcgcgaacttttggtttattcaagctgcaggagcggtttacttaatttatatgtcaatcaaaaatctgtggcagttctttaaacacccagaaattgaaagtcctgaagctggagatgatcatcattatgatgaatctggtgaagagattaaagcaagtaacaaatcattctggggaactgtgttgaaaatagaatttgcagatatcgcatttgccattgattctatgcttgctgctttagctattgctgtaacacttcctaaagttggtattcactttggtggtatggacttaggtcagttcgtagtcatgttcctaggtggaatgattggtgttattctaatgcgttatgcagcaacatggtttgtagagctattaaacaaatatccaggacttgaaggtgcagccttcgcgatcgttggttgggtaggtgttaaattagttgtcatggtattagcgcacccagacatcgctgtattgcctgagcacttcccacatggcgtattatggcaatctattttctggacagtactaattggattagtaattatcggttggttaggttcagttgttaaaaataaaaaatcgcataaataa

SEQ ID NO: 405366 - DNA, 1563 bp, Staphylococcus aureus
atgaacttaaagcaagaagttgagtctagaaagacttttgcgattatttcacatcccgatgcagggaaaacaacgttaactgaaaaactattgtacttcagtggtgctattcgtgaagcgggtacagttaaagggaagaagactggtaaatttgcgacaagtgactggatgaaagttgaacaagagcgtggtatttctgtaactagttcagtaatgcaatttgattacgatgattataaaatcaatatcttagatacaccaggacatgaagacttttcagaagatacgtatagaacattaatggcagttgacagtgctgtcatggtcatagactgtgcaaaaggtattgaaccacaaacattgaagttatttaaagtttgtaaaatgcgtggtattccaatctttacattcattaataaattagaccgagtaggtaaagaaccatttgaattattagatgaaatcgaagagacattaaatattgaaacataccctatgaattggccaattggtatgggacaaagtttctttggcatcattgatagaaagtctaaaacaattgaaccatttagagatgaagaaaatatattacatttgaatgatgattttgagttggaagaagatcatgcaattacaaatgatagtgattttgaacaagcgattgaagaattaatgttggttgaagaagcgggtgaagcctttgataatgacgcgctgttgagtggagacttaacacctgtatttttcggttcagctttagctaactttggtgtacaaaatttcttaaatgcatatgttgattttgcgccaatgccaaatgcgagacaaacaaaagaagacgttgaagtaagcccgtttgatgattcattttcaggatttatctttaaaattcaagccaacatggaccctaaacaccgtgatagaattgcctttatgcgtgtcgttagtggtgcatttgaacgtggtatggatgttactttgcaacgtactaataaaaagcaaaagatcacacgttcaacgtcatttatggcagacgataaagaaactgtgaatcatgctgtagcaggcgatatcattggactatatgatactggtaattatcaaattggagatactttagttggtggaaaacaaacctacagtttccaagatttaccacaatttacgccagaaatttttatgaaagtttctgctaaaaacgtcatgaaacagaagcatttccataaaggtattgaacaattagtacaagaaggtgcgattcaatactataaaacattacacacaaaccaaattattttaggtgctgttggtcagttacaatttgaagttttcgaacatagaatgaaaaacgaatataatgttgatgttgttatggagccagtaggccgtaaaattgcacgttggattgaaaatgaagaccaaattacagataagatgaacacatcaagatcgattttagtgaaagatagatatgacgatttagtattcttatttgaaaatgaatttgcaacaagatggtttgaagagaaattccctgaaattaaattgtatagtttactttaa

SEQ ID NO: 405367 - DNA, 252 bp, Staphylococcus aureus
ttgattaataaaagatttattgatgaaggtaaaactattgatgtttatttattcgaagcattaaataaccagataatcattgctataccagattggttttggtcatatcagatggcaatgacattagatgaagaaacttgttttgaagcaatactcatgcaattgtttgtttttaaagaagaggaagaggcagaatcgattgcatcacaactaacagattggatagaaacatataaaaaggagaaagactaa

SEQ ID NO: 405368 - DNA, 1482 bp, Staphylococcus aureus
ttggatgcaagtacgttgtttaagaaagtaaaagtaaagcgtgtattgggttctttagaacaacaaatagatgatatcactactgattcacgtacagcgagagaaggtagcatttttgtcgcttcagttggatatactgtagacagtcataagttctgtcaaaatgtagctgatcaagggtgtaagttggtagtggtcaataaagaacaatcattaccagctaacgtaacacaagtggttgtgccggacacattaagagtagctagtattctagcacacacattatatgattatccgagtcatcagttagtgacatttggtgtaacgggtacaaatggtaaaacttctattgcgacgatgattcatttaattcaaagaaagttacaaaaaaatagtgcatatttaggaactaatggtttccaaattaatgaaacaaagacaaaaggtgcaaatacgacaccagaaacagtttctttaactaagaaaattaaagaagcagttgatgcaggcgctgaatctatgacattagaagtatcaagccatggcttagtattaggacgactgcgaggcgttgaatttgacgttgcaatattttcaaatttaacacaagaccatttagattttcatggcacaatggaagcatacggacacgcgaagtctttattgtttagtcaattaggtgaagatttgtcgaaagaaaagtatgtcgtgttaaacaatgacgattcattttctgagtatttaagaacagtgacgccttatgaagtatttagttatggaattgatgaggaagcccaatttatggctaaaaatattcaagaatctttacaaggtgtcagctttgattttgtaacgccttttggaacttacccagtaaaatcgccttatgttggtaagtttaatatttctaatattatggcggcaatgattgcggtgtggagtaaaggtacatctttagaaacgattattaaagctgttgaaaatttagaacctgttgaagggcgattagaagttttagatccttcgttacctattgatttaattatcgattatgcacatacagctgatggtatgaacaaattaatcgatgcagtacagccttttgtaaagcaaaagttgatatttttagttggtatggcaggggaacgtgatttaactaaaacgcctgaaatggggcgagttgcctgtcgtgcagattatgtcattttcacaccggataatccggcaaatgatgacccgaaaatgttaacggcagaattagccaaaggtgcaacacatcaaaactatattgaatttgatgatcgtgcagaagggataaaacatgcaattgacatagctgagcctggggatactgtcgttttagcatcaaaaggaagagaaccatatcaaatcatgccagggcatattaaggtgccacatcgagatgatttaattggccttgaagcagcttacaaaaagttcggtggtggccctgttgattaa

SEQ ID NO: 405369 - DNA, 1176 bp, Staphylococcus aureus
atggttactcaaaataaaaagatattgattattactggctcattcggtaacggtcatatgcaagttacacagagtatcgttaatcaacttaatgatatgaatctagaccatttaagcgtcattgagcacgatttatttatggaagctcatccaattttgacttctatttgtaaaaaatggtatatcaatagctttaaatattttagaaatatgtacaaagggttttattacagccgcccagataaactagacaaatgtttttacaaatactatggacttaataagttaattaatttattgataaaagaaaagccagatttaatattattaacgtttcctacaccagttatgtcggtactaactgagcaatttaacattaatattccagttgctacagtgatgacagactatcgcttacataaaaactggattacgccgtattcaacaagatattatgtggcaacaaaagaaacgaaacaagacttcatagacgtaggtattgatccttcaacagttaaagtgacaggtattcctattgataacaaatttgaaacgcctattaatcaaaagcagtggttaatagacaacaacttagatccagataagcaaactattttaatgtcagctggtgcatttggtgtatctaaaggttttgacacgatgattactgatatattagcgaaaagtgcaaatgcacaagtagttatgatttgtggtaagagcaaagagctaaagcgttctttaacagctaagtttaaatctaacgagaatgtattgattctaggttataccaaacacatgaatgaatggatggcatcaagtcaacttatgattacgaaacctggtggtatcacaataactgaaggtttcgcccgttgtattccaatgattttcctaaatcctgcacctggtcaagagcttgaaaatgccctttactttgaagaaaaaggttttggtaaaatcgctgatactccagaagaagcaataaaaattgtagcaagtttaactaacggtaatgagcaattaactaacatgattagtacaatggaacaagataaaattaagtatgctacacagacaatatgtcgagacttacttgatttaatcggtcattcatcacaaccacaagagatttatggaaaggttcctttatatgcaagattcttcgttaaataa

SEQ ID NO: 405370 - DNA, 1191 bp, Staphylococcus aureus
atgcaagattcttcgttaaataattacgctaatcataaaaatttcattttaatgcttattatcttatttttaatggaatttgcgagaggcatgtatatcctaagctatattaatttcttgccaacagttacatccattgctgtagcaataacgtctctagcattttcaatacattttattgctgatgcatctacaaactttgttataggatttttactgaaaaaattcggcacaaaaatcgttttaacgactggatttattttagcatttacaagtttatttttagttatttggtttccagcatcaccttttgtaatcatatttagtgctatgatgctcggtattgcagttagtcctatttgggtcattatgttatccagtgttgaagaagataaacgtggcaaacaaatgggctatgtttatttttcatggttgttaggcctattggtaggtatggtttttatgaatctacttatcaaagtgcacccaacacgctttgccttcatgatgtctttagtcgttttaattgcatggatattatattattttgtcgatgtaaagttaacaaattataatactcgtccagttaaagctcaattgagacaaattgttgatgtgacaaagcgccatttattgttgttccctggtattcttttacaaggtgccgcaattgctgccctagttcctatattaccaacatatgctactaaggttattaacgtaagcacaattgaatatactgttgcaatcattattggtggtatcggctgtgcagtttcgatgctatttttatcgaaactaatagataaccgcagcagaaactttatgtatggtgttattctaagcggatttattttatacatgatattaatttttactctatctatgattgttaatattcacatcttgtggattatcgctttagctatcggtctaatgtatggcatcttattaccagcatggaatacctttatggcacgatttatcaaatcagatgaacaagaagaaacttggggtgtttttaatagtatccaaggattcggctcaatgatagggccattatttggcggattaattacacaatttaccaacaatttaaacaatacattttatttctcggcattaatctttttagtcttagctgtattttatggaagctactttatagtaaatagagaaaaagctaagtaa

SEQ ID NO: 405371 - DNA, 510 bp, Staphylococcus aureus
atgattttaggattagcattaattccatcaaagtcatttcaagaagcggtggattcttaccgtaaaagatatgataaacagtattcacgaattaaaccacatgtgacaattaaagcgccatttgaaattaaagatggtgatttagattctgtcattgaacaggttagagctcgtattaatggtataccagcagtagaagttcatgctacaaaagcttctagcttcaaaccaacgaacaatgtgatttactttaaagttgcgaagacggacgacttagaagaattgtttaatcgctttaatggagaagatttctatggagaagctgaacatgtttttgtgccacactttacaatagcacaaggactatctagccaagaattcgaagatatttttggtcaagtagcattagctggggtagaccataaagaaattatcgatgaattaactttgttacgttttgacgatgacgaagataaatggaaagttattgaaacgtttaaattagcttaa

SEQ ID NO: 405372 - DNA, 759 bp, Staphylococcus aureus
atgtcagaatttaaaactggtaagattaataaacatgttttatatagtaatattttaaatagagatgtcacgttaagtatttatttaccagaatcttataatcaacttgttaaatataatgtcattctttgctttgacggattagattttttacgtttcgggagaatacaacgtacatatgaatcgttaatcaaagaagcgcgtattgatgatgcgatcattgttggattccattatgaagacgttgataagcgtagagaggaatttcatccacaaggaagtcgttctcatttaactattcaatcagtcggtaaagaaatattgccatttattgactcgacgttttctacactgaaagtaggtaatgcaaggttattagtaggggatagtttagcgggtagtattgccttattaacggcgttgacctatccaacgatttttagtcgtgtagcaatgttaagtccacattcagatgaaaaagtattagataagctaaatcaatgtgcaaataaagaacaattgacaatttggcatgtcattggtctagatgaaaaagattttactttaccaacaaatggtaagcgtgccgatttcttaacaccgaatagagaattagctgaacaaattaagaaatataatataacttattattacgatgaatttgatggtggtcaccaatggaaagattggaaaccattgctgtcagatatattattgtattttttaagtaaaaacacagatgatcaactttatgaataa

SEQ ID NO: 405373 - DNA, 1569 bp, Staphylococcus aureus
atgattgaaaaattagtaacctttttaaatgaggttgtttggagtaagccattagtttatggtttgctaattactggtgtgctatttacattgcgtatgcgattttttcaagttagacattttaaagaaatgattcgattaatgtttcaaggagagaagtctcctaatggtatttcaagttttcaagcgatagccatgtctttagcaggcagggttggtacaggtaatattgtcggtgtatctactgcaatatttataggaggacctggtgcagtattttggatgtggattactgcgtttttaggtgcaagtagtgcttttattgaatctacacttggtcaaatattcaagagagttgaaaataatgaataccgtggtggaccagcgtattatattgaatatggtattggtggtaaatttggtaaaatttacggaattatctttgctattgttacgattatctcagtaggtctattgcttcctggtgtgcaatctaacgctatagcaagttctatgcataatgcgattcatgttccacaatggttaatgggtggtattgttgtagttattttgggattaattatttttggtggtgtacgtagtattgccaatgttgcaacagccgttgtaccatttatggcaattatttacatactgatggctgtcattatcatttgtatcaatatacaagaagtgccagcgttatttgcattaattttcaaatcagcatttggattacaatctgcttttggtggtatcgttggcgcaatgatagagattggtgttaaacgtggattatattcaaatgaggctggtcaaggtacaggtccacacgcagcagcggcagcagaagtatcacatccaagtaaacaaggtctagtacaagcattttcagtttatattgatacattatttgtatgtactgcaactgctctgattatacttatttctggtacatataatgtgactgatggtacggttaatgcgaatggcacaccgcatttaattaaagatggcggtatttatgttgaaaatgcaacaggtaaagattattcaggtactgcgatgtatgcacaagccggcattgataaagcgttccatggcagtggttatcaatttgatcctactttctctggcgtaggttcgtactttattgcatttgctttattcttctttgcatttactacaattttgtcgtactactacattacagaaacaaatgttgcttatttaacgcgtaatcaaaataatcaagtttcatcgatatttattaatattgctcgtgtgattattttgttcgctacattttacggtgcagttaaaacagctgatgtagcatgggcattcggtgatttaggtgtaggtctaatggcttggttaaatatcattgcgatttggattttacataagcctgccgtaaatgctttaaaagattatgaaattcaaaagaaacgtttaggcaacggttataatgcagtttatcaacctgatccgaataaattacctaatgctgtcttttggttgaagacgtatccagaacgtttaaaacaagcacgtgccaaaaagtaa

SEQ ID NO: 405374 - DNA, 1086 bp, Staphylococcus aureus
atgttaaacaaggtttggttccgaactggcatcgctctgattatgctgttcattctcatcaaactatttatggaagtgcacgaagtatttactccaatagctacaatcatcggttctgtatttcttccatttttaattagtggttttttattttatatctgtctaccttttcaaaacttacttgaaaaagtcggttttccaagatgggctagtataacaacaatcatgttagctttgtttgctattatcggcttaattgttgcgtttgttgcaccaatcatcatttcaaatatcaacaatttaattagtcagacacctgccctacaaaaagaagcagagcaaattattaaattcgcactagctcaaatggataaattacctgaagatgtaacaagtagaattacaaatatggttaaatcaatgggtgatggcgttactaatattttatctaattcattacagtacattacatcattaatttcaaccatcttcttattgattatggttccattcttcttaatttatatgttaaaagaccatgaaaaatttatcccagctgttgctaaatttttcaaaggtgaacgtaaagtatttttcgtagatttattaactgatttaaactttacattaaaatcttacattcaaggtcaagtaactgtcagtgttattttaggtatattcttatatatcggttattcaattattgacttaccatatattcctttattagtactatttgctggtgtcgcaaacttaattcctttcttaggttcatggttatcatttgcacctgcagcaatactcggtattatagatagtcctactacatttatatgggtttgtatcattacattaattgcacatcaacttgaaggtaatatcattacaccaaatgtaatgggtaaatctttaagtatccatcctttaacaattatcgttgttattttagcagcaggagatttaggtggctttacattagttctgattgcagtgccattatatgctgtacttaaaacggttgttagtaatattttcaaataccgccaacgcattattgataaagcaaacagtaatgttaaggactaa

SEQ ID NO: 405375 - DNA, 771 bp, Staphylococcus aureus
atgttaaatcttgaaaacaaaacatatgtcatcatgggaatcgctaataagcgtagtattgcttttggtgtcgctaaagttttagatcaattaggtgctaaattagtatttacttaccgtaaagaacgtagccgtaaagagcttgaaaaattattagaacaattaaatcaaccagaagcgcacttatatcaaattgatgttcaaagcgatgaagaggttattaatggttttgagcaaattggtaaagatgttggcaatattgatggtgtatatcattcaatcgcatttgctaatatggaagacttacgcggacgcttttctgaaacttcacgtgaaggcttcttgttagctcaagacattagttcttactcattaacaattgtggctcatgaagctaaaaaattaatgccagaaggtggtagcattgttgcaacaacatatttaggtggcgaattcgcagttcaaaactataatgtgatgggtgttgctaaagcgagcttagaagcaaatgttaaatatttagcattagacttaggtccagataatattcgcgttaatgcaatttcagctggtccaatccgtacattaagtgcaaaaggtgtgggtggtttcaatacaattcttaaagaaatcgaagagcgtgcacctttaaaacgtaatgttgatcaagtagaagtaggtaaaactgcggcttacttattaagtgatttatcaagtggcgttacaggtgaaaatattcatgtagatagcggattccacgcaattaaataa

SEQ ID NO: 405376 - DNA, 1845 bp, Staphylococcus aureus
atggagtttttatctttagttattgttgttttagcagcgtttttaactccaataattgtcaatcgattaaatattaatttcttgccagttgttgttgcagaaattttgatggggattgtgattggaaattcatttctaaatatagtagaaagggattcaattctaaatattttatcaacgttaggctttatctttttaatgtttttaagtggtttagaaattgattttaaagcttttaaaaaagataaacgcgcacgtcaaggacaaaatgatgatgaatcctcaattccagggcatcttaatctagcgttaactgtatttgcatttattatgattatttcgattcttttagcgtatgtatttaaatggcttggattagtggatgatgtgttattaatggtcattatcatttcaactatttccttaggcgtagttgttccaactttaaaagaaatgaatattatgagaacaactatagggcaatttatcctattagtagcagtacttgcggacttagtaactatgattttattaacggtctatggcgcaatcaatggtcaaggcggcagtacaatatggttaataggtatattagttgttttcacagcaatttcatatattttaggtgttcaatttaaaagaatgtcatttttacaaaaattgatggatggtacgacgcaaatcggtattcgtgcggtatttgcattaataatattattagtagccctagcagagggagttggcgcagaaaatatattaggtgcattcttagcaggtgtcgttgtttcattattaaatccagatgaagaaatggttgaaaagttagactcatttggttatgggttctttattcctattttctttataatggttggtgtagatttaaacataccttcattaattaaagaaccgaaattactaattatcataccgattttaatcgttgcatttatcatttcaaaattaattccagtcatgtttattcgacgttggtttgatatgaaaacaacgattgcatcagcatttttattaacatcaacattatcgctcgtgatagctgcagccaaaatttcagaaagattaaatgctatttcagctgaaacgtcaggtatattaattttaagcgcagtcattacatgtgtattcgttccgattattttcaaaaaactgtttccagttccagatgagtttaaccgtaaaattgaagttagtttaattggtaaaaatcaattaacgattcctatagcgcaaaatttaacatctcagttatatgacgtgacattatattatcgcaaagacttgagtgatcgtcgtcaattgtcagatgatatcacgatgatagaaattgctgattatgaacaagatgttttagaacgactaggtctgtttgaccgagacatagttgtttgtgctacgaatgacgatgatattaaccgaaaagttgctaaattagccaaagcacatcaagttgagcgtgtcatttgcagacttgaaagcacaacggacgatacagagttagttgattcaggtattgaaattttcagtagctacttaagtaataaaatcttattaaaaggtttaattgaaacacctaacatgttgaatttattaagtaatgttgaaacgtcactatatgaaattcaaatgttaaattataaatatgaaaatattcaattacgtaatttcccattcggaggagacatcatcttcgtgcgtattatccgtaataatgagtcgattgttccgcatggagatacacaattgcgatatggagatcgcttaattgttaccggtgctaaagaatacgttgatgaattgaagcaagagttagaattttatttttaa

SEQ ID NO: 405377 - DNA, 1386 bp, Staphylococcus aureus
atgtcaatgaacacagatgaaaaagagcgtgttcaagaggaattatacgaccaaactttattagatcaatatttagaaaatgatgatattgatcaatttagagatgaatttctagcattacacacatatgaacaaagtgagtattttgaagatactaccgatgaaaatagacaaaagatttttcaatatttatcacctgaagaagttgcaaatttctttgatcaattagatattgatgacgatgaatatgagttgctatttgataagatgaatgcgacatacgcaagtcacatattagaagaaatgtcatacgacaatgcagtagatattttaaatgagttgactaaaccaaaagttgctagtcttttaacattgatgaataaagatgacgcgaatgaaatcaaagcattacttcactatgatgaggatacggccggcggtattatgacgacggagtatttatcacttaaagcgcatacgcctgttaaagaagcattattattggtcaaagcgcaagcaccagacgcagaaacaatatatgttatatttgtcgttgatgatgatggtaaattagtaggtgttttatcgctaagagatttaattgtagctgaaaatgatgcttatattgaagatattatgaatgaacgtgtcattagtgtgaatgtagcagacgaccaagaagatgttgctcaagttatgagagactatgatttcatggctgtacctgttatagattaccaagaacatttgcttggtatcatcacgattgatgatattttagacgttatggatgaagaggctagtgaagactactctcgtttagccggggtatcagatatcgattcgactaatgattcaatcattaaaacagcattaaaacgtttaccatggttgattattttaacatttttaggaatgattactgcgacaattttagggagattcgaaaaaacattagaaaatgtagcgctactcgcagcgtttattcctattattagtggtatgtcaggaaattcaggtacacaatctttagccgtttcagttcgtaacattacgacaggggaaattaatgagcaaagtaaatttagaattgcattaagagaagcaggaagtggtgtattatcgggtgttgtatgttcaacaatattatttacaattattgttgcaatatatcatcagccacttttagcattaatcgttgcaggaagtttaacttgtgcgatgacggtggggacgtttgtaggttcgatgattccattattgatgaataaattaaatatcgatccagcagtggctagtggaccatttattacaacaattaatgatattattagtatgttgatttattttggtttagctacatcatttatggcttacttaatttaa

SEQ ID NO: 405378 - DNA, 855 bp, Staphylococcus aureus
atgaaatttaagtatcatatatcacaacaagaaactgttaaaacttttttagcacgacatgatttttctaagaagacagtgagcgccattaaaaataatggcgctttaattgttaatgatgaaccagtcacagtgcgtaagcaattaatgacaaatgatatattagaaattcatttaccgcgagaaataccgagtgttaatttaataccttatgctcgtaagctagaagtattgtatgaagatgcttttatcatcatagttactaaaccaaacaatcaaaattgtacgccttcgagagaacatcctcatgaaagtttaatcgaacaagtactatatcattgtcaggaacatggtgaaaatattaacccacatattgttacgcgtctagatcataatacaactggtattgtgatattcgctaaatatggacatatccatcatttattttctaaagtaaacttgaaaaaaatatatacttgccttgtatatggtaaaacccatacatctggtattattgaagctaatattagacggtcaaaggataggattataactagagaagttgcctcggatggtaaatacgctaaaacatcttatgaagtaataaatcagaatgataaatacagtttatgcaaagttcatttgcatacgggacgtacacatcaaattcgtgtacattttcaacatattgggcatccaattgtgggagattctttgtatgatggttttcatgacaaaattcatggtcaagtactgcaatgtacgcaaatatattttgttcatccaatcaataagaacaatatttatattacaattgattataagcaattacttaaattattcaatcaactctaa

SEQ ID NO: 405379 - DNA, 810 bp, Staphylococcus aureus
atgcgttatacaattttaactaaaggtgactccaagtctaatgccttaaagcataaaatgatgaactatatgaaagattttcgcatgattgaggatagtgaaaatcctgaaattgttatttcagttggtggtgacggtacattactacaagcattccatcagtatagccacatgttatcaaaagtggcatttgttggagttcatacaggtcatttaggattttatgcggattggttacctcatgaagttgaaaaattaatcatcgaaattaataattcagagtttcaggtcattgaatatccattgcttgaaattattatgagatacaacgacaacggctatgaaacaaggtatttagcattaaatgaagcaacgatgaaaactgaaaatggctcaacacttgttgtggatgttaacttaagagggaaacactttgagcgatttagaggcgatggattatgtgtatcaacaccttcgggttcaacggcttataacaaagcgctaggtggcgcactgatacatccttcacttgaagcaatgcaaattacagaaattgcctcgataaataatcgtgtgtttagaacggtaggatcaccacttgtattaccaaagcatcatacatgtttaatatcaccagttaatcatgataccattagaatgacgatagatcatgttagtatcaaacataaaaatgttaattcaatacaataccgtgtagcaaatgaaaaagtgaggtttgcacgttttagaccattcccattctggaaacgtgtgcacgattctttcatatcaagtgatgaagaacgatga

SEQ ID NO: 405380 - DNA, 636 bp, Staphylococcus aureus
atgaatcaatgggatcagttcttaacaccttataagcaagcggttgatgagttgaaagtgaaacttaaaggcatgcgcaaacaatatgaagttggtgaacaagcgtcgccaatagaatttgttactggtcgtgttaaaccaatcgctagtattatagataaggcaaacaaacgacaaataccatttgataggttaagagaagaaatgtacgatatcgctggtttaagaatgatgtgccaatttgttgaagatattgatgttgtcgtcaatattttaagacaaagaaaagattttaaagtaattgaagaacgagattatattcgtaacactaaagaaagtggttaccgctcgtatcatgtcattattgaatatccaattgaaacattacaaggccaaaaatttatattggctgagattcagattcgtacattagcaatgaatttctgggcaacgattgaacatactttacgatataaatatgatggtgcttatccggatgaaattcaacatcgtttggaaagagcggcagaagcagcgtatttacttgatgaagagatgtctgaaattaaagatgaaattcaggaagctcaaaaatattacacgcaaaaacgttctaaaaaacatgaaaatgattaa

SEQ ID NO: 405381 - DNA, 348 bp, Staphylococcus aureus
atgcgtttatatattaatgaaattaaaattaaagatgacatactttattgttatacagaagattctattaaaggattatctgaagtaggacaaatgctcgttgatagtgataattatgcctttgcgtatacattagatgatggtaaagcgtatgcttatctcattttcgtacaagaaacatggacgatgttgcatgaaaacatgactaaaaaaattattatcaatgatgaactagaattgactgaattccaccaagaacttacttatattttagacaacataaaagggaataataattatggtaaggaatttgttgcaaccgttgaagaaacattcgacattgaataa

SEQ ID NO: 405382 - DNA, 594 bp, Staphylococcus aureus
atggcaacaaatcatgaaatagaatttaaacaaatgataactgcatcaatctataataaattgcaagagaaatattttaaagacagtgtgctttttaagcaagtcaattactatattgatacacccgatttcaaattaaaggaacatcgctctgcactacgcataagagttaaagacaatcaatatgaaatgactttaaagacaccagcaaaggttggtctattagaatacaactatatcgtcgacattaaaccagagatgaacttgattatttcaaacgacaatcttccagatgacattcgtcaaattatagttgaacagtttggtgtaaaagatacaactttatcaatacttggtgcattaacgacatatcgccaagaaactaaatataaaggtgatttactggttttagataaaagtgagtatttcgatactacggattatgagttagagttcgaagttaaagactataatcaaggtttacaaaagttccaatctttattaaacgaactaaacctcgaacatcatcaacctttaaataaagttcaacgttttttcaagaaaaaagaaacactttcaaacaatataaattaa

SEQ ID NO: 405383 - DNA, 366 bp, Staphylococcus aureus
atgacaacaacaccatatgacatcattggtaaagaagcgttatacgatatgattgattatttttacacccttgtagaaaaagatgaacgacttaatcacctgtttccaggagattttgcagaaacaagtcgtaaacaaaaacaatttttaacacagtttttgggcggtccaaacatttataccgaagaacacggacatcctatgctaagaaaaagacatatagattttacaatcactgaatttgaaagagatgcatggttagaaaatatgcagacagcaattaatcgcgctgcgtttccacaaggtgttggagattatttatttgagcgcttaagattaactgctaatcatatggtgaattcctaa

SEQ ID NO: 405384 - DNA, 807 bp, Staphylococcus aureus
atggctggagaattacgaataatggaaaataagagtcgtgaagatatcaatctatcacctgtaagtaaaatcgaaatttattcatttttcgatccatttagctccgattgcttcaaattatcagcaatcttatccaaattaagaattgaatataatcaatatatacgtatcagacatatattaaatccttcgttaaaagtattaacgaaatgccaagctcaaagtacatccaactttgataacatcgccctagcttataaagcagctgagttacaaggtcgtgtacgtgccgaacgatttatacatttaatgcaaaatgaaatcatacctaaaagagatattattacagaatcaatgatttgtgactgtattcaaaatgcaggtattgatttagaagtatttaaagacgacttacaaaaaagtaaactaaccgaaagcttgaaaattgatttgcatattgcaagagaaatggaaatcgaacaagccccttctctcgttttctttagtgaagatgttcatgaagaaggtttaaaagtcgaaggattatacccatatcacatctatacttatataattaatgaattgatgggtaaacctatcgaaaagaatcttcctcctaaattagaaacttatatacagcaacaacaacttgtaacgatggaagaattacttactatttatgaatggccagaaaaacttttaaacaaagagttaaagaagttagccattcaacaaaaaattgaaaaacttaaatatccagatggcgatttctggaaatctaaaatgcctaaaatcaaatcaaaataa

SEQ ID NO: 405385 - DNA, 1809 bp, Staphylococcus aureus
atgagtcaacaattatcgagagaagaacaggaacgtaaatatcctgaatatacatgggacttaacaacaattttcaaagatgatgaagcttttgaggctgcatttaaagaagttgaaaatgagttaggcaaagaagaacaatttaaaggacacattggtgatagtgctgagacattatacaatgcgttagaattagaagatacattaggtactaaattagaaaaagtatatgtatacgcgcacctaaaacaagaccaagatacaacgaacgacaagtatactggtatggagtcaagagcacatcaattaattattaaatttagctcggcatggagtttcttagtgccagagattttacaaattgatgaagataaaattcaatcatttgtaaattcatatgataaattacaaaaattcgcatttgatttgaagttgattaatgaaaaacgtcctcatattttagatgctgaaactgaaaagttattaacagaagcgcaggacgcgttatcaacgccatcaaatgtatacggtatgtttagcaacgctgatttagtatttgaagatgcgatagataaagatggaaatgcacacccgttaacacaaggtacatttattaagtatttagaaacagatgatcgcaaactaagagaaagtgcttttagaaatgtatataaagcatatggtgctcataataatacgcttggcgctacgctagcaggtgaagtgaagaaaaatgtatttaatgctcgtacacacaattacaaaactgcaagagaaaaagcattgagtaataatcatattccagaaaatgtatatgacaatctagtaaaaactgtacataaatatttaccattgctacatagatatactgaattgcgcaaagaattgctaggtttagatgacttgaaaatgtatgatttatatacaccattaattaaagatattaagtttgaaatgccttatgaagaagctaaagagtggatgttaaaagcattagaaccaatgggtgaagaatatttaaatgtagttaaagaaggcttaaacaatcgttgggtcgatgtctatgagaataaaggtaaacgttcaggtggctattcatcaggtgcacatttaactaatccatttattctacttaactggtctaatactatttcagacttatacacattagttcatgaatttgggcattcagcacatagttacttcagtagaaaattccaaccgtcaaattctagtgactacactatttttgtcgctgaagttgcatcaacttgtaacgaagcacttttaagtgattatatggataaacatcttgatgatgaaaaacgcttattattattaaaccaagaattagaacgtttcagagctacattattccgacaaacaatgttcgcagaatttgagcataaaattcatgcaattgaagaagcaggtgaaccattaacgccaactagaatgaatgaagaatatgccaaattaaataaattatacttcggtgattctgtagaaactgatgaagatattagtaaggaatggtcacgtattccacacttctatatgaattattatgtatatcaatacgcaactggttacagtgcagctcaaagcttaagtcatcaaattttaacagaaggtaagccagcagtagatagatatattaatgaattcttgaaaaaaggtagctcaaattatccaattgagatattaaaaaatgctggtgtagatatgacaacacctgaaccaattgaacaagcttgtgaagtttttgaacaaaaattgaacgcttttgaaaaattaatgaaagcttag

SEQ ID NO: 405386 - DNA, 615 bp, Staphylococcus aureus
atgggatataaagtaagttggttattaaatgatgttgattattgtcataataaagtgaagttcaatcattttcaaagtatgtttattaatccattcactcgaaaacttcatacgttcaatttagagaaaaaacaaataatgatgtttcaacaaatacaatatttaggcgggcacaaatatgtcgctgaaaaaagaaatgccaaaattagtgagttgtttaatgaggcgccttgtgattatcatgctgtttataaattatcaaagttcgcaattaatcaatatatcaaatattgtcgctggcaaaattctgttttagaacccactttaagtgcaatgtatcaattacagttaactgatcaagaagtagtgcacaattatggttatatttttccagagcaaatttatattaaaaatcatcctattgagtggcaattacaagttgatttatggttaaagaatggaaaaagcaaattagtaaatgacaatcttaattattttaaactgaaaaaatttattgttgctctagaaagtaaaacagcaattatagaaaaacttattaacaattatttaaatatttgttcagataaaggtaatgacgtgcaaattttgttctaa

SEQ ID NO: 405387 - DNA, 258 bp, Staphylococcus aureus
atgttagtagctttaaatgaagaaaaggaacgcgtattagcaactactgcattgagaaagacacaatatttttgtccggtgtgtggcaagcaagttattttaaagcgtgggctcaaagtaattagtcattttgcacataaacatttagcggaacaaaaatgttttaataatgaaacgattaaacattataaaagtaaattgattttagcacagatgatacagcaacaaggatgtaaagtagagatagagccattttaa

SEQ ID NO: 405388 - DNA, 720 bp, Staphylococcus aureus
atgagaatagaacgagtagatgatacaactgtaaaattgtttataacatatagcgatatcgaggcccgtggatttagtcgtgaagatttatggacaaatcgcaaacgtggcgaagaattcttttggtcaatgatggatgaaattaacgaagaagaagattttgttgtagaaggtccattatggattcaagtacatgcctttgaaaaaggtgtcgaagtcacaatttctaaatctaaaaatgaagatatgatgaatatgtctgatgatgatgcaactgatcaatttgatgaacaagttcaagaattgttagctcaaacattagaaggtgaagatcaattagaagaattattcgagcaacgaacaaaagaaaaagaagctcaaggttctaaacgtcaaaagtcttcagcacgtaaaaatacaagaacaatcattgtgaaatttaacgatttagaagatgttattaattatgcatatcatagcaatccaataactacagagtttgaagatttgttatatatggttgatggtacttattattatgctgtatattttgatagtcatgttgatcaagaagtcattaatgatagttacagtcaattgcttgaatttgcttatccaacagacagaacagaagtttatttaaatgactatgctaaaataattatgagtcataacgtaacagctcaagttcgacgttattttccagagacaactgaataa

SEQ ID NO: 405389 - DNA, 396 bp, Staphylococcus aureus
atggtaacattatttacttcaccaagttgcacatcttgccgtaaagcgaaagcatggttacaagaacatgacattccgtatacggagcgtaatattttttctgaacatttaacaattgatgaaattaagcaaatattaaaaatgactgaagacggtactgatgaaatcatttctacacgttctaaaacataccaaaaattaaatgttgatattgattcactaccattacaagacttatattcaatcattcaagataatcctggcttattacgtcgtccaattattttagataataaacgactacaagttggttataatgaggacgagattcgacgtttcttacctagaaaagttcgtacgttccaattacaagaagcacaacgtatggttgactaa

SEQ ID NO: 405390 - DNA, 990 bp, Staphylococcus aureus
atggagacattattttcaggcatccaacctagtggaattcctactattggaaattatattggcgcactaaaacaatttgttgatgtgcaaaatgactatgattgttatttctgtatcgtagatcaacatgcaattacaatgccacaagatcgtttaaaattacgtaaacagaccagacaattagcagcgatttatttagcttctggtatagatccagacaaagcaacattgttcatacaatctgaagtccctgcacacgtacaagcaggatggatgttaactacgattgcttctgttggagaattagagcgtatgacgcaatacaaagataaagctcagaaagcagttgaaggtatacctgctggtctattaacatatccacctttaatggcagctgatattgttctttacaatactaatatcgttccagttggagatgaccaaaagcagcatatcgaattgactcgtaaccttgtagatagatttaatagtcgctataatgatgtgcttgtgaaacctgaaattcgtatgcctaaagttggtggacgtgtcatgagtttacaagacccaacaagaaaaatgagtaagagtgatgataatgctaaaaacttcatttcattattagacgagccgaatgttgcagctaaaaaaattaaaagcgcagtaactgattcagatggtattattaaatttgatcgtgacaacaagccaggtataacaaatttaatttcaatatacgctggattaacagacatgccaattaaagatattgaggcaaaatatgagggcgaaggttatggtaaatttaaaggtgaccttgctgaaatagttaaagcatttttagtagaattccaagaaaaatacgaaagtttctataactcagataaacttgatgatattttagatcaaggtagagataaagcacacaaagtttcatttaaaactgtcaaaaaaatggaaaaagcgatgggtttaggacgtaagagataa

SEQ ID NO: 405391 - DNA, 882 bp, Staphylococcus aureus
atgcaaaataagtcaaaatcgccttttaaaattgcattttctaaatttattcataataaaattgcaatgttatcggttatttttttattaatcataactattgtatcaattatagcgccattaatagctccttttccagtgaaccaacaagatttattaaatataaaaggtgaaatgacagcacaaaacattcttggtacagactctggtggtagggataactttagtcgtttgttatatgcaggtcgtatttcattatccattggaattacatctacaataggaatgcttttgattggaattacagttggagtgatttctggttattttggaggtattgttgatacattattaatgagaataaccgaatttgttatgttatttccatttttaatatttgcaattgtattaaatgctgcacttggagataaaattaaaaatccttatggatctgccataattcttgttctagttattatcgtattaagttggggaggtattgcaagacttgttcgtggtaaagtacttcaagaaaaagaaaatgaatactttttggcagcaaaatcaattggtacacccacatataaaattattttgaaacatcttttgccgaatatattaagtgtagttatcgtacaagcaacattgttatttgccggtatgattgtagtggaatcaggattgagctttttaggattcggaattagtaaagcaataccatcttggggtaatatgttgagtgatgctcaagaaggggatgttataagtggtaaaccgtggatatggatgccacctgctataatgattacattaactatattaagtataaactttgtaggggaagggattaaagatgcttttaatcctagaggtagacgttaa

SEQ ID NO: 405392 - DNA, 963 bp, Staphylococcus aureus
atgattaaattaatacttaaaagattagggttaatgatcccgttactaattttaatctcaatagttgtattttcattagcaatcatacaaccaggagatccattttcagatctacaaaacggtaaaataaaacaagaagcaataaatgcacaaagggaaaaattaggtctcaacgactcaataccacatcaatacattagatgggtcaatcatgttatacacggtgatttaggggagtcaatcaaatataaaaggccggtaattgatgttattgaggaaagaattccaaatacaatattactcggtgctatgtcattaattattacttatattatctcatttgctttaggaataacgtcaggtagatattcttacagtttgacggattatactgtgcaaatatttaattatttgatgttagccattccatcttttattgcgggagtatttgcaatttttattttttcttttgaattacaatggttcccgtttcaaggttctgttgatattaaccttaaagaaggtacttttgaatattatatgagtaaaatatatcacacatttttacctgcattcactttaggtttattatctactgctggttatattcaatatttacgtaatgatattattgaaaattctaaaaaagattatgtattgacggcaaggtcaaaaggattatctatgaataaaatttataataaacatatattgagaaattctctaatacctattattacatttttaggtgctgatattgtaagtattttaggtggagccgtgattacggagactatcttttcatataacggtatcggtaaattatttttagaatcggtaataggccaagactatccattaatgatggcattaacgttatttttctcatttttaggtttactgggtaatttgatttctgatattacttatggatttatagatccaagaattagaagtaactag

SEQ ID NO: 405393 - DNA, 981 bp, Staphylococcus aureus
atggaaaatattttagaagtcaaccaaataaaaaaatactacaaaattaaaactggattattacaaaaaactcagtacgttaaagctgttgatgacgtatcgttttcaataaaaaaaggacaaacttttggattagtaggagaatcgggttgtggtaagtcaacgttaggtaaagtgattatcaggcttgaagatgcaacttcaggctcaataattgttaatggtgaagatataacaagattacaaggtaaaaaactcagaaaatcacgacaacaatatcagatgatatttcaagatccgtatgcatcattgaatccgatgcaaatggttggagatatcatttcagaacctattttaaattataaaaaattgccaaaagaagaaataaaaaaagaagtactatatttattaaaatgtgttggcctaagtgaagatgcatattataaatatgcacatgaattttcaggtggacagagacaaagagtgggaattgcaagagcattggctttgcgtccgagtttaattgttgctgatgagcctgtaagtgcattagatgtatctgttcaatctcaagtactgaatttattaaaagatttacaagaacaatttaacttaagctatttatttatcgcacatgatttaagtgtagtaaaacatataagtgatgtcattggagttatgtatttaggtcatatagttgaaatcgcatctgataaagaaatttatgaaaatcccaaacatccatatacaaaagcgttgatttcatcaataccacaaattgataaacataataacaatagaattatattaaaaggagaattaccttcgccaagtaatccgccgcaaggttgtccttttcatacaagatgtccaattgctcaagatatgtgcaaaaaaagtatgccagaattaaaggacattggtaatgaacatcaagttgcttgtttctacgtagataaagtaggtgatttaaatgattaa

SEQ ID NO: 405394 - DNA, 987 bp, Staphylococcus aureus
atgaataatgtattgttagaggttaaagatttagaaacatcattaaaaataaataatgaatggttagcaactgttgaaaatatttcttttgaattatctaaaggagaagttttgggtatagtaggggaatctggttgcggtaagtccatattaagtaagtcaattattaaattattaccagaaaagatatctaaactaagtaatggagaagttatatttgatggtaaacgaatcgatacgctcaatgagaagcaattgctagatattcgaggaaatgatattgctatgatttttcaagaacctatgactgctttaaatcctgtatttaccataaaaaatcaacttgtggaatctataaaatcacataaaaaaatttctaaaaaagaagcaaataaattagcaaaagatttactaaaaaaagttggaattgctagacaagatgaaatattaaatagctatcctcatcaattatctggtggtatgagacaaagagtaatgattgcaatggccatttcatgttctcctaaattattaattgctgatgaacctacaacagcattggatgtcacgattcaagcgcaaatattagacttattaaaagaattgcaaaaggaaacgcaaatggcaattatgatgattacacatgatttgagtgtagttgctgagttttgcgataaagtcttagttatgtatgcaggtcaaattgtagaatttggaggcataaaagaaatactacacaatccgaaacatccttatacccaaaaattattatcaacaattccaaaacttaaagaagagcagaaacgacttgaaacgatagaaggaattgtgccatcaatccaagcatttcacgttaataagtgcagatttgcaaatagatgtaacaaaaaactggatatttgtaataatcaatctcctaaaatgcatgtttgtgaagatgtcattgtacgttgtcatttgtacaaaaatgaatataaggagatataa

SEQ ID NO: 405395 - DNA, 1716 bp, Staphylococcus aureus
atggggaagctaattaaatatatttcaatacttcttattgtcgttttagtgttgagtgcttgcggaaaaagcagtaataaagatgaaggagtaaaagatgctactaaaacggaaacctcaaaacataaaggtggtaccttaaatgtagcattaacagcaccgccaagtggtgtttattcttcgttattaaatagtacacatgcagattctgtagttgagggatattttaacgaaagcttattagcaactgataaaaaaatacgtcctaaggcatatattgcttcatggaaggacatcgagccggctaagaaaatagaatttaaaattaaaaaaggtattaaatggcatgatggtaatgaattgaaaattgatgattggatttattcaattgaagtcttagctaacaaggactacgaaggtgcttattatccaagtgtagaaaatatccaaggtgcgaaagattatcatgaaggaaaaactgatcatattagcggattgaagaaaatagatgactacactatgcaggttacatttgataaaaaacaagaaaattacttaacaggatttattactggacctttattaagtaaaaaatatttatcagatgtaccaattaaagatttagcgaaatcagataaaatccgaaaatatcctattggtattggaccgtataaagttaagaaaatcgttccaggtgaggctgttcaactcgttaaatttgatgattattggcaaggtaagcctgcactagacaaaatcaatttaaaagttattgatcaagcgcaaattattaaggcaatggaaaaaggcgatattgatgttgcgaatgatgctaccggtgcaatggcaaaagatgctaagtcatctaatgctggtctcaaggtattatctgcgccaagcttagactacggtttaataggattcgtatctcatgattacgataaaaaagctaataaaactggtaaagtgagaccaaaatatgaagacaaagaattacgtaaagcaatgctttatgcaattgatagagaaaaatggatcaaagcgtttttcaatggttacgctagtgaaatcaatagttttgtaccatctatgcattggatagcagccaatcctaaggacctaaatgattacaaatatgatcctgaaaaagctaaaaaaatcttagataagttaggttataaagatagagatggtgacggatttagagaagatcctaaaggtaataaatttgagattaactttaaacattattcaggttctaatcctacttttgaaccaagaactgctgcgataaaagatttctgggaaaaagttggcttgaaaacaaatgtgaagttagtagaattcggtaaatataatgaagacttagcaaatgcatctaaagatatggaagtgtacttcagatcatgggcaggaggtacagatccagatccatcagatttataccacactgatagacctcaaaatgaaatgagaacagttttaccaaaatcagatcaatatttagatgatgcattagacttcgaaaaagtaggcattgatgaaaagaaacgtaaagatatttatgttaaatggcaaaaatatatgaatgatgagttacctggattaccaatgttccaaggtaaatcgataactattgttaacgataaagtacgaaacttagacattgaaattggaactgatcaaagtttatataatttaactaaagaagcttag

SEQ ID NO: 405396 - DNA, 1656 bp, Staphylococcus aureus
atgacgagaaaatttagaacacttattttaattttgattgctacaattgcattaagtggttgtgctaatgacgatggtatttattcagataaaggtcaagtattcagaaaaattttgtcatcagacttaacatcccttgatacatcattaataacggatgaaatatcttctgaagtgactgcgcaaacattcgaaggtttatacacattaggaaaaggtgacaaaccggtgttaggtgttgcgaaagcttttcctgaaaagagtaaagatggtaaaactttaaaggttaaattaagaagcgatgctaaatggagcaatggtgacaaagtgactgcacaagactttgtttatgcttggagaaaaacagttgaccctaaaacaggttctgaatttgcatacattatgggggacattaaaaatgcgagtgatattagtactggtaagaaacctgtagagcaattaggtatcaaagcattaaatgatgaaacattacaaattgaattagaaaagccggttccatatattaatcaattattagcacttaatacctttgcacctcaaaatgaaaaagttgccaaaaaatatggtaaaaattacggtacggcagctgatagagcggtatacaatggtccatttaaagttgatgattggaaacaagaagataaaaccttactatctaaaaatcagtattattgggataaaaagaatgtaaaattagataaagtgaattataaagttattaaagacttacaagccggtgcatcattgtatgatactgaatcagtagatgacgcagttattactgcagatcaagtaaataaatataaagacaacaaaggattaaactttgtgttaacgactgggacattttttgtaaaaatgaatgaaaaacaatatcctgattttaaaaacaaaaatttaagattggctatcgcacaagcaatagataaaaaaggatacgttgattcagtgaaaaacaatggctcaattccttccgatacactaacagccaaaggaattgcgaaagcgcctaatggcaaagattatgcgagaaccatgaattcgcctttaaaatataatcctaaagaagcaagagcacactgggacaaagctaaaaaagagttaggtaaaaatgaagtgacattttcaatgaacacagaagatacaccagatgcaaaaatatctgctgaatatatcaaatcgcaagttgagaaaaatttaccaggagttactttgaaaattaagcaattaccgtttaaacaaagagtatcactagaactgagtaacaattttgaagcatcacttagtggttggtctgcagattaccctgatcctatggcttatttagaaacaatgaccacaggtagcgcacaaaataatacagactggggtaataaagaatatgatcaattacttaaagtagcaagaaccaaattggcacttcaaccgaacgaacgatatgaaaacttgaaaaaagcagaagaaatgttcctaggagatgcaccggtagcaccaatttatcaaaaaggtgttgcacatttaacaaatcctcaagtaaaaggattaatttaccataaatttggtccaaataactcacttaaacatgtatatattgataaatcgatagataaagaaacaggtaagaagaaaaaataa

SEQ ID NO: 405397 - DNA, 942 bp, Staphylococcus aureus
atgaaaaatgatgaagtgctattatctattaaaaatttaaagcaatattttaacgcaggaaagaaaaacgaagtgagagcgattgaaaatatttcgtttgatatatacaaaggggaaacattaggtttagtaggagaatcggggtgtggtaaatctacaactggtaaatcaattattaaacttaatgatattacaagtggagaaattttgtatgagggtattgatatacaaaagattcgtaaacgtaaagatttgcttaaatttaataaaaagatacagatgatttttcaagacccatatgcgtctttaaatcctaggttaaaagtaatggatatagtagctgaaggtattgatatccatcatttagcaactgataagcgtgaccgaaaaaaacgtgtctatgatttacttgaaactgttggattaagtaaagaacatgccaatcgctatcctcatgaattttcaggtggacaacgccaacgtattggaattgcccgtgcattagccgttgaaccagaattcattatcgcggacgaaccaatatcggcattggatgtttcaatccaagctcaagtagttaatttattattaaaattacaacgtgaaatagggattacgttcctatttatagctcatgatctatcaatggtgaagtatatttcagatcgtattgcagtcatgcattttgggaaaatagttgaaattggaccggcagaagaaatttatcaaaatccattacacgattatactaagtctttattatcagccattccacaacctgatcctgaatcagaacgcagtcgcaaacgatttagttatattgatgatgaagcaaataatcatttaagacaattacatgaaattagaccgaatcactttgtctttagtactgaagaagaagcggcacaactacgagaaaataaattggtgacacaaaattaa

SEQ ID NO: 405398 - DNA, 1083 bp, Staphylococcus aureus
atgactgaaagaatattagaagtaaatgatttgcatgtttcctttgatattacagcaggggaagtgcaggcagtgagaggcgtagatttttatttgaacaaaggggaaacattggcaattgttggtgaatcaggttcaggtaaatctgtaacaacaaaagcaattacaaaattattccaaggggacacaggaagaattaaaaagggagaaattttatttttaggggaagatttagcaaaaaaacctgaaaatgagttgattaaattacgtggcaaagatatttcaatgatctttcaagatccaatgacatctttaaacccaacgatgcaaattggtaaacaagtcatggaaccattaattaagcacaaaaattatagtaaagcacaagctaaaaagcgcgcattggaaatactaaatcttgtaggtttaccaaatgcagaaaaaagatttaaagcatatcctcatcaattttcaggtggacaaaggcaaagaattgttattgcaaccgcattagcttgtgaacctaaagtgctcattgctgatgaaccaacgactgcattagacgtaacgatgcaggcacaaattttagatttaatgaaagaactacaacaaaaaatcgatacagcaattatttttataacgcatgatttaggggttgttgcgaatattgctgatagagtggcagttatgtatggtggtcaaatggttgaaacaggagatgttaacgaaatattttatgatccaaagcatccatatacatggggattattatcgtcaatgcctgatttatcaacaacaaatgacacaccattactagcgattcctggagcgccacctgatttattacacccacctaaaggtgatgcatttgcgagacgtagtcaatatgcattagatattgattttaaagtagaaccaccgtggtttaaagtttcaccgacacattttgtgaaatcttggttattagacgcacgtgcaccaaaagttgaactacccgagctggtaaaacaacgtatgaaaccgatgcctaataattatgaaaaaccactcaaggtagaaagggtgtcgttcaatgaaaaatga

SEQ ID NO: 405399 - DNA, 1071 bp, Staphylococcus aureus
atggctgaaaataaaaacaatttgtcgattaacgacgatcattctaatgcagctatgacgcatacctctgacgctatcgcatcatctgattttattattagagaattagatttgaatcaggaacctgaaatgcaacgagaaagcaaaaacttttggcaagatgcttgggctcagttaaaacgaaataagttagctgttgtcggtatgataggtttaattatcattgtaatatttgcttttatcggtccagttataaataaacatgattatgctgaacaaaatgtagaacatagaaatcttccggcaaaaatacctgtattagacaaagttccatttttaccttttgatggtaaagatgcagatggcaaggatgcttataaagcagcaaatgctaaagaaaattattggtttggtactgatcagttgggtcgagatttatggacaagaacatggaaaggtgctcaaatttcattgtttatcggtgttgttgcagcgatgttagatatttttattggtgttgtatatggtgcgatttctggattcttcggtggacgtgtcgatacgattatgcaacgtatacttgaagtcatagcatctattccgaatttaattgtcgtaattttatttgtattaatttttgaaccatccatttggacaattatattggctatgtctatcacaggctggttaggcatgagcagagttgtacgtggagaatttttaaaattaaaaaatcaagagtttgtcatggcttcgaaaacattgggggcttcaaaattcaaattgatatttaagcatattttacctaatacattaggtgctatcgtggttacatcaatgtttacagtacctagtgctattttcttcgaagcatttttaagtttcattggtataggtgtacccgcacctcaaacatcgttagggtcattagtaaatgatgggcgcgcaatgttattaatttatccacatgaattatttataccagcaatgattttaagtttattaattctattcttttacttatttagtgatggattacgtgatgcatttgatccgaaaatgcgtaaataa

SEQ ID NO: 405400 - DNA, 927 bp, Staphylococcus aureus
atggggaaatatattttcaaacgatttatttatatgcttatttctttatttattattattacaattacatttttcttaatgaaattaatgccaggttcgccatttaacgatgctaaattaaatgctgaacaaaaagaaattttaaatgaaaaatatggattaaatgatcctgtagctacgcagtatttacattatttaaaaaatgttgttacaggcgattttggtaattcattccagtatcataatcaacctgtgtgggatttgattaaaccgagactactaccttcttttgaaatgggtcttacagcaatgttcatcggtgtgatactgggacttattttaggtgttgcagcagctactaaacaaaattcttgggttgactatacaactacagttatttcagttattgcagtatctgtaccatcttttgtacttgctgtacttttacaatatgtatttgcagttaaattaagatggttcccagtagctggatgggaaggtttttcgaccgcggtattaccgtcacttgcattatctgcagctgttttagcaactgtcgccagatacataagagcagagatgatagaggtattaagttcagactatattttattagcgagagctaaaggtaattcgacaatgcgtgtactttttggacatgcacttagaaatgctttaattccaattattacaattatcgttcccatgttagcaagtattttaacaggcactttaacaattgaaaatatttttggagttcctggattaggggatcaattcgtacgttcaattacaacaaatgatttctcagtaatcatggcaatcacactattatttagcacactgtttatcgtttctatttttattgtagatattttgtacggtgtgatagatccacgaattcgtgttcaaggaggtaaaaaataa

SEQ ID NO: 405401 - DNA, 372 bp, Staphylococcus aureus
atgttgaaaaaatggcttggaatggcactaataacgccaatattaacgtttattatatggctttttaatagccatactatcattacatatttaaatatattgttttatgtttcattaattatttttattagcatatttttgattttacttgtacaagaaggcatttttgatgcgacaagttatggttttagaagattaaagtatcaaatgtcatcttcgaaaaagaagaagtctatctctgatgatccatttttcaacccacaagaggtaaaaaaagagcattactttgtttctacatggataatccccttattattaataaatattttatattttattatgacgattgtgctgtcgctcatcttagtataa

SEQ ID NO: 405402 - DNA, 1245 bp, Staphylococcus aureus
atgagtcaaaataaaagagtagttattacaggtatgggagccctttctccaatcggtaatgatgtcaaaacaacatgggagaatgctctaaaaggcgtaaatggtatcgataaaattacacgtatcgatactgaaccttatagcgttcacttagcaggagaacttaaaaactttaatattgaagatcatatcgacaaaaaagaagcgcgtcgtatggatagatttactcaatatgcaattgtagcagctagagaggctgttaaagatgcgcaattagatatcaatgaaaatactgcagatcgaatcggtgtatggattggttctggtatcggtggtatggaaacatttgaaattgcacataaacaattaatggataaaggcccaagacgtgtgagtccatttttcgtaccaatgttaattcctgatatggcaactgggcaagtatcaattgacttaggtgcaaaaggaccaaatggtgcaacagttacagcatgtgcaacaggtacaaattcaatcggagaagcatttaaaattgtgcaacgcggtgatgcagatgcaatgattactggtggtacagaagcaccaattactcatatggcaattgctggtttcagtgcaagtcgagcgctttctacaaatgatgacattgaaacagcatgtcgtccattccaagaaggtagagatggttttgttatgggtgaaggtgctggtattttagtaattgaatctttagaatcagcacaagctcgaggtgccaatatttatgctgagatagttggctatggtactacaggtgatgcttatcatattacagcgccagctccagaaggtgaaggtggttctagagcaatgcaagcagctatggatgatgctggtattgaacctaaagatgtacaatacttaaatgcccatggtacaagtactcctgttggtgacttaaatgaagttaaagctattaaaaatacatttggtgaagcagctaaacacttaaaagttagctcaacaaaatcaatgactggtcacttacttggtgcaacaggtggaattgaagcaatcttctcagcgctttcaattaaagactctaaagtcgcaccgacaattcatgcggtaacaccagatccagaatgtgatttggatattgttccaaatgaagcgcaagaccttgatattacttatgcaatgagtaatagcttaggattcggtggacataacgcagtattagtattcaagaaatttgaagcataa

SEQ ID NO: 405403 - DNA, 942 bp, Staphylococcus aureus
atgaacgtgggtattaaaggttttggtgcatatgcgccagaaaagattattgacaatgcctattttgagcaatttttagatacatctgatgaatggatttctaagatgactggaattaaagaaagacattgggcagatgatgatcaagatacttcagatttagcatatgaagcaagtttaaaagcaatcgctgacgctggtattcagcccgaagatatagatatgataattgttgccacagcaactggagatatgccatttccaactgtcgcaaatatgttgcaagaacgtttagggacgggcaaagttgcctctatggatcaacttgcagcatgttctggatttatgtattcaatgattacagctaaacaatatgttcaatctggagattatcataacattttagttgtcggtgcagataaattatctaaaataacagatttaactgaccgttctactgcagttctatttggagatggtgcaggtgcggttatcatcggtgaagtttcagatggcagaggtattataagttatgaaatgggttctgatggcacaggtggtaaacatttatatttagataaagatactggtaaactgaaaatgaatggtcgagaagtatttaaatttgctgttagaattatgggtgatgcatcaacacgtgtagttgaaaaagcgaatttaacatcagatgatatagatttatttattcctcatcaagctaatattagaattatggaatcagctagagaacgcttaggtatttcaaaagacaaaatgagtgtttctgtaaataaatatggaaatacttcagctgcgtcaatacctttaagtatcgatcaagaattaaaaaatggtaaaatcaaagatgatgatacaattgttcttgtcggattcggtggcggcctaacttggggcgcaatgacaataaaatggggaaaatag

SEQ ID NO: 405404 - DNA, 186 bp, Staphylococcus aureus
atgaaacacctcgtaacattcttttgggcattattattaatgcaaatggttaactttgtacttaatagcctagtaggtggagacagcttaaatgtagtgaatccaattatcatggcagtattgttcacgattttcacagcaatttttgctgcagtaattaaaccgccgaaagattcatcacaataa

SEQ ID NO: 405405 - DNA, 435 bp, Staphylococcus aureus
atgaaattaaaatcatttataactgtaactttggcactgggcatgatcgcaacgactggcgctactgtggcaggtaatgaggtatctgcagcagaaaaggacaaactaccggcaactcaaaaagctaaagaaatgcaaaatgttccatatacaattgcagtagatggcattatggctttcaatcaatcttacttaaatttaccaaaagatagccaattatcatatttagatttaggaaataaagttaaagctttgttatatgatgaacgcggtgtaacacctgagaagattcgaaatgcaaaatctgccgtttacacgattacttggaaagatggtagtaaaaaagaagtggatcttaagaaagatagctacacagcaaacttgtttgattcaaattcaattaaacaaattgatattaatgtaaaaactaaataa

SEQ ID NO: 405406 - DNA, 516 bp, Staphylococcus aureus
atgaaaataaaaactgaatttaaagggaacaatataccatatgaatacgcagcaggtgcagatgtgagtgattctattaacgggaatccaattaagtcatttccatttgaagtaattgaattaccggaagggactaaatatcttgcttggtctttaattgactatgatgcaattcctgtatgtggctttgcttggattcattggagtgtagctaatgtaagtgttagtggcaattcaatttctataaaagcagatttatcaagaacaaagggcgactatgtacaaggtaaaaatagctttactagtgggttgttggctgaagatttttcagaaatagaaaatcactatgtaggacctacaccacctgatcaagatcatcaatatgaattaacagtttatgcgttagatcattctttaaatttgaagaatgggttctacttgaatgaatttttaaaagaagtaaatcaacataaaattgatcaaacaagtattaaccttataggaagaaaaatttaa

SEQ ID NO: 405407 - DNA, 1119 bp, Staphylococcus aureus
atgaataagttaatacttgggatttatttataccgaattttttcacgagcatacttttatttaccgtttttattaatttactttttgattcaaggttattccataatacaattagaaatattaatggcgtcttatggcattgcagcatttttattctctctatacaaagagaagtgttttaaaatttgtaacttaaaagattctaataaattagttgttagtgaaatattcaaaatcatcggtttattgttgttattatatcaaaatcaatatttaattttagtagtggcacaaatattattagggttaagttactcaatgatggcgggtgttgataccgcaataattaaaagaaatataacaaatgagaaatacgtacaaaataagtcaaatagctatatgttcctatcattattaatttcagggattataggtagttatctttatggaataaatattaaatggcctataataatgactggtatattttcaattctaacaattataattattcgatgcacattagttgaaaatagggaattaaatttaataggagaaacaaagggaaagataaagaaatttctaccagaagagaagttttggatattgcattattcttttttaagagcgttaatattaggattttttataggatttattccaattaatatatataatgatttaaaactgaataatttacaatttatttcagtattaacttgttacacagttatgggttttgtatcttcacgttatttaactaaatacttgaattataagtttgtgtcagaaatttgtttagtaatatttttaataatatatacatatcaaagtttcatagcagttactatttctatgatatttttaggtatttcttcagggttaactcgtccacaaactataaataaactttctagcagtagtaacttaagagtgatgcttaattatgcagaaacgttatattttatttttaatatcgcatttttacttatgggtggttacttatatacaataggaactattcaatacttaatattatttatttcgttattaatttttatatatttaataataatattttattttacaaggagagagcaacatgaaaataaaaactga

SEQ ID NO: 405408 - DNA, 642 bp, Staphylococcus aureus
atggaaattttaaatgattctgtaaaaagttttgaaaaactttatttacaattacaagatggttttccagtgattgttcctactgatactaattataatttatgtagtttacctaacaacgatctttgtatcgataaaatatttgaatataaaaagcgatcgaaagataagccattatcattatttattgataagccagaggattggaaattgtatggagataatcaaaatacggaaatagttgataaactagttgaaatattttggcctggaccattaaatattattttaaaaaataaaacaagctataattatatgctcaataattcagatagtatagctataggatgtgtacaaaataaaacgatgagaagatttatttcatatattaattcacctatagcaattacttcagcaaatatatctggaactgccgatgatattttaataactgaaaatgaagcaattaagcacatgggcgaaaatgtaagatatatgctaagaagtcaaaataaaactaactataaaacatctagtacgattattaaagtgacagataataaaattgaattattaagagaaggagatataaagtttgaagaaataaaagaaagactaggtacaggtattatttatgaataa

SEQ ID NO: 405409 - DNA, 1062 bp, Staphylococcus aureus
ttgaaacaaattaacaagttaaatataaattctgttgaagtaggcatgtgtacaactatcgaggatgaatttaatattcatcaattcagagacattttaagtcctgaaaaagaattagtagtattgactaggcttaatgaaaaagaaataaaaaaaatagtcaaattgaaaattcataatttagtggtaaaaatactattgccaatatctgacttgcatataaaagaaaagcttaatttttcaaataaatattatattcagaaaatcaaagactgcttggatatattaaagaaagataaaaaaggagtagatatttgttttgaagatggaacaaggacttctagagaaaaattgaaagaatacatggaaattatttcaaaatatcaagttagaacagttacatttgcggacactgtaggatgttcgacaccattagaatacggagatatttttaattactttgtaaaaaaatattctaacataattttttctgctcattgtcataacgatctagggttggctactgcaaatacattagctgcaattttaaatggtgcaaagcaaatagaaactacatttttgagaattggtgagagagcgggtaatgctcctattgaggaaataattactattttgacaaaaaaacaaatagaaagtacggaattcactttacccgacgtatataaaactagtattaatatttctaaaattctcgattttcaaatatcagaaaacaaacctataattggtgaaaatatatttaaacatgaatcaggaattcatcaagatggtactaaaaaaaatataaatatgtatcaatatttagttcctagtgatttaggattgaaaaattcacaagttgttcagtttccaataagtaatatttctagtaagaaaatcttgcacaataaatttaaatcaatagttaacactgaagaaattgatgaaaatatttctttctataaacttgtgaacaagttttcacctgaagtagcacctgaagatacagtggatttacttcagataataaaaaggaggagtaaagatggaaattttaaatga

SEQ ID NO: 405410 - DNA, 870 bp, Staphylococcus aureus
atgaatttagattggtactatacatttgtcattttagcgaagacgttaaactatcgattagctagtgaagaaattaatctcactataccttctatacataagcaaattaaaaatttagaacagcatctcaatgtgaaactatttgaaacttataaaaatcaaattatcttgactgaagatggtcatacatttcttccaattgcgcaaagttttattgaacaatatgaaagtggcatcaaacatatccaacttaaaaaaacgatgtttcaatcgaaattaaatgttgtcgtgtcttcatatatcgcgacattcattatgcccaaatttttaaaatctttctttaacgagcatccttttatcgatgtttctcttcatgtcaaaaatgaaaatattgaaaaagatattaataatcatacgtatgacatcgggattagcagaaatcaacctaaactaagagaagttcattctgaaaaagtatgcgaaggtaaaattgtattgattgctcccaataaagagaataatcatcttctaactgaggcatctttatttgaaaaatacaaaataataagtgataaccatccagaatattggtcatcacttaaaaataatattttaaatatttatgaaaaagcacaatttctatctatcaatgatgtgcatacttcaattaaattaatcgaaatgaatcaaggtatatcattcctgcctctttatataacaacaaatagtgattacaatatttcggttattaacacgaaaattttacaagcacctatttcatttacatatatatacagcaaaaaagaaagcccagaaatattggtgtttattaaatcatttaaaaagtatattgccaatgaacaattataa

SEQ ID NO: 405411 - DNA, 2610 bp, Staphylococcus aureus
atggatataaataaaatgacatatgctgttcaaagtgctttacaacaagcagttgaactgagtcagcaacataaattacaaaatatagaaattgaggcaattttaagcgctgccttaaatgaaagtgaaagcttatataaaagtattttagaacgagcaaatattgaggtagatcaattaaacaaagcttatgaagacaaactaaacacgtatgcatctgtagaaggtgacaatatacaatatggtcaatatattagccaacaagcaaaccaattgataactaaggctgaatcatacatgaaagaatatgaagatgaatatatttcaatggagcatattttacgttcggcaatggacattgatcaaacaacaaaacattatataaataataaagtagaagttatcaaagaaattattaaaaaagtaagagggggaaatcacgtgacatcacaaaatccagaagttaattacgaagcattagctaaatatggccgcgacttagtagaagaagttagacaaggtaaaatggatcctgttataggaagagatgaagaaattcgaaatacgattcgtattttaagtcgtaaaactaaaaacaaccctgtgctcattggtgaaccaggtgttggtaaaactgcaattgttgaaggattagcgcaacgtatagttaagaaagatgtgccagaatcattattagataaaactgtttttgagttagatttaagcgcattagtagcgggcgctaaatatcgtggtgaatttgaagagagattaaaagcagtcctaaaagaagttaaagagtctgatggtagaattatattatttattgatgaaatccatatgcttgtaggtgctggtaaaacagatggtgccatggatgcaggcaacatgctaaaaccaatgttagcacgaggagagttacattgtattggtgcaacaactttaaatgaatatcgagaatatattgaaaaagattcggcattagagcgtcgtttccaaaaagtagcagttagtgagcctgatgttgaagatacaatttcaattttacgtggtttaaaagaacgatatgaagtgtatcatggtgtgcgtattcaagatagagccttagttgctgccgctgaattgtctgatcgttacatcactgatcgttttttaccagataaagcgattgatttagttgaccaagcatgtgcaacaattcgtacggaaatgggatcaaatccaactgaattggatcaagttaatagacgtgtcatgcaattagaaattgaagaaagcgcacttaaaaatgaatctgacaatgcgagcaaacagagattacaagaactacaagaagagcttgccaatgaaaaagagaaacaagcagcacttcaatctcgtgtagaatcagaaaaagaaaaaatagcaaatttacaagaaaaacgtgcgcaactagatgaaagtagacaagcgttggaagatgcacaaacaaataacaatttagaaaaagctgctgaactacaatatggaacaattcctcaattggaaaaagaacttagagaattagaggataatttccaagatgagcaaggtgaagatacagatcgaatgattcgtgaagttgtaacagacgaagaaattggcgatattgtcagccaatggacaggcataccagtttcaaaattagttgaaacagaacgtgaaaaattacttcacttaagtgacatcttgcataaacgtgttgtaggtcaagataaagcggttgacctggtttcagatgcagtagttagagcaagagcaggtattaaagatccaaacagacctattggtagtttcttattcctaggtccaactggagtaggtaaaactgaattagctaaatcattagctgcatcattatttgattctgaaaaacatatgattcgtattgatatgagtgaatatatggaaaaacatgcagtatcaagattgataggggcacctccaggatatattggacatgatgaagggggtcaattaactgaagcggttcgtcgtaatccatactcagttattttattagatgaggttgaaaaagcgcatactgacgtctttaatgtattattgcaaattttagatgaaggccgtttaactgattctaaaggacgtagcgttgattttaaaaatactattattattatgacaagtaatattggatctcaagttttattagaaaacgtaaaagagactggtgaaattacagaatcaacagaaaaagctgttatgacaagtttaaatgcatatttcaaaccagaaattttgaatcgtatggatgatatcgtattatttaaaccattatctattgatgacatgagtatgattgtagataaaatcttaacgcaattaaatataagattattagaacaacgaatctcaattgaagtttctgatgatgctaaagcttggctaggtcaagaagcttatgaacctcaatacggtgcaagaccattaaaacgttttgtacaacgccaaattgaaacaccattagcacgtatgatgattaaagagggattcccagaaggtacaacgattaaagttaatttaaattcagacaataacttaacgtttaatgttgaaaaaattcatgaataa

SEQ ID NO: 405412 - DNA, 1815 bp, Staphylococcus aureus
atgaacaaaacaaagggttttacaaagtataagaaaatgagatatattccagggctcgatggtttgagggcaatcgctgttctaggaattattatttaccacttaaataagcaatggttgacaggtggctttttaggtgtggatacattttttgtgatctctggttatttaattacaagcttattactcaaagagtatgatgacacaggtatcattaaattgaaaagcttttggatacgtcgtttaaaacgtttattaccagcagtcatagttttattaatggttgtagggacagcaaccttattattaaaatcagataatatcattagggttaaacatgatattattgctgcgatattttatgtatcaaactggtggtatatagcaaaagatgttaattattttgagcaattttcatttatgccattaaagcatttatggtctttagcaattgaagaacagttttacatatttttcccagttattttggttacattattgttaacaattaaaaagcgatacaaaataggatttattttttggggagtatcaataatttctttagggttaatgatgtttatctatagtattaatggggatcattcacgagtgtattttggtacagatactagattacagacattgttactgggtgttattttagcttttttatggccaccgtttaaattgaaaaatgatccacctaaagttgtaaaatatgttattgatagcataggtagtttatcatttatagtacttatattattatttttcattattaatgatgagacgaattggatatatgatggtggtttctatttaatatccatattaacgttatttattattgctagtgtcgttcatccatctacatggatagcgaagatattttcaaatccagtgttagtatttatcgggaaaaggtcttatagtttatatttatggcattttgcagtaattagtttcgtacatagttactatgtagacggacagatacctgtatatgtgtactttatagatataagtttaacaattatatttgcagagctatcatatcgctttatagaaactccatttagaaaagaaggtattaaagctttaaattggcgaccttcttatataccacaatttataagaatggcaattgtagtaaccttgttaattccatttatgttgattttagtaggtgcattcaataaatatggtaaagacattattggagaaaaagcgaatagctttgataccacaattgaagataattatttaatgcggatagcaccaattgataacatacacattgatggcttagtaagtgagaagaaaaaggaatcttccgacgtatataataatattaaacctcttttaatcggtgattcagtaatggttgatatcggtgagtcatttaagtcatcagttcctaagtctagaattgatggaaaagtagggcgtcaattgtatcaaaccttacctttagttaaagcgaattattcacaatataaaaaatcatctgatcaagtcgtattagaattaggtacaaatggcgactttactgtcaaacagctcgacgatttacttaatcaatttggaaaagccaagatttatttagttaatacacgtgttccaagaatttatgaggcaaatgtaaatcgattattagctgacgcggcgaaacgaaagtccaatgtcacattaattgattggtataagcgatcacaaggacatagtgaatattttgcaccagacggtgtacatttagagtacaaaggagtcctagctttaaaagatgaaatattaaaagcacttaaaaagaaataa

SEQ ID NO: 405413 - DNA, 309 bp, Staphylococcus aureus
atggaagaggcattgaaagatagtatcttaggtgcattagaaatggtaattgaccctgaattaggaattgatatcgttaatttgggtttagtatacaaagtgaatgttgatgatgaaggcgtatgtacagttgatatgactttaacatcaatgggatgtccaatgggacctcaaattattgatcaagttaaaacagtattagcagagattcctgaaattcaggatactgaagtgaatatcgtatggagtccaccttggacaaaagatatgatgtcacgttacgctaagattgcacttggtgtgagctaa

SEQ ID NO: 405414 - DNA, 825 bp, Staphylococcus aureus
atgcaaccacatttaatatgtctagacttagacggaacattattaaacgataacaaagaaatttcatcatatactaaacaagtattaaatgaattacaacaacgtggacaccaaattatgattgcgactggcagaccttatcgtgcaagtcaaatgtattatcatgaattaaatttaacgacaccaattgttaattttaatggcgcttacgtacatcaccctaaagataaaaacttcaaaacttgccatgaaattttagatttaggcatcgcacaaaacattattcaaggattacaacaatatcaagtatcgaatattatagcagaagtgaaagattatgttttcattaacaatcatgatccaagattatttgaaggtttttcaatgggtaatccaagaattcaaactggtaatttacttgtccacttgaaagaatcccctacctcaattttaattgaagccgaagaaagtaaaatacctgaaatcaaaaatatgcttactcatttttatgccgatcatattgagcatcgacgctggggcgcaccattccctgtcattgaaattgtaaaacttggtattaataaagcaagaggcattgagcaagttagacaatttttaaatattgaccgaaataatattattgcattcggtgatgaagataatgatattgaaatgattgagtacgcgcgtcacggtgttgctatggaaaatggtttgcaagaacttaaagatgtagcgaacaatattacattcaacaataatgaagatggcattggtcgatatttgaatgatttctttaatttaaatattagatattactgttaa

SEQ ID NO: 405415 - DNA, 1317 bp, Staphylococcus aureus
atgcccaaaatagtcgtagtcggagcagtcgctggcggtgcaacatgtgccagccaaattcgacgtttagataaagaaagtgacattattatttttgaaaaagatcgtgatatgagctttgctaattgtgcattgccttatgtcattggcgaagttgttgaagatagaagatatgctttagcgtatacacctgaaaaattttatgatagaaagcaaattacagtaaaaacttatcatgaagttattgcaatcaatgatgaaagacaaactgtatctgtattaaatagaaagacaaacgaacaatttgaagaatcttacgataaactcattttaagccctggtgcaagtgcaaatagccttggctttgaaagtgatattacatttacacttagaaatttagaagacactgatgctatcgatcaattcatcaaagcaaatcaagttgataaagtattggttgtaggtgcaggttatgtttcattagaagttcttgaaaatctttatgaacgtggtttacaccctactttaattcatcgatctgataagataaataaattaatggatgccgacatgaatcaacctatacttgatgaattagataagcgggagattccataccgtttaaatgaggaaattaatgctatcaatggaaatgaaattacatttaaatcaggaaaagttgaacattacgatatgattattgaaggtgtcggtactcaccccaattcaaaatttatcgaaagttcaaatatcaaacttgatcgaaaaggtttcataccggtaaacgataaatttgaaacaaatgttccaaacatttatgcaataggcgatattgcaacatcacattatcgacatgtcgatctaccggctagtgttcctttagcttggggcgctcaccgtgcagcaagtattgttgccgaacaaattgctggaaatgacactattgaattcaaaggcttcttaggcaacaatattgtgaagttctttgattatacatttgcgagtgtcggcgttaaaccaaacgaactaaagcaatttgactataaaatggtagaagtcactcaaggtgcacacgcgaattattacccaggaaattcccctttacacttaagagtatattatgacacttcaaaccgtcagattttaagagcagctgcagtaggaaaagaaggtgcagataaacgtattgatgtactatcgatggcaatgatgaaccagctaactgtagatgagttaactgagtttgaagtggcttatgcaccaccatatagccaccctaaagatttaatcaatatgattggttacaaagctaaataa

SEQ ID NO: 405416 - DNA, 390 bp, Staphylococcus aureus
atgttacatttacatatattaagttgggtattagcgattattttatttatcgctacatacttaaacatttcaaaaaatcaaggcagatcaccatttttcaaaccgttgcacatgattttacgcttatttatgctgttgacgttaatttcaggattttggatattaattcagtcatttatgaatggcggggcaaatcatatgttgcttacattgaaaatgctgtgtggtgttgcagtagttggattgatggaagtgtcgattgctaaaagaaagagacatgaacaaagtcacacaatgttttggataacaattgcattaattatcatcacaatggtattaggtgtcattctaccgttagggcctatatcaaaattattcggtattggctaa

SEQ ID NO: 405417 - DNA, 903 bp, Staphylococcus aureus
atgaaattcttatcattcaagtataatgacaaaacttcatatggcgttaaagtaaaacgcgaagatgctgtatgggatttaacacaagtatttgctgactttgcagaaggagatttccatcctaaaacattgttagctggtttacaacaaaatcatactttagattttcaagaacaagtacgtaaagcagttgtagcagcagaagatagcggcaaagctgaagactataaaatttcatttaatgacattgaatttttaccaccagtaacacctccgaataatgtgattgcttttggtagaaattacaaagatcatgcgaacgaattaaatcatgaagtggaaaaattatatgtatttacaaaagcagcgtcatctttaacaggagataatgcaacaattccaaatcataaagatattactgatcaattagattatgaaggtgaattaggtattgttattggtaagtctggtgaaaagattccaaaagcattagctttagattatgtttacggctatacaattattaacgatatcactgatcgcaaagcacaaagtgaacaagatcaagcatttttatcaaaaagtttaactggcggttgcccaatgggtccttatatcgttactaaagacgaactaccattacctgaaaatgtaaatattgttacaaaagttaacaatgaaattagacaagatggtaacactggcgaaatgattcttaaaattgatgaattaatagaagaaatttcaaaatatgttgcactacatccgggagatattattgcaactggtacaccagcaggcgttggtgcaggtatgcaaccacctaaatttttacaaccaggtgatgaagttaaagtgactattgataatattggaacgctgacaacttatatcgctaaataa

SEQ ID NO: 405418 - DNA, 3654 bp, Staphylococcus aureus
atgacaattccagagaaaccacaaggcgtgatttggactgacgcgcaatggcaaagtatttacgcaactggacaagatgtacttgttgcagccgcggcaggttcaggtaaaacagctgtactagttgagcgtattatccaaaagattttacgtgatggcattgatgtcgatcgacttttagtcgtaacgtttacaaacttaagcgcacgtgaaatgaagcatcgtgtagaccaacgtattcaagaggcatcgattgctgatcctgcaaatgcacacttgaaaaaccaacgcatcaaaattcatcaagcacaaatatctacactccatagtttttgcttgaaattaattcaacagcattatgatgtattaaatattgacccgaactttagaacaagcagtgaagctgaaaatattttattattagaacaaacgatagatgaggtcatagaacaacattacgatatccttgatcctgcttttattgaattaacagagcaattgtcttcagatagaagtgatgatcagtttcgaatgattattaaacaattgtatttctttagcgttgcaaatccaaatcctaaaaattggttggatcaattggtgacaccatacgaagaagaagcacaacaagcgcaacttattcaactactaacagacttatctaaagtatttatcacagctgcttatgatgctttaaataaggcgtatgatttgtttagtatgatggatagcgtcgataaacatttagctgttatagaagatgaacgacgtttaatggggcgtgttttagaaggtggctttattgatataccttatttaactggtcacgaatttggcgcgcgtttgcctaatgtaacagcgaaaattaaagaagcaaatgaaatgatggtcgatgccttagaagatgctaaacttcagtataaaaaatataaatcattaattgataaagtgaagagtgattacttttcaagagaagctgatgatttgaaagctgatatgcaacaattggcgccacgagtaaagtaccttgcgcgtattgtgaaagatgttatgtcagaattcaatcgaaaaaagcgtagcaaaaatattttggatttttctgattatgaacattttgcattacaaattttaactaatgaggatggttcgccttcagaaattgccgaatcataccgtcaacacttccaagaaatattggtcgatgagtatcaagatacgaaccgagttcaagagaaaatactatcttgcatcaaaacgggtgatgaacataatggtaatttatttatggttggagatgttaagcaatccatttataaatttagacaagctgatccaagtttatttattgaaaagtatcaacgctttactatagatggagatggcactggacgtcgaattgatttgtcgcaaaacttccgttctcgaaaagaagtactgtcaacgactaactatatattcaaacatatgatggatgaacaagtcggtgaagtaaaatatgatgaagcggcacagttgtattatggtgcaccatatgatgaatcggaccatccagtaaacttaaaagtccttgttgaagcggatcaagaacatagtgatttaactggtagtgaacaagaagcgcattttatagtagaacaagttaaagatatcttagaacatcaaaaagtttatgatatgaaaacaggaagctatagaagtgcgacatacaaggatatcgttattctagaacgcagctttggacaagctcgcaatttacaacaagcctttaaaaatgaagatattccattccatgtgaatagtcgtgaaggttactttgaacaaacagaagtccgcttagtattatcatttttaagagcgatagataatccattacaagatatttatttagttgggttaatgcgctccgttatatatcagttcaaagaagacgaattagctcaaattagaatattgagtccaaatgatgactacttctatcaatcgattgtaaattacattaatgacgaagcagcagatgcaattttagttgataaattaaaaatgtttttatcagatattcaaagttaccaacaatatagtaaagatcatccggtgtatcagttaattgataaattttataatgatcattatgttattcaatactttagtggacttattggtggacgtggacgacgtgcaaatctttatggtttatttaataaagctatcgagtttgagaattcaagttttagaggtttatatcaatttattcgttttatcgatgaattgattgaaagaggcaaagattttggtgaggaaaatgtagttggtccaaacgataatgtcgttagaatgatgacaattcatagtagtaaaggtctagagtttccatttgtcatttattctggattgtcaaaagattttaataaacgtgatttgaaacaaccagttattttaaatcagcaatttggtctcggaatggattattttgatgtggataaagaaatggcatttccatctttagcttcggttgcatatagagctgttgccgaaaaagaacttgtgtcagaagaaatgcgattagtctatgtagcattaacaagagcgaaagaacaactttatttaattggtagagtgaaaaatgataaatcattactagaactagagcaattgtctatttctggtgagcacattgctgtcaatgaacgattaacttcaccaaatccgttccatcttatttatagtattttatctaaacatcaatctgcgtcaattccagatgatttaaaatttgaaaaagatatagcacaaattgaagatagtagtcgtccgaatgtaaatatttcaattgtgtactttgaagatgtgtctacagaaaccattttagataatgatgaatatcgttcggttaatcaattagaaactatgcaaaatggtaatgaagatgttaaagcacaaattaaacaccaacttgattatcgatatccatatgtaaatgatactaaaaagccctcaaaacaatctgtttctgaattgaaaagacaatatgaaacagaagaaagtggcacaagttacgaacgagtaaggcaatatcgtatcggtttttcaacgtatgaacgacctaaatttctaagtgaacaaggtaaacgaaaagcgaatgaaattggtacgttaatgcatacagtgatgcaacatttaccattcaaaaaagaacgcatatctgaagttgagttacatcagtatatcgatggattaatcgataaacatattatcgaagcagatgcgaaaaaagatatccgtatggatgaaataatgacatttatcaatagtgagttatattcgattattgctgaagcagagcaagtttatcgtgaattaccgtttgtagttaaccaagcattagttgaccaattgccacaaggagacgaagacgtctcaattattcaaggtatgattgacttaatctttgttaaagatggtgtgcattattttgtagactataaaaccgatgcatttaatcgtcgccgtgggatgacagatgaagaaattggtacacaattaaaaaataaatataagatacagatgaaatattatcaaaatacgcttcaaacgattcttaataaagaagttaaaggttatttatacttcttcaaatttggtacattgcaactatag

SEQ ID NO: 405419 - DNA, 3477 bp, Staphylococcus aureus
atgacattacatgcttatttaggtagagcgggaacaggtaagtctacgaaaatgttgaccgaaataaaacaaaaaatgaaagcagatccgcttggagatccaatcattttaattgcgccaactcaaagtacatttcaattagaacaagcctttgtcaatgatccggaattaaatggtagtttaagaacagaagtgttgcattttgaacgattaagtcatcgtattttccaagaagttggtagttatagcgaacaaaagttatctaaagctgcaacggaaatgatgatttataacattgttcaagaacaacaaaagtatttaaaactttatcaatcacaagcaaaatattatgggtttagtgaaaaattaacagaacaaattcaagattttaaaaaatatgcagtaacgcctgaacatttagaacactttattgctgataaaaatatgcaaactcgaactaaaaataagttagaggatattgctttaatataccgtgagttcgaacaacgcattcaaaacgagtttattacgggtgaggattcattacaatattttattgattgtatgccgaaatcagagtggctaaaacgtgctgatatatatattgatggttttcacaacttttcaacgattgagtatttaataatcaaaggattaattaaatatgcgaagagtgtcacaattatattgacgacagatggtaaccacgatcaatttagtttatttagaaaaccatcggaagtgttacgacatattgaagaaatagcaaatgaactcaatatttctattgaacgtcaatatttcaaccaattatatcgcttcaataatcaagatttaaagcatcttgaacaagaatttgatgcacttcaaatcaatcgagtggcatgtcaaggtcatatcaatattttagaatctgcgactatgagagaggaaataaatgaaattgcgcgacgtatcatcgttgatattcgtgataagcaattacgatatcaagatattgctattttatatcgtgatgaatcttatgcttatttatttgattccatattaccgctttataatattccttataatattgatacaaagcgttcgatgacacatcatccggtcatggaaatgattcgttcattgattgaagttattcaatctaattggcaagtgaatccaatgctacgcttattgaagactgatgtgttaacggcatcatatctaaaaagtgcatacttagttgatttacttgaaaattttgtacttgaacgtggtatatacggtaaacgttggttagatgatgagctatttaatgtcgaacattttagcaaaatggggcgtaaagcgcataaactgaccgaagatgaacgtaacacatttgaacaagtcgttaagttaaagaaagatgtcattgataaaattttacattttgaaaagcaaatgtcacaagcggaaactgtaaaagattttgcaactgctttttatgaaagtatggaatatttcgaactgccaaatcaattgatgacagagcgagatgaacttgatttaaatggtaatcatgaaaaggcggaggaaattgatcaaatatggaatggcttaattcaaatccttgatgacttagttctagtatttggagatgaaccaatgtcgatggaacgtttcttagaagtatttgatattggtttagaacaattagaatttgttatgattccgcaaacattggaccaagtaagtattggtacgatggatttggctaaagtcgataataagcaacatgtttacttagtaggtatgaatgatggaacgatgccacaaccagtaactgcgtcaagcttgattacagatgaagaaaagaaatactttgaacagcaggctaatgtcgagttaagtccaacatcagatattttacagatggatgaagcatttgtttgttatgttgctatgactagagctaagggagatgttacattttcttacagtctaatgggatcaagtggtgatgataaggagatcagcccatttttaaatcaaattcaatcattgttcaaccaattggaaattactaacattcctcaataccatgaagttaacccattgtcactaatgcaacatgctaagcaaaccaaaattacattatttgaagcattgcgtgcttggttatatgatgaaattgtggctgatagttggttagatgcttatcaagtaattagagatagcgatcatttaaatcaaggtttagattatttaatgtcagcattaacgtttgacaatgaaactgtaaaattaggtgaaacgttgtctaaagatttatatggtaaggaaatcaatgccagtgtatcccgttttgaaggttatcaacaatgcccatttaaacactatgcgtcacatggtctgaaactaaatgagcgaacgaagtatgaacttcaaaactttgatttaggtgatattttccattctgttttaaaatatatatctgaacgtattaatggcgattttaaacaattagacctgaaaaaaataagacaattaacgaatgaagcattggaagaaattttacctaaagttcagtttaatttattaaattcttcagcttactatcgttatttatcaagacgcattggcgctattgtagaaacaacactaagcgcattaaaatatcaaggcacgtattcaaagtttatgccaaaacattttgagacaagttttagaaggaaaccaagaacaaatgacgaattaattgcacaaacattaacgacaactcaaggtattccaattaatattagagggcaaattgaccgtatcgatacgtatacaaagaatgatacaagttttgttaatatcattgactataaatcctctgaaggtagtgcgacacttgatttaacgaaagtatattatggtatgcaaatgcaaatgatgacatacatggatatcgttttacaaaataaacaacgccttggattaacagatattgtgaaaccaggtggattattatacttccatgtacatgaacctagaattaaatttaaatcatggtctgatattgatgaagataaactagaacaagatttaattaaaaagtttaagttgagtggtttagttaatgcagaccaaactgttattgatgcattggatattcgtttagaacctaaattcacttcagatattgtaccagttggtttgaataaagatggctctttgagtaaacgaggcagccaagtggcagatgaagcaacgatttataaattcatccaacataacaaagagaattttatagaaacagcttcaaatattatggatggacatactgaagttgcaccattaaagtacaaacaaaaattgccatgtgctttttgtagttatcaatcggtatgtcatgtagatggcatgattgatagtaagcgatatcgaactgtagatgaaacaataaatccaattgaagcaattcaaaatattaacattaatgatgaatttgggggtgagcaatag

SEQ ID NO: 405420 - DNA, 576 bp, Staphylococcus aureus
ttgaaaaaagaaatattggaatggattatttcaattgcagtcgcttttgtcattttatttatagtaggtaaatttattgttacgccatatacaattaaaggtgaatcaatggatccaactttgaaagatggcgagcgagtagctgtaaacattgttggatataaaacaggtggtttggaaaaaggtaatgtagttgtcttccatgcaaacaaaaatgatgactatgttaaacgtgtcatcggtgttcctggtgataaagtagaatacaaaaatgatacattatatgtcaatggtaaaaaacaagatgaaccatatttaaactacaatttaaaacataaacaaggtgattacattactgggactttccaagttaaagatttaccgaatgcgaatcctaaatcaaatgtcattccaaaaggtaaatatttagtgcttggagataatcgtgaagtaagtaaagatagccgtgcgtttggcctcattgatgaagaccaaattgttggtaaagtttcatttaggttctggccatttagtgaatttaaacataatttcaatcctgaaaatactaaaaattaa
